(19) United States
(12) Patent Application Publication
(10) Pub. No.: US 2024/0000971 A1
(43) Pub. Date: Jan. 4, 2024

(54) COMPOSITIONS AND METHODS FOR THE TREATMENT OF TAUOPATHY

(71) Applicant: Voyager Therapeutics, Inc., Cambridge, MA (US)

(72) Inventors: Todd Carter, Cambridge, MA (US); Wencheng Liu, Cambridge, MA (US); Jerrah Holth, Cambridge, MA (US); Jinzhao Hou, Cambridge, MA (US); Yanqun Shu, Cambridge, MA (US); Giridhar Murlidharan, Cambridge, MA (US); Xiao-Qin Ren, Cambridge, MA (US)

(21) Appl. No.: 18/035,236

(22) PCT Filed: Nov. 3, 2021
(86) PCT No.: PCT/US2021/057823

§ 371 Date: May 3, 2023

Related U.S. Application Data
(60) Provisional application No. 63/109,706, filed on Nov. 4, 2020.

(51) Int. Cl. A61K 48/00; C12N 15/86; A61P 25/28; C07K 16/18

(52) U.S. Cl. CPC A61K 48/0058; C12N 15/86; A61K 48/0066; A61P 25/28; C07K 16/18

(57) ABSTRACT

The disclosure provides compositions and methods for the preparation, manufacture and therapeutic use of viral vectors, such as adeno-associated virus (AAV) particles having viral genomes encoding one or more antibodies or antibody fragments or antibody-like polypeptides, for the prevention and/or treatment of diseases and/or disorders.

### REFERENCE TO RELATED APPLICATION

[0001] The present application claims priority to U.S. Provisional Patent Application No. 63/109,706, filed on Nov. 4, 2020, the entire contents of which, including all drawings and sequence listing, are incorporated herein by reference.

### REFERENCE TO THE SEQUENCE LISTING

[0002] The present application is being filed along with a Sequence Listing in electronic format. The Sequence Listing file, entitled SEQ_LST_135333_02020, was created on Nov. 2, 2021, and is 18,388,346 bytes in size. The information in electronic format of the Sequence Listing is incorporated herein by reference in its entirety.

### FIELD OF THE DISCLOSURE

[0003] The disclosure relates to compositions and methods for vectored antibody delivery (VAD), wherein the antibody may be an anti-tau antibody.

### BACKGROUND OF THE INVENTION

[0004] Tauopathies are a group of neurodegenerative diseases characterized by the dysfunction and/or aggregation of the microtubule associated protein tau. Tau is normally a very soluble protein known to associate with microtubules based on the extent of its phosphorylation. Tau is considered a critical component of intracellular trafficking processes, particularly in neuronal cells, given their unique and extended structure. Hyperphosphorylation of tau depresses its binding to microtubules and microtubule assembly activity. Further, hyperphosphorylation of tau renders it prone to misfolding and aggregation. In tauopathies, the tau becomes hyperphosphorylated, misfolds and aggregates as neurofibrillary tangles (NFT) of paired helical filaments (PHF), twisted ribbons or straight filaments. These NFT are largely considered indicative of impending neuronal cell death and thought to contribute to widespread neuronal cell loss, leading to a variety of behavioral and cognitive deficits.

[0005] The first genetically defined tauopathy was described when mutations in the tau gene were shown to lead to an autosomal dominantly inherited tauopathy known as frontotemporal dementia and parkinsonism linked to chromosome 17 (FTDP-17). This was the first causal evidence that changes in tau could lead to neurodegenerative changes in the brain. These molecules are considered to be more amyloidogenic, meaning they are more likely to become hyperphosphorylated and more likely to aggregate into NFT (Hutton, M. et al., 1998, Nature 393(6686):702-5).

[0006] Other known tauopathies include, but are not limited to, Alzheimer's disease (AD), Frontotemporal lobar degeneration (FTLD), Frontotemporal dementia, chronic traumatic encephalopathy (CTE), Progressive Supranuclear Palsy (PSP), Down's syndrome, Pick's disease, Corticobasal degeneration (CBD), Corticobasal syndrome, Amyotrophic lateral sclerosis (ALS), Prion diseases, Creutzfeldt-Jakob disease (CJD), Multiple system atrophy, Tangle-only dementia, and Progressive subcortical gliosis.

[0007] Several approaches have been proposed for therapeutically interfering with progression of tau pathology and preventing the subsequent molecular and cellular consequences. Given that NFT are composed of hyperphosphorylated, misfolded and aggregated forms of tau, interference at each of these stages has yielded a set of avidly pursued targets. Introducing agents that limit phosphorylation, block misfolding or prevent aggregation have all generated promising results. Passive and active immunization with late stage anti-phospho-tau antibodies in mouse models have led to dramatic decreases in tau aggregation and improvements in cognitive parameters. It has also been suggested that introduction of anti-tau antibodies can prevent the trans-neuronal spread of tau pathology.

[0008] Antibodies have relatively short half-lives, and this presents an ongoing and long-felt challenge for antibody-based therapies. In order to achieve a sufficiently high concentration of an antibody for long lasting therapeutic effects, antibody therapies are traditionally delivered by repeated administration, e.g. by multiple injections. This dosing regimen results in an inconsistent level of antibody throughout the treatment period, limited efficiency per administration, high cost of administration and consumption of the antibody. Hence, there remains a need in the art for delivery of antibodies and antibody-based therapeutics through alternative routes or modalities of administration.

[0009] One such alternative route of administration is by expression vectors (e.g. plasmid or viral vector), including but not limited to, adeno-associated viral vectors (AAVs). Adeno-associated viral vectors are widely used in gene therapy approaches due to a number of advantageous features. As dependoparvoviruses, AAV are non-replicating in infected cells and therefore not associated with any known disease. Further, AAVs may be introduced to a wide variety of host cells, do not integrate into the genome of the host cell, and are capable of infecting both quiescent and dividing cells. AAVs transduce non-replicating and long-lived cells in vivo, resulting in long term expression of the protein of interest. Further, AAVs can be manipulated with cellular and molecular biology techniques to produce non-toxic particles carrying a payload encoded in the AAV viral genome that can be delivered to a target tissue or set of cells with limited or no side-effects. Given the foregoing, the use of AAVs for vectored antibody delivery (VAD) of anti-tau antibodies would allow for longer lasting efficacy, fewer dose treatments, and more consistent levels of the antibody throughout the treatment period.

[0010] In vectored antibody delivery (VAD) of anti-tau antibodies, an AAV is used as the delivery modality for a nucleic acid sequence encoding the anti-tau antibody, or a fragment thereof, which results in in vivo expression of the encoded payload, e.g., functional anti-tau antibody, or a fragment thereof.

[0011] The mechanism underlying VAD is thought to proceed through the following steps. First, the AAV vector enters the cell via endocytosis, then escapes from the endosomal compartment and is transported to the nucleus wherein the viral genome is released and converted into a double-stranded episomal molecule of DNA by the host. The transcriptionally active episome results in the expression of encoded anti-tau antibodies that may then be secreted from the cell into the circulation. VAD may therefore enable continuous, sustained and long-term delivery of anti-tau antibodies administered by a single injection of AAV particles.

[0012] Previous studies of an AAV-mediated antibody technique known as vectored immunoprophylaxis (VIP) have focused on neutralization of human immunodeficiency virus (HIV) (see, e.g. Johnson et al., 2009, Nature Med., 15, 901-906, Saunders et al., 2015, J. Virol., 89(16), 8334-8345, Balasz et al., 2012, Nature 481, 81-84, the contents of which are incorporated herein by reference in their entirety). Balasz et al. reported a long-term, even lifelong, expression of monoclonal antibody at high concentration from a single intramuscular administration in mice that resulted in full protection against HIV infection. AAV-mediated VIP has also been demonstrated against influenza strains (see, e.g. Balasz, et al. Nat. Biotechnol., 2013, 31(7):647-52) and Plasmodium Falciparum, a sporozoite causing malaria infection (see, e.g. Deal at al., 2014, PNAS, 111 (34), 12528-12532), as well as cancer, RSV and drug addiction (see, e.g. review by Schnepp and Johnson, Microbiol. Spectrum 2(4), 2014). Though promising, these studies emphasize efforts to prevent disease. There still remains a need for improved methods of prevention, and new antibody-mediated therapies for research, diagnosis, and treatment of disease.

[0013] The present disclosure addresses this need by providing novel AAV particles having viral genomes engineered to encode anti-tau antibodies and antibody-based compositions and methods of using these constructs (e.g., VAD) for the treatment, prevention, diagnosis and research of diseases, disorders and/or conditions associated with tau pathology. The present disclosure further embraces optimized AAV particles for delivery of nucleic acids (e.g., viral genomes) encoding anti-tau antibodies and antibody-based compositions to a subject in need thereof.

### SUMMARY OF THE INVENTION

[0014] The present disclosure describes AAV particles for delivery of anti-tau antibodies to a target tissue. AAV particles of the present disclosure may comprise an AAV capsid and a viral genome.

[0015] In one aspect, the disclosure provides an isolated, e.g., recombinant, nucleic acid comprising a transgene encoding an antibody, e.g., an antibody fragment, that binds to tau comprising a heavy chain variable region (VH) and a light chain variable region (VL), wherein: (i) the nucleotide sequence encoding the VH, comprises the nucleotide sequence of SEQ ID NO: 1839, 1841, or 2170, or a nucleotide sequence having at least 90%, 92%, 95%, 96%, 97%, 98%, or 99% sequence identity thereto; and/or (ii) the nucleotide sequence encoding the VL comprises the nucleotide sequence of SEQ ID NO: 1957 or 4565, or a nucleotide sequence having at least 90%, 92%, 95%, 96%, 97%, 98%, or 99% sequence identity thereto.

[0016] Another aspect of the disclosure provides an isolated, e.g., recombinant, antibody, e.g., antibody fragment, encoded by the nucleic acid of the disclosure.

[0017] Another aspect of the disclosure provides a viral genome, e.g., an adeno-associated (AAV) viral genome, which comprises a first promoter operably linked to the transgene encoding an antibody, e.g., antibody fragment, described herein.

[0018] Another aspect of the disclosure provides an AAV viral genome comprising: (i) the nucleotide sequence of any one of SEQ ID NOs: 4547, 4548, 4551, 4552, 4555, 4556, 4559, or 4560, or a nucleotide sequence having at least 90%, 92%, 95%, 96%, 97%, 98%, or 99% sequence identity thereto; (ii) the nucleotide sequence of any one of SEQ ID NOs: 4549, 4550, 4553, 4554, 4557, 4558, 4561, or 4562, or a nucleotide sequence having at least 90%, 92%, 95%, 96%, 97%, 98%, or 99% sequence identity thereto, optionally wherein the nucleotide sequence comprises or does not comprise a tag, e.g., comprising the nucleotide sequence of SEQ ID NO: 2118.

[0019] Another aspect of the disclosure provides a viral particle, e.g., an AAV viral particle, comprising the AAV viral genome of the disclosure, and a capsid protein.

[0020] Another aspect of the disclosure provides a vector comprising the nucleic acid of the disclosure, the AAV viral genome of the disclosure, or the viral particle of the disclosure.

[0021] Another aspect of the disclosure provides a host cell comprising the nucleic acid of the disclosure, the AAV viral genome of the disclosure, the AAV viral particle of the disclosure, or the vector of the disclosure, optionally wherein the host cell is an insect cell, a bacterial cell or a mammalian cell.

[0022] Another aspect of the disclosure provides a method of making an isolated, e.g., recombinant, AAV particle, the method comprising: (i) providing a cell comprising the AAV viral genome of the disclosure, or an AAV viral genome comprising the nucleic acid of the disclosure; and (ii) incubating the cell under conditions suitable to enclose the viral genome in a capsid protein, e.g., a VOY101 capsid protein; thereby making the isolated AAV particle.

[0023] Another aspect of the disclosure provides a pharmaceutical composition comprising the nucleic acid of the disclosure, the AAV viral genome of the disclosure, or the AAV viral particle of the disclosure, and a pharmaceutically acceptable carrier or excipient; optionally, wherein the pharmaceutically acceptable carrier or excipient comprises 10 mM disodium phosphate, 2 mM monopotassium phosphate, 2.7 mM potassium chloride, 192 mM sodium chloride, and 0.001% Pluronic Acid (F-68).

[0024] Another aspect of the disclosure provides a method for treating tauopathy in a subject in need thereof, the method comprising administering to said subject a therapeutically effective amount of a composition comprising the pharmaceutical composition of the disclosure, an AAV viral particle comprising nucleic acid of the disclosure, an AAV particle comprising the AAV viral genome of the disclosure, or the AAV viral particle of the disclosure, thereby treating the tauopathy in the subject.

[0025] Another aspect of the disclosure provides a use of the nucleic acid of the disclosure, the AAV viral genome of the disclosure, the AAV viral particle of the disclosure, or the pharmaceutical composition of the disclosure, in the manufacture of a medicament for treating tauopathy in a subject in need thereof.

[0026] Another aspect of the disclosure provides the nucleic acid of the disclosure, the AAV viral genome of the disclosure, the AAV viral particle of the disclosure, or the pharmaceutical composition of the disclosure, for use in treating tauopathy in a subject in need thereof.

### BRIEF DESCRIPTIONS OF THE DRAWINGS

[0027] FIG. 1 is a schematic of the Tau protein, depicting the various protein domains, phosphorylation sites, and target domains/epitopes of certain anti-tau antibodies, such as IPN002, AT08, PT3, UCB, PT7, PHF1, and C10.2. Other anti-tau antibodies such as 6C5 are not included.

[0028] FIGS. 2A-2B depict reduction of positive staining by anti-tau antibody AT100 in olfactory bulb (OB), entorhinal cortex (EC), hippocampus (Hipp) and thalamus (Thal) in mice receiving intravenous injection of AAV particles comprising vectorized antibody constructs compared to vehicle control in the hTau olfactory bulb model. FIG. 2A shows results of VOY101.CBA.PT3 construct injected at 1.4E13 vg/kg. FIG. 2B shows results of VOY101.GFAP.PHF1 construct injected at 1.4E13 (low), 4.4E13 (medium), and 1.4E14 (high) vg/kg.

[0029] FIG. 3 depicts efficacy of AAV particles comprising a VOY101.CBA.PT3 construct in P301S hippocampal seeding model. Briefly, AAV particles comprising VOY101.CBA.PT3 were intravenously injected into P301S mice of 6 weeks old at 5E+12 (5×10¹²) or 1.4E+13 (1.4×10¹³) Vg/Kg. PHF-containing lysates from patients was seeded into mouse hippocampus at 8 weeks old. Samples were collected at seeding or at termination of the experiment, when mice are 14 weeks old. The graph shows immunoreactivity (IR) in immunohistochemical (IHC) staining by anti-tau antibody AT100 in ipsilateral and contralateral hippocampus of mice injected with the vectorized PT3 antibody.

[0030] FIGS. 4A-4B depict efficacy of AAV particles comprising a VOY101.CBA.PHF1 construct in P301S hippocampal seeding model. Briefly, AAV particles comprising VOY101.CBA.PHF1 were intravenously injected into P301S mice of 6 weeks old at 1.4E+13 or 1.4E+14 Vg/Kg. PHF-containing lysates from patients was seeded into mouse hippocampus at 8 weeks old. Samples were collected at seeding or at termination of the experiment, when mice are 14 weeks old. FIG. 4A shows expression level of vectorized antibody PHF1 (or “antibody B”) in the cortex, hippocampus and serum at seeding. FIG. 4B shows immunoreactivity (IR) by anti-tau antibody AT100 in IHC in ipsilateral and contralateral hippocampus of mice injected with the vectorized PHF1 antibody in FIG. 4A.

[0031] FIGS. 5A-5B depict efficacy of AAV particles comprising a VOY101.CBA.PHF1 construct in P301S intrinsic model. Briefly, AAV particles comprising VOY101.CBA.PHF1 were intravenously injected into P301S mice of 8 weeks old at 1.4E+13, 4.4E+13 or 1.4E+14 Vg/Kg on day 1, and samples were collected on day 91. FIG. 5A shows expression levels of vectorized PHF1 antibody (“antibody B”) in the cortex and cerebrospinal fluid (CSF) at termination of the experiment. FIG. 5B shows anti-tau antibody AT8 immunoreactivity (IR) in the cortex, measured by ELISA in mice injected with the vectorized PHF1 antibody in FIG. 5A.

[0032] FIGS. 6A-6B show kinetics of AAV distribution in the wild-type mouse hippocampus (viral genome/cell, FIG. 6A), and kinetics of antibody expression (ng/g in cortex and hippocampus, ng/ml in CSF and serum. FIG. 6B) after intravenous injection of the respective AAV particles comprising vectorized PT3 antibody (“antibody A”) under CBA, GFAP or SYN promoters. AAV particles were injected at 1.4E+13 vg/kg dose. Samples were collected on day 1, 2, 3, 7, 14 and 28 post-injection for each data point.

### DETAILED DESCRIPTION OF THE INVENTION

### I. Compositions

[0033] According to the present disclosure, compositions for delivering functional anti-tau antibodies and/or antibody-based compositions by adeno-associated viruses (AAVs) are provided. AAV particles may be provided via any of several routes of administration, to a cell, tissue, organ, or organism, in vivo, ex vivo, or in vitro.

[0034] As used herein, an “AAV particle” is a virus which comprises a viral genome with at least one payload region and at least one inverted terminal repeat (ITR) region.

[0035] As used herein, “viral genome” or “vector genome” refers to the nucleic acid sequence(s) encapsulated in an AAV particle. Viral genomes comprise at least one payload region encoding polypeptides, e.g., antibodies, antibody-based compositions or fragments thereof.

[0036] As used herein, a “payload” or “payload region” is any nucleic acid molecule which encodes one or more polypeptides. At a minimum, a payload region comprises nucleic acid sequences that encode an antibody, an antibody-based composition, or a fragment thereof, but may also optionally comprise one or more functional or regulatory elements to facilitate transcriptional expression and/or polypeptide translation.

[0037] As used herein, “VL” and “VH” refer to components of a light chain or heavy chain of an antibody, respectively, or a fragment thereof. In some embodiments, “VL” and “VH” refer to the variable regions of the light or heavy chain of an antibody, respectively, or a fragment thereof. In another embodiment, “VL” and “VH” may also embrace a constant region of a light or heavy chain of an antibody, or a fragment thereof. In another embodiment, “VL” and “VH” may embrace the entirety of an antibody light chain or heavy chain, respectively.

[0038] In some embodiments, AAV particles, viral genomes and/or payloads, and the methods of their use may be as described in WO2017189963, the contents of which are herein incorporated by reference in their entirety.

[0039] The nucleic acid sequences and polypeptides disclosed herein may be engineered to contain modular elements and/or sequence motifs assembled to enable expression of the antibodies or antibody-based compositions. In some embodiments, the nucleic acid sequence comprising the payload region may comprise one or more of a promoter region, an intron, a Kozak sequence, an enhancer, or a polyadenylation sequence. Payload regions typically encode antibodies or antibody-based compositions, which may include an antibody heavy chain domain, an antibody light chain domain, both antibody heavy and light chain domains, or fragments of the foregoing in combination with each other or in combination with other polypeptide moieties. In some cases, payload regions may also encode one or more linkers or joining regions between antibody heavy and light chain domains or fragments. The order of expression, structural position, or concatemer count (heavy chain, light chain, or linker) may be different within or among different payload regions. The identity, position and number of linkers expressed by payload regions may also vary.

[0040] The payload regions may be delivered to one or more target cells, tissues, organs, or organisms within the viral genome of an AAV particle.

[0041] Viral genomes of the present disclosure may comprise a 5′ ITR with a sequence selected from SEQ ID NO: 2076 or 2077, one or more promoter regions with a sequence selected from SEQ ID NO: 2080-2089 and 2238-2239, an antibody polynucleotide with a sequence selected from SEQ ID NO: 1740-1989, 2241-2243, 2169-2170, and 4564-4565, or encoding a sequence selected from SEQ ID NO: 1740-1989, 2241-2243, 2169-2170, and 4564-4565, a polyadenylation signal sequence with a sequence selected from SEQ ID NO: 2122-2124, and a 3′ ITR with a sequence selected from SEQ ID NO: 2078-2079. In some embodiments, viral genomes described herein may comprise one or more exon sequences with a sequence selected from SEQ ID NO: 2090-2094. In some embodiments, viral genomes described herein may comprise one or more intron sequences with a sequence selected from SEQ ID NO: 2095-2105, 2240 and 2256-2258. In some embodiments, viral genomes described herein may comprise a BSA sequence comprising SEQ ID NO: 4563. In some embodiments, viral genomes described herein may comprise one or signal sequence regions with a sequence selected from SEQ ID NO: 1740, 1741, 1861, 2106-2117, 2241 and 4564. In some embodiments, the signal sequence region is derived from an antibody sequence. In some embodiments, viral genomes described herein may comprise one or more tag sequence regions with a sequence selected from SEQ ID NO: 2118-2121 and 2255. In some embodiments, the viral genomes described herein may comprise a filler sequence region with a sequence selected from SEQ ID NO: 2125-2126. Viral genomes described herein may comprise a sequence selected from SEQ ID NO: 1990-2075, 2137-2168, 2171-2237, 2260-2321, and 4547-4562.

[0042] Viral genomes described herein may comprise more than one antibody polynucleotide. When more than one antibody polynucleotide exists in a viral genome, these antibody polynucleotides may be separated by a linker sequence, with a sequence selected from SEQ ID NO: 1724-1739, 2244-2254 and 2259. In some embodiments, viral genomes described herein comprise a first antibody polynucleotide sequence and a second antibody polynucleotide sequence, wherein each may encode an antibody heavy or light chain or a fragment thereof. In some embodiments, the viral genome comprises more than two antibody polynucleotides.

[0043] In some embodiments, a viral genome, when read 5′ to 3′, may encode an antibody heavy chain, at least one linker, and an antibody light chain. This viral genome may be described as comprising a heavy-linker-light configuration.

[0044] In some embodiments, a viral genome, when read 5′ to 3′, may encode an antibody light chain, at least one linker, and an antibody heavy chain. This viral genome may be described as comprising a light-linker-heavy configuration.

[0045] The viral genomes described herein may be packaged into an AAV particle comprising any AAV serotype known in the art, or selected from VOY101, VOY201, AAVPHP.B (PHP.B), AAVPHP.A (PHP.A), AAVG2B-26, AAVG2B-13, AAVTH1.1-32, AAVTH1.1-35, AAVPHP.B2 (PHP.B2), AAVPHP.B3 (PHP.B3), AAVPHP.N/PHP.B-DGT, AAVPHP.B-EST, AAVPHP.B-GGT, AAVPHP.B-ATP, AAVPHP.B-ATT-T, AAVPHP.B-DGT-T, AAVPHP.B-GGT-T, AAVPHP.B-SGS, AAVPHP.B-AQP, AAVPHP.B-QQP, AAVPHP.B-SNP(3), AAVPHP.B-SNP, AAVPHP.B-QGT, AAVPHP.B-NQT, AAVPHP.B-EGS, AAVPHP.B-SGN, AAVPHP.B-EGT, AAVPHP.B-DST, AAVPHP.B-DST, AAVPHP.B-STP, AAVPHP.B-PQP, AAVPHP.B-SQP, AAVPHP.B-QLP, AAVPHP.B-TMP, AAVPHP.B-TTP, AAVPHP.S/G2A12, AAVG2A15/G2A3 (G2A3), AAVG2B4 (G2B4), AAVG2B5 (G2B5), PHP.S, AAV1, AAV2, AAV2 variants, AAV2G9, AAV3, AAV2/3 variants AAV3a, AAV3b, AAV3-3, AAV4, AAV4-4, AAV5, AAV6, AAV6.1, AAV6.2, AAV6.1.2, AAV7, AAV7.2, AAV8, AAV9, AAV9 K449R, or variants thereof.

[0046] In some embodiments, the capsid of the AAV particle is one of VOY101, PHP.B, AAV9, AAV9K449, AAV1, AAV2, VOY201, AAV2 variant or AAV2/3 variant.

[0047] AAV particles described herein may be prepared as a pharmaceutical composition. In some embodiments, the pharmaceutical composition may be administered to a subject. In some embodiments, a method of producing a functional antibody in a subject may comprise administration of a pharmaceutical composition described herein to the subject. In some embodiments, the functional antibody may be encoded by one or more antibody polynucleotides of a viral genome described herein, packaged into an AAV particle. In some embodiments, the functional antibody may be encoded by two different viral genomes, packaged into separate AAV particles. The functional antibody may be expressed in a target cell or tissue in a range from 0.001 μg/mL to 100 mg/mL.

[0048] Pharmaceutical compositions described herein may be used in a method of treating tauopathy, wherein a therapeutically effective amount of a pharmaceutical composition described herein is administered to a subject in need. The tauopathy may be any one of Alzheimer's disease (AD), frontotemporal dementia and parkinsonism linked to chromosome 17 (FTDP-17), Frontotemporal lobar degeneration (FTLD), Frontotemporal dementia, chronic traumatic encephalopathy (CTE), Progressive Supranuclear Palsy (PSP), Down's syndrome, Pick's disease, Corticobasal degeneration (CBD), Corticobasal syndrome, Amyotrophic lateral sclerosis (ALS), Prion diseases, Creutzfeldt-Jakob disease (CJD), Multiple system atrophy, Tangle-only dementia, and Progressive subcortical gliosis or other tau associated disease.

[0049] Pharmaceutical compositions described herein may be used in a method of preventing tauopathy, wherein a therapeutically effective amount of a pharmaceutical composition described herein is administered to a subject in need. The tauopathy may be any one of Alzheimer's disease (AD), frontotemporal dementia and parkinsonism linked to chromosome 17 (FTDP-17), Frontotemporal lobar degeneration (FTLD), Frontotemporal dementia, chronic traumatic encephalopathy (CTE), Progressive Supranuclear Palsy (PSP), Down's syndrome, Pick's disease, Corticobasal degeneration (CBD), Corticobasal syndrome, Amyotrophic lateral sclerosis (ALS), Prion diseases, Creutzfeldt-Jakob disease (CJD), Multiple system atrophy, Tangle-only dementia, and Progressive subcortical gliosis or other tau associated disease.

### Adeno-Associated Viruses (AAVs) and AAV Particles

[0050] Adeno-associated viruses (AAV) are small non-enveloped icosahedral capsid viruses of the Parvoviridae family characterized by a single stranded DNA viral genome. Parvoviridae family viruses consist of two subfamilies: Parvovirinae, which infect vertebrates, and Densovirinae, which infect invertebrates. The Parvoviridae family comprises the Dependovirus genus which includes AAV, capable of replication in vertebrate hosts including, but not limited to, human, primate, bovine, canine, equine, and ovine species.

[0051] The parvoviruses and other members of the Parvoviridae family are generally described in Kenneth I. Berns, “Parvoviridae: The Viruses and Their Replication,” Chapter 69 in FIELDS VIROLOGY (3d Ed. 1996), the contents of which are incorporated by reference in their entirety.

[0052] AAV have proven to be useful as a biological tool due to their relatively simple structure, their ability to infect a wide range of cells (including quiescent and dividing cells) without integration into the host genome and without replicating, and their relatively benign immunogenic profile. The genome of the virus may be manipulated to contain a minimum of components for the assembly of a functional recombinant virus, or viral particle, which is loaded with or engineered to target a particular tissue and express or deliver a desired payload.

[0053] The wild-type AAV vector genome is a linear, single-stranded DNA (ssDNA) molecule approximately 5,000 nucleotides (nt) in length. Inverted terminal repeats (ITRs) traditionally cap the viral genome at both the 5′ and the 3′ end, providing origins of replication for the viral genome. While not wishing to be bound by theory, an AAV viral genome typically comprises two ITR sequences. These ITRs have a characteristic T-shaped hairpin structure defined by a self-complementary region (145nt in wild-type AAV) at the 5′ and 3′ ends of the ssDNA which form an energetically stable double stranded region. The double stranded hairpin structures comprise multiple functions including, but not limited to, acting as an origin for DNA replication by functioning as primers for the endogenous DNA polymerase complex of the host viral replication cell.

[0054] The wild-type AAV viral genome further comprises nucleotide sequences for two open reading frames, one for the four non-structural Rep proteins (Rep78, Rep68, Rep52, Rep40, encoded by Rep genes) and one for the three capsid, or structural, proteins (VP1, VP2, VP3, encoded by capsid genes or Cap genes). The Rep proteins are important for replication and packaging, while the capsid proteins are assembled to create the protein shell of the AAV, or AAV capsid. Alternative splicing and alternate initiation codons and promoters result in the generation of four different Rep proteins from a single open reading frame and the generation of three capsid proteins from a single open reading frame. Though it varies by AAV serotype, as a non-limiting example, for AAV9/hu.14 (SEQ ID NO: 123 of U.S. Pat. No. 7,906,111, the contents of which are herein incorporated by reference in their entirety) VP1 refers to amino acids 1-736, VP2 refers to amino acids 138-736, and VP3 refers to amino acids 203-736. In other words, VP1 is the full-length capsid sequence, while VP2 and VP3 are shorter components of the whole. As a result, changes in the sequence in the VP3 region, are also changes to VP1 and VP2, however, the percent difference as compared to the parent sequence will be greatest for VP3 since it is the shortest sequence of the three. Though described here in relation to the amino acid sequence, the nucleic acid sequence encoding these proteins can be similarly described. Together, the three capsid proteins assemble to create the AAV capsid protein. While not wishing to be bound by theory, the AAV capsid protein typically comprises a molar ratio of 1:1:10 of VP1:VP2:VP3. As used herein, an “AAV serotype” is defined primarily by the AAV capsid. In some instances, the ITRs are also specifically described by the AAV serotype (e.g., AAV2/9).

[0055] For use as a biological tool, the wild-type AAV viral genome can be modified to replace the rep/cap sequences with a nucleic acid sequence comprising a payload region with at least one ITR region. Typically, in recombinant AAV viral genomes there are two ITR regions. The rep/cap sequences can be provided in trans during production to generate AAV particles.

[0056] In addition to the encoded heterologous payload, AAV vectors may comprise the viral genome, in whole or in part, of any naturally occurring and/or recombinant AAV serotype nucleotide sequence or variant. AAV variants may have sequences of significant homology at the nucleic acid (genome or capsid) and amino acid levels (capsids), to produce constructs which are generally physical and functional equivalents, replicate by similar mechanisms, and assemble by similar mechanisms. Chiorini et al., J. Vir. 71: 6823-33(1997); Srivastava et al., J. Vir. 45:555-64 (1983); Chiorini et al., J. Vir. 73:1309-1319 (1999); Rutledge et al., J. Vir. 72:309-319 (1998); and Wu et al., J. Vir. 74: 8635-47 (2000), the contents of each of which are incorporated herein by reference in their entirety.

[0057] In some embodiments, AAV particles of the present disclosure are recombinant AAV viral vectors which are replication defective and lacking sequences encoding functional Rep and Cap proteins within their viral genome. These defective AAV vectors may lack most or all parental coding sequences and essentially carry only one or two AAV ITR sequences and the nucleic acid of interest for delivery to a cell, a tissue, an organ, or an organism.

[0058] In some embodiments, the viral genome of the AAV particles of the present disclosure comprise at least one control element which provides for the replication, transcription, and translation of a coding sequence encoded therein. Not all of the control elements need always be present as long as the coding sequence is capable of being replicated, transcribed, and/or translated in an appropriate host cell. Non-limiting examples of expression control elements include sequences for transcription initiation and/or termination, promoter and/or enhancer sequences, efficient RNA processing signals such as splicing and polyadenylation signals, sequences that stabilize cytoplasmic mRNA, sequences that enhance translation efficacy (e.g., Kozak consensus sequence), sequences that enhance protein stability, and/or sequences that enhance protein processing and/or secretion.

[0059] According to the present disclosure, AAV particles for use in therapeutics and/or diagnostics comprise a virus that has been distilled or reduced to the minimum components necessary for transduction of a nucleic acid payload or cargo of interest. In this manner, AAV particles are engineered as vehicles for specific delivery while lacking the deleterious replication and/or integration features found in wild-type viruses.

[0060] AAV vectors of the present disclosure may be produced recombinantly and may be based on adeno-associated virus (AAV) parent or reference sequences. As used herein, a “vector” is any molecule or moiety which transports, transduces, or otherwise acts as a carrier of a heterologous molecule such as the nucleic acids described herein.

[0061] In addition to single stranded AAV viral genomes (e.g., ssAAVs), the present disclosure also provides for self-complementary AAV (scAAVs) viral genomes. scAAV vector genomes contain DNA strands which anneal together to form double stranded DNA. By skipping second strand synthesis, scAAVs allow for rapid expression in the transduced cell.

[0062] In some embodiments, the AAV particle of the present disclosure is an scAAV.

[0063] In some embodiments, the AAV particle of the present disclosure is an ssAAV.

[0064] Methods for producing and/or modifying AAV particles are disclosed in the art such as pseudotyped AAV vectors (PCT Patent Publication Nos. WO200028004; WO200123001; WO2004112727; WO2005005610; and WO2005072364, the content of each of which is incorporated herein by reference in its entirety).

[0065] AAV particles may be modified to enhance the efficiency of delivery. Such modified AAV particles can be packaged efficiently and be used to successfully infect the target cells at high frequency and with minimal toxicity. In some embodiments, the capsids of the AAV particles are engineered according to the methods described in US Publication Number US20130195801, the contents of which are incorporated herein by reference in their entirety.

[0066] In some embodiments, the AAV particles comprising a payload region encoding the polypeptides may be introduced into mammalian cells.

### AAV Serotypes

[0067] AAV particles of the present disclosure may comprise or be derived from any natural or recombinant AAV serotype. According to the present disclosure, the AAV particles may utilize or be based on a serotype or include a peptide selected from any of the following VOY101, VOY201, AAVPHP.B (PHP.B), AAVPHP.A (PHP.A), AAVG2B-26, AAVG2B-13, AAVTH1.1-32, AAVTH1.1-35, AAVPHP.B2 (PHP.B2), AAVPHP.B3 (PHP.B3), AAVPHP.N/PHP.B-DGT, AAVPHP.B-EST, AAVPHP.B-GGT, AAVPHP.B-ATP, AAVPHP.B-ATT-T, AAVPHP.B-DGT-T, AAVPHP.B-GGT-T, AAVPHP.B-SGS, AAVPHP.B-AQP, AAVPHP.B-QQP, AAVPHP.B-SNP(3), AAVPHP.B-SNP, AAVPHP.B-QGT, AAVPHP.B-NQT, AAVPHP.B-EGS, AAVPHP.B-SGN, AAVPHP.B-EGT, AAVPHP.B-DST, AAVPHP.B-DST, AAVPHP.B-STP, AAVPHP.B-PQP, AAVPHP.B-SQP, AAVPHP.B-QLP, AAVPHP.B-TMP, AAVPHP.B-TTP, AAVPHP.S/G2A12, AAVG2A15/G2A3 (G2A3), AAVG2B4 (G2B4), AAVG2B5 (G2B5), PHP.S, AAV1, AAV2, AAV2G9, AAV3, AAV3a, AAV3b, AAV3-3, AAV4, AAV4-4, AAV5, AAV6, AAV6.1, AAV6.2, AAV6.1.2, AAV7, AAV7.2, AAV8, AAV9, AAV9 K449R, AAV9.11, AAV9.13, AAV9.16, AAV9.24, AAV9.45, AAV9.47, AAV9.61, AAV9.68, AAV9.84, AAV9.9, AAV10, AAV11, AAV12, AAV16.3, AAV24.1, AAV27.3, AAV42.12, AAV42-1b, AAV42-2, AAV42-3a, AAV42-3b, AAV42-4, AAV42-5a, AAV42-5b, AAV42-6b, AAV42-8, AAV42-10, AAV42-11, AAV42-12, AAV42-13, AAV42-15, AAV42-aa, AAV43-1, AAV43-12, AAV43-20, AAV43-21, AAV43-23, AAV43-25, AAV43-5, AAV44.1, AAV44.2, AAV44.5, AAV223.1, AAV223.2, AAV223.4, AAV223.5, AAV223.6, AAV223.7, AAV1-7/rh.48, AAV1-8/rh.49, AAV2-15/rh.62, AAV2-3/rh.61, AAV2-4/rh.50, AAV2-5/rh.51, AAV3.1/hu.6, AAV3.1/hu.9, AAV3-9/rh.52, AAV3-11/rh.53, AAV4-8/r11.64, AAV4-9/rh.54, AAV4-19/rh.55, AAV5-3/rh.57, AAV5-22/rh.58, AAV7.3/hu.7, AAV16.8/hu.10, AAV16.12/hu.11, AAV29.3/bb.1, AAV29.5/bb.2, AAV106.1/hu.37, AAV114.3/hu.40, AAV127.2/hu.41, AAV127.5/hu.42, AAV128.3/hu.44, AAV130.4/hu.48, AAV145.1/hu.53, AAV145.5/hu.54, AAV145.6/hu.55, AAV161.10/hu.60, AAV161.6/hu.61, AAV33.12/hu.17, AAV33.4/hu.15, AAV33.8/hu.16, AAV52/hu.19, AAV52.1/hu.20, AAV58.2/hu.25, AAVA3.3, AAVA3.4, AAVA3.5, AAVA3.7, AAVC1, AAVC2, AAVC5, AAV-DJ, AAV-DJ8, AAVF3, AAVF5, AAVH2, AAVrh.72, AAVhu.8, AAVrh.68, AAVrh.70, AAVpi.1, AAVpi.3, AAVpi.2, AAVrh.60, AAVrh.44, AAVrh.65, AAVrh.55, AAVrh.47, AAVrh.69, AAVrh.45, AAVrh.59, AAVhu.12, AAVH6, AAVLK03, AAVH-1/hu.1, AAVH-5/hu.3, AAVLG-10/rh.40, AAVLG-4/rh.38, AAVLG-9/hu.39, AAVN721-8/rh.43, AAVCh.5, AAVCh.5R1, AAVcy.2, AAVcy.3, AAVcy.4, AAVcy.5, AAVCy.5R1, AAVCy.5R2, AAVCy.5R3, AAVCy.5R4, AAVcy.6, AAVhu.1, AAVhu.2, AAVhu.3, AAVhu.4, AAVhu.5, AAVhu.6, AAVhu.7, AAVhu.9, AAVhu.10, AAVhu.11, AAVhu.13, AAVhu.15, AAVhu.16, AAVhu.17, AAVhu.18, AAVhu.20, AAVhu.21, AAVhu.22, AAVhu.23.2, AAVhu.24, AAVhu.25, AAVhu.27, AAVhu.28, AAVhu.29, AAVhu.29R, AAVhu.31, AAVhu.32, AAVhu.34, AAVhu.35, AAVhu.37, AAVhu.39, AAVhu.40, AAVhu.41, AAVhu.42, AAVhu.43, AAVhu.44, AAVhu.44R1, AAVhu.44R2, AAVhu.44R3, AAVhu.45, AAVhu.46, AAVhu.47, AAVhu.48, AAVhu.48R1, AAVhu.48R2, AAVhu.48R3, AAVhu.49, AAVhu.51, AAVhu.52, AAVhu.54, AAVhu.55, AAVhu.56, AAVhu.57, AAVhu.58, AAVhu.60, AAVhu.61, AAVhu.63, AAVhu.64, AAVhu.66, AAVhu.67, AAVhu.14/9, AAVhu.t 19, AAVrh.2, AAVrh.2R, AAVrh.8, AAVrh.8R, AAVrh.10, AAVrh.12, AAVrh.13, AAVrh.13R, AAVrh.14, AAVrh.17, AAVrh.18, AAVrh.19, AAVrh.20, AAVrh.21, AAVrh.22, AAVrh.23, AAVrh.24, AAVrh.25, AAVrh.31, AAVrh.32, AAVrh.33, AAVrh.34, AAVrh.35, AAVrh.36, AAVrh.37, AAVrh.37R2, AAVrh.38, AAVrh.39, AAVrh.40, AAVrh.46, AAVrh.48, AAVrh.48.1, AAVrh.48.1.2, AAVrh.48.2, AAVrh.49, AAVrh.51, AAVrh.52, AAVrh.53, AAVrh.54, AAVrh.56, AAVrh.57, AAVrh.58, AAVrh.61, AAVrh.64, AAVrh.64R1, AAVrh.64R2, AAVrh.67, AAVrh.73, AAVrh.74, AAVrh8R, AAVrh8R A586R mutant, AAVrh8R R533A mutant, AAAV, BAAV, caprine AAV, bovine AAV, AAVhE1.1, AAVhEr1.5, AAVhER1.14, AAVhEr1.8, AAVhEr1.16, AAVhEr1.18, AAVhEr1.35, AAVhEr1.7, AAVhEr1.36, AAVhEr2.29, AAVhEr2.4, AAVhEr2.16, AAVhEr2.30, AAVhEr2.31, AAVhEr2.36, AAVhER1.23, AAVhEr3.1, AAV2.5T, AAV-PAEC, AAV-LK01, AAV-LK02, AAV-LK03, AAV-LK04, AAV-LK05, AAV-LK06, AAV-LK07, AAV-LK08, AAV-LK09, AAV-LK10, AAV-LK11, AAV-LK12, AAV-LK13, AAV-LK14, AAV-LK15, AAV-LK16, AAV-LK17, AAV-LK18, AAV-LK19, AAV-PAEC2, AAV-PAEC4, AAV-PAEC6, AAV-PAEC7, AAV-PAEC8, AAV-PAEC11, AAV-PAEC12, AAV-2-pre-miRNA-101, AAV-8h, AAV-8b, AAV-h, AAV-b, AAV SM 10-2, AAV Shuffle 100-1, AAV Shuffle 100-3, AAV Shuffle 100-7, AAV Shuffle 10-2, AAV Shuffle 10-6, AAV Shuffle 10-8, AAV Shuffle 100-2, AAV SM 10-1, AAV SM 10-8, AAV SM 100-3, AAV SM 100-10, BNP61 AAV, BNP62 AAV, BNP63 AAV, AAVrh.50, AAVrh.43, AAVrh.62, AAVrh.48, AAVhu.19, AAVhu.11, AAVhu.53, AAV4-8/rh.64, AAVLG-9/hu.39, AAV54.5/hu.23, AAV54.2/hu.22, AAV54.7/hu.24, AAV54.1/hu.21, AAV54.4R/hu.27, AAV46.2/hu.28, AAV46.6/hu.29, AAV128.1/hu.43, true type AAV (ttAAV), UPENN AAV 10, Japanese AAV 10 serotypes, AAV CBr-7.1, AAV CBr-7.10, AAV CBr-7.2, AAV CBr-7.3, AAV CBr-7.4, AAV CBr-7.5, AAV CBr-7.7, AAV CBr-7.8, AAV CBr-B7.3, AAV CBr-B7.4, AAV CBr-E1, AAV CBr-E2, AAV CBr-E3, AAV CBr-E4, AAV CBr-E5, AAV CBr-e5, AAV CBr-E6, AAV CBr-E7, AAV CBr-E8, AAV CHt-1, AAV CHt-2, AAV CHt-3, AAV CHt-6.1, AAV CHt-6.10, AAV CHt-6.5, AAV CHt-6.6, AAV CHt-6.7, AAV CHt-6.8, AAV CHt-P1, AAV CHt-P2, AAV CHt-P5, AAV CHt-P6, AAV CHt-P8, AAV CHt-P9, AAV CKd-1, AAV CKd-10, AAV CKd-2, AAV CKd-3, AAV CKd-4, AAV CKd-6, AAV CKd-7, AAV CKd-8, AAV CKd-B1, AAV CKd-B2, AAV CKd-B3, AAV CKd-B4, AAV CKd-B5, AAV CKd-B6, AAV CKd-B7, AAV CKd-B8, AAV CKd-H1, AAV CKd-H2, AAV CKd-H3, AAV CKd-H4, AAV CKd-H5, AAV CKd-H6, AAV CKd-N3, AAV CKd-N4, AAV CKd-N9, AAV CLg-F1, AAV CLg-F2, AAV CLg-F3, AAV CLg-F4, AAV CLg-F5, AAV CLg-F6, AAV CLg-F7, AAV CLg-F8, AAV CLv-1, AAV CLv1-1, AAV Clv1-10, AAV CLv1-2, AAV CLv-12, AAV CLv1-3, AAV CLv-13, AAV CLv1-4, AAV Clv1-7, AAV Clv1-8, AAV Clv1-9, AAV CLv-2, AAV CLv-3, AAV CLv-4, AAV CLv-6, AAV CLv-8, AAV CLv-D1, AAV CLv-D2, AAV CLv-D3, AAV CLv-D4, AAV CLv-D5, AAV CLv-D6, AAV CLv-D7, AAV CLv-D8, AAV CLv-E1, AAV CLv-K1, AAV CLv-K3, AAV CLv-K6, AAV CLv-L4, AAV CLv-L5, AAV CLv-L6, AAV CLv-M1, AAV CLv-M11, AAV CLv-M2, AAV CLv-M5, AAV CLv-M6, AAV CLv-M7, AAV CLv-M8, AAV CLv-M9, AAV CLv-R1, AAV CLv-R2, AAV CLv-R3, AAV CLv-R4, AAV CLv-R5, AAV CLv-R6, AAV CLv-R7, AAV CLv-R8, AAV CLv-R9, AAV CSp-1, AAV CSp-10, AAV CSp-11, AAV CSp-2, AAV CSp-3, AAV CSp-4, AAV CSp-6, AAV CSp-7, AAV CSp-8, AAV CSp-8.10, AAV CSp-8.2, AAV CSp-8.4, AAV CSp-8.5, AAV CSp-8.6, AAV CSp-8.7, AAV CSp-8.8, AAV CSp-8.9, AAV CSp-9, AAV.hu.48R3, AAV.VR-355, AAV3B, AAV4, AAV5, AAVF1/HSC1, AAVF11/HSC11, AAVF12/HSC12, AAVF13/HSC13, AAVF14/HSC14, AAVF15/HSC15, AAVF16/HSC16, AAVF17/HSC17, AAVF2/HSC2, AAVF3/HSC3, AAVF4/HSC4, AAVF5/HSC5, AAVF6/HSC6, AAVF7/HSC7, AAVF8/HSC8, and/or AAVF9/HSC9 and variants thereof.

[0068] In some embodiments, the AAV serotype may be, or have, a sequence as described in US20030138772, U.S. Pat. Nos. 7,198,951, 6,156,303, US20140359799, WO2015168666, U.S. Pat. No. 9,233,131, US20150376607, US20150376240, US20160017295, US20150238550, US20150315612, WO2015121501, WO2016049230, U.S. Pat. No. 8,734,809, WO2016065001, U.S. Pat. No. 9,624,274, the contents of which are herein incorporated by reference in their entirety, such as, but not limited to, the AAV serotypes listed in Table 1, or a variant or a derivative thereof.

[0069] In some embodiments, the AAV serotype may be, or have, a sequence as described in United States Publication No. US20150159173, the contents of which are herein incorporated by reference in their entirety, such as, but not limited to, the AAV serotypes listed in Table 1, or a variant thereof including, but not limited to Cy5R1, Cy5R2, Cy5R3, Cy5R4, rh.13R, rh.37R2, rh.2R, rh.8R, rh.48.1, rh.48.2, rh.48.1.2, hu.44R1, hu.44R2, hu.44R3, hu.29R, ch.5R1, rh64R1, rh64R2, AAV6.2, AAV6.1, AAV6.12, hu.48R1, hu.48R2, and hu.48R3.

[0070] In some embodiments, the AAV serotype may be, or have, a mutation in the AAV9 sequence as described by N Pulicherla et al. (Molecular Therapy 19(6):1070-1078 (2011), herein incorporated by reference in its entirety), such as but not limited to, AAV9.9, AAV9.11, AAV9.13, AAV9.16, AAV9.24, AAV9.45, AAV9.47, AAV9.61, AAV9.68, AAV9.84.

[0071] In some embodiments, the serotype may be AAVDJ or a variant thereof, such as AAVDJ8 (or AAV-DJ8), as described by Grimm et al. (Journal of Virology 82(12): 5887-5911 (2008), herein incorporated by reference in its entirety). The amino acid sequence of AAVDJ8 may comprise two or more mutations in order to remove the heparin binding domain (HBD). As a non-limiting example, the AAV-DJ sequence described as SEQ ID NO: 1 in U.S. Pat. No. 7,588,772, the contents of which are herein incorporated by reference in their entirety, may comprise two mutations: (1) R587Q where arginine (R; Arg) at amino acid 587 is changed to glutamine (Q; Gln) and (2) R590T where arginine (R; Arg) at amino acid 590 is changed to threonine (T; Thr). As another non-limiting example, may comprise three mutations: (1) K406R where lysine (K; Lys) at amino acid 406 is changed to arginine (R; Arg), (2) R587Q where arginine (R; Arg) at amino acid 587 is changed to glutamine (Q; Gln) and (3) R590T where arginine (R; Arg) at amino acid 590 is changed to threonine (T; Thr).

[0072] In some embodiments, the AAV serotype may be, or have, a sequence of AAV4 as described in International Publication No. WO1998011244, the contents of which are herein incorporated by reference in their entirety, such as, but not limited to AAV4 (SEQ ID NO: 1-20 of WO1998011244).

[0073] In some embodiments, the AAV serotype may be, or have, a mutation in the AAV2 sequence to generate AAV2G9 as described in International Publication No. WO2014144229 and herein incorporated by reference in its entirety.

[0074] In some embodiments, the AAV serotype may be, or have, a sequence as described in International Publication No. WO2005033321, the contents of which are herein incorporated by reference in their entirety, such as, but not limited to AAV3-3 (SEQ ID NO: 217 of WO2005033321), AAV1 (SEQ ID NO: 219 and 202 of WO2005033321), AAV106.1/hu.37 (SEQ ID No: 10 of WO2005033321), AAV114.3/hu.40 (SEQ ID No: 11 of WO2005033321), AAV127.2/hu.41 (SEQ ID NO:6 and 8 of WO2005033321), AAV128.3/hu.44 (SEQ ID No: 81 of WO2005033321), AAV130.4/hu.48 (SEQ ID NO: 78 of WO2005033321), AAV145.1/hu.53 (SEQ ID No: 176 and 177 of WO2005033321), AAV145.6/hu.56 (SEQ ID NO: 168 and 192 of WO2005033321), AAV16.12/hu.11 (SEQ ID NO: 153 and 57 of WO2005033321), AAV16.8/hu.10 (SEQ ID NO: 156 and 56 of WO2005033321), AAV161.10/hu.60 (SEQ ID No: 170 of WO2005033321), AAV161.6/hu.61 (SEQ ID No: 174 of WO2005033321), AAV1-7/rh.48 (SEQ ID NO: 32 of WO2005033321), AAV1-8/rh.49 (SEQ ID NOs: 103 and 25 of WO2005033321), AAV2 (SEQ ID NO: 211 and 221 of WO2005033321), AAV2-15/rh.62 (SEQ ID No: 33 and 114 of WO2005033321), AAV2-3/rh.61 (SEQ ID NO: 21 of WO2005033321), AAV2-4/rh.50 (SEQ ID No: 23 and 108 of WO2005033321), AAV2-5/rh.51 (SEQ ID NO: 104 and 22 of WO2005033321), AAV3.1/hu.6 (SEQ ID NO: 5 and 84 of WO2005033321), AAV3.1/hu.9 (SEQ ID NO: 155 and 58 of WO2005033321), AAV3-11/rh.53 (SEQ ID NO: 186 and 176 of WO2005033321), AAV3-3 (SEQ ID NO: 200 of WO2005033321), AAV33.12/hu.17 (SEQ ID NO:4 of WO2005033321), AAV33.4/hu.15 (SEQ ID No: 50 of WO2005033321), AAV33.8/hu.16 (SEQ ID No: 51 of WO2005033321), AAV3-9/rh.52 (SEQ ID NO: 96 and 18 of WO2005033321), AAV4-19/rh.55 (SEQ ID NO: 117 of WO2005033321), AAV4-4 (SEQ ID NO: 201 and 218 of WO2005033321), AAV4-9/rh.54 (SEQ ID NO: 116 of WO2005033321), AAV5 (SEQ ID NO: 199 and 216 of WO2005033321), AAV52.1/hu.20 (SEQ ID NO: 63 of WO2005033321), AAV52/hu.19 (SEQ ID NO: 133 of WO2005033321), AAV5-22/rh.58 (SEQ ID No: 27 of WO2005033321), AAV5-3/rh.57 (SEQ ID NO: 105 of WO2005033321), AAV5-3/rh.57 (SEQ ID No: 26 of WO2005033321), AAV58.2/hu.25 (SEQ ID No: 49 of WO2005033321), AAV6 (SEQ ID NO: 203 and 220 of WO2005033321), AAV7 (SEQ ID NO: 222 and 213 of WO2005033321), AAV7.3/hu.7 (SEQ ID No: 55 of WO2005033321), AAV8 (SEQ ID NO: 223 and 214 of WO2005033321), AAVH-1/hu.1 (SEQ ID No: 46 of WO2005033321), AAVH-5/hu.3 (SEQ ID No: 44 of WO2005033321), AAVhu.1 (SEQ ID NO: 144 of WO2005033321), AAVhu.10 (SEQ ID NO: 156 of WO2005033321), AAVhu.11 (SEQ ID NO: 153 of WO2005033321), AAVhu.12 (WO2005033321 SEQ ID NO: 59), AAVhu.13 (SEQ ID NO: 129 of WO2005033321), AAVhu.14/AAV9 (SEQ ID NO: 123 and 3 of WO2005033321), AAVhu.15 (SEQ ID NO: 147 of WO2005033321), AAVhu.16 (SEQ ID NO: 148 of WO2005033321), AAVhu.17 (SEQ ID NO: 83 of WO2005033321), AAVhu.18 (SEQ ID NO: 149 of WO2005033321), AAVhu.19 (SEQ ID NO: 133 of WO2005033321), AAVhu.2 (SEQ ID NO: 143 of WO2005033321), AAVhu.20 (SEQ ID NO: 134 of WO2005033321), AAVhu.21 (SEQ ID NO: 135 of WO2005033321), AAVhu.22 (SEQ ID NO: 138 of WO2005033321), AAVhu.23.2 (SEQ ID NO: 137 of WO2005033321), AAVhu.24 (SEQ ID NO: 136 of WO2005033321), AAVhu.25 (SEQ ID NO: 146 of WO2005033321), AAVhu.27 (SEQ ID NO: 140 of WO2005033321), AAVhu.29 (SEQ ID NO: 132 of WO2005033321), AAVhu.3 (SEQ ID NO: 145 of WO2005033321), AAVhu.31 (SEQ ID NO: 121 of WO2005033321), AAVhu.32 (SEQ ID NO: 122 of WO2005033321), AAVhu.34 (SEQ ID NO: 125 of WO2005033321), AAVhu.35 (SEQ ID NO: 164 of WO2005033321), AAVhu.37 (SEQ ID NO: 88 of WO2005033321), AAVhu.39 (SEQ ID NO: 102 of WO2005033321), AAVhu.4 (SEQ ID NO: 141 of WO2005033321), AAVhu.40 (SEQ ID NO: 87 of WO2005033321), AAVhu.41 (SEQ ID NO: 91 of WO2005033321), AAVhu.42 (SEQ ID NO: 85 of WO2005033321), AAVhu.43 (SEQ ID NO: 160 of WO2005033321), AAVhu.44 (SEQ ID NO: 144 of WO2005033321), AAVhu.45 (SEQ ID NO: 127 of WO2005033321), AAVhu.46 (SEQ ID NO: 159 of WO2005033321), AAVhu.47 (SEQ ID NO: 128 of WO2005033321), AAVhu.48 (SEQ ID NO: 157 of WO2005033321), AAVhu.49 (SEQ ID NO: 189 of WO2005033321), AAVhu.51 (SEQ ID NO: 190 of WO2005033321), AAVhu.52 (SEQ ID NO: 191 of WO2005033321), AAVhu.53 (SEQ ID NO: 186 of WO2005033321), AAVhu.54 (SEQ ID NO: 188 of WO2005033321), AAVhu.55 (SEQ ID NO: 187 of WO2005033321), AAVhu.56 (SEQ ID NO: 192 of WO2005033321), AAVhu.57 (SEQ ID NO: 193 of WO2005033321), AAVhu.58 (SEQ ID NO: 194 of WO2005033321), AAVhu.6 (SEQ ID NO: 84 of WO2005033321), AAVhu.60 (SEQ ID NO: 184 of WO2005033321), AAVhu.61 (SEQ ID NO: 185 of WO2005033321), AAVhu.63 (SEQ ID NO: 195 of WO2005033321), AAVhu.64 (SEQ ID NO: 196 of WO2005033321), AAVhu.66 (SEQ ID NO: 197 of WO2005033321), AAVhu.67 (SEQ ID NO: 198 of WO2005033321), AAVhu.7 (SEQ ID NO: 150 of WO2005033321), AAVhu.8 (WO2005033321 SEQ ID NO: 12), AAVhu.9 (SEQ ID NO: 155 of WO2005033321), AAVLG-10/rh.40 (SEQ ID No: 14 of WO2005033321), AAVLG-4/rh.38 (SEQ ID NO: 86 of WO2005033321), AAVLG-4/rh.38 (SEQ ID No: 7 of WO2005033321), AAVN721-8/rh.43 (SEQ ID NO: 163 of WO2005033321), AAVN721-8/rh.43 (SEQ ID No: 43 of WO2005033321), AAVpi.1 (WO2005033321 SEQ ID NO: 28), AAVpi.2 (WO2005033321 SEQ ID NO: 30), AAVpi.3 (WO2005033321 SEQ ID NO: 29), AAVrh.38 (SEQ ID NO: 86 of WO2005033321), AAVrh.40 (SEQ ID NO: 92 of WO2005033321), AAVrh.43 (SEQ ID NO: 163 of WO2005033321), AAVrh.44 (WO2005033321 SEQ ID NO: 34), AAVrh.45 (WO2005033321 SEQ ID NO: 41), AAVrh.47 (WO2005033321 SEQ ID NO: 38), AAVrh.48 (SEQ ID NO: 115 of WO2005033321), AAVrh.49 (SEQ ID NO: 103 of WO2005033321), AAVrh.50 (SEQ ID NO: 108 of WO2005033321), AAVrh.51 (SEQ ID NO: 104 of WO2005033321), AAVrh.52 (SEQ ID NO: 96 of WO2005033321), AAVrh.53 (SEQ ID NO: 97 of WO2005033321), AAVrh.55 (WO2005033321 SEQ ID NO: 37), AAVrh.56 (SEQ ID NO: 152 of WO2005033321), AAVrh.57 (SEQ ID NO: 105 of WO2005033321), AAVrh.58 (SEQ ID NO: 106 of WO2005033321), AAVrh.59 (WO2005033321 SEQ ID NO: 42), AAVrh.60 (WO2005033321 SEQ ID NO: 31), AAVrh.61 (SEQ ID NO: 107 of WO2005033321), AAVrh.62 (SEQ ID NO: 114 of WO2005033321), AAVrh.64 (SEQ ID NO: 99 of WO2005033321), AAVrh.65 (WO2005033321 SEQ ID NO: 35), AAVrh.68 (WO2005033321 SEQ ID NO: 16), AAVrh.69 (WO2005033321 SEQ ID NO: 39), AAVrh.70 (WO2005033321 SEQ ID NO: 20), AAVrh.72 (WO2005033321 SEQ ID NO: 9), or variants thereof including, but not limited to, AAVcy.2, AAVcy.3, AAVcy.4, AAVcy.5, AAVcy.6, AAVrh.12, AAVrh.17, AAVrh.18, AAVrh.19, AAVrh.21, AAVrh.22, AAVrh.23, AAVrh.24, AAVrh.25, AAVrh.25/42 15, AAVrh.31, AAVrh.32, AAVrh.33, AAVrh.34, AAVrh.35, AAVrh.36, AAVrh.37, AAVrh14. Non limiting examples of variants include SEQ ID NO: 13, 15, 17, 19, 24, 36, 40, 45, 47, 48, 51-54, 60-62, 64-77, 79, 80, 82, 89, 90, 93-95, 98, 100, 101, 109-113, 118-120, 124, 126, 131, 139, 142, 151,154, 158, 161, 162, 165-183, 202, 204-212, 215, 219, 224-236, of WO2005033321, the contents of which are herein incorporated by reference in their entirety.

[0075] In some embodiments, the AAV serotype may be, or have, a sequence as described in U.S. Pat. No. 9,163,261, the contents of which are herein incorporated by reference in their entirety, such as, but not limited to, AAV-2-pre-miRNA-101 (SEQ ID NO: 1 U.S. Pat. No. 9,163,261), or variants thereof.

[0076] According to the present disclosure, AAV capsid serotype selection or use may be from a variety of species. In some embodiments, the AAV may be an avian AAV (AAAV). The AAV serotype may be, or have, a sequence as described in U.S. Pat. No. 9,238,800, the contents of which are herein incorporated by reference in their entirety, such as, but not limited to, AAAV (SEQ ID NO: 1, 2, 4, 6, 8, 10, 12, and 14 of U.S. Pat. No. 9,238,800), or variants thereof.

[0077] In some embodiments, the AAV may be a bovine AAV (BAAV). The BAAV serotype may be, or have, a sequence as described in U.S. Pat. No. 9,193,769, the contents of which are herein incorporated by reference in their entirety, such as, but not limited to, BAAV (SEQ ID NO: 1 and 6 of U.S. Pat. No. 9,193,769), or variants thereof. The BAAV serotype may be or have a sequence as described in U.S. Pat. No. 7,427,396, the contents of which are herein incorporated by reference in their entirety, such as, but not limited to, BAAV (SEQ ID NO: 5 and 6 of U.S. Pat. No. 7,427,396), or variants thereof.

[0078] In some embodiments, the AAV may be a caprine AAV. The caprine AAV serotype may be, or have, a sequence as described in U.S. Pat. No. 7,427,396, the contents of which are herein incorporated by reference in their entirety, such as, but not limited to, caprine AAV (SEQ ID NO: 3 of U.S. Pat. No. 7,427,396), or variants thereof.

[0079] In other embodiments the AAV may be engineered as a hybrid AAV from two or more parental serotypes. In some embodiments, the AAV may be AAV2G9 which comprises sequences from AAV2 and AAV9. The AAV2G9 AAV serotype may be, or have, a sequence as described in United States Patent Publication No. US20160017005, the contents of which are herein incorporated by reference in its entirety.

[0080] In some embodiments, the AAV may be a serotype generated by the AAV9 capsid library with mutations in amino acids 390-627 (VP1 numbering) as described by Pulicherla et al. (Molecular Therapy 19(6):1070-1078 (2011), the contents of which are herein incorporated by reference in their entirety. The serotype and corresponding nucleotide and amino acid substitutions may be, but is not limited to, AAV9.1 (G1594C; D532H), AAV6.2 (T1418A and T1436X; V473D and I479K), AAV9.3 (T1238A; F413Y), AAV9.4 (T1250C and A1617T; F417S), AAV9.5 (A1235G, A1314T, A1642G, C1760T; Q412R, T548A, A587V), AAV9.6 (T1231A; F411I), AAV9.9 (G1203A, G1785T; W595C), AAV9.10 (A1500G, T1676C; M559T), AAV9.11 (A1425T, A1702C, A1769T; T568P, Q590L), AAV9.13 (A1369C, A1720T; N457H, T574S), AAV9.14 (T1340A, T1362C, T1560C, G1713A; L447H), AAV9.16 (A1775T; Q592L), AAV9.24 (T1507C, T1521G; W503R), AAV9.26 (A1337G, A1769C; Y446C, Q590P), AAV9.33 (A1667C; D556A), AAV9.34 (A1534G, C1794T; N512D), AAV9.35 (A1289T, T1450A, C1494T, A1515T, C1794A, G1816A; Q430L, Y484N, N98K, V606I), AAV9.40 (A1694T, E565V), AAV9.41 (A1348T, T1362C; T450S), AAV9.44 (A1684C, A1701T, A1737G; N562H, K567N), AAV9.45 (A1492T, C1804T; N498Y, L602F), AAV9.46 (G1441C, T1525C, T1549G; G481R, W509R, L517V), 9.47 (G1241A, G1358A, A1669G, C1745T; S414N, G453D, K557E, T582I), AAV9.48 (C1445T, A1736T; P482L, Q579L), AAV9.50 (A1638T, C1683T, T1805A; Q546H, L602H), AAV9.53 (G1301A, A1405C, C1664T, G1811T; R134Q, S469R, A555V, G604V), AAV9.54 (C1531A, T1609A; L511I, L537M), AAV9.55 (T1605A; F535L), AAV9.58 (C1475T, C1579A; T492I, H527N), AAV.59 (T1336C; Y446H), AAV9.61 (A1493T; N498I), AAV9.64 (C1531A, A1617T; L511I), AAV9.65 (C1335T, T1530C, C1568A; A523D), AAV9.68 (C1510A; P504T), AAV9.80 (G1441A, G481R), AAV9.83 (C1402A, A1500T; P468T, E500D), AAV9.87 (T1464C, T1468C; S490P), AAV9.90 (A1196T; Y399F), AAV9.91 (T1316G, A1583T, C1782G, T1806C; L439R, K528I), AAV9.93 (A1273G, A1421G, A1638C, C1712T, G1732A, A1744T, A1832T; S425G, Q474R, Q546H, P571L, G578R, T582S, D611V), AAV9.94 (A1675T; M559L) and AAV9.95 (T1605A; F535L).

[0081] In some embodiments, the AAV particle may have, or may be a serotype selected from any of those found in Table 1.

[0082] In some embodiments, the AAV capsid may comprise a sequence, fragment or variant thereof, of any of the sequences in Table 1.

[0083] In some embodiments, the AAV capsid may be encoded by a sequence, fragment or variant as described in Table 1.

[0084] In any of the DNA and RNA sequences referenced and/or described herein, the single letter symbol has the following description: A for adenine; C for cytosine; G for guanine; T for thymine; U for Uracil; W for weak bases such as adenine or thymine; S for strong nucleotides such as cytosine and guanine; M for amino nucleotides such as adenine and cytosine; K for keto nucleotides such as guanine and thymine; R for purines adenine and guanine; Y for pyrimidine cytosine and thymine; B for any base that is not A (e.g., cytosine, guanine, and thymine); D for any base that is not C (e.g., adenine, guanine, and thymine); H for any base that is not G (e.g., adenine, cytosine, and thymine); V for any base that is not T (e.g., adenine, cytosine, and guanine); N for any nucleotide (which is not a gap); and Z is for zero.

[0085] In any of the amino acid sequences referenced and/or described herein, the single letter symbol has the following description: G (Gly) for Glycine; A (Ala) for Alanine; L (Leu) for Leucine; M (Met) for Methionine; F (Phe) for Phenylalanine; W (Trp) for Tryptophan; K (Lys) for Lysine; Q (Gln) for Glutamine; E (Glu) for Glutamic Acid; S (Ser) for Serine; P (Pro) for Proline; V (Val) for Valine; I (Ilie) for Isoleucine; C (Cys) for Cysteine; Y (Tyr) for Tyrosine; H (His) for Histidine; R (Arg) for Arginine; N (Asn) for Asparagine; D (Asp) for Aspartic Acid; T (Thr) for Threonine; B (Asx) for Aspartic acid or Asparagine; J (Xle) for Leucine or Isoleucine; O (Pyl) for Pyrrolysine; U (See) for Selenocysteine; X (Xaa) for any amino acid; and Z (Glx) for Glutamine or Glutamic acid.

TABLE 1
AAV Serotypes

| | SEQ | | SEQ | | SEQ | | SEQ |
|---|---|---|---|---|---|---|---|
| | ID | | ID | | ID | | ID |
| Serotype | NO | Serotype | NO | Serotype | NO | Serotype | NO |
| VOY101 | 1 | AAV CLv-K6 | 848 | AAV2/3 | 2789 | AAV variant | 3665 |
| | | | | variant | | | |
| VOY101 | 2 | AAV CLv-M1 | 849 | AAV2/3 | 2790 | AAV variant | 3666 |
| | | | | variant | | | |
| VOY201 | 3 | AAV CLv-M11 | 850 | AAV2/3 | 2791 | AAV variant | 3667 |
| | | | | variant | | | |
| VOY201 | 4534 | AAV CLv-M2 | 851 | AAV2/3 | 2792 | AAV variant | 3668 |
| | | | | variant | | | |
| PHP.N/PHP.B- | 4 | AAV CLv-M5 | 852 | AAV2/3 | 2793 | AAV variant | 3669 |
| DGT | | | | variant | | | |
| AAVPHP.B or | 5 | AAV CLv-M6 | 853 | AAV2/3 | 2794 | AAV variant | 3670 |
| G2B-26 | | | | variant | | | |
| AAVPHP.B | 6 | AAV CLv-M7 | 854 | AAV2/3 | 2795 | AAV variant | 3671 |
| | | | | variant | | | |
| AAVG2B-13 | 7 | AAV CLv-M8 | 855 | AAV2/3 | 2796 | AAV variant | 3672 |
| | | | | variant | | | |
| AAVTH1.1-32 | 8 | AAV CLv-M9 | 856 | AAV2/3 | 2797 | AAV variant | 3673 |
| | | | | variant | | | |
| AAVTH1.1-35 | 9 | AAV CHt-P1 | 857 | AAV2/3 | 2798 | AAV variant | 3674 |
| | | | | variant | | | |
| PHP.S/G2A12 | 10 | AAV CHt-P6 | 858 | AAV2/3 | 2799 | AAV variant | 3675 |
| | | | | variant | | | |
| AAV9/hu.14 | 11 | AAV CHt-P8 | 859 | AAV2/3 | 2800 | AAV variant | 3676 |
| K449R | | | | variant | | | |
| AAV1 | 12 | AAV CHt-6.1 | 860 | AAV2/3 | 2801 | AAV variant | 3677 |
| | | | | variant | | | |
| AAV1 | 13 | AAV CHt-6.10 | 861 | AAV2/3 | 2802 | AAV variant | 3678 |
| | | | | variant | | | |
| AAV1 | 14 | AAV CHt-6.5 | 862 | AAV2/3 | 2803 | AAV variant | 3679 |
| | | | | variant | | | |
| AAV1.3 | 15 | AAV CHt-6.6 | 863 | AAV2/3 | 2804 | AAV variant | 3680 |
| | | | | variant | | | |
| AAV10 | 16 | AAV CHt-6.7 | 864 | AAV2/3 | 2805 | AAV variant | 3681 |
| | | | | variant | | | |
| AAV10 | 17 | AAV CHt-6.8 | 865 | AAV2/3 | 2806 | AAV variant | 3682 |
| | | | | variant | | | |
| AAV10 | 18 | AAV CSp-8.10 | 866 | AAV2/3 | 2807 | AAV variant | 3683 |
| | | | | variant | | | |
| AAV11 | 19 | AAV CSp-8.2 | 867 | AAV2/3 | 2808 | AAV variant | 3684 |
| | | | | variant | | | |
| AAV12 | 20 | AAV CSp-8.4 | 868 | AAV2/3 | 2809 | AAV variant | 3685 |
| | | | | variant | | | |
| AAV2 | 21 | AAV CSp-8.5 | 869 | AAV2/3 | 2810 | AAV variant | 3686 |
| | | | | variant | | | |
| AAV2 | 22 | AAV CSp-8.6 | 870 | AAV2/3 | 2811 | AAV variant | 3687 |
| | | | | variant | | | |
| AAV2 | 23 | AAV CSp-8.7 | 871 | AAV2/3 | 2812 | AAV variant | 3688 |
| | | | | variant | | | |
| AAV2 | 24 | AAV CSp-8.8 | 872 | AAV2/3 | 2813 | AAV variant | 3689 |
| | | | | variant | | | |
| AAV2 | 25 | AAV CSp-8.9 | 873 | AAV2/3 | 2814 | AAV variant | 3690 |
| | | | | variant | | | |
| AAV5 | 102 | AAV CBr-B7.3 | 874 | AAV2/3 | 2815 | AAV variant | 3691 |
| | | | | variant | | | |
| AAV5 | 103 | AAV CBr-B7.4 | 875 | AAV2/3 | 2816 | AAV variant | 3692 |
| | | | | variant | | | |
| AAV5 | 104 | AAV3B | 876 | AAV2/3 | 2817 | AAV variant | 3693 |
| | | | | variant | | | |
| AAV5 | 105 | AAV4 | 877 | AAV2/3 | 2818 | AAV variant | 3694 |
| | | | | variant | | | |
| AAV6 | 106 | AAV5 | 878 | AAV2/3 | 2819 | AAV variant | 3695 |
| | | | | variant | | | |
| AAV6 | 107 | GPV | 879 | AAV2/3 | 2820 | AAV variant | 3696 |
| | | | | variant | | | |
| AAV6 | 108 | B19 | 880 | AAV2/3 | 2821 | AAV variant | 3697 |
| | | | | variant | | | |
| AAV6 | 109 | MVM | 881 | AAV2/3 | 2822 | AAV variant | 3698 |
| | | | | variant | | | |
| AAV6 | 110 | FPV | 882 | AAV2/3 | 2823 | AAV variant | 3699 |
| | | | | variant | | | |
| AAV6 | 111 | CPV | 883 | AAV2/3 | 2824 | AAV variant | 3700 |
| | | | | variant | | | |
| AAV7 | 115 | AAV6 | 884 | AAV2/3 | 2825 | AAV variant | 3701 |
| | | | | variant | | | |
| AAV7 | 116 | AAV6 | 885 | AAV2/3 | 2826 | AAV variant | 3702 |
| | | | | variant | | | |
| AAV7 | 117 | AAV2 | 886 | AAV2/3 | 2827 | AAV variant | 3703 |
| | | | | variant | | | |
| AAV7 | 118 | ShH10 | 887 | AAV2/3 | 2828 | AAV variant | 3704 |
| | | | | variant | | | |
| AAV7 | 119 | ShH13 | 888 | AAV2/3 | 2829 | AAV variant | 3705 |
| | | | | variant | | | |
| AAV7 | 120 | ShH10 | 889 | AAV2/3 | 2830 | AAV variant | 3706 |
| | | | | variant | | | |
| AAV7 | 121 | ShH10 | 890 | AAV2/3 | 2831 | AAV variant | 3707 |
| | | | | variant | | | |
| AAV8 | 122 | ShH10 | 891 | AAV2/3 | 2832 | AAV variant | 3708 |
| | | | | variant | | | |
| AAV8 | 123 | ShH10 | 892 | AAV2/3 | 2833 | AAV variant | 3709 |
| | | | | variant | | | |
| AAV8 | 124 | ShH10 | 893 | AAV2/3 | 2834 | AAV variant | 3710 |
| | | | | variant | | | |
| AAV8 | 125 | rh74 | 894 | AAV2/3 | 2835 | AAV variant | 3711 |
| | | | | variant | | | |
| AAV8 | 126 | rh74 | 895 | AAV2/3 | 2836 | AAV variant | 3712 |
| | | | | variant | | | |
| AAV8 | 127 | AAV8 | 896 | AAV2/3 | 2837 | AAV variant | 3713 |
| | | | | variant | | | |
| AAV9 | 132 | rh74 | 897 | AAV2/3 | 2838 | AAV variant | 3714 |
| | | | | variant | | | |
| AAV9 | 133 | rh74 (RHM4-1) | 898 | AAV2/3 | 2839 | AAV variant | 3715 |
| | | | | variant | | | |
| AAV9 | 134 | rh74 (RHM15-1) | 899 | AAV2/3 | 2840 | AAV variant | 3716 |
| | | | | variant | | | |
| AAV9 | 135 | rh74 (RHM15-2) | 900 | AAV2/3 | 2841 | AAV variant | 3717 |
| | | | | variant | | | |
| AAV9 | 136 | rh74 (RHM15- | 901 | AAV2/3 | 2842 | AAV variant | 3718 |
| | | 3/RHM15-5) | | variant | | | |
| AAV2.5T | 26 | rh74 (RHM15-4) | 902 | AAV2/3 | 2843 | AAV variant | 3719 |
| | | | | variant | | | |
| AAV223.10 | 27 | rh74 (RHM15-6) | 903 | AAV2/3 | 2844 | AAV variant | 3720 |
| | | | | variant | | | |
| AAV223.2 | 28 | rh74 (RHM4-1) | 904 | AAV2/3 | 2845 | AAV variant | 3721 |
| | | | | variant | | | |
| AAV223.2 | 29 | rh74 (RHM15-1) | 905 | AAV2/3 | 2846 | AAV variant | 3722 |
| | | | | variant | | | |
| AAV223.4 | 30 | rh74 (RHM15-2) | 906 | AAV2/3 | 2847 | AAV variant | 3723 |
| | | | | variant | | | |
| AAV223.4 | 31 | rh74 (RHM15- | 907 | AAV2/3 | 2848 | AAV variant | 3724 |
| | | 3/RHM15-5) | | variant | | | |
| AAV223.5 | 32 | rh74 (RHM15-4) | 908 | AAV2/3 | 2849 | AAV variant | 3725 |
| | | | | variant | | | |
| AAV223.5 | 33 | rh74 (RHM15-6) | 909 | AAV2/3 | 2850 | AAV variant | 3726 |
| | | | | variant | | | |
| AAV223.6 | 34 | Anc80 | 912 | AAV2/3 | 2851 | AAV variant | 3727 |
| | | | | variant | | | |
| AAV223.6 | 35 | Anc80 | 913 | AAV2/3 | 2852 | AAV variant | 3728 |
| | | | | variant | | | |
| AAV223.7 | 36 | Anc81 | 914 | AAV2/3 | 2853 | AAV variant | 3729 |
| | | | | variant | | | |
| AAV223.7 | 37 | Anc80 | 915 | AAV2/3 | 2854 | AAV variant | 3730 |
| | | | | variant | | | |
| AAV29.3 | 38 | Anc82 | 916 | AAV2/3 | 2855 | AAV variant | 3731 |
| | | | | variant | | | |
| AAV29.4 | 39 | Anc82 | 917 | AAV2/3 | 2856 | AAV variant | 3732 |
| | | | | variant | | | |
| AAV29.5 | 40 | Anc83 | 918 | AAV2/3 | 2857 | AAV variant | 3733 |
| | | | | variant | | | |
| AAV29.5 | 41 | Anc83 | 919 | AAV2/3 | 2858 | AAV variant | 3734 |
| (AAVbb.2) | | | | variant | | | |
| AAV3 | 42 | Anc84 | 920 | AAV2/3 | 2859 | AAV variant | 3735 |
| | | | | variant | | | |
| AAV3 | 43 | Anc84 | 921 | AAV2/3 | 2860 | AAV variant | 3736 |
| | | | | variant | | | |
| AAV3 | 44 | Anc94 | 922 | AAV2/3 | 2861 | AAV variant | 3737 |
| | | | | variant | | | |
| AAV3.3b | 45 | Anc94 | 923 | AAV2/3 | 2862 | AAV variant | 3738 |
| | | | | variant | | | |
| AAV3-3 | 46 | Anc113 | 924 | AAV2/3 | 2863 | AAV variant | 3739 |
| | | | | variant | | | |
| AAV3-3 | 47 | Anc113 | 925 | AAV2/3 | 2864 | AAV variant | 3740 |
| | | | | variant | | | |
| AAV3a | 48 | Anc126 | 926 | AAV2/3 | 2865 | AAV variant | 3741 |
| | | | | variant | | | |
| AAV3a | 49 | Anc126 | 927 | AAV2/3 | 2866 | AAV variant | 3742 |
| | | | | variant | | | |
| AAV3b | 50 | Anc127 | 928 | AAV2/3 | 2867 | AAV variant | 3743 |
| | | | | variant | | | |
| AAV3b | 51 | Anc127 | 929 | AAV2/3 | 2868 | AAV variant | 3744 |
| | | | | variant | | | |
| AAV3b | 52 | Anc80L27 | 930 | AAV2/3 | 2869 | AAV variant | 3745 |
| | | | | variant | | | |
| AAV4 | 53 | Anc80L59 | 931 | AAV2/3 | 2870 | AAV variant | 3746 |
| | | | | variant | | | |
| AAV4 | 54 | Anc80L60 | 932 | AAV2/3 | 2871 | AAV variant | 3747 |
| | | | | variant | | | |
| AAV4 | 55 | Anc80L62 | 933 | AAV2/3 | 2872 | AAV variant | 3748 |
| | | | | variant | | | |
| AAV4 | 56 | Anc80L65 | 934 | AAV2/3 | 2873 | AAV variant | 3749 |
| | | | | variant | | | |
| AAV4 | 57 | Anc80L33 | 935 | AAV2/3 | 2874 | AAV variant | 3750 |
| | | | | variant | | | |
| AAV4 | 58 | Anc80L36 | 936 | AAV2/3 | 2875 | AAV variant | 3751 |
| | | | | variant | | | |
| AAV4 | 59 | Anc80L44 | 937 | AAV2/3 | 2876 | AAV variant | 3752 |
| | | | | variant | | | |
| AAV4 | 60 | Anc80L1 | 938 | AAV2/3 | 2877 | AAV variant | 3753 |
| | | | | variant | | | |
| AAV4 | 61 | Anc80L1 | 939 | AAV2/3 | 2878 | AAV variant | 3754 |
| | | | | variant | | | |
| AAV4 | 62 | AAV-X1 | 940 | AAV2/3 | 2879 | AAV variant | 3755 |
| | | | | variant | | | |
| AAV4 | 63 | AAV-X1b | 941 | AAV2/3 | 2880 | AAV variant | 3756 |
| | | | | variant | | | |
| AAV4 | 64 | AAV-X5 | 942 | AAV2/3 | 2881 | AAV variant | 3757 |
| | | | | variant | | | |
| AAV4 | 65 | AAV-X19 | 943 | AAV2/3 | 2882 | AAV variant | 3758 |
| | | | | variant | | | |
| AAV4 | 66 | AAV-X21 | 944 | AAV2/3 | 2883 | AAV variant | 3759 |
| | | | | variant | | | |
| AAV4 | 67 | AAV-X22 | 945 | AAV2/3 | 2884 | AAV variant | 3760 |
| | | | | variant | | | |
| AAV4 | 68 | AAV-X23 | 946 | AAV2/3 | 2885 | AAV variant | 3761 |
| | | | | variant | | | |
| AAV4 | 69 | AAV-X24 | 947 | AAV2/3 | 2886 | AAV variant | 3762 |
| | | | | variant | | | |
| AAV4 | 70 | AAV-X25 | 948 | AAV2/3 | 2887 | AAV variant | 3763 |
| | | | | variant | | | |
| AAV4 | 71 | AAV-X26 | 949 | AAV2/3 | 2888 | AAV variant | 3764 |
| | | | | variant | | | |
| AAV4 | 72 | AAV-X1 | 950 | AAV2/3 | 2889 | AAV variant | 3765 |
| | | | | variant | | | |
| AAV42.2 | 73 | AAV-X1b | 951 | AAV2/3 | 2890 | AAV variant | 3766 |
| | | | | variant | | | |
| AAV42.2 | 74 | AAV-X5 | 952 | AAV2/3 | 2891 | AAV variant | 3767 |
| | | | | variant | | | |
| AAV42.3b | 75 | AAV-X19 | 953 | AAV2/3 | 2892 | AAV variant | 3768 |
| | | | | variant | | | |
| AAV42.3B | 76 | AAV-X21 | 954 | AAV2/3 | 2893 | AAV variant | 3769 |
| | | | | variant | | | |
| AAV42.4 | 77 | AAV-X22 | 955 | AAV2/3 | 2894 | AAV variant | 3770 |
| | | | | variant | | | |
| AAV42.4 | 78 | AAV-X23 | 956 | AAV2/3 | 2895 | AAV variant | 3771 |
| | | | | variant | | | |
| AAV42.8 | 79 | AAV-X24 | 957 | AAV2/3 | 2896 | AAV variant | 3772 |
| | | | | variant | | | |
| AAV42.8 | 80 | AAV-X25 | 958 | AAV2/3 | 2897 | AAV variant | 3773 |
| | | | | variant | | | |
| AAV43.1 | 81 | AAV-X26 | 959 | AAV2/3 | 2898 | AAV variant | 3774 |
| | | | | variant | | | |
| AAV43.1 | 82 | AAVrh8 | 960 | AAV2/3 | 2899 | AAV variant | 3775 |
| | | | | variant | | | |
| AAV43.12 | 83 | AAVrh8VP2FC5 | 961 | AAV2/3 | 2900 | AAV variant | 3776 |
| | | | | variant | | | |
| AAV43.12 | 84 | AAVrh8VP2FC44 | 962 | AAV2/3 | 2901 | AAV variant | 3777 |
| | | | | variant | | | |
| AAV43.20 | 85 | AAVrh8VP2ApoB100 | 963 | AAV2/3 | 2902 | AAV variant | 3778 |
| | | | | variant | | | |
| AAV43.20 | 86 | AAVrh8VP2RVG | 964 | AAV2/3 | 2903 | AAV variant | 3779 |
| | | | | variant | | | |
| AAV43.21 | 87 | AAVrh8VP2Angiopep-2 | 965 | AAV2/3 | 2904 | AAV variant | 3780 |
| | | VP2 | | variant | | | |
| AAV43.21 | 88 | AAV9.47VP1.3 | 966 | AAV2/3 | 2905 | AAV variant | 3781 |
| | | | | variant | | | |
| AAV43.23 | 89 | AAV9.47VP2ICAMg3 | 967 | AAV2/3 | 2906 | AAV variant | 3782 |
| | | | | variant | | | |
| AAV43.23 | 90 | AAV9.47VP2RVG | 968 | AAV2/3 | 2907 | AAV variant | 3783 |
| | | | | variant | | | |
| AAV43.25 | 91 | AAV9.47VP2Angiopep-2 | 969 | AAV2/3 | 2908 | AAV variant | 3784 |
| | | | | variant | | | |
| AAV43.25 | 92 | AAV9.47VP2A-string | 970 | AAV2/3 | 2909 | AAV variant | 3785 |
| | | | | variant | | | |
| AAV43.5 | 93 | AAVrh8VP2FC5 VP2 | 971 | AAV2/3 | 2910 | AAV variant | 3786 |
| | | | | variant | | | |
| AAV43.5 | 94 | AAVrh8VP2FC44 VP2 | 972 | AAV2/3 | 2911 | AAV variant | 3787 |
| | | | | variant | | | |
| AAV4-4 | 95 | AAVrh8VP2ApoB100 VP2 | 973 | AAV2/3 | 2912 | AAV variant | 3788 |
| | | | | variant | | | |
| AAV4-4 | 96 | AAVrh8VP2RVG | 74 | AAV2/3 | 2913 | AAV variant | 3789 |
| | | VP2 | | variant | | | |
| AAV44.1 | 97 | AAVrh8VP2Angiopep-2 | 975 | AAV2/3 | 2914 | AAV variant | 3790 |
| | | VP2 | | variant | | | |
| AAV44.1 | 98 | AAV9.47VP2ICAMg3 | 976 | AAV2/3 | 2915 | AAV variant | 3791 |
| | | VP2 | | variant | | | |
| AAV44.5 | 99 | AAV9.47VP2RVG | 977 | AAV2/3 | 2916 | AAV variant | 3792 |
| | | VP2 | | variant | | | |
| AAV44.5 | 100 | AAV9.47VP2Angiopep-2 | 978 | AAV2/3 | 2917 | AAV variant | 3793 |
| | | VP2 | | variant | | | |
| AAV4407 | 101 | AAV9.47VP2A- | 979 | AAV2/3 | 2918 | AAV variant | 3794 |
| | | string VP2 | | variant | | | |
| AAV5 | 102 | rAAV-B1 | 980 | AAV2/3 | 2919 | AAV variant | 3795 |
| | | | | variant | | | |
| AAV5 | 103 | rAAV-B2 | 981 | AAV2/3 | 2920 | AAV variant | 3796 |
| | | | | variant | | | |
| AAV5 | 104 | rAAV-B3 | 982 | AAV2/3 | 2921 | AAV variant | 3797 |
| | | | | variant | | | |
| AAV5 | 105 | rAAV-B4 | 983 | AAV2/3 | 2922 | AAV variant | 3798 |
| | | | | variant | | | |
| AAV6 | 106 | rAAV-B1 | 984 | AAV2/3 | 2923 | AAV variant | 3799 |
| | | | | variant | | | |
| AAV6 | 107 | rAAV-B2 | 985 | AAV2/3 | 2924 | AAV variant | 3800 |
| | | | | variant | | | |
| AAV6 | 108 | rAAV-B3 | 986 | AAV8 | 2925 | AAV variant | 3801 |
| | | | | Variant | | | |
| AAV6 | 109 | rAAV-B4 | 987 | AAV8 | 2926 | AAV variant | 3802 |
| | | | | Variant | | | |
| AAV6 | 110 | rAAV-L1 | 988 | AAV8 | 2927 | AAV variant | 3803 |
| | | | | Variant | | | |
| AAV6 | 111 | rAAV-L2 | 989 | AAV8 | 2928 | AAV variant | 3804 |
| | | | | Variant | | | |
| AAV6.1 | 112 | rAAV-L3 | 990 | AAV8 | 2929 | AAV variant | 3805 |
| | | | | Variant | | | |
| AAV6.12 | 113 | rAAV-L4 | 991 | AAV8 | 2930 | AAV variant | 3806 |
| | | | | Variant | | | |
| AAV6.2 | 114 | rAAV-L1 | 992 | AAV8 | 2931 | AAV variant | 3807 |
| | | | | Variant | | | |
| AAV7 | 115 | rAAV-L2 | 993 | AAV8 | 2932 | AAV variant | 3808 |
| | | | | Variant | | | |
| AAV7 | 116 | rAAV-L3 | 994 | AAV8 | 2933 | AAV variant | 3809 |
| | | | | Variant | | | |
| AAV7 | 117 | rAAV-L4 | 995 | AAV8 | 2934 | AAV variant | 3810 |
| | | | | Variant | | | |
| AAV7 | 118 | AAV9 | 996 | AAV8 | 2935 | AAV variant | 3811 |
| | | | | Variant | | | |
| AAV7 | 119 | rAAV | 997 | AAV8 | 2936 | AAV variant | 3812 |
| | | | | Variant | | | |
| AAV7 | 120 | rAAV | 998 | AAV8 | 2937 | AAV variant | 3813 |
| | | | | Variant | | | |
| AAV7 | 121 | rAAV | 999 | AAV8 | 2938 | AAV variant | 3814 |
| | | | | Variant | | | |
| AAV8 | 122 | rAAV | 1000 | AAV8 | 2939 | AAV variant | 3815 |
| | | | | Variant | | | |
| AAV8 | 123 | rAAV | 1001 | AAV8 | 2940 | AAV variant | 3816 |
| | | | | Variant | | | |
| AAV8 | 124 | rAAV | 1002 | AAV8 | 2941 | AAV variant | 3817 |
| | | | | Variant | | | |
| AAV8 | 125 | rAAV | 1003 | AAV8 | 2942 | AAV variant | 3818 |
| | | | | Variant | | | |
| AAV8 | 126 | rAAV | 1004 | AAV8 | 2943 | AAV variant | 3819 |
| | | | | Variant | | | |
| AAV8 | 127 | rAAV | 1005 | AAV8 | 2944 | AAV variant | 3820 |
| | | | | Variant | | | |
| AAV-8b | 128 | rAAV | 1006 | AAV8 | 2945 | AAV variant | 3821 |
| | | | | Variant | | | |
| AAV-8b | 129 | rAAV | 1007 | AAV8 | 2946 | AAV variant | 3822 |
| | | | | Variant | | | |
| AAV-8h | 130 | rAAV | 1008 | AAV8 | 2947 | AAV variant | 3823 |
| | | | | Variant | | | |
| AAV-8h | 131 | rAAV | 1009 | AAV8 | 2948 | AAV variant | 3824 |
| | | | | Variant | | | |
| AAV9 | 132 | rAAV | 1010 | AAV8 | 2949 | AAV variant | 3825 |
| | | | | Variant | | | |
| AAV9 | 133 | rAAV | 1011 | AAV8 | 2950 | AAV variant | 3826 |
| | | | | Variant | | | |
| AAV9 | 134 | rAAV | 1012 | AAV8 | 2951 | AAV variant | 3827 |
| | | | | Variant | | | |
| AAV9 | 135 | rAAV | 1013 | AAV8 | 2952 | AAV variant | 3828 |
| | | | | Variant | | | |
| AAV9 | 136 | rAAV | 1014 | AAV8 | 2953 | AAV variant | 3829 |
| | | | | Variant | | | |
| AAV9 | 137 | rAAV | 1015 | AAV8 | 2954 | AAV variant | 3830 |
| (AAVhu.14) | | | | Variant | | | |
| AAV9 | 138 | rAAV | 1016 | AAV8 | 2955 | AAV variant | 3831 |
| (AAVhu.14) | | | | Variant | | | |
| AAVA3.1 | 139 | rAAV | 1017 | AAV8 | 2956 | AAV variant | 3832 |
| | | | | Variant | | | |
| AAVA3.3 | 140 | rAAV | 1018 | AAV8 | 2957 | AAV variant | 3833 |
| | | | | Variant | | | |
| AAVA3.3 | 141 | rAAV | 1019 | AAV8 | 2958 | AAV variant | 3834 |
| | | | | Variant | | | |
| AAVA3.4 | 142 | rAAV | 1020 | AAV8 | 2959 | AAV variant | 3835 |
| | | | | Variant | | | |
| AAVA3.4 | 143 | rAAV | 1021 | AAV8 | 2960 | AAV variant | 3836 |
| | | | | Variant | | | |
| AAVA3.5 | 144 | rAAV | 1022 | AAV8 | 2961 | AAV variant | 3837 |
| | | | | Variant | | | |
| AAVA3.5 | 145 | rAAV | 1023 | AAV8 | 2962 | AAV variant | 3838 |
| | | | | Variant | | | |
| AAVA3.7 | 146 | rAAV | 1024 | AAV8 | 2963 | AAV variant | 3839 |
| | | | | Variant | | | |
| AAVA3.7 | 147 | rAAV | 1025 | AAV8 | 2964 | AAV variant | 3840 |
| | | | | Variant | | | |
| AAV29.3 | 148 | rAAV | 1026 | AAV8 | 2965 | AAV variant | 3841 |
| (AAVbb.1) | | | | Variant | | | |
| AAVC2 | 149 | rAAV | 1027 | AAV8 | 2966 | AAV variant | 3842 |
| | | | | Variant | | | |
| AAVCh.5 | 150 | rAAV | 1028 | AAV8 | 2967 | AAV variant | 3843 |
| | | | | Variant | | | |
| AAVcy.2 | 151 | rAAV | 1029 | AAV8 | 2968 | AAV variant | 3844 |
| (AAV13.3) | | | | Variant | | | |
| AAV24.1 | 152 | rAAV | 1030 | AAV8 | 2969 | AAV variant | 3845 |
| | | | | Variant | | | |
| AAVcy.3 | 153 | rAAV | 1031 | AAV8 | 2970 | AAV variant | 3846 |
| (AAV24.1) | | | | Variant | | | |
| AAV27.3 | 154 | rAAV | 1032 | AAV8 | 2971 | AAV variant | 3847 |
| | | | | Variant | | | |
| AAVcy.4 | 155 | rAAV | 1033 | AAV8 | 2972 | AAV variant | 3848 |
| (AAV27.3) | | | | Variant | | | |
| AAVcy.5 | 156 | rAAV | 1034 | AAV8 | 2973 | AAV variant | 3849 |
| | | | | Variant | | | |
| AAV7.2 | 157 | rAAV | 1035 | AAV8 | 2974 | AAV variant | 3850 |
| | | | | Variant | | | |
| AAVcy.5 | 158 | rAAV | 1036 | AAV8 | 2975 | AAV variant | 3851 |
| (AAV7.2) | | | | Variant | | | |
| AAV16.3 | 159 | rAAV | 1037 | AAV8 | 2976 | AAV variant | 3852 |
| | | | | Variant | | | |
| AAVcy.6 | 160 | rAAV | 1038 | AAV8 | 2977 | AAV variant | 3853 |
| (AAV16.3) | | | | Variant | | | |
| AAVcy.5 | 161 | rAAV | 1039 | AAV8 | 2978 | AAV variant | 3854 |
| | | | | Variant | | | |
| AAVcy.5 | 162 | rAAV | 1040 | AAV8 | 2979 | AAV variant | 3855 |
| | | | | Variant | | | |
| AAVCy.5R1 | 163 | rAAV | 1041 | AAV8 | 2980 | AAV variant | 3856 |
| | | | | Variant | | | |
| AAVCy.5R2 | 164 | rAAV | 1042 | AAV8 | 2981 | AAV variant | 3857 |
| | | | | Variant | | | |
| AAVCy.5R3 | 165 | rAAV | 1043 | AAV8 | 2982 | AAV variant | 3858 |
| | | | | Variant | | | |
| AAVCy.5R4 | 166 | rAAV | 1044 | AAV8 | 2983 | AAV variant | 3859 |
| | | | | Variant | | | |
| AAVDJ | 167 | rAAV | 1045 | AAV8 | 2984 | AAV variant | 3860 |
| | | | | Variant | | | |
| AAVDJ | 168 | rAAV | 1046 | AAV8 | 2985 | AAV variant | 3861 |
| | | | | Variant | | | |
| AAVDJ-8 | 169 | rAAV | 1047 | AAV8 | 2986 | AAV variant | 3862 |
| | | | | Variant | | | |
| AAVDJ-8 | 170 | rAAV | 1048 | AAV8 | 2987 | AAV variant | 3863 |
| | | | | Variant | | | |
| AAVF5 | 171 | rAAV | 1049 | AAV8 | 2988 | AAV variant | 3864 |
| | | | | Variant | | | |
| AAVH2 | 172 | rAAV | 1050 | AAV8 | 2989 | AAV variant | 3865 |
| | | | | Variant | | | |
| AAVH6 | 173 | rAAV | 1051 | AAV8 | 2990 | AAV variant | 3866 |
| | | | | Variant | | | |
| AAVhE1.1 | 174 | rAAV | 1052 | AAV8 | 2991 | AAV variant | 3867 |
| | | | | Variant | | | |
| AAVhEr1.14 | 175 | rAAV | 1053 | AAV8 | 2992 | AAV variant | 3868 |
| | | | | Variant | | | |
| AAVhEr1.16 | 176 | rAAV | 1054 | AAV8 | 2993 | AAV variant | 3869 |
| | | | | Variant | | | |
| AAVhEr1.18 | 177 | rAAV | 1055 | AAV8 | 2994 | AAV variant | 3870 |
| | | | | Variant | | | |
| AAVhEr1.23 | 178 | rAAV | 1056 | AAV8 | 2995 | AAV variant | 3871 |
| (AAVhEr2.29) | | | | Variant | | | |
| AAVhEr1.35 | 179 | rAAV | 1057 | AAV8 | 2996 | AAV variant | 3872 |
| | | | | Variant | | | |
| AAVhEr1.36 | 180 | rAAV | 1058 | AAV8 | 2997 | AAV variant | 3873 |
| | | | | Variant | | | |
| AAVhEr1.5 | 181 | rAAV | 1059 | AAV8 | 2998 | AAV variant | 3874 |
| | | | | Variant | | | |
| AAVhEr1.7 | 182 | rAAV | 1060 | AAV8 | 2999 | AAV variant | 3875 |
| | | | | Variant | | | |
| AAVhEr1.8 | 183 | rAAV | 1061 | AAV8 | 3000 | AAV variant | 3876 |
| | | | | Variant | | | |
| AAVhEr2.16 | 184 | rAAV | 1062 | AAV8 | 3001 | AAV variant | 3877 |
| | | | | Variant | | | |
| AAVhEr2.30 | 185 | rAAV | 1063 | AAV8 | 3002 | AAV variant | 3878 |
| | | | | Variant | | | |
| AAVhEr2.31 | 186 | rAAV | 1064 | AAV8 | 3003 | AAV variant | 3879 |
| | | | | Variant | | | |
| AAVhEr2.36 | 187 | rAAV | 1065 | AAV8 | 3004 | AAV variant | 3880 |
| | | | | Variant | | | |
| AAVhEr2.4 | 188 | rAAV | 1066 | AAV8 | 3005 | AAV variant | 3881 |
| | | | | Variant | | | |
| AAVhEr3.1 | 189 | rAAV | 1067 | AAV8 | 3006 | AAV variant | 3882 |
| | | | | Variant | | | |
| AAVhu.1 | 190 | rAAV | 1068 | AAV8 | 3007 | AAV variant | 3883 |
| | | | | Variant | | | |
| AAVhu.1 | 191 | rAAV | 1069 | AAV8 | 3008 | AAV variant | 3884 |
| | | | | Variant | | | |
| AAVhu.10 | 192 | rAAV | 1070 | AAV8 | 3009 | AAV variant | 3885 |
| (AAV16.8) | | | | Variant | | | |
| AAVhu.10 | 193 | rAAV | 1071 | AAV8 | 3010 | AAV variant | 3886 |
| (AAV16.8) | | | | Variant | | | |
| AAVhu.11 | 194 | rAAV | 1072 | AAV8 | 3011 | AAV variant | 3887 |
| (AAV16.12) | | | | Variant | | | |
| AAVhu.11 | 195 | rAAV | 1073 | AAV8 | 3012 | AAV variant | 3888 |
| (AAV16.12) | | | | Variant | | | |
| AAVhu.12 | 196 | rAAV | 1074 | AAV8 | 3013 | AAV variant | 3889 |
| | | | | Variant | | | |
| AAVhu.12 | 197 | rAAV | 1075 | AAV8 | 3014 | AAV variant | 3890 |
| | | | | Variant | | | |
| AAVhu.13 | 198 | rAAV | 1076 | AAV8 | 3015 | AAV variant | 3891 |
| | | | | Variant | | | |
| AAVhu.13 | 199 | rAAV | 1077 | AAV8 | 3016 | AAV variant | 3892 |
| | | | | Variant | | | |
| AAVhu.136.1 | 200 | rAAV | 1078 | AAV8 | 3017 | AAV variant | 3893 |
| | | | | Variant | | | |
| AAVhu.140.1 | 201 | rAAV | 1079 | AAV8 | 3018 | AAV variant | 3894 |
| | | | | Variant | | | |
| AAVhu.140.2 | 202 | rAAV | 1080 | AAV8 | 3019 | AAV variant | 3895 |
| | | | | Variant | | | |
| AAVhu.145.6 | 203 | rAAV | 1081 | AAV8 | 3020 | AAV variant | 3896 |
| | | | | Variant | | | |
| AAVhu.15 | 204 | rAAV | 1082 | AAV8 | 3021 | AAV variant | 3897 |
| | | | | Variant | | | |
| AAVhu.15 | 205 | rAAV | 1083 | AAV8 | 3022 | AAV variant | 3898 |
| (AAV33.4) | | | | Variant | | | |
| AAVhu.156.1 | 206 | rAAV | 1084 | AAV8 | 3023 | AAV variant | 3899 |
| | | | | Variant | | | |
| AAVhu.16 | 207 | rAAV | 1085 | AAV8 | 3024 | AAV variant | 3900 |
| | | | | Variant | | | |
| AAVhu.16 | 208 | rAAV | 1086 | AAV8 | 3025 | AAV variant | 3901 |
| (AAV33.8) | | | | Variant | | | |
| AAVhu.17 | 209 | rAAV | 1087 | AAV8 | 3026 | AAV variant | 3902 |
| | | | | Variant | | | |
| AAVhu.17 | 210 | rAAV | 1088 | AAV8 | 3027 | AAV variant | 3903 |
| (AAV33.12) | | | | Variant | | | |
| AAVhu.172.1 | 211 | rAAV | 1089 | AAV8 | 3028 | AAV variant | 3904 |
| | | | | Variant | | | |
| AAVhu.172.2 | 212 | rAAV | 1090 | AAV8 | 3029 | AAV variant | 3905 |
| | | | | Variant | | | |
| AAVhu.173.4 | 213 | rAAV | 1091 | AAV8 | 3030 | AAV variant | 3906 |
| | | | | Variant | | | |
| AAVhu.173.8 | 214 | rAAV | 1092 | AAV8 | 3031 | AAV variant | 3907 |
| | | | | Variant | | | |
| AAVhu.18 | 215 | rAAV | 1093 | AAV8 | 3032 | AAV variant | 3908 |
| | | | | Variant | | | |
| AAVhu.18 | 216 | rAAV | 1094 | AAV8 | 3033 | AAV variant | 3909 |
| | | | | Variant | | | |
| AAVhu.19 | 217 | rAAV | 1095 | AAV8 | 3034 | AAV variant | 3910 |
| | | | | Variant | | | |
| AAVhu.19 | 218 | rAAV | 1096 | AAV8 | 3035 | AAV variant | 3911 |
| | | | | Variant | | | |
| AAVhu.2 | 219 | rAAV | 1097 | AAV8 | 3036 | AAV variant | 3912 |
| | | | | Variant | | | |
| AAVhu.2 | 220 | rAAV | 1098 | AAV8 | 3037 | AAV variant | 3913 |
| | | | | Variant | | | |
| AAVhu.20 | 221 | rAAV | 1099 | AAV8 | 3038 | AAV variant | 3914 |
| | | | | Variant | | | |
| AAVhu.20 | 222 | rAAV | 1100 | AAV8 | 3039 | AAV variant | 3915 |
| | | | | Variant | | | |
| AAVhu.21 | 223 | rAAV | 1101 | AAV8 | 3040 | AAV variant | 3916 |
| | | | | Variant | | | |
| AAVhu.21 | 224 | rAAV | 1102 | AAV8 | 3041 | AAV variant | 3917 |
| | | | | Variant | | | |
| AAVhu.22 | 225 | rAAV | 1103 | AAV8 | 3042 | AAV variant | 3918 |
| | | | | Variant | | | |
| AAVhu.22 | 226 | rAAV | 1104 | AAV8 | 3043 | AAV variant | 3919 |
| | | | | Variant | | | |
| AAVhu.23 | 227 | rAAV | 1105 | AAV8 | 3044 | AAV variant | 3920 |
| | | | | Variant | | | |
| AAVhu.23.2 | 228 | rAAV | 1106 | AAV8 | 3045 | AAV variant | 3921 |
| | | | | Variant | | | |
| AAVhu.24 | 229 | rAAV | 1107 | AAV8 | 3046 | AAV variant | 3922 |
| | | | | Variant | | | |
| AAVhu.24 | 230 | rAAV | 1108 | AAV8 | 3047 | AAV variant | 3923 |
| | | | | Variant | | | |
| AAVhu.25 | 231 | rAAV | 1109 | AAV8 | 3048 | AAV variant | 3924 |
| | | | | Variant | | | |
| AAVhu.25 | 232 | rAAV | 1110 | AAV8 | 3049 | AAV variant | 3925 |
| | | | | Variant | | | |
| AAVhu.26 | 233 | rAAV | 1111 | AAV8 | 3050 | AAV variant | 3926 |
| | | | | Variant | | | |
| AAVhu.26 | 234 | rAAV | 1112 | AAV8 | 3051 | AAV variant | 3927 |
| | | | | Variant | | | |
| AAVhu.27 | 235 | rAAV | 1113 | AAV8 | 3052 | AAV variant | 3928 |
| | | | | Variant | | | |
| AAVhu.27 | 236 | rAAV | 1114 | AAV8 | 3053 | AAV variant | 3929 |
| | | | | Variant | | | |
| AAVhu.28 | 237 | rAAV | 1115 | AAV8 | 3054 | AAV variant | 3930 |
| | | | | Variant | | | |
| AAVhu.28 | 238 | rAAV | 1116 | AAV8 | 3055 | AAV variant | 3931 |
| | | | | Variant | | | |
| AAVhu.29 | 239 | rAAV | 1117 | AAV8 | 3056 | AAV variant | 3932 |
| | | | | Variant | | | |
| AAVhu.29 | 240 | rAAV | 1118 | AAV8 | 3057 | AAV variant | 3933 |
| | | | | Variant | | | |
| AAVhu.29 | 241 | rAAV | 1119 | AAV8 | 3058 | AAV variant | 3934 |
| | | | | Variant | | | |
| AAVhu.29R | 242 | rAAV | 1120 | AAV8 | 3059 | AAV variant | 3935 |
| | | | | Variant | | | |
| AAVhu.3 | 243 | rAAV | 1121 | AAV8 | 3060 | AAV variant | 3936 |
| | | | | Variant | | | |
| AAVhu.3 | 244 | rAAV | 1122 | AAV8 | 3061 | AAV variant | 3937 |
| | | | | Variant | | | |
| AAVhu.30 | 245 | rAAV | 1123 | AAV8 | 3062 | AAV variant | 3938 |
| | | | | Variant | | | |
| AAVhu.30 | 246 | rAAV | 1124 | AAV8 | 3063 | AAV variant | 3939 |
| | | | | Variant | | | |
| AAVhu.31 | 247 | AAV8 E532K | 1125 | AAV8 | 3064 | AAV variant | 3940 |
| | | | | Variant | | | |
| AAVhu.31 | 248 | AAV8 E532K | 1126 | AAV8 | 3065 | AAV variant | 3941 |
| | | | | Variant | | | |
| AAVhu.32 | 249 | rAAV4 | 1127 | AAV8 | 3066 | AAV variant | 3942 |
| | | | | Variant | | | |
| AAVhu.32 | 250 | rAAV4 | 1128 | AAV8 | 3067 | AAV variant | 3943 |
| | | | | Variant | | | |
| AAVhu.33 | 251 | rAAV4 | 1129 | AAV8 | 3068 | AAV variant | 3944 |
| | | | | Variant | | | |
| AAVhu.33 | 252 | rAAV4 | 1130 | AAV8 | 3069 | AAV variant | 3945 |
| | | | | Variant | | | |
| AAVhu.34 | 253 | rAAV4 | 1131 | AAV8 | 3070 | AAV variant | 3946 |
| | | | | Variant | | | |
| AAVhu.34 | 254 | rAAV4 | 1132 | AAV8 | 3071 | AAV variant | 3947 |
| | | | | Variant | | | |
| AAVhu.35 | 255 | rAAV4 | 1133 | AAV8 | 3072 | AAV variant | 3948 |
| | | | | Variant | | | |
| AAVhu.35 | 256 | rAAV4 | 1134 | AAV8 | 3073 | AAV variant | 3949 |
| | | | | Variant | | | |
| AAVhu.36 | 257 | rAAV4 | 1135 | AAV8 | 3074 | AAV variant | 3950 |
| | | | | Variant | | | |
| AAVhu.36 | 258 | rAAV4 | 1136 | AAV8 | 3075 | AAV variant | 3951 |
| | | | | Variant | | | |
| AAVhu.37 | 259 | rAAV4 | 1137 | AAV8 | 3076 | AAV variant | 3952 |
| | | | | Variant | | | |
| AAVhu.37 | 260 | rAAV4 | 1138 | AAV8 | 3077 | AAV variant | 3953 |
| (AAV106.1) | | | | Variant | | | |
| AAVhu.38 | 261 | rAAV4 | 1139 | AAV8 | 3078 | AAV variant | 3954 |
| | | | | Variant | | | |
| AAVhu.39 | 262 | rAAV4 | 1140 | AAV8 | 3079 | AAV variant | 3955 |
| | | | | Variant | | | |
| AAVhu.39 | 263 | rAAV4 | 1141 | AAV8 | 3080 | AAV variant | 3956 |
| (AAVLG-9) | | | | Variant | | | |
| AAVhu.4 | 264 | rAAV4 | 1142 | AAV8 | 3081 | AAV variant | 3957 |
| | | | | Variant | | | |
| AAVhu.4 | 265 | rAAV4 | 1143 | AAV8 | 3082 | AAV variant | 3958 |
| | | | | Variant | | | |
| AAVhu.40 | 266 | rAAV4 | 1144 | AAV8 | 3083 | AAV variant | 3959 |
| | | | | Variant | | | |
| AAVhu.40 | 267 | rAAV4 | 1145 | AAV8 | 3084 | AAV variant | 3960 |
| (AAV114.3) | | | | Variant | | | |
| AAVhu.41 | 268 | rAAV4 | 1146 | AAV8 | 3085 | AAV variant | 3961 |
| | | | | Variant | | | |
| AAVhu.41 | 269 | AAV11 | 1147 | AAV8 | 3086 | AAV variant | 3962 |
| (AAV127.2) | | | | Variant | | | |
| AAVhu.42 | 270 | AAV12 | 1148 | AAV8 | 3087 | AAV variant | 3963 |
| | | | | Variant | | | |
| AAVhu.42 | 271 | rh32 | 1149 | AAV8 | 3088 | AAV variant | 3964 |
| (AAV127.5) | | | | Variant | | | |
| AAVhu.43 | 272 | rh33 | 1150 | AAV8 | 3089 | AAV variant | 3965 |
| | | | | Variant | | | |
| AAVhu.43 | 273 | rh34 | 1151 | AAV8 | 3090 | AAV variant | 3966 |
| | | | | Variant | | | |
| AAVhu.43 | 274 | rAAV4 | 1152 | AAV8 | 3091 | AAV variant | 3967 |
| (AAV128.1) | | | | Variant | | | |
| AA Vhu.44 | 275 | rAAV4 | 1153 | AAV8 | 3092 | AAV variant | 3968 |
| | | | | Variant | | | |
| AA Vhu.44 | 276 | rAAV4 | 1154 | AAV8 | 3093 | AAV variant | 3969 |
| (AAV128.3) | | | | Variant | | | |
| AAVhu.44R1 | 277 | rAAV4 | 1155 | AAV8 | 3094 | AAV variant | 3970 |
| | | | | Variant | | | |
| AAVhu.44R2 | 278 | rAAV4 | 1156 | AAV8 | 3095 | AAV variant | 3971 |
| | | | | Variant | | | |
| AAVhu.44R3 | 279 | rAAV4 | 1157 | AAV8 | 3096 | AAV variant | 3972 |
| | | | | Variant | | | |
| AAVhu.45 | 280 | AAV2/8 | 1158 | AAV8 | 3097 | AAV variant | 3973 |
| | | | | Variant | | | |
| AAVhu.45 | 281 | AAV2/8 | 1159 | AAV8 | 3098 | AAV variant | 3974 |
| | | | | Variant | | | |
| AAVhu.46 | 282 | ancestral AAV | 1160 | AAV8 | 3099 | AAV variant | 3975 |
| | | | | Variant | | | |
| AAVhu.46 | 283 | ancestral AAV | 1161 | AAV8 | 3100 | AAV variant | 3976 |
| | | variant C4 | | Variant | | | |
| AAVhu.46 | 284 | ancestral AAV | 1162 | AAV8 | 3101 | AAV variant | 3977 |
| | | variant C7 | | Variant | | | |
| AAVhu.47 | 285 | ancestral AAV | 1163 | AAV8 | 3102 | AAV variant | 3978 |
| | | variant G4 | | Variant | | | |
| AAVhu.47 | 286 | AAV VR-942n | 1167 | AAV8 | 3103 | AAV variant | 3979 |
| | | | | Variant | | | |
| AAVhu.48 | 287 | AAV5-A (M569V) | 1168 | AAV8 | 3104 | AAV variant | 3980 |
| | | | | Variant | | | |
| AAVhu.48 | 288 | AAV5-A (M569V) | 1169 | AAV8 | 3105 | AAV variant | 3981 |
| | | | | Variant | | | |
| AAVhu.48 | 289 | AAV5-A (Y585V) | 1170 | AAV8 | 3106 | AAV variant | 3982 |
| (AAV130.4) | | | | Variant | | | |
| AAVhu.48R1 | 290 | AAV5-A (Y585V) | 1171 | AAV8 | 3107 | AAV variant | 3983 |
| | | | | Variant | | | |
| AAVhu.48R2 | 291 | AAV5-A (L587T) | 1172 | AAV8 | 3108 | AAV variant | 3984 |
| | | | | Variant | | | |
| AAVhu.48R3 | 292 | AAV5-A (L587T) | 1173 | AAV8 | 3109 | AAV variant | 3985 |
| | | | | Variant | | | |
| AAVhu.49 | 293 | AAV5-A | 1174 | AAV8 | 3110 | AAV variant | 3986 |
| | | (Y585V/L587T) | | Variant | | | |
| AAVhu.49 | 294 | AAV5-A | 1175 | AAV8 | 3111 | AAV variant | 3987 |
| | | (Y585V/L587T) | | Variant | | | |
| AAVhu.5 | 295 | AAV5-B (D652A) | 1176 | AAV8 | 3112 | AAV variant | 3988 |
| | | | | Variant | | | |
| AAVhu.5 | 296 | AAV5-B (D652A) | 1177 | AAV8 | 3113 | AAV variant | 3989 |
| | | | | Variant | | | |
| AAVhu.51 | 297 | AAV5-B (T362M) | 1178 | AAV8 | 3114 | AAV variant | 3990 |
| | | | | Variant | | | |
| AAVhu.51 | 298 | AAV5-B (T362M) | 1179 | AAV8 | 3115 | AAV variant | 3991 |
| | | | | Variant | | | |
| AAVhu.52 | 299 | AAV5-B (Q359D) | 1180 | AAV8 | 3116 | AAV variant | 3992 |
| | | | | Variant | | | |
| AAVhu.52 | 300 | AAV5-B (Q359D) | 1181 | AAV8 | 3117 | AAV variant | 3993 |
| | | | | Variant | | | |
| AAVhu.53 | 301 | AAV5-B (E350Q) | 1182 | AAV8 | 3118 | AAV variant | 3994 |
| | | | | Variant | | | |
| AAVhu.53 | 302 | AAV5-B (E350Q) | 1183 | AAV8 | 3119 | AAV variant | 3995 |
| | | | | Variant | | | |
| AAVhu.53 | 303 | AAV5-B (P533S) | 1184 | AAV8 | 3120 | AAV variant | 3996 |
| (AAV145.1) | | | | Variant | | | |
| AAVhu.54 | 304 | AAV5-B (P533S) | 1185 | AAV8 | 3121 | AAV variant | 3997 |
| | | | | Variant | | | |
| AAVhu.54 | 305 | AAV5-B (P533G) | 1186 | AAV8 | 3122 | AAV variant | 3998 |
| (AAV145.5) | | | | Variant | | | |
| AAVhu.55 | 306 | AAV5-B (P533G) | 1187 | AAV8 | 3123 | AAV variant | 3999 |
| | | | | Variant | | | |
| AAVhu.56 | 307 | AAV5-mutation in | 1188 | AAV8 | 3124 | AAV variant | 4000 |
| | | loop VII | | Variant | | | |
| AAVhu.56 | 308 | AAV5-mutation in | 1189 | AAV8 | 3125 | AAV variant | 4001 |
| (AAV145.6) | | loop VII | | Variant | | | |
| AAVhu.56 | 309 | AAV8 | 1190 | AAV8 | 3126 | AAV variant | 4002 |
| AAV145.6) | | | | Variant | | | |
| AAVhu.57 | 310 | Mut A (LK03/AAV8) | 1191 | AAV8 | 3127 | AAV variant | 4003 |
| | | | | Variant | | | |
| AAVhu.57 | 311 | Mut B (LK03/AAV5) | 1192 | AAV8 | 3128 | AAV variant | 4004 |
| | | | | Variant | | | |
| AAVhu.57 | 312 | Mut C | 1193 | AAV8 | 3129 | AAV variant | 4005 |
| | | (AAV8/AAV3B) | | Variant | | | |
| AAVhu.58 | 313 | Mut D | 1194 | AAV8 | 3130 | AAV variant | 4006 |
| | | (AAV5/AAV3B) | | Variant | | | |
| AAVhu.58 | 314 | Mut E | 1195 | AAV8 | 3131 | AAV variant | 4007 |
| | | (AAV8/AAV3B) | | Variant | | | |
| AAVhu.6 | 315 | Mut F | 1196 | AAV8 | 3132 | AAV2 variant | 4008 |
| (AAV3.1) | | (AAV3B/AAV8) | | Variant | | | |
| AAVhu.6 | 316 | AAV44.9 | 1197 | AAV2 | 3133 | AAV2 variant | 4009 |
| (AAV3.1) | | | | variant | | | |
| AAVhu.60 | 317 | AAV44.9 | 1198 | AAV2 | 3134 | AAV2 variant | 4010 |
| | | | | variant | | | |
| AAVhu.60 | 318 | AAVrh8 | 1199 | AAV2 | 3135 | AAV2 variant | 4011 |
| (AAV161.10) | | | | variant | | | |
| AAVhu.61 | 319 | AAV44.9 (S470N) | 1200 | AAV2 | 3136 | AAV2 variant | 4012 |
| | | | | variant | | | |
| AAVhu.61 | 320 | rh74 VP1 | 1201 | AAV2 | 3137 | AAV2 variant | 4013 |
| (AAV161.6) | | | | variant | | | |
| AAVhu.63 | 321 | AAV-LK03 (L125I) | 1202 | AAV2 | 3138 | AAV2 variant | 4014 |
| | | | | variant | | | |
| AAVhu.63 | 322 | AAV3B | 1203 | AAV2 | 3139 | AAV2 variant | 4015 |
| | | (S663V + T492V) | | variant | | | |
| AAVhu.64 | 323 | Anc80 | 1204 | AAV2 | 3140 | AAV2 variant | 4016 |
| | | | | variant | | | |
| AAVhu.64 | 324 | Anc80 | 1205 | AAV2 | 3141 | AAV2 variant | 4017 |
| | | | | variant | | | |
| AAVhu.66 | 325 | Anc81 | 1206 | AAV2 | 3142 | AAV2 variant | 4018 |
| | | | | variant | | | |
| AAVhu.67 | 326 | Anc81 | 1207 | AAV2 | 3143 | AAV2 variant | 4019 |
| | | | | variant | | | |
| AAVhu.67 | 327 | Anc82 | 1208 | AAV2 | 3144 | AAV2 variant | 4020 |
| | | | | variant | | | |
| AAVhu.7 | 328 | Anc82 | 1209 | AAV2 | 3145 | AAV2 variant | 4021 |
| | | | | variant | | | |
| AAVhu.7 | 329 | Anc83 | 1210 | AAV2 | 3146 | AAV2 variant | 4022 |
| | | | | variant | | | |
| AAVhu.7 | 330 | Anc83 | 1211 | AAV2 | 3147 | AAV2 variant | 4023 |
| (AAV7.3) | | | | variant | | | |
| AAVhu.71 | 331 | Anc84 | 1212 | AAV2 | 3148 | AAV2 variant | 4024 |
| | | | | variant | | | |
| AAVhu.8 | 332 | Anc84 | 1213 | AAV8 B1 | 3149 | AAV2 variant | 4025 |
| AAVhu.8 | 333 | Anc94 | 1214 | AAV8 B2 | 3150 | AAV2 variant | 4026 |
| AAVhu.8 | 334 | Anc94 | 1215 | AAV8 B3 | 3151 | AAV2 variant | 4027 |
| AAVhu.9 | 335 | Anc113 | 1216 | AAV8 B4 | 3152 | AAV2 variant | 4028 |
| (AAV3.1) | | | | | | | |
| AAVhu.9 | 336 | Anc113 | 1217 | AAV8 B12 | 3153 | AAV2 variant | 4029 |
| (AAV3.1) | | | | | | | |
| AAV-LK01 | 337 | Anc126 | 1218 | AAV8 B18 | 3154 | AAV2 variant | 4030 |
| AAV-LK01 | 338 | Anc126 | 1219 | AAV8 B24 | 3155 | AAV2 variant | 4031 |
| AAV-LK02 | 339 | Anc127 | 1220 | AAV8 B41 | 3156 | AAV2 variant | 4032 |
| AAV-LK02 | 340 | Anc127 | 1221 | AAV8 B44 | 3157 | AAV2 variant | 4033 |
| AAV-LK03 | 341 | Anc80L27 | 1222 | AAV8 B45 | 3158 | AAV2 variant | 4034 |
| AAV-LK03 | 342 | Anc80L59 | 1223 | AAV8 B46 | 3159 | AAV2 variant | 4035 |
| AAV-LK04 | 343 | Anc80L60 | 1224 | AAV8 B60 | 3160 | AAV2 variant | 4036 |
| AAV-LK04 | 344 | Anc80L62 | 1225 | AAV8 B61 | 3161 | AAV2 variant | 4037 |
| AAV-LK05 | 345 | Anc80L65 | 1226 | AAV8 B62 | 3162 | AAV2 variant | 4038 |
| AAV-LK05 | 346 | Anc80L33 | 1227 | AAV8 B63 | 3163 | AAV2 variant | 4039 |
| AAV-LK06 | 347 | Anc80L36 | 1228 | AAV8 B64 | 3164 | AAV2 variant | 4040 |
| AAV-LK06 | 348 | Anc80L44 | 1229 | AAV variant | 3165 | AAV2 variant | 4041 |
| AAV-LK07 | 349 | Anc80L1 | 1230 | AAV variant | 3166 | AAV2 variant | 4042 |
| AAV-LK07 | 350 | Anc80L1 | 1231 | AAV variant | 3167 | AAV2 variant | 4043 |
| AAV-LK08 | 351 | AAVrh10 | 1232 | AAV variant | 3168 | AAV2 variant | 4044 |
| AAV-LK08 | 352 | Anc110 | 1233 | AAV variant | 3169 | AAV2 variant | 4045 |
| AAV-LK09 | 353 | Anc110 | 1234 | AAV variant | 3170 | AAV2 variant | 4046 |
| AAV-LK09 | 354 | AAVrh32.33 | 1235 | AAV variant | 3171 | AAV2 variant | 4047 |
| AAV-LK10 | 355 | AAVrh74 | 1236 | AAV variant | 3172 | AAV2 variant | 4048 |
| AAV-LK10 | 356 | AAV2 | 1237 | AAV variant | 3173 | AAV2 variant | 4049 |
| AAV-LK11 | 357 | AAV2 | 1238 | AAV variant | 3174 | AAV2 variant | 4050 |
| AAV-LK11 | 358 | AAV2 | 1239 | AAV variant | 3175 | AAV2 variant | 4051 |
| AAV-LK12 | 359 | Parvo-like virus | 1240 | AAV variant | 3176 | AAV2 variant | 4052 |
| AAV-LK12 | 360 | Parvo-like virus | 1241 | AAV variant | 3177 | AAV2 variant | 4053 |
| AAV-LK13 | 361 | Parvo-like virus | 1242 | AAV variant | 3178 | AAV2 variant | 4054 |
| AAV-LK13 | 362 | Parvo-like virus | 1243 | AAV variant | 3179 | AAV2 variant | 4055 |
| AAV-LK14 | 363 | Parvo-like virus | 1244 | AAV variant | 3180 | AAV2 variant | 4056 |
| AAV-LK14 | 364 | Parvo-like virus | 1245 | AAV variant | 3181 | AAV2 variant | 4057 |
| AAV-LK15 | 365 | AAVrh.10 | 1246 | AAV variant | 3182 | AAV2 variant | 4058 |
| AAV-LK15 | 366 | AAVrh.10 | 1247 | AAV variant | 3183 | AAV2 variant | 4059 |
| AAV-LK16 | 367 | AAV2tYF | 1248 | AAV variant | 3184 | AAV2 variant | 4060 |
| AAV-LK16 | 368 | AAV-SPK | 1249 | AAV variant | 3185 | AAV2 variant | 4061 |
| AAV-LK17 | 369 | AAV2.5 | 1250 | AAV variant | 3186 | AAV2 variant | 4062 |
| AAV-LK17 | 370 | AAV1.1 | 1251 | AAV variant | 3187 | AAV2 variant | 4063 |
| AAV-LK18 | 371 | AAV6.1 | 1252 | AAV variant | 3188 | AAV2 variant | 4064 |
| AAV-LK18 | 372 | AAV6.3.1 | 1253 | AAV variant | 3189 | AAV2 variant | 4065 |
| AAV-LK19 | 373 | AAV218 | 1254 | AAV variant | 3190 | AAV2 variant | 4066 |
| AAV-LK19 | 374 | AAV218 | 1255 | AAV variant | 3191 | AAV2 variant | 4067 |
| AAV-PAEC | 375 | ttAAV | 1256 | AAV variant | 3192 | AAV2 variant | 4068 |
| AAV-PAEC | 376 | ttAAV-S312N | 1257 | AAV variant | 3193 | AAV2 variant | 4069 |
| AAV-PAEC11 | 377 | ttAAV-S312N | 1258 | AAV variant | 3194 | AAV2 variant | 4070 |
| AAV-PAEC11 | 378 | AAV6 (Y705, Y731, | 1259 | AAV variant | 3195 | AAV2 variant | 4071 |
| | | and T492) | | | | | |
| AAV-PAEC12 | 379 | AAV2 | 1260 | AAV variant | 3196 | AAV2 variant | 4072 |
| AAV-PAEC12 | 380 | AAV2 | 1261 | AAV variant | 3197 | AAV2 variant | 4073 |
| AAV-PAEC13 | 381 | AAV2 variant | 2322 | AAV variant | 3198 | AAV2 variant | 4074 |
| AAV-PAEC13 | 382 | AAV2 variant | 2323 | AAV variant | 3199 | AAV2 variant | 4075 |
| AAV-PAEC2 | 383 | AAV2 variant | 2324 | AAV variant | 3200 | AAV2 variant | 4076 |
| AAV-PAEC2 | 384 | AAV2 variant | 2325 | AAV variant | 3201 | AAV2 variant | 4077 |
| AAV-PAEC4 | 385 | AAV2 variant | 2326 | AAV variant | 3202 | AAV2 variant | 4078 |
| AAV-PAEC4 | 386 | AAV2 variant | 2327 | AAV variant | 3203 | AAV2 variant | 4079 |
| AAV-PAEC6 | 387 | AAV2 variant | 2328 | AAV variant | 3204 | AAV2 variant | 4080 |
| AAV-PAEC6 | 388 | AAV2 variant | 2329 | AAV variant | 3205 | AAV2 variant | 4081 |
| AAV-PAEC7 | 389 | AAV2 variant | 2330 | AAV variant | 3206 | AAV2 variant | 4082 |
| AAV-PAEC7 | 390 | AAV2 variant | 2331 | AAV variant | 3207 | AAV2 variant | 4083 |
| AAV-PAEC8 | 391 | AAV2 variant | 2332 | AAV variant | 3208 | AAV2 variant | 4084 |
| AAV-PAEC8 | 392 | AAV2 variant | 2333 | AAV variant | 3209 | AAV2 variant | 4085 |
| AAVpi.1 | 393 | AAV2 variant | 2334 | AAV variant | 3210 | AAV2 variant | 4086 |
| AAVpi.1 | 394 | AAV2 variant | 2335 | AAV variant | 3211 | AAV2 variant | 4087 |
| AAVpi.2 | 395 | AAV2 variant | 2336 | AAV variant | 3212 | AAV2 variant | 4088 |
| AAVpi.2 | 396 | AAV2 variant | 2337 | AAV variant | 3213 | AAV2 variant | 4089 |
| AAVpi.3 | 397 | AAV2 variant | 2338 | AAV variant | 3214 | AAV2 variant | 4090 |
| AAVpi.3 | 398 | AAV2 variant | 2339 | AAV variant | 3215 | AAV2 variant | 4091 |
| AAVrh.10 | 399 | AAV2 variant | 2340 | AAV variant | 3216 | AAV2 variant | 4092 |
| AAVrh.10 | 400 | AAV2 variant | 2341 | AAV variant | 3217 | AAV2 variant | 4093 |
| AAV44.2 | 401 | AAV2 variant | 2342 | AAV variant | 3218 | AAV2 variant | 4094 |
| AAVrh.10 | 402 | AAV2 variant | 2343 | AAV variant | 3219 | AAV2 variant | 4095 |
| (AAV44.2) | | | | | | | |
| AAV42.1B | 403 | AAV2 variant | 2344 | AAV variant | 3220 | AAV2 variant | 4096 |
| AAVrh.12 | 404 | AAV2 variant | 2345 | AAV variant | 3221 | AAV2/3 variant | 4097 |
| (AAV42.1b) | | | | | | | |
| AAVrh.13 | 405 | AAV2 variant | 2346 | AAV variant | 3222 | AAV2/3 variant | 4098 |
| AAVrh.13 | 406 | AAV2 variant | 2347 | AAV variant | 3223 | AAV2/3 variant | 4099 |
| AAVrh.13 | 407 | AAV2 variant | 2348 | AAV variant | 3224 | AAV2/3 variant | 4100 |
| AAVrh.13R | 408 | AAV2 variant | 2349 | AAV variant | 3225 | AAV2/3 variant | 4101 |
| AAV42.3A | 409 | AAV2 variant | 2350 | AAV variant | 3226 | AAV2/3 variant | 4102 |
| AAVrh.14 | 410 | AAV2 variant | 2351 | AAV variant | 3227 | AAV2/3 variant | 4103 |
| (AAV42.3a) | | | | | | | |
| AAV42.5A | 411 | AAV2 variant | 2352 | AAV variant | 3228 | AAV2/3 variant | 4104 |
| AAVrh.17 | 412 | AAV2 variant | 2353 | AAV variant | 3229 | AAV2/3 variant | 4105 |
| (AAV42.5a) | | | | | | | |
| AAV42.5B | 413 | AAV2 variant | 2354 | AAV variant | 3230 | AAV2/3 variant | 4106 |
| AAVrh.18 | 414 | AAV2 variant | 2355 | AAV variant | 3231 | AAV2/3 variant | 4107 |
| (AAV42.5b) | | | | | | | |
| AAV42.6B | 415 | AAV2 variant | 2356 | AAV variant | 3232 | AAV2/3 variant | 4108 |
| AAVrh.19 | 416 | AAV2 variant | 2357 | AAV variant | 3233 | AAV2/3 variant | 4109 |
| (AAV42.6b) | | | | | | | |
| AAVrh.2 | 417 | AAV2 variant | 2358 | AAV variant | 3234 | AAV2/3 variant | 4110 |
| AAVrh.2 | 418 | AAV2 variant | 2359 | AAV variant | 3235 | AAV2/3 variant | 4111 |
| AAVrh.20 | 419 | AAV2 variant | 2360 | AAV variant | 3236 | AAV2/3 variant | 4112 |
| AAV42.10 | 420 | AAV2 variant | 2361 | AAV variant | 3237 | AAV2/3 variant | 4113 |
| AAVrh.21 | 421 | AAV2 variant | 2362 | AAV variant | 3238 | AAV2/3 variant | 4114 |
| (AAV42.10) | | | | | | | |
| AAV42.11 | 422 | AAV2 variant | 2363 | AAV variant | 3239 | AAV2/3 variant | 4115 |
| AAVrh.22 | 423 | AAV2 variant | 2364 | AAV variant | 3240 | AAV2/3 variant | 4116 |
| (AAV42.11) | | | | | | | |
| AAV42.12 | 424 | AAV2 variant | 2365 | AAV variant | 3241 | AAV2/3 variant | 4117 |
| AAVrh.23 | 425 | AAV2 variant | 2366 | AAV variant | 3242 | AAV2/3 variant | 4118 |
| (AAV42.12) | | | | | | | |
| AAV42.13 | 426 | AAV2 variant | 2367 | AAV variant | 3243 | AAV2/3 variant | 4119 |
| AAVrh.24 | 427 | AAV2 variant | 2368 | AAV variant | 3244 | AAV2/3 variant | 4120 |
| (AAV42.13) | | | | | | | |
| AAV42.15 | 428 | AAV2 variant | 2369 | AAV variant | 3245 | AAV2/3 variant | 4121 |
| AAVrh.25 | 429 | AAV2 variant | 2370 | AAV variant | 3246 | AAV2/3 variant | 4122 |
| (AAV42.15) | | | | | | | |
| AAVrh.2R | 430 | AAV2 variant | 2371 | AAV variant | 3247 | AAV2/3 variant | 4123 |
| AAVrh.31 | 431 | AAV2 variant | 2372 | AAV variant | 3248 | AAV2/3 variant | 4124 |
| (AAV223.1) | | | | | | | |
| AAVC1 | 432 | AAV2 variant | 2373 | AAV variant | 3249 | AAV2/3 variant | 4125 |
| AAVrh.32 | 433 | AAV2 variant | 2374 | AAV variant | 3250 | AAV2/3 variant | 4126 |
| (AAVC1) | | | | | | | |
| AAVrh.32/33 | 434 | AAV2 variant | 2375 | AAV variant | 3251 | AAV2/3 variant | 4127 |
| AAVrh.33 | 435 | AAV2 variant | 2376 | AAV variant | 3252 | AAV2/3 variant | 4128 |
| (AAVC3) | | | | | | | |
| AAVC5 | 436 | AAV2 variant | 2377 | AAV variant | 3253 | AAV2/3 variant | 4129 |
| AAVrh.34 | 437 | AAV2 variant | 2378 | AAV variant | 3254 | AAV2/3 variant | 4130 |
| (AAVC5) | | | | | | | |
| AAVF1 | 438 | AAV2 variant | 2379 | AAV variant | 3255 | AAV2/3 variant | 4131 |
| AAVrh.35 | 439 | AAV2 variant | 2380 | AAV variant | 3256 | AAV2/3 variant | 4132 |
| (AAVF1) | | | | | | | |
| AAVF3 | 440 | AAV2 variant | 2381 | AAV variant | 3257 | AAV2/3 variant | 4133 |
| AAVrh.36 | 441 | AAV2 variant | 2382 | AAV variant | 3258 | AAV2/3 variant | 4134 |
| (AAVF3) | | | | | | | |
| AAVrh.37 | 442 | AAV2 variant | 2383 | AAV variant | 3259 | AAV2/3 variant | 4135 |
| AAVrh.37 | 443 | AAV2 variant | 2384 | AAV variant | 3260 | AAV2/3 variant | 4136 |
| AAVrh.37 | 444 | AAV2 variant | 2385 | AAV variant | 3261 | AAV2/3 variant | 4137 |
| AAVrh.37R2 | 445 | AAV2 variant | 2386 | AAV variant | 3262 | AAV2/3 variant | 4138 |
| AAVrh.38 | 446 | AAV2 variant | 2387 | AAV variant | 3263 | AAV2/3 variant | 4139 |
| (AAVLG-4) | | | | | | | |
| AAVrh.38 | 447 | AAV2 variant | 2388 | AAV variant | 3264 | AAV2/3 variant | 4140 |
| (AAVLG-4) | | | | | | | |
| AAVrh.39 | 448 | AAV2 variant | 2389 | AAV variant | 3265 | AAV2/3 variant | 4141 |
| AAVrh.39 | 449 | AAV2 variant | 2390 | AAV variant | 3266 | AAV2/3 variant | 4142 |
| AAVrh.40 | 450 | AAV2 variant | 2391 | AAV variant | 3267 | AAV2/3 variant | 4143 |
| AAVrh.40 | 451 | AAV2 variant | 2392 | AAV variant | 3268 | AAV2/3 variant | 4144 |
| (AAVLG-10) | | | | | | | |
| AAVrh.43 | 452 | AAV2 variant | 2393 | AAV variant | 3269 | AAV2/3 variant | 4145 |
| (AAVN721-8) | | | | | | | |
| AAVrh.43 | 453 | AAV2 variant | 2394 | AAV variant | 3270 | AAV2/3 variant | 4146 |
| (AAVN721-8) | | | | | | | |
| AAVrh.44 | 454 | AAV2 variant | 2395 | AAV variant | 3271 | AAV2/3 variant | 4147 |
| AAVrh.44 | 455 | AAV2 variant | 2396 | AAV variant | 3272 | AAV2/3 variant | 4148 |
| AAVrh.45 | 456 | AAV2 variant | 2397 | AAV variant | 3273 | AAV2/3 variant | 4149 |
| AAVrh.45 | 457 | AAV2 variant | 2398 | AAV variant | 3274 | AAV2/3 variant | 4150 |
| AAVrh.46 | 458 | AAV2 variant | 2399 | AAV variant | 3275 | AAV2/3 variant | 4151 |
| AAVrh.46 | 459 | AAV2 variant | 2400 | AAV variant | 3276 | AAV2/3 variant | 4152 |
| AAVrh.47 | 460 | AAV2 variant | 2401 | AAV variant | 3277 | AAV2/3 variant | 4153 |
| AAVrh.47 | 461 | AAV2 variant | 2402 | AAV variant | 3278 | AAV2/3 variant | 4154 |
| AAVrh.48 | 462 | AAV2 variant | 2403 | AAV variant | 3279 | AAV2/3 variant | 4155 |
| AAVrh.48.1 | 463 | AAV2 variant | 2404 | AAV variant | 3280 | AAV2/3 variant | 4156 |
| AAVrh.48.1.2 | 464 | AAV2 variant | 2405 | AAV variant | 3281 | AAV2/3 variant | 4157 |
| AAVrh.48.2 | 465 | AAV2 variant | 2406 | AAV variant | 3282 | AAV2/3 variant | 4158 |
| AAVrh.48 | 466 | AAV2 variant | 2407 | AAV variant | 3283 | AAV2/3 variant | 4159 |
| (AAV1-7) | | | | | | | |
| AAVrh.49 | 467 | AAV2 variant | 2408 | AAV variant | 3284 | AAV2/3 variant | 4160 |
| (AAV1-8) | | | | | | | |
| AAVrh.49 | 468 | AAV2 variant | 2409 | AAV variant | 3285 | AAV2/3 variant | 4161 |
| (AAV1-8) | | | | | | | |
| AAVrh.50 | 469 | AAV2 variant | 2410 | AAV variant | 3286 | AAV2/3 variant | 4162 |
| (AAV2-4) | | | | | | | |
| AAVrh.50 | 470 | AAV2 variant | 2411 | AAV variant | 3287 | AAV2/3 variant | 4163 |
| (AAV2-4) | | | | | | | |
| AAVrh.51 | 471 | AAV2 variant | 2412 | AAV variant | 3288 | AAV2/3 variant | 4164 |
| (AAV2-5) | | | | | | | |
| AAVrh.51 | 472 | AAV2 variant | 2413 | AAV variant | 3289 | AAV2/3 variant | 4165 |
| (AAV2-5) | | | | | | | |
| AAVrh.52 | 473 | AAV2 variant | 2414 | AAV variant | 3290 | AAV2/3 variant | 4166 |
| (AAV3-9) | | | | | | | |
| AAVrh.52 | 474 | AAV2 variant | 2415 | AAV variant | 3291 | AAV2/3 variant | 4167 |
| (AAV3-9) | | | | | | | |
| AAVrh.53 | 475 | AAV2 variant | 2416 | AAV variant | 3292 | AAV2/3 variant | 4168 |
| AAVrh.53 | 476 | AAV2 variant | 2417 | AAV variant | 3293 | AAV2/3 variant | 4169 |
| (AAV3-11) | | | | | | | |
| AAVrh.53 | 477 | AAV2 variant | 2418 | AAV variant | 3294 | AAV2/3 variant | 4170 |
| AAV3-11) | | | | | | | |
| AAVrh.54 | 478 | AAV2 variant | 2419 | AAV variant | 3295 | AAV2/3 variant | 4171 |
| AAVrh.54 | 479 | AAV2 variant | 2420 | AAV variant | 3296 | AAV2/3 variant | 4172 |
| AAVrh.55 | 480 | AAV2 variant | 2421 | AAV variant | 3297 | AAV2/3 variant | 4173 |
| AAVrh.55 | 481 | AAV2 variant | 2422 | AAV variant | 3298 | AAV2/3 variant | 4174 |
| (AAV4-19) | | | | | | | |
| AAVrh.56 | 482 | AAV2 variant | 2423 | AAV variant | 3299 | AAV2/3 variant | 4175 |
| AAVrh.56 | 483 | AAV2 variant | 2424 | AAV variant | 3300 | AAV2/3 variant | 4176 |
| AAVrh.57 | 484 | AAV2 variant | 2425 | AAV variant | 3301 | AAV2/3 variant | 4177 |
| AAVrh.57 | 485 | AAV2 variant | 2426 | AAV variant | 3302 | AAV2/3 variant | 4178 |
| AAVrh.58 | 486 | AAV2 variant | 2427 | AAV variant | 3303 | AAV2/3 variant | 4179 |
| AAVrh.58 | 487 | AAV2 variant | 2428 | AAV variant | 3304 | AAV2/3 variant | 4180 |
| AAVrh.58 | 488 | AAV2 variant | 2429 | AAV variant | 3305 | AAV2/3 variant | 4181 |
| AAVrh.59 | 489 | AAV2 variant | 2430 | AAV variant | 3306 | AAV2/3 variant | 4182 |
| AAVrh.59 | 490 | AAV2 variant | 2431 | AAV variant | 3307 | AAV2/3 variant | 4183 |
| AAVrh.60 | 491 | AAV2 variant | 2432 | AAV variant | 3308 | AAV2/3 variant | 4184 |
| AAVrh.60 | 492 | AAV2 variant | 2433 | AAV variant | 3309 | AAV2/3 variant | 4185 |
| AAVrh.61 | 493 | AAV2 variant | 2434 | AAV variant | 3310 | AAV2/3 variant | 4186 |
| AAVrh.61 | 494 | AAV2 variant | 2435 | AAV variant | 3311 | AAV2/3 variant | 4187 |
| (AAV2-3) | | | | | | | |
| AAVrh.62 | 495 | AAV2 variant | 2436 | AAV variant | 3312 | AAV2/3 variant | 4188 |
| (AAV2-15) | | | | | | | |
| AAVrh.62 | 496 | AAV2 variant | 2437 | AAV variant | 3313 | AAV2/3 variant | 4189 |
| (AAV2-15) | | | | | | | |
| AAVrh.64 | 497 | AAV2 variant | 2438 | AAV variant | 3314 | AAV2/3 variant | 4190 |
| AAVrh.64 | 498 | AAV2 variant | 2439 | AAV variant | 3315 | AAV2/3 variant | 4191 |
| AAVrh.64 | 499 | AAV2 variant | 2440 | AAV variant | 3316 | AAV2/3 variant | 4192 |
| AAVRh.64R1 | 500 | AAV2 variant | 2441 | AAV variant | 3317 | AAV2/3 variant | 4193 |
| AAVRh.64R2 | 501 | AAV2 variant | 2442 | AAV variant | 3318 | AAV2/3 variant | 4194 |
| AAVrh.65 | 502 | AAV2 variant | 2443 | AAV variant | 3319 | AAV2/3 variant | 4195 |
| AAVrh.65 | 503 | AAV2 variant | 2444 | AAV variant | 3320 | AAV2/3 variant | 4196 |
| AAVrh.67 | 504 | AAV2 variant | 2445 | AAV variant | 3321 | AAV2/3 variant | 4197 |
| AAVrh.67 | 505 | AAV2 variant | 2446 | AAV variant | 3322 | AAV2/3 variant | 4198 |
| AAVrh.67 | 506 | AAV2 variant | 2447 | AAV variant | 3323 | AAV2/3 variant | 4199 |
| AAVrh.68 | 507 | AAV2 variant | 2448 | AAV variant | 3324 | AAV2/3 variant | 4200 |
| AAVrh.68 | 508 | AAV2 variant | 2449 | AAV variant | 3325 | AAV2/3 variant | 4201 |
| AAVrh.69 | 509 | AAV2 variant | 2450 | AAV variant | 3326 | AAV2/3 variant | 4202 |
| AAVrh.69 | 510 | AAV2 variant | 2451 | AAV variant | 3327 | AAV2/3 variant | 4203 |
| AAVrh.70 | 511 | AAV2 variant | 2452 | AAV variant | 3328 | AAV2/3 variant | 4204 |
| AAVrh.70 | 512 | AAV2 variant | 2453 | AAV variant | 3329 | AAV2/3 variant | 4205 |
| AAVrh.71 | 513 | AAV2 variant | 2454 | AAV variant | 3330 | AAV2/3 variant | 4206 |
| AAVrh.72 | 514 | AAV2 variant | 2455 | AAV variant | 3331 | AAV2/3 variant | 4207 |
| AAVrh.73 | 515 | AAV2 variant | 2456 | AAV variant | 3332 | AAV2/3 variant | 4208 |
| AAVrh.74 | 516 | AAV2 variant | 2457 | AAV variant | 3333 | AAV2/3 variant | 4209 |
| AAVrh.8 | 517 | AAV2 variant | 2458 | AAV variant | 3334 | AAV2/3 variant | 4210 |
| AAVrh.8 | 518 | AAV2 variant | 2459 | AAV variant | 3335 | AAV2/3 variant | 4211 |
| AAVrh.8R | 519 | AAV2 variant | 2460 | AAV variant | 3336 | AAV2/3 variant | 4212 |
| AAVrh.8R A586R | 520 | AAV2 variant | 2461 | AAV variant | 3337 | AAV2/3 variant | 4213 |
| mutant | | | | | | | |
| AAVrh.8R R533A | 521 | AAV2 variant | 2462 | AAV variant | 3338 | AAV2/3 variant | 4214 |
| mutant | | | | | | | |
| BAAV (bovine | 522 | AAV2 variant | 2463 | AAV variant | 3339 | AAV2/3 variant | 4215 |
| AAV) | | | | | | | |
| BAAV (bovine | 523 | AAV2 variant | 2464 | AAV variant | 3340 | AAV2/3 variant | 4216 |
| AAV) | | | | | | | |
| BAAV (bovine | 524 | AAV2 variant | 2465 | AAV variant | 3341 | AAV2/3 variant | 4217 |
| AAV) | | | | | | | |
| BAAV (bovine | 525 | AAV2 variant | 2466 | AAV variant | 3342 | AAV2/3 variant | 4218 |
| AAV) | | | | | | | |
| BAAV (bovine | 526 | AAV2 variant | 2467 | AAV variant | 3343 | AAV2/3 variant | 4219 |
| AAV) | | | | | | | |
| BAAV (bovine | 527 | AAV2 variant | 2468 | AAV variant | 3344 | AAV2/3 variant | 4220 |
| AAV) | | | | | | | |
| BAAV (bovine | 528 | AAV2 variant | 2469 | AAV variant | 3345 | AAV2/3 variant | 4221 |
| AAV) | | | | | | | |
| BAAV (bovine | 529 | AAV2 variant | 2470 | AAV variant | 3346 | AAV2/3 variant | 4222 |
| AAV) | | | | | | | |
| BAAV (bovine | 530 | AAV2 variant | 2471 | AAV variant | 3347 | AAV2/3 variant | 4223 |
| AAV) | | | | | | | |
| BAAV (bovine | 531 | AAV2 variant | 2472 | AAV variant | 3348 | AAV2/3 variant | 4224 |
| AAV) | | | | | | | |
| BAAV (bovine | 532 | AAV2 variant | 2473 | AAV variant | 3349 | AAV2/3 variant | 4225 |
| AAV) | | | | | | | |
| BAAV (bovine | 533 | AAV2 variant | 2474 | AAV variant | 3350 | AAV2/3 variant | 4226 |
| AAV) | | | | | | | |
| BAAV (bovine | 534 | AAV2 variant | 2475 | AAV variant | 3351 | AAV2/3 variant | 4227 |
| AAV) | | | | | | | |
| BNP61 AAV | 535 | AAV2 variant | 2476 | AAV variant | 3352 | AAV2/3 variant | 4228 |
| BNP61 AAV | 536 | AAV2 variant | 2477 | AAV variant | 3353 | AAV2/3 variant | 4229 |
| BNP62 AAV | 537 | AAV2 variant | 2478 | AAV variant | 3354 | AAV2/3 variant | 4230 |
| BNP63 AAV | 538 | AAV2 variant | 2479 | AAV variant | 3355 | AAV2/3 variant | 4231 |
| caprine AAV | 539 | AAV2 variant | 2480 | AAV variant | 3356 | AAV2/3 variant | 4232 |
| caprine AAV | 540 | AAV2 variant | 2481 | AAV variant | 3357 | AAV2/3 variant | 4233 |
| true type AAV | 541 | AAV2 variant | 2482 | AAV variant | 3358 | AAV2/3 variant | 4234 |
| (ttAAV) | | | | | | | |
| AAAV (Avian | 542 | AAV2 variant | 2483 | AAV variant | 3359 | AAV2/3 variant | 4235 |
| AAV) | | | | | | | |
| AAAV (Avian | 543 | AAV2 variant | 2484 | AAV variant | 3360 | AAV2/3 variant | 4236 |
| AAV) | | | | | | | |
| AAAV (Avian | 544 | AAV2 variant | 2485 | AAV variant | 3361 | AAV2/3 variant | 4237 |
| AAV) | | | | | | | |
| AAAV (Avian | 545 | AAV2 variant | 2486 | AAV variant | 3362 | AAV2/3 variant | 4238 |
| AAV) | | | | | | | |
| AAAV (Avian | 546 | AAV2 variant | 2487 | AAV variant | 3363 | AAV2/3 variant | 4239 |
| AAV) | | | | | | | |
| AAAV (Avian | 547 | AAV2 variant | 2488 | AAV variant | 3364 | AAV2/3 variant | 4240 |
| AAV) | | | | | | | |
| AAAV (Avian | 548 | AAV2 variant | 2489 | AAV variant | 3365 | AAV2/3 variant | 4241 |
| AAV) | | | | | | | |
| AAAV (Avian | 549 | AAV2 variant | 2490 | AAV variant | 3366 | AAV2/3 variant | 4242 |
| AAV) | | | | | | | |
| AAAV (Avian | 550 | AAV2 variant | 2491 | AAV variant | 3367 | AAV2/3 variant | 4243 |
| AAV) | | | | | | | |
| AAAV (Avian | 551 | AAV2 variant | 2492 | AAV variant | 3368 | AAV2/3 variant | 4244 |
| AAV) | | | | | | | |
| AAAV (Avian | 552 | AAV2 variant | 2493 | AAV variant | 3369 | AAV2/3 variant | 4245 |
| AAV) | | | | | | | |
| AAAV (Avian | 553 | AAV2 variant | 2494 | AAV variant | 3370 | AAV2/3 variant | 4246 |
| AAV) | | | | | | | |
| AAAV (Avian | 554 | AAV2 variant | 2495 | AAV variant | 3371 | AAV2/3 variant | 4247 |
| AAV) | | | | | | | |
| AAAV (Avian | 555 | AAV2 variant | 2496 | AAV variant | 3372 | AAV2/3 variant | 4248 |
| AAV) | | | | | | | |
| AAAV (Avian | 556 | AAV2 variant | 2497 | AAV variant | 3373 | AAV2/3 variant | 4249 |
| AAV) | | | | | | | |
| AAV Shuffle 100- | 557 | AAV2 variant | 2498 | AAV variant | 3374 | AAV2/3 variant | 4250 |
| 1 | | | | | | | |
| AAV Shuffle 100- | 558 | AAV2 variant | 2499 | AAV variant | 3375 | AAV2/3 variant | 4251 |
| 1 | | | | | | | |
| AAV Shuffle 100- | 559 | AAV2 variant | 2500 | AAV variant | 3376 | AAV2/3 variant | 4252 |
| 2 | | | | | | | |
| AAV Shuffle 100- | 560 | AAV2 variant | 2501 | AAV variant | 3377 | AAV2/3 variant | 4253 |
| 2 | | | | | | | |
| AAV Shuffle 100- | 561 | AAV2 variant | 2502 | AAV variant | 3378 | AAV2/3 variant | 4254 |
| 3 | | | | | | | |
| AAV Shuffle 100- | 562 | AAV2 variant | 2503 | AAV variant | 3379 | AAV2/3 variant | 4255 |
| 3 | | | | | | | |
| AAV Shuffle 100- | 563 | AAV2 variant | 2504 | AAV variant | 3380 | AAV2/3 variant | 4256 |
| 7 | | | | | | | |
| AAV Shuffle 100- | 564 | AAV2 variant | 2505 | AAV variant | 3381 | AAV2/3 variant | 4257 |
| 7 | | | | | | | |
| AAV Shuffle 10-2 | 565 | AAV2 variant | 2506 | AAV variant | 3382 | AAV2/3 variant | 4258 |
| AAV Shuffle 10-2 | 566 | AAV2 variant | 2507 | AAV variant | 3383 | AAV2/3 variant | 4259 |
| AAV Shuffle 10-6 | 567 | AAV2 variant | 2508 | AAV variant | 3384 | AAV2/3 variant | 4260 |
| AAV Shuffle 10-6 | 568 | AAV2 variant | 2509 | AAV variant | 3385 | AAV2/3 variant | 4261 |
| AAV Shuffle 10-8 | 569 | AAV2 variant | 2510 | AAV variant | 3386 | AAV2/3 variant | 4262 |
| AAV Shuffle 10-8 | 570 | AAV2 variant | 2511 | AAV variant | 3387 | AAV2/3 variant | 4263 |
| AAV SM 100-10 | 571 | AAV2 variant | 2512 | AAV variant | 3388 | AAV2/3 variant | 4264 |
| AAV SM 100-10 | 572 | AAV2 variant | 2513 | AAV variant | 3389 | AAV2/3 variant | 4265 |
| AAV SM 100-3 | 573 | AAV2 variant | 2514 | AAV variant | 3390 | AAV2/3 variant | 4266 |
| AAV SM 100-3 | 574 | AAV2 variant | 2515 | AAV variant | 3391 | AAV2/3 variant | 4267 |
| AAV SM 10-1 | 575 | AAV2 variant | 2516 | AAV variant | 3392 | AAV2/3 variant | 4268 |
| AAV SM 10-1 | 576 | AAV2 variant | 2517 | AAV variant | 3393 | AAV2/3 variant | 4269 |
| AAV SM 10-2 | 577 | AAV2 variant | 2518 | AAV variant | 3394 | AAV2/3 variant | 4270 |
| AAV SM 10-2 | 578 | AAV2 variant | 2519 | AAV variant | 3395 | AAV2 variant | 4271 |
| AAV SM 10-8 | 579 | AAV2 variant | 2520 | AAV variant | 3396 | AAV2 variant | 4272 |
| AAV SM 10-8 | 580 | AAV2 variant | 2521 | AAV variant | 3397 | AAV2 variant | 4273 |
| AAVF1/HSC1 | 581 | AAV2 variant | 2522 | AAV variant | 3398 | AAV2 variant | 4274 |
| AAVF2/HSC2 | 582 | AAV2 variant | 2523 | AAV variant | 3399 | AAV2 variant | 4275 |
| AAVF3/HSC3 | 583 | AAV2 variant | 2524 | AAV variant | 3400 | AAV2 variant | 4276 |
| AAVF4/HSC4 | 584 | AAV2 variant | 2525 | AAV variant | 3401 | AAV2 variant | 4277 |
| AAVF5/HSC5 | 585 | AAV2 variant | 2526 | AAV variant | 3402 | AAV2 variant | 4278 |
| AAVF6/HSC6 | 586 | AAV2 variant | 2527 | AAV variant | 3403 | AAV2 variant | 4279 |
| AAVF7/HSC7 | 587 | AAV2 variant | 2528 | AAV variant | 3404 | AAV2 variant | 4280 |
| AAVF8/HSC8 | 588 | AAV2 variant | 2529 | AAV variant | 3405 | AAV2 variant | 4281 |
| AAVF9/HSC9 | 589 | AAV2 variant | 2530 | AAV variant | 3406 | AAV2 variant | 4282 |
| AAVF11/HSC11 | 590 | AAV2 variant | 2531 | AAV variant | 3407 | AAV2 variant | 4283 |
| AAVF12/HSC12 | 591 | AAV2 variant | 2532 | AAV variant | 3408 | AAV2 variant | 4284 |
| AAVF13/HSC13 | 592 | AAV2 variant | 2533 | AAV variant | 3409 | AAV2 variant | 4285 |
| AAVF14/HSC14 | 593 | AAV2 variant | 2534 | AAV variant | 3410 | AAV2 variant | 4286 |
| AAVF15/HSC15 | 594 | AAV2 variant | 2535 | AAV variant | 3411 | AAV2 variant | 4287 |
| AAVF16/HSC16 | 595 | AAV2 variant | 2536 | AAV variant | 3412 | AAV2 variant | 4288 |
| AAVF17/HSC17 | 596 | AAV2 variant | 2537 | AAV variant | 3413 | AAV2 variant | 4289 |
| AAVF1/HSC1 | 597 | AAV2 variant | 2538 | AAV variant | 3414 | AAV2 variant | 4290 |
| AAVF2/HSC2 | 598 | AAV2 variant | 2539 | AAV variant | 3415 | AAV2 variant | 4291 |
| AAVF3/HSC3 | 599 | AAV2 variant | 2540 | AAV variant | 3416 | AAV2 variant | 4292 |
| AAVF4/HSC4 | 600 | AAV2 variant | 2541 | AAV variant | 3417 | AAV2 variant | 4293 |
| AAVF5/HSC5 | 601 | AAV2 variant | 2542 | AAV variant | 3418 | AAV2 variant | 4294 |
| AAVF6/HSC6 | 602 | AAV2 variant | 2543 | AAV variant | 3419 | AAV2 variant | 4295 |
| AAVF7/HSC7 | 603 | AAV2 variant | 2544 | AAV variant | 3420 | AAV2 variant | 4296 |
| AAVF8/HSC8 | 604 | AAV2 variant | 2545 | AAV variant | 3421 | AAV2 variant | 4297 |
| AAVF9/HSC9 | 605 | AAV2 variant | 2546 | AAV variant | 3422 | AAV2 variant | 4298 |
| AAVF11/HSC11 | 606 | AAV2 variant | 2547 | AAV variant | 3423 | AAV2 variant | 4299 |
| AAVF12/HSC12 | 607 | AAV2 variant | 2548 | AAV variant | 3424 | AAV2 variant | 4300 |
| AAVF13/HSC13 | 608 | AAV2 variant | 2549 | AAV variant | 3425 | AAV2 variant | 4301 |
| AAVF14/HSC14 | 609 | AAV2 variant | 2550 | AAV variant | 3426 | AAV2 variant | 4302 |
| AAVF15/HSC15 | 610 | AAV2 variant | 2551 | AAV variant | 3427 | AAV2 variant | 4303 |
| AAVF16/HSC16 | 611 | AAV2 variant | 2552 | AAV variant | 3428 | AAV2 variant | 4304 |
| AAVF17/HSC17 | 612 | AAV2 variant | 2553 | AAV variant | 3429 | AAV2 variant | 4305 |
| AAV CBr-E1 | 613 | AAV2 variant | 2554 | AAV variant | 3430 | AAV2 variant | 4306 |
| AAV CBr-E2 | 614 | AAV2 variant | 2555 | AAV variant | 3431 | AAV2 variant | 4307 |
| AAV CBr-E3 | 615 | AAV2 variant | 2556 | AAV variant | 3432 | AAV2 variant | 4308 |
| AAV CBr-E4 | 616 | AAV2 variant | 2557 | AAV variant | 3433 | AAV2 variant | 4309 |
| AAV CBr-E5 | 617 | AAV2 variant | 2558 | AAV variant | 3434 | AAV2 variant | 4310 |
| AAV CBr-e5 | 618 | AAV2 variant | 2559 | AAV variant | 3435 | AAV2 variant | 4311 |
| AAV CBr-E6 | 619 | AAV2 variant | 2560 | AAV variant | 3436 | AAV2 variant | 4312 |
| AAV CBr-E7 | 620 | AAV2 variant | 2561 | AAV variant | 3437 | AAV2 variant | 4313 |
| AAV CBr-E8 | 621 | AAV2 variant | 2562 | AAV variant | 3438 | AAV2 variant | 4314 |
| AAV CLv-D1 | 622 | AAV2 variant | 2563 | AAV variant | 3439 | AAV2 variant | 4315 |
| AAV CLv-D2 | 623 | AAV2 variant | 2564 | AAV variant | 3440 | AAV2 variant | 4316 |
| AAV CLv-D3 | 624 | AAV2 variant | 2565 | AAV variant | 3441 | AAV2 variant | 4317 |
| AAV CLv-D4 | 625 | AAV2 variant | 2566 | AAV variant | 3442 | AAV2 variant | 4318 |
| AAV CLv-D5 | 626 | AAV2 variant | 2567 | AAV variant | 3443 | AAV2 variant | 4319 |
| AAV CLv-D6 | 627 | AAV2 variant | 2568 | AAV variant | 3444 | AAV2 variant | 4320 |
| AAV CLv-D7 | 628 | AAV2 variant | 2569 | AAV variant | 3445 | AAV2 variant | 4321 |
| AAV CLv-D8 | 629 | AAV2 variant | 2570 | AAV variant | 3446 | AAV2 variant | 4322 |
| AAV CLv-E1 | 630 | AAV2 variant | 2571 | AAV variant | 3447 | AAV2 variant | 4323 |
| AAV CLv-R1 | 631 | AAV2 variant | 2572 | AAV variant | 3448 | AAV2 variant | 4324 |
| AAV CLv-R2 | 632 | AAV2 variant | 2573 | AAV variant | 3449 | AAV2 variant | 4325 |
| AAV CLv-R3 | 633 | AAV2 variant | 2574 | AAV variant | 3450 | AAV2 variant | 4326 |
| AAV CLv-R4 | 634 | AAV2 variant | 2575 | AAV variant | 3451 | AAV2 variant | 4327 |
| AAV CLv-R5 | 635 | AAV2 variant | 2576 | AAV variant | 3452 | AAV2 variant | 4328 |
| AAV CLv-R6 | 636 | AAV2 variant | 2577 | AAV variant | 3453 | AAV2 variant | 4329 |
| AAV CLv-R7 | 637 | AAV2 variant | 2578 | AAV variant | 3454 | AAV2 variant | 4330 |
| AAV CLv-R8 | 638 | AAV2 variant | 2579 | AAV variant | 3455 | AAV2 variant | 4331 |
| AAV CLv-R9 | 639 | AAV2 variant | 2580 | AAV variant | 3456 | AAV2 variant | 4332 |
| AAV CLg-F1 | 640 | AAV2 variant | 2581 | AAV variant | 3457 | AAV2 variant | 4333 |
| AAV CLg-F2 | 641 | AAV2 variant | 2582 | AAV variant | 3458 | AAV2 variant | 4334 |
| AAV CLg-F3 | 642 | AAV2 variant | 2583 | AAV variant | 3459 | AAV2 variant | 4335 |
| AAV CLg-F4 | 643 | AAV2 variant | 2584 | AAV variant | 3460 | AAV2 variant | 4336 |
| AAV CLg-F5 | 644 | AAV2 variant | 2585 | AAV variant | 3461 | AAV2 variant | 4337 |
| AAV CLg-F6 | 645 | AAV2 variant | 2586 | AAV variant | 3462 | AAV2 variant | 4338 |
| AAV CLg-F7 | 646 | AAV2 variant | 2587 | AAV variant | 3463 | AAV2 variant | 4339 |
| AAV CLg-F8 | 647 | AAV2 variant | 2588 | AAV variant | 3464 | AAV2 variant | 4340 |
| AAV CSp-1 | 648 | AAV2 variant | 2589 | AAV variant | 3465 | AAV2 variant | 4341 |
| AAV CSp-10 | 649 | AAV2 variant | 2590 | AAV variant | 3466 | AAV2 variant | 4342 |
| AAV CSp-11 | 650 | AAV2 variant | 2591 | AAV variant | 3467 | AAV2 variant | 4343 |
| AAV CSp-2 | 651 | AAV2 variant | 2592 | AAV variant | 3468 | AAV2 variant | 4344 |
| AAV CSp-3 | 652 | AAV2 variant | 2593 | AAV variant | 3469 | AAV2 variant | 4345 |
| AAV CSp-4 | 653 | AAV2 variant | 2594 | AAV variant | 3470 | AAV2 variant | 4346 |
| AAV CSp-6 | 654 | AAV2 variant | 2595 | AAV variant | 3471 | AAV2 variant | 4347 |
| AAV CSp-7 | 655 | AAV2 variant | 2596 | AAV variant | 3472 | AAV2 variant | 4348 |
| AAV CSp-8 | 656 | AAV2 variant | 2597 | AAV variant | 3473 | AAV2 variant | 4349 |
| AAV CSp-9 | 657 | AAV2 variant | 2598 | AAV variant | 3474 | AAV2 variant | 4350 |
| AAV CHt-2 | 658 | AAV2 variant | 2599 | AAV variant | 3475 | AAV2 variant | 4351 |
| AAV CHt-3 | 659 | AAV2 variant | 2600 | AAV variant | 3476 | AAV2 variant | 4352 |
| AAV CKd-1 | 660 | AAV2 variant | 2601 | AAV variant | 3477 | AAV2 variant | 4353 |
| AAV CKd-10 | 661 | AAV2 variant | 2602 | AAV variant | 3478 | AAV2 variant | 4354 |
| AAV CKd-2 | 662 | AAV2 variant | 2603 | AAV variant | 3479 | AAV2 variant | 4355 |
| AAV CKd-3 | 663 | AAV2 variant | 2604 | AAV variant | 3480 | AAV2 variant | 4356 |
| AAV CKd-4 | 664 | AAV2 variant | 2605 | AAV variant | 3481 | AAV2 variant | 4357 |
| AAV CKd-6 | 665 | AAV2 variant | 2606 | AAV variant | 3482 | AAV2 variant | 4358 |
| AAV CKd-7 | 666 | AAV2 variant | 2607 | AAV variant | 3483 | AAV2 variant | 4359 |
| AAV CKd-8 | 667 | AAV2 variant | 2608 | AAV variant | 3484 | AAV2/3 variant | 4360 |
| AAV CLv-1 | 668 | AAV2 variant | 2609 | AAV variant | 3485 | AAV2/3 variant | 4361 |
| AAV CLv-12 | 669 | AAV2 variant | 2610 | AAV variant | 3486 | AAV2/3 variant | 4362 |
| AAV CLv-13 | 670 | AAV2 variant | 2611 | AAV variant | 3487 | AAV2/3 variant | 4363 |
| AAV CLv-2 | 671 | AAV2 variant | 2612 | AAV variant | 3488 | AAV2/3 variant | 4364 |
| AAV CLv-3 | 672 | AAV2 variant | 2613 | AAV variant | 3489 | AAV2/3 variant | 4365 |
| AAV CLv-4 | 673 | AAV2 variant | 2614 | AAV variant | 3490 | AAV2/3 variant | 4366 |
| AAV CLv-6 | 674 | AAV2 variant | 2615 | AAV variant | 3491 | AAV2/3 variant | 4367 |
| AAV CLv-8 | 675 | AAV2 variant | 2616 | AAV variant | 3492 | AAV2/3 variant | 4368 |
| AAV CKd-B1 | 676 | AAV2 variant | 2617 | AAV variant | 3493 | AAV2/3 variant | 4369 |
| AAV CKd-B2 | 677 | AAV2 variant | 2618 | AAV variant | 3494 | AAV2/3 variant | 4370 |
| AAV CKd-B3 | 678 | AAV2 variant | 2619 | AAV variant | 3495 | AAV2/3 variant | 4371 |
| AAV CKd-B4 | 679 | AAV2 variant | 2620 | AAV variant | 3496 | AAV2/3 variant | 4372 |
| AAV CKd-B5 | 680 | AAV2 variant | 2621 | AAV variant | 3497 | AAV2/3 variant | 4373 |
| AAV CKd-B6 | 681 | AAV2 variant | 2622 | AAV variant | 3498 | AAV2/3 variant | 4374 |
| AAV CKd-B7 | 682 | AAV2 variant | 2623 | AAV variant | 3499 | AAV2/3 variant | 4375 |
| AAV CKd-B8 | 683 | AAV2 variant | 2624 | AAV variant | 3500 | AAV2/3 variant | 4376 |
| AAV CKd-H1 | 684 | AAV2 variant | 2625 | AAV variant | 3501 | AAV2/3 variant | 4377 |
| AAV CKd-H2 | 685 | AAV2 variant | 2626 | AAV variant | 3502 | AAV2/3 variant | 4378 |
| AAV CKd-H3 | 686 | AAV2 variant | 2627 | AAV variant | 3503 | AAV2/3 variant | 4379 |
| AAV CKd-H4 | 687 | AAV2 variant | 2628 | AAV variant | 3504 | AAV2/3 variant | 4380 |
| AAV CKd-H5 | 688 | AAV2 variant | 2629 | AAV variant | 3505 | AAV2/3 variant | 4381 |
| AAV CKd-H6 | 689 | AAV2 variant | 2630 | AAV variant | 3506 | AAV2/3 variant | 4382 |
| AAV CHt-1 | 690 | AAV2 variant | 2631 | AAV variant | 3507 | AAV2/3 variant | 4383 |
| AAV CLv1-1 | 691 | AAV2 variant | 2632 | AAV variant | 3508 | AAV2/3 variant | 4384 |
| AAV CLv1-2 | 692 | AAV2 variant | 2633 | AAV variant | 3509 | AAV2/3 variant | 4385 |
| AAV CLv1-3 | 693 | AAV2 variant | 2634 | AAV variant | 3510 | AAV2/3 variant | 4386 |
| AAV CLv1-4 | 694 | AAV2 variant | 2635 | AAV variant | 3511 | AAV2/3 variant | 4387 |
| AAV Clv1-7 | 695 | AAV2 variant | 2636 | AAV variant | 3512 | AAV2/3 variant | 4388 |
| AAV Clv1-8 | 696 | AAV2 variant | 2637 | AAV variant | 3513 | AAV2/3 variant | 4389 |
| AAV Clv1-9 | 697 | AAV2 variant | 2638 | AAV variant | 3514 | AAV2/3 variant | 4390 |
| AAV Clv1-10 | 698 | AAV2 variant | 2639 | AAV variant | 3515 | AAV2/3 variant | 4391 |
| AAV.VR-355 | 699 | AAV2 variant | 2640 | AAV variant | 3516 | AAV2/3 variant | 4392 |
| AAV.hu.48R3 | 700 | AAV2 variant | 2641 | AAV variant | 3517 | AAV2/3 variant | 4393 |
| AAV CBr-E1 | 701 | AAV2 variant | 2642 | AAV variant | 3518 | AAV2/3 variant | 4394 |
| AAV CBr-E2 | 702 | AAV2 variant | 2643 | AAV variant | 3519 | AAV2/3 variant | 4395 |
| AAV CBr-E3 | 703 | AAV2 variant | 2644 | AAV variant | 3520 | AAV2/3 variant | 4396 |
| AAV CBr-E4 | 704 | AAV2 variant | 2645 | AAV variant | 3521 | AAV2/3 variant | 4397 |
| AAV CBr-E5 | 705 | AAV2 variant | 2646 | AAV variant | 3522 | AAV2/3 variant | 4398 |
| AAV CBr-e5 | 706 | AAV2 variant | 2647 | AAV variant | 3523 | AAV2/3 variant | 4399 |
| AAV CBr-E6 | 707 | AAV2 variant | 2648 | AAV variant | 3524 | AAV2/3 variant | 4400 |
| AAV CBr-E7 | 708 | AAV2 variant | 2649 | AAV variant | 3525 | AAV2/3 variant | 4401 |
| AAV CBr-E8 | 709 | AAV2 variant | 2650 | AAV variant | 3526 | AAV2/3 variant | 4402 |
| AAV CLv-D1 | 710 | AAV2 variant | 2651 | AAV variant | 3527 | AAV2/3 variant | 4403 |
| AAV CLv-D2 | 711 | AAV2 variant | 2652 | AAV variant | 3528 | AAV2/3 variant | 4404 |
| AAV CLv-D3 | 712 | AAV2 variant | 2653 | AAV variant | 3529 | AAV2/3 variant | 4405 |
| AAV CLv-D4 | 713 | AAV2 variant | 2654 | AAV variant | 3530 | AAV2/3 variant | 4406 |
| AAV CLv-D5 | 714 | AAV2 variant | 2655 | AAV variant | 3531 | AAV2/3 variant | 4407 |
| AAV CLv-D6 | 715 | AAV2 variant | 2656 | AAV variant | 3532 | AAV2/3 variant | 4408 |
| AAV CLv-D7 | 716 | AAV2 variant | 2657 | AAV variant | 3533 | AAV2/3 variant | 4409 |
| AAV CLv-D8 | 717 | AAV2 variant | 2658 | AAV variant | 3534 | AAV2/3 variant | 4410 |
| AAV CLv-E1 | 718 | AAV2 variant | 2659 | AAV variant | 3535 | AAV2/3 variant | 4411 |
| AAV CLv-R1 | 719 | AAV2 variant | 2660 | AAV variant | 3536 | AAV2/3 variant | 4412 |
| AAV CLv-R2 | 720 | AAV2 variant | 2661 | AAV variant | 3537 | AAV2/3 variant | 4413 |
| AAV CLv-R3 | 721 | AAV2 variant | 2662 | AAV variant | 3538 | AAV2/3 variant | 4414 |
| AAV CLv-R4 | 722 | AAV2 variant | 2663 | AAV variant | 3539 | AAV2/3 variant | 4415 |
| AAV CLv-R5 | 723 | AAV2 variant | 2664 | AAV variant | 3540 | AAV2/3 variant | 4416 |
| AAV CLv-R6 | 724 | AAV2 variant | 2665 | AAV variant | 3541 | AAV2/3 variant | 4417 |
| AAV CLv-R7 | 725 | AAV2 variant | 2666 | AAV variant | 3542 | AAV2/3 variant | 4418 |
| AAV CLv-R8 | 726 | AAV2 variant | 2667 | AAV variant | 3543 | AAV2/3 variant | 4419 |
| AAV CLv-R9 | 727 | AAV2 variant | 2668 | AAV variant | 3544 | AAV2/3 variant | 4420 |
| AAV CLg-F1 | 728 | AAV2 variant | 2669 | AAV variant | 3545 | AAV2/3 variant | 4421 |
| AAV CLg-F2 | 729 | AAV2 variant | 2670 | AAV variant | 3546 | AAV2/3 variant | 4422 |
| AAV CLg-F3 | 730 | AAV2 variant | 2671 | AAV variant | 3547 | AAV2/3 variant | 4423 |
| AAV CLg-F4 | 731 | AAV2 variant | 2672 | AAV variant | 3548 | AAV2/3 variant | 4424 |
| AAV CLg-F5 | 732 | AAV2 variant | 2673 | AAV variant | 3549 | AAV2/3 variant | 4425 |
| AAV CLg-F6 | 733 | AAV2 variant | 2674 | AAV variant | 3550 | AAV2/3 variant | 4426 |
| AAV CLg-F7 | 734 | AAV2 variant | 2675 | AAV variant | 3551 | AAV2/3 variant | 4427 |
| AAV CLg-F8 | 735 | AAV2 variant | 2676 | AAV variant | 3552 | AAV2/3 variant | 4428 |
| AAV CSp-1 | 736 | AAV2 variant | 2677 | AAV variant | 3553 | AAV2/3 variant | 4429 |
| AAV CSp-10 | 737 | AAV2 variant | 2678 | AAV variant | 3554 | AAV2/3 variant | 4430 |
| AAV CSp-11 | 738 | AAV2 variant | 2679 | AAV variant | 3555 | AAV2/3 variant | 4431 |
| AAV CSp-2 | 739 | AAV2 variant | 2680 | AAV variant | 3556 | AAV2/3 variant | 4432 |
| AAV CSp-3 | 740 | AAV2 variant | 2681 | AAV variant | 3557 | AAV2/3 variant | 4433 |
| AAV CSp-4 | 741 | AAV2 variant | 2682 | AAV variant | 3558 | AAV2/3 variant | 4434 |
| AAV CSp-6 | 742 | AAV2 variant | 2683 | AAV variant | 3559 | AAV2/3 variant | 4435 |
| AAV CSp-7 | 743 | AAV2 variant | 2684 | AAV variant | 3560 | AAV2/3 variant | 4436 |
| AAV CSp-8 | 744 | AAV2 variant | 2685 | AAV variant | 3561 | AAV2/3 variant | 4437 |
| AAV CSp-9 | 745 | AAV2 variant | 2686 | AAV variant | 3562 | AAV2/3 variant | 4438 |
| AAV CHt-2 | 746 | AAV2 variant | 2687 | AAV variant | 3563 | AAV2/3 variant | 4439 |
| AAV CHt-3 | 747 | AAV2 variant | 2688 | AAV variant | 3564 | AAV2/3 variant | 4440 |
| AAV CKd-1 | 748 | AAV2 variant | 2689 | AAV variant | 3565 | AAV2/3 variant | 4441 |
| AAV CKd-10 | 749 | AAV2 variant | 2690 | AAV variant | 3566 | AAV2/3 variant | 4442 |
| AAV CKd-2 | 750 | AAV2 variant | 2691 | AAV variant | 3567 | AAV2/3 variant | 4443 |
| AAV CKd-3 | 751 | AAV2 variant | 2692 | AAV variant | 3568 | AAV2/3 variant | 4444 |
| AAV CKd-4 | 752 | AAV2 variant | 2693 | AAV variant | 3569 | AAV2/3 variant | 4445 |
| AAV CKd-6 | 753 | AAV2 variant | 2694 | AAV variant | 3570 | AAV2/3 variant | 4446 |
| AAV CKd-7 | 754 | AAV2 variant | 2695 | AAV variant | 3571 | AAV2/3 variant | 4447 |
| AAV CKd-8 | 755 | AAV2 variant | 2696 | AAV variant | 3572 | AAV2/3 variant | 4448 |
| AAV CLv-1 | 756 | AAV2 variant | 2697 | AAV variant | 3573 | AAV2/3 variant | 4449 |
| AAV CLv-12 | 757 | AAV2 variant | 2698 | AAV variant | 3574 | AAV2/3 variant | 4450 |
| AAV CLv-13 | 758 | AAV2 variant | 2699 | AAV variant | 3575 | AAV2/3 variant | 4451 |
| AAV CLv-2 | 759 | AAV2 variant | 2700 | AAV variant | 3576 | AAV2/3 variant | 4452 |
| AAV CLv-3 | 760 | AAV2 variant | 2701 | AAV variant | 3577 | AAV2/3 variant | 4453 |
| AAV CLv-4 | 761 | AAV2 variant | 2702 | AAV variant | 3578 | AAV2/3 variant | 4454 |
| AAV CLv-6 | 762 | AAV2 variant | 2703 | AAV variant | 3579 | AAV2/3 variant | 4455 |
| AAV CLv-8 | 763 | AAV2 variant | 2704 | AAV variant | 3580 | AAV2/3 variant | 4456 |
| AAV CKd-B1 | 764 | AAV2 variant | 2705 | AAV variant | 3581 | AAV2/3 variant | 4457 |
| AAV CKd-B2 | 765 | AAV2 variant | 2706 | AAV variant | 3582 | AAV2/3 variant | 4458 |
| AAV CKd-B3 | 766 | AAV2 variant | 2707 | AAV variant | 3583 | AAV2/3 variant | 4459 |
| AAV CKd-B4 | 767 | AAV2 variant | 2708 | AAV variant | 3584 | AAV2/3 variant | 4460 |
| AAV CKd-B5 | 768 | AAV2 variant | 2709 | AAV variant | 3585 | AAV2/3 variant | 4461 |
| AAV CKd-B6 | 769 | AAV2 variant | 2710 | AAV variant | 3586 | AAV2/3 variant | 4462 |
| AAV CKd-B7 | 770 | AAV2 variant | 2711 | AAV variant | 3587 | AAV2/3 variant | 4463 |
| AAV CKd-B8 | 771 | AAV2 variant | 2712 | AAV variant | 3588 | AAV2/3 variant | 4464 |
| AAV CKd-H1 | 772 | AAV2 variant | 2713 | AAV variant | 3589 | AAV2/3 variant | 4465 |
| AAV CKd-H2 | 773 | AAV2 variant | 2714 | AAV variant | 3590 | AAV2/3 variant | 4466 |
| AAV CKd-H3 | 774 | AAV2 variant | 2715 | AAV variant | 3591 | AAV2/3 variant | 4467 |
| AAV CKd-H4 | 775 | AAV2 variant | 2716 | AAV variant | 3592 | AAV2/3 variant | 4468 |
| AAV CKd-H5 | 776 | AAV2 variant | 2717 | AAV variant | 3593 | AAV2/3 variant | 4469 |
| AAV CKd-H6 | 777 | AAV2 variant | 2718 | AAV variant | 3594 | AAV2/3 variant | 4470 |
| AAV CHt-1 | 778 | AAV2 variant | 2719 | AAV variant | 3595 | AAV2/3 variant | 4471 |
| AAV CHt-P2 | 779 | AAV2 variant | 2720 | AAV variant | 3596 | AAV2/3 variant | 4472 |
| AAV CHt-P5 | 780 | AAV2 variant | 2721 | AAV variant | 3597 | AAV2/3 variant | 4473 |
| AAV CHt-P9 | 781 | AAV2 variant | 2722 | AAV variant | 3598 | AAV2/3 variant | 4474 |
| AAV CBr-7.1 | 782 | AAV2 variant | 2723 | AAV variant | 3599 | AAV2/3 variant | 4475 |
| AAV CBr-7.2 | 783 | AAV2 variant | 2724 | AAV variant | 3600 | AAV2/3 variant | 4476 |
| AAV CBr-7.3 | 784 | AAV2 variant | 2725 | AAV variant | 3601 | AAV2/3 variant | 4477 |
| AAV CBr-7.4 | 785 | AAV2 variant | 2726 | AAV variant | 3602 | AAV2/3 variant | 4478 |
| AAV CBr-7.5 | 786 | AAV2 variant | 2727 | AAV variant | 3603 | AAV2/3 variant | 4479 |
| AAV CBr-7.7 | 787 | AAV2 variant | 2728 | AAV variant | 3604 | AAV2/3 variant | 4480 |
| AAV CBr-7.8 | 788 | AAV2 variant | 2729 | AAV variant | 3605 | AAV2/3 variant | 4481 |
| AAV CBr-7.10 | 789 | AAV2 variant | 2730 | AAV variant | 3606 | AAV2/3 variant | 4482 |
| AAV CKd-N3 | 790 | AAV2/3 variant | 2731 | AAV variant | 3607 | AAV2/3 variant | 4483 |
| AAV CKd-N4 | 791 | AAV2/3 variant | 2732 | AAV variant | 3608 | AAV2/3 variant | 4484 |
| AAV CKd-N9 | 792 | AAV2/3 variant | 2733 | AAV variant | 3609 | AAV2/3 variant | 4485 |
| AAV CLv-L4 | 793 | AAV2/3 variant | 2734 | AAV variant | 3610 | AAV2/3 variant | 4486 |
| AAV CLv-L5 | 794 | AAV2/3 variant | 2735 | AAV variant | 3611 | AAV2/3 variant | 4487 |
| AAV CLv-L6 | 795 | AAV2/3 variant | 2736 | AAV variant | 3612 | AAV2/3 variant | 4488 |
| AAV CLv-K1 | 796 | AAV2/3 variant | 2737 | AAV variant | 3613 | AAV2/3 variant | 4489 |
| AAV CLv-K3 | 797 | AAV2/3 variant | 2738 | AAV variant | 3614 | AAV2/3 variant | 4490 |
| AAV CLv-K6 | 798 | AAV2/3 variant | 2739 | AAV variant | 3615 | AAV2/3 variant | 4491 |
| AAV CLv-M1 | 799 | AAV2/3 variant | 2740 | AAV variant | 3616 | AAV2/3 variant | 4492 |
| AAV CLv-M11 | 800 | AAV2/3 variant | 2741 | AAV variant | 3617 | AAV2/3 variant | 4493 |
| AAV CLv-M2 | 801 | AAV2/3 variant | 2742 | AAV variant | 3618 | AAV2/3 variant | 4494 |
| AAV CLv-M5 | 802 | AAV2/3 variant | 2743 | AAV variant | 3619 | AAV2/3 variant | 4495 |
| AAV CLv-M6 | 803 | AAV2/3 variant | 2744 | AAV variant | 3620 | AAV2/3 variant | 4496 |
| AAV CLv-M7 | 804 | AAV2/3 variant | 2745 | AAV variant | 3621 | AAV2/3 variant | 4497 |
| AAV CLv-M8 | 805 | AAV2/3 variant | 2746 | AAV variant | 3622 | AAV2/3 variant | 4498 |
| AAV CLv-M9 | 806 | AAV2/3 variant | 2747 | AAV variant | 3623 | AAV2/3 variant | 4499 |
| AAV CHt-P1 | 807 | AAV2/3 variant | 2748 | AAV variant | 3624 | AAV2/3 variant | 4500 |
| AAV CHt-P6 | 808 | AAV2/3 variant | 2749 | AAV variant | 3625 | AAV2/3 variant | 4501 |
| AAV CHt-P8 | 809 | AAV2/3 variant | 2750 | AAV variant | 3626 | AAV2/3 variant | 4502 |
| AAV CHt-6.1 | 810 | AAV2/3 variant | 2751 | AAV variant | 3627 | AAV2/3 variant | 4503 |
| AAV CHt-6.10 | 811 | AAV2/3 variant | 2752 | AAV variant | 3628 | AAV2/3 variant | 4504 |
| AAV CHt-6.5 | 812 | AAV2/3 variant | 2753 | AAV variant | 3629 | AAV2/3 variant | 4505 |
| AAV CHt-6.6 | 813 | AAV2/3 variant | 2754 | AAV variant | 3630 | AAV2/3 variant | 4506 |
| AAV CHt-6.7 | 814 | AAV2/3 variant | 2755 | AAV variant | 3631 | AAV2/3 variant | 4507 |
| AAV CHt-6.8 | 815 | AAV2/3 variant | 2756 | AAV variant | 3632 | AAV2/3 variant | 4508 |
| AAV CSp-8.10 | 816 | AAV2/3 variant | 2757 | AAV variant | 3633 | AAV2/3 variant | 4509 |
| AAV CSp-8.2 | 817 | AAV2/3 variant | 2758 | AAV variant | 3634 | AAV2/3 variant | 4510 |
| AAV CSp-8.4 | 818 | AAV2/3 variant | 2759 | AAV variant | 3635 | AAV2/3 variant | 4511 |
| AAV CSp-8.5 | 819 | AAV2/3 variant | 2760 | AAV variant | 3636 | AAV2/3 variant | 4512 |
| AAV CSp-8.6 | 820 | AAV2/3 variant | 2761 | AAV variant | 3637 | AAV2/3 variant | 4513 |
| AAV CSp-8.7 | 821 | AAV2/3 variant | 2762 | AAV variant | 3638 | AAV2/3 variant | 4514 |
| AAV CSp-8.8 | 822 | AAV2/3 variant | 2763 | AAV variant | 3639 | AAV2/3 variant | 4515 |
| AAV CSp-8.9 | 823 | AAV2/3 variant | 2764 | AAV variant | 3640 | AAV2/3 variant | 4516 |
| AAV CBr-B7.3 | 824 | AAV2/3 variant | 2765 | AAV variant | 3641 | AAV2/3 variant | 4517 |
| AAV CBr-B7.4 | 825 | AAV2/3 variant | 2766 | AAV variant | 3642 | AAV2/3 variant | 4518 |
| AAV3B | 826 | AAV2/3 variant | 2767 | AAV variant | 3643 | AAV2/3 variant | 4519 |
| AAV4 | 827 | AAV2/3 variant | 2768 | AAV variant | 3644 | AAV2/3 variant | 4520 |
| AAV5 | 828 | AAV2/3 variant | 2769 | AAV variant | 3645 | AAV2/3 variant | 4521 |
| AAV CHt-P2 | 829 | AAV2/3 variant | 2770 | AAV variant | 3646 | AAV2/3 variant | 4522 |
| AAV CHt-P5 | 830 | AAV2/3 variant | 2771 | AAV variant | 3647 | AAV2/3 variant | 4523 |
| AAV CHt-P9 | 831 | AAV2/3 variant | 2772 | AAV variant | 3648 | AAV2/3 variant | 4524 |
| AAV CBr-7.1 | 832 | AAV2/3 variant | 2773 | AAV variant | 3649 | AAV2/3 variant | 4525 |
| AAV CBr-7.2 | 833 | AAV2/3 variant | 2774 | AAV variant | 3650 | AAV2/3 variant | 4526 |
| AAV CBr-7.3 | 834 | AAV2/3 variant | 2775 | AAV variant | 3651 | AAV2/3 variant | 4527 |
| AAV CBr-7.4 | 835 | AAV2/3 variant | 2776 | AAV variant | 3652 | AAV2/3 variant | 4528 |
| AAV CBr-7.5 | 836 | AAV2/3 variant | 2777 | AAV variant | 3653 | AAV2/3 variant | 4529 |
| AAV CBr-7.7 | 837 | AAV2/3 variant | 2778 | AAV variant | 3654 | AAV2/3 variant | 4530 |
| AAV CBr-7.8 | 838 | AAV2/3 variant | 2779 | AAV variant | 3655 | AAV2/3 variant | 4531 |
| AAV CBr-7.10 | 839 | AAV2/3 variant | 2780 | AAV variant | 3656 | AAV2/3 variant | 4532 |
| AAV CKd-N3 | 840 | AAV2/3 variant | 2781 | AAV variant | 3657 | AAV2/3 variant | 4533 |
| AAV CKd-N4 | 841 | AAV2/3 variant | 2782 | AAV variant | 3658 | AAV2 | 910 |
| | | | | | | (comprising lung | |
| | | | | | | specific | |
| | | | | | | polypeptide) | |
| AAV CKd-N9 | 842 | AAV2/3 variant | 2783 | AAV variant | 3659 | AAV2 | 911 |
| | | | | | | (comprising lung | |
| | | | | | | specific | |
| | | | | | | polypeptide) | |
| AAV CLv-L4 | 843 | AAV2/3 variant | 2784 | AAV variant | 3660 | consensus amino | 1164 |
| | | | | | | acid sequence of | |
| | | | | | | ancestral AAV | |
| | | | | | | variants, C4, C7 | |
| | | | | | | and G4 | |
| AAV CLv-L5 | 844 | AAV2/3 variant | 2785 | AAV variant | 3661 | consensus amino | 1165 |
| | | | | | | acid sequence of | |
| | | | | | | ancestral AAV | |
| | | | | | | variants, C4 and | |
| | | | | | | C7 | |
| AAV CLv-L6 | 845 | AAV2/3 variant | 2786 | AAV variant | 3662 | AAV8 (with a | 1166 |
| | | | | | | AAV2 | |
| | | | | | | phospholipase | |
| | | | | | | domain) | |
| AAV CLv-K1 | 846 | AAV2/3 variant | 2787 | AAV variant | 3663 | | |
| AAV CLv-K3 | 847 | AAV2/3 variant | 2788 | AAV variant | 3664 | | |

[0086] In some embodiments, the AAV serotype may be, or may have a sequence as described in International Patent Publication WO2015038958, the contents of which are herein incorporated by reference in their entirety, such as, but not limited to, AAV9 (SEQ ID NO: 137 and 138 herein), PHP.B (SEQ ID NO: 5 and 6), G2B-13 (SEQ ID NO: 7), G2B-26 (SEQ ID NO: 5), TH1.1-32 (SEQ ID NO: 8), TH1.1-35 (SEQ ID NO: 9) or variants thereof. Further, any of the targeting peptides or amino acid inserts described in WO2015038958, may be inserted into any parent AAV serotype, such as, but not limited to, AAV9 (SEQ ID NO: 137 for the DNA sequence and SEQ ID NO: 138 for the amino acid sequence). In some embodiments, the amino acid insert is inserted between amino acids 586-592 of the parent AAV (e.g., AAV9). In another embodiment, the amino acid insert is inserted between amino acids 588-589 of the parent AAV sequence. The amino acid insert may be, but is not limited to, any of the following amino acid sequences: SEQ ID NO: 1262, 1263, 1264, 1265, 1266, 1267, 1268, 1269, 1270, 1271, 1271, 1273, 1274, 1275, 1276, and 1277. Non-limiting examples of nucleotide sequences that may encode the amino acid inserts include the following, SEQ ID NO: 1278, SEQ ID NO: 1279, SEQ ID NO: 1280, SEQ ID NO: 1281, SEQ ID NO: 1282, SEQ ID NO: 1283, SEQ ID NO: 1284, SEQ ID NO: 1285, SEQ ID NO: 1286, or SEQ ID NO: 1287.

[0087] In some embodiments, the AAV serotype may be, or may have a sequence as described in International Patent Publication WO2017100671, the contents of which are herein incorporated by reference in their entirety, such as, but not limited to, AAV9 (SEQ ID NO: 45 of WO2017100671, herein SEQ ID NO: 11), PHP.N (SEQ ID NO: 46 of WO2017100671, herein SEQ ID NO: 4), PHP.S (SEQ ID NO: 47 of WO2017100671, herein SEQ ID NO: 10), or variants thereof. Further, any of the targeting peptides or amino acid inserts described in WO2017100671 may be inserted into any parent AAV serotype, such as, but not limited to, AAV9. In some embodiments, the amino acid insert is inserted between amino acids 586-592 of the parent AAV (e.g., AAV9). In another embodiment, the amino acid insert is inserted between amino acids 588-589 of the parent AAV sequence. The amino acid insert may be, but is not limited to, any of the following amino acid sequences: SEQ ID NO: 1262, 1270, 1271, 1277, 1288, 1289, 1290, 1291, 1292, 1293, 1294, 1295, 1296, 1297, 1298, 1299, 1300, 1301, 1302, 1303, 1304, 1305, 1306, 1307, 1308, 1309, 1310, 1311, 1312, 1313, 1314, 1315, 1316, 1317, 1318, 1319, 1320, 1321, 1322, 1323, 1324, 1325, 1326, 1327, 1328, 1329, 1330, 1331, 1332, 1333, 1334, 1335, 1336, 1337, 1338, 1339, 1340, 1341, 1342, 1343, 1344, 1345, 1346, 1347, and 1348.

[0088] Non-limiting examples of nucleotide sequences that may encode the amino acid inserts include the following, SEQ ID NO: 1349, SEQ ID NO: 1350, SEQ ID NO: 1351, SEQ ID NO: 1352, SEQ ID NO: 1353, SEQ ID NO: 1354, SEQ ID NO: 1355, SEQ ID NO: 1356, SEQ ID NO: 1357, SEQ ID NO: 1358 (wherein N may be A, C, T, or G), SEQ ID NO: 1359 (wherein N may be A, C, T, or G), SEQ ID NO: 1360 (wherein N may be A, C, T, or G), SEQ ID NO: 1361 (wherein N may be A, C, T, or G), herein SEQ ID NO: 1362 (wherein N may be A, C, T, or G), SEQ ID NO: 1279, SEQ ID NO: 1280, SEQ ID NO: 1281, SEQ ID NO: 1287, or SEQ ID NO: 1363.

[0089] In some embodiments, the AAV serotype may be, or may have a sequence as described in U.S. Pat. No. 9,624,274, the contents of which are herein incorporated by reference in their entirety, such as, but not limited to, the AAV serotypes in table 1, or variants or derivative thereof. Further, any of the structural protein inserts described in U.S. Pat. No. 9,624,274, may be inserted into, but not limited to, I-453 and I-587 of any parent AAV serotype, such as, but not limited to, AAV2 (SEQ ID NO: 183 of U.S. Pat. No. 9,624,274).

[0090] The amino acid insert may be, but is not limited to, any of the following amino acid sequences: SEQ ID NO: 1364, 1365, 1366, 1367, 1368, 1369, 1370, 1371, 1372, 1373, 1374, 1375, 1376, 1377, 1378, 1379, 1380, 1381, 1382, 1383, 1384, 1385, 1386, 1387, 1388, 1389, 1390, 1391, 1392, 1393, 1394, 1395, 1396, 1397, 1398, 1399, 1400, 1401, 1402, 1403, 1404, 1405, and 1406.

[0091] In some embodiments, the AAV serotype may be, or may have a sequence as described in U.S. Pat. No. 9,475,845, the contents of which are herein incorporated by reference in their entirety, such as, but not limited to, AAV capsid proteins comprising modification of one or more amino acids at amino acid positions 585 to 590 of the native AAV2 capsid protein. Further the modification may result in, but not be limited to, the amino acid sequence of any one of SEQ ID NOs: 1407-1429.

[0092] In some embodiments, the amino acid modification is a substitution at amino acid positions 262 through 265 in the native AAV2 capsid protein or the corresponding position in the capsid protein of another AAV with a targeting sequence. The targeting sequence may be, but is not limited to, any of the amino acid sequences of SEQ ID NO: 1430, 1431, 1432, 1433, 1434, 1435, 1436, 1437, 1438, 1439, 1440, 1441, 1442, 1443, 1444, 1445, 1446, 1447, 1448, 1449, 1450, 1451, 1452, 1453, 1454, 1455, 1456, 1457, 1458, 1459, 1460, 1461, 1462, 1463, 1464, 1465, 1466, 1467, 1468, 1469, 1470, 1471, 1472, 1473, 1474, 1475, 1476, 1477, 1478, 1479, 1480, 1481, 1482, 1483, 1484, 1485, 1486, 1487, 1488, 1489, 1490, 1491, 1492, 1493, 1494, 1495, 1496, 1497, 1498, 1499, 1500, 1501, 1502, 1503, 1504, 1505, 1506, 1507, 1508, 1509, 1510, 1511, 1512, 1513, 1514, 1515, 1516, 1517, 1518, 1519, 1520, 1521, 1522, 1523, 1524, 1525, 1526, 1527, 1528, 1529, 1530, 1531, 1532, 1533, 1534, 1535, 1536, 1537, 1538, 1539, 1540, 1541, 1542, 1543, 1544, 1545, 1546, 1547, 1548, GGG, GFS, LWS, EGG, LLV, LSP, LBS, AGG, GRR, GGH and GTV.

[0093] In some embodiments, the AAV serotype may be, or may have a sequence as described in United States Publication No. US 20160369298, the contents of which are herein incorporated by reference in their entirety, such as, but not limited to, site-specific mutated capsid protein of AAV2 (SEQ ID NO: 97 of US 20160369298; herein SEQ ID NO: 1549) or variants thereof, wherein the specific site is at least one site selected from sites R447, G453, S578, N587, N587+1, S662 of VP1 or fragment thereof.

[0094] Further, any of the mutated sequences described in US 20160369298, may be or may have, but not limited to, any one of SEQ ID NO: 1550-1694. Non-limiting examples of nucleotide sequences that may encode the amino acid mutated sites include any of SEQ ID NO: 1695-1717.

[0095] In some embodiments, the AAV serotype may comprise an ocular cell targeting peptide as described in International Patent Publication WO2016134375, the contents of which are herein incorporated by reference in their entirety, such as, but not limited to SEQ ID NO: 9, and SEQ ID NO:10 of WO2016134375. Further, any of the ocular cell targeting peptides or amino acids described in WO2016134375, may be inserted into any parent AAV serotype, such as, but not limited to, SEQ ID NOs: 1718 and 1719. In some embodiments, modifications, such as insertions are made in AAV2 proteins at P34-A35, T138-A139, A139-P140, G453-T454, N587-R588, and/or R588-Q589. In certain embodiments, insertions are made at D384, G385, 1560, T561, N562, E563, E564, E565, N704, and/or Y705 of AAV9. The ocular cell targeting peptide may be, but is not limited to, any of SEQ ID NO: 1720 and 1721.

[0096] In some embodiments, the AAV serotype may be modified as described in the United States Publication US 20170145405 the contents of which are herein incorporated by reference in their entirety. AAV serotypes may include, modified AAV2 (e.g., modifications at Y444F, Y500F, Y730F and/or S662V), modified AAV3 (e.g., modifications at Y705F, Y731F and/or T492V), and modified AAV6 (e.g., modifications at S663V and/or T492V).

[0097] In some embodiments, the AAV serotype may be modified as described in the International Publication WO2017083722 the contents of which are herein incorporated by reference in their entirety. AAV serotypes may include, AAV1 (Y705+731F+T492V), AAV2 (Y444+500+730F+T491V), AAV3 (Y705+731F), AAV5, AAV 5(Y436+693+719F), AAV6 (VP3 variant Y705F/Y731F/T492V), AAV8 (Y733F), AAV9, AAV9 (VP3 variant Y731F), and AAV10 (Y733F).

[0098] In some embodiments, the AAV serotype may comprise, as described in International Patent Publication WO2017015102, the contents of which are herein incorporated by reference in their entirety, an engineered epitope comprising the amino acids of SEQ ID NO: 1722 or 1723. The epitope may be inserted in the region of amino acids 665 to 670 based on the numbering of the VP1 capsid of AAV8 (SEQ ID NO: 3 of WO2017015102) and/or residues 664 to 668 of AAV3B (SEQ ID NO: 3 of WO2017015102).

[0099] In some embodiments, the AAV serotype may be, or may have a sequence as described in International Patent Publication WO2017058892, the contents of which are herein incorporated by reference in their entirety, such as, but not limited to, AAV variants with capsid proteins that may comprise a substitution at one or more (e.g., 2, 3, 4, 5, 6, or 7) of amino acid residues 262-268, 370-379, 451-459, 472-473, 493-500, 528-534, 547-552, 588-597, 709-710, 716-722 of AAV1, in any combination, or the equivalent amino acid residues in AAV2, AAV3, AAV4, AAV5, AAV6, AAV7, AAV8, AAV9, AAV10, AAV11, AAV12, AAVrh8, AAVrh10, AAVrh32.33, bovine AAV or avian AAV. The amino acid substitution may be, but is not limited to, any of the amino acid sequences described in WO2017058892. In some embodiments, the AAV may comprise an amino acid substitution at residues 256L, 258K, 259Q, 261S, 263A, 264S, 265T, 266G, 272H, 385S, 386Q, S472R, V473D, N500E 547S, 709A, 710N, 716D, 717N, 718N, 720L, A456T, Q457T, N458Q, K459S, T492S, K493A, S586R, S587G, S588N, T589R and/or 722T of AAV1 (SEQ ID NO: 1 of WO2017058892) in any combination, 244N, 246Q, 248R, 249E, 250I, 251K, 252S, 253G, 254S, 255V, 256D, 263Y, 377E, 378N, 453L, 456R, 532Q, 533P, 535N, 536P, 537G, 538T, 539T, 540A, 541T, 542Y, 543L, 546N, 653V, 654P, 656S, 697Q, 698F, 704D, 705S, 706T, 707G, 708E, 709Y and/or 710R of AAV5 (SEQ ID NO:5 of WO2017058892) in any combination, 248R, 316V, 317Q, 318D, 319S, 443N, 530N, 531S, 532Q 533P, 534A, 535N, 540A, 541 T, 542Y, 543L, 545G, 546N, 697Q, 704D, 706T, 708E, 709Y and/or 710R of AAV5 (SEQ ID NO: 5 of WO2017058892) in any combination, 264S, 266G, 269N, 272H, 457Q, 588S and/or 5891 of AAV6 (SEQ ID NO:6 WO2017058892) in any combination, 457T, 459N, 496G, 499N, 500N, 589Q, 590N and/or 592A of AAV8 (SEQ ID NO: 8 of WO2017058892) in any combination, 451I, 452N, 453G, 454S, 455G, 456Q, 457N and/or 458Q of AAV9 (SEQ ID NO: 9 of WO2017058892) in any combination.

[0100] In some embodiments, the AAV may include a sequence of amino acids at positions 155, 156 and 157 of VP1 or at positions 17, 18, 19 and 20 of VP2, as described in International Publication No. WO 2017066764, the contents of which are herein incorporated by reference in their entirety. The sequences of amino acid may be, but not limited to, N-S-S, S-X-S, S-S-Y, N-X-S, N-S-Y, S-X-Y and N-X-Y, where N, X and Y are, but not limited to, independently non-serine, or non-threonine amino acids, wherein the AAV may be, but not limited to AAV1, AAV2, AAV3, AAV4, AAV5, AAV6, AAV7, AAV8, AAV9, AAV10, AAV11 and AAV12. In some embodiments, the AAV may include a deletion of at least one amino acid at positions 156, 157 or 158 of VP1 or at positions 19, 20 or 21 of VP2, wherein the AAV may be, but not limited to AAV1, AAV2, AAV3, AAV4, AAV5, AAV6, AAV7, AAV8, AAV9, AAV10, AAV11 and AAV12.

[0101] In some embodiments, the AAV may be a serotype generated by Cre-recombination-based AAV targeted evolution (CREATE) as described by Deverman et al., (Nature Biotechnology 34(2):204-209 (2016)), the contents of which are herein incorporated by reference in their entirety. In some embodiments, AAV serotypes generated in this manner have improved CNS transduction and/or neuronal and astrocytic tropism, as compared to other AAV serotypes. As non-limiting examples, the AAV serotype may include a peptide such as, but not limited to, PHP.B, PHP.B2, PHP.B3, PHP.A, PHP.S, G2A12, G2A15, G2A3, G2B4, and G2B5. In some embodiments, these AAV serotypes may be AAV9 (SEQ ID NO: 11 or 138) derivatives with a 7-amino acid insert between amino acids 588-589. Non-limiting examples of these 7-amino acid inserts include TLAVPFK (PHP.B; SEQ ID NO: 1262), SVSKPFL (PHP.B2; SEQ ID NO: 1270), FTLTTPK (PHP.B3; SEQ ID NO: 1271), YTLSQGW (PHP.A; SEQ ID NO: 1277), QAVRTSL (PHP.S; SEQ ID NO: 1321), LAKERLS (G2A3; SEQ ID NO: 1322), MNSTKNV (G2B4; SEQ ID NO: 1323), and/or VSGGHHS (G2B5; SEQ ID NO: 1324).

[0102] In some embodiments, the AAV serotype may be as described in Jackson et al (Frontiers in Molecular Neuroscience 9:154 (2016)), the contents of which are herein incorporated by reference in their entirety. In some embodiments, the AAV serotype is PHP.B or AAV9. In some embodiments, the AAV serotype is paired with a synapsin promoter to enhance neuronal transduction, as compared to when more ubiquitous promoters are used (i.e., CBA or CMV).

[0103] In some embodiments, the AAV serotype is a serotype comprising the AAVPHP.N (PHP.N) peptide, or a variant thereof. In some embodiments the AAV serotype is a serotype comprising the AAVPHP.B (PHP.B) peptide, or a variant thereof. In some embodiments, the AAV serotype is a serotype comprising the AAVPHP.A (PHP.A) peptide, or a variant thereof. In some embodiments, the AAV serotype is a serotype comprising the PHP.S peptide, or a variant thereof. In some embodiments, the AAV serotype is a serotype comprising the PHP.B2 peptide, or a variant thereof. In some embodiments, the AAV serotype is a serotype comprising the PHP.B3 peptide, or a variant thereof. In some embodiments, the AAV serotype is a serotype comprising the G2B4 peptide, or a variant thereof. In some embodiments, the AAV serotype is a serotype comprising the G2B5 peptide, or a variant thereof.

[0104] In some embodiments the AAV serotype is VOY101, or a variant thereof. In some embodiments, the VOY101 capsid comprises the amino acid sequence SEQ ID NO: 1. In some embodiments, the VOY101 amino acid sequence is encoded by a nucleotide sequence comprising SEQ ID NO: 2. In some embodiments, the VOY101 capsid comprises an amino acid sequence at least 70% identical to SEQ ID NO: 1, such as, 70%, 75%, 80%, 85%, 90%, 91%, 92%, 93%, 94%, 95%, 96%, 97%, 98%, 99%, or greater than 99%. In some embodiments, the VOY101 capsid comprises a nucleotide sequence at least 70% identical to SEQ ID NO: 2, such as, 70%, 75%, 80%, 85%, 90%, 91%, 92%, 93%, 94%, 95%, 96%, 97%, 98%, 99%, or greater than 99%.

[0105] In some embodiments, the AAV serotype is VOY201, or a variant thereof. In some embodiments, the VOY201 capsid comprises the amino acid sequence SEQ ID NO: 4534. In some embodiments, the VOY201 amino acid sequence is encoded by a nucleotide sequence comprising SEQ ID NO: 3. In some embodiments, the VOY201 capsid comprises an amino acid sequence at least 70% identical to SEQ ID NO: 4534, such as, 70%, 75%, 80%, 85%, 90%, 91%, 92%, 93%, 94%, 95%, 96%, 97%, 98%, 99%, or greater than 99%. In some embodiments, the VOY201 capsid comprises a nucleotide sequence at least 70% identical to SEQ ID NO: 3, such as, 70%, 75%, 80%, 85%, 90%, 91%, 92%, 93%, 94%, 95%, 96%, 97%, 98%, 99%, or greater than 99%.

[0106] In some embodiments, the AAV serotype is PHP.B, or a variant thereof. In some embodiments, the PHP.B capsid comprises the amino acid sequence SEQ ID NO: 5. In some embodiments, the PHP.B amino acid sequence is encoded by a nucleotide sequence comprising SEQ ID NO: 6. In some embodiments, the PHP.B capsid comprises an amino acid sequence at least 70% identical to SEQ ID NO: 5, such as, 70%, 75%, 80%, 85%, 90%, 91%, 92%, 93%, 94%, 95%, 96%, 97%, 98%, 99%, or greater than 99%. In some embodiments, the PHP.B capsid comprises a nucleotide sequence at least 70% identical to SEQ ID NO: 6, such as, 70%, 75%, 80%, 85%, 90%, 91%, 92%, 93%, 94%, 95%, 96%, 97%, 98%, 99%, or greater than 99%.

[0107] In some embodiments, the AAV serotype is PHP.N, or a variant thereof. In some embodiments, the PHP.N capsid comprises the amino acid sequence SEQ ID NO: 4. In some embodiments, the PHP.N capsid comprises an amino acid sequence at least 70% identical to SEQ ID NO: 4, such as, 70%, 75%, 80%, 85%, 90%, 91%, 92%, 93%, 94%, 95%, 96%, 97%, 98%, 99%, or greater than 99%.

[0108] In some embodiments the AAV serotype is AAV9, or a variant thereof. In some embodiments, the AAV9 capsid comprises the amino acid sequence SEQ ID NO: 138. In some embodiments, the AAV9 amino acid sequence is encoded by a nucleotide sequence comprising SEQ ID NO: 137. In some embodiments, the AAV9 capsid comprises an amino acid sequence at least 70% identical to SEQ ID NO: 138, such as, 70%, 75%, 80%, 85%, 90%, 91%, 92%, 93%, 94%, 95%, 96%, 97%, 98%, 99%, or greater than 99%. In some embodiments, the AAV9 capsid comprises a nucleotide sequence at least 70% identical to SEQ ID NO: 137, such as, 70%, 75%, 80%, 85%, 90%, 91%, 92%, 93%, 94%, 95%, 96%, 97%, 98%, 99%, or greater than 99%.

[0109] In some embodiments, the AAV serotype is AAV9 K449R, or a variant thereof. In some embodiments, the AAV9 K449R capsid comprises the amino acid sequence SEQ ID NO: 11. In some embodiments, the AAV9 K449R capsid comprises an amino acid sequence at least 70% identical to SEQ ID NO: 11, such as, 70%, 75%, 80%, 85%, 90%, 91%, 92%, 93%, 94%, 95%, 96%, 97%, 98%, 99%, or greater than 99%.

[0110] In some embodiments, the AAV capsid allows for blood brain barrier penetration following intravenous administration. Non-limiting examples of such AAV capsids include AAV9, AAV9 K449R, VOY101, VOY201, or AAV capsids comprising a peptide insert such as, but not limited to, AAVPHP.N (PHP.N), AAVPHP.B (PHP.B), PHP.S, G2A3, G2B4, G2B5, G2A12, G2A15, PHP.B2, PHP.B3, or AAVPHP.A (PHP.A).

[0111] In some embodiments, the AAV capsid is suitable for intramuscular administration and/or transduction of muscle fibers. Non-limiting examples of such AAV capsids include AAV2, AAV3, AAV8 and variants thereof such as, but not limited to, AAV2 variants, AAV2/3 variants, AAV8 variants, and/or AAV2/3/8 variants.

[0112] In some embodiments, the AAV serotype is an AAV2 variant. As a non-limiting example, the AAV serotype is an AAV2 variant comprising SEQ ID NO: 2679 or a fragment or variant thereof. As a non-limiting example, the AAV serotype is at least 70% identical to SEQ ID NO: 2679, such as, 70%, 75%, 80%, 85%, 90%, 91%, 92%, 93%, 94%, 95%, 96%, 97%, 98%, 99%, or greater than 99%.

[0113] In some embodiments, the AAV serotype is an AAV2/3 variant. As a non-limiting example, the AAV serotype is an AAV2/3 variant comprising SEQ ID NO: 2809 or a fragment or variant thereof. As a non-limiting example, the AAV serotype is an AAV2/3 variant which is at least 70% identical to SEQ ID NO: 2809, such as, 70%, 75%, 80%, 85%, 90%, 91%, 92%, 93%, 94%, 95%, 96%, 97%, 98%, 99%, or greater than 99%. As a non-limiting example, the AAV serotype is an AAV2/3 variant comprising SEQ ID NO: 2871 or a fragment or variant thereof. As a non-limiting example, the AAV serotype is an AAV2/3 variant which is at least 70% identical to SEQ ID NO: 2871, such as, 70%, 75%, 80%, 85%, 90%, 91%, 92%, 93%, 94%, 95%, 96%, 97%, 98%, 99%, or greater than 99%.

[0114] In some embodiments, the AAV serotype may comprise a capsid amino acid sequence with 50%, 51%, 52%, 53%, 54%, 55%, 56%, 57%, 58%, 59%, 60%, 61%, 62%, 63%, 64%, 65%, 66%, 67%, 68%, 69%, 70%, 71%, 72%, 73%, 74%, 75%, 76%, 77%, 78%, 79%, 80%, 81%, 82%, 83%, 84%, 85%, 86%, 87%, 88%, 89%, 90%, 91%, 92%, 93%, 94%, 95%, 96%, 97%, 98%, 99%, or 100% identity to any of those described herein.

[0115] In some embodiments, the AAV serotype may be encoded by a capsid nucleic acid sequence with 50%, 51%, 52%, 53%, 54%, 55%, 56%, 57%, 58%, 59%, 60%, 61%, 62%, 63%, 64%, 65%, 66%, 67%, 68%, 69%, 70%, 71%, 72%, 73%, 74%, 75%, 76%, 77%, 78%, 79%, 80%, 81%, 82%, 83%, 84%, 85%, 86%, 87%, 88%, 89%, 90%, 91%, 92%, 93%, 94%, 95%, 96%, 97%, 98%, 99%, or 100% identity to any of those described herein.

[0116] In some embodiments, the AAV serotype is selected for use due to its tropism for cells of the central nervous system. In some embodiments, the cells of the central nervous system are neurons. In another embodiment, the cells of the central nervous system are astrocytes.

[0117] In some embodiments, the AAV serotype is selected for use due to its tropism for cells of the muscle(s).

[0118] In some embodiments, the initiation codon for translation of the AAV VP1 capsid protein may be CTG, TTG, or GTG as described in U.S. Pat. No. 8,163,543, the contents of which are herein incorporated by reference in its entirety.

[0119] The present disclosure refers to structural capsid proteins (including VP1, VP2 and VP3) which are encoded by capsid (Cap) genes. These capsid proteins form an outer protein structural shell (i.e. capsid) of a viral vector such as AAV. VP capsid proteins synthesized from Cap polynucleotides generally include a methionine as the first amino acid in the peptide sequence (Met1), which is associated with the start codon (AUG or ATG) in the corresponding Cap nucleotide sequence. However, it is common for a first-methionine (Met1) residue or generally any first amino acid (AA1) to be cleaved off after or during polypeptide synthesis by protein processing enzymes such as Met-aminopeptidases. This “Met/AA-clipping” process often correlates with a corresponding acetylation of the second amino acid in the polypeptide sequence (e.g., alanine, valine, serine, threonine, etc.). Met-clipping commonly occurs with VP1 and VP3 capsid proteins but can also occur with VP2 capsid proteins.

[0120] Where the Met/AA-clipping is incomplete, a mixture of one or more (one, two or three) VP capsid proteins comprising the viral capsid may be produced, some of which may include a Met1/AA1 amino acid (Met+/AA+) and some of which may lack a Met1/AA1 amino acid as a result of Met/AA-clipping (Met−/AA−). For further discussion regarding Met/AA-clipping in capsid proteins, see Jin, et al. Direct Liquid Chromatography/Mass Spectrometry Analysis for Complete Characterization of Recombinant Adeno-Associated Virus Capsid Proteins. Hum Gene Ther Methods. 2017 Oct. 28(5):255-267; Hwang, et al. N-Terminal Acetylation of Cellular Proteins Creates Specific Degradation Signals. Science. 2010 Feb. 19. 327(5968): 973-977; the contents of which are each incorporated herein by reference in its entirety.

[0121] According to the present disclosure, references to capsid proteins is not limited to either clipped (Met−/AA−) or unclipped (Met+/AA+) and may, in context, refer to independent capsid proteins, viral capsids comprised of a mixture of capsid proteins, and/or polynucleotide sequences (or fragments thereof) which encode, describe, produce or result in capsid proteins of the present disclosure. A direct reference to a “capsid protein” or “capsid polypeptide” (such as VP1, VP2 or VP2) may also comprise VP capsid proteins which include a Met1/AA1 amino acid (Met+/AA+) as well as corresponding VP capsid proteins which lack the Met1/AA1 amino acid as a result of Met/AA-clipping (Met−/AA−).

[0122] Further according to the present disclosure, a reference to a specific SEQ ID NO: (whether a protein or nucleic acid) which comprises or encodes, respectively, one or more capsid proteins which include a Met1/AA1 amino acid (Met+/AA+) should be understood to teach the VP capsid proteins which lack the Met1/AA1 amino acid as upon review of the sequence, it is readily apparent any sequence which merely lacks the first listed amino acid (whether or not Met1/AA1).

[0123] As a non-limiting example, reference to a VP1 polypeptide sequence which is 736 amino acids in length and which includes a “Met1” amino acid (Met+) encoded by the AUG/ATG start codon may also be understood to teach a VP1 polypeptide sequence which is 735 amino acids in length and which does not include the “Met1” amino acid (Met−) of the 736 amino acid Met+ sequence. As a second non-limiting example, reference to a VP1 polypeptide sequence which is 736 amino acids in length and which includes an “AA1” amino acid (AA1+) encoded by any NNN initiator codon may also be understood to teach a VP1 polypeptide sequence which is 735 amino acids in length and which does not include the “AA1” amino acid (AA1−) of the 736 amino acid AA1+ sequence.

[0124] References to viral capsids formed from VP capsid proteins (such as reference to specific AAV capsid serotypes), can incorporate VP capsid proteins which include a Met1/AA1 amino acid (Met+/AA1+), corresponding VP capsid proteins which lack the Met1/AA1 amino acid as a result of Met/AA1-clipping (Met−/AA1−), and combinations thereof (Met+/AA1+ and Met−/AA1−).

[0125] As a non-limiting example, an AAV capsid serotype can include VP1 (Met+/AA1+), VP1 (Met−/AA1−), or a combination of VP1 (Met+/AA1+) and VP1 (Met−/AA1−). An AAV capsid serotype can also include VP3 (Met+/AA1+), VP3 (Met−/AA1−), or a combination of VP3 (Met+/AA1+) and VP3 (Met−/AA1−); and can also include similar optional combinations of VP2 (Met+/AA1) and VP2 (Met−/AA1−).

### Viral Genome Component: Inverted Terminal Repeats (ITRs)

[0126] The AAV particles of the present disclosure comprise a viral genome with at least one ITR region and a payload region. In some embodiments, the viral genome has two ITRs. These two ITRs flank the payload region at the 5′ and 3′ ends. The ITRs function as origins of replication comprising recognition sites for replication. ITRs comprise sequence regions which can be complementary and symmetrically arranged. ITRs incorporated into viral genomes may be comprised of naturally occurring polynucleotide sequences or recombinantly derived polynucleotide sequences.

[0127] The ITRs may be derived from the same serotype as the capsid, selected from any of the serotypes listed in Table 1, or a derivative or functional variant thereof. The ITR may be of a different serotype than the capsid. In some embodiments, the AAV particle has more than one ITR. In a non-limiting example, the AAV particle has a viral genome comprising two ITRs. In some embodiments, the ITRs are of the same serotype as one another. In another embodiment, the ITRs are of different serotypes. Non-limiting examples include zero, one or both of the ITRs having the same serotype as the capsid. In some embodiments both ITRs of the viral genome of the AAV particle are AAV2 ITRs or a functional variant thereof.

[0128] Independently, each ITR may be about 100 to about 150 nucleotides in length. An ITR may be about 100-180 nucleotides in length, e.g., 100-105 nucleotides in length, 106-110 nucleotides in length, 111-115 nucleotides in length, 116-120 nucleotides in length, 121-125 nucleotides in length, 126-130 nucleotides in length, 131-135 nucleotides in length, 136-140 nucleotides in length, 141-145 nucleotides in length or 146-150 nucleotides in length. In some embodiments, the ITRs are 140-142 nucleotides in length. Non-limiting examples of ITR length are 102, 130, 140, 141, 142, 145 nucleotides in length, and those having at least 95% identity thereto.

[0129] In some embodiments, each ITR may be 141 nucleotides in length.

[0130] In some embodiments, each ITR may be 130 nucleotides in length.

[0131] In some embodiments, the AAV particles comprise two ITRs and one ITR is 141 nucleotides in length and the other ITR is 130 nucleotides in length.

[0132] In some embodiments, the viral genome comprises an ITR region comprising the nucleotide sequence of any of the sequences provided in Table 7 or a nucleotide sequence with at least 70%, 75%, 80%, 85%, 90%, 95% or 99% sequence identity thereto. In some embodiments, the viral genome comprises two ITR regions comprising the nucleotide sequence of any of the sequences provided in Table 7 or a nucleotide sequence with at least 70%, 75%, 80%, 85%, 90%, 95% or 99% sequence identity thereto, wherein the first and second ITR comprise the same sequence or wherein the first and second ITR comprise different sequences.

TABLE 7
Inverted Terminal Repeat (ITR) Sequence Regions

| Sequence | | |
|---|---|---|
| Region Name | Sequence Length | SEQ ID NO |
| ITR1 | 130 | 2076 |
| ITR2 | 141 | 2077 |
| ITR3 | 130 | 2078 |
| ITR4 | 141 | 2079 |

[0133] In some embodiment, the viral genome comprises an ITR provided in Table 7. In some embodiments, the viral genome comprises an ITR chosen from any one of ITR1-ITR4 or a functional variant thereof. In some embodiments, the viral genome comprises ITR1. In some embodiments, the viral genome comprises ITR1. In some embodiments, the ITR comprises the nucleotide sequence of any one of SEQ ID NOs: 2076-2079, or a sequence with at least 70%, 75%, 80%, 85%, 90%, 95% or 99% sequence identity thereto. In some embodiments, the ITR comprises the nucleotide sequence of SEQ ID NO: 2076 or a nucleotide sequence with at least 70%, 75%, 80%, 85%, 90%, 95% or 99% sequence identity thereto. In some embodiments, the ITR comprises the nucleotide sequence of SEQ ID NO: 2078 or a nucleotide sequence with at least 70%, 75%, 80%, 85%, 90%, 95% or 99% sequence identity thereto.

[0134] In some embodiments, the viral genome comprises ITR1 and ITR2. In some embodiments, the viral genome comprises ITR1 at the 5′ end and ITR2 at the 3′ end. In some embodiments, the viral genome comprises an ITR, e.g., a 5′ ITR, comprising the nucleotide sequence of SEQ ID NO: 2076 or a sequence with at least with at least 70%, 75%, 80%, 85%, 90%, 95% or 99% sequence identity thereto; and an ITR, e.g., a 3′ ITR, comprising the nucleotide sequence of SEQ ID NO: 2078 or a nucleotide sequence at least 70%, 75%, 80%, 85%, 90%, 95% or 99% sequence identity thereto.

### Viral Genome Component: Promoters

[0135] In some embodiments, the viral genome comprises at least one element to enhance the transgene target specificity and/or expression (See e.g., Powell et al. Viral Expression Cassette Elements to Enhance Transgene Target Specificity and Expression in Gene Therapy, 2015; the contents of which are herein incorporated by reference in its entirety). Non-limiting examples of elements to enhance the transgene target specificity and expression include promoters, endogenous miRNAs, post-transcriptional regulatory elements (PREs), polyadenylation (PolyA) signal sequences and upstream enhancers (USEs), CMV enhancers and introns.

[0136] In some embodiments, an element to enhance the transgene target specificity and/or expression comprise a promoter, an enhancer, e.g., a CMV enhancer (such as CMV ie enhancer), or both. In some embodiments, the viral genome comprises a promoter operably linked to a transgene encoded by a nucleic acid molecule encoding a payload, e.g., antibody molecule (e.g., an anti-tau antibody molecule, such as any one of those described herein). In some embodiments, the viral genome comprises an enhancer, e.g., a CMV (such as CMVIe) enhancer. In some embodiment, the viral genome comprises at least two promoters, such as an EF1α promoter and a CMV promoter.

[0137] In some embodiments, the viral genome comprises a promoter that is species specific, inducible, tissue-specific, and/or cell cycle-specific (e.g., as described in Parr et al., Nat. Med. 3:1145-9 (1997); the contents of which are herein incorporated by reference in their entirety). In some embodiments, the viral genome comprises a promoter that is sufficient for expression, e.g., in a target cell, of a payload (e.g., an antibody, e.g., an anti-tau antibody) encoded by a transgene.

[0138] In some embodiments, the promoter results in expression of the polypeptide(s) encoded in the payload region of the viral genome of the AAV particle, in the cell being targeted for expression of the payload (e.g., a functional anti-tau antibody) for a sufficient period of time in targeted cells, tissues, or organs.

[0139] In some embodiments, the promoter results in expression of the payload for at least 1 hour to 24 hours, e.g., 1-5 hours, 1-10 hours, 1-15 hours, 1-20 hours, 2-5 hours, 2-10 hours, 2-15 hours, 2-20 hours, or 2-24 hours, 3-5 hours, 3-15 hours, 3-20 hours, 3-24 hours, 4-5 hours, 4-15 hours, 4-20 hours, 4-24 hours, 5-15 hours, 5-20 hours, 5-23 hours, 6-15 hours, 6-20 hours 6-24 hours, 7-15 hours, 7-20 hours, 7-24 hours, 8-10 hours, 8-15 hours, 8-20 hours, 8-24 hours, 9-10 hours, 9-15 hours, 9-20 hours, 9-24 hours, 10-15 hours, 10-20 hours, 10-23 hours, 11-15 hours, 11-20 hours 11-24 hours, 12-15 hours, 12-20 hours, 12-24 hours, 13-15 hours, 13-20 hours, 13-24 hours, 14-15 hours, 14-20 hours, 14-23 hours, 15-20 hours, 15-24 hours, 16-20 hours, 16-24 hours, 17-20 hours, 17-24 hours, 18-20 hours, 18-24 hours, 19-20 hours, 19-24 hours, 20-24 hours, 21-24 hours, 22-24 hours, or 23-24 hours, e.g., 1 hour, 5 hours, 10 hours, 12 hours, 14 hours, 18 hours, 20 hours, or 24 hours. In some embodiments, the promoter results in expression of the payload for at least 1-7 days, e.g., 1-6 days, 1-5 days, 1-4 days, 1-3 days, 1-2 days, 2-7 days, 2-6 days, 2-5 days, 2-4 days, 2-3 days, 3-7 days, 3-6 days, 3-5 days, 3-4 days, 4-7 days, 4-6 days, 4-5 days, 5-7 days, 5-6 days, or 6-7 days, e.g., 1 day, 5 days, or 7 days. In some embodiments, the promoter results in expression of the payload for 1 week to 4 weeks, e.g., 1-3 weeks, 1-2 weeks, 2-4 weeks, 2-3 weeks, or 3-4 weeks. In some embodiments, the promoter results in expression of the payload for at least 1-12 months, at least 10-24 months, or at least 1-10 years, e.g., at least 1 year, at least 5 years, at least 10 years, or more than 10 years.

[0140] In some embodiments, the promoter may be a naturally occurring promoter, or a non-naturally occurring promoter. In some embodiments, the promoter is from a naturally expressed protein. In some embodiments, the promoter is an engineered promoter. In some embodiments, the promoter comprises a viral promoter, plant promoter, and/or a mammalian promoter. In some embodiments, the promoter may be a human promoter. In some embodiments, the promoter may be truncated. In some embodiments, the promoter is not a cell specific promoter. In some embodiments, the promoter is a ubiquitous promoter. In some embodiments, the promoter is a cell- or tissue-specific promoter, such as neuronal or glial cell specific promoter.

[0141] In some embodiments, the viral genome comprises a promoter that results in expression in one or more, e.g., multiple, cells and/or tissues, e.g., a ubiquitous promoter. In some embodiments, a promoter that results in expression in one or more tissues includes but is not limited to a human elongation factor 1α-subunit (EF1α) promoter, a cytomegalovirus (CMV) immediate-early enhancer and/or promoter, a chicken β-actin (CBA) promoter (including a minimal CBA promoter) and its derivative CAG, a β glucuronidase (GUSB) promoter (such as one with a size of about 350-400 nts, or 378 nts), or ubiquitin C (UBC) promoter (such as one with a size of about 300-350 nts, or 332 nts).

[0142] Other promoters include is a neurofilament light (NFL) promoter (such as one with a size of about 600-700 nucleotides, or about 650 nucleotides); a neurofilament heavy (NFH) promoter (such as one with a size of about 900-950 nucleotides, or about 920 nucleotides); a scn8a promoter. (such as one with a size of about 450-500 nucleotides or about 470 nucleotides); a phosphoglycerate kinase 1 (PGK) promoter; a CB6 promoter.

[0143] In some embodiments, the viral genome comprises a ubiquitous promoter as described in Yu et al. (Molecular Pain 2011, 7:63), Soderblom et al. (E. Neuro 2015), Gill et al., (Gene Therapy 2001, Vol. 8, 1539-1546), and Husain et al. (Gene Therapy 2009), each of which are incorporated by reference in their entirety. In some embodiments, the viral genome comprises a ubiquitous promoter chosen from CMV, CBA (including derivatives CAG, CB6, CBh, etc.), EF-1α, PGK, UBC, GUSB (hGBp), or UCOE (promoter of HNRPA2B1-CBX3).

[0144] In some embodiments, a tissue-specific expression elements can be used to restrict expression to certain cell types such as, but not limited to, muscle specific promoters, B cell promoters, monocyte promoters, leukocyte promoters, macrophage promoters, pancreatic acinar cell promoters, endothelial cell promoters, lung tissue promoters, astrocyte promoters, or nervous system promoters which can be used to restrict expression to neurons, astrocytes, or oligodendrocytes.

[0145] In some embodiments, the viral genome comprises a muscle-specific promoter, e.g., a promoter that results in expression in a muscle cell. In some embodiments, a muscle-specific promoter includes but is not limited to a mammalian muscle creatine kinase (MCK) promoter, a mammalian desmin (DES) promoter, a mammalian troponin I (TNNI2) promoter, a synthetic C5-12 promoter, and a mammalian skeletal alpha-actin (ASKA) promoter (see, e.g., U.S. Pat. Publication US20110212529, the contents of which are herein incorporated by reference in their entirety).

[0146] In some embodiments, the viral genome comprises a nervous system specific promoter, e.g., a promoter that results in expression of a payload in a neuron, an astrocyte, and/or an oligodendrocyte. In some embodiments, a nervous system specific promoter that results in expression in neurons includes but is not limited to a neuron-specific enolase (NSE) promoter, a platelet-derived growth factor (PDGF) promoter, a platelet-derived growth factor B-chain (PDGF-β) promoter, a synapsin (Syn) promoter, a methyl-CpG binding protein 2 (MeCP2) promoter, a Ca²⁺/calmodulin-dependent protein kinase II (CaMKII) promoter, a metabotropic glutamate receptor 2 (mGluR2) promoter, a neurofilament light (NFL) or heavy (NFH) promoter, a β-globin minigene nβ2 promoter, a preproenkephalin (PPE) promoter, a enkephalin (Enk) promoter, and an excitatory amino acid transporter 2 (EAAT2) promoter.

[0147] In some embodiments, a nervous system specific promoter that results in expression in astrocytes includes but is not limited to a glial fibrillary acidic protein (GFAP) promoter and a EAAT2 promoter. In some embodiments, a nervous system specific promoter that results in expression in oligodendrocytes includes but is not limited to a myelin basic protein (MBP) promoter. In some embodiments, the viral genome comprises a nervous system specific promoter as described in Husain et al. (Gene Therapy 2009), Passini and Wolfe (J. Virol. 2001, 12382-12392), Xu et al. (Gene Therapy 2001, 8, 1323-1332), Drews et al. (Mamm Genome (2007) 18:723-731), and Raymond et al. (Journal of Biological Chemistry (2004) 279(44) 46234-46241), each of which are incorporated by reference in their entirety.

[0148] In some embodiments, the viral genome comprises a liver promoter, e.g. a promoter that results in expression a liver cell. In some embodiments, the liver promoter is chosen from human α-1-antitrypsin (hAAT) or thyroxine binding globulin (TBG). In some embodiments, the viral genome comprises an RNA pol III promoter. In some embodiments, the RNA pol III promoter is chosen from U6 or H1. In some embodiments, the viral genome comprises an endothelial cell promoter, e.g., a promoter that results in expression in an endothelial cell. In some embodiments, the endothelial cell promoter is an intercellular adhesion molecule 2 (ICAM2) promoter.

[0149] In some embodiments, the viral genome comprises a promoter chosen from a CAG promoter, a CBA promoter (e.g., a minimal CBA promoter), a CB promoter, a CMV(IE) promoter and/or enhancer, a GFAP promoter, a synapsin promoter, an ICAM2 promoter, or a functional variant thereof. In some embodiments, the viral genome comprises a CAG promoter, a CMVie enhancer, and a minimal CBA promoter. In some embodiments, the viral genome comprises a CMV(IE) promoter and a CB promoter.

[0150] In some embodiments, the CAG promoter comprises the nucleotide sequence of SEQ ID NO: 2080 or nucleotide sequence with at least 70%, 75%, 80%, 85%, 90%, 95%, or 99% sequence identity thereto. In some embodiments, the CBA promoter (e.g., a minimal CBA promoter) comprises the nucleotide sequence of SEQ ID NO: 2082 or nucleotide sequence with at least 70%, 75%, 80%, 85%, 90%, 95%, or 99% sequence identity thereto. In some embodiments, the CB promoter comprises the nucleotide sequence of SEQ ID NO: 2083 or nucleotide sequence with at least 70%, 75%, 80%, 85%, 90%, 95%, or 99% sequence identity thereto. In some embodiments, the GFAP promoter comprises the nucleotide sequence of SEQ ID NO: 2084 or nucleotide sequence with at least 70%, 75%, 80%, 85%, 90%, 95%, or 99% sequence identity thereto. In some embodiments, the GFAP promoter comprises the nucleotide sequence of SEQ ID NO: 2085 or nucleotide sequence with at least 70%, 75%, 80%, 85%, 90%, 95%, or 99% sequence identity thereto. In some embodiments, the synapsin promoter comprises the nucleotide sequence of SEQ ID NO: 2086 or nucleotide sequence with at least 70%, 75%, 80%, 85%, 90%, 95%, or 99% sequence identity thereto. In some embodiments, the CMV(IE) promoter comprises the nucleotide sequence of SEQ ID NO: 2239 or nucleotide sequence with at least 70%, 75%, 80%, 85%, 90%, 95%, or 99% sequence identity thereto. In some embodiments, the CMV(ie) enhancer comprises e nucleotide sequence of SEQ ID NO: 2081 or nucleotide sequence with at least 70%, 75%, 80%, 85%, 90%, 95%, or 99% sequence identity thereto.

[0151] In some embodiments, the viral genome comprises an enhancer element, a promoter and/or a 5′UTR intron. The enhancer element, also referred to herein as an “enhancer,” may be, but is not limited to, a CMV enhancer, the promoter may be, but is not limited to, a CMV, CBA, UBC, GUSB, NSE, Synapsin, MeCP2, and GFAP promoter and the 5′UTR/intron may be, but is not limited to, SV40, and CBA-MVM. As a non-limiting example, the enhancer, promoter and/or intron used in combination may be: (1) CMV enhancer, CMV promoter, SV40 5′UTR intron; (2) CMV enhancer, CBA promoter, SV 40 5′UTR intron; (3) CMV enhancer, CBA promoter, CBA-MVM 5′UTR intron; (4) UBC promoter; (5) GUSB promoter; (6) NSE promoter; (7) Synapsin promoter; (8) MeCP2 promoter; and (9) GFAP promoter.

[0152] In some embodiments, the viral genome comprises a promoter provided in Table 8. In some embodiments, the promoter is chosen from any one of Promoter 1-Promoter 12, or a functional variant thereof. In some embodiments, the promoter comprises the nucleotide sequence of any one of SEQ ID NOs: 2080-2089, 2238 and 2239, or a sequence with at least 70%, 75%, 80%, 85%, 90%, 95% or 99% sequence identity thereto. In some embodiments, the promoter comprises the nucleotide sequence of SEQ ID NO: 2080 or a sequence with at least 70%, 75%, 80%, 85%, 90%, 95% or 99% sequence identity thereto. In some embodiments, the promoter comprises the nucleotide sequence of SEQ ID NO: 2081, or a sequence with at least 70%, 75%, 80%, 85%, 90%, 95% or 99% sequence identity thereto. In some embodiments, the promoter comprises the nucleotide sequence of SEQ ID NO: 2082, or a sequence with at least 70%, 75%, 80%, 85%, 90%, 95% or 99% sequence identity thereto. In some embodiments, the promoter comprises the nucleotide sequence of SEQ ID NO: 2083, or a sequence with at least 70%, 75%, 80%, 85%, 90%, 95% or 99% sequence identity thereto. In some embodiments, the promoter comprises the nucleotide sequence of SEQ ID NO: 2084, or a sequence with at least 70%, 75%, 80%, 85%, 90%, 95% or 99% sequence identity thereto. In some embodiments, the promoter comprises the nucleotide sequence of SEQ ID NO: 2085, or a sequence with at least 70%, 75%, 80%, 85%, 90%, 95% or 99% sequence identity thereto. In some embodiments, the promoter comprises the nucleotide sequence of SEQ ID NO: 2086, or a sequence with at least 70%, 75%, 80%, 85%, 90%, 95% or 99% sequence identity thereto. In some embodiments, the promoter comprises the nucleotide sequence of SEQ ID NO: 2239, or a sequence with at least 70%, 75%, 80%, 85%, 90%, 95% or 99% sequence identity thereto.

[0153] In some embodiments, the viral genome comprises Promoter 1. In some embodiments, the viral genome comprises Promoter 2. In some embodiments, the viral genome comprises Promoter 3. In some embodiments, the viral genome comprises Promoter 4. In some embodiments, the viral genome comprises Promoter 5. In some embodiments, the viral genome comprises Promoter 6. In some embodiments, the viral genome comprises Promoter 7. In some embodiments, the viral genome comprises Promoter 8. In some embodiments, the viral genome comprises Promoter 9. In some embodiments, the viral genome comprises Promoter 10. In some embodiments, the viral genome comprises Promoter 11. In some embodiments, the viral genome comprises Promoter 12.

TABLE 8
Promoter Sequence Regions

| Sequence | | |
|---|---|---|
| Region Name | Sequence Length | SEQ ID NO |
| Promoter 1 | 1715 | 2080 |
| Promoter 2 | 299 | 2081 |
| Promoter 3 | 283 | 2082 |
| Promoter 4 | 260 | 2083 |
| Promoter 5 | 654 | 2084 |
| Promoter 6 | 699 | 2085 |
| Promoter 7 | 557 | 2086 |
| Promoter 8 | 382 | 2087 |
| Promoter 9 | 1736 | 2088 |
| Promoter 10 | 365 | 2089 |
| Promoter 11 | 1714 | 2238 |
| Promoter 12 | 380 | 2239 |

[0154] In some embodiments, the promoter of the viral genome further comprises at least one promoter sub-region. In some embodiments, the promoter comprises Promoter 1, further comprising Promoter 2 and Promoter 3 sub-regions.

[0155] In some embodiments, the viral genome comprises more than one promoter sequence region. In some embodiments, the viral genome comprises at least 2 or more promoters. In some embodiments, the viral genome comprises two promoter sequence regions. In some embodiments, the viral genome comprises three promoter sequence regions. In some embodiments, the viral genome comprises Promoter 4 and Promoter 8. In some embodiments, the viral genome comprises Promoter 12 and Promoter 4. In some embodiments, the promoter is a combination of a 382 nucleotide CMV-enhancer sequence (such as SEQ ID NO: 2087) and a 260 nucleotide CBA-promoter sequence (such as SEQ ID NO: 2083).

[0156] In some embodiments, the viral genome comprises a promoter that has a length between about 100-2000 nucleotides. In some embodiments, the promoter has a length between about 100-700 nucleotides, e.g., between about 100-600 nucleotides, 100-500 nucleotides, 100-400 nucleotides, 100-300 nucleotides, 100-200 nucleotides, 200-700 nucleotides, 200-600 nucleotides, 200-500 nucleotides, 200-400 nucleotides, 200-300 nucleotides, 300-700 nucleotides, 300-600 nucleotides, 300-500 nucleotides, 300-400 nucleotides, 400-700 nucleotides, 400-600 nucleotides, 400-500 nucleotides, 500-700 nucleotides, 500-600 nucleotides, or 600-700 nucleotides. In some embodiments, the promoter has a length between about 900-2000 nucleotides, e.g., between about 900-1000 nucleotides, 9000-1500 nucleotides, 1000-1500 nucleotides, 1000-2000 nucleotides, or 1500-2000 nucleotides. In some embodiments, the promoter has a length between about 1500 to about 1800 nucleotides, e.g., about 1715 nucleotides. In some embodiments, the promoter has a length of about 500 to about 750 nucleotides, e.g., about 557 nucleotides or about 699 nucleotides. In some embodiments, the promoter has a length of about 200 to about 450 nucleotides, e.g., about 260 nucleotides, about 283 nucleotides, about 299 nucleotides, about 365 nucleotides, about 380 nucleotides, about 382 nucleotides, about 399 nucleotides, about 557 nucleotides, about 654 nucleotides, or about 699 nucleotides. As a non-limiting example, the viral genome comprises a promoter region that is about 1714 nucleotides in length. As a non-limiting example, the viral genome comprises a promoter region that is about 1715 nucleotides in length. As a non-limiting example, the viral genome comprises a promoter region that is about 1736 nucleotides in length.

### Genetic Element Component: Exons

[0157] In some embodiments, the viral genome comprises an exon sequence region. In some embodiments, the viral genome comprises at least 2, at least 3, at least 4, or at least 5 exon regions. In some embodiments, the viral genome comprises 2 exon regions.

[0158] In some embodiments, the viral genome comprises an ie exon 1 region. In some embodiments, the ie exon 1 region comprises the nucleotide sequence of SEQ ID NO: 2090, or a nucleotide sequence with at least 70%, 75%, 80%, 85%, 90%, 95%, or 99% sequence identity thereto. In some embodiments, the viral genome comprises a human beta-globin exon region. In some embodiments, the human beta-globin exon region comprises a nucleotide sequence of SEQ ID NO: 2093 or a sequence with at least 70%, 75%, 80%, 85%, 90%, 95%, or 99% sequence identity thereto. In some embodiments, the viral genome comprises an ie exon 1 region and a human beta-globin exon region.

[0159] In some embodiments, the exon region is provided in Table 9. In some embodiments, the viral genome comprises an exon region chosen from Exon1, Exon2, Exon3, Exon4, or a function variant thereof. In some embodiments, the viral genome comprises Exon1. In some embodiments, the viral genome comprises Exon4. In some embodiments, the viral genome comprises Exon1 and Exon4. In some embodiments, the exon region comprises the nucleotide sequence of any one of SEQ ID NOs: 2090-2094, or a nucleotide sequence with at least 70%, 75%, 80%, 85%, 90%, 95%, or 99% sequence identity thereto. In some embodiments, the exon region comprises the nucleotide sequence of SEQ ID NO: 2090, or a nucleotide sequence with at least 70%, 75%, 80%, 85%, 90%, 95%, or 99% sequence identity thereto. In some embodiments, the exon region comprises the nucleotide sequence of SEQ ID NO: 2093, or a nucleotide sequence with at least 70%, 75%, 80%, 85%, 90%, 95%, or 99% sequence identity thereto.

TABLE 9
Exon Sequence Regions

| Sequence | | |
|---|---|---|
| Region Name | Sequence Length | SEQ ID NO |
| Exon1 | 134 | 2090 |
| Exon2 | 102 | 2091 |
| Exon3 | 59 | 2092 |
| Exon4 | 53 | 2093 |
| Exon5 | 54 | 2094 |

[0160] In some embodiments, the exon comprises about 50-nucleotides in length, e.g., about 50-140 nucleotides, about 50-130 nucleotides, about 50-120 nucleotides, about 50-110 nucleotides, about 50-100 nucleotides, about 50-90 nucleotides, about 50-80 nucleotides, about 50-80 nucleotides, about 50-70 nucleotides, about 50-60 nucleotides, about 60-150 nucleotides, about 60-140 nucleotides, about 60-130 nucleotides, about 60-120 nucleotides, about 60-110 nucleotides, about 60-100 nucleotides, about 60-90 nucleotides, about 60-80 nucleotides, about 60-80 nucleotides, about 60-70 nucleotides, about 70-150 nucleotides, about 70-140 nucleotides, about 70-130 nucleotides, about 70-120 nucleotides, about 70-110 nucleotides, about 70-100 nucleotides, about 70-90 nucleotides, about 70-80 nucleotides, about 80-150 nucleotides, about 80-140 nucleotides, about 80-130 nucleotides, about 80-120 nucleotides, about 80-110 nucleotides, about 80-100 nucleotides, about 80-90 nucleotides, about 90-150 nucleotides, about 90-140 nucleotides, about 90-130 nucleotides, about 90-120 nucleotides, about 90-110 nucleotides, about 90-100 nucleotides, about 100-150 nucleotides, about 100-140 nucleotides, about 100-130 nucleotides, about 100-120 nucleotides, about 100-110 nucleotides, about 110-150 nucleotides, about 110-140 nucleotides, about 110-130 nucleotides, about 110-120 nucleotides, about 120-150 nucleotides, about 120-140 nucleotides, about 120-130 nucleotides, about 130-150 nucleotides, about 130-140 nucleotides, or about 140-150 nucleotides. In some embodiments, the exon region comprises about 120 nucleotides to about 140 nucleotides in length, e.g., about 134 nucleotides. In some embodiments, the exon region comprises about 40 nucleotides to about 60 nucleotides in length, e.g., about 53 nucleotides.

[0161] In some embodiments, the exon region(s) may, independently, have a length between 20-80, 30-70, 40-60, about 50, 100-150, 110-140, 120-140, 120-150, 125-140, 130-145, 130-135, or about 135 nucleotides. In certain embodiments, the viral genome comprises an exon region that is about 53 nucleotides in length. In certain embodiments, the viral genome comprises an exon region that is about 54 nucleotides in length. In certain embodiments, the viral genome comprises an exon region that is about 59 nucleotides in length. In certain embodiments, the viral genome comprises an exon region that is about 102 nucleotides in length. In certain embodiments, the viral genome comprises an exon region that is about 134 nucleotides in length.

### Viral Genome Component: Introns

[0162] In some embodiments, the viral genome comprises at least one element to enhance the expression of a transgene encoding a payload. In some embodiments, an element that enhances expression of a transgene comprises an introns or functional variant thereof. In some embodiments, the viral genome comprises an intron or functional variant thereof. In some embodiments, the viral genome comprises at least two intron regions, e.g., at least 2 intron regions, at least 3 intron regions, at least 4 intron regions, or 5 or more intron regions.

[0163] In some embodiments, the viral genome comprises an intron chosen from a MVM intron (67-97 bps), an F.IX truncated intron 1 (300 bps), an β-globin SD/immunoglobulin heavy chain splice acceptor intron (250 bps), an adenovirus splice donor/immunoglobin splice acceptor intron (500 bps), SV40 late splice donor/splice acceptor intron (19S/16S) (180 bps), or a hybrid adenovirus splice donor/IgG splice acceptor intron (230 bps).

[0164] In some embodiments, the viral genome comprises a human beta-globin intron region. In some embodiments, the human beta-globin intron region comprises the nucleotide sequence of SEQ ID NO: 2097 or 2240, or a nucleotide sequence with at least 70%, 75%, 80%, 85%, 90%, 95% or 99% sequence identity to SEQ ID NO: 2097 or 2240. In some embodiments, the viral genome comprises an ie intron 1 region. In some embodiments, the ie intron 1 region comprises the nucleotide sequence of SEQ ID NO: 2095, or a nucleotide sequence with at least 70%, 75%, 80%, 85%, 90%, 95% or 99% sequence identity thereto. In some embodiments, the viral genome comprises a first human beta-globin intron region, e.g., a first human beta-globin intron region comprising SEQ ID NO: 2240, and a second human beta-globin intron region, e.g., a second human beta-globin intron region comprising SEQ ID NO: 2097. In some embodiments, an ie intron 1 region, e.g., an ie intron 1 region comprising SEQ ID NO: 2095, and a human beta-globin intron region, e.g., a human beta-globin intron region comprising SEQ ID NO: 2240.

[0165] In some embodiments, the viral genome comprises an intron region provided in Table 10. In some embodiments, the viral genome comprises an intron region chosen from any one of Intron1 to Intron15, or functional variants thereof. In some embodiments, the viral genome comprises Intron1, or a functional variant thereof. In some embodiments, the viral genome comprises Intron3, or a functional variant thereof. In some embodiments, the viral genome comprises Intron12, or a functional variant thereof. In some embodiments, the viral genome comprises Intron 12 and Intron3, or functional variants thereof. In some embodiments, the viral genome comprises Intron1 and Intron12, or functional variants thereof. In some embodiments, the viral genome comprises Intron1 and Intron3, or functional variants thereof. As used herein, functional variants refer to sequences with at least 70%, 75%, 80%, 85%, 90%, 95%, or 99% sequence identity to the reference sequence.

[0166] In some embodiments, the viral genome comprises an intron region of any one of SEQ ID NOs: 2095-2105, 2240, or 2256-2258, or a sequence with at least 70%, 75%, 80%, 85%, 90%, 95%, or 99% sequence identity thereto. In some embodiments, the intron region comprises the nucleotide sequence of SEQ ID NO: 2095, or a nucleotide sequence with at least 70%, 75%, 80%, 85%, 90%, 95%, or 99% sequence identity thereto. In some embodiments, the intron region comprises the nucleotide sequence of SEQ ID NO: 2097, or a nucleotide sequence with at least 70%, 75%, 80%, 85%, 90%, 95%, or 99% sequence identity thereto. In some embodiments, the intron region comprises the nucleotide sequence of SEQ ID NO: 2040, or a nucleotide sequence with at least 70%, 75%, 80%, 85%, 90%, 95%, or 99% sequence identity thereto. In some embodiments, the intron region comprises the nucleotide sequence of SEQ ID NO: 2095 or a nucleotide sequence with at least 70%, 75%, 80%, 85%, 90%, 95%, or 99% sequence identity thereto; and the nucleotide sequence of SEQ ID NO: 2097 or a nucleotide sequence with at least 70%, 75%, 80%, 85%, 90%, 95%, or 99% sequence identity thereto.

TABLE 10
Intron Sequence Regions

| Sequence | | |
|---|---|---|
| Region Name | Sequence Length | SEQ ID NO |
| Intron1 | 32 | 2095 |
| Intron2 | 15 | 2096 |
| Intron3 | 347 | 2097 |
| Intron4 | 168 | 2098 |
| Intron5 | 73 | 2099 |
| Intron6 | 73 | 2100 |
| Intron7 | 73 | 2101 |
| Intron8 | 53 | 2102 |
| Intron9 | 172 | 2103 |
| Intron10 | 1074 | 2104 |
| Intron11 | 41 | 2105 |
| Intron12 | 566 | 2240 |
| Intron13 | 491 | 2256 |
| Intron14 | 387 | 2257 |
| Intron15 | 292 | 2258 |

[0167] In some embodiments, the viral genome comprises an intron region comprising about 10 nucleotides to about 1200 nucleotides in length. In some embodiments, the intron region comprises about 10-100 nucleotides in length, e.g., about 10-90 nucleotides, about 10-80 nucleotides, about 10-70 nucleotides, about 10-60 nucleotides, about 10-50 nucleotides, about 10-40 nucleotides, about 10-30 nucleotides, about 10-20 nucleotides, about 20-100 nucleotides, about 20-90 nucleotides, about 20-80 nucleotides, about 20-70 nucleotides, about 20-60 nucleotides, about 20-50 nucleotides, about 20-40 nucleotides, about 20-30 nucleotides, about 30-100 nucleotides, about 30-90 nucleotides, about 30-80 nucleotides, about 30-70 nucleotides, about 30-60 nucleotides, about 30-50 nucleotides, about 30-40 nucleotides, about 40-100 nucleotides, about 40-90 nucleotides, about 40-80 nucleotides, about 40-70 nucleotides, about 40-60 nucleotides, about 40-50 nucleotides, about 50-100, about 50-90 nucleotides, about 50-80 nucleotides, about 50-70 nucleotides, about 50-60 nucleotides, about 60-100 nucleotides, about 60-90 nucleotides, about 60-80 nucleotides, about 60-70 nucleotides, about 70-100 nucleotides, about 70-90 nucleotides, about 70-80 nucleotides, about 80-100 nucleotides, about 80-90 nucleotides, or about 90-100 nucleotides in length. In some embodiments, the intron region comprises about 100-600 nucleotides in length, e.g., about 100-500 nucleotides, about 100-400 nucleotides, about 100-300 nucleotides, about 100-200 nucleotides, about 200-600 nucleotides, about 200-500 nucleotides, about 200-400 nucleotides, about 200-300 nucleotides, about 300-600 nucleotides, about 300-500 nucleotides, about 300-400 nucleotides, about 400-600 nucleotides, about 400-500 nucleotides, or about 500-600 nucleotides in length. In some embodiments, the intron region comprises about 900-1200 nucleotides in length, e.g., about 900-1100 nucleotides, about 900-1000 nucleotides, about 1000-1200 nucleotides, about 1000-1100 nucleotides, or about 1100-1200 nucleotides.

[0168] In some embodiments, the intron region comprises about 20 to about 40 nucleotides in length, e.g., about 32 nucleotides. In some embodiments, the intron region comprises about 340 to about 360 nucleotides in length, e.g., about 347 nucleotides. In some embodiments, the intron region comprises about 550 to about 570 nucleotides in length, e.g., about 566 nucleotides.

[0169] In some embodiments, the intron may be 15 nucleotides in length, 32 nucleotides in length, 41 nucleotides in length, 53 nucleotides in length, 54 nucleotides in length, 59 nucleotides in length, 73 nucleotides in length, 102 nucleotides in length, 134 nucleotides in length, 168 nucleotides in length, 172 nucleotides in length, 292 nucleotides in length, 347 nucleotides in length, 387 nucleotides in length, 491 nucleotides in length, 566 nucleotides in length, or 1074 nucleotides in length.

### Viral Genome Component: Tags

[0170] In some embodiments, the viral genome comprises a nucleic acid sequence encoding a tag polypeptide (e.g., a tag sequence or tag sequence region herein). As used herein, the term “tag” indicates a polynucleotide sequence appended to the payload, that once expressed may be used to identify the expressed payload. Alternatively, the term “tag” may indicate a polynucleotide sequence appended to the payload that signals for retention of the expressed payload in a particular region of the cell (e.g., endoplasmic reticulum).

[0171] In some embodiments, the AAV particle viral genome comprises more than one tag sequence region. In some embodiments, the AAV particle viral genome comprises two tag sequence regions. In some embodiments, the AAV particle viral genome comprises three tag sequence regions. In some embodiments, the AAV particle viral genome comprises more than three tag sequence regions.

[0172] In some embodiments, the viral genome comprises two or more tag sequences. In some embodiments, the tag comprises a nucleotide sequence appended to the transgene encoding the payload (e.g., an antibody molecule described herein), wherein the tag polypeptide encoded by the tag nucleic acid sequence is used to identify the encoded payload, e.g., antibody molecule. In other embodiments, a tag is a nucleotide sequence appended to the payload that signals for retention of the expressed payload in a region of the cell (e.g., endoplasmic reticulum or nucleus).

[0173] In some embodiments, the viral genome comprises a tag sequence provided in Table 12. In some embodiments, the viral genome comprises any one of Tag1-Tag5 or a functional variant thereof. In some embodiments, the tag sequence comprises the nucleotide sequence of any one of SEQ ID NOs: 2118-2121 or 2255, or a nucleotide sequence with at least 70%, 75%, 80%, 85%, 90%, 95% or 99% sequence identity thereto. In some embodiments, the encoded tag polypeptide comprises an amino acid sequence encoded by of any one of SEQ ID NOs: 2118-2121 or 2255, or an amino acid sequence with at least 70%, 75%, 80%, 85%, 90%, 95% or 99% sequence identity thereto.

TABLE 12
Tag Sequence Regions

| Sequence | | |
|---|---|---|
| Region Name | Sequence Length | SEQ ID NO |
| Tag1 | 27 | 2118 |
| Tag2 | 21 | 2119 |
| Tag3 | 18 | 2120 |
| Tag4 | 18 | 2121 |
| Tag5 | 18 | 2255 |

[0174] In some embodiments, the nucleotide sequence encoding the tag polypeptide comprises about 10-50 nucleotides in length, e.g., about 10-40 nucleotides, about 10-30 nucleotides, about 10-20 nucleotides, about 20-50 nucleotides, about 20-40 nucleotides, about 20-30 nucleotides, about 30-50 nucleotides, about 30-40 nucleotides, or about 40 to 50 nucleotides. In some embodiments, the nucleotide sequence encoding the tag polypeptide comprises about 10 nucleotides to about 30 nucleotides, e.g., about 18 nucleotides or about 21 nucleotides. In some embodiments, the nucleotide sequence encoding the tag polypeptide comprises about 20 nucleotides to about 40 nucleotides, e.g., about 27 nucleotides.

[0175] In some embodiments, the AAV particle viral genome comprises no tag sequence region. For example, the AAV particle viral genome of any one of Tables 94 and 95 may comprise a tag sequence region (see TAU_ITR252, TAU_ITR253, TAU_ITR256, TAU_ITR257, TAU_ITR260, TAU_ITR261, TAU_ITR264, and TAU_ITR265). Otherwise identical AAV particle viral genomes, except for the lack of the tag sequence region, are expressly contemplated. For example, an AAV particle viral genome corresponding to TAU_ITR252 but lacks the tag sequence may comprise, from 5′ to 3′, sequence elements represented by SEQ ID NOs: 2076, 2080, 4563, 1741, 2170, 1730, 1957, 2122, and 2078 (i.e., the tag sequence SEQ ID NO: 2118 is lacking).

[0176] Viral Genome Component: Polyadenylation Sequence

[0177] In some embodiments, the viral genome of the AAV particles of the present disclosure comprise a polyadenylation sequence. In some embodiments, the viral genome comprises a polyadenylation (referred to herein as poly A, polyA, or poly-A) sequence between the 3′ end of the transgene encoding the payload and the 5′ end of the 3′ITR. In some embodiments, the viral genome comprises two or more polyA sequences. In some embodiments, the viral genome does not comprise a polyA sequence.

[0178] In some embodiments, the viral genome comprises a rabbit globin polyA signal region. In some embodiments, the rabbit globin polyA signal region comprises the nucleotide sequence of SEQ ID NO: 2122, or a nucleotide sequence with at least 70%, 75%, 80%, 85%, 90%, 95%, or 99% sequence identity thereto.

TABLE 13
PolyA Signal Sequence Regions

| Sequence | | |
|---|---|---|
| Region Name | Sequence Length | SEQ ID NO |
| PolyA1 | 127 | 2122 |
| PolyA2 | 477 | 2123 |
| PolyA3 | 552 | 2124 |

[0179] In some embodiments, the polyA signal region is provided in Table 13. In some embodiments, the viral genome comprises a polyA sequence region chosen from polyA1, polyA2, polyA3, or a functional variant thereof. In some embodiments, the viral genome comprises the polyA signal region of PolyA1 or a functional variant thereof. In some embodiments, the polyA signal region comprises the nucleotide sequence of any one of SEQ ID NOs: 2122-2124, or a sequence with at least 70%, 75%, 80%, 85%, 90%, 95%, or 99% sequence identity thereto. In some embodiments, the polyA signal region comprises the nucleotide sequence of SEQ ID NO: 2122, or a nucleotide sequence with at least 70%, 75%, 80%, 85%, 90%, 95%, or 99% sequence identity thereto.

[0180] In some embodiments, the polyA signal region comprises a length of about 100-600 nucleotides, e.g., about 100-500 nucleotides, about 100-400 nucleotides, about 100-300 nucleotides, about 100-200 nucleotides, about 200-600 nucleotides, about 200-500 nucleotides, about 200-400 nucleotides, about 200-300 nucleotides, about 300-600 nucleotides, about 300-500 nucleotides, about 300-400 nucleotides, about 400-600 nucleotides, about 400-500 nucleotides, or about 500-600 nucleotides. In some embodiments, the polyA signal region comprises a length of about 100 to 150 nucleotides, e.g., about 127 nucleotides. In some embodiments, the polyA signal region comprises a length of about 450 to 500 nucleotides, e.g., about 477 nucleotides. In some embodiments, the polyA signal region comprises a length of about 520 to about 560 nucleotides, e.g., about 552 nucleotides. In some embodiments, the polyA signal region comprises a length of about 127 nucleotides.

### Viral Genome Component: Filler Sequences

[0181] In some embodiments, the viral genome comprises a filler sequence regions. In some embodiments, the viral genome comprises two or more filler sequences. A filler sequence is provided in Table 14. In some embodiments, the viral genome comprises FILLER1, FILLER2, or a functional variant thereof. In some embodiments, the viral genome comprises FILLER 1 and FILLER2. In some embodiments, the filler sequence comprises the nucleotide sequence of SEQ ID NO: 2125, or a nucleotide sequence with at least 70%, 75%, 80%, 85%, 90%, 95%, 99% or 100% sequence identity thereto. In some embodiments, the filler sequence comprises the nucleotide sequence of SEQ ID NO: 2126, or a nucleotide sequence with at least 70%, 75%, 80%, 85%, 90%, 95%, 99% or 100% sequence identity thereto. In some embodiments, the filler sequence comprises the nucleotide sequence of SEQ ID NO: 2125 or a nucleotide sequence with at least 70%, 75%, 80%, 85%, 90%, 95%, 99% or 100% sequence identity thereto; and the nucleotide sequence of SEQ ID NO: 2126 or a nucleotide sequence with at least 70%, 75%, 80%, 85%, 90%, 95%, 99% or 100% sequence identity thereto.

TABLE 14
Filler Sequence Regions

| Sequence | | |
|---|---|---|
| Region Name | Sequence Length | SEQ ID NO |
| FILLER1 | 1153 | 2125 |
| FILLER2 | 1240 | 2126 |

[0182] In some embodiments, the filler sequence comprises about 100-2000, about 200 to 1900, about 300 to 1800, about 400 to 1700, about 500 to 1600, about 600 to 1500, about 700 to 1500, about 800 to 1500, about 900 to 1500, about 1000-1500 nucleotides in length, e.g., about 1000-1400 nucleotides, about 1000-1300 nucleotides, about 1000-1200 nucleotides, about 1200-1500 nucleotides, about 1200-1400 nucleotides, about 1200-1300 nucleotides, about 1300-1500 nucleotides, about 1300-1400 nucleotides, or about 1400-1500 nucleotides. In some embodiments, the filler sequence comprises about 1140 nucleotides to about 1160 nucleotides in length, e.g., about 1153 nucleotides. In some embodiments, the filler sequence comprises about 1230 nucleotides to about 1250 nucleotides in length, e.g., about 1240 nucleotides.

[0183] In some embodiments, the AAV particle viral genome does not comprise a filler sequence region.

### Viral Genome Component: Untranslated Regions (UTRs)

[0184] In some embodiments, the viral genome comprises an untranslated region (UTR). In some embodiments, a wild type UTR of a gene are transcribed but not translated. In some embodiments, the 5′ UTR starts at the transcription start site and ends at the start codon and the 3′ UTR starts immediately following the stop codon and continues until the termination signal for transcription.

[0185] In some embodiments, a UTR comprises a feature found in abundantly expressed genes of specific target organs to enhance the stability and protein production. As a non-limiting example, a 5′ UTR from mRNA normally expressed in the liver (e.g., albumin, serum amyloid A, Apolipoprotein A/B/E, transferrin, alpha fetoprotein, erythropoietin, or Factor VIII) may be used in the viral genome of an AAV particle described herein to enhance expression in hepatic cell lines or liver.

[0186] In some embodiments, a viral genome comprises a 5′UTR, e.g., a wild-type (e.g., naturally occurring) 5′UTR or a recombinant (e.g., non-naturally occurring) 5′UTR. In some embodiments, a 5′ UTR comprises a feature which plays a role in translation initiation. In some embodiments, a UTR, e.g., a 5′ UTR, comprises a Kozak sequence. In some embodiments, a Kozak sequence is involved in the process by which the ribosome initiates translation of many genes. In some embodiments, a Kozak sequence has the consensus sequence of CCR(A/G)CCAUGG, where R is a purine (adenine or guanine) three bases upstream of the start codon (ATG), which is followed by another ‘G’. In some embodiments, a Kozak sequence comprises the nucleotide sequence of GAGGAGCCACC (SEQ ID NO: 4543) or a nucleotide sequence with at least 95-99% sequence identity thereto. In some embodiments, a Kozak sequence comprises the nucleotide sequence of GCCGCCACCATG (SEQ ID NO: 2114), or a nucleotide sequence with at least 95-99% sequence identity thereto. In some embodiments, a viral genome comprises a 5′UTR comprising a Kozak sequence. In some embodiments, a viral genome comprises a 5′UTR that does not comprise a Kozak sequence.

[0187] In some embodiments, the 5′UTR in the viral genome does not include a Kozak sequence.

[0188] In some embodiments, the viral genome comprises a 3′UTR, e.g., a wild-type (e.g., naturally occurring) 3′UTR or a recombinant (e.g., non-naturally occurring) 3′UTR. In some embodiments, a 3′ UTR comprises an element that modulates, e.g., increases or decreases, stability of a nucleic acid. In some embodiments, a 3′ UTR comprises stretches of Adenosines and Uridines embedded therein, e.g., an AU rich signature. These AU rich signatures are generally prevalent in genes with high rates of turnover and are described, e.g., in Chen et al, 1995, the contents of which are herein incorporated by reference in its entirety. In some embodiments, an AR rich signature comprises an AU rich element (ARE). In some embodiments, a 3′UTR comprises an ARE chosen from a class I ARE (e.g., c-Myc and MyoD), a class II ARE (e.g., GM-CSF and TNF-α), a class III ARE (e.g., c-Jun and Myogenin), or combination thereto. In some embodiments, a class I ARE comprises several dispersed copies of an AUUUA motif within U-rich regions. In some embodiments, a class II ARE comprises two or more overlapping UUAUUUA(U/A)(U/A) nonamers. In some embodiments, a class III ARE comprises U rich regions and/or do not contain an AUUUA motif. In some embodiments, an ARE destabilizes the messenger.

[0189] In some embodiments, a 3′UTR comprises a binding site for a protein member of the ELAV family. In some embodiments, a 3′ UTR comprises a binding site for an HuR protein. In some embodiments, an HuR protein binds to an ARE of any one of classes I-III and/or increases the stability of mRNA. Without wishing to be bound by theory, it is believed in some embodiments, that a 3′UTR comprising an HuR specific binding sites will lead to HuR binding and, stabilization of a message in vivo.

[0190] In some embodiments, the 3′ UTR of the viral genome comprises an oligo(dT) sequence for templated addition of a poly-A tail.

[0191] In some embodiments, the viral genome comprises a miRNA seed, binding site and/or full sequence. Generally, microRNAs (or miRNA or miR) are 19-25 nucleotide noncoding RNAs that bind to the sites of nucleic acid targets and down-regulate gene expression either by reducing nucleic acid molecule stability or by inhibiting translation. In some embodiments, the microRNA sequence comprises a seed region, e.g., a sequence in the region of positions 2-8 of the mature microRNA, which sequence has perfect Watson-Crick complementarity to the miRNA target sequence of the nucleic acid. In some embodiments, the viral genome may be engineered to include, alter or remove at least one miRNA binding site, sequence, or seed region.

[0192] In some embodiments, a UTR from any gene known in the art may be incorporated into the viral genome of an AAV particle described herein. These UTRs, or portions thereof, may be placed in the same orientation as in the gene from which they were selected, or they may be altered in orientation or location. In some embodiments, the UTR used in the viral genome of the AAV particle may be inverted, shortened, lengthened, made with one or more other 5′ UTRs or 3′ UTRs known in the art. In some embodiments, an altered UTR, comprises a UTR has been changed in some way in relation to a reference sequence. For example, a 3′ or 5′ UTR may be altered relative to a wild type or native UTR by the change in orientation or location as taught above or may be altered by the inclusion of additional nucleotides, deletion of nucleotides, swapping or transposition of nucleotides. In some embodiments, the viral genome comprises an artificial UTR, e.g., a UTR that is not a variant of a wild-type, e.g., a naturally occurring, UTR. In some embodiments, the viral genome comprises a UTR selected from a family of transcripts whose proteins share a common function, structure, feature or property.

[0193] In some embodiments, the viral genome of the AAV particle comprises at least one artificial UTRs which is not a variant of a wild type UTR. In some embodiments, the viral genome of the AAV particle comprises UTRs which have been selected from a family of transcripts whose proteins share a common function, structure, feature or property.

### Viral Genome Component: miR Binding Site

[0194] Tissue- or cell-specific expression of the AAV viral particles of the disclosure can be enhanced by introducing tissue- or cell-specific regulatory sequences, e.g., promoters, enhancers, microRNA binding sites, e.g., a detargeting site. Without wishing to be bound by theory, it is believed that an encoded miR binding site can modulate, e.g., prevent, suppress, or otherwise inhibit, the expression of a gene of interest on the viral genome of the disclosure, based on the expression of the corresponding endogenous microRNA (miRNA) or a corresponding controlled exogenous miRNA in a tissue or cell, e.g., a non-targeting cell or tissue. In some embodiments, a miR binding site modulates, e.g., reduces, expression of the payload encoded by a viral genome of an AAV particle described herein in a cell or tissue where the corresponding mRNA is expressed.

[0195] In some embodiments, the viral genome of an AAV particle described herein comprises a nucleotide sequence encoding a microRNA binding site, e.g., a detargeting site. In some embodiments, the viral genome of an AAV particle described herein comprises a nucleotide sequence encoding a miR binding site, a microRNA binding site series (miR BSs), or a reverse complement thereof.

[0196] In some embodiments, the nucleotide sequence encoding the miR binding site series or the miR binding site is located in the 3′-UTR region of the viral genome (e.g., 3′ relative to the nucleic acid sequence encoding a payload), e.g., before the polyA sequence, 5′-UTR region of the viral genome (e.g., 5′ relative to the nucleic acid sequence encoding a payload), or both.

[0197] In some embodiments, the encoded miR binding site series comprise at least 1-5 copies, e.g., at least 1-3, 2-4, 3-5, 1, 2, 3, 4, 5 or more copies of a miR binding site (miR BS). In some embodiments, all copies are identical, e.g., comprise the same miR binding site. In some embodiments, the miR binding sites within the encoded miR binding site series are continuous and not separated by a spacer. In some embodiments, the miR binding sites within an encoded miR binding site series are separated by a spacer, e.g., a non-coding sequence. In some embodiments, the spacer is at least about 5 to 10 nucleotides, e.g., about 7-8 nucleotides, nucleotides in length. In some embodiments, the spacer coding sequence or reverse complement thereof comprises one or more of (i) GGAT; (ii) CACGTG; (iii) GCATGC, or a repeat of one or more of (i)-(iii).

[0198] In some embodiments, the encoded miR binding site series comprise at least 1-5 copies, e.g., at least 1-3, 2-4, 3-5, 1, 2, 3, 4, 5 or more copies of a miR binding site (miR BS). In some embodiments, at least 1, 2, 3, 4, 5, or all of the copies are different, e.g., comprise a different miR binding site. In some embodiments, the miR binding sites within the encoded miR binding site series are continuous and not separated by a spacer. In some embodiments, the miR binding sites within an encoded miR binding site series are separated by a spacer, e.g., a non-coding sequence. In some embodiments, the spacer is at least about 5 to 10 nucleotides, e.g., about 7-8 nucleotides, in length. In some embodiments, the spacer coding sequence or reverse complement thereof comprises one or more of (i) GGAT; (ii) CACGTG; (iii) GCATGC, or a repeat of one or more of (i)-(iii).

[0199] In some embodiments, the encoded miR binding site is substantially identical (e.g., at least 70%, 75%, 80%, 85%, 90%, 95%, 99% or 100% identical), to the miR in the host cell. In some embodiments, the encoded miR binding site comprises at least 1, 2, 3, 4, or 5 mismatches or no more than 6, 7, 8, 9, or 10 mismatches to a miR in the host cell. In some embodiments, the mismatched nucleotides are contiguous. In some embodiments, the mismatched nucleotides are non-contiguous. In some embodiments, the mismatched nucleotides occur outside the seed region-binding sequence of the miR binding site, such as at one or both ends of the miR binding site. In some embodiments, the encoded miR binding site is 100% identical to the miR in the host cell.

[0200] In some embodiments, the nucleotide sequence encoding the miR binding site is substantially complimentary (e.g., at least 70%, 75%, 80%, 85%, 90%, 95%, 99% or 100% identical), to the miR in the host cell. In some embodiments, to complementary sequence of the nucleotide sequence encoding the miR binding site comprises at least 1, 2, 3, 4, or 5 mismatches or no more than 6, 7, 8, 9, or 10 mismatches to a miR in the host cell. In some embodiments, the mismatched nucleotides are contiguous. In some embodiments, the mismatched nucleotides are non-contiguous. In some embodiments, the mismatched nucleotides occur outside the seed region-binding sequence of the miR binding site, such as at one or both ends of the miR binding site. In some embodiments, the encoded miR binding site is 100% identical to the miR in the host cell.

[0201] In some embodiments, an encoded miR binding site or sequence region is at least about 10 to about 125 nucleotides in length, e.g., at least about 10 to 50 nucleotides, 10 to 100 nucleotides, 50 to 100 nucleotides, 50 to 125 nucleotides, or 100 to 125 nucleotides in length. In some embodiments, an encoded miR binding site or sequence region is at least about 7 to about 28 nucleotides in length, e.g., at least about 8-28 nucleotides, 7-28 nucleotides, 8-18 nucleotides, 12-28 nucleotides, 20-26 nucleotides, 22 nucleotides, 24 nucleotides, or 26 nucleotides in length, and optionally comprises at least one consecutive region (e.g., 7 or 8 nucleotides) complementary to the seed sequence of a miRNA (e.g., a miR122, a miR142, a miR183).

[0202] In some embodiments, the encoded miR binding site is complementary to a miR expressed in liver or hepatocytes, such as miR122. In some embodiments, the encoded miR binding site or encoded miR binding site series comprises a miR122 binding site sequence. In some embodiments, the encoded miR122 binding site comprises the nucleotide sequence of ACAAACACCATTGTCACACTCCA (SEQ ID NO: 4566), or a nucleotide sequence having at least 50%, 55%, 60%, 65%, 70%, 75%, 80%, 85%, 90%, at least 95%, at least 99%, or 100% sequence identity, or having at least one, two, three, four, five, six, or seven modifications but no more than ten modifications to SEQ ID NO: 4566, e.g., wherein the modification can result in a mismatch between the encoded miR binding site and the corresponding miRNA. In some embodiments, the viral genome comprises at least 3, 4, or 5 copies of the encoded miR122 binding site, e.g., an encoded miR122 binding site series, optionally wherein the encoded miR122 binding site series comprises the nucleotide sequence of: ACAAACACCATTGTCACACTCCACACAAACACCATTGT CACACTCCACACAAACACCATTGTCACACTCCA (SEQ ID NO: 4567), or a nucleotide sequence having at least 50%, 55%, 60%, 65%, 70%, 75%, 80%, 85%, 90%, at least 95%, at least 99%, or 100% sequence identity, or having at least one, two, three, four, five, six, or seven modifications but no more than ten modifications to SEQ ID NO: 4567, e.g., wherein the modification can result in a mismatch between the encoded miR binding site and the corresponding miRNA. In some embodiments, at least two of the encoded miR122 binding sites are connected directly, e.g., without a spacer. In other embodiments, at least two of the encoded miR122 binding sites are separated by a spacer, e.g., 1, 2, 3, 4, 5, 6, 7, 8, 9, or 10 nucleotides in length, which is located between two or more consecutive encoded miR122 binding site sequences. In embodiments, the spacer is at least about 5 to 10 nucleotides, e.g., about 7-8, in length. In some embodiments, the spacer coding sequence or reverse complement thereof comprises one or more of (i) GGAT; (ii) CACGTG; (iii) GCATGC, or a repeat of one or more of (i)-(iii). In some embodiments, an encoded miR binding site series comprises at least 3-5 copies (e.g., 4 copies) of a miR122 binding site, with or without a spacer, wherein the spacer is at least about 5 to 10 nucleotides, e.g., about 7-8 nucleotides, in length.

[0203] In some embodiments, the encoded miR binding site is complementary to a miR expressed in hematopoietic lineage, including immune cells (e.g., antigen presenting cells or APC, including dendritic cells (DCs), macrophages, and B-lymphocytes). In some embodiments, the encoded miR binding site complementary to a miR expressed in hematopoietic lineage comprises a nucleotide sequence disclosed, e.g., in US 2018/0066279, the contents of which are incorporated by reference herein in its entirety.

[0204] In some embodiments, the encoded miR binding site or encoded miR binding site series comprises a miR-142-3p binding site sequence. In some embodiments, the encoded miR-142-3p binding site comprises the nucleotide sequence of TCCATAAAGTAGGAAACACTACA (SEQ ID NO: 4568), a nucleotide sequence having at least 50%, 55%, 60%, 65%, 70%, 75%, 80%, 85%, 90%, at least 95%, at least 99%, or 100% sequence identity, or having at least one, two, three, four, five, six, or seven modifications but no more than ten modifications to SEQ ID NO: 4568, e.g., wherein the modification can result in a mismatch between the encoded miR binding site and the corresponding miRNA. In some embodiments, the viral genome comprises at least 3, 4, or 5 copies of the encoded miR-142-3p binding site, e.g., an encoded miR-142-3p binding site series. In some embodiments, an encoded miR binding site series comprises at least 3-5 copies (e.g., 4 copies) of a miR-142-3p binding site, with or without a spacer, wherein the spacer is at least about 5 to 10 nucleotides, e.g., about 7-8 nucleotides, in length.

[0205] In some embodiments, the encoded miR binding site is complementary to a miR expressed in a DRG (dorsal root ganglion) neuron, e.g., a miR183, a miR182, and/or miR96 binding site. In some embodiments, the encoded miR binding site complementary to a miR expressed in expressed in a DRG neuron comprises a nucleotide sequence disclosed, e.g., in WO2020/132455, the contents of which are incorporated by reference herein in its entirety.

[0206] In some embodiments, the encoded miR binding site or encoded miR binding site series comprises a miR183 binding site sequence. In some embodiments, the encoded miR183 binding site comprises the nucleotide sequence of AGTGAATTCTACCAGTGCCATA (SEQ ID NO: 4569), or a nucleotide sequence having at least 50%, 55%, 60%, 65%, 70%, 75%, 80%, 85%, 90%, at least 95%, at least 99%, or 100% sequence identity, or having at least one, two, three, four, five, six, or seven modifications but no more than ten modifications to SEQ ID NO: 4569, e.g., wherein the modification can result in a mismatch between the encoded miR binding site and the corresponding miRNA. In some embodiments, the sequence complementary to the seed sequence corresponds to the double underlined of the encoded miR-183 binding site sequence. In some embodiments, the viral genome comprises at least comprises at least 3, 4, or 5 copies of the encoded miR183 binding site, e.g. an encoded miR183 binding site. In some embodiments, an encoded miR binding site series comprises at least 3-5 copies (e.g., 4 copies) of a miR183 binding site, with or without a spacer, wherein the spacer is at least about 5 to 10 nucleotides, e.g., about 7-8 nucleotides, in length.

[0207] In some embodiments, the encoded miR binding site or encoded miR binding site series comprises a miR182 binding site sequence. In some embodiments, the encoded miR182 binding site comprises, the nucleotide sequence of AGTGTGAGTTCTACCATTGCCAAA (SEQ ID NO: 4570), a nucleotide sequence having at least 50%, 55%, 60%, 65%, 70%, 75%, 80%, 85%, 90%, at least 95%, at least 99%, or 100% sequence identity, or having at least one, two, three, four, five, six, or seven modifications but no more than ten modifications to SEQ ID NO: 4570, e.g., wherein the modification can result in a mismatch between the encoded miR binding site and the corresponding miRNA. In some embodiments, the viral genome comprises at least 3, 4, or 5 copies of the encoded miR182 binding site, e.g., an encoded miR182 binding site series. In some embodiments, an encoded miR binding site series comprises at least 3-5 copies (e.g., 4 copies) of a miR182 binding site, with or without a spacer, wherein the spacer is at least about 5 to 10 nucleotides, e.g., about 7-8 nucleotides, in length.

[0208] In some embodiments, the encoded miR binding site or encoded miR binding site series comprises a miR96 binding site sequence. In some embodiments, the encoded miR96 binding site comprises the nucleotide sequence of AGCAAAAATGTGCTAGTGCCAAA (SEQ ID NO: 4571), a sequence having at least 50%, 55%, 60%, 65%, 70%, 75%, 80%, 85%, 90%, at least 95%, at least 99%, or 100% sequence identity, or having at least one, two, three, four, five, six, or seven modifications but no more than ten modifications to SEQ ID NO: 4571, e.g., wherein the modification can result in a mismatch between the encoded miR binding site and the corresponding miRNA. In some embodiments, the viral genome comprises at least 3, 4, or 5 copies of the encoded miR96 binding site, e.g., an encoded miR96 binding site series. In some embodiments, an encoded miR binding site series comprises at least 3-5 copies (e.g., 4 copies) of a miR96 binding site, with or without a spacer, wherein the spacer is at least about 5 to 10 nucleotides, e.g., about 7-8, in length.

[0209] In some embodiments, the encoded miR binding site series comprises a miR122 binding site, a miR142 binding site, a miR183 binding site, a miR182 binding site, a miR 96 binding site, or a combination thereof. In some embodiments, the encoded miR binding site series comprises at least 3, 4, or 5 copies of a miR122 binding site, a miR142 binding site, a miR183 binding site, a miR182 binding site, a miR 96 binding site, or a combination thereof. In some embodiments, at least two of the encoded miR binding sites are connected directly, e.g., without a spacer. In other embodiments, at least two of the encoded miR binding sites are separated by a spacer, e.g., 1, 2, 3, 4, 5, 6, 7, 8, 9, or 10 nucleotides in length, which is located between two or more consecutive encoded miR binding site sequences. In embodiments, the spacer is at least about 5 to 10 nucleotides, e.g., about 7-8 nucleotides, in length. In some embodiments, the spacer coding sequence or reverse complement thereof comprises one or more of (i) GGAT; (ii) CACGTG; (iii) GCATGC, or a repeat of one or more of (i)-(iii). In some embodiments, an encoded miR binding site series comprises at least 3-5 copies (e.g., 4 copies) of a combination of at least two, three, four, five, or all of a miR122 binding site, a miR142 binding site, a miR183 binding site, a miR182 binding site, a miR96 binding site, with or without a spacer, wherein the spacer is at least about 5 to 10 nucleotides, e.g., about 7-8 nucleotides, in length.

### Payloads

[0210] The AAV particles of the present disclosure comprise at least one payload region. As used herein, “payload” or “payload region” refers to one or more polynucleotides or polynucleotide regions encoded by or within a viral genome or an expression product of such polynucleotide or polynucleotide region, e.g., a transgene, a polynucleotide encoding a polypeptide or multi-polypeptide or a modulatory nucleic acid or regulatory nucleic acid. Payloads of the present disclosure typically encode polypeptides (e.g., antibodies or antibody-based compositions) or fragments or variants thereof.

[0211] The payload region may be constructed in such a way as to reflect a region similar to or mirroring the natural organization of an mRNA.

[0212] The payload region may comprise a combination of coding and non-coding nucleic acid sequences.

[0213] In some embodiments, the AAV payload region may encode a coding or non-coding RNA.

[0214] In some embodiments, the AAV particle comprises a viral genome with a payload region comprising nucleic acid sequences encoding more than one polypeptide of interest (e.g., an antibody). In such an embodiment, a viral genome encoding more than one polypeptide may be replicated and packaged into a viral particle. A target cell transduced with a viral particle comprising more than one polypeptide may express each of the polypeptides in a single cell.

[0215] In some embodiments, an AAV particle comprises a viral genome with a payload region comprising a nucleic acid sequence encoding a heavy chain and a light chain of an antibody, or fragments thereof. The heavy chain and light chain are expressed and assembled to form the antibody which is secreted.

[0216] In some embodiments, the payload region may comprise at least one inverted terminal repeat (ITR), a promoter region, an intron region, and a coding region. In some embodiments, the coding region comprises a heavy chain region and/or a light chain region of an antibody, or a fragment thereof, and any two components may be separated by a linker region.

[0217] In some embodiments, the coding region may comprise a payload region with a heavy chain and light chain sequence separated by a linker and/or a cleavage site. In some embodiments, the heavy and light chain sequence is separated by an IRES sequence. In some embodiments, the heavy and light chain sequence is separated by a foot and mouth virus sequence. In some embodiments, the heavy and light chain sequence is separated by a foot and mouth virus sequence and a furin cleavage site. In some embodiments, the heavy and light chain sequence is separated by a porcine teschovirus-1 virus sequence. In some embodiments, the heavy and light chain sequence is separated by a porcine teschovirus-1 virus and a furin cleavage site. In some embodiments, the heavy and light chain sequence is separated by a 5xG4S sequence (“5xG4S” disclosed as SEQ ID NO: 4538).

[0218] Where the AAV particle payload region encodes a polypeptide, the polypeptide may be a peptide or protein. A protein encoded by the AAV particle payload region may comprise an antibody, an antibody related composition, a secreted protein, an intracellular protein, an extracellular protein, and/or a membrane protein. The encoded proteins may be structural or functional. In addition to the antibodies or antibody-based composition, proteins encoded by the payload region may include, in combination, certain mammalian proteins involved in immune system regulation. The AAV viral genomes encoding polypeptides described herein may be useful in the fields of human disease, viruses, infections, veterinary applications and a variety of in vivo and in vitro settings.

[0219] In some embodiments, the AAV particles are useful in the field of medicine for the treatment, prophylaxis, palliation, or amelioration of neurological diseases and/or disorders.

### Antibodies and Antibody-Based Compositions

[0220] Payload regions of the AAV particles may encode polypeptides that form one or more functional antibodies or antibody-based compositions. As used herein, the term “antibody” is referred to in the broadest sense and specifically covers various embodiments including, but not limited to monoclonal antibodies, polyclonal antibodies, multispecific antibodies (e.g. bispecific antibodies formed from at least two intact antibodies), and antibody fragments (e.g., diabodies) so long as they exhibit a desired biological activity (e.g., “functional”). Antibodies are primarily amino-acid based molecules but may also comprise one or more modifications (including, but not limited to the addition of sugar moieties, fluorescent moieties, chemical tags, etc.).

[0221] In some embodiments, the payload region of the AAV particles encodes two or more functional antibodies or antigen-binding fragments thereof, such as scFv (in either VH-linker-VL configuration or VL-linker-VH configuration), Fab, F(ab′)₂, etc. In certain embodiments, the two or more antibodies or fragments thereof comprise one specific for tau N-terminus (such as the N-terminal domain N-terminal to the 1N domain, or residues 15-25 or 1-about 50), one specific for tau mid-domain (such as the mid-domain comprising, consisting essentially, of consisting of residues between the 2N and R1 domains, or residues about 95-about 250 of the human tau protein), and one specific for tau C-terminal domain (such as the C-terminal domain comprising, consisting essentially, of consisting of residues C-terminal to the R4 domain, or residues about 370-441 of the human tau protein). The antibody or fragment thereof may be specific for one or more epitopes or phosphorylated Ser and/or Thr residues in the N-, mid- and/or C-terminal domains. Exemplary and non-limiting N-terminal epitopes may include residues 15-25 or 15-30. Exemplary and non-limiting mid-domain epitopes may include residues 125-131 or 234-246. Exemplary and non-limiting mid-domain epitopes may include pT181, pS199, pS202/pT205, pT212/pS214, and/or pT217. Exemplary and non-limiting C-terminal domain epitopes may include pS396, pS404, and/or pS409. In certain embodiments, the antibody or fragment thereof recognizes a 3D conformation epitope with residues not contiguous on the preminary sequence. Exemplary and non-limiting N-terminal-specific antibodies include IPN002, and antibodies that either binds to the same epitope thereof or competes binding therewith. Exemplary and non-limiting mid-domain-specific antibodies include AT08, PT3, UCB, PT76, and antibodies that either binds to the same epitope thereof or competes binding therewith. Exemplary and non-limiting C-terminal domain-specific antibodies include PHF1, C10.2, and antibodies that either binds to the same epitope thereof or competes binding therewith. Exemplary and non-limiting C-terminal domain-specific antibody fragments include PHF1 antibody fragments described herein, such as those in any one of SEQ ID NOs: 4547-4562, those with a VH sequence comprising any one of SEQ ID NOs: 1839, 1841, and 2170, or those with a VL sequence comprising SEQ ID NO: 4565.

[0222] As used herein, “antibody-based” or “antibody-derived” compositions are monomeric or multi-meric polypeptides which comprise at least one amino-acid region derived from a known or parental antibody sequence and at least one amino acid region derived from a non-antibody sequence, e.g., mammalian protein.

[0223] Payload regions may encode polypeptides that form or function as any antibody, including antibodies that are known in the art and/or antibodies that are commercially available. The encoded antibodies may be therapeutic, diagnostic, or for research purposes. Further, polypeptides may include fragments of such antibodies or antibodies that have been developed to comprise one or more of such fragments (e.g., variable domains or complementarity determining regions (CDRs)).

[0224] In some embodiments, the viral genome of the AAV particles may comprise nucleic acids which have been engineered to enable expression of antibodies, antibody fragments, or components of any of those described in U.S. Pat. No. 7,041,807 related to YYX epitope; US20090175884, US20110305630, US20130330275 related to misfolded proteins in cancer; US20040175775 related to PrP in eye fluid; US20030114360 related to copolymers and methods of treating prion-related diseases; WO2009121176 related to insulin-induced gene peptide compositions; US20030022243, WO2003000853 related to protein aggregation assays; WO200078344 related to prion protein peptides and uses thereof. Each of these publications are incorporated by reference in their entireties.

### Antibody Generation

[0225] In some embodiments, viral genomes of the AAV particles may encode antibodies or antibody-based compositions produced using methods known in the art. Such methods may include, but are not limited to, immunization and display technologies (e.g., phage display, yeast display, and ribosomal display). Antibodies may be developed, for example, using any naturally occurring or synthetic antigen. As used herein, an “antigen” is an entity which induces or evokes an immune response in an organism. An immune response is characterized by the reaction of the cells, tissues and/or organs of an organism to the presence of a foreign entity. Such an immune response typically leads to the production by the organism of one or more antibodies against the foreign entity, e.g., antigen or a portion of the antigen. As used herein, “antigens” also refer to binding partners for specific antibodies or binding agents in a display library.

[0226] In some embodiments, the sequences of the polypeptides to be encoded in the viral genomes may be derived from antibodies produced using hybridoma technology. Host animals (e.g. mice, rabbits, goats, and llamas) may be immunized by an injection with an antigenic protein to elicit lymphocytes that specifically bind to the antigen. Lymphocytes may be collected and fused with immortalized cell lines to generate hybridomas which can be cultured in a suitable culture medium to promote growth. The antibodies produced by the cultured hybridomas may be subjected to analysis to determine binding specificity of the antibodies for the target antigen. Once antibodies with desirable characteristics are identified, corresponding hybridomas may be subcloned through limiting dilution procedures and grown by standard methods. The antibodies produced by these cells may be isolated and purified using standard immunoglobulin purification procedures.

[0227] In some embodiments, the sequences of the polypeptides to be encoded in the viral genomes may be produced using heavy and light chain variable region cDNA sequences selected from hybridomas or from other sources. Sequences encoding antibody variable domains expressed by hybridomas may be determined by extracting RNA molecules from antibody-producing hybridoma cells and producing cDNA by reverse transcriptase polymerase chain reaction (PCR). PCR may be used to amplify cDNA using primers specific for heavy and light chain sequences. PCR products may then be subcloned into plasmids for sequence analysis. Antibodies may be produced by insertion of resulting variable domain sequences into expression vectors.

[0228] In some embodiments, the sequences of the polypeptides to be encoded in the viral genomes may be generated using display technologies. Display technologies used to generate polypeptides may include any of the display techniques (e.g. display library screening techniques) disclosed in International Patent Application No. WO2014074532, the contents of which are herein incorporated by reference in their entirety. In some embodiments, synthetic antibodies may be designed, selected, or optimized by screening target antigens using display technologies (e.g. phage display technologies). Phage display libraries may comprise millions to billions of phage particles, each expressing unique antibody fragments on their viral coats. Such libraries may provide richly diverse resources that may be used to select potentially hundreds of antibody fragments with diverse levels of affinity for one or more antigens of interest (McCafferty, et al., 1990. Nature. 348:552-4; Edwards, B. M. et al., 2003. JMB. 334: 103-18; Schofield, D. et al., 2007. Genome Biol. 8, R254 and Pershad, K. et al., 2010. Protein Engineering Design and Selection. 23:279-88; the contents of each of which are herein incorporated by reference in their entirety). Often, the antibody fragments present in such libraries comprise scFv antibody fragments, comprising a fusion protein of V_{H} and V_{L} antibody domains joined by a flexible linker. In some cases, scFvs may contain the same sequence with the exception of unique sequences encoding variable loops of the CDRs. In some cases, scFvs are expressed as fusion proteins, linked to viral coat proteins (e.g. the N-terminus of the viral pIII coat protein). V_{L} chains may be expressed separately for assembly with V_{H} chains in the periplasm prior to complex incorporation into viral coats. Precipitated library members may be sequenced from the bound phage to obtain cDNA encoding desired scFvs. Antibody variable domains or CDRs from such sequences may be directly incorporated into antibody sequences for recombinant antibody production or mutated and utilized for further optimization through in vitro affinity maturation.

[0229] In some embodiments, the sequences of the polypeptides to be encoded in the viral genomes may be produced using yeast surface display technology, wherein antibody variable domain sequences may be expressed on the cell surface of Saccharomyces cerevisiae. Recombinant antibodies may be developed by displaying the antibody fragment of interest as a fusion to e.g. Aga2p protein on the surface of the yeast, where the protein interacts with proteins and small molecules in a solution. scFvs with affinity toward desired receptors may be isolated from the yeast surface using magnetic separation and flow cytometry. Several cycles of yeast surface display and isolation may be done to attain scFvs with desired properties through directed evolution.

[0230] In some embodiments, the sequence of the polypeptides to be encoded in the viral genomes (e.g., antibodies) may be designed by VERSITOPE™ Antibody Generation and other methods used by BIOATLA® and described in United States Patent Publication No. US20130281303, the contents of which are herein incorporated by reference in their entirety. In brief, recombinant monoclonal antibodies are derived from B-cells of a host immuno-challenged with one or more target antigens. These methods of antibody generation do not rely on immortalized cell lines, such as hybridoma, thereby avoiding some of the associated challenges i.e., genetic instability and low production capacity, producing high affinity and high diversity recombinant monoclonal antibodies. In some embodiments, the method is a natural diversity approach. In another embodiment, the method is a high diversity approach.

[0231] In some embodiments, the sequences of the polypeptides to be encoded in the viral genomes may be generated using the BIOATLA® natural diversity approach. In the natural diversity approach of generating recombinant monoclonal antibodies described in United States Patent Publication No. US20130281303, the original pairings of variable heavy (V_{H}) and variable light (V_{L}) domains are retained from the host, yielding recombinant monoclonal antibodies that are naturally paired. These may be advantageous due to a higher likelihood of functionality as compared to non-natural pairings of V_{H} and V_{L}. To produce the recombinant monoclonal antibodies, first a non-human host (i.e., rabbit, mouse, hamster, guinea pig, camel or goat) is immuno-challenged with an antigen of interest. In some embodiments, the host may be a previously challenged human patient. In other embodiments, the host may not have been immuno-challenged. B-cells are harvested from the host and screened by fluorescence activated cell sorting (FACS), or other method, to create a library of B-cells enriched in B-cells capable of binding the target antigen. The cDNA obtained from the mRNA of a single B-cell is then amplified to generate an immunoglobulin library of V_{H} and V_{L} domains. This library of immunoglobulins is then cloned into expression vectors capable of expressing the V_{H} and V_{L}domains, wherein the V_{H} and V_{L} domains remain naturally paired. The library of expression vectors is then used in an expression system to express the V_{H} and V_{L} domains in order to create an antibody library. Screening of the antibody library yields antibodies able to bind the target antigen, and these antibodies can be further characterized. Characterization may include one or more of the following: isoelectric point, thermal stability, sedimentation rate, folding rate, neutralization or antigen activity, antagonist or agonistic activity, expression level, specific and non-specific binding, inhibition of enzymatic activity, rigidity/flexibility, shape, charge, stability across pH, in solvents, under UV radiation, in mechanical stress conditions, or in sonic conditions, half-life, and glycosylation.

[0232] In some embodiments, the sequences of the polypeptides to be encoded in the viral genomes may be generated using the BIOATLA® high diversity approach. In the high diversity approach of generating recombinant monoclonal antibodies described in United States Patent Publication No. US20130281303, additional pairings of variable heavy (V_{H}) and variable light (V_{L}) domains are attained. To produce the recombinant monoclonal antibodies, B-cells harvested from the host are screened by fluorescence activated cell sorting (FACS), panning, or other method, to create a library of B-cells enriched in B-cells capable of binding the target antigen. The cDNA obtained from the mRNA of the pooled B-cells is then amplified to generate an immunoglobulin library of V_{H} and V_{L} domains. This library of immunoglobulins is then used in a biological display system (mammalian, yeast or bacterial cell surface display systems) to generate a population of cells displaying antibodies, fragments or derivatives comprising the V_{H} and V_{L} domains wherein, the antibodies, fragments or derivatives comprise V_{H} and V_{L} domain combinations that were not present in the B-cells in vivo. Screening of the cell population by FACS, with the target antigen, yields a subset of cells capable of binding the target antigen and the antibodies displayed on these cells can be further characterized. In an alternate embodiment of the high diversity approach, the immunoglobulin library comprises only V_{H} domains obtained from the B-cells of the immuno-challenged host, while the V_{L} domain(s) are obtained from another source.

[0233] In some embodiments, the sequences of the polypeptides to be encoded in the viral genomes may be evolved using BIOATLA® comprehensive approaches. The methods of generating recombinant monoclonal antibodies as described in United States Patent Publication No. US20130281303, further comprises evolving the recombinant antibody by comprehensive positional evolution (CPE™), CPE™ followed by comprehensive protein synthesis (CPS™) PCR shuffling, or other method.

[0234] In some embodiments, the sequence of the polypeptides to be encoded in the viral genomes (e.g., antibodies) may be derived from any of the BIOATLA® protein evolution methods described in International Publication WO2012009026, the contents of which are herein incorporated by reference in their entirety. In this method, mutations are systematically performed throughout the polypeptide or molecule of interest, a map is created providing useful informatics to guide the subsequent evolutionary steps. Not wishing to be bound by theory, these evolutionary methods typically start with a template polypeptide and a mutant is derived therefrom, which has desirable properties or characteristics. Non-limiting examples of evolutionary techniques include polymerase chain reaction (PCR), error prone PCR, oligonucleotide-directed mutagenesis, cassette mutagenesis, shuffling, assembly PCR, sexual PCR mutagenesis, in vivo mutagenesis, site-specific mutagenesis, gene reassembly, gene site saturated mutagenesis, in vitro mutagenesis, ligase chain reaction, oligonucleotide synthesis or any combination thereof.

[0235] In some embodiments, the BIOATLA® evolution method is Comprehensive Positional Evolution (CPE™). In CPE, naturally occurring amino acid variants are generated for each of the codons of the template polypeptide, wherein 63 different codon options exist for each amino acid variant. A set of polypeptides with single amino acid mutations are generated and the mutations are then confirmed by sequencing or other method known in the art and each amino acid change screened for improved function, neutral mutations, inhibitory mutations, expression, and compatibility with the host system. An EvoMap™ is created that describes in detail the effects of each amino acid mutation on the properties and characteristics of that polypeptide. The data from the EvoMap™ may be utilized to produce polypeptides with more than one amino acid mutation, wherein the resultant multi-site mutant polypeptides can be screened for desirable characteristics.

[0236] In some embodiments, the BIOATLA® evolution method is Synergy Evolution, wherein an EvoMap™ is used to identify amino acid positions to introduce 2-20 mutations simultaneously to produce a combinatorial effect. The resulting multi-site mutant polypeptides may be screened on one or more pre-determined characteristics to identify “upmutants” wherein the function of the mutant is improved as compared to the parent polypeptide. In some embodiments, Synergy Evolution is used to enhance binding affinity of an antibody.

[0237] In some embodiments, the BIOATLA® evolution method is Flex Evolution, wherein an EvoMap™ is used to identify fully mutable sites within a polypeptide that may then be targeted for alteration, such as introduction of glycosylation sites or chemical conjugation.

[0238] In some embodiments, the BIOATLA® evolution method is Comprehensive Positional Insertion Evolution (CPI™), wherein an amino acid is inserted after each amino acid of a template polypeptide to generate a set of lengthened polypeptides. CPI may be used to insert 1, 2, 3, 4, or 5 amino acids at each new position. The resultant lengthened polypeptides are sequenced and assayed for one or more pre-determined properties and evaluated in comparison to its template or parent molecule. In some embodiments, the binding affinity and immunogenicity of the resultant polypeptides are assayed. In some embodiments, the lengthened polypeptides are further mutated and mapped to identify polypeptides with desirable characteristics.

[0239] In some embodiments, the BIOATLA® evolution approach is Comprehensive Positional Deletion Evolution (CPD™), wherein each amino acid of the template polypeptide is individually and systematically deleted one at a time. The resultant shortened polypeptides are then sequenced and evaluated by assay for at least one pre-determined feature. In some embodiments, the shortened polypeptides are further mutated and mapped to identify polypeptides with desirable characteristics.

[0240] In some embodiments, the BIOATLA® evolution approach is Combinatorial Protein Synthesis (CPS™), wherein mutants identified in CPE, CPI, CPD, or other evolutionary techniques are combined for polypeptide synthesis. These combined mutant polypeptides are then screened for enhanced properties and characteristics. In some embodiments CPS is combined with any of the aforementioned evolutionary or polypeptide synthesis methods.

[0241] In some embodiments, the sequence of the polypeptides to be encoded in the viral genomes (e.g., antibodies) may be derived from the BIOATLA® Comprehensive Integrated Antibody Optimization (CIAO!™) described in U.S. Pat. No. 8,859,467, the contents of which are herein incorporated by reference in their entirety. The CIAO!™ method allows for simultaneous evolution of polypeptide performance and expression optimization, within a eukaryotic cell host (i.e., mammalian or yeast cell host). First, an antibody library is generated in a mammalian cell production host by antibody cell surface display, wherein the generated antibody library targets a particular antigen of interest. The antibody library is then screened by any method known in the art, for one or more properties or characteristics. One or more antibodies of the library, with desirable properties or characteristics are chosen for further polypeptide evolution by any of the methods known in the art, to produce a library of mutant antibodies by antibody cell surface display in a mammalian cell production host. The generated mutant antibodies are screened for one or more predetermined properties or characteristics, whereby an upmutant is selected, wherein the upmutant has enhanced or improved characteristics as compared to the parent template polypeptide.

[0242] In some embodiments, the sequences of the polypeptides to be encoded in the viral genomes may be humanized by the methods of BIOATLA® as described in United States Patent Publication US20130303399, the contents of which are herein incorporated by reference in their entirety. In this method, for generating enhanced full-length humanized antibodies in mammalian cells, no back-mutations are required to retain affinity to the antigen and no CDR grafting or phage-display is necessary. The generated humanized antibody has reduced immunogenicity and equal or greater affinity for the target antigen as compared to the parent antibody. The variable regions or CDRs of the generated humanized antibody are derived from the parent or template, whereas the framework and constant regions are derived from one or more human antibodies. To start, the parent, or template antibody is selected, cloned and each CDR sequence identified and synthesized into a CDR fragment library. Double stranded DNA fragment libraries for V_{H} and V_{L} are synthesized from the CDR fragment encoding libraries, wherein at least one CDR fragment library is derived from the template antibody and framework (FW) fragment encoding libraries, wherein the FW fragment library is derived from a pool of human frameworks obtained from natively expressed and functional human antibodies. Stepwise liquid phase ligation of FW and CDR encoding fragments is then used to generate both V_{H} and V_{L} fragment libraries. The V_{H} and V_{L} fragment libraries are then cloned into expression vectors to create a humanization library, which is further transfected into cells for expression of full length humanized antibodies and used to create a humanized antibody library. The humanized antibody library is then screened to determine expression level of the humanized antibodies, affinity or binding ability for the antigen, and additional improved or enhanced characteristics, as compared to the template or parent antibody. Non-limiting examples of characteristics that may be screened include equilibrium dissociation constant (K_{D}), stability, melting temperature (Tₘ), pI, solubility, expression level, reduced immunogenicity, and improved effector function.

[0243] In some embodiments, the sequences of the polypeptides to be encoded in the viral genomes may be generated by the BIOATLA® method for preparing conditionally active antibodies as described in International Publications WO2016033331 and WO2016036916, the contents of which are herein incorporated by reference in their entirety. As used herein, the term “conditionally active” refers to a molecule that is active at an aberrant condition. Further, the conditionally active molecule may be virtually inactive at normal physiological conditions. Aberrant conditions may result from changes in pH, temperature, osmotic pressure, osmolality, oxidative stress, electrolyte concentration, and/or chemical or proteolytic resistance, as non-limiting examples.

[0244] The method of preparing a conditionally active antibody is described in International Publications WO2016033331 and WO2016036916 and summarized herein. Briefly, a wild-type polypeptide is selected and the DNA is evolved to create mutant DNAs. Non-limiting examples of evolutionary techniques that may be used to evolve the DNA include polymerase chain reaction (PCR), error prone PCR, shuffling, oligonucleotide-directed mutagenesis, assembly PCR, sexual PCR mutagenesis, in vivo mutagenesis, site-specific mutagenesis, gene reassembly, gene site saturated mutagenesis, in vitro mutagenesis, ligase chain reaction, oligonucleotide synthesis or any combination thereof. Once mutant DNAs are created, they are expressed in a eukaryotic cell production host (i.e., fungal, insect, mammalian, adenoviral, plant), wherein a mutant polypeptide is produced. The mutant polypeptide and the corresponding wild-type polypeptide are then subjected to assays under both normal physiological conditions and aberrant conditions in order to identify mutants that exhibit a decrease in activity in the assay at normal physiological conditions as compared to the wild-type polypeptide and/or an increase in activity in the assay under aberrant conditions, as compared to the corresponding wild-type polypeptide. The desired conditionally active mutant may then be produced in the aforementioned eukaryotic cell production host.

[0245] In some embodiments, the conditionally active antibody is a “mirac protein” as described by BIOATLA® in U.S. Pat. No. 8,709,755, the contents of which are herein incorporated by reference in their entirety. As used herein “mirac protein” refers to a conditionally active antibody that is virtually inactive at body temperature but active at lower temperatures.

[0246] In some embodiments, the sequence of the polypeptides to be encoded in the viral genomes (e.g., antibodies) may be derived based on any of the BIOATLA™ methods including, but not limited to, VERSITOPE™ Antibody Generation, natural diversity approaches, and high diversity approaches for generating monoclonal antibodies, methods for generation of conditionally active polypeptides, humanized antibodies, mirac proteins, multi-specific antibodies or cross-species active mutant polypeptides, Comprehensive Integrated Antibody Optimization (CIAO!™), Comprehensive Positional Evolution (CPE™), Synergy Evolution, Flex Evolution, Comprehensive Positional Insertion Evolution (CPI™), Comprehensive Positional Deletion Evolution (CPD™), Combinatorial Protein Synthesis (CPS™), or any combination thereof. These methods are described in U.S. Pat. Nos. 8,859,467 and 8,709,755 and United States Publication Nos. US20130281303, US20130303399, US20150065690, US20150252119, US20150086562 and US20100138945, and International Publication Nos. WO2015105888, WO2012009026, WO2011109726, WO2016036916, and WO2016033331, the contents of each of which are herein incorporated by reference in their entirety.

[0247] In some embodiments, antibodies of the present disclosure are generated by any of the aforementioned means to target one or more of the following epitopes of the tau protein; phosphorylated tau peptides, pS396, pS396-pS404, pS404, pS396-pS404-pS422, pS422, pS199, pS199-pS202, pS202, pT181, pT231, cis-pT231, any of the following acetylated sites acK174, acK274, acK280, acK281 and/or any combination thereof

### Antibody Fragments and Variants

[0248] In some embodiments, antibody fragments encoded by payloads comprise antigen binding regions from intact antibodies. Examples of antibody fragments may include, but are not limited to Fab, Fab′, F(ab′)₂, and Fv fragments; diabodies; linear antibodies; single-chain antibody molecules; and multispecific antibodies formed from antibody fragments. Papain digestion of antibodies produces two identical antigen-binding fragments, called “Fab” fragments, each with a single antigen-binding site. Also produced is a residual “Fc” fragment, whose name reflects its ability to crystallize readily. Pepsin treatment yields an F(ab′)2 fragment that has two antigen-binding sites and is still capable of cross-linking antigen. Compounds and/or compositions of the present disclosure may comprise one or more of these fragments. For the purposes herein, an “antibody” may comprise a heavy and light variable domain as well as an Fc region.

[0249] In some embodiments, the Fc region may be a modified Fc region, as described in US Patent Publication US20150065690, wherein the Fc region may have a single amino acid substitution as compared to the corresponding sequence for the wild-type Fc region, wherein the single amino acid substitution yields an Fc region with preferred properties to those of the wild-type Fc region. Non-limiting examples of Fc properties that may be altered by the single amino acid substitution include bind properties or response to pH conditions

[0250] As used herein, the term “native antibody” refers to a usually heterotetrameric glycoprotein of about 150,000 Daltons, composed of two identical light (L) chains and two identical heavy (H) chains. Genes encoding antibody heavy and light chains are known and segments making up each have been well characterized and described (Matsuda, F. et al., 1998. The Journal of Experimental Medicine. 188(11); 2151-62 and Li, A. et al., 2004. Blood. 103(12: 4602-9, the content of each of which are herein incorporated by reference in their entirety). Each light chain is linked to a heavy chain by one covalent disulfide bond, while the number of disulfide linkages varies among the heavy chains of different immunoglobulin isotypes. Each heavy and light chain also has regularly spaced intrachain disulfide bridges. Each heavy chain has at one end a variable domain (V_{H}) followed by a number of constant domains. Each light chain has a variable domain at one end (V_{L}) and a constant domain at its other end; the constant domain of the light chain is aligned with the first constant domain of the heavy chain, and the light chain variable domain is aligned with the variable domain of the heavy chain.

[0251] As used herein, the term “variable domain” refers to specific antibody domains found on both the antibody heavy and light chains that differ extensively in sequence among antibodies and are used in the binding and specificity of each particular antibody for its particular antigen. Variable domains comprise hypervariable regions. As used herein, the term “hypervariable region” refers to a region within a variable domain comprising amino acid residues responsible for antigen binding. The amino acids present within the hypervariable regions determine the structure of the complementarity determining regions (CDRs) that become part of the antigen-binding site of the antibody. As used herein, the term “CDR” refers to a region of an antibody comprising a structure that is complimentary to its target antigen or epitope. Other portions of the variable domain, not interacting with the antigen, are referred to as framework (FW) regions. The antigen-binding site (also known as the antigen combining site or paratope) comprises the amino acid residues necessary to interact with a particular antigen. The exact residues making up the antigen-binding site are typically elucidated by co-crystallography with bound antigen, however computational assessments can also be used based on comparisons with other antibodies (Strohl, W. R. Therapeutic Antibody Engineering. Woodhead Publishing, Philadelphia PA. 2012. Ch. 3, p 47-54, the contents of which are herein incorporated by reference in their entirety). Determining residues making up CDRs may include the use of numbering schemes including, but not limited to, those taught by Kabat [Wu, T. T. et al., 1970, JEM, 132(2):211-50 and Johnson, G. et al., 2000, Nucleic Acids Res. 28(1): 214-8, the contents of each of which are herein incorporated by reference in their entirety], Chothia [Chothia and Lesk, J. Mol. Biol. 196, 901 (1987), Chothia et al., Nature 342, 877 (1989) and Al-Lazikani, B. et al., 1997, J. Mol. Biol. 273(4):927-48, the contents of each of which are herein incorporated by reference in their entirety], Lefranc (Lefranc, M. P. et al., 2005, Immunome Res. 1:3) and Honegger (Honegger, A. and Pluckthun, A. 2001. J. Mol. Biol. 309(3):657-70, the contents of which are herein incorporated by reference in their entirety).

[0252] V_{H} and V_{L} domains have three CDRs each. V_{L} CDRs are referred to herein as CDR-L1, CDR-L2 and CDR-L3, in order of occurrence when moving from N- to C-terminus along the variable domain polypeptide. V_{H} CDRs are referred to herein as CDR-H1, CDR-H2, and CDR-H3, in order of occurrence when moving from N- to C-terminus along the variable domain polypeptide. Each of CDRs have favored canonical structures with the exception of the CDR-H3, which comprises amino acid sequences that may be highly variable in sequence and length between antibodies resulting in a variety of three-dimensional structures in antigen-binding domains (Nikoloudis, D. et al., 2014. Peer J. 2:e456; the contents of which are herein incorporated by reference in their entirety). In some cases, CDR-H3s may be analyzed among a panel of related antibodies to assess antibody diversity. Various methods of determining CDR sequences are known in the art and may be applied to known antibody sequences (Strohl, W. R. Therapeutic Antibody Engineering. Woodhead Publishing, Philadelphia PA. 2012. Ch. 3, p 47-54, the contents of which are herein incorporated by reference in their entirety).

[0253] As used herein, the term “Fv” refers to an antibody fragment comprising the minimum fragment on an antibody needed to form a complete antigen-binding site. These regions consist of a dimer of one heavy chain and one light chain variable domain in tight, non-covalent association. Fv fragments can be generated by proteolytic cleavage but are largely unstable. Recombinant methods are known in the art for generating stable Fv fragments, typically through insertion of a flexible linker between the light chain variable domain and the heavy chain variable domain [to form a single chain Fv (scFv)] or through the introduction of a disulfide bridge between heavy and light chain variable domains (Strohl, W. R. Therapeutic Antibody Engineering. Woodhead Publishing, Philadelphia PA. 2012. Ch. 3, p 46-47, the contents of which are herein incorporated by reference in their entirety).

[0254] As used herein, the term “light chain” refers to a component of an antibody from any vertebrate species assigned to one of two clearly distinct types, called kappa and lambda based on amino acid sequences of constant domains. Depending on the amino acid sequence of the constant domain of their heavy chains, antibodies can be assigned to different classes. There are five major classes of intact antibodies: IgA, IgD, IgE, IgG, and IgM, and several of these may be further divided into subclasses (isotypes), e.g., IgG1, IgG2, IgG3, IgG4, IgA, and IgA2.

[0255] As used herein, the term “single chain Fv” or “scFv” refers to a fusion protein of V_{H} and V_{L} antibody domains, wherein these domains are linked together into a single polypeptide chain by a flexible peptide linker. In some embodiments, the Fv polypeptide linker enables the scFv to form the desired structure for antigen binding. In some embodiments, scFvs are utilized in conjunction with phage display, yeast display or other display methods where they may be expressed in association with a surface member (e.g. phage coat protein) and used in the identification of high affinity peptides for a given antigen.

[0256] As used herein, the term “bispecific antibody” refers to an antibody capable of binding two different antigens. Such antibodies typically comprise regions from at least two different antibodies. Bispecific antibodies may include any of those described in Riethmuller, G. 2012. Cancer Immunity. 12:12-18, Marvin, J. S. et al., 2005. Acta Pharmacologica Sinica. 26(6):649-58 and Schaefer, W. et al., 2011. PNAS. 108(27):11187-92, the contents of each of which are herein incorporated by reference in their entirety.

[0257] As used herein, the term “diabody” refers to a small antibody fragment with two antigen-binding sites. Diabodies comprise a heavy chain variable domain V_{H} connected to a light chain variable domain V_{L} in the same polypeptide chain. By using a linker that is too short to allow pairing between the two domains on the same chain, the domains are forced to pair with the complementary domains of another chain and create two antigen-binding sites. Diabodies are described more fully in, for example, EP 404097; WO 9311161; and Hollinger et al. (Hollinger, P. et al., “Diabodies”: Small bivalent and bispecific antibody fragments. PNAS. 1993. 90:6444-8) the contents of each of which are incorporated herein by reference in their entirety.

[0258] The term “intrabody” refers to a form of antibody that is not secreted from a cell in which it is produced, but instead targets one or more intracellular proteins. Intrabodies may be used to affect a multitude of cellular processes including, but not limited to intracellular trafficking, transcription, translation, metabolic processes, proliferative signaling, and cell division. In some embodiments, methods of the present disclosure may include intrabody-based therapies. In some such embodiments, variable domain sequences and/or CDR sequences disclosed herein may be incorporated into one or more constructs for intrabody-based therapy.

[0259] As used herein, the term “monoclonal antibody” refers to an antibody obtained from a population of substantially homogeneous cells (or clones), i.e., the individual antibodies comprising the population are identical and/or bind the same epitope, except for possible variants that may arise during production of the monoclonal antibodies, such variants generally being present in minor amounts. In contrast to polyclonal antibody preparations that typically include different antibodies directed against different determinants (epitopes), each monoclonal antibody is directed against a single determinant on the antigen

[0260] The modifier “monoclonal” indicates the character of the antibody as being obtained from a substantially homogeneous population of antibodies and is not to be construed as requiring production of the antibody by any particular method. The monoclonal antibodies herein include “chimeric” antibodies (immunoglobulins) in which a portion of the heavy and/or light chain is identical with or homologous to corresponding sequences in antibodies derived from a particular species or belonging to a particular antibody class or subclass, while the remainder of the chain(s) is identical with or homologous to corresponding sequences in antibodies derived from another species or belonging to another antibody class or subclass, as well as fragments of such antibodies.

[0261] As used herein, the term “humanized antibody” refers to a chimeric antibody comprising a minimal portion from one or more non-human (e.g., murine) antibody source(s) with the remainder derived from one or more human immunoglobulin sources. For the most part, humanized antibodies are human immunoglobulins (recipient antibody) in which residues from the hypervariable region from an antibody of the recipient are replaced by residues from the hypervariable region from an antibody of a non-human species (donor antibody) such as mouse, rat, rabbit or nonhuman primate having the desired specificity, affinity, and/or capacity.

[0262] In some embodiments, viral genomes of the present disclosure may encode antibody mimetics. As used herein, the term “antibody mimetic” refers to any molecule which mimics the function or effect of an antibody and which binds specifically and with high affinity to their molecular targets. In some embodiments, antibody mimetics may be monobodies, designed to incorporate the fibronectin type III domain (Fn3) as a protein scaffold (U.S. Pat. Nos. 6,673,901; 6,348,584). In some embodiments, antibody mimetics may be those known in the art including, but are not limited to affibody molecules, affilins, affitins, anticalins, avimers, Centyrins, DARPINS™, fynomers, Kunitz domains, and domain peptides. In other embodiments, antibody mimetics may include one or more non-peptide regions.

[0263] As used herein, the term “antibody variant” refers to a modified antibody (in relation to a native or starting antibody) or a biomolecule resembling a native or starting antibody in structure and/or function (e.g., an antibody mimetic). Antibody variants may be altered in their amino acid sequence, composition, or structure as compared to a native antibody. Antibody variants may include, but are not limited to, antibodies with altered isotypes (e.g., IgA, IgD, IgE, IgG₁, IgG₂, IgG₃, IgG₄, or IgM), humanized variants, optimized variants, multispecific antibody variants (e.g., bispecific variants), and antibody fragments.

[0264] The preparation of antibodies, whether monoclonal or polyclonal, is known in the art. Techniques for the production of antibodies are well known in the art and described, e.g. in Harlow and Lane “Antibodies, A Laboratory Manual”, Cold Spring Harbor Laboratory Press, 1988; Harlow and Lane “Using Antibodies: A Laboratory Manual” Cold Spring Harbor Laboratory Press, 1999 and “Therapeutic Antibody Engineering: Current and Future Advances Driving the Strongest Growth Area in the Pharmaceutical Industry” Woodhead Publishing, 2012.

### Multispecific Antibodies

[0265] In some embodiments, payloads may encode antibodies that bind more than one epitope. As used herein, the terms “multibody” or “multispecific antibody” refer to an antibody wherein two or more variable regions bind to different epitopes. The epitopes may be on the same or different targets. In certain embodiments, a multi-specific antibody is a “bispecific antibody,” which recognizes two different epitopes on the same or different antigens.

[0266] In some embodiments, multi-specific antibodies may be prepared by the methods used by BIOATLA® and described in International Patent publication WO201109726, the contents of which are herein incorporated by reference in their entirety. First a library of homologous, naturally occurring antibodies is generated by any method known in the art (i.e., mammalian cell surface display), then screened by FACSAria or another screening method, for multi-specific antibodies that specifically bind to two or more target antigens. In some embodiments, the identified multi-specific antibodies are further evolved by any method known in the art, to produce a set of modified multi-specific antibodies. These modified multi-specific antibodies are screened for binding to the target antigens. In some embodiments, the multi-specific antibody may be further optimized by screening the evolved modified multi-specific antibodies for optimized or desired characteristics.

[0267] In some embodiments, multi-specific antibodies may be prepared by the methods used by BIOATLA® and described in Unites States Publication No. US20150252119, the contents of which are herein incorporated by reference in their entirety. In one approach, the variable domains of two parent antibodies, wherein the parent antibodies are monoclonal antibodies are evolved using any method known in the art in a manner that allows a single light chain to functionally complement heavy chains of two different parent antibodies. Another approach requires evolving the heavy chain of a single parent antibody to recognize a second target antigen. A third approach involves evolving the light chain of a parent antibody so as to recognize a second target antigen. Methods for polypeptide evolution are described in International Publication WO2012009026, the contents of which are herein incorporated by reference in their entirety, and include as non-limiting examples, Comprehensive Positional Evolution (CPE), Combinatorial Protein Synthesis (CPS), Comprehensive Positional Insertion (CPI), Comprehensive Positional Deletion (CPD), or any combination thereof. The Fc region of the multi-specific antibodies described in United States Publication No. US20150252119 may be created using a knob-in-hole approach, or any other method that allows the Fc domain to form heterodimers. The resultant multi-specific antibodies may be further evolved for improved characteristics or properties such as binding affinity for the target antigen.

### Bispecific Antibodies

[0268] In some embodiments, payloads may encode bispecific antibodies. Bispecific antibodies are capable of binding two different antigens. Such antibodies typically comprise antigen-binding regions from at least two different antibodies. For example, a bispecific monoclonal antibody (BsMAb, BsAb) is an artificial protein composed of fragments of two different monoclonal antibodies, thus allowing the BsAb to bind to two different types of antigen.

[0269] In some cases, payloads encode bispecific antibodies comprising antigen-binding regions from two different anti-tau antibodies. For example, such bispecific antibodies may comprise binding regions from two different antibodies selected from Table 3.

[0270] Bispecific antibody frameworks may include any of those described in Riethmuller, G., 2012. Cancer Immunity. 12:12-18; Marvin, J. S. et al., 2005. Acta Pharmacologica Sinica. 26(6):649-58; and Schaefer, W. et al., 2011. PNAS. 108(27):11187-92, the contents of each of which are herein incorporated by reference in their entirety.

[0271] New generations of BsMAb, called “trifunctional bispecific” antibodies, have been developed. These consist of two heavy and two light chains, one each from two different antibodies, where the two Fab regions (the arms) are directed against two antigens, and the Fc region (the foot) comprises the two heavy chains and forms the third binding site.

[0272] Of the two paratopes that form the tops of the variable domains of a bispecific antibody, one can be directed against a target antigen and the other against a T-lymphocyte antigen like CD3. In the case of trifunctional antibodies, the Fc region may additionally bind to a cell that expresses Fc receptors, like a macrophage, a natural killer (NK) cell or a dendritic cell. In sum, the targeted cell is connected to one or two cells of the immune system, which subsequently destroy it.

[0273] Other types of bispecific antibodies have been designed to overcome certain problems, such as short half-life, immunogenicity and side-effects caused by cytokine liberation. They include chemically linked Fabs, consisting only of the Fab regions, and various types of bivalent and trivalent single-chain variable fragments (scFvs), fusion proteins mimicking the variable domains of two antibodies. The furthest developed of these newer formats are the bispecific T-cell engagers (BiTEs) and mAb2's, antibodies engineered to contain an Fcab antigen-binding fragment instead of the Fc constant region.

[0274] Using molecular genetics, two scFvs can be engineered in tandem into a single polypeptide, separated by a linker domain, called a “tandem scFv” (tascFv). TascFvs have been found to be poorly soluble and require refolding when produced in bacteria, or they may be manufactured in mammalian cell culture systems, which avoids refolding requirements but may result in poor yields. Construction of a tascFv with genes for two different scFvs yields a “bispecific single-chain variable fragments” (bis-scFvs). Only two tascFvs have been developed clinically by commercial firms; both are bispecific agents in active early phase development by Micromet for oncologic indications and are described as “Bispecific T-cell Engagers (BiTE).” Blinatumomab is an anti-CD19/anti-CD3 bispecific tascFv that potentiates T-cell responses to B-cell non-Hodgkin lymphoma in Phase 2. MT110 is an anti-EP-CAM/anti-CD3 bispecific tascFv that potentiates T-cell responses to solid tumors in Phase 1. Bispecific, tetravalent “TandAbs” are also being researched by Affimed (Nelson, A. L., MAbs. 2010. January-February; 2(1):77-83).

[0275] In some embodiments, payloads may encode antibodies comprising a single antigen-binding domain. These molecules are extremely small, with molecular weights approximately one-tenth of those observed for full-sized mAbs. Further antibodies may include “nanobodies” derived from the antigen-binding variable heavy chain regions (V_{HH}S) of heavy chain antibodies found in camels and llamas, which lack light chains (Nelson, A. L., MAbs. 2010. January-February; 2(1):77-83).

[0276] Disclosed and claimed in PCT Publication WO2014144573 to Memorial Sloan-Kettering Cancer Center are multimerization technologies for making dimeric multispecific binding agents (e.g., fusion proteins comprising antibody components) with improved properties over multispecific binding agents without the capability of dimerization.

[0277] In some cases, payloads may encode tetravalent bispecific antibodies (TetBiAbs as disclosed and claimed in PCT Publication WO2014144357). TetBiAbs feature a second pair of Fab fragments with a second antigen specificity attached to the C-terminus of an antibody, thus providing a molecule that is bivalent for each of the two antigen specificities. The tetravalent antibody is produced by genetic engineering methods, by linking an antibody heavy chain covalently to a Fab light chain, which associates with its cognate, co-expressed Fab heavy chain.

[0278] In some aspects, payloads may encode biosynthetic antibodies as described in U.S. Pat. No. 5,091,513, the contents of which are herein incorporated by reference in their entirety. Such antibody may include one or more sequences of amino acids constituting a region which behaves as a biosynthetic antibody binding site (BABS). The sites comprise 1) non-covalently associated or disulfide bonded synthetic V_{H} and V_{L} dimers, 2) V_{H}-V_{L} or V_{L}-V_{H} single chains wherein the V_{H} and V_{L} are attached by a polypeptide linker, or 3) individuals V_{H} or V_{L} domains. The binding domains comprise linked CDR and FR regions, which may be derived from separate immunoglobulins. The biosynthetic antibodies may also include other polypeptide sequences which function, e.g., as an enzyme, toxin, binding site, or site of attachment to an immobilization media or radioactive atom. Methods are disclosed for producing the biosynthetic antibodies, for designing BABS having any specificity that can be elicited by in vivo generation of antibody, and for producing analogs thereof.

[0279] In some embodiments, payloads may encode antibodies with antibody acceptor frameworks taught in U.S. Pat. No. 8,399,625. Such antibody acceptor frameworks may be particularly well suited accepting CDRs from an antibody of interest. In some cases, CDRs from anti-tau antibodies known in the art or developed according to the methods presented herein may be used.

### Miniaturized Antibody

[0280] In some embodiments, the antibody encoded by the payloads may be a “miniaturized” antibody. Among the best examples of mAb miniaturization are the small modular immunopharmaceuticals (SMIPs) from Trubion Pharmaceuticals. These molecules, which can be monovalent or bivalent, are recombinant single-chain molecules containing one V_{L}, one V_{H} antigen-binding domain, and one or two constant “effector” domains, all connected by linker domains. Presumably, such a molecule might offer the advantages of increased tissue or tumor penetration claimed by fragments while retaining the immune effector functions conferred by constant domains. At least three “miniaturized” SMIPs have entered clinical development. TRU-015, an anti-CD20 SMIP developed in collaboration with Wyeth, is the most advanced project, having progressed to Phase 2 for rheumatoid arthritis (RA). Earlier attempts in systemic lupus erythrematosus (SLE) and B cell lymphomas were ultimately discontinued. Trubion and Facet Biotechnology are collaborating in the development of TRU-016, an anti-CD37 SMIP, for the treatment of CLL and other lymphoid neoplasias, a project that has reached Phase 2. Wyeth has licensed the anti-CD20 SMIP SBI-087 for the treatment of autoimmune diseases, including RA, SLE, and possibly multiple sclerosis, although these projects remain in the earliest stages of clinical testing. (Nelson, A. L., MAbs. 2010. January-February; 2(1):77-83).

### Diabodies

[0281] In some embodiments, payloads may encode diabodies. Diabodies are functional bispecific single-chain antibodies (bscAb). These bivalent antigen-binding molecules are composed of non-covalent dimers of scFvs, and can be produced in mammalian cells using recombinant methods. (See, e.g., Mack et al, Proc. Natl. Acad. Sci., 92: 7021-7025, 1995). Few diabodies have entered clinical development. An iodine-123-labeled diabody version of the anti-CEA chimeric antibody cT84.66 has been evaluated for pre-surgical immunoscintigraphic detection of colorectal cancer in a study sponsored by the Beckman Research Institute of the City of Hope (Clinicaltrials.gov NCT00647153) (Nelson, A. L., MAbs., 2010. January-February; 2(1):77-83).

### Unibody

[0282] In some embodiments, payloads may encode a “unibody,” in which the hinge region has been removed from IgG4 molecules. While IgG4 molecules are unstable and can exchange light-heavy chain heterodimers with one another, deletion of the hinge region prevents heavy chain-heavy chain pairing entirely, leaving highly specific monovalent light/heavy heterodimers, while retaining the Fc region to ensure stability and half-life in vivo. This configuration may minimize the risk of immune activation or oncogenic growth, as IgG4 interacts poorly with FcRs and monovalent unibodies fail to promote intracellular signaling complex formation. These contentions are, however, largely supported by laboratory, rather than clinical, evidence. Other antibodies may be “miniaturized” antibodies, which are compacted 100 kDa antibodies (see, e.g., Nelson, A. L., MAbs., 2010. January-February; 2(1):77-83).

### Intrabodies

[0283] In some embodiments, payloads may encode intrabodies. Intrabodies are a form of antibody that is not secreted from a cell in which it is produced, but instead targets one or more intracellular proteins. Intrabodies are expressed and function intracellularly, and may be used to affect a multitude of cellular processes including, but not limited to intracellular trafficking, transcription, translation, metabolic processes, proliferative signaling and cell division. In some embodiments, methods described herein include intrabody-based therapies. In some such embodiments, variable domain sequences and/or CDR sequences disclosed herein are incorporated into one or more constructs for intrabody-based therapy. For example, intrabodies may target one or more glycated intracellular proteins or may modulate the interaction between one or more glycated intracellular proteins and an alternative protein.

[0284] More than two decades ago, intracellular antibodies against intracellular targets were first described (Biocca, Neuberger and Cattaneo EMBO J. 9: 101-108, 1990). The intracellular expression of intrabodies in different compartments of mammalian cells allows blocking or modulation of the function of endogenous molecules (Biocca, et al., EMBO J. 9: 101-108, 1990; Colby et al., Proc. Natl. Acad. Sci. U.S.A. 101: 17616-21, 2004). Intrabodies can alter protein folding, protein-protein, protein-DNA, protein-RNA interactions and protein modification. They can induce a phenotypic knockout and work as neutralizing agents by direct binding to the target antigen, by diverting its intracellular trafficking or by inhibiting its association with binding partners. They have been largely employed as research tools and are emerging as therapeutic molecules for the treatment of human diseases such as viral pathologies, cancer and misfolding diseases. The fast-growing bio-market of recombinant antibodies provides intrabodies with enhanced binding specificity, stability, and solubility, together with lower immunogenicity, for their use in therapy (Biocca, abstract in Antibody Expression and Production Cell Engineering Volume 7, 2011, pp. 179-195).

[0285] In some embodiments, intrabodies have advantages over interfering RNA (iRNA); for example, iRNA has been shown to exert multiple non-specific effects, whereas intrabodies have been shown to have high specificity and affinity to target antigens. Furthermore, as proteins, intrabodies possess a much longer active half-life than iRNA. Thus, when the active half-life of the intracellular target molecule is long, gene silencing through iRNA may be slow to yield an effect, whereas the effects of intrabody expression can be almost instantaneous. Lastly, it is possible to design intrabodies to block certain binding interactions of a particular target molecule, while sparing others.

[0286] Intrabodies are often single chain variable fragments (scFvs) expressed from a recombinant nucleic acid molecule and engineered to be retained intracellularly (e.g., retained in the cytoplasm, endoplasmic reticulum, or periplasm). Intrabodies may be used, for example, to ablate the function of a protein to which the intrabody binds. The expression of intrabodies may also be regulated through the use of inducible promoters in the nucleic acid expression vector comprising the intrabody. Intrabodies may be produced for use in the viral genomes using methods known in the art, such as those disclosed and reviewed in: (Marasco et al., 1993 Proc. Natl. Acad. Sci. USA, 90: 7889-7893; Chen et al., 1994, Hum. Gene Ther. 5:595-601; Chen et al., 1994, Proc. Natl. Acad. Sci. USA, 91: 5932-5936; Maciejewski et al., 1995, Nature Med., 1: 667-673; Marasco, 1995, Immunotech, 1: 1-19; Mhashilkar, et al., 1995, EMBO J. 14: 1542-51; Chen et al., 1996, Hum. Gene Therap., 7: 1515-1525; Marasco, Gene Ther. 4:11-15, 1997; Rondon and Marasco, 1997, Annu. Rev. Microbiol. 51:257-283; Cohen, et al., 1998, Oncogene 17:2445-56; Proba et al., 1998, J. Mol. Biol. 275:245-253; Cohen et al., 1998, Oncogene 17:2445-2456; Hassanzadeh, et al., 1998, FEBS Lett. 437:81-6; Richardson et al., 1998, Gene Ther. 5:635-44; Ohage and Steipe, 1999, J. Mol. Biol. 291:1119-1128; Ohage et al., 1999, J. Mol. Biol. 291:1129-1134; Wirtz and Steipe, 1999, Protein Sci. 8:2245-2250; Zhu et al., 1999, J. Immunol. Methods 231:207-222; Arafat et al., 2000, Cancer Gene Ther. 7:1250-6; der Maur et al., 2002, J. Biol. Chem. 277:45075-85; Mhashilkar et al., 2002, Gene Ther. 9:307-19; and Wheeler et al., 2003, FASEB J. 17: 1733-5; and references cited therein). In particular, a CCR5 intrabody has been produced by Steinberger et al., 2000, Proc. Natl. Acad. Sci. USA 97:805-810). See generally Marasco, W A, 1998, “Intrabodies: Basic Research and Clinical Gene Therapy Applications” Springer: New York; and for a review of scFvs, see Pluckthun in “The Pharmacology of Monoclonal Antibodies,” 1994, vol. 113, Rosenburg and Moore eds. Springer-Verlag, New York, pp. 269-315.

[0287] Sequences from donor antibodies may be used to develop intrabodies. Intrabodies are often recombinantly expressed as single domain fragments such as isolated V_{H} and V_{L} domains or as a single chain variable fragment (scFv) antibody within the cell. For example, intrabodies are often expressed as a single polypeptide to form a single chain antibody comprising the variable domains of the heavy and light chains joined by a flexible linker polypeptide. Intrabodies typically lack disulfide bonds and are capable of modulating the expression or activity of target genes through their specific binding activity. Single chain antibodies can also be expressed as a single chain variable region fragment joined to the light chain constant region.

[0288] As is known in the art, an intrabody can be engineered into recombinant polynucleotide vectors to encode sub-cellular trafficking signals at its N or C terminus to allow expression at high concentrations in the sub-cellular compartments where a target protein is located. For example, intrabodies targeted to the endoplasmic reticulum (ER) are engineered to incorporate a leader peptide and, optionally, a C-terminal ER retention signal, such as the KDEL amino acid motif (SEQ ID NO: 4545). Intrabodies intended to exert activity in the nucleus are engineered to include a nuclear localization signal. Lipid moieties are joined to intrabodies in order to tether the intrabody to the cytosolic side of the plasma membrane. Intrabodies can also be targeted to exert function in the cytosol. For example, cytosolic intrabodies are used to sequester factors within the cytosol, thereby preventing them from being transported to their natural cellular destination.

[0289] There are certain technical challenges with intrabody expression. In particular, protein conformational folding and structural stability of the newly synthesized intrabody within the cell is affected by reducing conditions of the intracellular environment.

[0290] Intrabodies may be promising therapeutic agents for the treatment of misfolding diseases, including Tauopathies, prion diseases, Alzheimer's, Parkinson's, and Huntington's, because of their virtually infinite ability to specifically recognize the different conformations of a protein, including pathological isoforms, and because they can be targeted to the potential sites of aggregation (both intra- and extracellular sites). These molecules can work as neutralizing agents against amyloidogenic proteins by preventing their aggregation, and/or as molecular shunters of intracellular traffic by rerouting the protein from its potential aggregation site (Cardinale, and Biocca, Curr. Mol. Med. 2008, 8:2-11).

### Maxibodies

[0291] In some embodiments, the payloads encode a maxibody (bivalent scFv fused to the amino terminus of the Fc (CH2-CH3 domains) of IgG.

### Chimeric Antigen Receptors

[0292] In some embodiments, the polypeptides encoded by the viral genomes (e.g., antibodies) may be used to generate chimeric antigen receptors (CARs) as described by BIOATLA® in International Publications WO2016033331 and WO2016036916, the contents of which are herein incorporated by reference in their entirety. As used herein, a “chimeric antigen receptor (CAR)” refers to an artificial chimeric protein comprising at least one antigen specific targeting region (ASTR), wherein the antigen specific targeting region comprises a full-length antibody or a fragment thereof that specifically binds to a target antigen. The ASTR may comprise any of the following: a full length heavy or light chain, an Fab fragment, a single chain Fv fragment, a divalent single chain antibody, or a diabody. As a non-limiting example, the ASTR of a CAR may be any of the antibodies listed in Table 3, antibody-based compositions or fragments thereof. Any molecule that is capable of binding a target antigen with high affinity can be used in the ASTR of a CAR. In some embodiments, the CAR may have more than one ASTR. These ASTRs may target two or more antigens or two or more epitopes of the same antigen. In some embodiments, the CAR is conditionally active. In some embodiments, the CAR is used to produce a genetically engineered cytotoxic cell carrying the CAR and capable of targeting the antigen bound by the ASTR.

[0293] Chimeric antigen receptors (CARs) are particularly useful in the treatment of cancers, though also therapeutically effective in treatment of a wide variety of other diseases and disorders. Non-limiting examples of disease categories that may be treated with CARs or CAR-based therapeutics include autoimmune disorders, B-cell mediated diseases, inflammatory diseases, neuronal disorders, cardiovascular disease and circulatory disorders, or infectious diseases. Not wishing to be bound by theory, CARs traditionally work by targeting antigens presented on the surface of or on the inside of cells to be destroyed e.g., cancer tumor cells, by the cytotoxic cell of the CAR.

### Senescent Cell Surface Protein Antibodies

[0294] In some embodiments, the AAV particles may comprise nucleic acids which have been engineered to express of antibodies that selectively bind to surface marker proteins of senescent cells. For example, the antibodies may selectively bind to proteins that are in misfolded conformation. The binding antibodies may reduce the number of senescent cells and be used to treat age-related conditions, such as, but not limited to, Alzheimer's disease, cardiovascular disease, emphysema, sarcopenia, and tumorigenesis as well as conditions more cosmetic in nature such as signs of skin aging including wrinkling, sagging, discoloration, age-related tissue dysfunction, tumor formation, and other age-related conditions.

[0295] In some embodiments, the expressed antibodies binding to epitopes of senescent cell surface proteins may be, but are not limited to, such as prion epitopes presented by SEQ ID NO: 1-14 of International Publication No. WO2014186878; CD44 epitopes presented by SEQ ID NO: 47-51 of International Publication No. WO2014186878; TNFR epitopes presented by SEQ ID NO: 52-56 of International Publication No. WO2014186878; NOTCHI epitope presented by SEQ ID NO: 57-61 of International Publication No. WO2014186878; FasR epitopes presented by SEQ ID NO: 62-66 of International Publication No. WO2014186878; epidermal growth factor epitopes presented by SEQ ID NO: 67-81 of International Publication No. WO2014186878; CD38 epitopes presented by SEQ ID NO: 82-86 of International Publication No. WO2014186878, the contents of each of which are herein incorporated by reference in their entirety.

[0296] In some embodiments, the expressed antibodies may comprise peptides binding to senescent cell surface prion proteins, such as, but not limited to, those presented by SEQ ID NO: 15-36 of International Publication No. WO2014186878, the contents of which are herein incorporated by reference in their entirety.

[0297] In some embodiments, the expressed antibody may be AMF-3a-118 or AMF 3d-19 (SEQ ID NO: 89-92 and 103-106 of International publication WO2014186878, respectively, the contents of which are herein incorporated by reference in their entirety) targeting senescent cell surface protein FasR. In some embodiments, the expressed antibody may be Ab c-120 (SEQ ID NO: 37-40 of International publication WO2014186878, the contents of which are herein incorporated by reference in their entirety) targeting senescent cell surface protein PrP.

### Payload Antibodies

[0298] In some embodiments, the payload region of the AAV particle comprises one or more nucleic acid sequences encoding tau associated disease antibodies, variants or fragments thereof.

[0299] In some embodiments, the payload region of the AAV particle comprises one or more nucleic acid sequences encoding one or more of the payload antibody polypeptides listed in Table 3, or variants or fragments thereof. As used herein, “antibody polynucleotide” refers to a nucleic acid sequence encoding an antibody polypeptide.

[0300] In some embodiments, the payload region of the AAV particle comprises one or more nucleic acid sequences listed in Table 3, or variants or fragments thereof.

[0301] In some embodiments, the payload region of the AAV particle comprises a nucleic acid sequence encoding a payload antibody with at least 50% identity to one or more payload antibody polypeptides listed in Tables 3. The encoded antibody polypeptide may have 50%, 51%, 52%, 53%, 54%, 55%, 56%, 57%, 58%, 59%, 60%, 61%, 62%, 63%, 64%, 65%, 66%, 67%, 68%, 69%, 70%, 71%, 72%, 73%, 74%, 75%, 76%, 77%, 78%, 79%, 80%, 81%, 82%, 83%, 84%, 85%, 86%, 87%, 88%, 89%, 90%, 91%, 92%, 93%, 94%, 95%, 96%, 97%, 98%, 99%, or 100% identity to one or more of the payload antibody polypeptides listed in Table 3, or variants or fragments thereof.

[0302] In some embodiments, the full sequence of the encoded antibody polypeptide may have 50%, 51%, 52%, 53%, 54%, 55%, 56%, 57%, 58%, 59%, 60%, 61%, 62%, 63%, 64%, 65%, 66%, 67%, 68%, 69%, 70%, 71%, 72%, 73%, 74%, 75%, 76%, 77%, 78%, 79%, 80%, 81%, 82%, 83%, 84%, 85%, 86%, 87%, 88%, 89%, 90%, 91%, 92%, 93%, 94%, 95%, 96%, 97%, 98%, 99%, or 100% identity to one or more of the payload antibody polypeptides listed in Table 3, or variants or fragments thereof.

[0303] In some embodiments, the variable region sequence(s) of the encoded antibody polypeptide may have 50%, 51%, 52%, 53%, 54%, 55%, 56%, 57%, 58%, 59%, 60%, 61%, 62%, 63%, 64%, 65%, 66%, 67%, 68%, 69%, 70%, 71%, 72%, 73%, 74%, 75%, 76%, 77%, 78%, 79%, 80%, 81%, 82%, 83%, 84%, 85%, 86%, 87%, 88%, 89%, 90%, 91%, 92%, 93%, 94%, 95%, 96%, 97%, 98%, 99%, or 100% identity to one or more of the payload antibody polypeptides listed in Table 3, or variants or fragments thereof.

[0304] In some embodiments, the heavy chain of the encoded antibody polypeptide may have 50%, 51%, 52%, 53%, 54%, 55%, 56%, 57%, 58%, 59%, 60%, 61%, 62%, 63%, 64%, 65%, 66%, 67%, 68%, 69%, 70%, 71%, 72%, 73%, 74%, 75%, 76%, 77%, 78%, 79%, 80%, 81%, 82%, 83%, 84%, 85%, 86%, 87%, 88%, 89%, 90%, 91%, 92%, 93%, 94%, 95%, 96%, 97%, 98%, 99%, or 100% identity to one or more of the payload heavy chain antibody polypeptides listed in Table 3, or variants or fragments thereof.

[0305] In some embodiments, the light chain of the encoded antibody polypeptide may have 50%, 51%, 52%, 53%, 54%, 55%, 56%, 57%, 58%, 59%, 60%, 61%, 62%, 63%, 64%, 65%, 66%, 67%, 68%, 69%, 70%, 71%, 72%, 73%, 74%, 75%, 76%, 77%, 78%, 79%, 80%, 81%, 82%, 83%, 84%, 85%, 86%, 87%, 88%, 89%, 90%, 91%, 92%, 93%, 94%, 95%, 96%, 97%, 98%, 99%, or 100% identity to one or more of the payload light chain antibody polypeptides listed in Table 3, or variants or fragments thereof.

[0306] In some embodiments, the CDR region of the encoded antibody polypeptide may have 50%, 51%, 52%, 53%, 54%, 55%, 56%, 57%, 58%, 59%, 60%, 61%, 62%, 63%, 64%, 65%, 66%, 67%, 68%, 69%, 70%, 71%, 72%, 73%, 74%, 75%, 76%, 77%, 78%, 79%, 80%, 81%, 82%, 83%, 84%, 85%, 86%, 87%, 88%, 89%, 90%, 91%, 92%, 93%, 94%, 95%, 96%, 97%, 98%, 99%, or 100% identity to the CDRs of one or more of the payload antibody polypeptides listed in Table 3, or variants or fragments thereof.

[0307] In some embodiments, the payload antibody has 90% identity to one or more of the antibody polypeptides listed in Table 3, or variants or fragments thereof.

[0308] In some embodiments, the payload antibody has 91% identity to one or more of the antibody polypeptides listed in Table 3, or variants or fragments thereof.

[0309] In some embodiments, the payload antibody has 92% identity to one or more of the antibody polypeptides listed in Table 3, or variants or fragments thereof.

[0310] In some embodiments, the payload antibody has 93% identity to one or more of the antibody polypeptides listed in Table 3, or variants or fragments thereof.

[0311] In some embodiments, the payload antibody has 94% identity to one or more of the antibody polypeptides listed in Table 3, or variants or fragments thereof.

[0312] In some embodiments, the payload antibody has 95% identity to one or more of the antibody polypeptides listed in Table 3, or variants or fragments thereof.

[0313] In some embodiments, the payload antibody has 96% identity to one or more of the antibody polypeptides listed in Table 3, or variants or fragments thereof.

[0314] In some embodiments, the payload antibody has 97% identity to one or more of the antibody polypeptides listed in Table 3, or variants or fragments thereof.

[0315] In some embodiments, the payload antibody has 98% identity to one or more of the antibody polypeptides listed in Table 3, or variants or fragments thereof.

[0316] In some embodiments, the payload antibody has 99% identity to one or more of the antibody polypeptides listed in Table 3, or variants or fragments thereof.

[0317] In some embodiments, the payload antibody has 100% identity to one or more of the antibody polypeptides listed in Table 3, or variants or fragments thereof.

[0318] In some embodiments, the payload region of the AAV particle comprises a nucleic acid sequence with at least 50% identity to one or more nucleic acid sequences listed in Table 3, or variants or fragments thereof. The payload nucleic acid sequence may have 50%, 51%, 52%, 53%, 54%, 55%, 56%, 57%, 58%, 59%, 60%, 61%, 62%, 63%, 64%, 65%, 66%, 67%, 68%, 69%, 70%, 71%, 72%, 73%, 74%, 75%, 76%, 77%, 78%, 79%, 80%, 81%, 82%, 83%, 84%, 85%, 86%, 87%, 88%, 89%, 90%, 91%, 92%, 93%, 94%, 95%, 96%, 97%, 98%, 99%, or 100% identity to one or more nucleic acid sequences listed in Table 3, or variants or fragments thereof.

[0319] In some embodiments, the payload nucleic acid sequence has 90% identity to one or more of the nucleic acid sequences listed in Table 3, or variants or fragments thereof.

[0320] In some embodiments, the payload nucleic acid sequence has 91% identity to one or more of the nucleic acid sequences listed in Table 3, or variants or fragments thereof.

[0321] In some embodiments, the payload nucleic acid sequence has 92% identity to one or more of the nucleic acid sequences listed in Table 3, or variants or fragments thereof.

[0322] In some embodiments, the payload nucleic acid sequence has 93% identity to one or more of the nucleic acid sequences listed in Table 3, or variants or fragments thereof.

[0323] In some embodiments, the payload nucleic acid sequence has 94% identity to one or more of the nucleic acid sequences listed in Table 3, or variants or fragments thereof.

[0324] In some embodiments, the payload nucleic acid sequence has 95% identity to one or more of the nucleic acid sequences listed in Table 3, or variants or fragments thereof.

[0325] In some embodiments, the payload nucleic acid sequence has 96% identity to one or more of the nucleic acid sequences listed in Table 3, or variants or fragments thereof.

[0326] In some embodiments, the payload nucleic acid sequence has 97% identity to one or more of the nucleic acid sequences listed in Table 3, or variants or fragments thereof.

[0327] In some embodiments, the payload nucleic acid sequence has 98% identity to one or more of the nucleic acid sequences listed in Table 3, or variants or fragments thereof.

[0328] In some embodiments, the payload nucleic acid sequence has 99% identity to one or more of the nucleic acid sequences listed in Table 3, or variants or fragments thereof.

[0329] In some embodiments, the payload nucleic acid sequence has 100% identity to one or more of the nucleic acid sequences listed in Table 3, or variants or fragments thereof.

TABLE 3
Tau Associated Disease Antibodies

| | | Type | | | | SEQ |
|---|---|---|---|---|---|---|
| | | (PRT/ | | | | ID |
| Ab ID | Component | DNA) | Description | Reference | Len. | NO |
| Ab1 | VH Signal | DNA | IPN002 (VH Signal) | | 57 | 1740 |
| Ab2 | VH Signal | DNA | PHF1 (VH Signal) | | 57 | 1741 |
| Ab3 | VH Constant | DNA | VH (constant - 969) | | 969 | 1742 |
| Ab4 | VH Constant | DNA | VH (constant - 972) | | 972 | 1743 |
| Ab5 | VH CDR | PRT | 7295-M6 HCDR | WO2015122922; SEQ ID | 10 | 1744 |
| | | | | NO: 12 and 20 | | |
| Ab6 | VH CDR | PRT | 7295-M6 HCDR | WO2015122922; SEQ ID | 16 | 1745 |
| | | | | NO: 13 and 21 | | |
| Ab7 | VH CDR | PRT | 7295-M6 HCDR | WO2015122922; SEQ ID | 4 | 1746 |
| | | | | NO: 14 and 22 | | |
| Ab8 | VH CDR | PRT | 7297-2M1 HCDR | WO2015122922; SEQ ID | 16 | 1747 |
| | | | | NO: 69 | | |
| Ab9 | VH CDR | PRT | 7298-M1 HCDR | WO2015122922; SEQ ID | 11 | 1748 |
| | | | | NO: 28 | | |
| Ab10 | VH CDR | PRT | 7298-M1 HCDR | WO2015122922; SEQ ID | 16 | 1749 |
| | | | | NO: 29 | | |
| Ab11 | VH CDR | PRT | 7298-M1 HCDR | WO2015122922; SEQ ID | 4 | 1750 |
| | | | | NO: 30 | | |
| Ab12 | VH CDR | PRT | 7298-M2 HCDR | WO2015122922; SEQ ID | 10 | 1751 |
| | | | | NO: 36 | | |
| Ab13 | VH CDR | PRT | 7298-M2 HCDR | WO2015122922; SEQ ID | 14 | 1752 |
| | | | | NO: 37 | | |
| Ab14 | VH CDR | PRT | 7298-M2 HCDR | WO2015122922; SEQ ID | 8 | 1753 |
| | | | | NO: 38 | | |
| Ab15 | VH CDR | PRT | 7299-M2 HCDR | WO2015122922; SEQ ID | 10 | 1754 |
| | | | | NO: 44 and 60 | | |
| Ab16 | VH CDR | PRT | 7299-M2 HCDR | WO2015122922; SEQ ID | 16 | 1755 |
| | | | | NO: 45 | | |
| Ab17 | VH CDR | PRT | 7299-M2 HCDR | WO2015122922; SEQ ID | 4 | 1756 |
| | | | | NO: 46 and 62 | | |
| Ab18 | VH CDR | PRT | 7299-M5 HCDR | WO2015122922; SEQ ID | 10 | 1757 |
| | | | | NO: 52 and 68 | | |
| Ab19 | VH CDR | PRT | 7299-M5 HCDR | WO2015122922; SEQ ID | 16 | 1758 |
| | | | | NO: 53 | | |
| Ab20 | VH CDR | PRT | 7299-M5 HCDR | WO2015122922; SEQ ID | 10 | 1759 |
| | | | | NO: 54 and 70 | | |
| Ab21 | VH CDR | PRT | 7299-M9 HCDR | WO2015122922; SEQ ID | 15 | 1760 |
| | | | | NO: 61 | | |
| Ab22 | VH CDR | PRT | C10.2 HCDR1 | WO2017009308; SEQ ID | 13 | 1761 |
| | | | | NO: 12, 20 and 28 | | |
| Ab23 | VH CDR | PRT | C10.2 HCDR2 | WO2017009308; SEQ ID | 16 | 1762 |
| | | | | NO: 13 and 29 | | |
| Ab24 | VH CDR | PRT | C10.2 HCDR3 | WO2017009308; SEQ ID | 6 | 1763 |
| | | | | NO: 14 and 30 | | |
| Ab25 | VH CDR | PRT | C5.2 HCDR2 | WO2017009308; SEQ ID | 16 | 1764 |
| | | | | NO: 21 | | |
| Ab26 | VH CDR | PRT | C5.2 HCDR3 | WO2017009308; SEQ ID | 6 | 1765 |
| | | | | NO: 22 | | |
| Ab27 | VH CDR | PRT | D1.2 HCDR1 | WO2017009308; SEQ ID | 13 | 1766 |
| | | | | NO: 4 | | |
| Ab28 | VH CDR | PRT | D1.2 HCDR2 | WO2017009308; SEQ ID | 16 | 1767 |
| | | | | NO: 5 | | |
| Ab29 | VH CDR | PRT | D1.2 HCDR3 | WO2017009308; SEQ ID | 6 | 1768 |
| | | | | NO: 6 | | |
| Ab30 | VH CDR | PRT | HCDR1 | US8980270; SEQ ID NO: 4 | 5 | 1769 |
| Ab31 | VH CDR | PRT | HCDR1 | US8980270; SEQ ID NO: 10 | 5 | 1770 |
| Ab32 | VH CDR | PRT | HCDR2 | US8980270; SEQ ID NO: 5 | 17 | 1771 |
| Ab33 | VH CDR | PRT | HCDR2 | US8980270; SEQ ID NO: 11 | 17 | 1772 |
| Ab34 | VH CDR | PRT | HCDR2 | WO2015081085; SEQ ID | 32 | 1773 |
| | | | | NO: 27 | | |
| Ab35 | VH CDR | PRT | HCDR3 | US8980270; SEQ ID NO: 6 | 8 | 1774 |
| Ab36 | VH CDR | PRT | HCDR3 | US8980270; SEQ ID NO: 12 | 8 | 1775 |
| Ab37 | VH CDR | PRT | HCDR3 | WO2015081085; SEQ ID | 11 | 1776 |
| | | | | NO: 44 | | |
| Ab38 | VH CDR | PRT | IPN002 HCDR1 | WO2014028777; SEQ ID | 14 | 1777 |
| | | | | NO: 84 | | |
| Ab39 | VH CDR | PRT | IPN002 HCDR2 | WO2014028777; SEQ ID | 32 | 1778 |
| | | | | NO: 85 | | |
| Ab40 | VH CDR | PRT | IPN002 HCDR3 | WO2014028777; SEQ ID | 11 | 1779 |
| | | | | NO: 86 | | |
| Ab41 | VH CDR | PRT | MC1 LCDR1 | WO2016137811; SEQ ID | 13 | 1780 |
| | | | | NO: 6 | | |
| Ab42 | VH CDR | PRT | MC1 LCDR2 | WO2016137811; SEQ ID | 18 | 1781 |
| | | | | NO: 7 | | |
| Ab43 | VH CDR | PRT | MC1 LCDR3 | WO2016137811; SEQ ID | 9 | 1782 |
| | | | | NO: 8 | | |
| Ab44 | VH CDR | PRT | PT1 HCDR1 (Chothia) | US9371376; SEQ ID NO: 19 | 7 | 1783 |
| Ab45 | VH CDR | PRT | PT1 HCDR1 (Kabat) | US9371376; SEQ ID NO: 7 | 5 | 1784 |
| Ab46 | VH CDR | PRT | PT1 HCDR2 (Chothia) | US9371376; SEQ ID NO: 20 | 6 | 1785 |
| Ab47 | VH CDR | PRT | PT1 HCDR2 (Kabat) | US9371376; SEQ ID NO: 8 | 17 | 1786 |
| Ab48 | VH CDR | PRT | PT1 HCDR3 (Chothia) | US9371376; SEQ ID NO: 21 | 9 | 1787 |
| Ab49 | VH CDR | PRT | PT1 HCDR3 (Kabat) | US9371376; SEQ ID NO: 9 | 10 | 1788 |
| Ab50 | VH CDR | PRT | PT3 HCDR1 (Chothia) | US9371376; SEQ ID NO: 25 | 7 | 1789 |
| Ab51 | VH CDR | PRT | PT3 HCDR1 (Kabat) | US9371376; SEQ ID NO: 13 | 5 | 1790 |
| Ab52 | VH CDR | PRT | PT3 HCDR2 (Chothia) | US9371376; SEQ ID NO: 26 | 5 | 1791 |
| Ab53 | VH CDR | PRT | PT3 HCDR2 (Kabat) | US9371376; SEQ ID NO: 14 | 16 | 1792 |
| Ab54 | VH CDR | PRT | PT3 HCDR3 (Chothia) | US9371376; SEQ ID NO: 27 | 9 | 1793 |
| Ab55 | VH CDR | PRT | PT3 HCDR3 (Kabat) | US9371376; SEQ ID NO: 15 | 10 | 1794 |
| Ab56 | VH | PRT | 7295-M6 VH | WO2015122922; SEQ ID | 125 | 1795 |
| | | | | NO: 16 and 24 | | |
| Ab57 | VH | PRT | 7297-2M1 VH | WO2015122922; SEQ ID | 131 | 1796 |
| | | | | NO: 72 | | |
| Ab58 | VH | PRT | 7298-M1 VH | WO2015122922; SEQ ID | 127 | 1797 |
| | | | | NO: 32 | | |
| Ab59 | VH | PRT | 7298-M2 VH | WO2015122922; SEQ ID | 128 | 1798 |
| | | | | NO: 40 | | |
| Ab60 | VH | PRT | 7299-M2 VH | WO2015122922; SEQ ID | 125 | 1799 |
| | | | | NO: 48 | | |
| Ab61 | VH | PRT | 7299-M5 VH | WO2015122922; SEQ ID | 131 | 1800 |
| | | | | NO: 56 | | |
| Ab62 | VH | PRT | 7299-M9 VH | WO2015122922; SEQ ID | 125 | 1801 |
| | | | | NO: 64 | | |
| Ab63 | VH | PRT | C10.2 VH | WO2017009308; SEQ ID | 439 | 1802 |
| | | | | NO: 16 | | |
| Ab64 | VH | PRT | C10.2 VH - 115 | | 115 | 1803 |
| Ab65 | VH | DNA | C10.2 VH | | 345 | 1804 |
| | | | Bioinformatics | | | |
| Ab66 | VH | DNA | C10.2 VH EMBOSS | | 345 | 1805 |
| Ab67 | VH | DNA | C10.2 VH GeneInfinity | | 345 | 1806 |
| Ab68 | VH | DNA | C10.2 VH | | 345 | 1807 |
| | | | GregThatcher | | | |
| Ab69 | VH | DNA | C10.2 VH IDT | | 345 | 1808 |
| Ab70 | VH | DNA | C10.2 VH InSilico | | 345 | 1809 |
| Ab71 | VH | DNA | C10.2 VH MolBio | | 345 | 1810 |
| Ab72 | VH | DNA | C10.2 VH N2P | | 345 | 1811 |
| Ab73 | VH | DNA | C10.2 VH Snapgene | | 345 | 1812 |
| Ab74 | VH | DNA | C10.2 VH Vector NTI | | 345 | 1813 |
| Ab75 | VH | PRT | C5.2 VH | WO2017009308; SEQ ID | 439 | 1814 |
| | | | | NO: 24 | | |
| Ab76 | VH | PRT | C8.3 VH | WO2017009308; SEQ ID | 439 | 1815 |
| | | | | NO: 32 | | |
| Ab77 | VH | PRT | D1.2 VH | WO2017009308; SEQ ID | 451 | 1816 |
| | | | | NO: 8 | | |
| Ab78 | VH | PRT | hC10.2 VH | WO2017009308; SEQ ID | 444 | 1817 |
| | | | | NO: 35 | | |
| Ab79 | VH | DNA | IPN001 VH - 351 | US8980270; SEQ ID NO: 18 | 351 | 1818 |
| Ab80 | VH | PRT | IPN001 VH - 117 | US8980270; SEQ ID NO: 14 | 117 | 1819 |
| Ab81 | VH | DNA | IPN002 VH - 1377 | | 1377 | 1820 |
| Ab82 | VH | DNA | IPN002 VH - 351 | US8980270; SEQ ID NO: 20 | 351 | 1821 |
| Ab83 | VH | PRT | IPN002 VH - 117 | US8980270; SEQ ID NO: 16 | 117 | 1822 |
| Ab84 | VH | PRT | IPN002 VH - 30 | WO2014028777; SEQ ID | 30 | 1823 |
| | | | | NO: 83 | | |
| Ab85 | VH | DNA | IPN002 VH variant 1 | US8980270; SEQ ID NO: 28 | 351 | 1824 |
| Ab86 | VH | PRT | IPN002 VH variant 1 | US8980270; SEQ ID NO: 36 | 117 | 1825 |
| Ab87 | VH | DNA | IPN002 VH variant 2 | US8980270; SEQ ID NO: 29 | 351 | 1826 |
| Ab88 | VH | PRT | IPN002 VH variant 2 | US8980270; SEQ ID NO: 37 | 117 | 1827 |
| Ab89 | VH | DNA | IPN002 VH variant 3 | US8980270; SEQ ID NO: 30 | 351 | 1828 |
| Ab90 | VH | PRT | IPN002 VH variant 3 | US8980270; SEQ ID NO: 38 | 117 | 1829 |
| Ab91 | VH | DNA | IPN002 VH variant 4 | US8980270; SEQ ID NO: 31 | 351 | 1830 |
| Ab92 | VH | PRT | IPN002 VH variant 4 | US8980270; SEQ ID NO: 39 | 117 | 1831 |
| Ab93 | VH | DNA | MC1 VH - 1374 | | 1374 | 1832 |
| Ab94 | VH | DNA | MC1 VH - 1326 | WO2016137811; SEQ ID | 1326 | 1833 |
| | | | | NO: 12 | | |
| Ab95 | VH | PRT | MC1 VH - 458 | | 458 | 1834 |
| Ab96 | VH | PRT | MC1 VH - 442 | WO2016137811; SEQ ID | 442 | 1835 |
| | | | | NO: 2 | | |
| Ab97 | VH | PRT | MC1 VH - 116 | WO2016137811; SEQ ID | 116 | 1836 |
| | | | | NO: 10 | | |
| Ab98 | VH | DNA | PHF1 VH - 1320 | | 1320 | 1837 |
| Ab99 | VH | DNA | PHF1 VH - 1377 | | 1377 | 1838 |
| Ab100 | VH | DNA | PHF1 VH - 351 | | 351 | 1839 |
| Ab101 | VH | DNA | PHF1 VH - 699 | | 699 | 1840 |
| Ab102 | VH | DNA | PHF1 VH - 717 | | 717 | 1841 |
| Ab103 | VH | DNA | PHF1 VH - 744 | | 744 | 1842 |
| Ab104 | VH | DNA | PHF1 VH - 753 | | 753 | 1843 |
| Ab105 | VH | PRT | PHF1 VH - 459 | | 459 | 1844 |
| Ab106 | VH | DNA | PHF1 VH + | | 1383 | 1845 |
| Ab107 | VH | DNA | PT1 VH - 357 | US9371376; SEQ ID NO: 31 | 357 | 1846 |
| Ab108 | VH | PRT | PT1 VH - 119 | US9371376; SEQ ID NO: 35 | 119 | 1847 |
| Ab109 | VH | DNA | PT3 VH - 354 | US9371376; SEQ ID NO: 33 | 354 | 1848 |
| Ab110 | VH | PRT | PT3 VH - 118 | US9371376; SEQ ID NO: 37 | 118 | 1849 |
| Ab111 | VH | DNA | PT3 VH Bioinformatics | | 354 | 1850 |
| Ab112 | VH | DNA | PT3 VH Bioinformatics | | 354 | 1851 |
| | | | 2 | | | |
| Ab113 | VH | DNA | PT3 VH EMBOSS | | 354 | 1852 |
| Ab114 | VH | DNA | PT3 VH Geneinfinity | | 354 | 1853 |
| Ab115 | VH | DNA | PT3 VH Genescript | | 354 | 1854 |
| Ab116 | VH | DNA | PT3 VH IDT | | 354 | 1855 |
| Ab117 | VH | DNA | PT3 VH NUS | | 354 | 1856 |
| Ab118 | VH | DNA | PT3 VH NUS2 | | 354 | 1857 |
| Ab119 | VH | DNA | PT3 VH NUS3 | | 354 | 1858 |
| Ab120 | VH | DNA | PT3 VH Snapgene | | 354 | 1859 |
| Ab121 | VH | PRT | VH | WO2015081085; SEQ ID | 30 | 1860 |
| | | | | NO: 25 | | |
| Ab122 | VL Signal | DNA | IPN002 (VL Signal) | | 57 | 1861 |
| Ab123 | VL Signal | DNA | PHF1 (VL Signal) | | 57 | 1862 |
| Ab124 | VL Signal | DNA | PHF1 (VL Signal 72) | | 72 | 1863 |
| Ab125 | VL Constant | DNA | VL (constant) | | 321 | 1864 |
| Ab126 | VL CDR | PRT | 7295-M6 LCDR | WO2015122922; SEQ ID | 16 | 1865 |
| | | | | NO: 9 and 17 | | |
| Ab127 | VL CDR | PRT | 7295-M6 LCDR | WO2015122922; SEQ ID | 9 | 1866 |
| | | | | NO: 11 and 19 | | |
| Ab128 | VL CDR | PRT | 7297-2M1 LCDR | WO2015122922; SEQ ID | 11 | 1867 |
| | | | | NO: 65 | | |
| Ab129 | VL CDR | PRT | 7297-2M1 LCDR | WO2015122922; SEQ ID | 7 | 1868 |
| | | | | NO: 66 | | |
| Ab130 | VL CDR | PRT | 7297-2M1 LCDR | WO2015122922; SEQ ID | 8 | 1869 |
| | | | | NO: 67 | | |
| Ab131 | VL CDR | PRT | 7298-M1 LCDR | WO2015122922; SEQ ID | 15 | 1870 |
| | | | | NO: 25 and 33 | | |
| Ab132 | VL CDR | PRT | 7298-M1 LCDR | WO2015122922; SEQ ID | 7 | 1871 |
| | | | | NO: 26 and 34 | | |
| Ab133 | VL CDR | PRT | 7298-M1 LCDR | WO2015122922; SEQ ID | 9 | 1872 |
| | | | | NO: 27 and 35 | | |
| Ab134 | VL CDR | PRT | 7299-M2 LCDR | WO2015122922; SEQ ID | 16 | 1873 |
| | | | | NO: 41 | | |
| Ab135 | VL CDR | PRT | 7299-M2 LCDR | WO2015122922; SEQ ID | 7 | 1874 |
| | | | | NO: 42 | | |
| Ab136 | VL CDR | PRT | 7299-M2 LCDR | WO2015122922; SEQ ID | 9 | 1875 |
| | | | | NO: 43 | | |
| Ab137 | VL CDR | PRT | 7299-M5 LCDR | WO2015122922; SEQ ID | 16 | 1876 |
| | | | | NO: 49 and 57 | | |
| Ab138 | VL CDR | PRT | 7299-M5 LCDR | WO2015122922; SEQ ID | 7 | 1877 |
| | | | | NO: 50 and 58 | | |
| Ab139 | VL CDR | PRT | 7299-M5 LCDR | WO2015122922; SEQ ID | 9 | 1878 |
| | | | | NO: 51 | | |
| Ab140 | VL CDR | PRT | 7299-M9 LCDR | WO2015122922; SEQ ID | 8 | 1879 |
| | | | | NO: 59 | | |
| Ab141 | VL CDR | PRT | C10.2 LCDR1 | WO2017009308; SEQ ID | 11 | 1880 |
| | | | | NO: 9 and 25 | | |
| Ab142 | VL CDR | PRT | C10.2 LCDR2 | WO2017009308; SEQ ID | 7 | 1881 |
| | | | | NO: 10 and 18 | | |
| Ab143 | VL CDR | PRT | C10.2 LCDR3 | WO2017009308; SEQ ID | 7 | 1882 |
| | | | | NO: 11 and 19 | | |
| Ab144 | VL CDR | PRT | C5.2 LCDR1 | WO2017009308; SEQ ID | 11 | 1883 |
| | | | | NO: 17 | | |
| Ab145 | VL CDR | PRT | C8.3 LCDR2 | WO2017009308; SEQ ID | 7 | 1884 |
| | | | | NO: 26 | | |
| Ab146 | VL CDR | PRT | C8.3 LCDR3 | WO2017009308; SEQ ID | 7 | 1885 |
| | | | | NO: 27 | | |
| Ab147 | VL CDR | PRT | D1.2 LCDR1 | WO2017009308; SEQ ID | 16 | 1886 |
| | | | | NO: 1 | | |
| Ab148 | VL CDR | PRT | D1.2 LCDR2 | WO2017009308; SEQ ID | 7 | 1887 |
| | | | | NO: 2 | | |
| Ab149 | VL CDR | PRT | D1.2 LCDR3 | WO2017009308; SEQ ID | 7 | 1888 |
| | | | | NO: 3 | | |
| Ab150 | VL CDR | PRT | IPN002 LCDR1 | WO2014028777; SEQ ID | 15 | 1889 |
| | | | | NO: 55 | | |
| Ab151 | VL CDR | PRT | IPN002 LCDR2 | WO2014028777; SEQ ID | 32 | 1890 |
| | | | | NO: 56 | | |
| Ab152 | VL CDR | PRT | IPN002 LCDR3 | WO2014028777; SEQ ID | 10 | 1891 |
| | | | | NO: 57 | | |
| Ab153 | VL CDR | PRT | LCDR1 | US8980270; SEQ ID NO: 1 | 16 | 1892 |
| Ab154 | VL CDR | PRT | LCDR1 | US8980270; SEQ ID NO: 7 | 16 | 1893 |
| Ab155 | VL CDR | PRT | LCDR1 | WO2015081085; SEQ ID | 15 | 1894 |
| | | | | NO: 46 | | |
| Ab156 | VL CDR | PRT | LCDR2 | US8980270; SEQ ID NO: 2 | 7 | 1895 |
| Ab157 | VL CDR | PRT | LCDR2 | WO2015081085; SEQ ID | 32 | 1896 |
| | | | | NO: 47 | | |
| Ab158 | VL CDR | PRT | LCDR3 | US8980270; SEQ ID NO: 3 | 9 | 1897 |
| | | | | and 9 | | |
| Ab159 | VL CDR | PRT | MC1 LCDR1 | WO2016137811; SEQ ID | 16 | 1898 |
| | | | | NO: 3 | | |
| Ab160 | VL CDR | PRT | MC1 LCDR2 | WO2016137811; SEQ ID | 8 | 1899 |
| | | | | NO: 4 | | |
| Ab161 | VL CDR | PRT | MC1 LCDR3 | WO2016137811; SEQ ID | 9 | 1900 |
| | | | | NO: 5 | | |
| Ab162 | VL CDR | PRT | PT1 LCDR1 (Chothia) | US9371376; SEQ ID NO: 22 | 12 | 1901 |
| Ab163 | VL CDR | PRT | PT1 LCDR1 (Kabat) | US9371376; SEQ ID NO: 10 | 16 | 1902 |
| Ab164 | VL CDR | PRT | PT1 LCDR2 (Chothia) | US9371376; SEQ ID NO: 23 | 3 | 1903 |
| Ab165 | VL CDR | PRT | PT1 LCDR2 (Kabat) | US9371376; SEQ ID NO: 11 | 7 | 1904 |
| Ab166 | VL CDR | PRT | PT1 LCDR3 (Chothia) | US9371376; SEQ ID NO: 24 | 7 | 1905 |
| Ab167 | VL CDR | PRT | PT1 LCDR3 (Kabat) | US9371376; SEQ ID NO: 12 | 9 | 1906 |
| Ab168 | VL CDR | PRT | PT3 LCDR1 (Chothia) | US9371376; SEQ ID NO: 28 | 7 | 1907 |
| Ab169 | VL CDR | PRT | PT3 LCDR1 (Kabat) | US9371376; SEQ ID NO: 16 | 11 | 1908 |
| Ab170 | VL CDR | PRT | PT3 LCDR2 (Chothia) | US9371376; SEQ ID NO: 29 | 3 | 1909 |
| Ab171 | VL CDR | PRT | PT3 LCDR2 (Kabat) | US9371376; SEQ ID NO: 17 | 7 | 1910 |
| Ab172 | VL CDR | PRT | PT3 LCDR3 (Chothia) | US9371376; SEQ ID NO: 30 | 6 | 1911 |
| Ab173 | VL CDR | PRT | PT3 LCDR3 (Kabat) | US9371376; SEQ ID NO: 18 | 10 | 1912 |
| Ab174 | VL | PRT | 7295-M6 VL | WO2015122922; SEQ ID | 122 | 1913 |
| | | | | NO: 15 and 23 | | |
| Ab175 | VL | PRT | 7297-2M1 VL | WO2015122922; SEQ ID | 116 | 1914 |
| | | | | NO: 71 | | |
| Ab176 | VL | PRT | 7298-M1 VL | WO2015122922; SEQ ID | 121 | 1915 |
| | | | | NO: 31 and 39 | | |
| Ab177 | VL | PRT | 7299-M2 VL | WO2015122922; SEQ ID | 122 | 1916 |
| | | | | NO: 47 | | |
| Ab178 | VL | PRT | 7299-M5 VL | WO2015122922; SEQ ID | 122 | 1917 |
| | | | | NO: 55 | | |
| Ab179 | VL | PRT | 7299-M9 VL | WO2015122922; SEQ ID | 122 | 1918 |
| | | | | NO: 63 | | |
| Ab180 | VL | PRT | C10.2 VL - 107 | | 107 | 1919 |
| Ab181 | VL | PRT | C10.2 VL - 214 | WO2017009308; SEQ ID | 214 | 1920 |
| | | | | NO: 15 | | |
| Ab182 | VL | DNA | C10.2 VL | | 321 | 1921 |
| | | | Bioinformatics | | | |
| Ab183 | VL | DNA | C10.2 VL EMBOSS | | 321 | 1922 |
| Ab184 | VL | DNA | C10.2 VL GeneInfinity | | 321 | 1923 |
| Ab185 | VL | DNA | C10.2 VL | | 321 | 1924 |
| | | | GregThatcher | | | |
| Ab186 | VL | DNA | C10.2 VL IDT | | 321 | 1925 |
| Ab187 | VL | DNA | C10.2 VL InSilico | | 321 | 1926 |
| Ab188 | VL | DNA | C10.2 VL MolBio | | 321 | 1927 |
| Ab189 | VL | DNA | C10.2 VL N2P | | 321 | 1928 |
| Ab190 | VL | DNA | C10.2 VL Snapgene | | 321 | 1929 |
| Ab191 | VL | DNA | C10.2 VL Vector NTI | | 321 | 1930 |
| Ab192 | VL | PRT | C5.2 VL | WO2017009308; SEQ ID | 214 | 1931 |
| | | | | NO: 23 | | |
| Ab193 | VL | PRT | C8.3 VL | WO2017009308; SEQ ID | 214 | 1932 |
| | | | | NO: 31 | | |
| Ab194 | VL | PRT | D1.2 VL | WO2017009308; SEQ ID | 219 | 1933 |
| | | | | NO: 7 | | |
| Ab195 | VL | PRT | D1.2* VL | WO2017009308; SEQ ID | 219 | 1934 |
| | | | | NO: 34 | | |
| Ab196 | VL | PRT | hC10.2 VL | WO2017009308; SEQ ID | 214 | 1935 |
| | | | | NO: 36 | | |
| Ab197 | VL | DNA | IPN001 VL - 336 | US8980270; SEQ ID NO: 17 | 336 | 1936 |
| Ab198 | VL | PRT | IPN001 VL | US8980270; SEQ ID NO: 13 | 112 | 1937 |
| Ab199 | VL | PRT | IPN002 VL | WO2014028777; SEQ ID | 23 | 1938 |
| | | | | NO: 54 | | |
| Ab200 | VL | DNA | IPN002 VL - 336 | US8980270; SEQ ID NO: 19 | 336 | 1939 |
| Ab201 | VL | DNA | IPN002 VL - 714 | | 714 | 1940 |
| Ab202 | VL | PRT | IPN002 VL - 112 | US8980270; SEQ ID NO: 15 | 112 | 1941 |
| Ab203 | VL | DNA | IPN002 VL variant 1 | US8980270; SEQ ID NO: 32 | 336 | 1942 |
| Ab204 | VL | PRT | IPN002 VL variant 1 | US8980270; SEQ ID NO: 40 | 112 | 1943 |
| Ab205 | VL | DNA | IPN002 VL variant 2 | US8980270; SEQ ID NO: 33 | 336 | 1944 |
| Ab206 | VL | PRT | IPN002 VL variant 2 | US8980270; SEQ ID NO: 41 | 112 | 1945 |
| Ab207 | VL | DNA | IPN002 VL variant 3 | US8980270; SEQ ID NO: 34 | 336 | 1946 |
| Ab208 | VL | PRT | IPN002 VL variant 3 | US8980270; SEQ ID NO: 42 | 112 | 1947 |
| Ab209 | VL | DNA | IPN002 VL variant 4 | US8980270; SEQ ID NO: 35 | 336 | 1948 |
| Ab210 | VL | PRT | IPN002 VL variant 4 | US8980270; SEQ ID NO: 43 | 112 | 1949 |
| Ab211 | VL | DNA | MC1 VL - 714 | | 714 | 1950 |
| Ab212 | VL | DNA | MC1 VL - 717 | | 717 | 1951 |
| Ab213 | VL | DNA | MC1 VL - 657 | WO2016137811; SEQ ID | 657 | 1952 |
| | | | | NO: 11 | | |
| Ab214 | VL | PRT | MC1 VL - 238 | | 238 | 1953 |
| Ab215 | VL | PRT | MC1 VL - 219 | WO2016137811; SEQ ID | 219 | 1954 |
| | | | | NO: 1 | | |
| Ab216 | VL | PRT | MC1 VL - 112 | WO2016137811; SEQ ID | 112 | 1955 |
| | | | | NO: 9 | | |
| Ab217 | VL | DNA | PHF1 VL - 339v1 | | 339 | 1956 |
| Ab218 | VL | DNA | PHF1 VL - 339v2 | | 339 | 1957 |
| Ab219 | VL | DNA | PHF1 VL - 396 | | 396 | 1958 |
| Ab220 | VL | DNA | PHF1 VL - 657 | | 657 | 1959 |
| Ab221 | VL | DNA | PHF1 VL - 660 | | 660 | 1960 |
| Ab222 | VL | DNA | PHF1 VL - 678 | | 678 | 1961 |
| Ab223 | VL | DNA | PHF1 VL - 714 | | 714 | 1962 |
| Ab224 | VL | DNA | PHF1 VL - 720 | | 720 | 1963 |
| Ab225 | VL | PRT | PHF1 VL - 239 | | 239 | 1964 |
| Ab226 | VL | DNA | PHF1 VL + (732) | | 732 | 1965 |
| Ab227 | VL | DNA | PHF1 VL + (747) | | 747 | 1966 |
| Ab228 | VL | DNA | PT1 VL - 336 | US9371376; SEQ ID NO: 32 | 336 | 1967 |
| Ab229 | VL | PRT | PT1 VL - 112 | US9371376; SEQ ID NO: 36 | 112 | 1968 |
| Ab230 | VL | DNA | PT3 VL - 321 | US9371376; SEQ ID NO: 34 | 321 | 1969 |
| Ab231 | VL | PRT | PT3 VL - 107 | US9371376; SEQ ID NO: 38 | 107 | 1970 |
| Ab232 | VL | DNA | PT3 VL Bioinformatics | | 321 | 1971 |
| Ab233 | VL | DNA | PT3 VL Bioinformatics | | 321 | 1972 |
| | | | 2 | | | |
| Ab234 | VL | DNA | PT3 VL EMBOSS | | 321 | 1973 |
| Ab235 | VL | DNA | PT3 VL Geneinfinity | | 321 | 1974 |
| Ab236 | VL | DNA | PT3 VL Genescript | | 321 | 1975 |
| Ab237 | VL | DNA | PT3 VL IDT | | 321 | 1976 |
| Ab238 | VL | DNA | PT3 VL NUS | | 321 | 1977 |
| Ab239 | VL | DNA | PT3 VL NUS2 | | 321 | 1978 |
| Ab240 | VL | DNA | PT3 VL NUS3 | | 321 | 1979 |
| Ab241 | VL | DNA | PT3 VL Snapgene | | 321 | 1980 |
| Ab242 | VL | PRT | VL | WO2015081085; SEQ ID | 23 | 1981 |
| | | | | NO: 45 | | |
| Ab243 | Fab | PRT | AT8 Fab1 | Malia, T.J. et al, “Epitope | 18 | 1982 |
| | | | | mapping and structural basis | | |
| | | | | for the recognition of | | |
| | | | | phosphorylated tau by the | | |
| | | | | anti-tau antibody AT8”, | | |
| | | | | Proteins 84 (4), 427-434 | | |
| | | | | (2016), Accession number | | |
| | | | | 5E2V_P | | |
| Ab244 | Fab | PRT | AT8 Fab2 | Malia, T.J. et al, “Epitope | 18 | 1983 |
| | | | | mapping and structural basis | | |
| | | | | for the recognition of | | |
| | | | | phosphorylated tau by the | | |
| | | | | anti-tau antibody AT8”, | | |
| | | | | Proteins 84 (4), 427-434 | | |
| | | | | (2016), Accession number | | |
| | | | | 5E2W_P | | |
| Ab245 | Full | DNA | MC1 Furin 2A - 2168 | WO2015035190; SEQ ID | 2168 | 1984 |
| | antibody | | | NO: 2 | | |
| Ab246 | Full | PRT | MC1 Furin 2A - 718 | WO2015035190; SEQ ID | 718 | 1985 |
| | antibody | | | NO: 4 | | |
| Ab247 | Full | DNA | MC1 optimized seq | WO2015035190; SEQ ID | 2168 | 1986 |
| | antibody | | | NO: 6 | | |
| Ab248 | Full | DNA | PHF1 Furin 2A - 2174 | WO2015035190; SEQ ID | 2174 | 1987 |
| | antibody | | | NO: 1 | | |
| Ab249 | Full | PRT | PHF1 Furin 2A - 720 | WO2015035190; SEQ ID | 720 | 1988 |
| | antibody | | | NO: 3 | | |
| Ab250 | Full | DNA | PHF1 optimized seq | WO2015035190; SEQ ID | 2174 | 1989 |
| | antibody | | | NO: 5 | | |
| Ab251 | VH | DNA | PT3 | | 348 | 2241 |
| Ab252 | VH | DNA | VH (constant - 309) | | 309 | 2242 |
| | Constant | | | | | |
| Ab253 | VH | DNA | VH (constant - 291) | | 291 | 2243 |
| | Constant | | | | | |
| Ab254 | VH | DNA | PHF1 VH-435 | | 435 | 2169 |
| Ab255 | VH | DNA | PHF1 VH-408 | | 408 | 2170 |
| Ab256 | VL Signal | DNA | PHF1 (VL Signal 60) | | 60 | 4564 |
| Ab257 | VL | DNA | PHF1 VL - 449 | | 449 | 4565 |

[0330] In some embodiments, the payload region of the AAV particle comprises a nucleic acid sequence encoding a polypeptide which is an antibody, an antibody-based composition, or a fragment thereof. As a non-limiting example, the antibody may be one or more of the polypeptides listed in Table 3, or variants or fragments thereof. As another non-limiting example, the antibody may be one or more of the heavy chain sequences listed in Table 3. As a non-limiting example, the antibody may be one or more of the light chain sequences listed in Table 3, or variants or fragments thereof.

[0331] In some embodiments, the payload region of the AAV particle comprises a nucleic acid sequence encoding a polypeptide comprising a heavy chain and a light chain sequence listed in Table 3, or variants or fragments thereof. The payload region may also comprise a linker between the heavy and light chain sequences. The linker may be a sequence known in the art or described in Table 2.

[0332] In some embodiments, the payload region of the AAV particle comprises a nucleic acid sequence encoding a polypeptide comprising a heavy chain and a light chain sequence listed in Table 3, or variants or fragments thereof, where the heavy chain sequence is from a different antibody than the light chain sequence. The payload region may also comprise a linker between the heavy and light chain sequences. The linker may be a sequence known in the art or described in Table 2.

[0333] In some embodiments, the payload region comprises, in the 5′ to 3′ direction, an antibody light chain sequence, a linker and a heavy chain sequence. In another embodiment, the linker is not used.

[0334] In some embodiments, the payload region comprises a nucleic acid sequence encoding, in the 5′ to 3′ direction, an antibody light chain sequence from Table 3, a linker from Table 2 and a heavy chain sequence from Table 3. Non-limiting examples are included in Tables 4-6 and Tables 15-95.

[0335] In some embodiments, the payload region comprises, in the 5′ to 3′ direction, an antibody heavy chain sequence, a linker region (may comprise one or more linkers) and a light chain sequence. In another embodiment, the linker is not used.

[0336] In some embodiments, the payload region comprises a nucleic acid sequence encoding, in the 5′ to 3′ direction, an antibody heavy chain sequence from Table 3, one or more linkers from Table 2, and a light chain sequence from Table 3. Non-limiting examples are included in Tables 4-6 and Tables 15-95.

[0337] In some embodiments, the payload region comprises a nucleic acid sequence encoding a single heavy chain. As a non-limiting example, the heavy chain is an amino acid sequence or fragment thereof described in Table 3.

[0338] Shown in Table 3 are a listing of antibodies and their polynucleotides and/or polypeptides sequences. These sequences may be encoded by or included in the AAV particles of the present disclosure. Variants or fragments of the antibody sequences described in Table 3 may be utilized in the AAV particles of the present disclosure.

[0339] In some embodiments, the AAV particles may comprise a viral genome, wherein one or more components may be codon-optimized. Codon-optimization may be achieved by any method known to one with skill in the art such as, but not limited to, by a method according to Genescript, EMBOSS, Bioinformatics, NUS, NUS2, Geneinfinity, IDT, NUS3, GregThatcher, Insilico, Molbio, N2P, Snapgene, and/or VectorNTI. Antibody heavy and/or light chain sequences within the same viral genome may be codon-optimized according to the same or according to different methods.

[0340] In some cases, the payload region of the AAV particles may encode one or more isoforms or variants of heavy and light chain antibody domains. Such variants may be humanized or optimized antibody domains comprising one or more complementarity determining regions (CDRs) from the heavy and light chains listed in Table 3. CDRs of the antibodies encoded by the viral genomes of the present disclosure may be 50%, 60%, 70%, 80%, 90%, 95% identical to CDRs listed in or incorporated in the sequences of Table 3. Methods of determining CDRs are well known in the art and are described herein. Payload regions may encode antibody variants with one or more heavy chain variable domain (V_{H}) or light chain variable domain (V_{L}) derived from the antibody sequences in Table 3. In some cases, such variants may include bispecific antibodies. Bispecific antibodies encoded by payload regions may comprise variable domain pairs from two different antibodies.

[0341] In some embodiments, the AAV particles may comprise a heavy and a light chain of an antibody described herein and two promoters. As a non-limiting example, the AAV particles may comprise a nucleic acid sequence of a genome as described in FIG. 1 or FIG. 2 of US Patent Publication No. US20030219733, the contents of which are herein incorporated by reference in their entirety. As another non-limiting example, the AAV particles may be a dual-promoter AAV for antibody expression as described by Lewis et al. (J. of. Virology, September 2002, Vol. 76(17), p 8769-8775; the contents of which are herein incorporated by reference in their entirety).

[0342] Payload regions of the viral genomes may encode any anti-tau antibodies, or tau-associated antibodies, not limited to those described in Table 3, including antibodies that are known in the art and/or antibodies that are commercially available. This may include fragments of such antibodies or antibodies that have been developed to comprise one or more of such fragments [e.g., variable domains or complementarity determining regions (CDRs)]. Anti-tau antibodies that may be encoded by payloads include, but are not limited to, AT8 (pSer²⁰²/pThr²⁰⁵; ThermoFisher, Waltham, MA; described in International Publication No. WO1995017429, the contents of which are herein incorporated in their entirety), AT100 (pThr²¹²/pSer²¹⁴; ThermoFisher, Waltham, MA; described in U.S. Pat. No. 6,121,003, the contents of which are herein incorporated in their entirety), AT180 (pThr²³¹; ThermoFisher, Waltham, MA; described in International Publication No. WO1995017429, the contents of which are herein incorporated by reference in their entirety), MC-1 (or MC1) (Tau^{2-18/312-342} conformational antibody; as described in International Publication WO199620218, the contents of which are herein incorporated by reference in their entirety), MC-6 (pSer²³⁵; described in U.S. Pat. No. 5,811,310, the contents of which are herein incorporated in their entirety), TG-3 (pThr²³¹; described in Jicha, G A et al., 1997 J Neurochem 69(5):2087-95, the contents of which are herein incorporated by reference in their entirety), CP13 (pSer²⁰²), CP27 (human Tau¹³⁰⁻¹⁵⁰), Tau12 (human Tau⁹⁻¹⁸; Abcam, Cambridge, MA), TG5 (Tau²²⁰⁻²⁴²; described in U.S. Pat. No. 5,811,310), DA9 (Tau¹⁰²⁻¹⁴⁰; described in U.S. Pat. No. 5,811,310), PHF1 (or PHF-1) (pSer³⁹⁶/pSer⁴⁰⁴; described in International Publication WO199620218), Alz50 (Tau⁷⁻⁹ and Tau³¹²⁻³⁴² conformational epitope; described in U.S. Pat. No. 5,811,310 and Carmel, G et al 1996 J Biol Chem 271(51):32780-32795 and Jicha, G A et al, 1997 J Neurosci Res 48(2):128-132, the contents of each of which are herein incorporated by reference in their entirety), Tau-1 (de-phosphorylated Ser¹⁹⁵/Ser¹⁹⁸/Ser¹⁹⁹/Ser²⁰²; ThermoFisher, Waltham, MA), Tau46 (Tau⁴⁰⁴⁻⁴⁴¹; Abcam, Cambridge, MA), pS199 (ThermoFisher, Waltham, MA), pT205, pS396 (ThermoFisher, Waltham, MA; described in U.S. Pat. No. 8,647,631, the contents of which are herein incorporated by reference in their entirety), pS404 (ThermoFisher, Waltham, MA; described in U.S. Pat. No. 8,647,631, the contents of which are herein incorporated by reference in their entirety), pS422 (ThermoFisher, Waltham, MA), A0024 (hTau²⁴³⁻⁴⁴¹; Dako, Glostrup, Denmark), HT7 (hTau¹⁵⁹⁻¹⁶³; ThermoFisher, Waltham, MA), Tau2 (hTau⁵²⁻⁶⁸; Abcam, Cambridge, MA), AD2 (pSer³⁹⁶/pSer⁴⁰⁴; Bio-Rad Laboratories, Hercules, CA), AT120 (hTau²¹⁶⁻²²⁴; described in U.S. Pat. No. 5,843,779, the contents of which are herein incorporated by reference in their entirety), AT270 (pThr¹⁸¹; ThermoFisher, Waltham, MA), 12E8 (pSer²⁶² and/or Ser³⁵⁶), K9JA (hTau²⁴³⁻⁴⁴¹; Dako, Caprinteria, CA), TauC3 (hTau Asp441; Santa Cruz Biotechnology, Dallas, TX; described in United States Patent Publication US20120244174 and Gamblin, T C et al 2003 PNAS 100(17):10032-7, the contents of each of which are herein incorporated by reference in their entirety), 4E6G7 (pSer³⁹⁶/pSer⁴⁰⁴; described in United States Patent Publication No. US2010316564 and Congdon, E. E. et al., 2016. Molecular Neurodegeneration August 30; 11(1):62, the contents of which are herein incorporated by reference in their entirety), 6B2 and variants thereof, described in International Patent Publication WO2016007414, the contents of which are herein incorporated by reference in their entirety, RZ3 (pThr²³¹), PG5 (pSer⁴⁰⁹), BT2 (pS^{199/202}), DA31 (Tau¹⁵⁰⁻¹⁹⁰), CP9 (pThr²³¹) Ta1505 (phospho site between Tau⁴¹⁰⁻⁴²¹, particularly pSer⁴¹³ as described in United States Patent Publication US20150183854 and Umeda, T. et al., 2015. Ann Clin Trans Neurol 2(3): 241-255, the contents of each of which are herein incorporated by reference in their entirety), PHF-6 (pThr²³¹, as described in Hoffman R et al., 1997. Biochemistry 36; 8114-8124, the contents of which are herein incorporated by reference in their entirety), PHF-13 (pSer³⁹⁶, as described in Hoffman R et al., 1997. Biochemistry 36; 8114-8124), 16B5 (Tau²⁵⁻⁴⁶, as described in United States Publication US20160031976, the contents of which are herein incorporated by reference in their entirety), DC8E8 (as described in United States Patent Publication US20150050215, the contents of which are herein incorporated by reference in their entirety), PT1 or PT3 (as described in U.S. Pat. No. 9,371,376, the contents of which are herein incorporated by reference in their entirety), 4G11 (Tau⁵⁷⁻⁶⁴, as described in International Publication WO2016137950, the contents of which are herein incorporated by reference in their entirety), 1A6 (Tau⁷-1⁷ and Tau²¹⁵-2²⁰, as described in International Publication WO2016137950), Tau15 or Tau81 (as described in International Publication WO2016055941, the contents of which are herein incorporated by reference in their entirety), TOC-1 (dimerized or aggregated tau, as described in International Publication WO2012149365, the contents of which are herein incorporated by reference in their entirety), pS404IgG2a/k (Neotope Biosciences, South San Francisco, CA; as described in Ittner et al., 2015. Neurochemistry 132:135-145, the contents of which are herein incorporated by reference in their entirety), TOMA (tau oligomer monoclonal antibody; as described in U.S. Pat. Nos. 8,778,343 and 9,125,846, International Publications WO2012051498 and WO2011026031, or United States Publication Nos. US20150004169 and US20150322143, and Castillo-Carranza, D L et al., 2014 J Neurosci 34(12)4260-72, the contents of each of which are herein incorporated by reference in their entirety), TTC-99 (oligomeric tau), BMS-986168 (as described in United States Patent Publication US2014294831, International Publication WO2015081085 and U.S. Pat. No. 8,980,271, the contents of which are herein incorporated by reference in their entirety), 3H3 (pan-amyloid epitope; described in Levites, Y et al 2015 J Neurosci 35(16)6265-76, the contents of which are herein incorporated by reference in their entirety), cis-pT231 (described in International Publications WO2012149334 and WO2011056561, the contents of which are herein incorporated by reference in their entirety), CP-3 (pSer²¹⁴; described in Jicha et al 1999 J Neurosci 19(17):7486-94, the contents of which are herein incorporated by reference in their entirety), TNT1 (Tau²⁻¹⁸; as described in United States Patent Publication 20160031978, the contents of which are herein incorporated by reference in their entirety), Tau-nY29 (nTyr²⁹; described in Reynolds M R, et al., 2006 J Neurosci 26(42):10636-45, the contents of which are herein incorporated by reference in their entirety), Tau-nY197 (nTyr¹⁹⁷; described in Reyes, J F et al., 2012 Acta Neuropathol 123(1):119-32, the contents of which are herein incorporated by reference in their entirety), Tau-nY394 (nTyr³⁹⁴; described in Reyes, J F et al 2012), 4E4 (Tau³³⁷⁻³⁴³ Tau³⁸⁷⁻³⁹⁷; described in International Publication WO2012049570 and United States Patent Publication US20150252102, the contents of each of which are herein incorporated by reference in their entirety), ADx210 (described in United States Patent Publication US20140161875, the contents of which are herein incorporated by reference in their entirety), ADx215 (described in United States Patent Publication US20140161875), ADx202 (as described in International Publication WO2015004163, the contents of which are herein incorporated by reference in their entirety), AP422 (pSer⁴²²; described in Hasegawa, M et al 1996 FEBS Lett 384:25-30, the contents of which are herein incorporated by reference in their entirety), Tau5 (Tau²¹⁰⁻²⁴¹) RTA2 (Tau²⁷³⁻²⁸³), RTAC (Tau⁴²⁶⁻⁴⁴¹), RTA1 (Tau²⁵⁷⁻²⁷⁴), T46 (Tau³⁹⁵⁻⁴³²), T49, MIGT4, O.BG.15, 525, 3-39, 4F1, MapTau (Tau⁹⁵⁻¹⁰⁸; SMI Covance), T1, HYB33801 (Tau⁵⁻¹²), Tau13 (Tau²⁻¹⁸), B11E8, 5J20 (14-3-3 tau), DC25 (Tau³⁴⁷⁻³⁵³), DC39N1 (Tau⁴⁵⁻⁷³), DC-11 (Tau³²¹⁻³⁹¹; described in U.S. Pat. No. 7,746,180, the contents of which are herein incorporated by reference in their entirety), DC39 (Tau⁴⁰¹⁻⁴¹¹), DC4R, n847 (nitrated tau), SPM452, TI4, 1E1/A6 (Tau²⁷⁵⁻²⁹¹), 5E2, 8E6/C11 (Tau²⁰⁹⁻²²⁴), 2E12 (pT231), NFT200, 248E5 (Tau³⁻²¹⁴), IG2 (Thr¹⁷⁵, Thr¹⁸¹, Thr²³¹; as described in International Publication WO2016041553, the contents of which are herein incorporated by reference in their entirety), YP3 (as described in WO2007019273, the contents of which are herein incorporated by reference in their entirety), YP4 (as described in WO2007019273) and 14-3-3 Tau (pSer 14-3-3 binding motif; Abcam, Cambridge, MA). Further, anti-tau antibodies may be any of those listed in the antibody section of Alzforum.org or at the Antibody Resource Page.com, the contents of each of which are herein incorporated by reference in their entirety. Further, anti-tau antibodies may be any commercially available anti-tau antibody. Additional antibodies may include any of those taught in Petry, F. R. et al., 2014. PLoS One 9(5): e94251, the contents of which are herein incorporated by reference in their entirety. In one example, such antibodies may include any of those described in Jicha, G. A. et al., 1997. Journal of Neuroscience Research 48:128-132, the contents of which are herein incorporated by reference in their entirety. One such antibody, MC-1 (or MC1), recognizes distinct conformations of tau that are associated with neurological disease.

[0343] In some embodiments, the AAV particles may have a payload region comprising any of the anti-tau antibodies as described in International Publication WO2017189963, the contents of which are herein incorporated by reference in their entirety. As a non-limiting example, the payload region may comprise one or more of the anti-tau antibodies as described in Table 3 of International Publication WO2017189963. In some embodiments, the payload region encodes one or more anti-tau antibodies selected from SEQ ID NO: 2948-4269 as described in WO2017189963.

[0344] In some embodiments, payloads may encode anti-tau antibodies (or fragments thereof) taught in United States Publication No. US2014294831, the contents of which are herein incorporated by reference in their entirety. Such antibodies may include IPN001 and/or IPN002 antibodies or fragments of such antibodies. In some cases, variable domains of IPN002 as presented in FIGS. 2A and 2B of US2014294831 may be used (e.g., incorporated into another antibody). In some cases, CDR regions of IPN002 as underlined in FIGS. 2A and 2B may be used (e.g., incorporated into another antibody or used to prepare humanized versions of IPN002). In some cases, anti-tau antibodies may include any of the IPN001 or IPN002 antibody variants taught in US2014294831 (e.g., in FIGS. 9-16 of that publication). In some embodiments, this antibody is also referred to as BMS-986168.

[0345] In some cases, payloads may encode anti-tau antibodies (or fragments thereof) taught in Otvos, L. et al., 1994. J Neurosci. Res 39(6):669-73, the contents of which are herein incorporated by reference in their entirety. Such antibodies may include monoclonal antibody PHF-1 or fragments thereof. The PHF-1 antibody binds to tau paired helical filaments, a pathological conformation of tau, found in certain neurological disorders, including Alzheimer's disease. Further, antibody affinity is increased when either serine 396 or serine 404 of tau is phosphorylated and even further increased when both are phosphorylated.

[0346] In some embodiments, payloads may encode anti-tau antibodies (or fragments thereof) taught in U.S. Pat. No. 5,811,310, the contents of which are herein incorporated by reference in their entirety. Such embodiments may include monoclonal antibodies PHF-1 or MC1 or fragments thereof. MC1 is a conformational antibody binding to the epitopes presented in Jicha, G. A., et al., 1997. J Neurosci Res 48(128-132).

[0347] In some embodiments, payloads may encode anti-tau antibodies (or fragments thereof) taught in International Publication Number WO2015035190, the contents of which are herein incorporated by reference in their entirety. Such embodiments may include, but are not limited to, antibodies PHF-1 or MC1 or fragments thereof. Viral genomes of the AAV particles of the present disclosure may comprise or encode any of SEQ ID NO: 1-6 of WO2015035190.

[0348] In some embodiments, viral genomes may encode anti-tau antibody MC1 scFv as described in Vitale et al 2018, (Acta Neuropath Commun. 6:82) the contents of which are herein incorporated by reference in their entirety.

[0349] In some embodiments, viral genomes may encode anti-tau antibody MC1 as described in International Publication WO2016137811, the contents of which are herein incorporated by reference in their entirety.

[0350] Anti-tau antibodies (or fragments thereof) encoded by viral genomes may include antibodies that bind to one or more of the epitopes presented in Otvos, L. et al., 1994. J Neurosci. Res 39(6):669-73 (e.g., any of those presented in Table 1 of that publication).

[0351] In some embodiments, payloads may encode anti-tau antibodies (or fragments thereof) taught in U.S. Pat. No. 7,746,180, the contents of which are herein incorporated by reference in their entirety. Such embodiments may include antibody DC-11 or fragments thereof.

[0352] In some embodiments, the antibodies encoded by the viral genomes of the present disclosure may target any of the antigenic regions or epitopes described in United States Patent Publication No US2008050383 or US20100316564, the contents of which are herein incorporated by reference in their entirety. In some embodiments, the antibody targets pS396/pS404. Such embodiments may include antibody 4E6 and/or variants or fragments thereof. The affinity of antibody 4E6 for soluble PHF and its ability to reduce soluble phospho tau has been described in Congdon, E. E. et al., 2016. Molecular Neurodegeneration August 30; 11(1):62, the contents of which are herein incorporated by reference in their entirety.

[0353] In some embodiments, the antibodies encoded by the viral genomes of the present disclosure may target any of the antigenic regions or epitopes described in International Patent Publication WO1998022120, the contents of which are herein incorporated by reference in their entirety. In some embodiments, the antibody may be PHF-6 (pT231), or fragments or variants thereof. In another embodiment, the antibody may be PHF-13 (pS396), or a fragment of variant thereof. These antibodies are further described in Hoffman et al., 1997. Biochemistry 36: 8114-8124, the contents of which are herein incorporated by reference in their entirety.

[0354] In some embodiments, the antibodies encoded by the viral genomes of the present disclosure may target any of the antigenic regions or epitopes described in International Publication WO2016126993, the contents of which are herein incorporated by reference in their entirety. The antibodies may be derived from any of the tau epitopes described in Table A of WO2016126993. In some embodiments, the antibody of the present disclosure may comprise any of the sequences listed in Table B or Table 1 of WO2016126993.

[0355] In some embodiments, the antibodies encoded by the viral genomes of the present disclosure may target any of the antigenic regions or epitopes described in United States Patent Publication US20120244174, the contents of which are herein incorporated by reference in their entirety. In some embodiments, the antibody may bind to caspase-cleaved tau. In some embodiments, the epitope for antibodies targeting caspase cleaved tau is aspartic acid 421. In another embodiment, the epitope for antibodies targeting caspase cleaved tau may be the C-terminus after glutamic residue Glu391. In yet another embodiment, the epitope for antibodies targeting caspase cleaved tau may be at the N-terminus at aspartic acid residue 13. In another embodiment, the antibody may be TauC3.

[0356] In some embodiments, the antibodies encoded by the viral genomes of the present disclosure may target any of the antigenic regions or epitopes described in United States Patent Publication US20160031978, the contents of which are herein incorporated by reference in their entirety. In some embodiments, the antibody may bind to tau N-terminal residues associated with the PP1/GSK3 signaling cascade. In some embodiments, the antibody may be TNT1.

[0357] In some embodiments, the antibodies encoded by the viral genomes of the present disclosure may be any of those described in d'Abramo, C et al., 2015. PLOS One 10(8):e0135774, the contents of which are herein incorporated by reference in their entirety. In some embodiments, the antibody may be CP13 (pS202), or a fragment or variant thereof. In another embodiment, the antibody may be RZ3 (pT231), or a fragment or variant thereof. In another embodiment, the antibody may be PG5 (pS409), or a fragment or variant thereof.

[0358] Anti-tau antibodies or fragments thereof encoded by the viral genomes of the present disclosure may target tau in any antigenic form. As non-limiting examples, antigenic tau may be an unphosphorylated or unmodified tau protein, a phosphorylated or otherwise post-translationally modified tau protein (O-GlnAcylated, or nitrosylated), an oligomeric species of tau protein, a soluble species of tau protein, an insoluble species of tau protein, a conformationally abnormal species of tau protein, a neuropathological form of tau protein and/or a neurofibrillary tangle or a precursor thereof.

[0359] Anti-tau antibodies or fragments thereof encoded by the viral genomes, may target any antigenic region or epitope along the full length of any of the six human tau protein isoforms, such as, but not limited to, tau441 (SEQ ID NO: 2127). As non-limiting examples, the targeted antigenic peptides of the tau protein may be any of the following phosphorylated sites pT50, pS396, pS396-pS404, pS404, pS396-pS404-pS422, pS409, pS413, pS422, pS198, pS1⁹⁹, pS199-pS202, pS202, pT205, pT212, pS214, pT212-pS214, pT181, pT231, cis-pT231, pS235, pS238, pT245, pS262, pY310, pY394, pS324, pS356, pTau¹⁷⁷⁻¹⁸⁷, pY18, pS610, pS622, nitrosylated tau (nY18, nY29), methylated tau (di-meK281, dimeK311), O-GlnAcylated tau at S400, any of the following acetylated sites acK174, acK274, acK280, acK281 and/or any combination thereof. Acetylated tau proteins and associated antigenic peptides are described in Min et al., 2010, Neuron., 67, 953-966, Min et al., 2015, Nature Medicine., 10, 1154-1162, Cohen et al., 2011, Nature Communications., 2, 252, Gorsky et al., 2016, Scientific Report., 6, 22685, Tracy et al., 2016, Neuron., 90, 245-260, the contents of each of which are herein incorporated by reference in their entirety. Phosphorylated tau proteins and associated antigenic peptides are described in Asuni et al., 2007, J Neurosci., 27, 9115-9129, Boutajangout et al., 2010, J Neurosci., 30, 16559-16566, Boutajangout et al., 2011, J Neurochem., 118, 658-667, Chai et al., 2011, J Biol Chem., 286, 34457-34467, Gu et al., 2011, J Biol Chem., 288, 33081-33095, Sankaranarayanan et al., 2015, PLoS One, 10, e0125614, Ittner et al., 2015, J Neurochem., 132, 135-145, D'Abramo et al., 2016, Neurobiol Aging., 37, 58-65, Collin et al., 2014, Brain., 137, 2834-2846, Kondo et al., 2015, Nature., 523, 431-436, the contents of each of which are herein incorporated by reference in their entirety.

[0360] In some embodiments, the targeted antigenic peptides of the tau protein may comprise a sequence selected from SEQ ID NO: 2128-2136.

[0361] In some embodiments, the antibody encoded by the viral genomes of the present disclosure may be a pS409 targeting antibody as described in Lee et al., 2016, Cell Reports, 16, 1690-1700, or International Patent Publication WO2013151762, the contents of each of which are herein incorporated by reference in their entirety. In some embodiments, this antibody may be RG6100 or R071057 or variants or fragments thereof.

[0362] In some embodiments, the antibody encoded by the viral genomes of the present disclosure may be a pS413 targeting antibody as described in Umeda et al., 2015, Ann Clin Trans Neurol., 2(3), 241-255 or International Patent Publication WO2013180238, the contents of each of which are herein incorporated by reference in their entirety. In some embodiments, the antibody is Ta1505 or variants or fragments thereof.

[0363] In some embodiments, the antibody encoded by the viral genomes of the present disclosure may target a tau epitope with amino acid residues 210-275, more specifically pS238 and/or pT245, as described in International Publication WO2011053565, the contents of which are herein incorporated by reference in their entirety.

[0364] In some embodiments, the CDRs of an antibody encoded by the viral genomes of the present disclosure may be any of those listed in or incorporated in the antibody sequences of Table 3. In some embodiments, the CDRs may be any of those described in International Publication WO2015122922, the contents of which are herein incorporated by reference in their entirety. In some embodiments, a CDR may be any of those chosen from the group of SEQ ID NO: 41, 49, or 57 of WO2015122922. Further a CDR of an antibody encoded by the viral genomes of the present disclosure may have 50%, 60%, 70%, 80%, 90%, or 95% identity to SEQ ID NO: 41, 49, or 57 of WO2015122922.

[0365] In some embodiments, the antibodies encoded by the viral genomes of the present disclosure may be any of those described in International Publication WO2016097315, the contents of which are herein incorporated by reference in their entirety. In some embodiments, the antibody may have an amino acid sequence as shown by SEQ ID NO: 2, 11, 20, 29, 38, 47, 56, 65, 74, 83, 92, 101, 110, 119, 128, 137, 146, 155, 164, 173, 182, 191, 209, 218, 226, or 227 of WO2016097315.

[0366] In some embodiments, the antibodies encoded by the viral genomes of the present disclosure may be a multispecific blood brain barrier receptor antibody that also targets tau, as described in International Publication WO2016094566, the contents of which are herein incorporated by reference in their entirety. In some embodiments, the antibody may have a sequence as shown by SEQ ID NO: 1, 2, 17, 18, 33, 34, 49, 50, 65, 66, 81, 82, 9-16, 25-32, 41-48, 57-64, 73-80, 89-96 of WO2016094566.

[0367] In some embodiments, the antibodies (or fragments thereof) encoded by the viral genomes of the present disclosure may be any of those taught in U.S. Pat. Nos. 8,778,343 and 9,125,846, International Publications WO2012051498 and WO2011026031, or United States Publication Nos. US20150004169 and US20150322143, the contents of each of which are herein incorporated by reference in their entirety. Such antibodies may include those that bind to oligomeric species of tau. Further, such an antibody may be referred to as TOMA (tau oligomer monoclonal antibody), as described in Castillo-Carranza et at (Castillo-Carranza, D L et al., 2014 J Neurosci 34(12)4260-72) the contents of which are herein incorporated by reference in their entirety. In some embodiments, the antibody that binds oligomeric tau may be TTC-99.

[0368] In some embodiments, the antibodies (or fragments thereof) encoded by the viral genomes of the present disclosure may be any of those taught in International Publications WO2014059442, the contents of which are herein incorporated by reference in their entirety. Such antibodies may include those that bind to oligomeric species of tau.

[0369] In some embodiments, the antibodies (or fragments thereof) encoded by the viral genomes of the present disclosure may be any of those taught in the International Publications WO2014008404 and WO2016126993, United States Patent Publication US20150183855, Yanamandra, K et al., 2013 Neuron 80(2):402-14 and Yanamandra, K et al 2015 Ann Clin Transl Neurol 2(3):278-88, the contents of each of which are herein incorporated by reference in their entirety. Such antibodies may block tau seeding. Non-limiting examples of antibodies described in these publications include HJ8.1.1, HJ8.1.2, HJ8.2, HJ8.3, HJ8.4, HJ8.5, HJ8.7, HJ8.8, HJ9.1, HJ9.2, HJ9.3, HJ9.4, HJ9.5, and variants thereof. Non-limiting examples of targeted epitopes of tau may include amino acids 22-34, 385-391, 405-411, 3-6, 118-122, 386-401, 7-13, and/or 272-281 of human tau.

[0370] In some embodiments, the antibodies (or fragments thereof) encoded by the viral genomes of the present disclosure may be any of those taught in the International Publications WO2002062851, the contents of which are herein incorporated by reference in their entirety.

[0371] In some embodiments, the antibodies (or fragments thereof) encoded by the viral genomes of the present disclosure may be as described in Bright, J et al., 2015 Neurobiol of Aging 36:693-709; Pedersen, JT and Sigurdsson E M, 2015 Trends Mol Med 21(6):394-402; Levites, Y et al 2015 J Neurosci 35(16)6265-76; Jicha et al 1999 J Neurosci 19(17):7486-94; Reyes μF et al., 2012 Acta Neuropathol 123(1):119-32; Reynolds M R, et al., 2006 J Neurosci 26(42):10636-45; Gamblin, T C et al 2003 PNAS 100(17):10032-7; Castillo-Carranza, D L et al., 2014 J Neurosci 34(12)4260-72; Walls, K C et al., 2014 Neurosci Lett 575:96-100; Yanamandra, K et al., 2013 Neuron 80(2):402-14; Yanamandra, K et al 2015 Ann Clin Transl Neurol 2(3):278-88; Allen B, et al., 2002 J Neurosci 22(21):9340-51; Gotz, J et al., 2010 Biochem Biophys Acta 1802(10):860-71; Hasegawa, M et al 1996 FEBS Lett 384:25-30; Carmel, G et al 1996 J Biol Chem 271(51):32780-32795; Jicha, G A et al, 1997 J Neurosci Res 48(2):128-132; Jicha, G A et al., 1997 J Neurochem 69(5):2087-95; the contents of each of which are herein incorporated by reference in their entirety.

[0372] Anti-tau antibodies or fragments thereof encoded by the viral genomes of the present disclosure may be any commercially available anti-tau antibody known in the art or developed by a person with skill in the art. Non-limiting examples of commercially available anti-tau antibodies include EPR2396(2) (pThr⁵⁰; Abcam, Cambridge, MA), 5H911 (pThr¹⁸¹; ThermoFisher, Waltham, MA), M7004D06 (pThr¹⁸¹; BioLegend, San Diego, CA), 1E7 (pThr¹⁸¹. EMD Millipore, Billerica, MA), EPR2400 (pSer¹⁹⁸; Abcam, Cambridge, MA), EPR2401Y (pSer¹⁹⁹; Abcam, Cambridge, MA), 2H23L4 (pSer¹⁹⁹; ThermoFisher, Waltham, MA), EPR2402 (pSer²⁰²; Abcam, Cambridge, MA), 10F8 (pSer²⁰²; Abcam, Cambridge, MA), EPR2403(2) (pThr²⁰⁵; Abcam, Cambridge, MA), EPR1884(2) (pSer²¹⁴; Abcam, Cambridge, MA), EPR2488 (pThr²³¹; Abcam, Cambridge, MA), 1H6L6 (pThr²³¹; ThermoFisher, Waltham, MA), 3G3 (pThr²³¹, pSer²³s; Abcam, Cambridge, MA), EPR2452 (pSer²³⁵; Abcam, Cambridge, MA), 12G10 (pSer²³⁸; Abcam, Cambridge, MA), EPR2454 (pSer²⁶²; Abcam, Cambridge, MA), EPR2457(2) (pSer³²⁴; Abcam, Cambridge, MA), EPR2603 (pSer³⁵⁶; Abcam, Cambridge, MA), EPR2731 (pSer³⁹⁶; Abcam, Cambridge, MA), EPR2605 (pSer⁴⁰⁴; Abcam, Cambridge, MA), EPR2866 (pSer⁴²²; Abcam, Cambridge, MA), 1A4 (pTau¹⁷⁷⁻¹⁸⁷; Origene, Rockville, MD), 7G9 (pTau¹⁷⁷⁻¹⁸⁷; Origene, Rockville, MD), 9B4 (pTau¹⁷⁷⁻¹⁸⁷; Origene, Rockville, MD), 2A4 (pTau¹⁷⁷⁻¹⁸⁷; Origene, Rockville, MD), 9G3 (pTyr¹⁸; NovusBio, Littleton, CO), EPR2455(2) (pSer⁶¹⁰; Abcam, Cambridge, MA), EP2456Y (pSer⁶²²; Abcam, Cambridge, MA; EMD Millipore, Billerica, MA), SMI 51 (PHF Tau⁹⁵⁻¹⁰⁸; BioLegend, San Diego, CA), TOMA-1 (Oligomeric Tau; EMD Millipore, Billerica, MA), Tau-nY18 (nTyr¹⁸; Origene, Rockville, MD; BioLegend, San Diego, CA; EMD Millipore, Billerica, MA), Tau-nY29 (nTyr²⁹; BioLegend, San Diego, CA; EMD Millipore, Billerica, MA; Abcam, Cambridge, MA), 1C9.G6 (di-methyl-Lys²⁸¹; BioLegend, San Diego, CA), 7G5.F4 (di-methyl-Lys³¹¹; BioLegend, San Diego, CA), TNT-1 (Tau²⁻¹⁸; EMD Millipore, Billerica, MA), TNT-2 (Tau²⁻¹⁸; EMD Millipore, Billerica, MA), 7B8 (Tau⁵⁻¹²; Abcam, Cambridge, MA), Tau-13 (Tau²⁰⁻³⁵; BioLegend, San Diego, CA), 1-100 (Tau¹⁻¹⁰⁰; BioLegend, San Diego, CA), 2G9.F10 (Tau¹⁵⁷-1⁶⁸; BioLegend, San Diego, CA; Origene, Rockville, MD), 39E10 (Tau¹⁸⁹-1⁹⁵; BioLegend, San Diego, CA; Origene, Rockville, MD), 77E9 (Tau¹⁸⁵⁻¹⁹⁵; BioLegend, San Diego, CA; Origene, Rockville, MD), AT8 (pSer²⁰², pThr²⁰⁵; ThermoFisher, Waltham, MA), AT100 (pThr²¹², pSer²¹⁴; ThermoFisher, Waltham, MA), PHF-6 (pThr²³¹; NovusBio, Littleton, CO; EMD Millipore, Billerica, MA; BioLegend, San Diego, CA; ThermoFisher, Waltham, MA), AT180 (pThr²³¹; ThermoFisher, Waltham, MA), AT270 (pThr¹⁸¹; ThermoFisher, Waltham, MA), PHF-13 (pSer³⁹⁶; ThermoFisher, Waltham, MA; BioLegend, San Diego, CA), TauC3 (Asp⁴²¹; BioLegend, San Diego, CA; EMD Millipore, Billerica, MA; ThermoFisher, Waltham, MA), Tau12 (Tau⁶⁻¹⁸; BioLegend, San Diego, CA; EMD Millipore, Billerica, MA), Tau5 (Tau²¹⁰⁻²⁴¹; BioLegend, San Diego, CA; EMD Millipore, Billerica, MA; Abcam, Cambridge MA; ThermoFisher, Waltham, MA), HT7 (Tau¹⁵⁹⁻¹⁶³; ThermoFisher, Waltham, MA), 77G7 (Tau³¹⁶⁻³⁵⁵; BioLegend, San Diego, CA), Tau46 (Tau⁴⁰⁴⁻⁴⁴¹; BioLegend, San Diego, CA; NovusBio, Littleton, CO; Abeam, Cambridge, MA), UMAB239 (Tau⁶²³⁻⁷⁵⁸; Origene, Rockville, MD), OTI6G3 (Tau⁶²³⁻⁷⁵⁸; Origene, Rockville, MD), OTI13E11 (Tau⁶²³⁻⁷⁵⁸; Origene, Rockville, MD), OTI13B5 (Tau⁶²³⁻⁷⁵⁸; Origene, Rockville, MD), E178 (Tau⁷⁰⁰⁻⁸⁰⁰; Abeam, Cambridge, MA), SP70 (N-terminal Tau; Origene, Rockville, MD; NovusBio, Littleton, CO; ThermoFisher, Waltham, MA; Abeam, Cambridge, MA), C45 (N-terminal Tau; Origene, Rockville, MD), Tau7 (C-terminal Tau; EMD Millipore, Billerica, MA), S.125.0 (C-terminal Tau; ThermoFisher, Waltham, MA), 8E6/C11 (Three-repeat Tau²⁰⁹⁻²²⁴; EMD Millipore, Billerica, MA), 1E1/A6 (Four-repeat Tau²⁷⁵⁻²⁹¹; EMD Millipore, Billerica, MA), 7D12.1 (Four-repeat Tau²⁷⁵⁻²⁹¹; EMD Millipore, Billerica, MA), 5C7 (Four-repeat Tau²⁶⁷⁻²⁷⁸; BioLegend, San Diego, CA; Origene, Rockville, MD), 5F9 (Four-repeat Tau²⁷⁵⁻²⁹¹. BioLegend, San Diego, CA; Origene, Rockville, MD), 3H6.H7 (0N Tau³⁹⁻⁵⁰; BioLegend, San Diego, CA; Origene, Rockville, MD), 4H5.B9 (1N Tau⁶⁸⁻⁷⁹; BioLegend, San Diego, CA; Origene, Rockville, MD), 71C11 (2N Tau; BioLegend, San Diego, CA), PC1C6 (unphosphorylated tau; EMD Millipore, Billerica, MA), Tau2 (BioLegend, San Diego, CA; Origene, Rockville, MD; EMD Millipore, Billerica, MA), 2E9 (Origene, Rockville, MD; NovusBio, Littleton, CO), 4F1 (Origene, Rockville, MD; NovusBio, Littleton, CO), 5B10 (NovusBio, Littleton, CO); 5E2 (EMD Millipore, Billerica, MA), Tau-93 (Origene, Rockville, MD), T14 (ThermoFisher, Waltham, MA), T46 (ThermoFisher, Waltham, MA), BT2 (ThermoFisher, Waltham, MA) and/or variants or derivates thereof.

[0373] In some embodiments, the antibodies encoded by the viral genomes of the present disclosure may be multispecific antibodies for transferrin receptor and a brain antigen, wherein the brain antigen may be tau, as described in International Publication WO2016081643, the contents of which are herein incorporated by reference in their entirety. In some embodiments, the antibody may have a sequence as given by SEQ ID NO: 160 or 161 of WO2016081643.

[0374] In some embodiments, the antibodies encoded by the viral genomes of the present disclosure are any of those described in U.S. Pat. Nos. 8,871,447, 8,420,613, International Publication No. WO2014193935, WO2010011999, or in United States Publication Nos. US20110250217, US20110020237, US20100316590, or US20120225864, the contents of each of which are herein incorporated by reference in their entirety. In some embodiments, the antibody recognizes a misfolded, amyloidogenic or aggregating protein.

[0375] In some embodiments, the viral genome of the AAV particle of the present disclosure encodes anti-tau antibody PT3, or a fragment or variant thereof.

[0376] In some embodiments, the viral genome of the AAV particle of the present disclosure encodes anti-tau antibody AT8, or a fragment or variant thereof.

[0377] In some embodiments, the viral genome of the AAV particle of the present disclosure encodes anti-tau antibody IPN002, or a fragment or variant thereof.

[0378] In some embodiments, the viral genome of the AAV particle of the present disclosure encodes anti-tau antibody MC1, or a fragment or variant thereof.

[0379] In some embodiments, the viral genome of the AAV particle of the present disclosure encodes anti-tau antibody PHF1, or a fragment or variant thereof.

[0380] In some embodiments, the viral genome of the AAV particle of the present disclosure encodes anti-tau antibody CP13, or a fragment or variant thereof.

[0381] In some embodiments, the viral genome of the AAV particle of the present disclosure encodes anti-tau antibody C10.2, or a fragment or variant thereof.

[0382] In some embodiments, the viral genome of the AAV particle of the present disclosure encodes anti-tau antibody PHF-13, or a fragment or variant thereof.

[0383] In some embodiments, the viral genome of the AAV particle of the present disclosure encodes anti-tau antibody PHF-6, or a fragment or variant thereof.

### The Nature of the Polypeptides and Variants

[0384] Antibodies encoded by payload regions of the viral genomes may be translated as a whole polypeptide, a plurality of polypeptides or fragments of polypeptides, which independently may be encoded by one or more nucleic acids, fragments of nucleic acids or variants of any of the aforementioned. As used herein, “polypeptide” means a polymer of amino acid residues (natural or unnatural) linked together most often by peptide bonds. The term, as used herein, refers to proteins, polypeptides, and peptides of any size, structure, or function. In some instances, the polypeptide encoded is smaller than about 50 amino acids and the polypeptide is then termed a peptide. If the polypeptide is a peptide, it will be at least about 2, 3, 4, or at least 5 amino acid residues long. Thus, polypeptides include gene products, naturally occurring polypeptides, synthetic polypeptides, homologs, orthologs, paralogs, fragments and other equivalents, variants, and analogs of the foregoing. A polypeptide may be a single molecule or may be a multi-molecular complex such as a dimer, trimer or tetramer. They may also comprise single chain or multichain polypeptides and may be associated or linked. The term polypeptide may also apply to amino acid polymers in which one or more amino acid residues are an artificial chemical analogue of a corresponding naturally occurring amino acid.

[0385] The term “polypeptide variant” refers to molecules which differ in their amino acid sequence from a native or reference sequence. The amino acid sequence variants may possess substitutions, deletions, and/or insertions at certain positions within the amino acid sequence, as compared to a native or reference sequence. Ordinarily, variants will possess at least about 50% identity (homology) to a native or reference sequence, and preferably, they will be at least about 80%, more preferably at least about 90% identical (homologous) to a native or reference sequence.

[0386] In some embodiments “variant mimics” are provided. As used herein, the term “variant mimic” is one which contains one or more amino acids which would mimic an activated sequence. For example, glutamate may serve as a mimic for phosphoro-threonine and/or phosphoro-serine. Alternatively, variant mimics may result in deactivation or in an inactivated product containing the mimic, e.g., phenylalanine may act as an inactivating substitution for tyrosine; or alanine may act as an inactivating substitution for serine.

[0387] The term “amino acid sequence variant” refers to molecules with some differences in their amino acid sequences as compared to a native or starting sequence. The amino acid sequence variants may possess substitutions, deletions, and/or insertions at certain positions within the amino acid sequence. “Native” or “starting” sequence should not be confused with a wild type sequence. As used herein, a native or starting sequence is a relative term referring to an original molecule against which a comparison may be made. “Native” or “starting” sequences or molecules may represent the wild-type (that sequence found in nature) but do not have to be the wild-type sequence.

[0388] Ordinarily, variants will possess at least about 70% homology to a native sequence, and preferably, they will be at least about 80%, more preferably at least about 90% homologous to a native sequence. “Homology” as it applies to amino acid sequences is defined as the percentage of residues in the candidate amino acid sequence that are identical with the residues in the amino acid sequence of a second sequence after aligning the sequences and introducing gaps, if necessary, to achieve the maximum percent homology. Methods and computer programs for the alignment are well known in the art. It is understood that homology depends on a calculation of percent identity but may differ in value due to gaps and penalties introduced in the calculation.

[0389] By “homologs” as it applies to amino acid sequences is meant the corresponding sequence of other species having substantial identity to a second sequence of a second species.

[0390] “Analogs” is meant to include polypeptide variants which differ by one or more amino acid alterations, e.g., substitutions, additions, or deletions of amino acid residues that still maintain the properties of the parent polypeptide.

[0391] Sequence tags or amino acids, such as one or more lysines, can be added to the peptide sequences (e.g., at the N-terminal or C-terminal ends). Sequence tags can be used for peptide purification or localization. Lysines can be used to increase peptide solubility or to allow for biotinylation. Alternatively, amino acid residues located at the carboxy and amino terminal regions of the amino acid sequence of a peptide or protein may optionally be deleted providing for truncated sequences. Certain amino acids (e.g., C-terminal or N-terminal residues) may alternatively be deleted depending on the use of the sequence, as for example, expression of the sequence as part of a larger sequence which is soluble, or linked to a solid support.

[0392] “Substitutional variants” when referring to proteins are those that have at least one amino acid residue in a native or starting sequence removed and a different amino acid inserted in its place at the same position. The substitutions may be single, where only one amino acid in the molecule has been substituted, or they may be multiple, where two or more amino acids have been substituted in the same molecule.

[0393] As used herein the term “conservative amino acid substitution” refers to the substitution of an amino acid that is normally present in the sequence with a different amino acid of similar size, charge, or polarity. Examples of conservative substitutions include the substitution of a non-polar (hydrophobic) residue such as isoleucine, valine, and leucine for another non-polar residue. Likewise, examples of conservative substitutions include the substitution of one polar (hydrophilic) residue for another such as between arginine and lysine, between glutamine and asparagine, and between glycine and serine. Additionally, the substitution of a basic residue such as lysine, arginine, or histidine for another, or the substitution of one acidic residue such as aspartic acid or glutamic acid for another acidic residue are additional examples of conservative substitutions. Examples of non-conservative substitutions include the substitution of a non-polar (hydrophobic) amino acid residue such as isoleucine, valine, leucine, alanine, methionine for a polar (hydrophilic) residue such as cysteine, glutamine, glutamic acid or lysine and/or a polar residue for a non-polar residue.

[0394] “Insertional variants” when referring to proteins are those with one or more amino acids inserted immediately adjacent to an amino acid at a particular position in a native or starting sequence. “Immediately adjacent” to an amino acid means connected to either the alpha-carboxy or alpha-amino functional group of the amino acid.

[0395] “Deletional variants” when referring to proteins, are those with one or more amino acids in the native or starting amino acid sequence removed. Ordinarily, deletional variants will have one or more amino acids deleted in a particular region of the molecule.

[0396] As used herein, the term “derivative” is used synonymously with the term “variant” and refers to a molecule that has been modified or changed in any way relative to a reference molecule or starting molecule. In some embodiments, derivatives include native or starting proteins that have been modified with an organic proteinaceous or non-proteinaceous derivatizing agent, and post-translational modifications. Covalent modifications are traditionally introduced by reacting targeted amino acid residues of the protein with an organic derivatizing agent that is capable of reacting with selected side-chains or terminal residues, or by harnessing mechanisms of post-translational modifications that function in selected recombinant host cells. The resultant covalent derivatives are useful in programs directed at identifying residues important for biological activity, for immunoassays, or for the preparation of anti-protein antibodies for immunoaffinity purification of the recombinant glycoprotein. Such modifications are within the ordinary skill in the art and are performed without undue experimentation.

[0397] Certain post-translational modifications are the result of the action of recombinant host cells on the expressed polypeptide. Glutaminyl and asparaginyl residues are frequently post-translationally deamidated to the corresponding glutamyl and aspartyl residues. Alternatively, these residues are deamidated under mildly acidic conditions. Either form of these residues may be present in the proteins used in accordance with the present disclosure.

[0398] Other post-translational modifications include hydroxylation of proline and lysine, phosphorylation of hydroxyl groups of seryl or threonyl residues, methylation of the alpha-amino groups of lysine, arginine, and histidine side chains (T. E. Creighton, Proteins: Structure and Molecular Properties, W.H. Freeman & Co., San Francisco, pp. 79-86 (1983)).

[0399] “Features” when referring to proteins are defined as distinct amino acid sequence-based components of a molecule. Features of the proteins of the present disclosure include surface manifestations, local conformational shape, folds, loops, half-loops, domains, half-domains, sites, termini or any combination thereof.

[0400] As used herein when referring to proteins the term “surface manifestation” refers to a polypeptide-based component of a protein appearing on an outermost surface.

[0401] As used herein when referring to proteins the term “local conformational shape” means a polypeptide based structural manifestation of a protein which is located within a definable space of the protein.

[0402] As used herein when referring to proteins the term “fold” means the resultant conformation of an amino acid sequence upon energy minimization. A fold may occur at the secondary or tertiary level of the folding process. Examples of secondary level folds include beta sheets and alpha helices. Examples of tertiary folds include domains and regions formed due to aggregation or separation of energetic forces. Regions formed in this way include hydrophobic and hydrophilic pockets, and the like.

[0403] As used herein the term “turn” as it relates to protein conformation means a bend which alters the direction of the backbone of a peptide or polypeptide and may involve one, two, three or more amino acid residues.

[0404] As used herein when referring to proteins the term “loop” refers to a structural feature of a peptide or polypeptide which reverses the direction of the backbone of a peptide or polypeptide and comprises four or more amino acid residues. Oliva et al. have identified at least 5 classes of protein loops (J. Mol Biol 266 (4): 814-830; 1997).

[0405] As used herein when referring to proteins the term “half-loop” refers to a portion of an identified loop having at least half the number of amino acid residues as the loop from which it is derived. It is understood that loops may not always contain an even number of amino acid residues. Therefore, in those cases where a loop contains or is identified to comprise an odd number of amino acids, a half-loop of the odd-numbered loop will comprise the whole number portion or next whole number portion of the loop (number of amino acids of the loop/2+/−0.5 amino acids). For example, a loop identified as a 7-amino acid loop could produce half-loops of 3 amino acids or 4 amino acids (7/2=3.5+/−0.5 being 3 or 4).

[0406] As used herein when referring to proteins the term “domain” refers to a motif of a polypeptide having one or more identifiable structural or functional characteristics or properties (e.g., binding capacity, serving as a site for protein-protein interactions).

[0407] As used herein when referring to proteins the term “half-domain” means portion of an identified domain having at least half the number of amino acid residues as the domain from which it is derived. It is understood that domains may not always contain an even number of amino acid residues. Therefore, in those cases where a domain contains or is identified to comprise an odd number of amino acids, a half-domain of the odd-numbered domain will comprise the whole number portion or next whole number portion of the domain (number of amino acids of the domain/2+/−0.5 amino acids). For example, a domain identified as a 7-amino acid domain could produce half-domains of 3 amino acids or 4 amino acids (7/2=3.5+/−0.5 being 3 or 4). It is also understood that sub-domains may be identified within domains or half-domains, these subdomains possessing less than all of the structural or functional properties identified in the domains or half domains from which they were derived. It is also understood that the amino acids that comprise any of the domain types herein need not be contiguous along the backbone of the polypeptide (i.e., nonadjacent amino acids may fold structurally to produce a domain, half-domain or subdomain).

[0408] As used herein when referring to proteins the terms “site” as it pertains to amino acid-based embodiments is used synonymous with “amino acid residue” and “amino acid side chain”. A site represents a position within a peptide or polypeptide that may be modified, manipulated, altered, derivatized or varied within the polypeptide-based molecules of the present disclosure.

[0409] As used herein the terms “termini or terminus” when referring to proteins refers to an extremity of a peptide or polypeptide. Such extremity is not limited only to the first or final site of the peptide or polypeptide but may include additional amino acids in the terminal regions. The polypeptide-based molecules of the present disclosure may be characterized as having both an N-terminus (terminated by an amino acid with a free amino group (NH2)) and a C-terminus (terminated by an amino acid with a free carboxyl group (COOH)). Proteins are in some cases made up of multiple polypeptide chains brought together by disulfide bonds or by non-covalent forces (multimers, oligomers). These sorts of proteins will have multiple N- and C-termini. Alternatively, the termini of the polypeptides may be modified such that they begin or end, as the case may be, with a non-polypeptide-based moiety such as an organic conjugate.

[0410] Once any of the features have been identified or defined as a component of a molecule, any of several manipulations and/or modifications of these features may be performed by moving, swapping, inverting, deleting, randomizing, or duplicating. Furthermore, it is understood that manipulation of features may result in the same outcome as a modification to the molecules. For example, a manipulation which involves deleting a domain would result in the alteration of the length of a molecule just as modification of a nucleic acid to encode less than a full-length molecule would.

[0411] Modifications and manipulations can be accomplished by methods known in the art such as site directed mutagenesis. The resulting modified molecules may then be tested for activity using in vitro or in vivo assays such as those described herein or any other suitable screening assay known in the art.

### AAV Production

[0412] The present disclosure provides methods for the generation of parvoviral particles, e.g. AAV particles, by viral genome replication in a viral replication cell.

[0413] In accordance with the disclosure, the viral genome comprising a payload region encoding an antibody, an antibody-based composition or fragment thereof, will be incorporated into the AAV particle produced in the viral replication cell. Methods of making AAV particles are well known in the art and are described in e.g., U.S. Pat. Nos. 6,204,059, 5,756,283, 6,258,595, 6,261,551, 6,270,996, 6,281,010, 6,365,394, 6,475,769, 6,482,634, 6,485,966, 6,943,019, 6,953,690, 7,022,519, 7,238,526, 7,291,498 and 7,491,508, 5,064,764, 6,194,191, 6,566,118, 8,137,948; or International Publication Nos. WO1996039530, WO1998010088, WO1999014354, WO1999015685, WO1999047691, WO2000055342, WO2000075353, and WO2001023597; Methods In Molecular Biology, ed. Richard, Humana Press, N J (1995); O'Reilly et al., Baculovirus Expression Vectors, A Laboratory Manual, Oxford Univ. Press (1994); Samulski et al., J. Vir. 63:3822-8 (1989); Kajigaya et al., Proc. Nat'l. Acad. Sci. USA 88: 4646-50 (1991); Ruffing et al., J. Vir. 66:6922-30 (1992); Kimbauer et al., Vir., 219:37-44 (1996); Zhao et al., Vir. 272:382-93 (2000); the contents of each of which are herein incorporated by reference in their entirety. In some embodiments, the AAV particles are made using the methods described in WO2015191508, the contents of which are herein incorporated by reference in their entirety.

[0414] Viral replication cells commonly used for production of recombinant AAV viral vectors include but are not limited to 293 cells, COS cells, HeLa cells, KB cells, and other mammalian cell lines as described in U.S. Pat. Nos. 6,156,303, 5,387,484, 5,741,683, 5,691,176, and 5,688,676; U.S. patent publication No. 2002/0081721, and International Patent Publication Nos. WO 00/47757, WO 00/24916, and WO 96/17947, the contents of each of which are herein incorporated by reference in their entireties.

[0415] In some embodiments, the AAV particles of the present disclosure may be produced in insect cells (e.g., Sf9 cells).

[0416] In some embodiments, the AAV particles of the present disclosure may be produced using triple transfection.

[0417] In some embodiments, the AAV particles of the present disclosure may be produced in mammalian cells.

[0418] In some embodiments, the AAV particles of the present disclosure may be produced by triple transfection in mammalian cells.

[0419] In some embodiments, the AAV particles of the present disclosure may be produced by triple transfection in HEK293 cells.

[0420] The present disclosure provides a method for producing an AAV particle comprising the steps of: 1) co-transfecting competent bacterial cells with a bacmid vector and either a viral construct vector and/or AAV payload construct vector, 2) isolating the resultant viral construct expression vector and AAV payload construct expression vector and separately transfecting viral replication cells, 3) isolating and purifying resultant payload and viral construct particles comprising viral construct expression vector or AAV payload construct expression vector, 4) co-infecting a viral replication cell with both the AAV payload and viral construct particles comprising viral construct expression vector or AAV payload construct expression vector, 5) harvesting and purifying the viral particle comprising a parvoviral genome.

[0421] In some embodiments, the present disclosure provides a method for producing an AAV particle comprising the steps of 1) simultaneously co-transfecting mammalian cells, such as, but not limited to HEK293 cells, with a payload region, a construct expressing rep and cap genes and a helper construct, 2) harvesting and purifying the AAV particle comprising a viral genome.

[0422] In some embodiments, the viral construct vector(s) used for AAV production may contain a nucleotide sequence encoding the AAV capsid proteins where the initiation codon of the AAV VP1 capsid protein is a non-ATG, i.e., a suboptimal initiation codon, allowing the expression of a modified ratio of the viral capsid proteins in the production system, to provide improved infectivity of the host cell. In a non-limiting example, a viral construct vector may contain a nucleic acid construct comprising a nucleotide sequence encoding AAV VP1, VP2, and VP3 capsid proteins, wherein the initiation codon for translation of the AAV VP1 capsid protein is CTG, TTG, or GTG, as described in U.S. Pat. No. 8,163,543, the contents of which are herein incorporated by reference in its entirety.

[0423] In some embodiments, the viral construct vector(s) used for AAV production may contain a nucleotide sequence encoding the AAV rep proteins where the initiation codon of the AAV rep protein or proteins is a non-ATG. In some embodiments, a single coding sequence is used for the Rep78 and Rep52 proteins, wherein initiation codon for translation of the Rep78 protein is a suboptimal initiation codon, selected from the group consisting of ACG, TTG, CTG and GTG, that effects partial exon skipping upon expression in insect cells, as described in U.S. Pat. No. 8,512,981, the contents of which is herein incorporated by reference in its entirety, for example to promote less abundant expression of Rep78 as compared to Rep52, which may be advantageous in that it promotes high vector yields.

[0424] In some embodiments, the viral genome of the AAV particle optionally encodes a selectable marker. The selectable marker may comprise a cell-surface marker, such as any protein expressed on the surface of the cell including, but not limited to receptors, CD markers, lectins, integrins, or truncated versions thereof.

[0425] In some embodiments, selectable marker reporter genes are selected from those described in International Application No. WO 96/23810; Heim et al., Current Biology 2:178-182 (1996); Heim et al., Proc. Natl. Acad. Sci. USA (1995); or Heim et al., Science 373:663-664 (1995); WO 96/30540, the contents of each of which are incorporated herein by reference in their entireties).

[0426] The AAV viral genomes encoding an anti-tau antibody payload described herein may be useful in the fields of human disease, veterinary applications and a variety of in vivo and in vitro settings. The AAV particles of the present disclosure may be useful in the field of medicine for the treatment, prophylaxis, palliation or amelioration of neurological diseases and/or disorders. In some embodiments, the AAV particles are used for the prevention and/or treatment of a tauopathy.

[0427] Various embodiments herein provide a pharmaceutical composition comprising the AAV particles described herein and a pharmaceutically acceptable excipient.

[0428] Various embodiments herein provide a method of treating a subject in need thereof comprising administering to the subject a therapeutically effective amount of the pharmaceutical composition described herein.

[0429] Certain embodiments of the method provide that the subject is treated by a route of administration of the pharmaceutical composition selected from the group consisting of intravenous, intracerebroventricular, intraparenchymal, intrathecal, subpial and intramuscular, or a combination thereof. Certain embodiments of the method provide that the subject is treated for a tauopathy and/or other neurological disorder. In one aspect of the method, a pathological feature of the tauopathy or other neurological disorder is alleviated and/or the progression of the tauopathy or other neurological disorder is halted, slowed, ameliorated or reversed.

[0430] Various embodiments herein describe a method of decreasing the level of soluble tau in the central nervous system of a subject in need thereof comprising administering to said subject an effective amount of the pharmaceutical composition described herein.

[0431] Also described herein are compositions, methods, processes, kits and devices for the design, preparation, manufacture and/or formulation of AAV particles. In some embodiments, payloads, such as but not limited to anti-tau antibodies, may be encoded by payload constructs or contained within plasmids or vectors or recombinant adeno-associated viruses (AAVs).

[0432] The present disclosure also provides administration and/or delivery methods for vectors and viral particles, e.g., AAV particles, for the treatment or amelioration of neurological disease, such as, but not limited to tauopathy.

### AAV Particles Comprising Anti-Tau Antibody Payloads

[0433] In some embodiments, the AAV particle comprises a viral genome with a payload region comprising one or more anti-tau antibody polynucleotide sequences.

[0434] In some embodiments, a viral genome encoding more than one polypeptide may be replicated and packaged into a viral particle. A target cell transduced with a viral particle comprising one or more anti-tau antibody polynucleotides may express the encoded antibody or antibodies in a single cell.

[0435] In some embodiments, the AAV particles are useful in the field of medicine for the treatment, prophylaxis, palliation or amelioration of neurological diseases and/or disorders.

[0436] Non-limiting examples of ITR to ITR sequences of AAV particles comprising a viral genome with a payload region comprising an anti-tau antibody polynucleotide sequence are described in Table 4-6.

TABLE 4
ITR to ITR Sequences of AAV particles
comprising anti-tau antibody
polynucleotide sequences

| ITR to ITR | Length | SEQ ID |
|---|---|---|
| Construct Name | (nt) | NO: |
| TAU_ITR1 | 4450 | 1990 |
| TAU_ITR2 | 4471 | 1991 |
| TAU_ITR3 | 3983 | 1992 |
| TAU_ITR4 | 3962 | 1993 |
| TAU_ITR5 | 4041 | 1994 |
| TAU_ITR6 | 4020 | 1995 |
| TAU_ITR7 | 3899 | 1996 |
| TAU_ITR8 | 3878 | 1997 |
| TAU_ITR17 | 3932 | 2006 |
| TAU_ITR18 | 3932 | 2007 |
| TAU_ITR19 | 3932 | 2008 |
| TAU_ITR20 | 3932 | 2009 |
| TAU_ITR21 | 3932 | 2010 |
| TAU_ITR22 | 3932 | 2011 |
| TAU_ITR23 | 3932 | 2012 |
| TAU_ITR24 | 3932 | 2013 |
| TAU_ITR25 | 3932 | 2014 |
| TAU_ITR26 | 4309 | 2015 |
| TAU_ITR27 | 4309 | 2016 |
| TAU_ITR28 | 4309 | 2017 |
| TAU_ITR29 | 4309 | 2018 |
| TAU_ITR30 | 4309 | 2019 |
| TAU_ITR31 | 4309 | 2020 |
| TAU_ITR32 | 4309 | 2021 |
| TAU_ITR33 | 4309 | 2022 |
| TAU_ITR34 | 4309 | 2023 |
| TAU_ITR35 | 4309 | 2024 |
| TAU_ITR87 | 3950 | 2137 |
| TAU_ITR88 | 3962 | 2138 |
| TAU_ITR89 | 4450 | 2139 |
| TAU_ITR90 | 4020 | 2140 |
| TAU_ITR91 | 3878 | 2141 |
| TAU_ITR92 | 3950 | 2142 |
| TAU_ITR93 | 4438 | 2143 |
| TAU_ITR94 | 4008 | 2144 |
| TAU_ITR95 | 3866 | 2145 |
| TAU_ITR96 | 3941 | 2146 |
| TAU_ITR97 | 4429 | 2147 |
| TAU_ITR98 | 3999 | 2148 |
| TAU_ITR99 | 3857 | 2149 |
| TAU_ITR100 | 4420 | 2150 |
| TAU_ITR101 | 3990 | 2151 |
| TAU_ITR102 | 3848 | 2152 |
| TAU_ITR103 | 3971 | 2153 |
| TAU_ITR104 | 4459 | 2154 |
| TAU_ITR105 | 4029 | 2155 |
| TAU_ITR106 | 3887 | 2156 |
| TAU_ITR107 | 3938 | 2157 |
| TAU_ITR108 | 4447 | 2158 |
| TAU_ITR109 | 4017 | 2159 |
| TAU_ITR110 | 3875 | 2160 |
| TAU_ITR111 | 3950 | 2161 |
| TAU_ITR112 | 4438 | 2162 |
| TAU_ITR113 | 4008 | 2163 |
| TAU_ITR160 | 3097 | 2210 |
| TAU_ITR161 | 3082 | 2211 |
| TAU_ITR162 | 3097 | 2212 |
| TAU_ITR163 | 3112 | 2213 |
| TAU_ITR164 | 2652 | 2214 |
| TAU_ITR165 | 2667 | 2215 |
| TAU_ITR166 | 2730 | 2216 |
| TAU_ITR167 | 2510 | 2217 |
| TAU_ITR168 | 2525 | 2218 |
| TAU_ITR169 | 2540 | 2219 |
| TAU_ITR170 | 3091 | 2220 |
| TAU_ITR171 | 3082 | 2221 |
| TAU_ITR172 | 3103 | 2222 |
| TAU_ITR173 | 3109 | 2223 |
| TAU_ITR174 | 3115 | 2224 |
| TAU_ITR175 | 3121 | 2225 |
| TAU_ITR176 | 3097 | 2226 |
| TAU_ITR177 | 3124 | 2227 |
| TAU_ITR178 | 3109 | 2228 |
| TAU_ITR179 | 3157 | 2229 |
| TAU_ITR180 | 3760 | 2230 |
| TAU_ITR181 | 3781 | 2231 |
| TAU_ITR182 | 3778 | 2232 |
| TAU_ITR183 | 3748 | 2233 |
| TAU_ITR184 | 3769 | 2234 |
| TAU_ITR185 | 3766 | 2235 |
| TAU_ITR186 | 3760 | 2236 |
| TAU_ITR187 | 3778 | 2237 |
| TAU_ITR188 | 3188 | 2260 |
| TAU_ITR189 | 3330 | 2261 |
| TAU_ITR190 | 3976 | 2262 |
| TAU_ITR191 | 3404 | 2263 |
| TAU_ITR192 | 3546 | 2264 |
| TAU_ITR193 | 3997 | 2265 |
| TAU_ITR194 | 3425 | 2266 |
| TAU_ITR195 | 3567 | 2267 |
| TAU_ITR196 | 3088 | 2268 |
| TAU_ITR197 | 3558 | 2269 |
| TAU_ITR198 | 3360 | 2270 |
| TAU_ITR199 | 3384 | 2271 |
| TAU_ITR200 | 2625 | 2272 |
| TAU_ITR9 | 4459 | 1998 |
| TAU_ITR10 | 4438 | 1999 |
| TAU_ITR11 | 3971 | 2000 |
| TAU_ITR12 | 4029 | 2001 |
| TAU_ITR13 | 4008 | 2002 |
| TAU_ITR14 | 3887 | 2003 |
| TAU_ITR15 | 3866 | 2004 |
| TAU_ITR16 | 3932 | 2005 |
| TAU_ITR114 | 3866 | 2164 |
| TAU_ITR115 | 3938 | 2165 |
| TAU_ITR116 | 4426 | 2166 |
| TAU_ITR117 | 3996 | 2167 |
| TAU_ITR118 | 3854 | 2168 |
| TAU_ITR119 | 3950 | 2161 |
| TAU_ITR120 | 4438 | 2162 |
| TAU_ITR121 | 3455 | 2171 |
| TAU_ITR122 | 3498 | 2172 |
| TAU_ITR123 | 3282 | 2173 |
| TAU_ITR124 | 3300 | 2174 |
| TAU_ITR125 | 3943 | 2175 |
| TAU_ITR126 | 3988 | 2176 |
| TAU_ITR127 | 3772 | 2177 |
| TAU_ITR128 | 3790 | 2178 |
| TAU_ITR129 | 3324 | 2179 |
| TAU_ITR130 | 3814 | 2180 |
| TAU_ITR131 | 2567 | 2181 |
| TAU_ITR132 | 2582 | 2182 |
| TAU_ITR133 | 2597 | 2183 |
| TAU_ITR134 | 2612 | 2184 |
| TAU_ITR135 | 2627 | 2185 |
| TAU_ITR136 | 2642 | 2186 |
| TAU_ITR137 | 3055 | 2187 |
| TAU_ITR138 | 3070 | 2188 |
| TAU_ITR139 | 3085 | 2189 |
| TAU_ITR140 | 3100 | 2190 |
| TAU_ITR141 | 3115 | 2191 |
| TAU_ITR142 | 3130 | 2192 |
| TAU_ITR143 | 3160 | 2193 |
| TAU_ITR144 | 2569 | 2194 |
| TAU_ITR145 | 2584 | 2195 |
| TAU_ITR146 | 2599 | 2196 |
| TAU_ITR147 | 2614 | 2197 |
| TAU_ITR148 | 2627 | 2198 |
| TAU_ITR149 | 2642 | 2199 |
| TAU_ITR150 | 3055 | 2200 |
| TAU_ITR151 | 3070 | 2201 |
| TAU_ITR152 | 3084 | 2202 |
| TAU_ITR153 | 3100 | 2203 |
| TAU_ITR154 | 3115 | 2204 |
| TAU_ITR155 | 3130 | 2205 |
| TAU_ITR156 | 3097 | 2206 |
| TAU_ITR157 | 3082 | 2207 |
| TAU_ITR158 | 3097 | 2208 |
| TAU_ITR159 | 3112 | 2209 |
| TAU_ITR201 | 2655 | 2273 |
| TAU_ITR202 | 2685 | 2274 |
| TAU_ITR203 | 2730 | 2275 |
| TAU_ITR204 | 2625 | 2276 |
| TAU_ITR205 | 2655 | 2277 |
| TAU_ITR206 | 2685 | 2278 |
| TAU_ITR207 | 3416 | 2279 |
| TAU_ITR208 | 3218 | 2280 |
| TAU_ITR209 | 3242 | 2281 |
| TAU_ITR210 | 2483 | 2282 |
| TAU_ITR211 | 2513 | 2283 |
| TAU_ITR212 | 2543 | 2284 |
| TAU_ITR213 | 2588 | 2285 |
| TAU_ITR214 | 2483 | 2286 |
| TAU_ITR215 | 2513 | 2287 |
| TAU_ITR216 | 2543 | 2288 |
| TAU_ITR217 | 3967 | 2289 |
| TAU_ITR218 | 3769 | 2290 |
| TAU_ITR219 | 3792 | 2291 |
| TAU_ITR220 | 3751 | 2292 |
| TAU_ITR221 | 3058 | 2293 |
| TAU_ITR222 | 3088 | 2294 |
| TAU_ITR223 | 3118 | 2295 |
| TAU_ITR224 | 3163 | 2296 |
| TAU_ITR225 | 3537 | 2297 |
| TAU_ITR226 | 3339 | 2298 |
| TAU_ITR227 | 3362 | 2299 |
| TAU_ITR228 | 3321 | 2300 |
| TAU_ITR229 | 2628 | 2301 |
| TAU_ITR230 | 2658 | 2302 |
| TAU_ITR231 | 2688 | 2303 |
| TAU_ITR232 | 2733 | 2304 |
| TAU_ITR233 | 3395 | 2305 |
| TAU_ITR234 | 3197 | 2306 |
| TAU_ITR235 | 3220 | 2307 |
| TAU_ITR236 | 3179 | 2308 |
| TAU_ITR237 | 2486 | 2309 |
| TAU_ITR238 | 2516 | 2310 |
| TAU_ITR239 | 2546 | 2311 |
| TAU_ITR240 | 2591 | 2312 |

TABLE 5A
ITR to ITR Sequences of AAV particles comprising
anti-tau antibody polynucleotide sequences

| ITR to ITR | Sequence | ITR to ITR |
|---|---|---|
| Construct Name | Length (nt) | SEQ ID NO |
| TAU_ITR36 | 4253 | 2025 |
| TAU_ITR37 | 4716 | 2026 |
| TAU_ITR38 | 4716 | 2027 |
| TAU_ITR39 | 4698 | 2028 |
| TAU_ITR40 | 4689 | 2029 |
| TAU_ITR41 | 4716 | 2030 |
| TAU_ITR42 | 4716 | 2031 |
| TAU_ITR43 | 4698 | 2032 |
| TAU_ITR44 | 4689 | 2033 |
| TAU_ITR45 | 4253 | 2034 |
| TAU_ITR46 | 2350 | 2035 |
| TAU_ITR47 | 2370 | 2036 |
| TAU_ITR48 | 2282 | 2037 |
| TAU_ITR49 | 2314 | 2038 |
| TAU_ITR50 | 2350 | 2039 |
| TAU_ITR51 | 2370 | 2040 |
| TAU_ITR52 | 2624 | 2041 |
| TAU_ITR53 | 3778 | 2042 |
| TAU_ITR54 | 2029 | 2043 |
| TAU_ITR55 | 2218 | 2044 |
| TAU_ITR56 | 3778 | 2045 |
| TAU_ITR57 | 2624 | 2046 |
| TAU_ITR58 | 2350 | 2047 |
| TAU_ITR59 | 2029 | 2048 |
| TAU_ITR60 | 2218 | 2049 |
| TAU_ITR61 | 4188 | 2050 |
| TAU_ITR62 | 3435 | 2051 |
| TAU_ITR63 | 4395 | 2052 |
| TAU_ITR64 | 3510 | 2053 |
| TAU_ITR65 | 4131 | 2054 |
| TAU_ITR66 | 3378 | 2055 |
| TAU_ITR67 | 4395 | 2056 |
| TAU_ITR68 | 3510 | 2057 |
| TAU_ITR69 | 4016 | 2058 |
| TAU_ITR70 | 4016 | 2059 |
| TAU_ITR71 | 3608 | 2060 |
| TAU_ITR241 | 3900 | 2313 |
| TAU_ITR242 | 4042 | 2314 |
| TAU_ITR243 | 3984 | 2315 |
| TAU_ITR244 | 4472 | 2316 |
| TAU_ITR245 | 2549 | 2317 |
| TAU_ITR246 | 2445 | 2318 |
| TAU_ITR247 | 2350 | 2319 |
| TAU_ITR248 | 4698 | 2320 |
| TAU_ITR249 | 4223 | 2321 |

TABLE 5B
ITR to ITR Sequences of AAV particles comprising
anti-tau antibody polynucleotide sequences

| ITR to ITR | Sequence | ITR to ITR |
|---|---|---|
| Construct Name | Length (nt) | SEQ ID NO |
| TAU_ITR250 | 4010 | 4547 |
| TAU_ITR251 | 3812 | 4548 |
| TAU_ITR252 | 3109 | 4549 |
| TAU_ITR253 | 3115 | 4550 |
| TAU_ITR254 | 3522 | 4551 |
| TAU_ITR255 | 3324 | 4552 |
| TAU_ITR256 | 2627 | 4553 |
| TAU_ITR257 | 2621 | 4554 |
| TAU_ITR258 | 3580 | 4555 |
| TAU_ITR259 | 3382 | 4556 |
| TAU_ITR260 | 2685 | 4557 |
| TAU_ITR261 | 2705 | 4558 |
| TAU_ITR262 | 3438 | 4559 |
| TAU_ITR263 | 3240 | 4560 |
| TAU_ITR264 | 2543 | 4561 |
| TAU_ITR265 | 2537 | 4562 |

TABLE 6
ITR to ITR Sequences of AAV particles comprising
anti-tau antibody polynucleotide sequences

| ITR to ITR | Sequence | ITR to ITR |
|---|---|---|
| Construct Name | Length (nt) | SEQ ID NO |
| TAU_ITR72 | 3619 | 2061 |
| TAU_ITR73 | 3610 | 2062 |
| TAU_ITR74 | 3607 | 2063 |
| TAU_ITR75 | 4158 | 2064 |
| TAU_ITR76 | 3598 | 2065 |
| TAU_ITR77 | 3622 | 2066 |
| TAU_ITR78 | 3619 | 2067 |
| TAU_ITR79 | 3607 | 2068 |
| TAU_ITR80 | 4158 | 2069 |
| TAU_ITR81 | 3607 | 2070 |
| TAU_ITR82 | 3598 | 2071 |
| TAU_ITR83 | 3610 | 2072 |
| TAU_ITR84 | 3610 | 2073 |
| TAU_ITR85 | 3622 | 2074 |
| TAU_ITR86 | 3610 | 2075 |

[0437] In some embodiments, the AAV particle comprises a viral genome which comprises a sequence which has a percent identity to any of SEQ ID NOs: 1990-2075, 2137-2168, 2171-2237, 2260-2321, and 4547-4562. The viral genome may have 1%, 2%, 3%, 4%, 5%, 6%, 7%, 8%, 9%, 10%, 15%, 20%, 25%, 30%, 35%, 40%, 45%, 50%, 55%, 60%, 65%, 70%, 75%, 80%, 85%, 90%, 95%, 99% or 100% identity to any of SEQ ID NOs: 1990-2075, 2137-2168, 2171-2237, 2260-2321, and 4547-4562. The viral genome may have 1-10%, 10-20%, 30-40%, 50-60%, 50-70%, 50-80%, 50-90%, 50-99%, 50-100%, 60-70%, 60-80%, 60-90%, 60-99%, 60-100%, 70-80%, 70-90%, 70-99%, 70-100%, 80-85%, 80-90%, 80-95%, 80-99%, 80-100%, 90-95%, 90-99%, or 90-100% to any of SEQ ID NOs: 1990-2075, 2137-2168, 2171-2237, 2260-2321, and 4547-4562. As a non-limiting example, the viral genome comprises a sequence which has 80% identity to any of SEQ ID NO: 1990-2075, 2137-2168, 2171-2237, 2260-2321, and 4547-4562. As another non-limiting example, the viral genome comprises a sequence which has 85% identity to any of SEQ ID NO: 1990-2075, 2137-2168, 2171-2237, 2260-2321, and 4547-4562. As another non-limiting example, the viral genome comprises a sequence which has 90% identity to any of SEQ ID NO: 1990-2075, 2137-2168, 2171-2237, 2260-2321, and 4547-4562. As another non-limiting example, the viral genome comprises a sequence which has 95% identity to any of SEQ ID NO: 1990-2075, 2137-2168, 2171-2237, 2260-2321, and 4547-4562. As another non-limiting example, the viral genome comprises a sequence which has 99% identity to any of SEQ ID NO: 1990-2075, 2137-2168, 2171-2237, 2260-2321, and 4547-4562.

[0438] In some embodiments, the AAV particles comprising anti-tau antibody polynucleotide sequences which comprise a nucleic acid sequence encoding at least one antibody heavy and/or light chain may be introduced into mammalian cells.

[0439] The AAV viral genomes encoding anti-tau antibody polynucleotides described herein may be useful in the fields of human disease, viruses, infections veterinary applications and a variety of in vivo and in vitro settings. In some embodiments, the AAV viral genomes encoding anti-tau antibody polynucleotides are used for the prevention and/or treatment of a tauopathy.

[0440] The viral genome of the AAV particles of the present disclosure may comprise any combination of the sequence regions described in Tables 7-14 encapsulated in any of the capsids listed in Table 1 or described herein.

[0441] In some embodiments, the AAV particle viral genome may comprise at least one sequence region as described herein, such as the elements in Tables 7-14, including ITR sequences, promoters, introns and exons, UTR regions, miR binding sites, tags, fillers, polyA sequence. The regions may be located before or after any of the other sequence regions described herein. Viral genomes may further comprise more than one copy of one or more sequence regions as described in Tables 7-14.

[0442] Additional sequence regions of the AAV viral genomes within the payload region, such as the signal sequence regions for the encoded polypeptide payload (e.g., antibody payload, such as anti-tau antibody payload), and any linkers (such as linkers between the antibody VH and VL coding sequences, are described below.

### Viral Genome (Payload) Component: Signal Sequence Region

[0443] In some embodiments, the nucleic acid sequence comprising the transgene encoding the payload, e.g., an antibody (such as an anti-tau antibody), comprises a nucleic acid sequence encoding a signal sequence (e.g., a signal sequence region herein). In some embodiments, the nucleic acid sequence comprising the transgene encoding the payload comprises two signal sequence regions. In some embodiments, the nucleic acid sequence comprising the transgene encoding the payload comprises three or more signal sequence regions. In certain embodiments, the signal sequence region is not derived from an antibody. In another embodiment, the signal sequence region is derived from an antibody sequence.

[0444] In some embodiments, the nucleic acid sequence encoding the signal sequence is located 5′ relative to the nucleic acid sequence encoding the VH and/or the heavy chain. In some embodiments, the nucleotide sequence encoding the signal sequence is located 5′ relative to the nucleic acid sequence encoding the VL and/or the light chain. In some embodiments, the encoded VH, VL, heavy chain, and/or light chain of the encoded antibody (e.g., full length, or antigen binding fragment thereof such as Fab, F(ab′)₂, scFv, etc) comprises a signal sequence at the N-terminus, wherein the signal sequence is optionally cleaved during cellular processing and/or localization of the antibody molecule.

[0445] In some embodiments, the signal sequence comprises any one of the signal sequences provided in Table 11 or a functional variant thereof. In some embodiments, the encoded signal sequence comprises an amino acid sequence encoded by any one of the nucleotide sequences provided in Table 11, or an amino acid sequence with at least 70%, 75%, 80%, 85%, 90%, 95%, or 99% sequence identity thereto. In some embodiments, the nucleic acid sequence encoding the signal sequence comprises any one of the nucleotide sequences provided in Table 11, or a nucleotide sequence with at least 70%, 75%, 80%, 85%, 90%, 95%, or 99% sequence identity thereto.

TABLE 11
Signal Sequence Regions

| Sequence | | |
|---|---|---|
| Region Name | Sequence Length | SEQ ID NO |
| Signal1 | 84 | 2106 |
| Signal2 | 93 | 2107 |
| Signal3 | 96 | 2108 |
| Signal4 | 66 | 2109 |
| Signal5 | 72 | 2110 |
| Signal6 | 93 | 2111 |
| Signal7 | 69 | 2112 |
| Signal8 | 81 | 2113 |
| Signal9 | 12 | 2114 |
| Signal10 | 81 | 2115 |
| Signal11 | 66 | 2116 |
| Signal12 | 78 | 2117 |
| Signal13 | 57 | 1740 |
| Signal14 | 57 | 1741 |
| Signal15 | 57 | 1861 |
| Signal16 | 411 | 2241 |
| Signal17 | 60 | 4564 |
| Signal18 | 57 | 1862 |

[0446] In some embodiments, the nucleic acid sequence encoding the signal sequence comprises the nucleotide sequence of SEQ ID NO: 4564, or nucleotide sequence with at least 70%, 75%, 80%, 85%, 90%, 95%, or 99% sequence identity thereto. In some embodiments, the nucleic acid sequence encoding the signal sequence comprises the nucleotide sequence of SEQ ID NO: 1862, or nucleotide sequence with at least 70%, 75%, 80%, 85%, 90%, 95%, or 99% sequence identity thereto. In some embodiments, the nucleotide sequence encoding the signal sequence comprises the nucleotide sequence of SEQ ID NO: 1741, or nucleotide sequence with at least 70%, 75%, 80%, 85%, 90%, 95%, or 99% sequence identity thereto. In some embodiments, the nucleic acid sequence encoding the signal sequence comprises the nucleotide sequence of SEQ ID NO: 1741 and is located 5′ relative to the nucleic acid sequence encoding the VH (including the N-terminal VH in scFv) and/or the heavy chain of the antibody molecule. In some embodiments, the nucleic acid sequence encoding the signal sequence comprises the nucleotide sequence of SEQ ID NO: 4564 or 1862, and is located 5′ relative to the nucleic acid sequence encoding the VL (including the N-terminal VL in scFv) and/or the light chain of the antibody molecule.

[0447] The signal sequence region(s) may, independently, have a length such as, but not limited to 45, 46, 47, 48, 49, 50, 51, 52, 53, 54, 55, 56, 57, 58, 59, 60, 61, 62, 63, 64, 65, 66, 67, 68, 69, 70, 71, 72, 73, 74, or 75 nucleotides. The length of the signal region in the viral genome may be 45-75, or 60-66 nucleotides. As a non-limiting example, the viral genome comprises a signal sequence region that is about 45 nucleotides in length, 57 nucleotides in length, 66 nucleotides in length, about 69 nucleotides in length, about 72 nucleotides in length, about 78 nucleotides in length, about 81 nucleotides in length, about 84 nucleotides in length, about 93 nucleotides in length, about 96 nucleotides in length.

[0448] In some embodiments, the AAV particle viral genome comprises one signal sequence region. In some embodiments, the AAV particle viral genome comprises two signal sequence regions. In some embodiments, the AAV particle viral genome comprises three signal sequence regions. In some embodiments, the AAV particle viral genome comprises more than three signal sequence regions. In some embodiments, the signal sequences of a viral genome comprising more than one signal sequence, are the same. In another embodiment, the signal sequences of a viral genome comprising more than one signal sequence, are not the same.

[0449] In some embodiments, the AAV particle viral genome comprises one signal sequence region. In some embodiments, the signal sequence region is the Signal14 sequence region. In some embodiments, the signal sequence region is the Signal17 sequence region. In some embodiments, the signal sequence region is the Signal18 sequence region.

[0450] In some embodiments, the AAV particle viral genome comprises two signal sequence regions. In some embodiments, the signal sequence regions are Signal14 sequence region and Signal17 sequence region.

[0451] In some embodiments, the signal sequence is derived from an antibody sequence. As a non-limiting example, a signal sequence may be derived from the heavy chain or the light chain of an anti-tau antibody, such as, but not limited to, IPN002, PHF1 and/or MC1. While not wishing to be bound by theory, the first approximately 57-60 nucleotides of an antibody heavy chain or light chain sequence may be considered a signal sequence. Non-limiting examples of antibody derived signal sequences include Ab1 (SEQ ID NO: 1740), Ab2 (SEQ ID NO: 1741), Ab122-124 (SEQ ID NO: 1861-1863), and Ab256 (SEQ ID NO: 4564) herein.

### Viral Genome (Payload) Component: Linkers

[0452] In certain embodiments, the viral genome includes one or more spacer or linker regions to separate different coding regions, and/or coding and non-coding regions.

[0453] In some embodiments, the nucleic acid encoding the payload, e.g., antibody, comprises a nucleic acid sequence encoding a linker. In some embodiments, the nucleic acid encoding the payload encodes two or more linkers. In some embodiments, the encoded linker comprises a linker provided in Table 2. In some embodiments, the encoded linker comprises an amino acid sequence encoded by any one of the nucleotide sequences provided in Table 2, or an amino acid sequence with at least 70%, 75%, 80%, 85%, 90%, 95%, or 99% sequence identity thereto. In some embodiments, the nucleic acid sequence encoding the linker comprises any one of the nucleotide sequences provided in Table 2, or a nucleotide sequence with at least 70%, 75%, 80%, 85%, 90%, 95%, or 99% sequence identity thereto.

[0454] In some embodiments, the linker may be a peptide linker that connects the polypeptides encoded by the payload region (e.g., light and heavy antibody chains or VH and VL during expression). Some peptide linkers may be cleaved after expression to separate heavy and light chain domains, allowing assembly of mature antibodies or antibody fragments. Linker cleavage may be enzymatic. In some cases, linkers comprise an enzymatic cleavage site to facilitate intracellular or extracellular cleavage. Some payload regions encode linkers that interrupt polypeptide synthesis during translation of the linker sequence from an mRNA transcript. Such linkers may facilitate the translation of separate protein domains (e.g., heavy and light chain antibody domains) from a single transcript. In some cases, two or more linkers are encoded by a payload region of the viral genome. Non-limiting examples of linkers that may be encoded by the payload region of an AAV particle viral genome are given in Table 2.

TABLE 2
Linkers

| | | | SEQ |
|---|---|---|---|
| Linker ID | Description | Length | ID NO |
| Linker1 | Furin | 12 | 1724 |
| Linker2 | Furin | 12 | 1725 |
| Linker3 | T2A | 54 | 1726 |
| Linker4 | F2A | 75 | 1727 |
| Linker5 | P2A | 66 | 1728 |
| Linker6 | SG4S (SEQ ID NO: 4536) | 18 | 1729 |
| Linker7 | (G4S)3 (SEQ ID NO: 4537) | 45 | 1730 |
| Linker8 | (G4S)5 (SEQ ID NO: 4538) | 75 | 1731 |
| Linker9 | IRES | 609 | 1732 |
| Linker10 | IRES-2 | 623 | 1733 |
| Linker11 | hIgG2 hinge | 54 | 1734 |
| Linker12 | hIgG3 hinge | 108 | 1735 |
| Linker13 | hIgG3-2 hinge | 153 | 1736 |
| Linker14 | hIgG3-3 hinge | 198 | 1737 |
| Linker15 | msiGG-1 hinge | 45 | 1738 |
| Linker16 | msiGG1 hinge | 18 | 1739 |
| Linker17 | HigG3 hinge | 198 | 2244 |
| Linker18 | G4S (SEQ ID NO: 4535) | 15 | 2245 |
| Linker19 | (G4S)2 (SEQ ID NO: 4539) | 30 | 2246 |
| Linker20 | (G4S)3 (SEQ ID NO: 4537) | 45 | 2247 |
| Linker21 | (G4S)4 (SEQ ID NO: 4540) | 60 | 2248 |
| Linker22 | (G4S)5 (SEQ ID NO: 4538) | 75 | 2249 |
| Linker23 | (G4S)5 (SEQ ID NO: 4538) | 75 | 2250 |
| Linker24 | (G4S)6 (SEQ ID NO: 4541) | 90 | 2251 |
| Linker25 | (G4S)8 (SEQ ID NO: 4542) | 120 | 2252 |
| Linker26 | (G4S)8 (SEQ ID NO: 4542) | 120 | 2253 |
| Linker27 | (G4S)4 (SEQ ID NO: 4540) | 60 | 2254 |
| Linker28 | (G4S)6 (SEQ ID NO: 4541) | 90 | 2259 |

[0455] In some embodiments, any of the antibodies described herein can have a linker, e.g., a flexible polypeptide linker, of varying lengths, connecting the variable domains (e.g., the VH and the VL) of the antigen binding domain of the antibody molecule. For example, a (Gly4-Ser)n linker, wherein n is 0, 1, 2, 3, 4, 5, 6, 7, or 8 can be used (e.g., any one of SEQ ID NOs: 1730-1731, 2245-2254, or 2259). In some embodiments, the antibody binds to tau (e.g., N-terminal, mid-region, repeat region, or C-terminal region of tau), such as phosphorylated tau.

[0456] In some embodiments, the encoded linker comprises an enzymatic cleavage site, e.g., for intracellular and/or extracellular cleavage. In some embodiments, the linker is cleaved to separate the VH and the VL of the antigen binding domain and/or the heavy chain and light chain of the encoded antibodies (e.g., an anti-tau antibody molecule). In some embodiments, the encoded linker comprises a furin linker or a functional variant. In some embodiments, the nucleotide sequence encoding the furin linker comprises the nucleotide sequence of SEQ ID NO: 1724, or a nucleotide sequence with at least 70%, 75%, 80%, 85%, 90%, 95%, or 99% sequence identity thereto. In some embodiments, furin cleaves proteins downstream of a basic amino acid target sequence (e.g., Arg-X-(Arg/Lys)-Arg) (e.g., as described in Thomas, G., 2002. Nature Reviews Molecular Cell Biology 3(10): 753-66; the contents of which are herein incorporated by reference in its entirety). In some embodiments, the encoded linker comprises a 2A self-cleaving peptide (e.g., a 2A peptide derived from foot-and-mouth disease virus (F2A), porcine teschovirus-1 (P2A), Thoseaasigna virus (T2A), or equine rhinitis A virus (E2A)). In some embodiments, the encoded linker comprises a T2A self-cleaving peptide linker. In some embodiments, the nucleotide sequence encoding the T2A linker comprises the nucleotide sequence of SEQ ID NO: 1726, or a nucleotide sequence with at least 70%, 75%, 80%, 85%, 90%, 95%, or 99% sequence identity thereto. In some embodiments, the nucleic acid encoding the payload encodes a furin linker (such as SEQ ID NO: 1724) and a T2A linker (such as SEQ ID NO: 1726).

[0457] In certain embodiments, the nucleic acid encoding the payload encodes a furin linker (such as SEQ ID NO: 1724) or a nucleotide sequence with at least 70%, 75%, 80%, 85%, 90%, 95%, or 99% sequence identity thereto; followed by a T2A linker (such as SEQ ID NO: 1726) or a nucleotide sequence with at least 70%, 75%, 80%, 85%, 90%, 95%, or 99% sequence identity thereto. In certain embodiments, the nucleic acid encoding the payload further comprises a msiGG1 hinge sequence (such as SEQ ID NO: 1739) or a nucleotide sequence with at least 70%, 75%, 80%, 85%, 90%, 95%, or 99% sequence identity thereto, followed by a HigG3 hinge sequence (such as SEQ ID NO: 2244) or a nucleotide sequence with at least 70%, 75%, 80%, 85%, 90%, 95%, or 99% sequence identity thereto, both of which are 5′ to the polynucleotide encoding the furin cleavage site and T2A sequence.

[0458] In some embodiments, the encoded linkers comprises a cathepsin, a matrix metalloproteinases or a legumain cleavage sites, such as those described e.g. by Cizeau and Macdonald in International Publication No. WO2008052322, the contents of which are herein incorporated in their entirety.

[0459] In some embodiments, the encoded linker comprises an internal ribosomal entry site (IRES) is a nucleotide sequence (>500 nucleotides) for initiation of translation in the middle of a nucleotide sequence, e.g., an mRNA sequence (Kim et al., 2011. PLoS One 6(4): e18556; the contents of which are herein incorporated by reference in its entirety), which can be used, for example, to modulate expression of one or more transgenes. In some embodiments, the encode linker comprises a small and unbranched serine-rich peptide linker, such as those described by Huston et al. in U.S. Pat. No. 5,525,491, the contents of which are herein incorporated in their entirety. In some embodiments, polypeptides comprising a serine-rich linker has increased solubility. In some embodiments, the encoded linker comprises an artificial linker, such as those described by Whitlow and Filpula in U.S. Pat. No. 5,856,456 and Ladner et al. in U.S. Pat. No. 4,946,778, the contents of each of which are herein incorporated by their entirety.

[0460] In some embodiments, payload regions may encode linkers that are not cleaved. Such linkers may include a simple amino acid sequence, such as a glycine rich sequence. In some cases, linkers may comprise flexible peptide linkers comprising glycine and serine residues. The linker may comprise flexible peptide linkers of different lengths, e.g. nxG4S, where n=1-10 (SEQ ID NO: 4544), and the length of the encoded linker varies between 5 and 50 amino acids. In a non-limiting example, the linker may be 5xG4S (SEQ ID NO: 4544). These flexible linkers are small and without side chains so they tend not to influence secondary protein structure while providing a flexible linker between antibody segments (George et al., 2002. Protein Engineering 15(11): 871-9; Huston et al., 1988. PNAS 85:5879-83; and Shan et al., 1999. Journal of Immunology. 162(11):6589-95; the contents of each of which are herein incorporated by reference in their entirety). Furthermore, the polarity of the serine residues improves solubility and prevents aggregation problems. In some embodiments, the payload region encodes at least one G4S3 linker (“G4S3” disclosed as SEQ ID NO: 4537). In some embodiments, the payload region encodes at least one G4S linker (“G4S” disclosed as SEQ ID NO: 4535). In some embodiments, the payload region encodes at least one G4S5 linker (“G455” disclosed as SEQ ID NO: 4538).

[0461] In some embodiments, payload regions may encode small and unbranched serine-rich peptide linkers, such as those described by Huston et al. in U.S. Pat. No. 5,525,491, the contents of which are herein incorporated in their entirety. Polypeptides encoded by the payload region, linked by serine-rich linkers, have increased solubility.

[0462] In some embodiments, payload regions may encode artificial linkers, such as those described by Whitlow and Filpula in U.S. Pat. No. 5,856,456 and Ladner et al. in U.S. Pat. No. 4,946,778, the contents of each of which are herein incorporated by their entirety.

[0463] In some embodiments, the payload region encodes at least one hinge region. As a non-limiting example, the hinge is an IgG hinge.

[0464] In some embodiments, the nucleic acid sequence encoding the linker comprises about 10 to about 700 nucleotides in length, e.g., about 10 to about 700 nucleotides, e.g. about 10 to about 100, e.g., about 50-200 nucleotides, about 150-300 nucleotides, about 250-400 nucleotides, about 350-500 nucleotides, about 450-600 nucleotides, about 550-700 nucleotides, about 650-700 nucleotides. In some embodiments, the nucleic acid sequence encoding the linker comprises about 5 to about 20 nucleotides in length, e.g., about 12 nucleotides in length. In some embodiments, the nucleic acid sequence encoding the linker comprises about 40 to about 60 nucleotides in length, e.g., about 54 nucleotides in length.

[0465] Any, or all components of a viral genome may be modified or optimized to improve expression or targeting of the payload. Such components include, but are not limited to, intron, signal peptide sequences, antibody heavy chain and/or light chain 5′ to 3′ order, antibody heavy chain and/or light chain codons, linkers, cleavage sites, polyadenylation sequences, stuffer sequences, other regulatory sequences, and/or the backbone of the ITR to ITR sequence.

[0466] This disclosure also provides in some embodiments, nucleic acids, cells, AAV vectors, and AAV particles comprising the above elements.

[0467] Exemplary Viral Genome Sequences

[0468] In some embodiments, the AAV particle viral genome may comprise any of the sequences shown in Tables 15-91 of WO/2020/223276, incorporated herein by reference. Representative tables are replicated below.

TABLE 67
Sequence Regions in ITR to ITR Sequences

| | TAU_ITR243 | | TAU_ITR242 | | TAU_ITR241 | |
|---|---|---|---|---|---|---|
| | (SEQ ID NO: | | (SEQ ID NO: | | (SEQ ID NO: | |
| | 2315) | | 2314) | | 2313) | |
| | Region | | Region | | Region | |
| Sequence | SEQ | Region | SEQ | Region | SEQ | Region |
| Regions | ID NO | length | ID NO | length | ID NO | length |
| 5′ ITR | 2076 | 130 | 2076 | 130 | 2076 | 130 |
| Promoter | 2084 | 654 | 2085 | 699 | 5086 | 557 |
| Intron | 2240 | 566 | 2240 | 566 | 2240 | 566 |
| VH | 1838 | 1377 | 1838 | 1377 | 1838 | 1377 |
| Linker | | 12 | 1724 | 12 | 1724 | 12 |
| Linker | 1726 | 54 | 1726 | 54 | 1726 | 54 |
| VL | 1936 | 720 | 1936 | 720 | 1936 | 720 |
| PolyA | 2122 | 127 | 2122 | 127 | 2122 | 127 |
| 3′ ITR | 2078 | 130 | 2078 | 130 | 2078 | 130 |

[0469] In some embodiments, the AAV particle genome comprises SEQ ID NO: 2315 (TAU_ITR243) which comprises a 5′ inverted terminal repeat (ITR) sequence region and a 3′ ITR sequence region, a CBA promoter, a human beta-globin intron region, a PHF1 antibody heavy chain variable region, a furin cleavage site, a T2A linker, an PHF1 antibody light chain variable region, and a rabbit globin polyadenylation sequence.

[0470] In some embodiments, the AAV particle genome comprises SEQ ID NO: 2314 (TAU_ITR242) which comprises a 5′ inverted terminal repeat (ITR) sequence region and a 3′ ITR sequence region, a GFAP promoter, a human beta-globin intron region, a PHF1 antibody heavy chain variable region, a furin cleavage site, a T2A linker, an PHF1 antibody light chain variable region, and a rabbit globin polyadenylation sequence.

TABLE 82
Sequence Regions in ITR to ITR Sequences

| | TAU_ITR105 | | TAU_ITR113 | | TAU_ITR189 | |
|---|---|---|---|---|---|---|
| | (SEQ ID NO: | | (SEQ ID NO: | | (SEQ ID NO: | |
| | 2155) | | 2163) | | 2261) | |
| | Region | | Region | | Region | |
| Sequence | SEQ | Region | SEQ | Region | SEQ | Region |
| Regions | ID NO | length | ID NO | length | ID NO | length |
| 5′ ITR | 2076 | 130 | 2076 | 130 | 2076 | 130 |
| GFAP | 2085 | 699 | 2085 | 699 | 2085 | 699 |
| Promoter | | | | | | |
| Intron | 2240 | 566 | 2240 | 566 | 2240 | 566 |
| Signal | 1740 | 57 | 1740 | 57 | 1740 | 57 |
| VH | 1859 | 354 | 1859 | 354 | 1859 | 354 |
| Constant | 1742 | 969 | 1742 | 969 | 2243 | 291 |
| Linker | 1725 | 12 | 1724 | 12 | 1724 | 12 |
| Linker | 1727 | 75 | 1726 | 54 | 1726 | 54 |
| Signal | 1980 | 321 | 1980 | 321 | 1980 | 321 |
| VL | 1864 | 321 | 1864 | 321 | 1864 | 321 |
| PolyA | 2122 | 127 | 2122 | 127 | 2122 | 127 |
| 3′ ITR | 2078 | 130 | 2078 | 130 | 2078 | 130 |

[0471] In some embodiments, the AAV particle genome comprises SEQ ID NO: 2155 (TAU_ITR105) which comprises a 5′ inverted terminal repeat (ITR) sequence region and a 3′ ITR sequence region, a GFAP promoter, a human beta-globin intron region, a heavy chain signal, a PT3 antibody heavy chain variable and constant region, a furin cleavage site, a F2A linker, a light chain signal, a PT3 antibody light chain variable and constant region and a rabbit beta globin polyadenylation signal sequence.

[0472] In some embodiments, the AAV particle genome comprises SEQ ID NO: 2163 (TAU_ITR513) which comprises a 5′ inverted terminal repeat (ITR) sequence region and a 3′ ITR sequence region, a GFAP promoter, a human beta-globin intron region, a heavy chain signal, a PT3 antibody heavy chain variable and constant region, a furin cleavage site, a T2A linker, a light chain signal, a PT3 antibody light chain variable and constant region and a rabbit beta globin polyadenylation signal sequence.

TABLE 86
Sequence Regions in ITR to ITR Sequences

| | TAU_ITR106 | | TAU_ITR114 | | TAU_ITR188 | |
|---|---|---|---|---|---|---|
| | (SEQ ID NO: 2156) | | (SEQ ID NO: 2164) | | (SEQ ID NO: 2260) | |
| Sequence | Region SEQ | Region | Region SEQ | Region | Region SEQ | Region |
| Regions | ID NO | length | ID NO | length | ID NO | length |
| 5′ ITR | 2076 | 130 | 2076 | 130 | 2076 | 130 |
| SYN Promoter | 2086 | 557 | 2086 | 557 | 2086 | 557 |
| Intron | 2240 | 566 | 2240 | 566 | 2240 | 566 |
| Signal | 1740 | 57 | 1740 | 57 | 1740 | 57 |
| VH | 1859 | 354 | 1859 | 354 | 1859 | 354 |
| Constant | 1742 | 969 | 1742 | 969 | 2243 | 291 |
| Linker | 1725 | 12 | 1724 | 12 | 1724 | 12 |
| Linker | 1727 | 75 | 1726 | 54 | 1726 | 54 |
| Signal | 1861 | 57 | 1861 | 57 | 1861 | 57 |
| VL | 1980 | 321 | 1980 | 231 | 1980 | 231 |
| Constant | 1864 | 321 | 1864 | 321 | 1864 | 321 |
| PolyA | 2122 | 127 | 2122 | 127 | 2122 | 127 |
| 3′ ITR | 2078 | 130 | 2078 | 130 | 2078 | 130 |

[0473] In some embodiments, the AAV particle genome comprises SEQ ID NO: 2156 (TAU_ITR106) which comprises a 5′ inverted terminal repeat (ITR) sequence region and a 3′ ITR sequence region, a synapsin promoter, a human beta-globin intron region, a heavy chain signal, a PT3 antibody heavy chain variable and constant region, a furin cleavage site, a F2A linker, a light chain signal, a PT3 antibody light chain variable and constant region and a rabbit beta globin polyadenylation signal sequence.

[0474] In some embodiments, the AAV particle genome comprises SEQ ID NO: 2164 (TAU_ITR114) which comprises a 5′ inverted terminal repeat (ITR) sequence region and a 3′ ITR sequence region, a synapsin promoter, a human beta-globin intron region, a heavy chain signal, a PT3 antibody heavy chain variable and constant region, a furin cleavage site, a F2A linker, a light chain signal, a PT3 antibody light chain variable and constant region and a rabbit beta globin polyadenylation signal sequence.

TABLE 90
Sequence Regions in ITR to ITR Sequences

| | TAU_ITR103 | | TAU_ITR111 | | TAU_ITR119 | |
|---|---|---|---|---|---|---|
| | (SEQ ID NO: | | (SEQ ID NO: | | (SEQ ID NO: | |
| | 2153) | | 2161) | | 2161) | |
| | Region | | Region | | Region | |
| Sequence | SEQ | Region | SEQ | Region | SEQ | Region |
| Regions | ID NO | length | ID NO | length | ID NO | length |
| 5′ ITR | 2076 | 130 | 2076 | 130 | 2076 | 130 |
| CMVie | 2239 | 380 | 2239 | 380 | 2239 | 380 |
| CB Promoter | 2083 | 260 | 2083 | 260 | 2083 | 260 |
| Intron | 2240 | 566 | 2240 | 566 | 2240 | 566 |
| Signal | 1740 | 57 | 1740 | 57 | 1740 | 57 |
| VH | 1859 | 354 | 1859 | 354 | 1859 | 354 |
| Constant | 1742 | 969 | 1742 | 969 | 1742 | 969 |
| Linker | 1725 | 12 | 1724 | 12 | 1724 | 12 |
| Linker | 1727 | 75 | 1726 | 54 | 1726 | 54 |
| Signal | 1861 | 57 | 1861 | 57 | 1861 | 57 |
| VL | 1980 | 321 | 1980 | 321 | 1980 | 321 |
| Constant | 1864 | 321 | 1864 | 321 | 1864 | 321 |
| PolyA | 2122 | 127 | 2122 | 127 | 2122 | 127 |
| 3′ ITR | 2078 | 130 | 2078 | 130 | 2078 | 130 |

[0475] In some embodiments, the AAV particle genome comprises SEQ ID NO: 2161 (TAU_ITR111) which comprises a 5′ inverted terminal repeat (ITR) sequence region and a 3′ ITR sequence region, a CMVie region and a CB promoter, a human beta-globin intron region, a heavy chain signal, a PT3 antibody heavy chain variable and constant region, a furin cleavage site, a T2A linker, a light chain signal, a PT3 antibody light chain variable and constant region and a rabbit beta globin polyadenylation signal sequence.

[0476] In some embodiments, the AAV particle viral genome may comprise any of the sequences shown in Tables 92-95.

TABLE 92
Sequence Regions in ITR to ITR Sequences

| | TAU_ITR250 | | TAU_ITR254 | | TAU_ITR258 | | TAU_ITR262 | |
|---|---|---|---|---|---|---|---|---|
| | (SEQ ID NO: | | (SEQ ID NO: | | (SEQ ID NO: | | (SEQ ID NO: | |
| | 4547) | | 4551) | | 4555) | | 4559) | |
| | Region | | Region | | Region | | Region | |
| Sequence | SEQ | Region | SEQ | Region | SEQ | Region | SEQ | Region |
| Regions | ID NO | length | ID NO | length | ID NO | length | ID NO | length |
| 5′ ITR | 2076 | 130 | 2076 | 130 | 2076 | 130 | 2076 | 130 |
| Promoter | 2080 | 1715 | — | — | 2085 | 699 | 2086 | 557 |
| CMVie | 2081 | 299 | 2087 | 382 | — | — | — | — |
| CBA min. | 2082 | 283 | 2083 | 260 | — | — | — | — |
| Exon | — | — | 2090 | 134 | 2090 | 134 | 2090 | 134 |
| Intron | — | — | 2095 | 32 | 2095 | 32 | 2095 | 32 |
| Intron | — | — | 2097 | 347 | 2097 | 347 | 2097 | 347 |
| Exon | — | — | 2093 | 53 | 2093 | 53 | 2093 | 53 |
| BSA | 4563 | 26 | 4563 | 26 | 4563 | 26 | 4563 | 26 |
| Signal | 1741 | 57 | 1741 | 57 | 1741 | 57 | 1741 | 57 |
| VH | 1841 | 717 | 1841 | 717 | 1841 | 717 | 1841 | 717 |
| Linker | 1739 | 18 | 1739 | 18 | 1739 | 18 | 1739 | 18 |
| Linker | 2244 | 198 | 2244 | 198 | 2244 | 198 | 2244 | 198 |
| Linker | 1724 | 12 | 1724 | 12 | 1724 | 12 | 1724 | 12 |
| Linker | 1726 | 54 | 1726 | 54 | 1726 | 54 | 1726 | 54 |
| Signal | 4564 | 60 | 4564 | 60 | 4564 | 60 | 4564 | 60 |
| VL | 4565 | 449 | 4565 | 449 | 4565 | 449 | 4565 | 449 |
| PolyA | 2122 | 127 | 2122 | 127 | 2122 | 127 | 2122 | 127 |
| 3′ ITR | 2078 | 130 | 2078 | 130 | 2078 | 130 | 2078 | 130 |

[0477] In some embodiments, the AAV particle genome comprises SEQ ID NO: 4547 (TAU_ITR250) which comprises a 5′ inverted terminal repeat (ITR) sequence region and a 3′ ITR sequence region, a CAG promoter comprising a CMVie region and a minimal CBA promoter region, a BSA sequence, a PHF1 antibody heavy chain signal sequence, a PHF1 antibody heavy chain variable region, two antibody hinge sequences (herein listed as linker sequences), a furin cleavage site, a T2A linker, a PHF1 antibody light chain signal sequence, a PHF1 antibody light chain variable region and a rabbit globin polyadenylation sequence.

[0478] In some embodiments, the AAV particle genome comprises SEQ ID NO: 4551 (TAU_ITR254) which comprises a 5′ inverted terminal repeat (ITR) sequence region and a 3′ ITR sequence region, a CMVie region, a CB promoter, an ie1 exon 1 region, an ie1 intron 1 region, a human beta-globin intron region, a human beta-globin exon region, a BSA sequence, a PHF1 antibody heavy chain signal sequence, a PHF1 antibody heavy chain variable region, two antibody hinge sequences (herein listed as linker sequences), a furin cleavage site, a T2A linker, a PHF1 antibody light chain signal sequence, a PHF1 antibody light chain variable region and a rabbit globin polyadenylation sequence.

[0479] In some embodiments, the AAV particle genome comprises SEQ ID NO: 4555 (TAU_ITR258) which comprises a 5′ inverted terminal repeat (ITR) sequence region and a 3′ ITR sequence region, a GFAP promoter, an ie1 exon 1 region, an ie1 intron 1 region, a human beta-globin intron region, a human beta-globin exon region, a BSA sequence, a PHF1 antibody heavy chain signal sequence, a PHF1 antibody heavy chain variable region, two antibody hinge sequences (herein listed as linker sequences), a furin cleavage site, a T2A linker, a PHF1 antibody light chain signal sequence, a PHF1 antibody light chain variable region and a rabbit globin polyadenylation sequence.

[0480] In some embodiments, the AAV particle genome comprises SEQ ID NO: 4559 (TAU_ITR262) which comprises a 5′ inverted terminal repeat (ITR) sequence region and a 3′ ITR sequence region, a synapsin promoter, an ie1 exon 1 region, an ie1 intron 1 region, a human beta-globin intron region, a human beta-globin exon region, a BSA sequence, a PHF1 antibody heavy chain signal sequence, a PHF1 antibody heavy chain variable region, two antibody hinge sequences (herein listed as linker sequences), a furin cleavage site, a T2A linker, a PHF1 antibody light chain signal sequence, a PHF1 antibody light chain variable region and a rabbit globin polyadenylation sequence.

TABLE 93
Sequence Regions in ITR to ITR Sequences

| | TAU_ITR251 | | TAU_ITR255 | | TAU_ITR259 | | TAU_ITR263 | |
|---|---|---|---|---|---|---|---|---|
| | (SEQ ID NO: | | (SEQ ID NO: | | (SEQ ID NO: | | (SEQ ID NO: | |
| | 4548) | | 4552) | | 4556) | | 4560) | |
| | Region | | Region | | Region | | Region | |
| Sequence | SEQ | Region | SEQ | Region | SEQ | Region | SEQ | Region |
| Regions | ID NO | length | ID NO | length | ID NO | length | ID NO | length |
| 5′ ITR | 2076 | 130 | 2076 | 130 | 2076 | 130 | 2076 | 130 |
| Promoter | 2080 | 1715 | — | — | 2085 | 699 | 2086 | 557 |
| CMVie | 2081 | 299 | 2087 | 382 | — | — | — | — |
| CBA min. | 2082 | 283 | 2083 | 260 | — | — | — | — |
| Exon | — | — | 2090 | 134 | 2090 | 134 | 2090 | 134 |
| Intron | — | — | 2095 | 32 | 2095 | 32 | 2095 | 32 |
| Intron | — | — | 2097 | 347 | 2097 | 347 | 2097 | 347 |
| Exon | — | — | 2093 | 53 | 2093 | 53 | 2093 | 53 |
| BSA | 4563 | 26 | 4563 | 26 | 4563 | 26 | 4563 | 26 |
| Signal | 1741 | 57 | 1741 | 57 | 1741 | 57 | 1741 | 57 |
| VH | 1841 | 717 | 1841 | 717 | 1841 | 717 | 1841 | 717 |
| Linker | 1724 | 12 | 1724 | 12 | 1724 | 12 | 1724 | 12 |
| Linker | 1726 | 54 | 1726 | 54 | 1726 | 54 | 1726 | 54 |
| Signal | 4564 | 60 | 4564 | 60 | 4564 | 60 | 4564 | 60 |
| VL | 4565 | 449 | 4565 | 449 | 4565 | 449 | 4565 | 449 |
| PolyA | 2122 | 127 | 2122 | 127 | 2122 | 127 | 2122 | 127 |
| 3′ ITR | 2078 | 130 | 2078 | 130 | 2078 | 130 | 2078 | 130 |

[0481] In some embodiments, the AAV particle genome comprises SEQ ID: 4548 (TAU_ITR251) which comprises a 5′ inverted terminal repeat (ITR) sequence region and a 3′ ITR sequence region, a CAG promoter comprising a CMVie region and a minimal CBA promoter region, a BSA sequence, a PHF1 antibody heavy chain signal sequence, a PHF1 antibody heavy chain variable region, a furin cleavage site, a T2A linker, a PHF1 antibody light chain signal sequence, a PHF1 antibody light chain variable region and a rabbit globin polyadenylation sequence.

[0482] In some embodiments, the AAV particle genome comprises SEQ ID NO: 4552 (TAU_ITR255) which comprises a 5′ inverted terminal repeat (ITR) sequence region and a 3′ ITR sequence region, a CMVie region, a CB promoter, an ie1 exon 1 region, an ie1 intron 1 region, a human beta-globin intron region, a human beta-globin exon region, a BSA sequence, a PHF1 antibody heavy chain signal sequence, a PHF1 antibody heavy chain variable region, a furin cleavage site, a T2A linker, a PHF1 antibody light chain signal sequence, a PHF1 antibody light chain variable region and a rabbit globin polyadenylation sequence.

[0483] In some embodiments, the AAV particle genome comprises SEQ ID NO: 4556 (TAU_ITR259) which comprises a 5′ inverted terminal repeat (ITR) sequence region and a 3′ ITR sequence region, a GFAP promoter, an ie1 exon 1 region, an ie1 intron 1 region, a human beta-globin intron region, a human beta-globin exon region, a BSA sequence, a PHF1 antibody heavy chain signal sequence, a PHF1 antibody heavy chain variable region, a furin cleavage site, a T2A linker, a PHF1 antibody light chain signal sequence, a PHF1 antibody light chain variable region and a rabbit globin polyadenylation sequence.

[0484] In some embodiments, the AAV particle genome comprises SEQ ID NO: 4560 (TAU_ITR263) which comprises a 5′ inverted terminal repeat (ITR) sequence region and a 3′ ITR sequence region, a synapsin promoter, an ie1 exon 1 region, an ie1 intron 1 region, a human beta-globin intron region, a human beta-globin exon region, a BSA sequence, a PHF1 antibody heavy chain signal sequence, a PHF1 antibody heavy chain variable region, a furin cleavage site, a T2A linker, a PHF1 antibody light chain signal sequence, a PHF1 antibody light chain variable region and a rabbit globin polyadenylation sequence.

TABLE 94
Sequence Regions in ITR to ITR Sequences

| | TAU_ITR252 (SEQ | | TAU_ITR257 (SEQ | | TAU_ITR261 (SEQ | | TAU_ITR265 (SEQ | |
|---|---|---|---|---|---|---|---|---|
| | ID NO: 4549) | | ID NO: 4554) | | ID NO: 4558) | | ID NO: 4562) | |
| Sequence | Region SEQ | Region | Region SEQ | Region | Region SEQ | Region | Region SEQ | Region |
| Regions | ID NO | length | ID NO | length | ID NO | length | ID NO | length |
| 5′ ITR | 2076 | 130 | 2076 | 130 | 2076 | 130 | 2076 | 130 |
| Promoter | 2080 | 1715 | — | — | 2085 | 699 | 2086 | 557 |
| CMVie | 2081 | 299 | 2087 | 382 | — | — | — | — |
| CBA min. | 2082 | 283 | 2083 | 260 | — | — | — | — |
| Exon | — | — | 2090 | 134 | 2090 | 134 | 2090 | 134 |
| Intron | — | — | 2095 | 32 | 2095 | 32 | 2095 | 32 |
| Intron | — | — | 2097 | 347 | 2097 | 347 | 2097 | 347 |
| Exon | — | — | 2093 | 53 | 2093 | 53 | 2093 | 53 |
| BSA | 4563 | 26 | 4563 | 26 | 4563 | 26 | 4563 | 26 |
| Signal | 1741 | 57 | 1741 | 57 | 1741 | 57 | 1741 | 57 |
| VH | 2170 | 408 | 2170 | 408 | 2170 | 408 | 2170 | 408 |
| Linker | 1730 | 45 | 1730 | 45 | 1730 | 45 | 1730 | 45 |
| VL | 1957 | 339 | 1957 | 339 | 1957 | 339 | 1957 | 339 |
| Tag | 2118 | 27 | 2118 | 27 | 2118 | 27 | 2118 | 27 |
| PolyA | 2122 | 127 | 2122 | 127 | 2122 | 127 | 2122 | 127 |
| 3′ ITR | 2078 | 130 | 2078 | 130 | 2078 | 130 | 2078 | 130 |

[0485] In some embodiments, the AAV particle genome comprises SEQ ID NO: 4549 (TAU_ITR252) which comprises a 5′ inverted terminal repeat (ITR) sequence region and a 3′ ITR sequence region, a CAG promoter comprising a CMVie region and a minimal CBA promoter region, a BSA sequence, a PHF1 antibody heavy chain signal sequence, a PHF1 antibody heavy chain variable region, a G4S3 linker, a PHF1 antibody light chain variable region, an HA tag, and a rabbit globin polyadenylation sequence.

[0486] In some embodiments, the AAV particle genome comprises SEQ ID NO: 4554 (TAU_ITR257) which comprises a 5′ inverted terminal repeat (ITR) sequence region and a 3′ ITR sequence region, a CMVie region, a CB promoter, an ie1 exon 1 region, an ie1 intron 1 region, a human beta-globin intron region, a human beta-globin exon region, a BSA sequence, a PHF1 antibody heavy chain signal sequence, a PHF1 antibody heavy chain variable region, a G4S3 linker, a PHF1 antibody light chain variable region, an HA tag, and a rabbit globin polyadenylation sequence.

[0487] In some embodiments, the AAV particle genome comprises SEQ ID NO: 4558 (TAU_ITR261) which comprises a 5′ inverted terminal repeat (ITR) sequence region and a 3′ ITR sequence region, a GFAP promoter, an Tel exon 1 region, an el intron 1 region, a human beta-globin intron region, a human beta-globin exon region, a BSA sequence, a PHF1 antibody heavy chain signal sequence, a PHF1 antibody heavy chain variable region, a G4S3 linker, a PHF1 antibody light chain variable region, an HA tag, and a rabbit globin polyadenylation sequence.

[0488] In some embodiments, the AAV particle genome comprises SEQ ID NO: 4562 (TAU_ITR265) which comprises a 5′ inverted terminal repeat (ITR) sequence region and a 3′ ITR sequence region, a synapsin promoter, an ie1 exon 1 region, an ie1 intron 1 region, a human beta-globin intron region, a human beta-globin exon region, a BSA sequence, a PHF1 antibody heavy chain signal sequence, a PHF1 antibody heavy chain variable region, a G4S3 linker, a PHF1 antibody light chain variable region, an HA tag, and a rabbit globin polyadenylation sequence.

TABLE 95
Sequence Regions in ITR to ITR Sequences

| | TAU_ITR253 (SEQ | | TAU_ITR256 (SEQ | | TAU_ITR260 (SEQ | | TAU_ITR264 (SEQ | |
|---|---|---|---|---|---|---|---|---|
| | ID NO: 4550) | | ID NO: 4553) | | ID NO: 4557) | | ID NO: 4561) | |
| Sequence | Region SEQ | Region | Region SEQ | Region | Region SEQ | Region | Region SEQ | Region |
| Regions | ID NO | length | ID NO | length | ID NO | length | ID NO | length |
| 5′ ITR | 2076 | 130 | 2076 | 130 | 2076 | 130 | 2076 | 130 |
| Promoter | 2080 | 1715 | — | — | 2085 | 699 | 2086 | 557 |
| CMVie | 2081 | 299 | 2087 | 382 | — | — | — | — |
| CBA min. | 2082 | 283 | 2083 | 260 | — | — | — | — |
| Exon | — | — | 2090 | 134 | 2090 | 134 | 2090 | 134 |
| Intron | — | — | 2095 | 32 | 2095 | 32 | 2095 | 32 |
| Intron | — | — | 2097 | 347 | 2097 | 347 | 2097 | 347 |
| Exon | — | — | 2093 | 53 | 2093 | 53 | 2093 | 53 |
| BSA | 4563 | 26 | 4563 | 26 | 4563 | 26 | 4563 | 26 |
| Signal | 1862 | 57 | 1862 | 57 | 1862 | 57 | 1862 | 57 |
| VL | 1957 | 339 | 1957 | 339 | 1957 | 339 | 1957 | 339 |
| Linker | 1730 | 45 | 1730 | 45 | 1730 | 45 | 1730 | 45 |
| VH | 1839 | 351 | 1839 | 351 | 1839 | 351 | 1839 | 351 |
| Tag | 2118 | 27 | 2118 | 27 | 2118 | 27 | 2118 | 27 |
| PolyA | 2122 | 127 | 2122 | 127 | 2122 | 127 | 2122 | 127 |
| 3′ ITR | 2078 | 130 | 2078 | 130 | 2078 | 130 | 2078 | 130 |

[0489] In some embodiments, the AAV particle genome comprises SEQ ID NO: 4550 (TAU_ITR253) which comprises a 5′ inverted terminal repeat (ITR) sequence region and a 3′ ITR sequence region, a CAG promoter comprising a CMVie region and a minimal CBA promoter region, a BSA sequence, a PHF1 antibody signal sequence, a PHF1 antibody light chain variable region, a G4S3 linker, a PHF1 antibody heavy chain variable region, an HA tag, and a rabbit globin polyadenylation sequence.

[0490] In some embodiments, the AAV particle genome comprises SEQ ID NO: 4553 (TAU_ITR256) which comprises a 5′ inverted terminal repeat (ITR) sequence region and a 3′ ITR sequence region, a CMVie region, a CB promoter, an ie1 exon 1 region, an ie1 intron 1 region, a human beta-globin intron region, a human beta-globin exon region, a BSA sequence, a PHF1 antibody signal sequence, a PHF1 antibody light chain variable region, a G4S3 linker, a PHF1 antibody heavy chain variable region, an HA tag, and a rabbit globin polyadenylation sequence.

[0491] In some embodiments, the AAV particle genome comprises SEQ ID NO: 4557 (TAU_ITR260) which comprises a 5′ inverted terminal repeat (ITR) sequence region and a 3′ ITR sequence region, a GFAP promoter, an ie1 exon 1 region, an ie1 intron 1 region, a human beta-globin intron region, a human beta-globin exon region, a BSA sequence, a PHF1 antibody signal sequence, a PHF1 antibody light chain variable region, a G4S3 linker, a PHF1 antibody heavy chain variable region, an HA tag, and a rabbit globin polyadenylation sequence.

[0492] In some embodiments, the AAV particle genome comprises SEQ ID NO: 4561 (TAU_ITR264) which comprises a 5′ inverted terminal repeat (ITR) sequence region and a 3′ ITR sequence region, a synapsin promoter, an ie1 exon 1 region, an ie1 intron 1 region, a human beta-globin intron region, a human beta-globin exon region, a BSA sequence, a PHF1 antibody signal sequence, a PHF1 antibody light chain variable region, a G4S3 linker, a PHF1 antibody heavy chain variable region, an HA tag, and a rabbit globin polyadenylation sequence.

[0493] In some embodiments, the viral genome may comprise any combination of the following components, including, but not limited to, a 5′ ITR, a promoter region (may comprise one or more component pieces), an intronic region, a Kozak sequence, one or more signal sequences (antibody signal sequences or signal sequence derived from another protein), one or more furin cleavage sites, one or more linker sequences, one or more antibody light chain variable regions, one or more antibody light chain constant regions, one or more antibody heavy chain variable regions, one or more antibody heavy chain constant regions, a polyadenylation sequence, a stuffer sequence, and/or a filler sequence.

[0494] In some embodiments, the AAV viral genome comprises, when read in the 5′ to 3′ direction, a 5′ ITR, a promoter region, an optional intronic region, a signal sequence, an antibody light chain region, a linker region, a signal sequence, an antibody heavy chain region, a polyadenylation sequence, an optional filler sequence, and a 3′ ITR.

[0495] The viral genome may encode an antibody fragment, such as, but not limited to Fab, F(ab′)₂ or scFv fragments. In some embodiments, the viral genome encodes a Fab antibody fragment. In another embodiment, the viral genome encodes an F(ab′)₂ antibody fragment. In some embodiments, the viral genome encodes an scFv (either VH-linker-VL or VL-linker-VH).

[0496] In some embodiments, the viral genome comprising the ITR to ITR sequence, or a fragment thereof, described in Tables 4-6 and 15-91 of WO/2020/223276 (incorporated herein by reference), and Tables 92-95 herein, is packaged in a capsid having a serotype selected from Table 1 to generate an AAV particle. For example, each and every of the ITR to ITR sequences in Tables 4-6 and 15-91 of WO/2020/223276 (incorporated herein by reference), and in Tables 92-95 herein, is explicitly contemplated to be used with each and every one of the capsids in Table 1, such as the capsid serotype selected form VOY101, VOY201, AAVPHP.B (PHP.B), AAVPHP.A (PHP.A), AAVG2B-26, AAVG2B-13, AAVTH1.1-32, AAVTH1.1-35, AAVPHP.B2 (PHP.B2), AAVPHP.B3 (PHP.B3), AAVPHP.N/PHP.B-DGT, AAVPHP.B-EST, AAVPHP.B-GGT, AAVPHP.B-ATP, AAVPHP.B-ATT-T, AAVPHP.B-DGT-T, AAVPHP.B-GGT-T, AAVPHP.B-SGS, AAVPHP.B-AQP, AAVPHP.B-QQP, AAVPHP.B-SNP(3), AAVPHP.B-SNP, AAVPHP.B-QGT, AAVPHP.B-NQT, AAVPHP.B-EGS, AAVPHP.B-SGN, AAVPHP.B-EGT, AAVPHP.B-DST, AAVPHP.B-DST, AAVPHP.B-STP, AAVPHP.B-PQP, AAVPHP.B-SQP, AAVPHP.B-QLP, AAVPHP.B-TMP, AAVPHP.B-TTP, AAVPHP.S/G2A12, AAVG2A15/G2A3 (G2A3), AAVG2B4 (G2B4), AAVG2B5 (G2B5), AAVPHP.N (PHP.N), PHP.S, AAV1, AAV2, AAV2 variant, AAV2/3 variant, AAV4, AAV5, AAV6, AAV7, AAV8, AAV9.47, AAV9(hu14), AAV9, AAV9 K449R, AAV10, AAV11, AAV12, AAVrh8, AAVrh10, AAVDJ, AAVDJ8, AAV2G9, and a functional variant thereof with amino acid sequence identity of at least 70%, 75%, 80%, 85%, 90%, 91%, 92%, 93%, 94%, 95%, 96%, 97%, 98%, 99%, or greater than 99%; optionally, the AAV capsid is VOY101, VOY201, AAVPHP.B, AAVPHP.N, AAV1, AAV2, AAV2 variant, AAV3, AAV2/3 variant, AAV4, AAV5, AAV6, AAV7, AAV8, AAV9, AAV9.47, AAV9(hu14), AAV9 K449R, AAV10, AAV11, AAV12, AAVrh8, AAVrh10, AAVDJ, or AAVDJ8, or any variant thereof.

[0497] In some embodiments, each and every of the ITR to ITR sequences in Tables 4-6 and 15-91 of WO/2020/223276 (incorporated herein by reference), and in Tables 92-95 herein, as well as variant sequences thereof sharing at least 60, 65%, 70%, 75%, 80%, 85%, 90%, 91%, 92%, 93%, 94%, 95%, 96%, 97%, 98%, 99%, or greater than 99% nucleotide sequence identity to any one of the ITR to ITR sequences in Tables 4-6 and 15-95, is explicitly contemplated to be used with each and every one of the capsids selected from VOY101, VOY201, AAVPHP.B, AAVPHP.N, AAV2, AAV2/3 variant, AAV9, AAV9 K449R, AAV6, AAVrh10, and/or AAVDJ, and a functional variant thereof with amino acid sequence identity of at least 70%, 75%, 80%, 85%, 90%, 91%, 92%, 93%, 94%, 95%, 96%, 97%, 98%, 99%, or greater than 99%; optionally, the capsid is encoded by a nucleic acid sequence comprising any one of SEQ ID NOs: 1-6, 11, 137, 138, 2679, 2809, 2871 and 4534, and a functional variant thereof with amino acid sequence identity of at least 70%, 75%, 80%, 85%, 90%, 91%, 92%, 93%, 94%, 95%, 96%, 97%, 98%, 99%, or greater than 99%.

[0498] In some embodiments, the AAV particle comprises a viral genome comprising SEQ ID NO: 4547 and a VOY101 capsid. In some embodiments, the AAV particle comprises a viral genome comprising SEQ ID NO: 4547 and a VOY201 capsid. In some embodiments, the AAV particle comprises a viral genome comprising SEQ ID NO: 4547 and an AAV9 capsid. In some embodiments, the AAV particle comprises a viral genome comprising SEQ ID NO: 4547 and an AAV9 K449R capsid. In some embodiments, the AAV particle comprises a viral genome comprising SEQ ID NO: 4547 and an AAVPHP.B capsid. In some embodiments, the AAV particle comprises a viral genome comprising SEQ ID NO: 4547 and an AAVPHP.N capsid. In some embodiments, the AAV particle comprises a viral genome comprising SEQ ID NO: 4547 and an AAV2 variant capsid. In some embodiments, the AAV particle comprises a viral genome comprising SEQ ID NO: 4547 and an AAV2/3 variant capsid. In some embodiments, the AAV particle comprises a viral genome comprising SEQ ID NO: 4547 and a capsid comprising SEQ ID NO: 1. In some embodiments, the AAV particle comprises a viral genome comprising SEQ ID NO: 4547 and a capsid encoded by a nucleic acid sequence comprising SEQ ID NO: 2. In some embodiments, the AAV particle comprises a viral genome comprising SEQ ID NO: 4547 and a capsid comprising SEQ ID NO: 4534. In some embodiments, the AAV particle comprises a viral genome comprising SEQ ID NO: 4547 and a capsid encoded by a nucleic acid sequence comprising SEQ ID NO: 3. In some embodiments, the AAV particle comprises a viral genome comprising SEQ ID NO: 4547 and a capsid comprising SEQ ID NO: 138. In some embodiments, the AAV particle comprises a viral genome comprising SEQ ID NO: 4547 and a capsid encoded by a nucleic acid sequence comprising SEQ ID NO: 137. In some embodiments, the AAV particle comprises a viral genome comprising SEQ ID NO: 4547 and a capsid comprising SEQ ID NO: 5. In some embodiments, the AAV particle comprises a viral genome comprising SEQ ID NO: 4547 and a capsid encoded by a nucleic acid sequence comprising SEQ ID NO: 6. In some embodiments, the AAV particle comprises a viral genome comprising SEQ ID NO: 4547 and a capsid comprising SEQ ID NO: 4. In some embodiments, the AAV particle comprises a viral genome comprising SEQ ID NO: 4547 and a capsid comprising SEQ ID NO: 11. In some embodiments, the AAV particle comprises a viral genome comprising SEQ ID NO: 4547 and a capsid comprising SEQ ID NO: 2679. In some embodiments, the AAV particle comprises a viral genome comprising SEQ ID NO: 4547 and a capsid comprising SEQ ID NO: 2809. In some embodiments, the AAV particle comprises a viral genome comprising SEQ ID NO: 4547 and a capsid comprising SEQ ID NO: 2871.

[0499] In some embodiments, the AAV particle comprises a viral genome comprising SEQ ID NO: 4548 and a VOY101 capsid. In some embodiments, the AAV particle comprises a viral genome comprising SEQ ID NO: 4548 and a VOY201 capsid. In some embodiments, the AAV particle comprises a viral genome comprising SEQ ID NO: 4548 and an AAV9 capsid. In some embodiments, the AAV particle comprises a viral genome comprising SEQ ID NO: 4548 and an AAV9 K449R capsid. In some embodiments, the AAV particle comprises a viral genome comprising SEQ ID NO: 4548 and an AAVPHP.B capsid. In some embodiments, the AAV particle comprises a viral genome comprising SEQ ID NO: 4548 and an AAVPHP.N capsid. In some embodiments, the AAV particle comprises a viral genome comprising SEQ ID NO: 4548 and an AAV2 variant capsid. In some embodiments, the AAV particle comprises a viral genome comprising SEQ ID NO: 4548 and an AAV2/3 variant capsid. In some embodiments, the AAV particle comprises a viral genome comprising SEQ ID NO: 4548 and a capsid comprising SEQ ID NO: 1. In some embodiments, the AAV particle comprises a viral genome comprising SEQ ID NO: 4548 and a capsid encoded by a nucleic acid sequence comprising SEQ ID NO: 2. In some embodiments, the AAV particle comprises a viral genome comprising SEQ ID NO: 4548 and a capsid comprising SEQ ID NO: 4534. In some embodiments, the AAV particle comprises a viral genome comprising SEQ ID NO: 4548 and a capsid encoded by a nucleic acid sequence comprising SEQ ID NO: 3. In some embodiments, the AAV particle comprises a viral genome comprising SEQ ID NO: 4548 and a capsid comprising SEQ ID NO: 138. In some embodiments, the AAV particle comprises a viral genome comprising SEQ ID NO: 4548 and a capsid encoded by a nucleic acid sequence comprising SEQ ID NO: 137. In some embodiments, the AAV particle comprises a viral genome comprising SEQ ID NO: 4548 and a capsid comprising SEQ ID NO: 5. In some embodiments, the AAV particle comprises a viral genome comprising SEQ ID NO: 4548 and a capsid encoded by a nucleic acid sequence comprising SEQ ID NO: 6. In some embodiments, the AAV particle comprises a viral genome comprising SEQ ID NO: 4548 and a capsid comprising SEQ ID NO: 4. In some embodiments, the AAV particle comprises a viral genome comprising SEQ ID NO: 4548 and a capsid comprising SEQ ID NO: 11. In some embodiments, the AAV particle comprises a viral genome comprising SEQ ID NO: 4548 and a capsid comprising SEQ ID NO: 2679. In some embodiments, the AAV particle comprises a viral genome comprising SEQ ID NO: 4548 and a capsid comprising SEQ ID NO: 2809. In some embodiments, the AAV particle comprises a viral genome comprising SEQ ID NO: 4548 and a capsid comprising SEQ ID NO: 2871.

[0500] In some embodiments, the AAV particle comprises a viral genome comprising SEQ ID NO: 4549 and a VOY101 capsid. In some embodiments, the AAV particle comprises a viral genome comprising SEQ ID NO: 4549 and a VOY201 capsid. In some embodiments, the AAV particle comprises a viral genome comprising SEQ ID NO: 4549 and an AAV9 capsid. In some embodiments, the AAV particle comprises a viral genome comprising SEQ ID NO: 4549 and an AAV9 K449R capsid. In some embodiments, the AAV particle comprises a viral genome comprising SEQ ID NO: 4549 and an AAVPHP.B capsid. In some embodiments, the AAV particle comprises a viral genome comprising SEQ ID NO: 4549 and an AAVPHP.N capsid. In some embodiments, the AAV particle comprises a viral genome comprising SEQ ID NO: 4549 and an AAV2 variant capsid. In some embodiments, the AAV particle comprises a viral genome comprising SEQ ID NO: 4549 and an AAV2/3 variant capsid. In some embodiments, the AAV particle comprises a viral genome comprising SEQ ID NO: 4549 and a capsid comprising SEQ ID NO: 1. In some embodiments, the AAV particle comprises a viral genome comprising SEQ ID NO: 4549 and a capsid encoded by a nucleic acid sequence comprising SEQ ID NO: 2. In some embodiments, the AAV particle comprises a viral genome comprising SEQ ID NO: 4549 and a capsid comprising SEQ ID NO: 4534. In some embodiments, the AAV particle comprises a viral genome comprising SEQ ID NO: 4549 and a capsid encoded by a nucleic acid sequence comprising SEQ ID NO: 3. In some embodiments, the AAV particle comprises a viral genome comprising SEQ ID NO: 4549 and a capsid comprising SEQ ID NO: 138. In some embodiments, the AAV particle comprises a viral genome comprising SEQ ID NO: 4549 and a capsid encoded by a nucleic acid sequence comprising SEQ ID NO: 137. In some embodiments, the AAV particle comprises a viral genome comprising SEQ ID NO: 4549 and a capsid comprising SEQ ID NO: 5. In some embodiments, the AAV particle comprises a viral genome comprising SEQ ID NO: 4549 and a capsid encoded by a nucleic acid sequence comprising SEQ ID NO: 6. In some embodiments, the AAV particle comprises a viral genome comprising SEQ ID NO: 4549 and a capsid comprising SEQ ID NO: 4. In some embodiments, the AAV particle comprises a viral genome comprising SEQ ID NO: 4549 and a capsid comprising SEQ ID NO: 11. In some embodiments, the AAV particle comprises a viral genome comprising SEQ ID NO: 4549 and a capsid comprising SEQ ID NO: 2679. In some embodiments, the AAV particle comprises a viral genome comprising SEQ ID NO: 4549 and a capsid comprising SEQ ID NO: 2809. In some embodiments, the AAV particle comprises a viral genome comprising SEQ ID NO: 4549 and a capsid comprising SEQ ID NO: 2871.

[0501] In some embodiments, the AAV particle comprises a viral genome comprising SEQ ID NO: 4550 and a VOY101 capsid. In some embodiments, the AAV particle comprises a viral genome comprising SEQ ID NO: 4550 and a VOY201 capsid. In some embodiments, the AAV particle comprises a viral genome comprising SEQ ID NO: 4550 and an AAV9 capsid. In some embodiments, the AAV particle comprises a viral genome comprising SEQ ID NO: 4550 and an AAV9 K449R capsid. In some embodiments, the AAV particle comprises a viral genome comprising SEQ ID NO: 4550 and an AAVPHP.B capsid. In some embodiments, the AAV particle comprises a viral genome comprising SEQ ID NO: 4550 and an AAVPHP.N capsid. In some embodiments, the AAV particle comprises a viral genome comprising SEQ ID NO: 4550 and an AAV2 variant capsid. In some embodiments, the AAV particle comprises a viral genome comprising SEQ ID NO: 4550 and an AAV2/3 variant capsid. In some embodiments, the AAV particle comprises a viral genome comprising SEQ ID NO: 4550 and a capsid comprising SEQ ID NO: 1. In some embodiments, the AAV particle comprises a viral genome comprising SEQ ID NO: 4550 and a capsid encoded by a nucleic acid sequence comprising SEQ ID NO: 2. In some embodiments, the AAV particle comprises a viral genome comprising SEQ ID NO: 4550 and a capsid comprising SEQ ID NO: 4534. In some embodiments, the AAV particle comprises a viral genome comprising SEQ ID NO: 4550 and a capsid encoded by a nucleic acid sequence comprising SEQ ID NO: 3. In some embodiments, the AAV particle comprises a viral genome comprising SEQ ID NO: 4550 and a capsid comprising SEQ ID NO: 138. In some embodiments, the AAV particle comprises a viral genome comprising SEQ ID NO: 4550 and a capsid encoded by a nucleic acid sequence comprising SEQ ID NO: 137. In some embodiments, the AAV particle comprises a viral genome comprising SEQ ID NO: 4550 and a capsid comprising SEQ ID NO: 5. In some embodiments, the AAV particle comprises a viral genome comprising SEQ ID NO: 4550 and a capsid encoded by a nucleic acid sequence comprising SEQ ID NO: 6. In some embodiments, the AAV particle comprises a viral genome comprising SEQ ID NO: 4550 and a capsid comprising SEQ ID NO: 4. In some embodiments, the AAV particle comprises a viral genome comprising SEQ ID NO: 4550 and a capsid comprising SEQ ID NO: 11. In some embodiments, the AAV particle comprises a viral genome comprising SEQ ID NO: 4550 and a capsid comprising SEQ ID NO: 2679. In some embodiments, the AAV particle comprises a viral genome comprising SEQ ID NO: 4550 and a capsid comprising SEQ ID NO: 2809. In some embodiments, the AAV particle comprises a viral genome comprising SEQ ID NO: 4550 and a capsid comprising SEQ ID NO: 2871.

[0502] In some embodiments, the AAV particle comprises a viral genome comprising SEQ ID NO: 4551 and a VOY101 capsid. In some embodiments, the AAV particle comprises a viral genome comprising SEQ ID NO: 4551 and a VOY201 capsid. In some embodiments, the AAV particle comprises a viral genome comprising SEQ ID NO: 4551 and an AAV9 capsid. In some embodiments, the AAV particle comprises a viral genome comprising SEQ ID NO: 4551 and an AAV9 K449R capsid. In some embodiments, the AAV particle comprises a viral genome comprising SEQ ID NO: 4551 and an AAVPHP.B capsid. In some embodiments, the AAV particle comprises a viral genome comprising SEQ ID NO: 4551 and an AAVPHP.N capsid. In some embodiments, the AAV particle comprises a viral genome comprising SEQ ID NO: 4551 and an AAV2 variant capsid. In some embodiments, the AAV particle comprises a viral genome comprising SEQ ID NO: 4551 and an AAV2/3 variant capsid. In some embodiments, the AAV particle comprises a viral genome comprising SEQ ID NO: 4551 and a capsid comprising SEQ ID NO: 1. In some embodiments, the AAV particle comprises a viral genome comprising SEQ ID NO: 4551 and a capsid encoded by a nucleic acid sequence comprising SEQ ID NO: 2. In some embodiments, the AAV particle comprises a viral genome comprising SEQ ID NO: 4551 and a capsid comprising SEQ ID NO: 4534. In some embodiments, the AAV particle comprises a viral genome comprising SEQ ID NO: 4551 and a capsid encoded by a nucleic acid sequence comprising SEQ ID NO: 3. In some embodiments, the AAV particle comprises a viral genome comprising SEQ ID NO: 4551 and a capsid comprising SEQ ID NO: 138. In some embodiments, the AAV particle comprises a viral genome comprising SEQ ID NO: 4551 and a capsid encoded by a nucleic acid sequence comprising SEQ ID NO: 137. In some embodiments, the AAV particle comprises a viral genome comprising SEQ ID NO: 4551 and a capsid comprising SEQ ID NO: 5. In some embodiments, the AAV particle comprises a viral genome comprising SEQ ID NO: 4551 and a capsid encoded by a nucleic acid sequence comprising SEQ ID NO: 6. In some embodiments, the AAV particle comprises a viral genome comprising SEQ ID NO: 4551 and a capsid comprising SEQ ID NO: 4. In some embodiments, the AAV particle comprises a viral genome comprising SEQ ID NO: 4551 and a capsid comprising SEQ ID NO: 11. In some embodiments, the AAV particle comprises a viral genome comprising SEQ ID NO: 4551 and a capsid comprising SEQ ID NO: 2679. In some embodiments, the AAV particle comprises a viral genome comprising SEQ ID NO: 4551 and a capsid comprising SEQ ID NO: 2809. In some embodiments, the AAV particle comprises a viral genome comprising SEQ ID NO: 4551 and a capsid comprising SEQ ID NO: 2871.

[0503] In some embodiments, the AAV particle comprises a viral genome comprising SEQ ID NO: 4552 and a VOY101 capsid. In some embodiments, the AAV particle comprises a viral genome comprising SEQ ID NO: 4552 and a VOY201 capsid. In some embodiments, the AAV particle comprises a viral genome comprising SEQ ID NO: 4552 and an AAV9 capsid. In some embodiments, the AAV particle comprises a viral genome comprising SEQ ID NO: 4552 and an AAV9 K449R capsid. In some embodiments, the AAV particle comprises a viral genome comprising SEQ ID NO: 4552 and an AAVPHP.B capsid. In some embodiments, the AAV particle comprises a viral genome comprising SEQ ID NO: 4552 and an AAVPHP.N capsid. In some embodiments, the AAV particle comprises a viral genome comprising SEQ ID NO: 4552 and an AAV2 variant capsid. In some embodiments, the AAV particle comprises a viral genome comprising SEQ ID NO: 4552 and an AAV2/3 variant capsid. In some embodiments, the AAV particle comprises a viral genome comprising SEQ ID NO: 4552 and a capsid comprising SEQ ID NO: 1. In some embodiments, the AAV particle comprises a viral genome comprising SEQ ID NO: 4552 and a capsid encoded by a nucleic acid sequence comprising SEQ ID NO: 2. In some embodiments, the AAV particle comprises a viral genome comprising SEQ ID NO: 4552 and a capsid comprising SEQ ID NO: 4534. In some embodiments, the AAV particle comprises a viral genome comprising SEQ ID NO: 4552 and a capsid encoded by a nucleic acid sequence comprising SEQ ID NO: 3. In some embodiments, the AAV particle comprises a viral genome comprising SEQ ID NO: 4552 and a capsid comprising SEQ ID NO: 138. In some embodiments, the AAV particle comprises a viral genome comprising SEQ ID NO: 4552 and a capsid encoded by a nucleic acid sequence comprising SEQ ID NO: 137. In some embodiments, the AAV particle comprises a viral genome comprising SEQ ID NO: 4552 and a capsid comprising SEQ ID NO: 5. In some embodiments, the AAV particle comprises a viral genome comprising SEQ ID NO: 4552 and a capsid encoded by a nucleic acid sequence comprising SEQ ID NO: 6. In some embodiments, the AAV particle comprises a viral genome comprising SEQ ID NO: 4552 and a capsid comprising SEQ ID NO: 4. In some embodiments, the AAV particle comprises a viral genome comprising SEQ ID NO: 4552 and a capsid comprising SEQ ID NO: 11. In some embodiments, the AAV particle comprises a viral genome comprising SEQ ID NO: 4552 and a capsid comprising SEQ ID NO: 2679. In some embodiments, the AAV particle comprises a viral genome comprising SEQ ID NO: 4552 and a capsid comprising SEQ ID NO: 2809. In some embodiments, the AAV particle comprises a viral genome comprising SEQ ID NO: 4552 and a capsid comprising SEQ ID NO: 2871.

[0504] In some embodiments, the AAV particle comprises a viral genome comprising SEQ ID NO: 4553 and a VOY101 capsid. In some embodiments, the AAV particle comprises a viral genome comprising SEQ ID NO: 4553 and a VOY201 capsid. In some embodiments, the AAV particle comprises a viral genome comprising SEQ ID NO: 4553 and an AAV9 capsid. In some embodiments, the AAV particle comprises a viral genome comprising SEQ ID NO: 4553 and an AAV9 K449R capsid. In some embodiments, the AAV particle comprises a viral genome comprising SEQ ID NO: 4553 and an AAVPHP.B capsid. In some embodiments, the AAV particle comprises a viral genome comprising SEQ ID NO: 4553 and an AAVPHP.N capsid. In some embodiments, the AAV particle comprises a viral genome comprising SEQ ID NO: 4553 and an AAV2 variant capsid. In some embodiments, the AAV particle comprises a viral genome comprising SEQ ID NO: 4553 and an AAV2/3 variant capsid. In some embodiments, the AAV particle comprises a viral genome comprising SEQ ID NO: 4553 and a capsid comprising SEQ ID NO: 1. In some embodiments, the AAV particle comprises a viral genome comprising SEQ ID NO: 4553 and a capsid encoded by a nucleic acid sequence comprising SEQ ID NO: 2. In some embodiments, the AAV particle comprises a viral genome comprising SEQ ID NO: 4553 and a capsid comprising SEQ ID NO: 4534. In some embodiments, the AAV particle comprises a viral genome comprising SEQ ID NO: 4553 and a capsid encoded by a nucleic acid sequence comprising SEQ ID NO: 3. In some embodiments, the AAV particle comprises a viral genome comprising SEQ ID NO: 4553 and a capsid comprising SEQ ID NO: 138. In some embodiments, the AAV particle comprises a viral genome comprising SEQ ID NO: 4553 and a capsid encoded by a nucleic acid sequence comprising SEQ ID NO: 137. In some embodiments, the AAV particle comprises a viral genome comprising SEQ ID NO: 4553 and a capsid comprising SEQ ID NO: 5. In some embodiments, the AAV particle comprises a viral genome comprising SEQ ID NO: 4553 and a capsid encoded by a nucleic acid sequence comprising SEQ ID NO: 6. In some embodiments, the AAV particle comprises a viral genome comprising SEQ ID NO: 4553 and a capsid comprising SEQ ID NO: 4. In some embodiments, the AAV particle comprises a viral genome comprising SEQ ID NO: 4553 and a capsid comprising SEQ ID NO: 11. In some embodiments, the AAV particle comprises a viral genome comprising SEQ ID NO: 4553 and a capsid comprising SEQ ID NO: 2679. In some embodiments, the AAV particle comprises a viral genome comprising SEQ ID NO: 4553 and a capsid comprising SEQ ID NO: 2809. In some embodiments, the AAV particle comprises a viral genome comprising SEQ ID NO: 4553 and a capsid comprising SEQ ID NO: 2871.

[0505] In some embodiments, the AAV particle comprises a viral genome comprising SEQ ID NO: 4554 and a VOY101 capsid. In some embodiments, the AAV particle comprises a viral genome comprising SEQ ID NO: 4554 and a VOY201 capsid. In some embodiments, the AAV particle comprises a viral genome comprising SEQ ID NO: 4554 and an AAV9 capsid. In some embodiments, the AAV particle comprises a viral genome comprising SEQ ID NO: 4554 and an AAV9 K449R capsid. In some embodiments, the AAV particle comprises a viral genome comprising SEQ ID NO: 4554 and an AAVPHP.B capsid. In some embodiments, the AAV particle comprises a viral genome comprising SEQ ID NO: 4554 and an AAVPHP.N capsid. In some embodiments, the AAV particle comprises a viral genome comprising SEQ ID NO: 4554 and an AAV2 variant capsid. In some embodiments, the AAV particle comprises a viral genome comprising SEQ ID NO: 4554 and an AAV2/3 variant capsid. In some embodiments, the AAV particle comprises a viral genome comprising SEQ ID NO: 4554 and a capsid comprising SEQ ID NO: 1. In some embodiments, the AAV particle comprises a viral genome comprising SEQ ID NO: 4554 and a capsid encoded by a nucleic acid sequence comprising SEQ ID NO: 2. In some embodiments, the AAV particle comprises a viral genome comprising SEQ ID NO: 4554 and a capsid comprising SEQ ID NO: 4534. In some embodiments, the AAV particle comprises a viral genome comprising SEQ ID NO: 4554 and a capsid encoded by a nucleic acid sequence comprising SEQ ID NO: 3. In some embodiments, the AAV particle comprises a viral genome comprising SEQ ID NO: 4554 and a capsid comprising SEQ ID NO: 138. In some embodiments, the AAV particle comprises a viral genome comprising SEQ ID NO: 4554 and a capsid encoded by a nucleic acid sequence comprising SEQ ID NO: 137. In some embodiments, the AAV particle comprises a viral genome comprising SEQ ID NO: 4554 and a capsid comprising SEQ ID NO: 5. In some embodiments, the AAV particle comprises a viral genome comprising SEQ ID NO: 4554 and a capsid encoded by a nucleic acid sequence comprising SEQ ID NO: 6. In some embodiments, the AAV particle comprises a viral genome comprising SEQ ID NO: 4554 and a capsid comprising SEQ ID NO: 4. In some embodiments, the AAV particle comprises a viral genome comprising SEQ ID NO: 4554 and a capsid comprising SEQ ID NO: 11. In some embodiments, the AAV particle comprises a viral genome comprising SEQ ID NO: 4554 and a capsid comprising SEQ ID NO: 2679. In some embodiments, the AAV particle comprises a viral genome comprising SEQ ID NO: 4554 and a capsid comprising SEQ ID NO: 2809. In some embodiments, the AAV particle comprises a viral genome comprising SEQ ID NO: 4554 and a capsid comprising SEQ ID NO: 2871.

[0506] In some embodiments, the AAV particle comprises a viral genome comprising SEQ ID NO: 4555 and a VOY101 capsid. In some embodiments, the AAV particle comprises a viral genome comprising SEQ ID NO: 4555 and a VOY201 capsid. In some embodiments, the AAV particle comprises a viral genome comprising SEQ ID NO: 4555 and an AAV9 capsid. In some embodiments, the AAV particle comprises a viral genome comprising SEQ ID NO: 4555 and an AAV9 K449R capsid. In some embodiments, the AAV particle comprises a viral genome comprising SEQ ID NO: 4555 and an AAVPHP.B capsid. In some embodiments, the AAV particle comprises a viral genome comprising SEQ ID NO: 4555 and an AAVPHP.N capsid. In some embodiments, the AAV particle comprises a viral genome comprising SEQ ID NO: 4555 and an AAV2 variant capsid. In some embodiments, the AAV particle comprises a viral genome comprising SEQ ID NO: 4555 and an AAV2/3 variant capsid. In some embodiments, the AAV particle comprises a viral genome comprising SEQ ID NO: 4555 and a capsid comprising SEQ ID NO: 1. In some embodiments, the AAV particle comprises a viral genome comprising SEQ ID NO: 4555 and a capsid encoded by a nucleic acid sequence comprising SEQ ID NO: 2. In some embodiments, the AAV particle comprises a viral genome comprising SEQ ID NO: 4555 and a capsid comprising SEQ ID NO: 4534. In some embodiments, the AAV particle comprises a viral genome comprising SEQ ID NO: 4555 and a capsid encoded by a nucleic acid sequence comprising SEQ ID NO: 3. In some embodiments, the AAV particle comprises a viral genome comprising SEQ ID NO: 4555 and a capsid comprising SEQ ID NO: 138. In some embodiments, the AAV particle comprises a viral genome comprising SEQ ID NO: 4555 and a capsid encoded by a nucleic acid sequence comprising SEQ ID NO: 137. In some embodiments, the AAV particle comprises a viral genome comprising SEQ ID NO: 4555 and a capsid comprising SEQ ID NO: 5. In some embodiments, the AAV particle comprises a viral genome comprising SEQ ID NO: 4555 and a capsid encoded by a nucleic acid sequence comprising SEQ ID NO: 6. In some embodiments, the AAV particle comprises a viral genome comprising SEQ ID NO: 4555 and a capsid comprising SEQ ID NO: 4. In some embodiments, the AAV particle comprises a viral genome comprising SEQ ID NO: 4555 and a capsid comprising SEQ ID NO: 11. In some embodiments, the AAV particle comprises a viral genome comprising SEQ ID NO: 4555 and a capsid comprising SEQ ID NO: 2679. In some embodiments, the AAV particle comprises a viral genome comprising SEQ ID NO: 4555 and a capsid comprising SEQ ID NO: 2809. In some embodiments, the AAV particle comprises a viral genome comprising SEQ ID NO: 4555 and a capsid comprising SEQ ID NO: 2871.

[0507] In some embodiments, the AAV particle comprises a viral genome comprising SEQ ID NO: 4556 and a VOY101 capsid. In some embodiments, the AAV particle comprises a viral genome comprising SEQ ID NO: 4556 and a VOY201 capsid. In some embodiments, the AAV particle comprises a viral genome comprising SEQ ID NO: 4556 and an AAV9 capsid. In some embodiments, the AAV particle comprises a viral genome comprising SEQ ID NO: 4556 and an AAV9 K449R capsid. In some embodiments, the AAV particle comprises a viral genome comprising SEQ ID NO: 4556 and an AAVPHP.B capsid. In some embodiments, the AAV particle comprises a viral genome comprising SEQ ID NO: 4556 and an AAVPHP.N capsid. In some embodiments, the AAV particle comprises a viral genome comprising SEQ ID NO: 4556 and an AAV2 variant capsid. In some embodiments, the AAV particle comprises a viral genome comprising SEQ ID NO: 4556 and an AAV2/3 variant capsid. In some embodiments, the AAV particle comprises a viral genome comprising SEQ ID NO: 4556 and a capsid comprising SEQ ID NO: 1. In some embodiments, the AAV particle comprises a viral genome comprising SEQ ID NO: 4556 and a capsid encoded by a nucleic acid sequence comprising SEQ ID NO: 2. In some embodiments, the AAV particle comprises a viral genome comprising SEQ ID NO: 4556 and a capsid comprising SEQ ID NO: 4534. In some embodiments, the AAV particle comprises a viral genome comprising SEQ ID NO: 4556 and a capsid encoded by a nucleic acid sequence comprising SEQ ID NO: 3. In some embodiments, the AAV particle comprises a viral genome comprising SEQ ID NO: 4556 and a capsid comprising SEQ ID NO: 138. In some embodiments, the AAV particle comprises a viral genome comprising SEQ ID NO: 4556 and a capsid encoded by a nucleic acid sequence comprising SEQ ID NO: 137. In some embodiments, the AAV particle comprises a viral genome comprising SEQ ID NO: 4556 and a capsid comprising SEQ ID NO: 5. In some embodiments, the AAV particle comprises a viral genome comprising SEQ ID NO: 4556 and a capsid encoded by a nucleic acid sequence comprising SEQ ID NO: 6. In some embodiments, the AAV particle comprises a viral genome comprising SEQ ID NO: 4556 and a capsid comprising SEQ ID NO: 4. In some embodiments, the AAV particle comprises a viral genome comprising SEQ ID NO: 4556 and a capsid comprising SEQ ID NO: 11. In some embodiments, the AAV particle comprises a viral genome comprising SEQ ID NO: 4556 and a capsid comprising SEQ ID NO: 2679. In some embodiments, the AAV particle comprises a viral genome comprising SEQ ID NO: 4556 and a capsid comprising SEQ ID NO: 2809. In some embodiments, the AAV particle comprises a viral genome comprising SEQ ID NO: 4556 and a capsid comprising SEQ ID NO: 2871.

[0508] In some embodiments, the AAV particle comprises a viral genome comprising SEQ ID NO: 4557 and a VOY101 capsid. In some embodiments, the AAV particle comprises a viral genome comprising SEQ ID NO: 4557 and a VOY201 capsid. In some embodiments, the AAV particle comprises a viral genome comprising SEQ ID NO: 4557 and an AAV9 capsid. In some embodiments, the AAV particle comprises a viral genome comprising SEQ ID NO: 4557 and an AAV9 K449R capsid. In some embodiments, the AAV particle comprises a viral genome comprising SEQ ID NO: 4557 and an AAVPHP.B capsid. In some embodiments, the AAV particle comprises a viral genome comprising SEQ ID NO: 4557 and an AAVPHP.N capsid. In some embodiments, the AAV particle comprises a viral genome comprising SEQ ID NO: 4557 and an AAV2 variant capsid. In some embodiments, the AAV particle comprises a viral genome comprising SEQ ID NO: 4557 and an AAV2/3 variant capsid. In some embodiments, the AAV particle comprises a viral genome comprising SEQ ID NO: 4557 and a capsid comprising SEQ ID NO: 1. In some embodiments, the AAV particle comprises a viral genome comprising SEQ ID NO: 4557 and a capsid encoded by a nucleic acid sequence comprising SEQ ID NO: 2. In some embodiments, the AAV particle comprises a viral genome comprising SEQ ID NO: 4557 and a capsid comprising SEQ ID NO: 4534. In some embodiments, the AAV particle comprises a viral genome comprising SEQ ID NO: 4557 and a capsid encoded by a nucleic acid sequence comprising SEQ ID NO: 3. In some embodiments, the AAV particle comprises a viral genome comprising SEQ ID NO: 4557 and a capsid comprising SEQ ID NO: 138. In some embodiments, the AAV particle comprises a viral genome comprising SEQ ID NO: 4557 and a capsid encoded by a nucleic acid sequence comprising SEQ ID NO: 137. In some embodiments, the AAV particle comprises a viral genome comprising SEQ ID NO: 4557 and a capsid comprising SEQ ID NO: 5. In some embodiments, the AAV particle comprises a viral genome comprising SEQ ID NO: 4557 and a capsid encoded by a nucleic acid sequence comprising SEQ ID NO: 6. In some embodiments, the AAV particle comprises a viral genome comprising SEQ ID NO: 4557 and a capsid comprising SEQ ID NO: 4. In some embodiments, the AAV particle comprises a viral genome comprising SEQ ID NO: 4557 and a capsid comprising SEQ ID NO: 11. In some embodiments, the AAV particle comprises a viral genome comprising SEQ ID NO: 4557 and a capsid comprising SEQ ID NO: 2679. In some embodiments, the AAV particle comprises a viral genome comprising SEQ ID NO: 4557 and a capsid comprising SEQ ID NO: 2809. In some embodiments, the AAV particle comprises a viral genome comprising SEQ ID NO: 4557 and a capsid comprising SEQ ID NO: 2871.

[0509] In some embodiments, the AAV particle comprises a viral genome comprising SEQ ID NO: 4558 and a VOY101 capsid. In some embodiments, the AAV particle comprises a viral genome comprising SEQ ID NO: 4558 and a VOY201 capsid. In some embodiments, the AAV particle comprises a viral genome comprising SEQ ID NO: 4558 and an AAV9 capsid. In some embodiments, the AAV particle comprises a viral genome comprising SEQ ID NO: 4558 and an AAV9 K449R capsid. In some embodiments, the AAV particle comprises a viral genome comprising SEQ ID NO: 4558 and an AAVPHP.B capsid. In some embodiments, the AAV particle comprises a viral genome comprising SEQ ID NO: 4558 and an AAVPHP.N capsid. In some embodiments, the AAV particle comprises a viral genome comprising SEQ ID NO: 4558 and an AAV2 variant capsid. In some embodiments, the AAV particle comprises a viral genome comprising SEQ ID NO: 4558 and an AAV2/3 variant capsid. In some embodiments, the AAV particle comprises a viral genome comprising SEQ ID NO: 4558 and a capsid comprising SEQ ID NO: 1. In some embodiments, the AAV particle comprises a viral genome comprising SEQ ID NO: 4558 and a capsid encoded by a nucleic acid sequence comprising SEQ ID NO: 2. In some embodiments, the AAV particle comprises a viral genome comprising SEQ ID NO: 4558 and a capsid comprising SEQ ID NO: 4534. In some embodiments, the AAV particle comprises a viral genome comprising SEQ ID NO: 4558 and a capsid encoded by a nucleic acid sequence comprising SEQ ID NO: 3. In some embodiments, the AAV particle comprises a viral genome comprising SEQ ID NO: 4558 and a capsid comprising SEQ ID NO: 138. In some embodiments, the AAV particle comprises a viral genome comprising SEQ ID NO: 4558 and a capsid encoded by a nucleic acid sequence comprising SEQ ID NO: 137. In some embodiments, the AAV particle comprises a viral genome comprising SEQ ID NO: 4558 and a capsid comprising SEQ ID NO: 5. In some embodiments, the AAV particle comprises a viral genome comprising SEQ ID NO: 4558 and a capsid encoded by a nucleic acid sequence comprising SEQ ID NO: 6. In some embodiments, the AAV particle comprises a viral genome comprising SEQ ID NO: 4558 and a capsid comprising SEQ ID NO: 4. In some embodiments, the AAV particle comprises a viral genome comprising SEQ ID NO: 4558 and a capsid comprising SEQ ID NO: 11. In some embodiments, the AAV particle comprises a viral genome comprising SEQ ID NO: 4558 and a capsid comprising SEQ ID NO: 2679. In some embodiments, the AAV particle comprises a viral genome comprising SEQ ID NO: 4558 and a capsid comprising SEQ ID NO: 2809. In some embodiments, the AAV particle comprises a viral genome comprising SEQ ID NO: 4558 and a capsid comprising SEQ ID NO: 2871.

[0510] In some embodiments, the AAV particle comprises a viral genome comprising SEQ ID NO: 4559 and a VOY101 capsid. In some embodiments, the AAV particle comprises a viral genome comprising SEQ ID NO: 4559 and a VOY201 capsid. In some embodiments, the AAV particle comprises a viral genome comprising SEQ ID NO: 4559 and an AAV9 capsid. In some embodiments, the AAV particle comprises a viral genome comprising SEQ ID NO: 4559 and an AAV9 K449R capsid. In some embodiments, the AAV particle comprises a viral genome comprising SEQ ID NO: 4559 and an AAVPHP.B capsid. In some embodiments, the AAV particle comprises a viral genome comprising SEQ ID NO: 4559 and an AAVPHP.N capsid. In some embodiments, the AAV particle comprises a viral genome comprising SEQ ID NO: 4559 and an AAV2 variant capsid. In some embodiments, the AAV particle comprises a viral genome comprising SEQ ID NO: 4559 and an AAV2/3 variant capsid. In some embodiments, the AAV particle comprises a viral genome comprising SEQ ID NO: 4559 and a capsid comprising SEQ ID NO: 1. In some embodiments, the AAV particle comprises a viral genome comprising SEQ ID NO: 4559 and a capsid encoded by a nucleic acid sequence comprising SEQ ID NO: 2. In some embodiments, the AAV particle comprises a viral genome comprising SEQ ID NO: 4559 and a capsid comprising SEQ ID NO: 4534. In some embodiments, the AAV particle comprises a viral genome comprising SEQ ID NO: 4559 and a capsid encoded by a nucleic acid sequence comprising SEQ ID NO: 3. In some embodiments, the AAV particle comprises a viral genome comprising SEQ ID NO: 4559 and a capsid comprising SEQ ID NO: 138. In some embodiments, the AAV particle comprises a viral genome comprising SEQ ID NO: 4559 and a capsid encoded by a nucleic acid sequence comprising SEQ ID NO: 137. In some embodiments, the AAV particle comprises a viral genome comprising SEQ ID NO: 4559 and a capsid comprising SEQ ID NO: 5. In some embodiments, the AAV particle comprises a viral genome comprising SEQ ID NO: 4559 and a capsid encoded by a nucleic acid sequence comprising SEQ ID NO: 6. In some embodiments, the AAV particle comprises a viral genome comprising SEQ ID NO: 4559 and a capsid comprising SEQ ID NO: 4. In some embodiments, the AAV particle comprises a viral genome comprising SEQ ID NO: 4559 and a capsid comprising SEQ ID NO: 11. In some embodiments, the AAV particle comprises a viral genome comprising SEQ ID NO: 4559 and a capsid comprising SEQ ID NO: 2679. In some embodiments, the AAV particle comprises a viral genome comprising SEQ ID NO: 4559 and a capsid comprising SEQ ID NO: 2809. In some embodiments, the AAV particle comprises a viral genome comprising SEQ ID NO: 4559 and a capsid comprising SEQ ID NO: 2871.

[0511] In some embodiments, the AAV particle comprises a viral genome comprising SEQ ID NO: 4560 and a VOY101 capsid. In some embodiments, the AAV particle comprises a viral genome comprising SEQ ID NO: 4560 and a VOY201 capsid. In some embodiments, the AAV particle comprises a viral genome comprising SEQ ID NO: 4560 and an AAV9 capsid. In some embodiments, the AAV particle comprises a viral genome comprising SEQ ID NO: 4560 and an AAV9 K449R capsid. In some embodiments, the AAV particle comprises a viral genome comprising SEQ ID NO: 4560 and an AAVPHP.B capsid. In some embodiments, the AAV particle comprises a viral genome comprising SEQ ID NO: 4560 and an AAVPHP.N capsid. In some embodiments, the AAV particle comprises a viral genome comprising SEQ ID NO: 4560 and an AAV2 variant capsid. In some embodiments, the AAV particle comprises a viral genome comprising SEQ ID NO: 4560 and an AAV2/3 variant capsid. In some embodiments, the AAV particle comprises a viral genome comprising SEQ ID NO: 4560 and a capsid comprising SEQ ID NO: 1. In some embodiments, the AAV particle comprises a viral genome comprising SEQ ID NO: 4560 and a capsid encoded by a nucleic acid sequence comprising SEQ ID NO: 2. In some embodiments, the AAV particle comprises a viral genome comprising SEQ ID NO: 4560 and a capsid comprising SEQ ID NO: 4534. In some embodiments, the AAV particle comprises a viral genome comprising SEQ ID NO: 4560 and a capsid encoded by a nucleic acid sequence comprising SEQ ID NO: 3. In some embodiments, the AAV particle comprises a viral genome comprising SEQ ID NO: 4560 and a capsid comprising SEQ ID NO: 138. In some embodiments, the AAV particle comprises a viral genome comprising SEQ ID NO: 4560 and a capsid encoded by a nucleic acid sequence comprising SEQ ID NO: 137. In some embodiments, the AAV particle comprises a viral genome comprising SEQ ID NO: 4560 and a capsid comprising SEQ ID NO: 5. In some embodiments, the AAV particle comprises a viral genome comprising SEQ ID NO: 4560 and a capsid encoded by a nucleic acid sequence comprising SEQ ID NO: 6. In some embodiments, the AAV particle comprises a viral genome comprising SEQ ID NO: 4560 and a capsid comprising SEQ ID NO: 4. In some embodiments, the AAV particle comprises a viral genome comprising SEQ ID NO: 4560 and a capsid comprising SEQ ID NO: 11. In some embodiments, the AAV particle comprises a viral genome comprising SEQ ID NO: 4560 and a capsid comprising SEQ ID NO: 2679. In some embodiments, the AAV particle comprises a viral genome comprising SEQ ID NO: 4560 and a capsid comprising SEQ ID NO: 2809. In some embodiments, the AAV particle comprises a viral genome comprising SEQ ID NO: 4560 and a capsid comprising SEQ ID NO: 2871.

[0512] In some embodiments, the AAV particle comprises a viral genome comprising SEQ ID NO: 4561 and a VOY101 capsid. In some embodiments, the AAV particle comprises a viral genome comprising SEQ ID NO: 4561 and a VOY201 capsid. In some embodiments, the AAV particle comprises a viral genome comprising SEQ ID NO: 4561 and an AAV9 capsid. In some embodiments, the AAV particle comprises a viral genome comprising SEQ ID NO: 4561 and an AAV9 K449R capsid. In some embodiments, the AAV particle comprises a viral genome comprising SEQ ID NO: 4561 and an AAVPHP.B capsid. In some embodiments, the AAV particle comprises a viral genome comprising SEQ ID NO: 4561 and an AAVPHP.N capsid. In some embodiments, the AAV particle comprises a viral genome comprising SEQ ID NO: 4561 and an AAV2 variant capsid. In some embodiments, the AAV particle comprises a viral genome comprising SEQ ID NO: 4561 and an AAV2/3 variant capsid. In some embodiments, the AAV particle comprises a viral genome comprising SEQ ID NO: 4561 and a capsid comprising SEQ ID NO: 1. In some embodiments, the AAV particle comprises a viral genome comprising SEQ ID NO: 4561 and a capsid encoded by a nucleic acid sequence comprising SEQ ID NO: 2. In some embodiments, the AAV particle comprises a viral genome comprising SEQ ID NO: 4561 and a capsid comprising SEQ ID NO: 4534. In some embodiments, the AAV particle comprises a viral genome comprising SEQ ID NO: 4561 and a capsid encoded by a nucleic acid sequence comprising SEQ ID NO: 3. In some embodiments, the AAV particle comprises a viral genome comprising SEQ ID NO: 4561 and a capsid comprising SEQ ID NO: 138. In some embodiments, the AAV particle comprises a viral genome comprising SEQ ID NO: 4561 and a capsid encoded by a nucleic acid sequence comprising SEQ ID NO: 137. In some embodiments, the AAV particle comprises a viral genome comprising SEQ ID NO: 4561 and a capsid comprising SEQ ID NO: 5. In some embodiments, the AAV particle comprises a viral genome comprising SEQ ID NO: 4561 and a capsid encoded by a nucleic acid sequence comprising SEQ ID NO: 6. In some embodiments, the AAV particle comprises a viral genome comprising SEQ ID NO: 4561 and a capsid comprising SEQ ID NO: 4. In some embodiments, the AAV particle comprises a viral genome comprising SEQ ID NO: 4561 and a capsid comprising SEQ ID NO: 11. In some embodiments, the AAV particle comprises a viral genome comprising SEQ ID NO: 4561 and a capsid comprising SEQ ID NO: 2679. In some embodiments, the AAV particle comprises a viral genome comprising SEQ ID NO: 4561 and a capsid comprising SEQ ID NO: 2809. In some embodiments, the AAV particle comprises a viral genome comprising SEQ ID NO: 4561 and a capsid comprising SEQ ID NO: 2871.

[0513] In some embodiments, the AAV particle comprises a viral genome comprising SEQ ID NO: 4562 and a VOY101 capsid. In some embodiments, the AAV particle comprises a viral genome comprising SEQ ID NO: 4562 and a VOY201 capsid. In some embodiments, the AAV particle comprises a viral genome comprising SEQ ID NO: 4562 and an AAV9 capsid. In some embodiments, the AAV particle comprises a viral genome comprising SEQ ID NO: 4562 and an AAV9 K449R capsid. In some embodiments, the AAV particle comprises a viral genome comprising SEQ ID NO: 4562 and an AAVPHP.B capsid. In some embodiments, the AAV particle comprises a viral genome comprising SEQ ID NO: 4562 and an AAVPHP.N capsid. In some embodiments, the AAV particle comprises a viral genome comprising SEQ ID NO: 4562 and an AAV2 variant capsid. In some embodiments, the AAV particle comprises a viral genome comprising SEQ ID NO: 4562 and an AAV2/3 variant capsid. In some embodiments, the AAV particle comprises a viral genome comprising SEQ ID NO: 4562 and a capsid comprising SEQ ID NO: 1. In some embodiments, the AAV particle comprises a viral genome comprising SEQ ID NO: 4562 and a capsid encoded by a nucleic acid sequence comprising SEQ ID NO: 2. In some embodiments, the AAV particle comprises a viral genome comprising SEQ ID NO: 4562 and a capsid comprising SEQ ID NO: 4534. In some embodiments, the AAV particle comprises a viral genome comprising SEQ ID NO: 4562 and a capsid encoded by a nucleic acid sequence comprising SEQ ID NO: 3. In some embodiments, the AAV particle comprises a viral genome comprising SEQ ID NO: 4562 and a capsid comprising SEQ ID NO: 138. In some embodiments, the AAV particle comprises a viral genome comprising SEQ ID NO: 4562 and a capsid encoded by a nucleic acid sequence comprising SEQ ID NO: 137. In some embodiments, the AAV particle comprises a viral genome comprising SEQ ID NO: 4562 and a capsid comprising SEQ ID NO: 5. In some embodiments, the AAV particle comprises a viral genome comprising SEQ ID NO: 4562 and a capsid encoded by a nucleic acid sequence comprising SEQ ID NO: 6. In some embodiments, the AAV particle comprises a viral genome comprising SEQ ID NO: 4562 and a capsid comprising SEQ ID NO: 4. In some embodiments, the AAV particle comprises a viral genome comprising SEQ ID NO: 4562 and a capsid comprising SEQ ID NO: 11. In some embodiments, the AAV particle comprises a viral genome comprising SEQ ID NO: 4562 and a capsid comprising SEQ ID NO: 2679. In some embodiments, the AAV particle comprises a viral genome comprising SEQ ID NO: 4562 and a capsid comprising SEQ ID NO: 2809. In some embodiments, the AAV particle comprises a viral genome comprising SEQ ID NO: 4562 and a capsid comprising SEQ ID NO: 2871.

### II. Formulation and Delivery

### Pharmaceutical Compositions

[0514] According to the present disclosure the AAV particles may be prepared as pharmaceutical compositions. It will be understood that such compositions necessarily comprise one or more active ingredients and, most often, a pharmaceutically acceptable excipient.

[0515] Relative amounts of the active ingredient (e.g. AAV particle), a pharmaceutically acceptable excipient, and/or any additional ingredients in a pharmaceutical composition in accordance with the present disclosure may vary, depending upon the identity, size, and/or condition of the subject being treated and further depending upon the route by which the composition is to be administered. For example, the composition may comprise between 0.1% and 99% (w/w) of the active ingredient. By way of example, the composition may comprise between 0.1% and 100%, e.g., between 0.5 and 50%, between 1-30%, between 5-80%, at least 80% (w/w) active ingredient.

[0516] In some embodiments, the AAV particle pharmaceutical compositions described herein may comprise at least one payload. As a non-limiting example, the pharmaceutical compositions may contain an AAV particle with 1, 2, 3, 4 or 5 payloads. In some embodiments, the pharmaceutical composition may contain a nucleic acid encoding a payload construct encoding proteins selected from antibodies and/or antibody-based compositions.

[0517] Although the descriptions of pharmaceutical compositions provided herein are principally directed to pharmaceutical compositions which are suitable for administration to humans, it will be understood by the skilled artisan that such compositions are generally suitable for administration to any other animal, e.g., to non-human animals, e.g. non-human mammals. Modification of pharmaceutical compositions suitable for administration to humans in order to render the compositions suitable for administration to various animals is well understood, and the ordinarily skilled veterinary pharmacologist can design and/or perform such modification with merely ordinary, if any, experimentation. Subjects to which administration of the pharmaceutical compositions is contemplated include, but are not limited to, humans and/or other primates; mammals, including commercially relevant mammals such as cattle, pigs, horses, sheep, cats, dogs, mice, rats, birds, including commercially relevant birds such as poultry, chickens, ducks, geese, and/or turkeys.

[0518] In some embodiments, compositions are administered to humans, human patients, or subjects.

### Formulations

[0519] The AAV particles can be formulated using one or more excipients to: (1) increase stability; (2) increase cell transfection or transduction; (3) permit the sustained or delayed expression of the payload; (4) alter the biodistribution (e.g., target the viral particle to specific tissues or cell types); (5) increase the translation of encoded protein; (6) alter the release profile of encoded protein; and/or (7) allow for regulatable expression of the payload.

[0520] Formulations of the present disclosure can include, without limitation, saline, liposomes, lipid nanoparticles, polymers, peptides, proteins, cells transfected with viral vectors (e.g., for transfer or transplantation into a subject) and combinations thereof.

[0521] Formulations of the pharmaceutical compositions described herein may be prepared by any method known or hereafter developed in the art of pharmacology. As used herein the term “pharmaceutical composition” refers to compositions comprising at least one active ingredient and optionally one or more pharmaceutically acceptable excipients.

[0522] In general, such preparatory methods include the step of associating the active ingredient with an excipient and/or one or more other accessory ingredients. As used herein, the phrase “active ingredient” generally refers either to an AAV particle carrying a payload region encoding the polypeptides or to the antibody or antibody-based composition encoded by a viral genome of by an AAV particle as described herein.

[0523] A pharmaceutical composition in accordance with the present disclosure may be prepared, packaged, and/or sold in bulk, as a single unit dose, and/or as a plurality of single unit doses. As used herein, a “unit dose” refers to a discrete amount of the pharmaceutical composition comprising a predetermined amount of the active ingredient. The amount of the active ingredient is generally equal to the dosage of the active ingredient which would be administered to a subject and/or a convenient fraction of such a dosage such as, for example, one-half or one-third of such a dosage.

[0524] In some embodiments, the AAV particles may be formulated in phosphate buffered saline (PBS), in combination with an ethylene oxide/propylene oxide copolymer (also known as Pluronic or poloxamer).

[0525] In some embodiments, the AAV particles may be formulated in PBS with 0.001% Pluronic acid (F-68) (poloxamer 188) at a pH of about 7.0.

[0526] In some embodiments, the AAV particles may be formulated in PBS with 0.001% Pluronic acid (F-68) (poloxamer 188) at a pH of about 7.3.

[0527] In some embodiments, the AAV particles may be formulated in PBS with 0.001% Pluronic acid (F-68) (poloxamer 188) at a pH of about 7.4.

[0528] In some embodiments, the AAV particles may be formulated in a solution comprising sodium chloride, sodium phosphate and an ethylene oxide/propylene oxide copolymer.

[0529] In some embodiments, the AAV particles may be formulated in a solution comprising sodium chloride, sodium phosphate dibasic, sodium phosphate monobasic and poloxamer 188/Pluronic acid (F-68).

[0530] In some embodiments, the AAV particles may be formulated in a solution comprising 10 mM disodium phosphate, 2 mM monopotassium phosphate, 2.7 mM potassium chloride, 192 mM sodium chloride and 0.001% Pluronic Acid (F-68).

[0531] In some embodiments, the AAV particles may be formulated in a solution comprising about 180 mM sodium chloride, about 10 mM sodium phosphate and about 0.001% poloxamer 188. In some embodiments, this formulation may be at a pH of about 7.3. The concentration of sodium chloride in the final solution may be 150 mM-200 mM. As non-limiting examples, the concentration of sodium chloride in the final solution may be 150 mM, 160 mM, 170 mM, 180 mM, 190 mM or 200 mM. The concentration of sodium phosphate in the final solution may be 1 mM-50 mM. As non-limiting examples, the concentration of sodium phosphate in the final solution may be 1 mM, 2 mM, 3 mM, 4 mM, 5 mM, 6 mM, 7 mM, 8 mM, 9 mM, 10 mM, 15 mM, 20 mM, 25 mM, 30 mM, 40 mM, or 50 mM. The concentration of poloxamer 188 (Pluronic acid (F-68)) may be 0.0001%-1%. As non-limiting examples, the concentration of poloxamer 188 (Pluronic acid (F-68)) may be 0.0001%, 0.0005%, 0.001%, 0.005%, 0.01%, 0.05%, 0.1%, 0.5%, or 1%. The final solution may have a pH of 6.8-7.7. Non-limiting examples for the pH of the final solution include a pH of 6.8, 6.9, 7.0, 7.1, 7.2, 7.3, 7.4, 7.5, 7.6, or 7.7.

[0532] In some embodiments, the AAV particles of the disclosure may be formulated in a solution comprising about 1.05% sodium chloride, about 0.212% sodium phosphate dibasic, heptahydrate, about 0.025% sodium phosphate monobasic, monohydrate, and 0.001% poloxamer 188, at a pH of about 7.4. As a non-limiting example, the concentration of AAV particle in this formulated solution may be about 0.001%. The concentration of sodium chloride in the final solution may be 0.1-2.0%, with non-limiting examples of 0.1%, 0.25%, 0.5%, 0.75%, 0.95%, 0.96%, 0.97%, 0.98%, 0.99%, 1.00%, 1.01%, 1.02%, 1.03%, 1.04%, 1.05%, 1.06%, 1.07%, 1.08%, 1.09%, 1.10%, 1.25%, 1.5%, 1.75%, or 2%. The concentration of sodium phosphate dibasic in the final solution may be 0.100-0.300% with non-limiting examples including 0.100%, 0.125%, 0.150%, 0.175%, 0.200%, 0.210%, 0.211%, 0.212%, 0.213%, 0.214%, 0.215%, 0.225%, 0.250%, 0.275%, 0.300%. The concentration of sodium phosphate monobasic in the final solution may be 0.010-0.050%, with non-limiting examples of 0.010%, 0.015%, 0.020%, 0.021%, 0.022%, 0.023%, 0.024%, 0.025%, 0.026%, 0.027%, 0.028%, 0.029%, 0.030%, 0.035%, 0.040%, 0.045%, or 0.050%. The concentration of poloxamer 188 (Pluronic acid (F-68)) may be 0.0001%-1%. As non-limiting examples, the concentration of poloxamer 188 (Pluronic acid (F-68)) may be 0.0001%, 0.0005%, 0.001%, 0.005%, 0.01%, 0.05%, 0.1%, 0.5%, or 1%. The final solution may have a pH of 6.8-7.7. Non-limiting examples for the pH of the final solution include a pH of 6.8, 6.9, 7.0, 7.1, 7.2, 7.3, 7.4, 7.5, 7.6, or 7.7.

[0533] Relative amounts of the active ingredient (e.g. AAV particle), the pharmaceutically acceptable excipient, and/or any additional ingredients in a pharmaceutical composition in accordance with the present disclosure may vary, depending upon the identity, size, and/or condition of the subject being treated and further depending upon the route by which the composition is to be administered. For example, the composition may comprise between 0.1% and 99% (w/w) of the active ingredient. By way of example, the composition may comprise between 0.1% and 100%, e.g., between 0.5 and 50%, between 1-30%, between 5-80%, or at least 80% (w/w) active ingredient.

[0534] In some embodiments, the AAV formulations described herein may contain sufficient AAV particles for expression of at least one expressed functional antibody or antibody-based composition. As a non-limiting example, the AAV particles may contain viral genomes encoding 1, 2, 3, 4, or 5 functional antibodies.

[0535] According to the present disclosure AAV particles may be formulated for CNS delivery. Agents that cross the brain blood barrier may be used. For example, some cell penetrating peptides that can target molecules to the brain blood barrier endothelium may be used for formulation (e.g., Mathupala, Expert Opin Ther Pat., 2009, 19, 137-140; the content of which is incorporated herein by reference in its entirety).

### Excipients and Diluents

[0536] In some embodiments, a pharmaceutically acceptable excipient may be at least 95%, at least 96%, at least 97%, at least 98%, at least 99%, or 100% pure. In some embodiments, an excipient is approved for use for humans and for veterinary use. In some embodiments, an excipient may be approved by United States Food and Drug Administration. In some embodiments, an excipient may be of pharmaceutical grade. In some embodiments, an excipient may meet the standards of the United States Pharmacopoeia (USP), the European Pharmacopoeia (EP), the British Pharmacopoeia, and/or the International Pharmacopoeia.

[0537] Excipients, as used herein, include, but are not limited to, any and all solvents, dispersion media, diluents, or other liquid vehicles, dispersion or suspension aids, surface active agents, isotonic agents, thickening or emulsifying agents, preservatives, and the like, as suited to the particular dosage form desired. Various excipients for formulating pharmaceutical compositions and techniques for preparing the composition are known in the art (see Remington: The Science and Practice of Pharmacy, 21st Edition, A. R. Gennaro, Lippincott, Williams & Wilkins, Baltimore, M D, 2006; incorporated herein by reference in its entirety). The use of a conventional excipient medium may be contemplated within the scope of the present disclosure, except insofar as any conventional excipient medium may be incompatible with a substance or its derivatives, such as by producing any undesirable biological effect or otherwise interacting in a deleterious manner with any other component(s) of the pharmaceutical composition.

[0538] Exemplary diluents include, but are not limited to, calcium carbonate, sodium carbonate, calcium phosphate, dicalcium phosphate, calcium sulfate, calcium hydrogen phosphate, sodium phosphate lactose, sucrose, cellulose, microcrystalline cellulose, kaolin, mannitol, sorbitol, inositol, sodium chloride, dry starch, cornstarch, powdered sugar, etc., and/or combinations thereof.

### Inactive Ingredients

[0539] In some embodiments, AAV particle formulations may comprise at least one inactive ingredient. As used herein, the term “inactive ingredient” refers to one or more agents that do not contribute to the activity of the active ingredient of the pharmaceutical composition included in formulations. In some embodiments, all, none or some of the inactive ingredients which may be used in the formulations of the present disclosure may be approved by the US Food and Drug Administration (FDA).

[0540] Pharmaceutical composition formulations of AAV particles disclosed herein may include cations or anions. In some embodiments, the formulations include metal cations such as, but not limited to, Zn2+, Ca2+, Cu2+, Mn2+, Mg+ and combinations thereof. As a non-limiting example, formulations may include polymers and complexes with a metal cation (See e.g., U.S. Pat. Nos. 6,265,389 and 6,555,525, each of which is herein incorporated by reference in its entirety).

### III. Administration and Dosing

### Administration

[0541] The AAV particles of the present disclosure may be administered by any delivery route which results in a therapeutically effective outcome. These include, but are not limited to, enteral (into the intestine), gastroenteral, epidural (into the dura mater), oral (by way of the mouth), transdermal, intracerebral (into the cerebrum), intracerebroventricular (into the cerebral ventricles), epicutaneous (application onto the skin), intradermal (into the skin itself), subcutaneous (under the skin), nasal administration (through the nose), intravenous (into a vein), intravenous bolus, intravenous drip, intra-arterial (into an artery), intramuscular (into a muscle), intracardiac (into the heart), intraosseous infusion (into the bone marrow), intrathecal (into the spinal canal), intraparenchymal (into brain tissue), intraperitoneal (infusion or injection into the peritoneum), intravesical infusion, intravitreal (through the eye), intracavernous injection (into a pathologic cavity) intracavitary (into the base of the penis), intravaginal administration, intrauterine, extra-amniotic administration, transdermal (diffusion through the intact skin for systemic distribution), transmucosal (diffusion through a mucous membrane), transvaginal, insufflation (snorting), sublingual, sublabial, enema, eye drops (onto the conjunctiva), ear drops, auricular (in or by way of the ear), buccal (directed toward the cheek), conjunctival, cutaneous, dental (to a tooth or teeth), electro-osmosis, endocervical, endosinusial, endotracheal, extracorporeal, hemodialysis, infiltration, interstitial, intra-abdominal, intra-amniotic, intra-articular, intrabiliary, intrabronchial, intrabursal, intracartilaginous (within a cartilage), intracaudal (within the cauda equine), intracisternal (within the cisterna magna cerebellomedularis), intracorneal (within the cornea), dental intracoronal, intracoronary (within the coronary arteries), intracorporus cavernosum (within the dilatable spaces of the corporus cavernosa of the penis), intradiscal (within a disc), intraductal (within a duct of a gland), intraduodenal (within the duodenum), intradural (within or beneath the dura), intraepidermal (to the epidermis), intraesophageal (to the esophagus), intragastric (within the stomach), intragingival (within the gingivae), intraileal (within the distal portion of the small intestine), intralesional (within or introduced directly to a localized lesion), intraluminal (within a lumen of a tube), intralymphatic (within the lymph), intramedullary (within the marrow cavity of a bone), intrameningeal (within the meninges), intramyocardial (within the myocardium), intraocular (within the eye), intraovarian (within the ovary), intrapericardial (within the pericardium), intrapleural (within the pleura), intraprostatic (within the prostate gland), intrapulmonary (within the lungs or its bronchi), intrasinal (within the nasal or periorbital sinuses), intraspinal (within the vertebral column), intrasynovial (within the synovial cavity of a joint), intratendinous (within a tendon), intratesticular (within the testicle), intrathecal (within the cerebrospinal fluid at any level of the cerebrospinal axis), intrathoracic (within the thorax), intratubular (within the tubules of an organ), intratumor (within a tumor), intratympanic (within the aurus media), intravascular (within a vessel or vessels), intraventricular (within a ventricle), iontophoresis (by means of electric current where ions of soluble salts migrate into the tissues of the body), irrigation (to bathe or flush open wounds or body cavities), laryngeal (directly upon the larynx), nasogastric (through the nose and into the stomach), occlusive dressing technique (topical route administration which is then covered by a dressing which occludes the area), ophthalmic (to the external eye), oropharyngeal (directly to the mouth and pharynx), parenteral, percutaneous, periarticular, peridural, perineural, periodontal, rectal, respiratory (within the respiratory tract by inhaling orally or nasally for local or systemic effect), retrobulbar (behind the pons or behind the eyeball), soft tissue, subarachnoid, subconjunctival, submucosal, topical, transplacental (through or across the placenta), transtracheal (through the wall of the trachea), transtympanic (across or through the tympanic cavity), ureteral (to the ureter), urethral (to the urethra), vaginal, caudal block, diagnostic, nerve block, biliary perfusion, cardiac perfusion, photopheresis, and spinal. In some embodiments, an AAV particle comprising a viral genome encoding an antibody, e.g., an antibody fragment, described herein is administered intravenously, intracerebrally, intrathecally, intracerebroventricularly, intramuscularly, via intraparenchymal administration, via focused ultrasound (FUS), e.g., coupled with the intravenous administration of microbubbles (FUS-MB), or MRI-guided FUS coupled with intravenous administration, or via intra-cisterna magna injection (ICM).

[0542] In some embodiments, compositions may be administered in a way which allows them to cross the blood-brain barrier, vascular barrier, or other epithelial barrier. The AAV particles of the present disclosure may be administered in any suitable form, either as a liquid solution or suspension, as a solid form suitable for liquid solution or suspension in a liquid solution. The AAV particles may be formulated with any appropriate and pharmaceutically acceptable excipient.

[0543] In some embodiments, the AAV particles of the present disclosure may be delivered to a subject via a single route administration.

[0544] In some embodiments, the AAV particles of the present disclosure may be delivered to a subject via a multi-site route of administration. A subject may be administered at 2, 3, 4, 5, or more than 5 sites.

[0545] In some embodiments, a subject may be administered the AAV particles of the present disclosure using a bolus infusion.

[0546] In some embodiments, a subject may be administered the AAV particles of the present disclosure using sustained delivery over a period of minutes, hours, or days. The infusion rate may be changed depending on the subject, distribution, formulation or another delivery parameter.

[0547] In some embodiments, the AAV particles may be delivered by more than one route of administration. As non-limiting examples of combination administrations, AAV particles may be delivered by intrathecal and intracerebroventricular, or by intravenous and intraparenchymal administration.

### Intravenous Administration

[0548] In some embodiments, the AAV particles may be administered to a subject by systemic administration.

[0549] In some embodiments, the systemic administration is intravenous administration.

[0550] In another embodiment, the systemic administration is intraarterial administration.

[0551] In some embodiments, the AAV particles of the present disclosure may be administered to a subject by intravenous administration.

[0552] In some embodiments, the intravenous administration may be achieved by subcutaneous delivery.

[0553] In some embodiments, the intravenous administration may be achieved by a tail vein injection (e.g., in a mouse model).

[0554] In some embodiments, the intravenous administration may be achieved by retro-orbital injection.

### Administration to the CNS

[0555] In some embodiments, the AAV particles may be delivered by direct injection into the brain. As a non-limiting example, the brain delivery may be by intrahippocampal administration.

[0556] In some embodiments, the AAV particles of the present disclosure may be administered to a subject by intraparenchymal administration. In some embodiments, the intraparenchymal administration is to tissue of the central nervous system.

[0557] In some embodiments, the AAV particles of the present disclosure may be administered to a subject by intracranial delivery (See, e.g., U.S. Pat. No. 8,119,611; the content of which is incorporated herein by reference in its entirety).

[0558] In some embodiments, the AAV particles may be delivered by injection into the CSF pathway. Non-limiting examples of delivery to the CSF pathway include intrathecal and intracerebroventricular administration.

[0559] In some embodiments, the AAV particles may be delivered to the brain by systemic delivery. As a non-limiting example, the systemic delivery may be by intravascular administration. As a non-limiting example, the systemic or intravascular administration may be intravenous.

[0560] In some embodiments, the AAV particles of the present disclosure may be delivered by intraocular delivery route. A non-limiting example of intraocular administration include an intravitreal injection.

### Intramuscular Administration

[0561] In some embodiments, the AAV particles may be delivered by intramuscular administration. Whilst not wishing to be bound by theory, the multi-nucleated nature of muscle cells provides an advantage to gene transduction subsequent to AAV delivery. Cells of the muscle are capable of expressing recombinant proteins with the appropriate post-translational modifications. The enrichment of muscle tissue with vascular structures allows for transfer to the blood stream and whole-body delivery. Examples of intramuscular administration include systemic (e.g., intravenous), subcutaneous or directly into the muscle. In some embodiments, more than one injection is administered.

[0562] In some embodiments, the AAV particles of the present disclosure may be delivered by intramuscular delivery route. (See, e.g., U.S. Pat. No. 6,506,379; the content of which is incorporated herein by reference in its entirety). Non-limiting examples of intramuscular administration include an intravenous injection or a subcutaneous injection.

[0563] In some embodiments, the AAV particles of the present disclosure are administered to a subject and transduce muscle of a subject. As a non-limiting example, the AAV particles are administered by intramuscular administration.

[0564] In some embodiments, the AAV particles of the present disclosure may be administered to a subject by subcutaneous administration.

[0565] In some embodiments, the intramuscular administration is via systemic delivery.

[0566] In some embodiments, the intramuscular administration is via intravenous delivery.

[0567] In some embodiments, the intramuscular administration is via direct injection to the muscle.

[0568] In some embodiments, the muscle is transduced by administration, and this is referred to as intramuscular administration.

[0569] In some embodiments, the intramuscular delivery comprises administration at one site.

[0570] In some embodiments, the intramuscular delivery comprises administration at more than one site. In some embodiments, the intramuscular delivery comprises administration at two sites. In some embodiments, the intramuscular delivery comprises administration at three sites. In some embodiments, the intramuscular delivery comprises administration at four sites. In some embodiments, the intramuscular delivery comprises administration at more than four sites.

[0571] In some embodiments, intramuscular delivery is combined with at least one other method of administration.

[0572] In some embodiments, the AAV particles that may be administered to a subject by peripheral injections. Non-limiting examples of peripheral injections include intraperitoneal, intramuscular, intravenous, conjunctival, or joint injection. It was disclosed in the art that the peripheral administration of AAV vectors can be transported to the central nervous system, for example, to the motor neurons (e.g., U.S. Patent Publication Nos. US20100240739 and US20100130594; the content of each of which is incorporated herein by reference in their entirety).

[0573] In some embodiments, the AAV particles of the present disclosure may be administered to a subject by intraparenchymal administration. In some embodiments, the intraparenchymal administration is to muscle tissue.

[0574] In some embodiments, the AAV particles of the present disclosure are delivered as described in Bright et al 2015 (Neurobiol Aging. 36(2):693-709), the contents of which are herein incorporated by reference in their entirety.

[0575] In some embodiments, the AAV particles of the present disclosure are administered to the gastrocnemius muscle of a subject.

[0576] In some embodiments, the AAV particles of the present disclosure are administered to the bicep femorii of the subject.

[0577] In some embodiments, the AAV particles of the present disclosure are administered to the tibialis anterior muscles.

[0578] In some embodiments, the AAV particles of the present disclosure are administered to the soleus muscle.

### Depot Administration

[0579] As described herein, in some embodiments, pharmaceutical compositions, AAV particles of the present disclosure are formulated in depots for extended release. Generally, specific organs or tissues (“target tissues”) are targeted for administration.

[0580] In some aspects, pharmaceutical compositions, AAV particles of the present disclosure are spatially retained within or proximal to target tissues. Provided are methods of providing pharmaceutical compositions, AAV particles, to target tissues of mammalian subjects by contacting target tissues (which comprise one or more target cells) with pharmaceutical compositions, AAV particles, under conditions such that they are substantially retained in target tissues, meaning that at least 10, 20, 30, 40, 50, 60, 70, 80, 85, 90, 95, 96, 97, 98, 99, 99.9, 99.99 or greater than 99.99% of the composition is retained in the target tissues. Advantageously, retention is determined by measuring the amount of pharmaceutical compositions, AAV particles, that enter one or more target cells. For example, at least 1%, 5%, 10%, 20%, 30%, 40%, 50%, 60%, 70%, 80%, 85%, 90%, 95%, 96%, 97%, 98%, 99%, 99.9%, 99.99%, or greater than 99.99% of pharmaceutical compositions, AAV particles, administered to subjects are present intracellularly at a period of time following administration. For example, intramuscular injection to mammalian subjects may be performed using aqueous compositions comprising pharmaceutical compositions, AAV particles of the present disclosure and one or more transfection reagents, and retention is determined by measuring the amount of pharmaceutical compositions, AAV particles, present in muscle cells.

[0581] Certain aspects are directed to methods of providing pharmaceutical compositions, AAV particles of the present disclosure to a target tissues of mammalian subjects, by contacting target tissues (comprising one or more target cells) with pharmaceutical compositions, AAV particles under conditions such that they are substantially retained in such target tissues. Pharmaceutical compositions, AAV particles comprise enough active ingredient such that the effect of interest is produced in at least one target cell. In some embodiments, pharmaceutical compositions, AAV particles generally comprise one or more cell penetration agents, although “naked” formulations (such as without cell penetration agents or other agents) are also contemplated, with or without pharmaceutically acceptable carriers.

### Delivery

[0582] In some embodiments, the AAV particles or pharmaceutical compositions of the present disclosure may be administered or delivered using the methods for treatment of disease described in U.S. Pat. No. 8,999,948, or International Publication No. WO2014178863, the contents of which are herein incorporated by reference in their entirety.

[0583] In some embodiments, the AAV particles or pharmaceutical compositions of the present disclosure may be administered or delivered using the methods for delivering gene therapy in Alzheimer's Disease or other neurodegenerative conditions as described in US Application No. 20150126590, the contents of which are herein incorporated by reference in their entirety.

[0584] In some embodiments, the AAV particles or pharmaceutical compositions of the present disclosure may be administered or delivered using the methods for delivery of a CNS gene therapy as described in U.S. Pat. Nos. 6,436,708, and 8,946,152, and International Publication No. WO2015168666, the contents of which are herein incorporated by reference in their entirety.

[0585] In some embodiments, the AAV particle or pharmaceutical compositions of the present disclosure may be administered or delivered using the methods for delivering proteins using AAV vectors described in European Patent Application No. EP2678433, the contents of which are herein incorporated by reference in their entirety.

[0586] In some embodiments, the AAV particle or pharmaceutical compositions of the present disclosure may be administered or delivered using the methods for delivering DNA to the bloodstream described in U.S. Pat. No. 6,211,163, the contents of which are herein incorporated by reference in their entirety.

[0587] In some embodiments, the AAV particle or pharmaceutical compositions of the present disclosure may be administered or delivered using the methods for delivering a payload to the central nervous system described in U.S. Pat. No. 7,588,757, the contents of which are herein incorporated by reference in their entirety.

[0588] In some embodiments, the AAV particle or pharmaceutical compositions of the present disclosure may be administered or delivered using the methods for delivering a payload described in U.S. Pat. No. 8,283,151, the contents of which are herein incorporated by reference in their entirety.

[0589] In some embodiments, the AAV particle or pharmaceutical compositions of the present disclosure may be administered or delivered using the methods for delivering a payload using a glutamic acid decarboxylase (GAD) delivery vector described in International Patent Publication No. WO2001089583, the contents of which are herein incorporated by reference in their entirety.

[0590] In some embodiments, the AAV particle or pharmaceutical compositions of the present disclosure may be administered or delivered using the methods for delivering a payload to neural cells described in International Patent Publication No. WO2012057363, the contents of which are herein incorporated by reference in their entirety.

### Delivery to Cells

[0591] The present disclosure provides a method of delivering to a cell or tissue any of the above-described AAV particles, comprising contacting the cell or tissue with said AAV particle or contacting the cell or tissue with a formulation comprising said AAV particle, or contacting the cell or tissue with any of the described compositions, including pharmaceutical compositions. The method of delivering the AAV particle to a cell or tissue can be accomplished in vitro, ex vivo, or in vivo.

### Delivery to Subjects

[0592] The present disclosure additionally provides a method of delivering to a subject, including a mammalian subject, any of the above-described AAV particles comprising administering to the subject said AAV particle, or administering to the subject a formulation comprising said AAV particle, or administering to the subject any of the described compositions, including pharmaceutical compositions.

### Dose and Regimen

[0593] The present disclosure provides methods of administering AAV particles in accordance with the disclosure to a subject in need thereof. The pharmaceutical, diagnostic, or prophylactic AAV particles and compositions of the present disclosure may be administered to a subject using any amount and any route of administration effective for preventing, treating, managing, or diagnosing diseases, disorders and/or conditions. The exact amount required will vary from subject to subject, depending on the species, age, and general condition of the subject, the severity of the disease, the particular composition, its mode of administration, its mode of activity, and the like. The subject may be a human, a mammal, or an animal. Compositions in accordance with the disclosure are typically formulated in unit dosage form for ease of administration and uniformity of dosage. It will be understood, however, that the total daily usage of the compositions of the present disclosure may be decided by the attending physician within the scope of sound medical judgment. The specific therapeutically effective, prophylactically effective, or appropriate diagnostic dose level for any particular individual will depend upon a variety of factors including the disorder being treated and the severity of the disorder; the activity of the specific payload employed; the specific composition employed; the age, body weight, general health, sex and diet of the patient; the time of administration, route of administration, and rate of excretion of the specific AAV particle employed; the duration of the treatment; drugs used in combination or coincidental with the specific AAV particle employed; and like factors well known in the medical arts.

[0594] In certain embodiments, AAV particle pharmaceutical compositions in accordance with the present disclosure may be administered at dosage levels sufficient to deliver from about 0.0001 mg/kg to about 100 mg/kg, from about 0.001 mg/kg to about 0.05 mg/kg, from about 0.005 mg/kg to about 0.05 mg/kg, from about 0.001 mg/kg to about 0.005 mg/kg, from about 0.05 mg/kg to about 0.5 mg/kg, from about 0.01 mg/kg to about 50 mg/kg, from about 0.1 mg/kg to about 40 mg/kg, from about 0.5 mg/kg to about 30 mg/kg, from about 0.01 mg/kg to about 10 mg/kg, from about 0.1 mg/kg to about 10 mg/kg, or from about 1 mg/kg to about 25 mg/kg, of subject body weight per day, one or more times a day, to obtain the desired therapeutic, diagnostic, or prophylactic, effect. It will be understood that the above dosing concentrations may be converted to vg or viral genomes per kg or into total viral genomes administered by one of skill in the art.

[0595] In certain embodiments, AAV particle pharmaceutical compositions in accordance with the present disclosure may be administered at about 10 to about 600 μl/site, 50 to about 500 μl/site, 100 to about 400 μl/site, 120 to about 300 μl/site, 140 to about 200 μl/site, about 160 μl/site. As non-limiting examples, AAV particles may be administered at 50 μl/site and/or 150 μl/site.

[0596] In certain embodiments, the desired dosage may be delivered using multiple administrations (e.g., two, three, four, or more than four administrations). When multiple administrations are employed, split dosing regimens such as those described herein may be used. As used herein, a “split dose” is the division of “single unit dose” or total daily dose into two or more doses, e.g., two or more administrations of the “single unit dose”. As used herein, a “single unit dose” is a dose of any therapeutic administered in one dose/at one time/single route/single point of contact, i.e., single administration event.

[0597] The desired dosage of the AAV particles of the present disclosure may be administered as a “pulse dose” or as a “continuous flow”. As used herein, a “pulse dose” is a series of single unit doses of any therapeutic administered with a set frequency over a period of time. As used herein, a “continuous flow” is a dose of therapeutic administered continuously for a period of time in a single route/single point of contact, i.e., continuous administration event. A total daily dose, an amount given or prescribed in 24-hour period, may be administered by any of these methods, or as a combination of these methods, or by any other methods suitable for a pharmaceutical administration.

[0598] In some embodiments, delivery of the AAV particles of the present disclosure to a subject provides neutralizing activity to a subject. The neutralizing activity can be for at least 1 month, 2 months, 3 months, 4 months, 5 months, 6 months, 7 months, 8 months, 9 months, 10 months, 11 months, 1 year, 13 months, 14 months, 15 months, 16 months, 17 months, 18 months, 19 months, 20 months, 20 months, 21 months, 22 months, 23 months, 2 years, 3 years, 4 years, 5 years, 6 years, 7 years, 8 years, 9 years, 10 years or more than 10 years.

[0599] In some embodiments, delivery of the AAV particles of the present disclosure results in minimal serious adverse events (SAEs) as a result of the delivery of the AAV particles.

[0600] In some embodiments, delivery of AAV particles may comprise a total dose between about 1×10⁶ VG and about 1×10¹⁶ VG. In some embodiments, delivery may comprise a total dose of about 1×10⁶, 2×10⁶, 3×10⁶, 4×10⁶, 5×10⁶, 6×10⁶, 7×10⁶, 8×10⁶, 9×10⁶, 1×10⁷, 2×10⁷, 3×10⁷, 4×10⁷, 5×10⁷, 6×10⁷, 7×10⁷, 8×10⁷, 9×10⁷, 1×10⁸, 2×10⁸, 3×10⁸, 4×10⁸, 5×10⁸, 6×10⁸, 7×10⁸, 8×10⁸, 9×10⁸, 1×10⁹, 2×10⁹, 3×10⁹, 4×10⁹, 5×10⁹, 6×10⁹, 7×10⁹, 8×10⁹, 9×10⁹, 1×10¹⁰, 1.9×10¹⁰, 2×10¹⁰, 3×10¹⁰, 3.73×10¹⁰, 4×10¹⁰, 5×10¹⁰, 6×10¹⁰, 7×10¹⁰, 8×10¹⁰, 9×10¹⁰, 1×10¹¹, 2×10¹¹, 2.5×10¹¹, 3×10¹¹, 4×10¹¹, 5×10¹¹, 6×10¹¹, 7×10¹¹, 8×10¹¹, 9×10¹¹, 1×10¹², 2×10¹², 3×10¹², 4×10¹², 5×10¹², 6×10¹², 7×10¹², 8×10¹², 9×10¹², 1×10¹³, 2×10¹³, 3×10, 4×10¹³, 5×10¹³, 6×10¹³, 7×10¹³, 8×10¹³, 9×10¹³, 1×10¹⁴, 2×10¹⁴, 3×10¹⁴, 4×10¹⁴, 5×10¹⁴, 6×10¹⁴, 7×10¹⁴, 8×10¹⁴, 9×10¹⁴, 1×10¹⁵, 2×10¹⁵, 3×10¹⁵, 4×10¹⁵, 5×10¹⁵, 6×10¹⁵, 7×10¹⁵, 8×10¹⁵, 9×10¹⁵, or 1×10¹⁶ VG. As a non-limiting example, the total dose is 1×10¹³ VG. As another non-limiting example, the total dose is 2.1×10¹² VG.

[0601] In some embodiments, delivery of AAV particles may comprise a composition concentration between about 1×10⁶ VG/mL and about 1×10¹⁶ VG/mL. In some embodiments, delivery may comprise a composition concentration of about 1×10⁶, 2×10⁶, 3×10⁶, 4×10⁶, 5×10⁶, 6×10⁶, 7×10⁶, 8×10⁶, 9×10⁶, 1×10⁷, 2×10⁷, 3×10⁷, 4×10⁷, 5×10⁷, 6×10⁷, 7×10⁷, 8×10⁷, 9×10⁷, 1×10⁸, 2×10⁸, 3×10⁸, 4×10⁸, 5×10⁸, 6×10⁸, 7×10⁸, 8×10⁸, 9×10⁸, 1×10⁹, 2×10⁹, 3×10⁹, 4×10⁹, 5×10⁹, 6×10⁹, 7×10⁹, 8×10⁹, 9×10⁹, 1×10¹⁰, 2×10¹⁰, 3×10¹⁰, 4×10¹⁰, 5×10¹⁰, 6×10¹⁰, 7×10¹⁰, 8×10¹⁰, 9×10¹⁰, 1×10¹¹, 2×10¹¹, 3×10¹¹, 4×10¹¹, 5×10¹¹, 6×10¹¹, 7×10¹¹, 8×10¹¹, 9×10¹¹, 1×10¹², 2×10¹², 3×10¹², 4×10¹², 5×10¹², 6×10¹², 7×10¹², 8×10¹², 9×10¹², 1×10¹³, 2×10¹³, 3×10¹³, 4×10¹³, 5×10¹³, 6×10¹³, 7×10¹³, 8×10¹³, 9×10¹³, 1×10¹⁴, 2×10¹⁴, 3×10¹⁴, 4×10¹⁴, 5×10¹⁴, 6×10¹⁴, 7×10¹⁴, 8×10¹⁴, 9×10¹⁴, 1×10¹⁵, 2×10¹⁵, 3×10¹⁵, 4×10¹⁵, 5×10¹⁵, 6×10¹⁵, 7×10¹⁵, 8×10¹⁵, 9×10¹⁵, or 1×10¹⁶ VG/mL. In some embodiments, the delivery comprises a composition concentration of 1×10¹³ VG/mL. In some embodiments, the delivery comprises a composition concentration of 2.1×10¹² VG/mL.

### Combinations

[0602] The AAV particles may be used in combination with one or more other therapeutic, prophylactic, research or diagnostic agents. By “in combination with,” it is not intended to imply that the agents must be administered at the same time and/or formulated for delivery together, although these methods of delivery are within the scope of the present disclosure. Compositions can be administered concurrently with, prior to, or subsequent to, one or more other desired therapeutics or medical procedures. In general, each agent will be administered at a dose and/or on a time schedule determined for that agent. In some embodiments, the present disclosure encompasses the delivery of pharmaceutical, prophylactic, research, or diagnostic compositions in combination with agents that may improve their bioavailability, reduce and/or modify their metabolism, inhibit their excretion, and/or modify their distribution within the body.

### Measurement of Expression

[0603] Expression of payloads from viral genomes may be determined using various methods known in the art such as, but not limited to immunochemistry (e.g., IHC), in situ hybridization (ISH), enzyme-linked immunosorbent assay (ELISA), affinity ELISA, ELISPOT, flow cytometry, immunocytology, immunohistochemistry, surface plasmon resonance analysis, kinetic exclusion assay, liquid chromatography-mass spectrometry (LCMS), high-performance liquid chromatography (HPLC), BCA assay, immunoelectrophoresis, Western blot, SDS-PAGE, protein immunoprecipitation, and/or PCR.

[0604] In some embodiments, the ELISA assays used are those described in Liu et al 2016, the contents of which are herein incorporated by reference in their entirety (Liu, W et al., 2016 J Neurosci 36(49):12425-12435).

### IV. Methods and Uses of the Compositions

[0605] The present disclosure provides a method for treating a disease, disorder and/or condition in a mammalian subject, including a human subject, comprising administering to the subject any of the AAV particles described herein or administering to the subject any of the described compositions, including pharmaceutical compositions, described herein.

[0606] In some embodiments, the AAV particles of the present disclosure are administered to a subject prophylactically.

[0607] In some embodiments, the AAV particles of the present disclosure are administered to a subject having at least one of the diseases described herein.

[0608] In some embodiments, the AAV particles of the present disclosure are administered to a subject to treat a disease or disorder described herein. The subject may have the disease or disorder or may be at-risk to developing the disease or disorder.

[0609] In some embodiments, the AAV particles of the present disclosure are part of an active immunization strategy to protect against diseases and disorders. In an active immunization strategy, a vaccine or AAV particles are administered to a subject to prevent an infectious disease by activating the subject's production of antibodies that can fight off invading bacteria or viruses.

[0610] In some embodiments, the AAV particles of the present disclosure are part of a passive immunization strategy. In a passive immunization strategy, antibodies against a particular infectious agent are given directly to the subject.

[0611] In some embodiments, the AAV particles of the present disclosure may be used for passive immunotherapy of tauopathy, (e.g. Alzheimer Disease or Frontotemporal Dementia), as described in Liu et al, the contents of which are herein incorporated by reference in their entirety (Liu, W et al., 2016 J Neurosci 36(49):12425-12435). As a non-limiting example, the AAV particles of the present disclosure may encode a PHF1 antibody. Heavy and light chains of the PHF1 antibody may be linked by a Tav2A and/or Furin 2A linker sequence. Antibody expression may be under the control of a CAG promoter. The AAV particle may comprise, as a non-limiting example, an AAVrh.10 serotype capsid. Further, these PHF1 encoding AAV particles may be administered by bilateral intraparenchymal delivery directly to the hippocampus. Such treatment with AAV-PHF1 may result in a 50-fold increase in antibody levels in the hippocampus as compared to antibody levels subsequent to systemic administration. Neuropathological tau species in the hippocampus may be reduced as much as 80-90% and hippocampal atrophy may be fully rescued after treatment with AAV particles of the present disclosure.

[0612] In some embodiments, the AAV particles of the present disclosure may be used to treat tauopathy as described in Ising et al, the contents of which are herein incorporated by reference in their entirety (Ising, C et al., 2017 J Exp Med April 17, Epub ahead of print). As a non-limiting example, the AAV particles of the present disclosure may encode an HJ8.5, HJ8.7, or Tau5 antibody or a single chain variable fragment (scFv) derived therefrom. Heavy and light chains of the HJ8.5 antibody or scFv may be linked by variable length linker sequences and may be flexible glycine and/or serine linkers. The AAV particle may comprise, as a non-limiting example, an AAV2/8 serotype. Further, these HJ8.5, HJ8.7 or Tau5 encoding AAV particles may be administered by bilateral intracerebroventricular delivery. Such treatment with HJ8.5, HJ8.7 or Tau5 encoding AAV particles may result in a significant reduction in neuropathological tau species in the hippocampus.

[0613] Passive immunization by intravenous (or intraperitoneal in mice) delivery of antibody has been shown to result in substantial serum levels of antibody (Chai et al., 2011, J Biol Chem., 286, 34457-34467, the contents of which are herein incorporated by reference in their entirety) and reduced tau pathology in mouse models of tauopathy (e.g., P301L or P301S mice). However, these reductions in tau pathology are considered modest (e.g., about 34%) and require high and repeated dosing to achieve. Passive immunization strategies are thought to be limited in their ability to deliver large quantity of antibody to the brain, which may limit efficacy, and are also challenged in addressing intracellular aggregates. In some embodiments, delivery of an AAV particle comprising a viral genome encoding an anti-tau antibody can be used to overcome the limitations seen with passive immunization strategies.

[0614] In some embodiments, the administration of AAV particles of the present disclosure may result in substantially higher antibody levels in the target tissue (e.g., CNS) of the subject than if anti-tau antibodies were administered by passive immunization. In some embodiments, AAV mediated delivery can result in 1.5-16 fold higher antibody levels in the brain than if delivered by passive immunization. Whilst not wishing to be bound by theory, passive immunization is thought to generate 20-40 ng of antibody per mg of protein in the brain of the subject. In some embodiments, AAV-mediated delivery results in antibody levels 2-5× above the levels seen with passive immunization. In some embodiments, AAV-mediated delivery results in antibody levels 1.5-3× above the levels seen with passive immunization. In some embodiments, AAV-mediated delivery results in antibody levels 5-10× above the levels seen with passive immunization. In some embodiments, AAV-mediated delivery results in antibody levels 8-16× above the levels seen with passive immunization.

[0615] In some embodiments, AAV mediated delivery of anti-tau antibody may be used to reduce tau seeding, prevent tau seeding and/or prevent the propagation of tau seeds in a subject. Tau may exist in both a monomeric form and in different aggregated forms. As used herein, the term “tau aggregate” refers to a molecular complex that comprises two or more tau monomers. A tau aggregate may include a nearly unlimited number of monomers bound together. For example, a tau aggregate may comprise 2, 3, 4, 5, 6, 7, 8, 9, 10 or more tau monomers. Alternatively, a tau aggregate may include 20, 30, 40, 50, 60, 70, 80, 90, 100 or more tau monomers. A tau aggregate may also include 500, 1000, 1500, 2000, 2500, 3000, 3500, 4000, 4500, 5000 or more tau monomers. The terms “fibrillar tau aggregate” and “tau fibril” may refer to forms of tau aggregates, and these terms are used interchangeably herein. A fibrillar tau aggregate is a polymeric, ordered fiber comprising tau. Tau fibrils are generally not soluble, but shorter assemblies, or oligomers, can be soluble. Tau aggregate also refers to soluble tau oligomers and protofibrils, which may act as intermediates during tau aggregation. Also included in the definition of tau aggregate is the term “tau seed”, which refers to a tau aggregate that is capable of nucleating or “seeding” intracellular tau aggregation when internalized by a cell, or when exposed to monomeric tau in vitro.

[0616] Tau seeding activity may be assessed in vitro in cellular tau models or in vivo in mouse models. Tau seeds for efficacy studies may be variant Tau fibrils such as, but not limited to, htau40, P301S, P301L, and K18. Tau seeds may also be prepared from brain lysates of subjects with Alzheimer's disease and/or with a P301S mutation. Tau seeds may also include enriched PHFs (ePHF) or immuno purified PHF (iPHF).

[0617] In vivo, the accumulation of intracellular tau amyloids defines tauopathies. In early disease stages, the disease pathology is generally localized to discrete regions of the brain, but with disease progression, pathology invariably spreads along distinct neural networks. Accumulating evidence suggests transcellular propagation of tau seeds underlies this pathology. In this model, tau are released from donor cells and enter neighboring cells, transforming native tau protein into the misfolded form via templated conformational change. AAV particles or pharmaceutical formulations containing the AAV particles of the disclosure may be administered to a subject in order to prevent, delay or reduce the progression of tau seeds through neural networks.

[0618] In some embodiments, antibodies may be generated and/or screened using methods such as but not limited to, hybridoma technology, recombinant antibody productions, reverse translation for antibody generation, as described in Example 1 of copending commonly owned U.S. Ser. No. 62,839/891, filed on Apr. 29, 2019, the contents of which are incorporated herein by reference in their entirety.

[0619] In some embodiments, codon-optimization methods utilized in antibody preparation may include any of the methods described in Example 1 of copending commonly owned U.S. Ser. No. 62,839/891, filed on Apr. 29, 2019, the contents of which are incorporated herein by reference in their entirety.

[0620] In some embodiments, the present disclosure provides methods for engineering viral genomes for the expression of anti-tau antibodies such as, but not limited to IPN002, C10.2, PT3, MC1 including codon optimized variants and promoter and configuration variants of the same, as described in Example 2 of copending commonly owned U.S. Ser. No. 62,839/891, filed on Apr. 29, 2019, the contents of which are incorporated herein by reference in their entirety.

[0621] In some embodiments, the present disclosure provides methods for production and purification of AAV particles as described in Example 3 of copending commonly owned U.S. Ser. No. 62,839/891, filed on Apr. 29, 2019, the contents of which are incorporated herein by reference in their entirety.

[0622] In some embodiments, any of the assays including ELISA assay developed to determine the affinity of anti-tau antibodies to ePHF tau may be useful in the present disclosure, including assays described in Example 4 of copending commonly owned US Ser. No. 62,839/891, filed on Apr. 29, 2019, the contents of which are incorporated herein by reference in their entirety.

[0623] In some embodiments, antibodies described herein may be detected using ELISA assay as described in Example 5 of copending commonly owned U.S. Ser. No. 62,839/891, filed on Apr. 29, 2019, the contents of which are incorporated herein by reference in their entirety.

[0624] In some embodiments, antibodies described herein may be detected using western blotting as described in Example 6 of copending commonly owned US Ser. No. 62,839/891, filed on Apr. 29, 2019, the contents of which are incorporated herein by reference in their entirety.

[0625] In some embodiments, the present disclosure may include any of the methods for purification of anti-tau antibody constructs e.g. MC1, or PT3 described in Example 7 of copending commonly owned U.S. Ser. No. 62,839/891, filed on Apr. 29, 2019, the contents of which are incorporated herein by reference in their entirety.

[0626] In some embodiments, viral genomes may be optimized for antibody expression as described in Example 8 of copending commonly owned U.S. Ser. No. 62,839/891, filed on Apr. 29, 2019, the contents of which are incorporated herein by reference in their entirety.

[0627] In some embodiments, optimization may involve promoter selection, incorporation of linkers, cleavage sites and/or optimizing the configuration of the viral genome for expression as described in Example 8 of copending commonly owned U.S. Ser. No. 62,839/891, filed on Apr. 29, 2019, the contents of which are incorporated herein by reference in their entirety.

[0628] In some embodiments, rAAV production of anti-tau antibodies using HEK293T cells may be performed as described in Example 9 of copending commonly owned US Ser. No. 62,839/891, filed on Apr. 29, 2019, the contents of which are incorporated herein by reference in their entirety.

[0629] In some embodiments, viral genomes may be constructed for the expression of antibody fragments as described in Example 10 of copending commonly owned US Ser. No. 62,839/891, filed on Apr. 29, 2019, the contents of which are incorporated herein by reference in their entirety.

[0630] In some embodiments, AAV particles comprising viral genomes encoding anti-tau antibodies are modified for enhanced transduction to muscular tissue as described in Example 13 of copending commonly owned U.S. Ser. No. 62,839/891, filed on Apr. 29, 2019, the contents of which are incorporated herein by reference in their entirety.

[0631] In some embodiments, doses suitable for intramuscular dosing of anti-tau antibody AAV particles may be identified as described in Example 14 of copending commonly owned U.S. Ser. No. 62,839/891, filed on Apr. 29, 2019, the contents of which are incorporated herein by reference in their entirety.

[0632] In some embodiments, methods of treatment of Tau-Associated Disease using AAV particles of the disclosure are described in Example 16 of copending commonly owned US Ser. No. 62,839/891, filed on Apr. 29, 2019, the contents of which are incorporated herein by reference in their entirety.

[0633] In some embodiments, vectorized PT3 and IPN002 antibodies or fragments thereof may be expressed in primary hippocampal neurons as described in Example 18 of copending commonly owned U.S. Ser. No. 63,002/011, filed on Mar. 30, 2020, the contents of which are incorporated herein by reference in their entirety.

[0634] In some embodiments, viral genomes comprising a T2A cleavage site may contribute to greater antibody expression than when an F2A cleavage site is used as described in Example 18 of copending commonly owned U.S. Ser. No. 63,002/011, filed on Mar. 30, 2020, the contents of which are incorporated herein by reference in their entirety.

[0635] In some embodiments, the expression and distribution of scFv based anti-tau antibody constructs are tested and optimized as described in Example 19 of copending commonly owned U.S. Ser. No. 63,002/011, filed on Mar. 30, 2020, the contents of which are incorporated herein by reference in their entirety.

[0636] In some embodiments, the effects of promoters and viral genome configurations on brain distribution, cellular tropism and expression levels of anti-tau antibody PT3, after intravenous delivery, viral genomes may be undertaken as described in Example 20 of copending commonly owned U.S. Ser. No. 63,002/011, filed on Mar. 30, 2020, the contents of which are incorporated herein by reference in their entirety.

[0637] In some embodiments, the biodistribution, tissue tropism and expression patterns of anti-tau antibody IPN002 or PT3 fragments (Fab vs (Fab′)2) driven by CAG promoter in serum, CSF and/or CNS tissue of mice after intravenous delivery of AAV particles, viral genomes are analyzed as described in Example 21 of copending commonly owned US Ser. No. 63,002/011, filed on Mar. 30, 2020, the contents of which are incorporated herein by reference in their entirety.

### Diagnostic Applications

[0638] The AAV particles of the present disclosure may be used for diagnostic purposes or as diagnostic tools for any disease or disorder. As non-limiting examples, the AAV particles of the present disclosure or the antibodies encoded within the viral genome therein may be used as a biomarker for disease diagnosis. As a second non-limiting example, the AAV particles of the present disclosure or the antibodies encoded within the viral genome therein may be used for diagnostic imaging purposes, e.g., MRI, PET, CT or ultrasound.

### Preventative Applications

[0639] The AAV particles of the present disclosure or the antibodies encoded by the viral genome therein may be used to prevent disease or stabilize the progression of disease. In some embodiments, the AAV particles of the present disclosure are used to as a prophylactic to prevent a disease or disorder in the future. In some embodiments, the AAV particles of the present disclosure are used to halt further progression of a disease or disorder. As a non-limiting example, the AAV particles may be used in a manner similar to that of a vaccine.

### Research Applications

[0640] The AAV particles of the present disclosure or the antibodies encoded by the viral genome therein may also be used as research tools. The AAV particles may be used as in any research experiment, e.g., in vivo or in vitro experiments. In a non-limiting example, the AAV particles may be used in cultured cells. The cultured cells may be derived from any origin known to one with skill in the art, and may be as non-limiting examples, derived from a stable cell line, an animal model or a human patient or control subject. In a non-limiting example, the AAV particles may be used in in vivo experiments in animal models (i.e., mouse, rat, rabbit, dog, cat, non-human primate, guinea pig, ferret, C-elegans, Drosophila, zebrafish, or any other animal used for research purposes, known in the art). In another non-limiting example, the AAV particles may be used in human research experiments or human clinical trials.

### Combination Applications

[0641] The AAV particles may be used as a combination therapy with any other therapeutic molecule known in the art. The therapeutic molecule may be approved by the US Food and Drug Administration or may be in clinical trial or at the preclinical research stage. The therapeutic molecule may utilize any therapeutic modality known in the art, with non-limiting examples including gene silencing or interference (i.e., miRNA, siRNA, RNAi, shRNA), gene editing (i.e., TALEN, CRISPR/Cas9 systems, zinc finger nucleases), and gene, protein or enzyme replacement.

### Therapeutic Applications

[0642] The present disclosure additionally provides a method for treating neurological diseases and/or disorders in a mammalian subject, including a human subject, comprising administering to the subject any of the AAV particles. In some cases, neurological diseases and/or disorders treated according to methods described herein include indications involving irregular expression or aggregation of tau. Such indications may include, but are not limited to Alzheimer's disease (AD), frontotemporal dementia and parkinsonism linked to chromosome 17 (FTDP-17), Frontotemporal lobar degeneration (FTLD), Frontotemporal dementia (FTD), chronic traumatic encephalopathy (CTE), Progressive Supranuclear Palsy (PSP), Down's syndrome, Pick's disease, Corticobasal degeneration (CBD), Corticobasal syndrome, Amyotrophic lateral sclerosis (ALS), Prion diseases, Creutzfeldt-Jakob disease (CJD), Multiple system atrophy, Tangle-only dementia, and Progressive subcortical gliosis.

[0643] In some embodiments, methods of treating neurological diseases and/or disorders in a subject in need thereof may comprise the steps of: (1) deriving, generating and/or selecting an anti-tau antibody, antibody-based composition or fragment thereof; (2) producing an AAV particle with a viral genome that includes a payload region encoding the selected antibody of (1); and (3) administering the AAV particle (or pharmaceutical composition thereof) to the subject.

[0644] The present disclosure provides a method for administering to a subject in need thereof, including a human subject, a therapeutically effective amount of the AAV particles to slow, stop or reverse disease progression. As a non-limiting example, disease progression may be measured by cognitive tests such as, but not limited to, the Mini-Mental State Exam (MMSE) or other similar diagnostic tool(s), known to those skilled in the art. As another non-limiting example, disease progression may be measured by change in the pathological features of the brain, CSF or other tissues of the subject, such as, but not limited to a decrease in levels of tau (either soluble or insoluble). In some embodiments, the levels of insoluble hyperphosphorylated tau are decreased. In some embodiments levels of soluble tau are decreased. In some embodiments both soluble and insoluble tau are decreased. In some embodiments, levels of insoluble hyperphosphorylated tau are increased. In some embodiments levels of soluble tau are increased. In some embodiments both insoluble and soluble tau levels are increased. In some embodiments, neurofibrillary tangles are decreased in size, number, density, or combination thereof. In another embodiment, neurofibrillary tangles are increased in size, number, density or combination thereof.

### Alzheimer's Disease

[0645] Alzheimer Disease (AD) is a debilitating neurodegenerative disease currently afflicting more than 35 million people worldwide, with that number expected to double in coming decades. Symptomatic treatments have been available for many years but these treatments do not address the underlying pathophysiology. Recent clinical trials using these and other treatments have largely failed and, to date, no known cure has been identified.

[0646] The AD brain is characterized by the presence of two forms of pathological aggregates, the extracellular plaques composed of β-amyloid (Aβ) and the intracellular neurofibrillary tangles (NFT) comprised of hyperphosphorylated microtubule associated protein tau. Based on early genetic findings, β-amyloid alterations were thought to initiate disease, with changes in tau considered downstream. Thus, most clinical trials have been Aβ-centric. Although no mutations of the tau gene have been linked to AD, such alterations have been shown to result in a family of dementias known as tauopathies, demonstrating that changes in tau can contribute to neurodegenerative processes. Tau is normally a very soluble protein known to associate with microtubules based on the extent of its phosphorylation. Hyperphosphorylation of tau depresses its binding to microtubules and microtubule assembly activity. In tauopathies, the tau becomes hyperphosphorylated, misfolds and aggregates as NFT of paired helical filaments (PHF), twisted ribbons or straight filaments. In AD, NFT pathology, rather than plaque pathology, correlates more closely with neuropathological markers such as neuronal loss, synaptic deficits, severity of disease and cognitive decline. NFT pathology marches through the brain in a stereotyped manner and animal studies suggest a trans-cellular propagation mechanism along neuronal connections.

[0647] Several approaches have been proposed for therapeutically interfering with progression of tau pathology and preventing the subsequent molecular and cellular consequences. Given that NFT are composed of a hyperphosphorylated, misfolded and aggregated form of tau, interference at each of these stages has yielded the most avidly pursued set of targets. Introducing agents that limit phosphorylation, block misfolding or prevent aggregation have all generated promising results. Passive and active immunization with late stage anti-phospho-tau antibodies in mouse models has led to dramatic decreases in tau aggregation and improvements in cognitive parameters. It has also been suggested that introduction of anti-tau antibodies can prevent the trans-neuronal spread of tau pathology.

[0648] The vectored antibody delivery (VAD) of tau disease associated antibodies of the present disclosure may be used to treat subjects suffering from AD and other tauopathies. In some cases, methods of the present disclosure may be used to treat subjects suspected of developing AD or other tauopathies.

### Frontotemporal Dementia and Parkinsonism Linked to Chromosome 17 (FTDP-17)

[0649] Although Alzheimer's disease is, in part, characterized by the presence of tau pathology, no known mutations in the tau gene have been causally linked to the disease. Mutations in the tau gene have been shown to lead to an autosomal dominantly inherited tauopathy known as frontotemporal dementia and parkinsonism linked to chromosome 17 (FTDP-17) and demonstrate that alterations in tau can lead to neurodegenerative changes in the brain. Mutations in the tau gene that lead to FTDP-17 are thought to influence splicing patterns, thereby leading to an elevated proportion of tau with four microtubule binding domains (rather than three). These molecules are considered to be more amyloidogenic, meaning they are more likely to become hyperphosphorylated and more likely to aggregate into NFT (Hutton, M. et al., 1998, Nature 393(6686):702-5). Although physically and behaviorally, FTDP-17 patients can appear quite similar to Alzheimer's disease patients, at autopsy FTDP-17 brains lack the prominent Aβ plaque pathology of an AD brain (Gotz, J. et al., 2012, British Journal of Pharmacology 165(5):1246-59). Therapeutically targeting the aggregates of tau protein may ameliorate and prevent degenerative changes in the brain and potentially lead to improved cognitive ability.

[0650] As of today, there is no treatment to prevent, slow the progression, or cure FTDP-17. Medication may be prescribed to reduce aggressive, agitated or dangerous behavior. There remains a need for therapy affecting the underlying pathophysiology, such as antibody therapies targeting tau protein.

[0651] In some embodiments, the vectored antibody delivery of the present disclosure may be used to treat subjects suffering from FTDP-17. In some cases, methods of the present disclosure may be used to treat subjects suspected of developing FTDP-17.

### Chronic Traumatic Encephalopathy

[0652] Unlike the genetically linked tauopathies, chronic traumatic encephalopathy is a degenerative tauopathy linked to repeated head injuries. The disease was first described in boxers who behaved “punch drunk” and has since been identified primarily in athletes that play American football, ice hockey, wrestling and other contact sports. The brains of those suffering from CTE are characterized by distinctive patterns of brain atrophy accompanied by accumulation of hyperphosphorylated species of aggregated tau in NFT. In CTE, pathological changes in tau are accompanied by a number of other pathobiological processes, such as inflammation (Daneshvar, D. H. et al., 2015 Mol Cell Neurosci 66(Pt B): 81-90). Targeting the tau aggregates may provide reprieve from the progression of the disease and may allow cognitive improvement.

[0653] As of today, there is no medical therapy to treat or cure CTE. The condition is only diagnosed after death, due to lack of in vivo techniques to identify CTE specific biomarkers. There remains a need for therapy affecting the underlying pathophysiology, such as antibody therapies targeting tau protein.

[0654] In some embodiments, the vectored antibody delivery methods of the present disclosure may be used to treat subjects suffering from CTE. In some cases, methods of the present disclosure may be used to treat subjects suspected of developing CTE.

### Prion Diseases

[0655] Prion diseases, also known as transmissible spongiform encephalopathies (TSEs), are a group of rare progressive conditions affecting the nervous system. The related conditions are rare and are typically caused by mutations in the PRNP gene which enables production of the prion protein. Gene mutations lead to an abnormally structured prion protein. Alternatively, the abnormal prion may be acquired by exposure from an outside source, e.g. by consumption of beef products containing the abnormal prion protein. Abnormal prions are misfolded, causing the brain tissue to degenerate rapidly. Prion diseases include, but are not limited to, Creutzfeldt-Jakob disease (CJD), Gerstmann-Straussler-Scheinker syndrome (GSS), fatal insomnia (FFI), variably protease-sensitive prionopathy (VPSPr), and kuru. Prion diseases are rare. Approximately 350 cases of prion diseases are diagnosed in the US annually.

[0656] CJD is a degenerative brain disorder characterized by problems with muscular coordination, personality changes including mental impairment, impaired vision, involuntary muscle jerks, weakness and eventually coma. The most common categories of CJD are sporadic, hereditary due to a genetic mutation, and acquired. Sporadic CJD is the most common form affecting people with no known risk factors for the disease. The acquired form of CJD is transmitted by exposure of the brain and nervous system tissue to the prion. As an example, variant CJD (vCDJ) is linked to a bovine spongiform encephalopathy (BSE), also known as a ‘mad cow’ disease. CJD is fatal and patients typically die within one year of diagnosis.

[0657] Prion diseases are associated with an infectious agent consisting of an alternative conformational isoform of the prion protein, PrPSc. PrPSc replication is considered to occur through an induction of the infectious prion in the normal prion protein (PrPC). The replication occurs without a nucleic acid.

[0658] As of today, there is no therapy to manage or cure CJD, or other prion diseases. Typically, treatment is aimed at alleviating symptoms and increasing comfortability of the patient, e.g. with pain relievers. There remains a need for therapy affecting the underlying pathophysiology, such as antibody therapies targeting the prion protein.

[0659] In some embodiments, vectored antibody delivery methods of the present disclosure may be used to treat subjects suffering from a prion disease. In some cases, methods of the present disclosure may be used to treat subjects suspected of developing a prion disease.

### Neurodegeneration and Stroke

[0660] Neurodegenerative diseases and other diseases of the nervous system share many common features. Neurodegenerative diseases, in particular, are a group of conditions characterized by progressive loss of neuronal structure and function, ultimately leading to neuronal cell death. Neurons are the building blocks of the nervous system(s) and are generally not able to reproduce and/or be replaced, and therefore neuron damage and/or death is especially devastating. Other, non-degenerating diseases that lead to neuronal cell loss, such as stroke, have similarly debilitating outcomes. Targeting molecules that contribute to the deteriorating cell structure or function may prove beneficial generally for treatment of nervous system diseases, neurodegenerative disease and/or stroke.

[0661] Certain molecules are believed to have inhibitory effects on neurite outgrowth, contributing to the limited ability of the central nervous system to repair. Such molecules include, but are not limited to, myelin associated proteins, such as, but not limited to, RGM (Repulsive guidance molecule), NOGO (Neurite outgrowth inhibitor), NOGO receptor, MAG (myelin associated glycoprotein), and MAI (myelin associated inhibitor). In some embodiments, the vectored antibody delivery of the present disclosure is utilized to target the aforementioned antigens (e.g., neurite outgrowth inhibitors).

[0662] Many neurodegenerative diseases are associated with aggregation of misfolded proteins, including, but not limited to, alpha synuclein, tau, amyloid β, prion proteins, TDP-43, and huntingtin (see, e.g. De Genst et al., 2014, Biochim Biophys Acta; 1844(11):1907-1919, and Yu et al., 2013, Neurotherapeutics.; 10(3): 459-472, references therein). The aggregation results from disease-specific conversion of soluble proteins to an insoluble, highly ordered fibrillary deposit. This conversion is thought to prevent the proper disposal or degradation of the misfolded protein, thereby leading to further aggregation. Conditions associated with alpha synuclein and tau may be referred to as “synucleinopathies” and “tauopathies”, respectively. In some embodiments, the vectored antibody delivery of the present disclosure is utilized to target the aforementioned antigens (e.g., misfolded or aggregated proteins).

[0663] AAV Particles and methods of using the AAV particles described in the present disclosure may be used to prevent, manage and/or treat tauopathies or tau associated disease. As a non-limiting example, the AAV particles of the present disclosure comprise a nucleic acid sequence encoding at least one of the sequences described in Table 3.

### V. Kits and Devices

### Kits

[0664] In some embodiments, the disclosure provides a variety of kits for conveniently and/or effectively carrying out methods of the present disclosure. Typically, kits will comprise sufficient amounts and/or numbers of components to allow a user to perform multiple treatments of a subject(s) and/or to perform multiple experiments.

[0665] Any of the AAV particles of the present disclosure may be comprised in a kit. In some embodiments, kits may further include reagents and/or instructions for creating and/or synthesizing compounds and/or compositions of the present disclosure. In some embodiments, kits may also include one or more buffers. In some embodiments, kits may include components for making protein or nucleic acid arrays or libraries and thus, may include, for example, solid supports.

[0666] In some embodiments, kit components may be packaged either in aqueous media or in lyophilized form. The container means of the kits will generally include at least one vial, test tube, flask, bottle, syringe or other container means, into which a component may be placed, and preferably, suitably aliquoted. Where there is more than one kit component, (labeling reagent and label may be packaged together), kits may also generally contain second, third or other additional containers into which additional components may be separately placed. In some embodiments, kits may also comprise second container means for containing sterile, pharmaceutically acceptable buffers and/or other diluents. In some embodiments, various combinations of components may be comprised in one or more vial. Kits of the present disclosure may also typically include means for containing compounds and/or compositions of the present disclosure, e.g., proteins, nucleic acids, and any other reagent containers in close confinement for commercial sale. Such containers may include injection or blow-molded plastic containers into which desired vials are retained.

[0667] In some embodiments, kit components are provided in one and/or more liquid solutions. In some embodiments, liquid solutions are aqueous solutions, with sterile aqueous solutions being particularly preferred. In some embodiments, kit components may be provided as dried powder(s). When reagents and/or components are provided as dry powders, such powders may be reconstituted by the addition of suitable volumes of solvent. In some embodiments, it is envisioned that solvents may also be provided in another container means. In some embodiments, labeling dyes are provided as dried powders. In some embodiments, it is contemplated that 10, 20, 30, 40, 50, 60, 70, 80, 90, 100, 120, 120, 130, 140, 150, 160, 170, 180, 190, 200, 300, 400, 500, 600, 700, 800, 900, 1000 micrograms or at least or at most those amounts of dried dye are provided in kits. In such embodiments, dye may then be resuspended in any suitable solvent, such as DMSO.

[0668] In some embodiments, kits may include instructions for employing kit components as well the use of any other reagent not included in the kit. Instructions may include variations that may be implemented.

### Devices

[0669] In some embodiments, the AAV particles may delivered to a subject using a device to deliver the AAV particles and a head fixation assembly. The head fixation assembly may be, but is not limited to, any of the head fixation assemblies sold by MRI interventions. As a non-limiting example, the head fixation assembly may be any of the assemblies described in U.S. Pat. Nos. 8,099,150, 8,548,569, and 9,031,636 and International Patent Publication Nos. WO201108495 and WO2014014585, the contents of each of which are incorporated by reference in their entireties. A head fixation assembly may be used in combination with an MRI compatible drill such as, but not limited to, the MRI compatible drills described in International Patent Publication No. WO2013181008 and US Patent Publication No. US20130325012, the contents of which are herein incorporated by reference in its entirety.

[0670] In some embodiments, the AAV particles may be delivered using a method, system and/or computer program for positioning apparatus to a target point on a subject to deliver the AAV particles. As a non-limiting example, the method, system and/or computer program may be the methods, systems and/or computer programs described in U.S. Pat. No. 8,340,743, the contents of which are herein incorporated by reference in its entirety. The method may include: determining a target point in the body and a reference point, wherein the target point and the reference point define a planned trajectory line (PTL) extending through each; determining a visualization plane, wherein the PTL intersects the visualization plane at a sighting point; mounting the guide device relative to the body to move with respect to the PTL, wherein the guide device does not intersect the visualization plane; determining a point of intersection (GPP) between the guide axis and the visualization plane; and aligning the GPP with the sighting point in the visualization plane.

[0671] In some embodiments, the AAV particles may be delivered to a subject using a convention-enhanced delivery device. Non-limiting examples of targeted delivery of drugs using convection are described in US Patent Publication Nos. US20100217228, US20130035574, and US 20130035660 and International Patent Publication No. WO2013019830 and WO2008144585, the contents of each of which are herein incorporated by reference in their entireties.

[0672] In some embodiments, a subject may be imaged prior to, during and/or after delivery of the AAV particles. The imaging method may be a method known in the art and/or described herein, such as but not limited to, magnetic resonance imaging (MRI). As a non-limiting example, imaging may be used to assess therapeutic effect. As another non-limiting example, imaging may be used for assisted delivery of AAV particles.

[0673] In some embodiments, the AAV particles may be delivered using an MRI-guided device. Non-limiting examples of MRI-guided devices are described in U.S. Pat. Nos. 9,055,884, 9,042,958, 8,886,288, 8,768,433, 8,396,532, 8,369,930, 8,374,677, and 8,175,677 and US Patent Application No. US20140024927 the contents of each of which are herein incorporated by reference in their entireties. As a non-limiting example, the MRI-guided device may be able to provide data in real time such as those described in U.S. Pat. Nos. 8,886,288 and 8,768,433, the contents of each of which is herein incorporated by reference in its entirety. As another non-limiting example, the MRI-guided device or system may be used with a targeting cannula such as the systems described in U.S. Pat. Nos. 8,175,677 and 8,374,677, the contents of each of which are herein incorporated by reference in their entireties. As yet another non-limiting example, the MRI-guided device includes a trajectory guide frame for guiding an interventional device as described, for example, in U.S. Pat. No. 9,055,884 and US Patent Application No. US20140024927, the contents of each of which are herein incorporated by reference in their entireties.

[0674] In some embodiments, the AAV particles may be delivered using an MRI-compatible tip assembly. Non-limiting examples of MRI-compatible tip assemblies are described in US Patent Publication No. US20140275980, the contents of which is herein incorporated by reference in its entirety.

[0675] In some embodiments, the AAV particles may be delivered using a cannula which is MRI-compatible. Non-limiting examples of MRI-compatible cannulas include those taught in International Patent Publication No. WO2011130107, the contents of which are herein incorporated by reference in its entirety.

[0676] In some embodiments, the AAV particles may be delivered using a catheter which is MRI-compatible. Non-limiting examples of MRI-compatible catheters include those taught in International Patent Publication No. WO2012116265, U.S. Pat. No. 8,825,133 and US Patent Publication No. US20140024909, the contents of each of which are herein incorporated by reference in their entireties.

[0677] In some embodiments, the AAV particles may be delivered using a device with an elongated tubular body and a diaphragm as described in US Patent Publication Nos. US20140276582 and US20140276614, the contents of each of which are herein incorporated by reference in their entireties.

[0678] In some embodiments, the AAV particles may be delivered using an MRI compatible localization and/or guidance system such as, but not limited to, those described in US Patent Publication Nos. US20150223905 and US20150230871, the contents of each of which are herein incorporated by reference in their entireties. As a non-limiting example, the MRI compatible localization and/or guidance systems may comprise a mount adapted for fixation to a patient, a targeting cannula with a lumen configured to attach to the mount so as to be able to controllably translate in at least three dimensions, and an elongate probe configured to snugly advance via slide and retract in the targeting cannula lumen, the elongate probe comprising at least one of a stimulation or recording electrode.

[0679] In some embodiments, the AAV particles may be delivered to a subject using a trajectory frame as described in US Patent Publication Nos. US20150031982 and US20140066750 and International Patent Publication Nos. WO2015057807 and WO2014039481, the contents of each of which are herein incorporated by reference in their entireties.

[0680] In some embodiments, the AAV particles may be delivered to a subject using a gene gun.

### VI. Definitions

[0681] At various places in the present specification, substituents of compounds of the present disclosure are disclosed in groups or in ranges. It is specifically intended that the present disclosure include each and every individual sub combination of the members of such groups and ranges.

[0682] About: As used herein, the term “about” means +/−10% of the recited value.

[0683] Adeno-associated virus: The term “adeno-associated virus” or “AAV” as used herein refers to members of the dependovirus genus comprising any particle, sequence, gene, protein, or component derived therefrom.

[0684] AAV Particle: As used herein, an “AAV particle” is a virus which comprises a viral genome with at least one payload region and at least one ITR region. AAV vectors of the present disclosure may be produced recombinantly and may be based on adeno-associated virus (AAV) parent or reference sequences. AAV particle may be derived from any serotype, described herein or known in the art, including combinations of serotypes (i.e., “pseudotyped” AAV) or from various genomes (e.g., single stranded or self-complementary). In addition, the AAV particle may be replication defective and/or targeted.

[0685] Activity: As used herein, the term “activity” refers to the condition in which things are happening or being done. Compositions may have activity and this activity may involve one or more biological events.

[0686] Administered in combination: As used herein, the term “administered in combination” or “combined administration” means that two or more agents are administered to a subject at the same time or within an interval such that there may be an overlap of an effect of each agent on the patient. In some embodiments, they are administered within about 60, 30, 15, 10, 5, or 1 minute of one another. In some embodiments, the administrations of the agents are spaced sufficiently closely together such that a combinatorial (e.g., a synergistic) effect is achieved.

[0687] Amelioration: As used herein, the term “amelioration” or “ameliorating” refers to a lessening of severity of at least one indicator of a condition or disease. For example, in the context of neurodegeneration disorder, amelioration includes the reduction of neuron loss.

[0688] Animal: As used herein, the term “animal” refers to any member of the animal kingdom. In some embodiments, “animal” refers to humans at any stage of development. In some embodiments, “animal” refers to non-human animals at any stage of development. In certain embodiments, the non-human animal is a mammal (e.g., a rodent, a mouse, a rat, a rabbit, a monkey, a dog, a cat, a sheep, cattle, a primate, or a pig). In some embodiments, animals include, but are not limited to, mammals, birds, reptiles, amphibians, fish, and worms. In some embodiments, the animal is a transgenic animal, genetically-engineered animal, or a clone.

[0689] Antibody: As used herein, the term “antibody” is referred to in the broadest sense and specifically covers various embodiments including, but not limited to monoclonal antibodies, polyclonal antibodies, multispecific antibodies (e.g. bispecific antibodies formed from at least two intact antibodies), and antibody fragments (e.g., diabodies) so long as they exhibit a desired biological activity (e.g., “functional”). Antibodies are primarily amino-acid based molecules but may also comprise one or more modifications (including, but not limited to the addition of sugar moieties, fluorescent moieties, chemical tags, etc.). Non-limiting examples of antibodies or fragments thereof include V_{H} and V_{L} domains, scFvs, Fab, Fab′, F(ab′)2, Fv fragment, diabodies, linear antibodies, single chain antibody molecules, multispecific antibodies, bispecific antibodies, intrabodies, monoclonal antibodies, polyclonal antibodies, humanized antibodies, codon-optimized antibodies, tandem scFv antibodies, bispecific T-cell engagers, mAb2 antibodies, chimeric antigen receptors (CAR), tetravalent bispecific antibodies, biosynthetic antibodies, native antibodies, miniaturized antibodies, unibodies, maxibodies, antibodies to senescent cells, antibodies to conformers, antibodies to disease specific epitopes, or antibodies to innate defense molecules.

[0690] Antibody-based composition: As used herein, “antibody-based” or “antibody-derived” compositions are monomeric or multi-meric polypeptides which comprise at least one amino-acid region derived from a known or parental antibody sequence and at least one amino acid region derived from a non-antibody sequence, e.g., mammalian protein.

[0691] Approximately: As used herein, the term “approximately” or “about,” as applied to one or more values of interest, refers to a value that is similar to a stated reference value. In certain embodiments, the term “approximately” or “about” refers to a range of values that fall within 25%, 20%, 19%, 18%, 17%, 16%, 15%, 14%, 13%, 12%, 11%, 10%, 9%, 8%, 7%, 6%, 5%, 4%, 3%, 2%, 1%, or less in either direction (greater than or less than) of the stated reference value unless otherwise stated or otherwise evident from the context (except where such number would exceed 100% of a possible value).

[0692] Associated with: As used herein, the terms “associated with,” “conjugated,” “linked,” “attached,” and “tethered,” when used with respect to two or more moieties, means that the moieties are physically associated or connected with one another, either directly or via one or more additional moieties that serves as a linking agent, to form a structure that is sufficiently stable so that the moieties remain physically associated under the conditions in which the structure is used, e.g., physiological conditions. An “association” need not be strictly through direct covalent chemical bonding. It may also suggest ionic or hydrogen bonding or a hybridization based connectivity sufficiently stable such that the “associated” entities remain physically associated.

[0693] Bifunctional: As used herein, the term “bifunctional” refers to any substance, molecule or moiety which is capable of or maintains at least two functions. The functions may affect the same outcome or a different outcome. The structure that produces the function may be the same or different.

[0694] Biocompatible: As used herein, the term “biocompatible” means compatible with living cells, tissues, organs or systems posing little to no risk of injury, toxicity or rejection by the immune system.

[0695] Biodegradable: As used herein, the term “biodegradable” means capable of being broken down into innocuous products by the action of living things.

[0696] Biologically active: As used herein, the phrase “biologically active” refers to a characteristic of any substance that has activity in a biological system and/or organism. For instance, a substance that, when administered to an organism, has a biological effect on that organism, is considered to be biologically active. In particular embodiments, an AAV particle of the present disclosure may be considered biologically active if even a portion of the encoded payload is biologically active or mimics an activity considered biologically relevant.

[0697] Capsid: As used herein, the term “capsid” refers to the protein shell of a virus particle. In some embodiments, the term capsid may refer to the nucleic acid encoding the protein shell of the virus particle.

[0698] Chimeric antigen receptor (CAR): As used herein, the term “chimeric antigen receptor” or “CAR” refers to an artificial chimeric protein comprising at least one antigen specific targeting region (ASTR), a transmembrane domain and an intracellular signaling domain, wherein the antigen specific targeting region comprises a full-length antibody or a fragment thereof. As a non-limiting example, the ASTR of a CAR may be any of the antibodies listed in Table 3, antibody-based compositions or fragments thereof. Any molecule that is capable of binding a target antigen with high affinity can be used in the ASTR of a CAR. The CAR may optionally have an extracellular spacer domain and/or a co-stimulatory domain. A CAR may also be used to generate a cytotoxic cell carrying the CAR.

[0699] Complementary and substantially complementary: As used herein, the term “complementary” refers to the ability of polynucleotides to form base pairs with one another. Base pairs are typically formed by hydrogen bonds between nucleotide units in antiparallel polynucleotide strands. Complementary polynucleotide strands can form base pair in the Watson-Crick manner (e.g., A to T, A to U, C to G), or in any other manner that allows for the formation of duplexes. As persons skilled in the art are aware, when using RNA as opposed to DNA, uracil rather than thymine is the base that is considered to be complementary to adenosine. However, when a U is denoted in the context of the present disclosure, the ability to substitute a T is implied, unless otherwise stated. Perfect complementarity or 100% complementarity refers to the situation in which each nucleotide unit of one polynucleotide strand can form hydrogen bond with a nucleotide unit of a second polynucleotide strand. Less than perfect complementarity refers to the situation in which some, but not all, nucleotide units of two strands can form hydrogen bond with each other. For example, for two 20-mers, if only two base pairs on each strand can form hydrogen bond with each other, the polynucleotide strands exhibit 10% complementarity. In the same example, if 18 base pairs on each strand can form hydrogen bonds with each other, the polynucleotide strands exhibit 90% complementarity. As used herein, the term “substantially complementary” means that the siRNA has a sequence (e.g., in the antisense strand) which is sufficient to bind the desired target mRNA, and to trigger the RNA silencing of the target mRNA.

[0700] Compound: Compounds of the present disclosure include all of the isotopes of the atoms occurring in the intermediate or final compounds. “Isotopes” refers to atoms having the same atomic number but different mass numbers resulting from a different number of neutrons in the nuclei. For example, isotopes of hydrogen include tritium and deuterium.

[0701] The compounds and salts of the present disclosure can be prepared in combination with solvent or water molecules to form solvates and hydrates by routine methods.

[0702] Comprehensive Positional Evolution (CPE™): As used herein, the term “comprehensive positional evolution” refers to an antibody evolution technology that allows for mapping of the effects of amino acid changes at every position along an antibody variable domain's sequence. This comprehensive mutagenesis technology can be used to enhance one or more antibody properties or characteristics.

[0703] Comprehensive Protein Synthesis (CPS™): As used herein, the term “comprehensive protein synthesis” refers to a combinatorial protein synthesis technology that can be used to optimize antibody properties or characteristics by combining the best properties into a new, high-performance antibody.

[0704] Conditionally active: As used herein, the term “conditionally active” refers to a mutant or variant of a wild-type polypeptide, wherein the mutant or variant is more or less active at physiological conditions than the parent polypeptide. Further, the conditionally active polypeptide may have increased or decreased activity at aberrant conditions as compared to the parent polypeptide. A conditionally active polypeptide may be reversibly or irreversibly inactivated at normal physiological conditions or aberrant conditions.

[0705] Conserved: As used herein, the term “conserved” refers to nucleotides or amino acid residues of a polynucleotide sequence or polypeptide sequence, respectively, that are those that occur unaltered in the same position of two or more sequences being compared. Nucleotides or amino acids that are relatively conserved are those that are conserved amongst more related sequences than nucleotides or amino acids appearing elsewhere in the sequences.

[0706] In some embodiments, two or more sequences are said to be “completely conserved” if they are 100% identical to one another. In some embodiments, two or more sequences are said to be “highly conserved” if they are at least 70% identical, at least 80% identical, at least 90% identical, or at least 95% identical to one another. In some embodiments, two or more sequences are said to be “highly conserved” if they are about 70% identical, about 80% identical, about 90% identical, about 95%, about 98%, or about 99% identical to one another. In some embodiments, two or more sequences are said to be “conserved” if they are at least 30% identical, at least 40% identical, at least 50% identical, at least 60% identical, at least 70% identical, at least 80% identical, at least 90% identical, or at least 95% identical to one another. In some embodiments, two or more sequences are said to be “conserved” if they are about 30% identical, about 40% identical, about 50% identical, about 60% identical, about 70% identical, about 80% identical, about 90% identical, about 95% identical, about 98% identical, or about 99% identical to one another. Conservation of sequence may apply to the entire length of a polynucleotide or polypeptide or may apply to a portion, region or feature thereof.

[0707] Control Elements: As used herein, “control elements”, “regulatory control elements”, or “regulatory sequences” refers to promoter regions, polyadenylation signals, transcription termination sequences, upstream regulatory domains, origins of replication, internal ribosome entry sites (“IRES”), enhancers, and the like, which provide for the replication, transcription and translation of a coding sequence in a recipient cell. Not all of these control elements need always be present as long as the selected coding sequence is capable of being replicated, transcribed and/or translated in an appropriate host cell.

[0708] Controlled Release: As used herein, the term “controlled release” refers to a pharmaceutical composition or compound release profile that conforms to a particular pattern of release to affect a therapeutic outcome.

[0709] Cytostatic: As used herein, “cytostatic” refers to inhibiting, reducing, suppressing the growth, division, or multiplication of a cell (e.g., a mammalian cell (e.g., a human cell)), bacterium, virus, fungus, protozoan, parasite, prion, or a combination thereof.

[0710] Cytotoxic: As used herein, “cytotoxic” refers to killing or causing injurious, toxic, or deadly effect on a cell (e.g., a mammalian cell (e.g., a human cell)), bacterium, virus, fungus, protozoan, parasite, prion, or a combination thereof.

[0711] Delivery: As used herein, “delivery” refers to the act or manner of delivering an AAV particle, a compound, substance, entity, moiety, cargo or payload.

[0712] Delivery Agent: As used herein, “delivery agent” refers to any substance which facilitates, at least in part, the in vivo delivery of an AAV particle to targeted cells.

[0713] Destabilized: As used herein, the term “destable”, “destabilize”, or “destabilizing region” means a region or molecule that is less stable than a starting, wild-type or native form of the same region or molecule.

[0714] Detectable label: As used herein, “detectable label” refers to one or more markers, signals, or moieties which are attached, incorporated or associated with another entity that is readily detected by methods known in the art including radiography, fluorescence, chemiluminescence, enzymatic activity, absorbance and the like. Detectable labels include radioisotopes, fluorophores, chromophores, enzymes, dyes, metal ions, ligands such as biotin, avidin, streptavidin and haptens, quantum dots, and the like. Detectable labels may be located at any position in the peptides or proteins disclosed herein. They may be within the amino acids, the peptides, or proteins, or located at the N- or C-termini.

[0715] Digest: As used herein, the term “digest” means to break apart into smaller pieces or components. When referring to polypeptides or proteins, digestion results in the production of peptides.

[0716] Distal: As used herein, the term “distal” means situated away from the center or away from a point or region of interest.

[0717] Dosing regimen: As used herein, a “dosing regimen” is a schedule of administration or physician determined regimen of treatment, prophylaxis, or palliative care.

[0718] Encapsulate: As used herein, the term “encapsulate” means to enclose, surround or encase.

[0719] Engineered: As used herein, embodiments are “engineered” when they are designed to have a feature or property, whether structural or chemical, that varies from a starting point, wild type or native molecule.

[0720] Effective Amount: As used herein, the term “effective amount” of an agent is that amount sufficient to effect beneficial or desired results, for example, clinical results, and, as such, an “effective amount” depends upon the context in which it is being applied. For example, in the context of administering an agent that treats cancer, an effective amount of an agent is, for example, an amount sufficient to achieve treatment, as defined herein, of cancer, as compared to the response obtained without administration of the agent.

[0721] Epitope: As used herein, an “epitope” refers to a surface or region on a molecule that is capable of interacting with a biomolecule. For example, a protein may contain one or more amino acids, e.g., an epitope, which interacts with an antibody, e.g., a biomolecule. In some embodiments, when referring to a protein or protein module, an epitope may comprise a linear stretch of amino acids or a three-dimensional structure formed by folded amino acid chains.

[0722] EvoMap™: As used herein, an EvoMap™ refers to a map of a polypeptide, wherein detailed informatics are presented about the effects of single amino acid mutations within the length of the polypeptide and their influence on the properties and characteristics of that polypeptide.

[0723] Expression: As used herein, “expression” of a nucleic acid sequence refers to one or more of the following events: (1) production of an RNA template from a DNA sequence (e.g., by transcription); (2) processing of an RNA transcript (e.g., by splicing, editing, 5′ cap formation, and/or 3′ end processing); (3) translation of an RNA into a polypeptide or protein; and (4) post-translational modification of a polypeptide or protein.

[0724] Feature: As used herein, a “feature” refers to a characteristic, a property, or a distinctive element.

[0725] Formulation: As used herein, a “formulation” includes at least one AAV particle and a delivery agent.

[0726] Fragment: A “fragment,” as used herein, refers to a portion. For example, fragments of proteins may comprise polypeptides obtained by digesting full-length protein isolated from cultured cells.

[0727] Functional: As used herein, a “functional” biological molecule is a biological molecule in a form in which it exhibits a property and/or activity by which it is characterized.

[0728] Gene expression: The term “gene expression” refers to the process by which a nucleic acid sequence undergoes successful transcription and in most instances translation to produce a protein or peptide. For clarity, when reference is made to measurement of “gene expression”, this should be understood to mean that measurements may be of the nucleic acid product of transcription, e.g., RNA or mRNA or of the amino acid product of translation, e.g., polypeptides or peptides. Methods of measuring the amount or levels of RNA, mRNA, polypeptides and peptides are well known in the art.

[0729] Homology: As used herein, the term “homology” refers to the overall relatedness between polymeric molecules, e.g. between polynucleotide molecules (e.g. DNA molecules and/or RNA molecules) and/or between polypeptide molecules. In some embodiments, polymeric molecules are considered to be “homologous” to one another if their sequences are at least 25%, 30%, 35%, 40%, 45%, 50%, 55%, 60%, 65%, 70%, 75%, 80%, 85%, 90%, 95%, or 99% identical or similar. The term “homologous” necessarily refers to a comparison between at least two sequences (polynucleotide or polypeptide sequences). In accordance with the disclosure, two polynucleotide sequences are considered to be homologous if the polypeptides they encode are at least about 50%, 60%, 70%, 80%, 90%, 95%, or even 99% for at least one stretch of at least about 20 amino acids. In some embodiments, homologous polynucleotide sequences are characterized by the ability to encode a stretch of at least 4-5 uniquely specified amino acids. For polynucleotide sequences less than 60 nucleotides in length, homology is determined by the ability to encode a stretch of at least 4-5 uniquely specified amino acids. In accordance with the disclosure, two protein sequences are considered to be homologous if the proteins are at least about 50%, 60%, 70%, 80%, or 90% identical for at least one stretch of at least about 20 amino acids.

[0730] Heterologous Region: As used herein the term “heterologous region” refers to a region which would not be considered a homologous region.

[0731] Homologous Region: As used herein the term “homologous region” refers to a region which is similar in position, structure, evolution origin, character, form or function.

[0732] Identity: As used herein, the term “identity” refers to the overall relatedness between polymeric molecules, e.g., between polynucleotide molecules (e.g. DNA molecules and/or RNA molecules) and/or between polypeptide molecules. Calculation of the percent identity of two polynucleotide sequences, for example, can be performed by aligning the two sequences for optimal comparison purposes (e.g., gaps can be introduced in one or both of a first and a second nucleic acid sequences for optimal alignment and non-identical sequences can be disregarded for comparison purposes). In certain embodiments, the length of a sequence aligned for comparison purposes is at least 30%, at least 40%, at least 50%, at least 60%, at least 70%, at least 80%, at least 90%, at least 95%, or 100% of the length of the reference sequence. The nucleotides at corresponding nucleotide positions are then compared. When a position in the first sequence is occupied by the same nucleotide as the corresponding position in the second sequence, then the molecules are identical at that position. The percent identity between the two sequences is a function of the number of identical positions shared by the sequences, taking into account the number of gaps, and the length of each gap, which needs to be introduced for optimal alignment of the two sequences. The comparison of sequences and determination of percent identity between two sequences can be accomplished using a mathematical algorithm. For example, the percent identity between two nucleotide sequences can be determined using methods such as those described in Computational Molecular Biology, Lesk, A. M., ed., Oxford University Press, New York, 1988; Biocomputing: Informatics and Genome Projects, Smith, D. W., ed., Academic Press, New York, 1993; Sequence Analysis in Molecular Biology, von Heinje, G., Academic Press, 1987; Computer Analysis of Sequence Data, Part I, Griffin, A. M., and Griffin, H. G., eds., Humana Press, New Jersey, 1994; and Sequence Analysis Primer, Gribskov, M. and Devereux, J., eds., M Stockton Press, New York, 1991; each of which is incorporated herein by reference. For example, the percent identity between two nucleotide sequences can be determined using the algorithm of Meyers and Miller (CABIOS, 1989, 4:11-17), which has been incorporated into the ALIGN program (version 2.0) using a PAM120 weight residue table, a gap length penalty of 12 and a gap penalty of 4. The percent identity between two nucleotide sequences can, alternatively, be determined using the GAP program in the GCG software package using an NWSgapdna.CMP matrix. Methods commonly employed to determine percent identity between sequences include, but are not limited to those disclosed in Carillo, H. and Lipman, D., SIAM J Applied Math., 48:1073 (1988); incorporated herein by reference. Techniques for determining identity are codified in publicly available computer programs. Exemplary computer software to determine homology between two sequences include, but are not limited to, GCG program package, Devereux, J., et al., Nucleic Acids Research, 12(1), 387 (1984)), BLASTP, BLASTN, and FASTA Altschul, S. F. et al., J. Molec. Biol., 215, 403 (1990)).

[0733] Inhibit expression of a gene: As used herein, the phrase “inhibit expression of a gene” means to cause a reduction in the amount of an expression product of the gene. The expression product can be an RNA transcribed from the gene (e.g., an mRNA) or a polypeptide translated from an mRNA transcribed from the gene. Typically, a reduction in the level of an mRNA results in a reduction in the level of a polypeptide translated therefrom. The level of expression may be determined using standard techniques for measuring mRNA or protein.

[0734] In vitro: As used herein, the term “in vitro” refers to events that occur in an artificial environment, e.g., in a test tube or reaction vessel, in cell culture, in a Petri dish, etc., rather than within an organism (e.g., animal, plant, or microbe).

[0735] In vivo: As used herein, the term “in vivo” refers to events that occur within an organism (e.g., animal, plant, or microbe or cell or tissue thereof).

[0736] Isolated: As used herein, the term “isolated” refers to a substance or entity that has been separated from at least some of the components with which it was associated (whether in nature or in an experimental setting). Isolated substances may have varying levels of purity in reference to the substances from which they have been associated. Isolated substances and/or entities may be separated from at least about 10%, about 20%, about 30%, about 40%, about 50%, about 60%, about 70%, about 80%, about 90%, or more of the other components with which they were initially associated. In some embodiments, isolated agents are more than about 80%, about 85%, about 90%, about 91%, about 92%, about 93%, about 94%, about 95%, about 96%, about 97%, about 98%, about 99%, or more than about 99% pure. As used herein, a substance is “pure” if it is substantially free of other components.

[0737] Substantially isolated: By “substantially isolated” is meant that a substance is substantially separated from the environment in which it was formed or detected. Partial separation can include, for example, a composition enriched in the substance or AAV particles of the present disclosure. Substantial separation can include compositions containing at least about 50%, at least about 60%, at least about 70%, at least about 80%, at least about 90%, at least about 95%, at least about 97%, or at least about 99% by weight of the compound of the present disclosure, or salt thereof. Methods for isolating compounds and their salts are routine in the art.

[0738] Linker: As used herein “linker” refers to a molecule or group of molecules which connects two molecules, such as a V_{H} chain and V_{L} chain or an antibody. A linker may be a nucleic acid sequence connecting two nucleic acid sequences encoding two different polypeptides. The linker may or may not be translated. The linker may be a cleavable linker.

[0739] MicroRNA (miRNA) binding site: As used herein, a microRNA (miRNA) binding site represents a nucleotide location or region of a nucleic acid transcript to which at least the “seed” region of a miRNA binds.

[0740] Modified: As used herein “modified” refers to a changed state or structure of a molecule. Molecules may be modified in many ways including chemically, structurally, and functionally.

[0741] Naturally Occurring: As used herein, “naturally occurring” or “wild-type” means existing in nature without artificial aid, or involvement of the hand of man.

[0742] Non-human vertebrate: As used herein, a “non-human vertebrate” includes all vertebrates except Homo sapiens, including wild and domesticated species. Examples of non-human vertebrates include, but are not limited to, mammals, such as alpaca, banteng, bison, camel, cat, cattle, deer, dog, donkey, gayal, goat, guinea pig, horse, llama, mule, pig, rabbit, reindeer, sheep water buffalo, and yak.

[0743] Off-target: As used herein, “off target” refers to any unintended effect on any one or more target, gene, or cellular transcript.

[0744] Open reading frame: As used herein, “open reading frame” or “ORF” refers to a sequence which does not contain a stop codon in a given reading frame.

[0745] Operably linked: As used herein, the phrase “operably linked” refers to a functional connection between two or more molecules, constructs, transcripts, entities, moieties or the like.

[0746] Particle: As used herein, a “particle” is a virus comprised of at least two components, a protein capsid and a polynucleotide sequence enclosed within the capsid (e.g., viral genome).

[0747] Patient: As used herein, “patient” refers to a subject who may seek or be in need of treatment, requires treatment, is receiving treatment, will receive treatment, or a subject who is under care by a trained professional for a particular disease or condition.

[0748] Payload: As used herein, “payload” or “payload region” refers to one or more polynucleotides or polynucleotide regions encoded by or within a viral genome or an expression product of such polynucleotide or polynucleotide region, e.g., a transgene, a polynucleotide encoding a polypeptide or multi-polypeptide or a modulatory nucleic acid or regulatory nucleic acid.

[0749] Payload construct: As used herein, “payload construct” or “construct” is one or more polynucleotide regions encoding or comprising a payload that is flanked on one or both sides by an inverted terminal repeat (ITR) sequence. The payload construct is a template that is replicated in a viral production cell to produce a viral genome.

[0750] Payload construct vector: As used herein, “payload construct vector” is a vector encoding or comprising a payload construct, and regulatory regions for replication and expression in bacterial cells.

[0751] Payload construct expression vector: As used herein, a “payload construct expression vector” is a vector encoding or comprising a payload construct and which further comprises one or more polynucleotide regions encoding or comprising components for viral expression in a viral replication cell.

[0752] Peptide: As used herein, “peptide” is less than or equal to 50 amino acids long, e.g., about 5, 10, 15, 20, 25, 30, 35, 40, 45, or 50 amino acids long.

[0753] Pharmaceutically acceptable: The phrase “pharmaceutically acceptable” is employed herein to refer to those compounds, materials, compositions, and/or dosage forms which are, within the scope of sound medical judgment, suitable for use in contact with the tissues of human beings and animals without excessive toxicity, irritation, allergic response, or other problem or complication, commensurate with a reasonable benefit/risk ratio.

[0754] Pharmaceutically acceptable excipients: The phrase “pharmaceutically acceptable excipient,” as used herein, refers any ingredient other than the compounds described herein (for example, a vehicle capable of suspending or dissolving the active compound) and having the properties of being substantially nontoxic and non-inflammatory in a patient. Excipients may include, for example: antiadherents, antioxidants, binders, coatings, compression aids, disintegrants, dyes (colors), emollients, emulsifiers, fillers (diluents), film formers or coatings, flavors, fragrances, glidants (flow enhancers), lubricants, preservatives, printing inks, sorbents, suspensing or dispersing agents, sweeteners, and waters of hydration. Exemplary excipients include, but are not limited to: butylated hydroxytoluene (BHT), calcium carbonate, calcium phosphate (dibasic), calcium stearate, croscarmellose, crosslinked polyvinyl pyrrolidone, citric acid, crospovidone, cysteine, ethylcellulose, gelatin, hydroxypropyl cellulose, hydroxypropyl methylcellulose, lactose, magnesium stearate, maltitol, mannitol, methionine, methylcellulose, methyl paraben, microcrystalline cellulose, polyethylene glycol, polyvinyl pyrrolidone, povidone, pregelatinized starch, propyl paraben, retinyl palmitate, shellac, silicon dioxide, sodium carboxymethyl cellulose, sodium citrate, sodium starch glycolate, sorbitol, starch (corn), stearic acid, sucrose, talc, titanium dioxide, vitamin A, vitamin E, vitamin C, and xylitol.

[0755] Pharmaceutically acceptable salts: The present disclosure also includes pharmaceutically acceptable salts of the compounds described herein. As used herein, “pharmaceutically acceptable salts” refers to derivatives of the disclosed compounds wherein the parent compound is modified by converting an existing acid or base moiety to its salt form (e.g., by reacting the free base group with a suitable organic acid). Examples of pharmaceutically acceptable salts include, but are not limited to, mineral or organic acid salts of basic residues such as amines; alkali or organic salts of acidic residues such as carboxylic acids; and the like. Representative acid addition salts include acetate, acetic acid, adipate, alginate, ascorbate, aspartate, benzenesulfonate, benzene sulfonic acid, benzoate, bisulfate, borate, butyrate, camphorate, camphorsulfonate, citrate, cyclopentanepropionate, digluconate, dodecylsulfate, ethanesulfonate, fumarate, glucoheptonate, glycerophosphate, hemisulfate, heptonate, hexanoate, hydrobromide, hydrochloride, hydroiodide, 2-hydroxy-ethanesulfonate, lactobionate, lactate, laurate, lauryl sulfate, malate, maleate, malonate, methanesulfonate, 2-naphthalenesulfonate, nicotinate, nitrate, oleate, oxalate, palmitate, pamoate, pectinate, persulfate, 3-phenylpropionate, phosphate, picrate, pivalate, propionate, stearate, succinate, sulfate, tartrate, thiocyanate, toluenesulfonate, undecanoate, valerate salts, and the like. Representative alkali or alkaline earth metal salts include sodium, lithium, potassium, calcium, magnesium, and the like, as well as nontoxic ammonium, quaternary ammonium, and amine cations, including, but not limited to ammonium, tetramethylammonium, tetraethylammonium, methylamine, dimethylamine, trimethylamine, triethylamine, ethylamine, and the like. The pharmaceutically acceptable salts of the present disclosure include the conventional non-toxic salts of the parent compound formed, for example, from non-toxic inorganic or organic acids. The pharmaceutically acceptable salts of the present disclosure can be synthesized from the parent compound which contains a basic or acidic moiety by conventional chemical methods. Generally, such salts can be prepared by reacting the free acid or base forms of these compounds with a stoichiometric amount of the appropriate base or acid in water or in an organic solvent, or in a mixture of the two; generally, nonaqueous media like ether, ethyl acetate, ethanol, isopropanol, or acetonitrile are preferred. Lists of suitable salts are found in Remington's Pharmaceutical Sciences, 17^{th} ed., Mack Publishing Company, Easton, Pa., 1985, p. 1418, Pharmaceutical Salts: Properties, Selection, and Use, P. H. Stahl and C. G. Wermuth (eds.), Wiley-VCH, 2008, and Berge et al., Journal of Pharmaceutical Science, 66, 1-19 (1977), each of which is incorporated herein by reference in its entirety.

[0756] Pharmaceutically acceptable solvate: The term “pharmaceutically acceptable solvate,” as used herein, means a compound wherein molecules of a suitable solvent are incorporated in the crystal lattice. A suitable solvent is physiologically tolerable at the dosage administered. For example, solvates may be prepared by crystallization, recrystallization, or precipitation from a solution that includes organic solvents, water, or a mixture thereof. Examples of suitable solvents are ethanol, water (for example, mono-, di-, and tri-hydrates), N-methylpyrrolidinone (NMP), dimethyl sulfoxide (DMSO), N,N′-dimethylformamide (DMF), N,N′-dimethylacetamide (DMAC), 1,3-dimethyl-2-imidazolidinone (DMEU), 1,3-dimethyl-3,4,5,6-tetrahydro-2-(1H)-pyrimidinone (DMPU), acetonitrile (ACN), propylene glycol, ethyl acetate, benzyl alcohol, 2-pyrrolidone, benzyl benzoate, and the like. When water is the solvent, the solvate is referred to as a “hydrate.”

[0757] Pharmacokinetic: As used herein, “pharmacokinetic” refers to any one or more properties of a molecule or compound as it relates to the determination of the fate of substances administered to a living organism. Pharmacokinetics is divided into several areas including the extent and rate of absorption, distribution, metabolism and excretion. This is commonly referred to as ADME where: (A) Absorption is the process of a substance entering the blood circulation; (D) Distribution is the dispersion or dissemination of substances throughout the fluids and tissues of the body; (M) Metabolism (or Biotransformation) is the irreversible transformation of parent compounds into daughter metabolites; and (E) Excretion (or Elimination) refers to the elimination of the substances from the body. In rare cases, some drugs irreversibly accumulate in body tissue.

[0758] Physicochemical: As used herein, “physicochemical” means of or relating to a physical and/or chemical property.

[0759] Preventing: As used herein, the term “preventing” refers to partially or completely delaying onset of an infection, disease, disorder and/or condition; partially or completely delaying onset of one or more symptoms, features, or clinical manifestations of a particular infection, disease, disorder, and/or condition; partially or completely delaying onset of one or more symptoms, features, or manifestations of a particular infection, disease, disorder, and/or condition; partially or completely delaying progression from an infection, a particular disease, disorder and/or condition; and/or decreasing the risk of developing pathology associated with the infection, the disease, disorder, and/or condition.

[0760] Proliferate: As used herein, the term “proliferate” means to grow, expand or increase or cause to grow, expand or increase rapidly. “Proliferative” means having the ability to proliferate. “Anti-proliferative” means having properties counter to or inapposite to proliferative properties.

[0761] Prophylactic: As used herein, “prophylactic” refers to a therapeutic or course of action used to prevent the spread of disease.

[0762] Prophylaxis: As used herein, a “prophylaxis” refers to a measure taken to maintain health and prevent the spread of disease.

[0763] Protein of interest: As used herein, the terms “proteins of interest” or “desired proteins” include those provided herein and fragments, mutants, variants, and alterations thereof.

[0764] Proximal: As used herein, the term “proximal” means situated nearer to the center or to a point or region of interest.

[0765] Purified: As used herein, “purify,” “purified,” “purification” means to make substantially pure or clear from unwanted components, material defilement, admixture or imperfection. “Purified” refers to the state of being pure. “Purification” refers to the process of making pure.

[0766] Region: As used herein, the term “region” refers to a zone or general area. In some embodiments, when referring to a protein or protein module, a region may comprise a linear sequence of amino acids along the protein or protein module or may comprise a three-dimensional area, an epitope and/or a cluster of epitopes. In some embodiments, regions comprise terminal regions. As used herein, the term “terminal region” refers to regions located at the ends or termini of a given agent. When referring to proteins, terminal regions may comprise N- and/or C-termini. N-termini refer to the end of a protein comprising an amino acid with a free amino group. C-termini refer to the end of a protein comprising an amino acid with a free carboxyl group. N- and/or C-terminal regions may there for comprise the N- and/or C-termini as well as surrounding amino acids. In some embodiments, N- and/or C-terminal regions comprise from about 3 amino acid to about 30 amino acids, from about 5 amino acids to about 40 amino acids, from about 10 amino acids to about 50 amino acids, from about 20 amino acids to about 100 amino acids and/or at least 100 amino acids. In some embodiments, N-terminal regions may comprise any length of amino acids that includes the N-terminus, but does not include the C-terminus. In some embodiments, C-terminal regions may comprise any length of amino acids, which include the C-terminus, but do not comprise the N-terminus.

[0767] In some embodiments, when referring to a polynucleotide, a region may comprise a linear sequence of nucleic acids along the polynucleotide or may comprise a three-dimensional area, secondary structure, or tertiary structure. In some embodiments, regions comprise terminal regions. As used herein, the term “terminal region” refers to regions located at the ends or termini of a given agent. When referring to polynucleotides, terminal regions may comprise 5′ and 3′ termini. 5′ termini refer to the end of a polynucleotide comprising a nucleic acid with a free phosphate group. 3′ termini refer to the end of a polynucleotide comprising a nucleic acid with a free hydroxyl group. 5′ and 3′ regions may there for comprise the 5′ and 3′ termini as well as surrounding nucleic acids. In some embodiments, 5′ and 3′ terminal regions comprise from about 9 nucleic acids to about 90 nucleic acids, from about 15 nucleic acids to about 120 nucleic acids, from about 30 nucleic acids to about 150 nucleic acids, from about 60 nucleic acids to about 300 nucleic acids and/or at least 300 nucleic acids. In some embodiments, 5′ regions may comprise any length of nucleic acids that includes the 5′ terminus, but does not include the 3′ terminus. In some embodiments, 3′ regions may comprise any length of nucleic acids, which include the 3′ terminus, but does not comprise the 5′ terminus.

[0768] RNA or RNA molecule: As used herein, the term “RNA” or “RNA molecule” or “ribonucleic acid molecule” refers to a polymer of ribonucleotides; the term “DNA” or “DNA molecule” or “deoxyribonucleic acid molecule” refers to a polymer of deoxyribonucleotides. DNA and RNA can be synthesized naturally, e.g., by DNA replication and transcription of DNA, respectively; or be chemically synthesized. DNA and RNA can be single-stranded (i.e., ssRNA or ssDNA, respectively) or multi-stranded (e.g., double stranded, i.e., dsRNA and dsDNA, respectively). The term “mRNA” or “messenger RNA”, as used herein, refers to a single stranded RNA that encodes the amino acid sequence of one or more polypeptide chains.

[0769] Sample: As used herein, the term “sample” or “biological sample” refers to a subset of its tissues, cells or component parts (e.g. body fluids, including but not limited to blood, mucus, lymphatic fluid, synovial fluid, cerebrospinal fluid, saliva, amniotic fluid, amniotic cord blood, urine, vaginal fluid and semen). A sample further may include a homogenate, lysate or extract prepared from a whole organism or a subset of its tissues, cells or component parts, or a fraction or portion thereof, including but not limited to, for example, plasma, serum, spinal fluid, lymph fluid, the external sections of the skin, respiratory, intestinal, and genitourinary tracts, tears, saliva, milk, blood cells, tumors, organs. A sample further refers to a medium, such as a nutrient broth or gel, which may contain cellular components, such as proteins or nucleic acid molecule.

[0770] Self-complementary viral particle: As used herein, a “self-complementary viral particle” is a particle comprised of at least two components, a protein capsid and a polynucleotide sequence encoding a self-complementary genome enclosed within the capsid.

[0771] Signal Sequences: As used herein, the phrase “signal sequences” refers to a sequence which can direct the transport or localization of a protein.

[0772] Single unit dose: As used herein, a “single unit dose” is a dose of any therapeutic administered in one dose/at one time/single route/single point of contact, i.e., single administration event. In some embodiments, a single unit dose is provided as a discrete dosage form (e.g., a tablet, capsule, patch, loaded syringe, vial, etc.).

[0773] Similarity: As used herein, the term “similarity” refers to the overall relatedness between polymeric molecules, e.g. between polynucleotide molecules (e.g. DNA molecules and/or RNA molecules) and/or between polypeptide molecules. Calculation of percent similarity of polymeric molecules to one another can be performed in the same manner as a calculation of percent identity, except that calculation of percent similarity takes into account conservative substitutions as is understood in the art.

[0774] Split dose: As used herein, a “split dose” is the division of single unit dose or total daily dose into two or more doses.

[0775] Stable: As used herein “stable” refers to a compound that is sufficiently robust to survive isolation to a useful degree of purity from a reaction mixture, and preferably capable of formulation into an efficacious therapeutic agent.

[0776] Stabilized: As used herein, the term “stabilize”, “stabilized,” “stabilized region” means to make or become stable.

[0777] Subject: As used herein, the term “subject” or “patient” refers to any organism to which a composition in accordance with the disclosure may be administered, e.g., for experimental, diagnostic, prophylactic, and/or therapeutic purposes. Typical subjects include animals (e.g., mammals such as mice, rats, rabbits, non-human primates, and humans) and/or plants.

[0778] Substantially: As used herein, the term “substantially” refers to the qualitative condition of exhibiting total or near-total extent or degree of a characteristic or property of interest. One of ordinary skill in the biological arts will understand that biological and chemical phenomena rarely, if ever, go to completion and/or proceed to completeness or achieve or avoid an absolute result. The term “substantially” is therefore used herein to capture the potential lack of completeness inherent in many biological and chemical phenomena.

[0779] Substantially equal: As used herein as it relates to time differences between doses, the term means plus/minus 2%.

[0780] Substantially simultaneously: As used herein and as it relates to plurality of doses, the term means within 2 seconds.

[0781] Suffering from: An individual who is “suffering from” a disease, disorder, and/or condition has been diagnosed with or displays one or more symptoms of a disease, disorder, and/or condition.

[0782] Susceptible to: An individual who is “susceptible to” a disease, disorder, and/or condition has not been diagnosed with and/or may not exhibit symptoms of the disease, disorder, and/or condition but harbors a propensity to develop a disease or its symptoms. In some embodiments, an individual who is susceptible to a disease, disorder, and/or condition (for example, cancer) may be characterized by one or more of the following: (1) a genetic mutation associated with development of the disease, disorder, and/or condition; (2) a genetic polymorphism associated with development of the disease, disorder, and/or condition; (3) increased and/or decreased expression and/or activity of a protein and/or nucleic acid associated with the disease, disorder, and/or condition; (4) habits and/or lifestyles associated with development of the disease, disorder, and/or condition; (5) a family history of the disease, disorder, and/or condition; and (6) exposure to and/or infection with a microbe associated with development of the disease, disorder, and/or condition. In some embodiments, an individual who is susceptible to a disease, disorder, and/or condition will develop the disease, disorder, and/or condition. In some embodiments, an individual who is susceptible to a disease, disorder, and/or condition will not develop the disease, disorder, and/or condition.

[0783] Sustained release: As used herein, the term “sustained release” refers to a pharmaceutical composition or compound release profile that conforms to a release rate over a specific period of time.

[0784] Synthetic: The term “synthetic” means produced, prepared, and/or manufactured by the hand of man. Synthesis of polynucleotides or polypeptides or other molecules of the present disclosure may be chemical or enzymatic.

[0785] Targeting: As used herein, “targeting” means the process of design and selection of nucleic acid sequence that will hybridize to a target nucleic acid and induce a desired effect.

[0786] Targeted Cells: As used herein, “targeted cells” refers to any one or more cells of interest. The cells may be found in vitro, in vivo, in situ or in the tissue or organ of an organism. The organism may be an animal, preferably a mammal, more preferably a human and most preferably a patient.

[0787] Therapeutic Agent: The term “therapeutic agent” refers to any agent that, when administered to a subject, has a therapeutic, diagnostic, and/or prophylactic effect and/or elicits a desired biological and/or pharmacological effect.

[0788] Therapeutically effective amount: As used herein, the term “therapeutically effective amount” means an amount of an agent to be delivered (e.g., nucleic acid, drug, therapeutic agent, diagnostic agent, prophylactic agent, etc.) that is sufficient, when administered to a subject suffering from or susceptible to an infection, disease, disorder, and/or condition, to treat, improve symptoms of, diagnose, prevent, and/or delay the onset of the infection, disease, disorder, and/or condition. In some embodiments, a therapeutically effective amount is provided in a single dose. In some embodiments, a therapeutically effective amount is administered in a dosage regimen comprising a plurality of doses. Those skilled in the art will appreciate that in some embodiments, a unit dosage form may be considered to comprise a therapeutically effective amount of a particular agent or entity if it comprises an amount that is effective when administered as part of such a dosage regimen.

[0789] Therapeutically effective outcome: As used herein, the term “therapeutically effective outcome” means an outcome that is sufficient in a subject suffering from or susceptible to an infection, disease, disorder, and/or condition, to treat, improve symptoms of, diagnose, prevent, and/or delay the onset of the infection, disease, disorder, and/or condition.

[0790] Total daily dose: As used herein, a “total daily dose” is an amount given or prescribed in 24 hr period. It may be administered as a single unit dose.

[0791] Transfection: As used herein, the term “transfection” refers to methods to introduce exogenous nucleic acids into a cell. Methods of transfection include, but are not limited to, chemical methods, physical treatments and cationic lipids or mixtures.

[0792] Treating: As used herein, the term “treating” refers to partially or completely alleviating, ameliorating, improving, relieving, delaying onset of, inhibiting progression of, reducing severity of, and/or reducing incidence of one or more symptoms or features of a particular infection, disease, disorder, and/or condition. For example, “treating” cancer may refer to inhibiting survival, growth, and/or spread of a tumor. Treatment may be administered to a subject who does not exhibit signs of a disease, disorder, and/or condition and/or to a subject who exhibits only early signs of a disease, disorder, and/or condition for the purpose of decreasing the risk of developing pathology associated with the disease, disorder, and/or condition.

[0793] Unmodified: As used herein, “unmodified” refers to any substance, compound or molecule prior to being changed in any way. Unmodified may, but does not always, refer to the wild type or native form of a biomolecule. Molecules may undergo a series of modifications whereby each modified molecule may serve as the “unmodified” starting molecule for a subsequent modification.

[0794] Vector: As used herein, a “vector” is any molecule or moiety which transports, transduces or otherwise acts as a carrier of a heterologous molecule. Vectors of the present disclosure may be produced recombinantly and may be based on and/or may comprise adeno-associated virus (AAV) parent or reference sequence. Such parent or reference AAV sequences may serve as an original, second, third or subsequent sequence for engineering vectors. In non-limiting examples, such parent or reference AAV sequences may comprise any one or more of the following sequences: a polynucleotide sequence encoding a polypeptide or multi-polypeptide, which sequence may be wild-type or modified from wild-type and which sequence may encode full-length or partial sequence of a protein, protein domain, or one or more subunits of a protein; a polynucleotide comprising a modulatory or regulatory nucleic acid which sequence may be wild-type or modified from wild-type; and a transgene that may or may not be modified from wild-type sequence. These AAV sequences may serve as either the “donor” sequence of one or more codons (at the nucleic acid level) or amino acids (at the polypeptide level) or “acceptor” sequences of one or more codons (at the nucleic acid level) or amino acids (at the polypeptide level).

[0795] Viral genome: As used herein, a “viral genome” or “vector genome” is a polynucleotide comprising at least one inverted terminal repeat (ITR) and at least one encoded payload. A viral genome encodes at least one copy of the payload.

[0796] Described herein are compositions, methods, processes, kits and devices for the design, preparation, manufacture and/or formulation of AAV particles. In some embodiments, payloads, such as but not limited to AAV polynucleotides, may be encoded by payload constructs or contained within plasmids or vectors or recombinant adeno-associated viruses (AAVs).

[0797] The details of one or more embodiments are set forth in the accompanying description below. Although any materials and methods similar or equivalent to those described herein can be used in the practice or testing of the present disclosure, the preferred materials and methods are now described. Other features, objects and advantages will be apparent from the description. In the description, the singular forms also include the plural unless the context clearly dictates otherwise. Unless defined otherwise, all technical and scientific terms used herein have the same meaning as commonly understood by one of ordinary skill in the art to which this disclosure belongs. In the case of conflict, the present description will control.

[0798] The present disclosure is further illustrated by the following non-limiting examples. In addition, the Examples of U.S. Provisional Patent Application No. 62/839,891, entitled “Compositions and Methods for the Treatment of Tauopathy”, filed Apr. 29, 2019, U.S. Provisional Patent Application No. 63/002,011, entitled “Compositions and Methods for the Treatment of Tauopathy” filed Mar. 30, 2020 and International Patent Application No. PCT/US20/30357, entitled “Compositions and Methods for the Treatment of Tauopathy, filed Apr. 29, 2020, are herein each incorporated by reference in their entirety, particularly as pertains to the making, testing and/or using of AAV particles for delivery of vectorized anti-tau antibodies.

### VII. Examples

### Example 1. Olfactory Bulb Propagation Model-Based Studies

[0799] Olfactory deficits are present in numerous neurodegenerative disorders and are accompanied by pathology in related brain regions. In several neurodegenerative disorders, olfactory disturbances appear early and are considered as prodromal symptoms of the disease. In addition, pathological protein aggregates affect olfactory regions prior to other regions, suggesting that the olfactory system might be particularly vulnerable to neurodegenerative diseases.

[0800] Distribution and kinetics of AAV particles dosed intravenously were evaluated in htau female mice (B6.Cg-Mapt^{tml(EGFP)Klt} Tg(MAPT)8cPdav/J; The Jackson Laboratory, Bar Harbor, ME). Viral genome TAU_ITR111 (SEQ ID NO: 2161; VOY101.CBA.HL.T2A) was packaged into VOY101 capsids. AAV particles were formulated in formulation buffer (10 mM disodium phosphate, 2 mM monopotassium phosphate, 2.7 mM potassium chloride, 192 mM sodium chloride and 0.001% Pluronic Acid (F-68)) and provided intravenously at a dose of 1.4×10¹³ vg/kg to approximately 18 week-old mice. Mice were euthanized and CNS and/or tissue samples were collected 1, 3, 7, 14, and 28 days post injection. The right half of the brain and lumbar SC tissues were fixed with 4% PFA; whereas the left half of the brain as well as the cervical and thoracic regions of the spinal cord were flash frozen. Peripheral tissues (spleen, liver, skeletal muscle) were also harvested at all time points. Serum and CSF were also harvested at all time points. Harvested tissues were analyzed by ePHF ELISA (specifically, CNS tissue, peripheral tissues, serum) and IgG1immunohistochemistry (IHC).

[0801] Samples of hippocampus, cortex, olfactory bulb, and thalamus were subjected to analysis by ePHF ELISA to determine PT3 expression. Data are shown in Table 96 below as ng/mg protein

TABLE 96
PT3 expression from TAU_ITR111 (ng/mg protein)

| Region | Day 1 | Day 3 | Day 7 | Day 14 | Day 28 |
|---|---|---|---|---|---|
| Hippocampus | 0.00 | 0.00 | 7.65 | 124.70 | 271.70 |
| | 0.00 | 0.00 | 9.66 | 88.03 | 128.90 |
| | 0.00 | 0.48 | 15.95 | 196.98 | 148.33 |
| | 0.00 | 0.80 | — | — | — |
| Cortex | 0.00 | 1.57 | 14.02 | 196.60 | 555.51 |
| | 0.00 | 1.25 | 23.15 | 164.22 | 175.41 |
| | 0.00 | 4.69 | 26.68 | 256.15 | 321.62 |
| | 2.91 | 2.08 | — | — | — |
| Olfactory | 0.00 | 15.46 | 56.04 | 398.87 | 559.84 |
| bulb | 0.00 | 14.81 | 99.43 | 328.47 | 433.80 |
| | 0.00 | 19.41 | 76.10 | 442.19 | 589.25 |
| | 0.00 | 13.85 | — | — | — |
| Thalamus | 0.00 | 0.00 | 16.85 | 56.24 | 98.24 |
| | 0.00 | 2.59 | 16.91 | 80.27 | 113.64 |
| | 0.00 | 1.12 | 18.13 | 122.91 | 92.26 |
| | 0.00 | 0.00 | — | — | — |

[0802] Analysis of the PT3 expression data by ePHF ELISA showed that PT3 expression could be observed as early as 3 days after intravenous injection of TAU_ITR111. PT3 expression levels were higher in the later measurements made at later time points suggesting that PT3 expression increased over time. These observations were confirmed by immunohistochemistry studies in which PT3 expression could be detected in the olfactory bulb on day 3 and to a lesser extent in the hippocampus and cortex. These studies demonstrate that treating mice 1 day after the injection of tau seeds may be a suitable experimental set up for measuring the therapeutic efficacy of vectored antibody delivery.

### Biodistributions and Expression of Vectorized PT3 Antibody in Olfactory Bulb Propagation Model

[0803] To study the effects of intracranial olfactory bulb injection on PT3 antibody distribution, a subsequent study was conducted. Three month-old wild type mice were injected with PBS intracranially into the olfactory bulb. One, two or three days later, viral genome comprising TAU_ITR111 (SEQ ID NO: 2161; VOY101.CBA.HL.T2A) was packaged into VOY101 capsids. AAV particles were formulated in formulation buffer (10 mM disodium phosphate, 2 mM monopotassium phosphate, 2.7 mM potassium chloride, 192 mM sodium chloride and 0.001% Pluronic Acid (F-68)) and provided intravenously at a dose of 1.4×10¹³ vg/kg. 28 days later, mice were euthanized and CNS and/or tissue samples were obtained. The left half of the brain and lumbar SC tissues were fixed with 4% PFA; whereas the right half of the brain and cervical/thoracic SC were flash frozen. Peripheral tissue (specifically the liver), serum and CSF were also harvested. Tissues were analyzed by ePHF ELISA (specifically, CNS tissue, liver, serum); IgG1immunohistochemistry (IHC); and vector genome quantification (specifically, cortex, hippocampus, thalamus, OB, BS, thoracic SC, liver).

[0804] Biodistribution, or VG/DC (vector genome/diploid cell) was quantified for a subset of tissues, such as brain using droplet digital PCR. Vector genome biodistribution quantification (VG/DC) data are shown in Table 97, Table 98, Table 99, Table 100, Table 101, Table 102, and Table 103, wherein the “control (no injection)” column refers to VG/DC in animals who have not received an intracranial olfactory bulb injection. Average VG/DC values are shown in Table 104. Significance was analyzed using one-way ANOVA-Tukey's multiple comparison test.

TABLE 97
Vector genome quantification of VOY101.PT3
construct in the olfactory bulb

| | AAV genomes/cell | | | |
|---|---|---|---|---|
| | | 1 day | 2 day | 3 day |
| | Control (no | Post | Post | Post |
| Mouse # | injection) | Injection | Injection | Injection |
| 1 | 137.23 | 19.95 | 56.02 | 84.82 |
| 2 | 47.74 | 59.97 | 42.91 | 60.33 |
| 3 | 33.76 | 73.54 | 136.45 | 37.81 |
| 4 | 82.65 | 83.55 | 55.69 | 15.71 |
| 5 | 51.25 | 56.73 | 32.29 | — |

TABLE 98
Vector genome quantification of VOY101.PT3
construct in the cortex

| | AAV genomes/cell | | | |
|---|---|---|---|---|
| | | 1 day | 2 day | 3 day |
| | Control (no | Post | Post | Post |
| Mouse # | injection) | Injection | Injection | Injection |
| 1 | 83.45 | 19.40 | 31.01 | 47.62 |
| 2 | 36.25 | 76.96 | 43.34 | 59.29 |
| 3 | 32.87 | 47.14 | 46.18 | 29.63 |
| 4 | 55.87 | 68.53 | 52.01 | 24.42 |
| 5 | 28.49 | 53.01 | 41.02 | — |

TABLE 99
Vector genome quantification of VOY101.PT3
construct in the hippocampus

| | AAV genomes/cell | | | |
|---|---|---|---|---|
| | | 1 day | 2 day | 3 day |
| | Control (no | Post | Post | Post |
| Mouse # | injection) | Injection | Injection | Injection |
| 1 | 49.18 | 7.93 | 24.60 | 29.82 |
| 2 | 22.78 | 35.91 | 23.25 | 29.07 |
| 3 | 30.58 | 53.60 | 43.33 | 23.22 |
| 4 | 27.33 | 39.94 | 23.82 | 14.43 |
| 5 | 33.04 | 33.55 | 26.71 | — |

TABLE 100
Vector genome quantification of VOY101.PT3
construct in the thalamus

| | AAV genomes/cell | | | |
|---|---|---|---|---|
| | | 1 day | 2 day | 3 day |
| | Control (no | Post | Post | Post |
| Mouse # | injection) | Injection | Injection | Injection |
| 1 | 82.37 | 28.68 | 47.33 | 69.55 |
| 2 | 61.54 | 60.12 | 41.97 | 67.31 |
| 3 | 67.14 | 68.61 | 65.72 | 48.96 |
| 4 | 77.94 | 93.99 | 68.85 | 94.66 |
| 5 | 65.29 | 68.54 | 48.87 | — |

TABLE 101
Vector genome quantification of VOY101.PT3
construct in the brain stem

| | AAV genomes/cell | | | |
|---|---|---|---|---|
| | | 1 day | 2 day | 3 day |
| | Control (no | Post | Post | Post |
| Mouse # | injection) | Injection | Injection | Injection |
| 1 | 96.75 | 34.00 | 49.02 | 57.36 |
| 2 | 39.55 | 98.51 | 54.63 | 62.27 |
| 3 | 60.14 | 89.47 | 59.32 | 59.91 |
| 4 | 10.67 | 119.91 | 53.75 | 28.97 |
| 5 | 69.99 | 65.56 | 62.49 | — |

TABLE 102
Vector genome quantification of VOY101.PT3
construct in the spinal cord

| | AAV genomes/cell | | | |
|---|---|---|---|---|
| | | 1 day | 2 day | 3 day |
| | Control (no | Post | Post | Post |
| Mouse # | injection) | Injection | Injection | Injection |
| 1 | 60.08 | 16.87 | 37.40 | 40.83 |
| 2 | 32.12 | 61.80 | 15.15 | 57.66 |
| 3 | 41.31 | 61.83 | 48.43 | 44.36 |
| 4 | 46.93 | 99.23 | 34.92 | 92.72 |
| 5 | 43.19 | 67.14 | 65.50 | — |

TABLE 103
Vector genome quantification of
VOY101.PT3 construct in the liver

| | AAV genomes/cell | | | |
|---|---|---|---|---|
| | | 1 day | 2 day | 3 day |
| | Control (no | Post | Post | Post |
| Mouse # | injection) | Injection | Injection | Injection |
| 1 | 14.67 | 0.19 | 9.09 | 13.56 |
| 2 | 4.43 | 6.20 | 8.17 | 15.51 |
| 3 | 6.05 | 5.30 | 7.01 | 8.56 |
| 4 | 10.59 | 7.10 | 9.02 | 9.06 |
| 5 | 4.33 | 5.36 | 17.12 | — |

TABLE 104
Average of vector genome quantification in the tissues

| | AAV genomes/cell | | | |
|---|---|---|---|---|
| | | 1 day | 2 day | 3 day |
| | Control (no | Post | Post | Post |
| Tissue | injection) | Injection | Injection | Injection |
| Olfactory Bulb | 70.53 | 58.75 | 64.67 | 49.67 |
| Cortex | 47.39 | 53.01 | 42.71 | 40.24 |
| Hippocampus | 32.58 | 34.19 | 28.34 | 24.14 |
| Thalamus | 70.86 | 63.99 | 54.55 | 70.12 |
| Brain Stem | 55.42 | 81.49 | 55.84 | 52.13 |
| Spinal cord | 44.73 | 61.37 | 40.28 | 58.89 |
| Liver | 8.01 | 4.83 | 10.08 | 11.67 |

[0805] No significant differences were observed in the AAV biodistribution VG/DC values between the different treatment groups. These data show that stereotaxic pre-injections in the olfactory bulb do not affect AAV biodistribution.

[0806] Samples of hippocampus, cortex, olfactory bulb, and thalamus were subject to analysis by ePHF ELISA to determine PT3 expression. Data are shown in Table 105 below as ng/mg protein.

TABLE 105
PT3 expression (ng/mg protein)

| | | 1 day | 2 day | 3 day |
|---|---|---|---|---|
| | Control (no | Post | Post | Post |
| Tissue | injection) | Injection | Injection | Injection |
| Olfactory Bulb | 470.77 | 87.35 | 317.08 | 439.18 |
| (OB) | 478.86 | 917.50 | 330.50 | 496.93 |
| | — | 515.00 | 484.76 | 467.54 |
| | 332.60 | 606.31 | 472.74 | 221.15 |
| | 495.24 | 574.86 | 399.38 | — |
| OB Average | 444.37 | 540.21 | 400.89 | 406.20 |
| Cortex | 457.93 | 21.97 | 164.92 | 201.29 |
| | 378.93 | 381.65 | 123.43 | 271.14 |
| | 346.30 | 476.32 | 467.99 | 281.39 |
| | 777.58 | 585.19 | 466.92 | 138.32 |
| | 275.13 | 382.33 | 241.26 | — |
| Cortex Average | 447.17 | 369.49 | 292.90 | 223.03 |
| Hippocampus | 205.95 | 9.05 | 39.01 | 82.04 |
| | 91.37 | 47.39 | 23.81 | 82.61 |
| | 34.06 | 239.05 | 189.39 | 57.04 |
| | 117.98 | 227.08 | 45.77 | 31.25 |
| | 141.39 | 169.86 | 92.90 | — |
| Hippocampus | 118.15 | 138.48 | 78.17 | 63.23 |
| Average | | | | |
| Thalamus | 177.58 | 8.39 | 137.91 | 108.37 |
| | 175.36 | 192.77 | 68.01 | 138.62 |
| | 144.91 | 119.14 | 110.74 | 109.52 |
| | 91.50 | 306.87 | 110.32 | 83.60 |
| | 424.90 | 344.34 | 230.53 | 14.50 |
| Thalamus | 202.85 | 194.30 | 131.50 | 90.92 |
| Average | | | | |

[0807] Significance was measured by one-way ANOVA. No significant difference in the PT3 expression was observed among different groups. Similarly, the immunohistochemical analysis of the olfactory bulb, cortex, hippocampus and thalamus showed no obvious differences between the staining pattern observed in the no injection group and the groups that received pre-injections. Thus, stereotaxic pre-injections in the olfactory bulb do not affect vector genome transduction or antibody expression.

### Propagation of Tau Seeds in Olfactory Bulb Propagation Model

[0808] Propagation of tau seeds in the olfactory bulb model was evaluated over time. Eighteen to twenty week old htau female mice (B6.Cg-Mapt^{tml(EGFP)Klt} Tg(MAPT)8cPdav/J; The Jackson Laboratory, Bar Harbor, ME) were injected with ePHF purified from AD brain lysates obtained from patients with Alzheimer's disease (herein referred to as AD lysate) via unilateral olfactory bulb injection. Two different ePHF preparations containing different concentrations of ePHF, i.e., 0.4 μg (sample 1) or 0.29 μg (sample 2) were tested in different groups of mice. Control groups were injected with 2 μL PBS. Mice were euthanized at 12 or 16 weeks and whole brain tissues were collected and fixed in formalin. Slides were cut to a thickness of 5 μM, and every fifth tissue section was collected, among which, every seventh section was stained with AT100. The stained sections were 175 μM apart. AT100 antibody detects Tau protein phosphorylated at threonine 212 and serine 214. The number of cells positively stained for AT100 were quantified in the olfactory bulb mitral and tufted cells, piriform cortex, entorhinal cortex, medial thalamus and CA1 hippocampus. Piriform cortex was also analyzed for AT100 (ePHF) staining intensity.

[0809] Greater olfactory mitral bulb/tuft cell staining was observed with 0.29 μg ePHF (sample 2) compared to 0.4 μg ePHF (sample 1). Strong AT100 positive cell counts were observed in the olfactory bulb, piriform cortex and CA1 hippocampus while fewer positive cell counts were observed in the medial thalamus.

[0810] Analysis of the AT100 staining revealed that Tau propagation to the first synapse (entorhinal and piriform cortex) and second synapse (CA1 hippocampus and medial thalamus) could be observed with both samples of ePHF tested. Tau propagation could be observed both at 12 and 16 weeks following injection and was virtually unchanged between the two groups. Table 106 provides AT100 cell numbers and Table 107 provides AT100 cell number per tissue slice. Table 108 provides data related to AT100 staining in the piriform cortex.

TABLE 106
AT100 staining (cell numbers)

| | | | | | Medial | Greater |
|---|---|---|---|---|---|---|
| | | Entorhinal | | | Thalamus | Medial |
| Dose (end | Olfactory | cortex (1st | CA1 (2nd | CA1/ | (2nd | Thalamus |
| point) | bulb | Synapse) | Synapse) | Sub | Synapse) | area |
| 0.29 μg ePHF | 181 | 25 | 18 | 27 | 9 | 14 |
| (3 month) | | | | | | |
| 0.29 μg ePHF | 63 | 31 | 23 | 43 | 0 | 8 |
| (4 month) | 66 | 23 | 31 | 64 | 0 | 19 |
| Average | 64.5 | 27 | 27 | 53.5 | 0 | 13.5 |
| | 12 | 53 | 66 | 109 | 1 | 11 |
| 0.4 μg ePHF | 64 | 100 | 60 | 140 | 12 | 46 |
| (3 month) | 27 | 60 | 44 | 89 | 2 | 23 |
| | 20 | 50 | 47 | 109 | 6 | 25 |
| | 59 | 57 | 71 | 133 | 7 | 15 |
| Average | 36.4 | 64 | 57.6 | 116 | 5.6 | 24 |
| 0.4 μg ePHF | 20 | 86 | 55 | 99 | 2 | 7 |
| (4 month) | 21 | 39 | 34 | 70 | 0 | 12 |
| | 28 | 76 | 47 | 88 | 4 | 19 |
| | 20 | 40 | 46 | 87 | 5 | 18 |
| | 46 | 45 | 34 | 59 | 1 | 7 |
| Average | 27 | 57.2 | 43.2 | 80.6 | 2.4 | 12.6 |

TABLE 107
AT100 staining (Cell number/slice)

| | | Entorhinal | | | Medial | Greater |
|---|---|---|---|---|---|---|
| | | cortex | | | Thalamus | Medial |
| | Olfactory | (1st | CA1 (2nd | | (2nd | Thalamus |
| | bulb | Synapse) | Synapse) | CA1/Sub | Synapse) | area |
| 0.29 μg ePHF | 16.45 | 2.50 | 2.25 | 3.38 | 2.25 | 3.50 |
| (3 month) | | | | | | |
| 0.29 μg ePHF | 7.00 | 3.44 | 3.83 | 7.17 | 0.00 | 4.00 |
| (4 month) | 7.33 | 2.88 | 4.43 | 9.14 | 0.00 | 4.75 |
| average | 7.17 | 3.16 | 4.13 | 8.15 | 0.00 | 4.38 |
| 0.4 μg ePHF | 1.20 | 4.82 | 8.25 | 13.63 | 0.33 | 2.75 |
| (3 month) | 5.33 | 8.33 | 7.50 | 17.50 | 3.00 | 11.50 |
| | 2.45 | 5.00 | 5.50 | 11.13 | 0.50 | 5.75 |
| | 2.00 | 4.55 | 5.22 | 12.11 | 1.50 | 6.25 |
| | 5.36 | 4.75 | 7.89 | 14.78 | 2.33 | 3.75 |
| average | 3.27 | 5.49 | 6.87 | 13.83 | 1.53 | 6.00 |
| 0.4 μg ePHF | 2.50 | 9.56 | 9.17 | 16.50 | 2.00 | 7.00 |
| (4 month) | 4.20 | 5.57 | 8.50 | 17.50 | 0.00 | 4.00 |
| | 3.11 | 7.60 | 6.71 | 12.57 | 1.33 | 4.75 |
| | 2.22 | 4.44 | 6.57 | 12.43 | 1.67 | 6.00 |
| | 5.75 | 5.63 | 5.67 | 9.83 | 0.50 | 2.33 |
| average | 3.56 | 6.56 | 7.32 | 13.77 | 1.10 | 4.82 |

TABLE 108
AT100 staining in piriform cortex

| | 0.29 μg ePHF | | | | 0.4 μg ePHF | | | |
|---|---|---|---|---|---|---|---|---|
| | | | % area | % area | | | % area | % area |
| | | | covered | covered | | | covered | covered |
| | Cell | Cells/ | (all | (3 | Cell | Cells/ | (all | (3 |
| Duration | number | slice | slices) | slices) | number | slice | slices) | slices) |
| 3 month | 458.00 | 152.67 | 10.21 | 10.21 | 1068.00 | 213.60 | 9.32 | 11.25 |
| | — | — | — | — | 818.00 | 204.50 | 10.49 | 12.46 |
| | — | — | — | — | 885.00 | 177.00 | 11.58 | 16.94 |
| | — | — | — | — | 505.00 | 168.33 | 7.00 | 7.00 |
| | — | — | — | — | 675.00 | 168.75 | 13.23 | 13.23 |
| 4 month | 1007.00 | 167.83 | 7.58 | 11.47 | 1540.00 | 256.67 | 13.60 | 19.79 |
| | 488.00 | 122.00 | 4.77 | 6.03 | 1046.00 | 348.67 | 12.38 | 12.38 |
| | — | — | — | — | 1097.00 | 274.25 | 15.33 | 17.69 |
| | — | — | — | — | 802.00 | 200.50 | 11.68 | 14.42 |
| | — | — | — | — | 1079.00 | 215.80 | 13.53 | 19.13 |

[0811] As shown in Table 108, Tau propagation to the piriform cortex could be observed at 3 months and 4 months, with a slight increase at 4 months. These data show that seeding and propagation of tau seeds could be observed using two different samples of ePHF at 3 and 4 months post seeding.

### Efficacy of Vectorized PT3 and PHF1 Antibody in Olfactory Bulb Propagation Model

[0812] Using experimental set up as described above, one day after seeding of PHF into the olfactory bulb of hTau mice, AAV particles comprising VOY10.CBA.PT3 construct (TAU ITR_111, SEQ ID NO: 2161) were administered intravenously at a dose of 1.4E13 vg/kg. Vehicle control group was injected with PBS. Mice were terminated after three months, and AT100 staining intensity were analyzed for the olfactory bulb, entorhinal cortex, ipsilateral hippocampus and thalamus. As shown in FIG. 2A, the number of AT100+ cells were significantly reduced in the olfactory bulb (43%) and hippocampus (17%) of AAV-treated mice compared to vehicle control.

[0813] Similarly, the efficacy of AAV particles comprising a vectorized PHF1 antibody construct under the GFAP astrocyte-specific promoter were also tested in the hTau olfactory bulb propagation model. Different doses of AAV particles comprising VOY101.GFAP.PHF1 construct (TAU_ITR242; SEQ ID NO: 2314) were injected intravenously one day post-seeding at 1.4E13 (low dose), 4.4E13 (medium dose), and 1.4E14 (high dose) vg/kg doses. Mice treated with the VOY101.GFAP.PHF1 constructs had a significant reduction (21% with the medium dose and 26% with the high dose, with a statistically insignificant 14% reduction in the low dose) in AT100 staining in a dose-dependent manner at least in hippocampus (see FIG. 2B).

### Example 2A. Efficacy of VOY101.PT3 Constructs in a Hippocampal Seeding Model

[0814] Exogenous tau seeds that include misfolded tau protein may be used to induce tauopathy that propagates from the site of injection to interconnected regions in the brain. Such models may be used to study the therapeutic efficacy of vectorized antibodies.

[0815] To establish a hippocampal tau seeding model in P301S transgenic mice, animals were infused intraparenchymally with AD lysates from patients with Alzheimer's disease. 2 month old female mice were injected at the CA1 of hippocampus unilaterally. The injections were performed at 2 μl per site at the rate of 2 μl per minute. Two doses of AD lysate (28 or 56 ng of ePHF) were administered to the animals. Phosphate buffered saline was used as the vehicle control. The stereotactic coordinates for the hippocampal infusion were as follows: AP: −2.1; ML: −1.5; DV: −1.8 from bregma (−1.6 from dura). Four to six weeks after the injection, mice were euthanized. At necropsy, CSF and serum samples were collected and mice were subjected to transcardiac perfusion with PBS. Brain samples were harvested and immersion-fixed in 10% buffered formalin for immunohistochemistry. For ELISA assays, brain samples were harvested and flash frozen. Tau pathology was measured using AT100 antibody. Additional readouts measured included weekly body weight measurements, and cage side observations for mortality or morbidity.

[0816] For IHC, mouse brains fixed in PFA for 48 hours were transferred to PBS. The samples were processed on Leica HistoCore Pearl and embedded in paraffin. Tissue was sectioned through the hippocampus and 3 planes (anterior, mid and posterior) were chosen for analysis. IHC samples were further processed using Ventana discovery ultra-protocol (#12). Briefly, sections were deparaffinized following antigen retrieval, which was performed for 64 minutes at 95 degrees Celsius using cell conditioner #1 containing EDTA. Endogenous peroxidase inhibition was achieved by treatment with inhibitor CM (H₂O₂) for 8 minutes followed by a blocking step using Rodent Block M (Biocare Medical; RBM961, Lot 082819-2) for another 8 minutes. Tissues were incubated with anti-AT-100 (Invitrogen; MN1060, Lot UH2803903) at 1:100 dilution for 60 minutes; followed by a brief washing step to remove excess antibody. This was followed by treatment with the secondary/linking antibody consisting of a combination of IgG1, IgG2a, and IgG3 (Abcam; ab133469, Lot GR3279440-1) at 1:1000 dilution for 20 minutes. Sections were developed using multimer, Omnimap Anti-Rb HRP treatment for 16 minutes followed by chromogen (DAB CM Kit). Slides were then stained with Hematoxylin II (for 4 minutes) and counterstained with Bluing Reagent (for 4 minutes). Following the staining the slides were washed in water, and dehydrated through graded ethanol and xylene treatment. A drop of Cytoseal 60 was added to the tissue section and a cover slip was placed on the slide to seal the tissue.

[0817] Analysis of the tissue sections revealed that infusion with AD lysate that contained 56 ng PHF led to robust tau pathology in the ipsilateral hippocampus at 4 weeks and 6 weeks post-seeding. This dose was used in subsequent experiments.

[0818] To measure the efficacy of the vectorized antibody delivery in the hippocampal seeding model, mice were transduced intravenously with VOY101.TAU_ITR111 (SEQ ID NO: 2161; VOY101.CBA.HL.T2A) particles. Six-week old female P301S transgenic mice were injected intravenously with AAV particles comprising TAU_ITR111 genome using doses described in Table 109.

TABLE 109
Dose of AAV particles comprising TAU_ITR111 genome

| | | | Age at |
|---|---|---|---|
| Group | Vector | Dose (vg/kg) | treatment (wks) |
| 1 | TAU_ITR111 (SEQ ID NO: | 1.40E+13 | 6 |
| | 2161; VOY101.CBA.HL.T2A) | | |
| 2 | TAU_ITR111 (SEQ ID NO: | 5.00E+12 | 6 |
| | 2161; VOY101.CBA.HL.T2A) | | |
| 3 | PBS | | 6 |

[0819] At 8 weeks, AD brain lysate containing 56 ng PHF was injected into the CA1 of the hippocampus unilaterally as described above. Some mice were euthanized at the time of seeding, whereas the rest of the mice were euthanized 6 weeks after the seeding. At week 6, CSF and serum were collected; and mice were subjected to intracardiac perfusion with PBS. Brains were harvested for dissection, and either snap frozen for ELISA analysis or fixed in 4% PFA for IgG IHC. Immunohistochemistry analysis was also performed using AT100 antibody.

[0820] Table 110 shows the PT3 expression levels at the time of seeding.

TABLE 110
PT3 levels at the time of seeding (ng/mg)

| | | 5.00E+12 | 1.40E+13 |
|---|---|---|---|
| Tissue type | Vehicle | Vg/Kg | Vg/Kg |
| Cortex | 0.00 | 13.73 | 69.37 |
| | 0.00 | 5.00 | 62.52 |
| | 0.00 | 22.31 | 20.59 |
| | 0.00 | 6.18 | 63.46 |
| | 0.00 | 10.42 | 97.44 |
| Average | 0.00 | 11.53 | 62.68 |
| Hippocampus | 0.00 | 4.26 | 69.04 |
| | 0.00 | 1.17 | 69.71 |
| | 0.00 | 6.99 | 9.36 |
| | 0.00 | 2.58 | 67.02 |
| | 0.00 | 7.00 | 68.28 |
| Average | 0.00 | 4.40 | 56.68 |
| Serum | 0.00 | 8830.00 | 30450.00 |
| | 0.00 | 2665.00 | 35375.00 |
| | 0.00 | 9070.00 | 7075.00 |
| | 0.00 | 5140.00 | 30975.00 |
| | 0.00 | 9050.00 | 46275.00 |
| Average | 0.00 | 6951.00 | 30030.00 |
| CSF | 0.00 | 511.00 | 726.00 |
| | 0.00 | 86.00 | 81.00 |
| | 0.00 | 251.00 | 306.00 |
| | 0.00 | 166.00 | 1941.00 |
| | 0.00 | 275.00 | 965.00 |
| Average | 0.00 | 257.80 | 803.80 |

[0821] As shown in Table 110, dose dependent PT3 levels were observed in the CNS at the time of seeding. The CSF PT3 expression levels obtained in these studies were consistent with the CSF PT3 expression observed in previous studies (5.00E+12 AAV particles resulted in average CSF PT3 levels of 337.87 ng/ml and 1.40E+13 resulted in average CSF PT3 levels of 559.98 ng/ml in previous experiments).

[0822] Distribution of PT3 expression in CNS was determined by IgG-IHC. AAV particle dose dependent expression of PT3 was observed in the CNS. In addition to cortex, hippocampus and thalamus, PT3 expression was also abundant in the cerebellum and brainstem. The broad expression and distribution of PT3 antibody in the CNS was consistent with previous experiments related to PT3 distribution.

[0823] IHC analysis using AT100 antibody was also performed. Anterior and medial levels of the hippocampus were used for quantification. AT-100 IHC analysis showed robust AT100 positive areas in the ipsilateral and contralateral hippocampus of AD-lysate seeded P301S mice. AD-lysate seeding activity was seen from anterior to the posterior hippocampus. Intrinsic AT100 tau pathology was also be observed in the brainstem of P301S female (at 14 weeks).

[0824] The efficacy of treatment with vectorized antibody delivery in P301S hippocampal seeding model was measured using AT100 IHC stained tissue sections. Hippocampi of tissue sections were imaged and the individual hippocampi were traced out in the sections. Any imaging or staining artifacts were annotated “out of the analysis”. The tissue sections from each mouse were numbered 1 through 4, with regions 1 and 2 being the animal left (ipsilateral) and 3 and 4 being the animal right (contralateral) tissue sections. Analysis was performed using HALO algorithm “Indica Labs-Area Quantification v2.1.3 settings 1.” The settings were determined empirically using multiple images to assess lower limit of staining intensity that captured stained pixels without picking up unstained pixels. The HALO algorithm settings for AT100 were 0.493, 0.815, 1.064; and the settings for the hematoxylin staining were 0.123, 0.108, 0.076. The minimum tissue optical density (OD) cut off values for classifying staining as weak, moderate or strong were 0.09, 0.5 and 0.9 respectively.

[0825] PT3 expression was also quantified as AT100 percentage immunoreactivity (IR) per hippocampal area. The results are shown in Table 111. The final row in the table lists the average value (in bold) for each group. There are two ipsilateral and two contralateral hippocampi per plane for most animals. Each data point in Table 111 is an average of AT100 IR per hippocampal area from anterior/medial hippocampal sections. Significance was calculated using one-way ANOVA-Tukey's multiple comparison test.

TABLE 111
PT3 levels at the time of seeding (ng/mg)

| Ipsilateral | | | Contralateral | | |
|---|---|---|---|---|---|
| | PT3 Low | PT3 high | | PT3 Low | PT3 high |
| | (5.00E+12 | (1.40E+13 | | (5.00E+12 | (1.40E+13 |
| Vehicle | Vg/Kg) | Vg/Kg) | Vehicle | Vg/Kg) | Vg/Kg) |
| 13.96 | 1.11 | 4.71 | 17.30 | 0.36 | 3.88 |
| 13.01 | 10.54 | 3.92 | 18.02 | 12.04 | 6.05 |
| 6.08 | 2.63 | 5.31 | 10.39 | 4.16 | 7.67 |
| 12.88 | 0.85 | 2.98 | 13.53 | 0.34 | 4.64 |
| 8.27 | 7.70 | 5.70 | 10.07 | 10.11 | 2.41 |
| 27.68 | 11.43 | 4.79 | 23.74 | 15.93 | 4.98 |
| 1.47 | 8.10 | 12.51 | 0.69 | 5.27 | 15.46 |
| 14.34 | 4.96 | 19.60 | 6.19 | 1.65 | 20.50 |
| 3.99 | 1.25 | 5.58 | 1.64 | 24.99 | 6.91 |
| 14.06 | 24.13 | 3.42 | 14.17 | 12.98 | 5.00 |
| 5.37 | 15.47 | 1.09 | 9.47 | 3.47 | 0.27 |
| 16.18 | 2.27 | 0.39 | 19.37 | 13.99 | 0.13 |
| 7.69 | 8.70 | 0.26 | 12.59 | 11.92 | 0.07 |
| 11.97 | 9.73 | 9.87 | 12.69 | 7.04 | 12.79 |
| 10.22 | 8.45 | 11.88 | 10.19 | 4.70 | 15.24 |
| — | 5.24 | 3.44 | — | 12.89 | 3.57 |
| — | 9.32 | — | — | 7.94 | — |
| — | 9.24 | — | — | — | — |
| 11.15 | 7.84 | 5.97 | 12.00 | 8.81 | 6.85 |

[0826] There was a significant reduction in the hippocampal AT100 positive areas in animals treated with 1.40E+13 vg/kg both at the ipsilateral site (46.5% reduction) and at the contralateral sites (43% reduction). A similar trend was observed in mice treated with 5.00E+12 Vg/Kg, but without statistical significance (see FIG. 3). Together, these data demonstrate a dose dependent reduction in AT100 positive staining in mice following IV delivery of VOY101.PT3 particles.

[0827] Similar experiments can also be performed using otherwise identical constructs, except for using tissue-specific promoters (as opposed to the ubiquitous CBA promoter), such as the SYN or GFAP promoter.

### Example 2B. Efficacy of VOY101.PHF1 Constructs in a Hippocampal Seeding Model

[0828] Similar to the experiment described in Example 2A, efficacy of a VOY101.CBA.PHF1 construct were examined in the hippocampal seeding model. Mice were transduced intravenously AAV particles comprising VOY101.TAU_ITR243 (SEQ ID NO: 2315) particles at 1.4E+13 and 1.4E+14 Vg/Kg doses.

[0829] Dose dependent PHF1 levels were observed in the CNS at the time of seeding (see FIG. 4A) and at termination (data not shown). ATR100 staining of the hippocampus showed that injection of vectorized PHF1 construct was effective at the higher dose 1.4E+14 Vg/Kg, achieving about 46% reduction of AT100 positive area (see FIG. 4B). These data show that intravenous delivery of vertorized PHF1, which targets the C-terminal of tau, was effective at reducing tau burden in this hippocampal seeding model.

[0830] Similar experiments can also be performed using otherwise identical constructs, except for using tissue-specific promoters (as opposed to the ubiquitous CBA promoter), such as the SYN or GFAP promoter.

### Example 3A. Efficacy of VOY101.PHF1 Constructs in Intrinsic Model

[0831] Efficacy of a VOY101.CBA.PHF1 construct in an intrinsic tauopathy P301S mouse model was examined. Briefly, VOY101.TAU_ITR243 (SEQ ID NO: 2315) particles were delivered intravenously into mice at age of 8 weeks at 3 doses: 1.4E+13, 4.4E+13, or 1.4E+14 Vg/Kg. Tauopathy was allowed to progress naturally over 3 months, and mouse tissues were examined after termination.

[0832] Expression levels of PHF1 antibody increased in an AAV particle dose-dependent manner in the cortex and CSF at termination of the experiment (see FIG. 5A). Efficacy against tau pathology was carried out using AT8 antibody to measure tau levels by ELISA, and at all three doses tested, AT8 immunoreactivity was reduced by at least 45% in average, up to about 59% reduction (all statistically significant). These data demonstrated that intravenous delivery of vertorized PHF1 was effective at reducing tau burden in this intrinsic tauopathy model.

[0833] Similar experiments can also be performed using otherwise identical constructs, except for using tissue-specific promoters (as opposed to the ubiquitous CBA promoter), such as the SYN or GFAP promoter.

### Example 3B. Efficacy of VOY101.PT3 Constructs in Intrinsic Model

[0834] Efficacy of a VOY101.CBA.PT3 construct in an intrinsic tauopathy P301S mouse model is examined. Briefly, VOY101.TAU_ITR111 (SEQ ID NO: 2161) particles are delivered intravenously into mice at age of 8 weeks at 3 doses: 1.4E+13, 4.4E+13, or 1.4E+14 Vg/Kg. Tauopathy is allowed to progress naturally over 3 months, and mouse tissues are examined after termination.

[0835] Expression levels of PT3 antibody increases in an AAV particle dose-dependent manner in the cortex and CSF at termination of the experiment. Efficacy against tau pathology is carried out using AT8 antibody to measure tau levels by ELISA, and at all three doses tested, AT8 immunoreactivity is reduced. These data demonstrates that intravenous delivery of vertorized PT3 is effective at reducing tau burden in the intrinsic tauopathy model.

[0836] Similar experiments can also be performed using otherwise identical constructs, except for using tissue-specific promoters (as opposed to the ubiquitous CBA promoter), such as the SYN or GFAP promoter.

### Example 4. Effect of Inflammation at Injection Site on Antibody Staining

[0837] The effect of injury/inflammation at the site of injection on the PT3 antibody staining pattern in the glia and the neurons is tested. 19 week-old htau female mice (B6.Cg-Mapt^{tml(EGFP)Klt} Tg(MAPT)8cPdav/J; The Jackson Laboratory, Bar Harbor, ME) are injected with PBS intracranially into the olfactory bulb. One day after the injection, AAV particles comprising viral genome TAU_ITR111 (SEQ ID NO: 2161; VOY101.CBA.HL.T2A) formulated in formulation buffer (10 mM disodium phosphate, 2 mM monopotassium phosphate, 2.7 mM potassium chloride, 192 mM sodium chloride and 0.001% Pluronic Acid (F-68)) are provided intravenously at a dose of 1.4e13/kg. Whole brain samples are collected at 28 days and fixed in formalin. Brains are analyzed by immunohistochemistry for glial and neuronal vector biodistribution.

### Example 5. Efficacy of Vectorized Antibody Delivery in Olfactory Bulb Propagation Model

[0838] Nineteen week-old mice are injected with 0.4 μg ePHF in 2 μL or PBS. One day later, AAV particles comprising viral genome CBA.HL.T2A (TAU_ITR111; SEQ ID NO: 2161), GFAP-PT3-HF.T2AL (TAU_ITR113; SEQ ID NO.2163) or SYN-PT3-HF.T2AL (TAU_ITR114; SEQ ID NO. 2164) are provided intravenously at a dose of 1.4e13/kg or 7.0e13/kg. AAV particles are formulated in formulation buffer (10 mM disodium phosphate, 2 mM monopotassium phosphate, 2.7 mM potassium chloride, 192 mM sodium chloride and 0.001% Pluronic Acid (F-68)). Mice injected with formulation buffer alone will serve as the vehicle control group. 16 weeks after the injection, the mice are euthanized and CNS, serum, liver and/or other tissue samples are collected. Additionally, each experiment includes a control group of animals that are not seeded with ePHF, but are treated with the AAV particles described herein or formulation buffer. Animals are euthanized at 16 weeks and brain samples analyzed for PT3 expression by ePHF ELISA and IHC as well as vector biodistribution,

[0839] For efficacy studies, the entire brain is fixed in formalin and sectioned horizontally. For expression studies, the right half of the brain and lumbar SC tissues are fixed with 4% PFA; whereas the left half of the brain and cervical/thoracic SC are flash frozen. Liver, serum and CSF are also harvested at the end of the study. Harvested whole brain is analyzed by AT100 IHC analysis of the tissues (specifically, the olfactory bulb, piriform cortex, Entorhinal cortex, thalamus, hippocampus CA1, amygdala); expression samples are analyzed by ePHF ELISA (specifically, CNS tissue, CSF, peripheral tissues, serum); IgG1immunohistochemistry (IHC); and vector genome quantification (specifically, cortex, hippocampus, thalamus, OB, BS, thoracic SC, and liver).

[0840] Similar experiments can also be performed using otherwise identical constructs, except for using tissue-specific promoters (as opposed to the ubiquitous CBA promoter), such as the SYN or GFAP promoter.

### Example 6. Kinetics of Antibody Expression after Intravenous Dosing of Vectorized Anti-Tau Antibodies

[0841] Viral genome comprising vectorized PT3 construct with CBA (TAU_ITR111, SEQ ID NO: 2161), GFAP (TAU_ITR105; SEQ ID NO: 2155) or SYN (TAU_ITR106, SEQ ID NO: 2156) promoters are packaged in VOY101 blood brain barrier-penetrant capsid and injected intravenously into wild-type mice at 1.4E+13 Vg/Kg. Samples were collected on day 1, 2, 3, 7, 14 and 28 after injection. Following i.v. administration, antibody expression could be detected as early as 2 days, approached maximum levels at 7 days, and plateaued 14-28 days post-injection (see FIG. 6B).

[0842] Particularly in the hippocampus, AAV biodistribution (FIG. 6A) and antibody expression (FIG. 6B) both approached stable levels by 7 days-post injection and plateaued at 14-28 days post-dose, stabilizing at approximately 30 vg/cell and antibody concentrations of 2750 ng/g tissue for the CBA and GFAP promoters and 450 ng/g tissue for the SYN promoter in the hippocampus. These data demonstrate that the antibody vector constructs have good biodistribution and effective antibody expression.

[0843] Additionally, antibody levels in different CNS and fluid compartment 5 weeks after injection of viral particles comprising VOY101.CBA.PT3 or VOY101.CBA.PHF1 were compared to antibody levels after injection of the respective purified PT3 and PHF1 antibodies (passive immunization) (see Table 114). CSF and serum data from passive immunization (PT3 or PHF1, 1× weekly) fall within the range of published data from various antibody by passive immunization with similar dosing paradigm. Under the experimental condition used, PHF1 expression levels were lower in hippocampus (7.5× lower), cortex (10× lower), thalamus (5.4× lower) and brainstem (1.8× lower) compared to PT3 expression levels in the corresponding CNS regions of mice dosed with equal amount of CBA.PT3 vector genome (1.4e3 vg/kg).

[0844] Overall, injection of a single dose of vectorized antibody resulted in a much higher level of both PT3 and PHF1 antibodies in the CNS. This data demonstrates superiority of transduction with vectorized antibody over passive immunization.

TABLE 114
Pharmacokinetics of CBA.PT3 and CBA.PHF1 vectors

| | | | | | |
|---|---|---|---|---|---|
| Cortex | Hippocampus | Thalamus | Brainstem | CSF | Serum |
| (ng/g) | (ng/g) | (ng/g ) | (ng/g) | (ng/mL) | (μg/mL) |

Immunization with vectorized antibody

| | | | | | | |
|---|---|---|---|---|---|---|
| CBA.PT3 | 7535 | 2785 | 5000 | 5880 | 596.8 | 75 |
| (1.4e13 Vg/kg) | | | | | | |
| CBA.PHF1 | 699.1 | 367.4 | 922 | 3285 | 86 | 20 |
| (1.4e13 Vg/kg) | | | | | | |
| CBA.PHF1 | 1223 | 899 | 2762 | 9186 | 374 | 130 |
| (4.4e13 Vg/kg) | | | | | | |
| CBA.PHF1 | 2389 | 2567 | 5092 | 15936 | 512 | 534 |
| (1.4e14 Vg/kg) | | | | | | |

Passive immunization

| | | | | | | |
|---|---|---|---|---|---|---|
| PT3 (30 mg/kg, | | | | | 283.2 | 359.2 |
| 1×, weekly) | | | | | | |
| PHF1 (40 mg/kg, | 66.2 | 113 | 375 | 1350 | 292 | 465 |
| 1×, weekly) | | | | | | |
| PHF1 (40 mg/kg, | 92.7 | 142 | 695 | 1200 | 621 | 540 |
| 2× weekly | | | | | | |

[0845] Similar experiments can also be performed using otherwise identical constructs, except for using tissue-specific promoters (as opposed to the ubiquitous CBA promoter), such as the SYN or GFAP promoter.

### Example 7. Evaluation of Capsids and PT3 Antibody Constructs in Non-Human Primates

[0846] Adult rhesus macaque monkeys pre-screened for low anti-AAV antibody levels will receive intravenous (IV) or intracisternal magna (CM or ICM) administration of capsids and/or PT3 antibody constructs (e.g. TAU_ITR111 (SEQ ID NO: 2161) to assess CNS biodistribution and transduction of capsids and/or PT3 antibody constructs.

[0847] AAV capsids and PT3 antibody constructs (e.g. TAU_ITR111, SEQ ID NO: 2161) will be formulated in a solution containing 10 mM Sodium Phosphate Dibasic, 2 mM Potassium Phosphate Monobasic, 2.7 mM Potassium Chloride, 192 mM Sodium Chloride, 0.001% Pluronic F-68. The study design is provided in Table 112.

TABLE 112
Experimental Design Overview

| | | | | | | |
|---|---|---|---|---|---|---|
| Grp | 1 | 2 | 3 | 4 | 5 | 6 |
| Test article | VOY101.CBA. | VOY101.CBA. | VOY1O1. | Vehicle | VOY101.CBA. | Vehicle |
| | PT3.HL.T2A; | PT3.HL.T2A; | Empty | (PBS, | PT3.HL.T2A; | (PBS, |
| | TAU_ITR111 | TAU_ITR111 | capsid | 0.001% | TAU_ITR111 | 0.001% |
| | (SEQ ID NO: | (SEQ ID NO: | | F-68) | (SEQ ID NO: | F-68) |
| | 2161) | 2161) | | | 2161) | |
| Route | IV | IV | IV | IV | ICM | ICM |
| Dose | 1.6e13 vg/kg | 5.0 e13 vg/kg | 7.8 | N/A | 3.0e13 vg/kg | N/A |
| | | | VLP/kg | | | |
| Number (F = | 3 (2F/1M) | 3 (1F/2M) | 3 (2F/1M) | 2 | 3 (1F/2M) | 2 |
| female; M = | | | | (1F/1M) | | (1F/1M) |
| male) | | | | | | |
| Average NHP | 3 | 3 | 3 | 3 | 3 | 3 |
| weight | | | | | | |
| Duration | Day 29 | Day 29 | Day 29 | Day 29 | Day 29 | Day 29 |

[0848] The study is performed in stages. For group 1 involving low dose, one animal is dosed intravenously and observed for 10 days; if tolerated, then next two animals are dosed and observed for full period to day 29. If group 1 involving low dose is tolerated, then group 2 is initiated into the study. Similar to group 1, one animal in group 2 is dosed intravenously with the high dose of the test article and observed for 10 days. If tolerated, then the next 2 animals are dosed. A similar strategy is adopted for group three. All intravenous deliveries are administered at an IV infusion rate of 5 ml/kg over 1.5 hours.

[0849] For groups related to ICM dosing (i.e. group 5 and group 6), one animal is dosed and observed for 10 days. If the dose is tolerated, then the next two animals are treated. Animals are maintained under isoflurane sedation. A stereotaxic frame and manipulator are used for the procedure. The placement of the needle placement is confirmed by CSF flow. 2 ml of CSF is collected. The TA is infused at 0.5 ml/min (total 3 ml) and the needle is flushed. The needle remains in place for 5 min, and the animal is then placed in the Trendelenburg position (15-30 deg, feet above head) for 10 min. Animals will be monitored for the following clinical parameters (see Table 113).

TABLE 113
Clinical parameters

| Parameters | Frequency |
|---|---|
| Clinical Signs | Daily |
| Body weight/Food Consumption | Weekly |
| FOB cage: fine motor and 10 | Only for ICM arms: Pre (training), Day |
| nerves; open field: body motor | 10, 30 |
| Clinical Pathology (standard | Heme and chem: Pre (week −1, Day 1), |
| serum chem) | Days 3, 5, 7, 14, 21, 29 |
| | Coagulation: Pre (week-1) days 7 & 28 |
| Cytokine and complement panel | Pre (day 1), 6 h, 12 h, 24 h, 48 h, 96 h, |
| | 14 d, 27 d post-dose |
| CSF (lumbar puncture: count | Pre (1x), Day 7, 15, 29 |
| and cell differential), antibody | |
| protein | |
| Gross necropsy including | Day 29 |
| organ weights | |
| Histopathology | Brain, spinal cord, 3 pairs of DRG (C6, |
| | T6, L4), peripheral nerves, liver, |
| | relevant gross observations |

[0850] On day 29, animals are euthanized and tissue samples are collected. One hemisphere of the brain is placed in 4% paraformaldehyde (for hematoxylin and eosin studies as well immunohistochemical analysis). Contralateral hemispheres are snap frozen in vapor phase: isopentane. Biodistribution is measured by tissue punches for vector genome level analysis and protein analysis of CNS and PNS tissue. The entire brain is weighed, and volume calculated. The brain is placed in ice-cold PBS for approximately 15 mins before being placed in a refrigerated brain mold and sliced coronally in 3-4 mm slabs. Samples are placed on ice cold board, alphabetized, and photographed. Right hemisphere post-fixed and left hemisphere frozen on 3×5 glass slides and wrapped in foil.

[0851] Each pair of dorsal root ganglia are collected i.e. from C1-7, T1-12, L1-L7 and sacral regions. Odd segment DRG pairs are frozen in vapor phase isopentane and dry ice) for vector genome quantification and mRNA analysis. Even segment DRG pairs are placed in 4% paraformaldehyde for H&E and IHC analyses. Antibody expression and biodistribution analyses are carried out in a tiered format i.e. if tier 1 analysis is effective, then tier 2 tissue are analyzed. Tissues analyzed in tier 1 include frontal cortex, motor cortex, hippocampus, putamen, liver, serum, CSF. Tissues analyzed in tier 2 include thalamus, caudate, substantia nigra, hypothalamus, amygdala, basal ganglia, cerebellum, deep cerebellar nuclei, brainstem, DRG, spinal cord, and retina.

[0852] For each peripheral tissue sample, one piece is flash-frozen. Approximately 500 mg to 1.5 g of peripheral tissue is collected. Post-collection, all tissues are sliced 3-4 mm thickness and placed in 4% paraformaldehyde for 24-32 hours at room temperature and then transferred to phosphate buffered saline (PBS) after rinse. Peripheral tissues collected include heart, kidney, liver, lung, spleen, lymph node-cervical, lymph node-prescapular, muscle-vastus lateralis, sciatic nerve, rinse eye (prespecified volume collected).

[0853] AAV biodistribution is measured by quantifying vector genome levels in the cortex, hippocampus, striatum, and liver. PT3 levels are measured using ePHF ELISA in cortex, hippocampus, striatum, liver, serum, and CSF. Tissues are also immunostained with HRP labeled mouse IgG1 for presence of Tau antibodies. Further, these sample are co-immunostained with NeuN, IbaI or GFAP to identify the cell type. CSF antibody expression level, brain antibody expression level, cell specificity, distribution in the brain, and safety/tolerability parameters are evaluated in this study.

[0854] Similar experiments can also be performed using otherwise identical constructs, except for using tissue-specific promoters (as opposed to the ubiquitous CBA promoter), such as the SYN or GFAP promoter.

### Example 8. Construction of Viral Genomes for the Expression of Antibody Fragments

[0855] Sixteen viral genomes were designed for the expression of PHF1 F(ab′)2, Fab and scFv fragments (SEQ ID NO: 4547-4562), driven by one of four promoters (CAG, CBA, GFAP or synapsin). scFv fragments constructs were designed in two configurations (heavy-linker-light or light-linker-heavy). These constructs are described in Tables 5B and 92-95.

### VIII. Equivalents and Scope

[0856] Those skilled in the art will recognize, or be able to ascertain using no more than routine experimentation, many equivalents to the specific embodiments in accordance with the disclosure described herein. The scope of the present disclosure is not intended to be limited to the above Description, but rather is as set forth in the appended claims.

[0857] In the claims, articles such as “a,” “an,” and “the” may mean one or more than one unless indicated to the contrary or otherwise evident from the context. Claims or descriptions that include “or” between one or more members of a group are considered satisfied if one, more than one, or all of the group members are present in, employed in, or otherwise relevant to a given product or process unless indicated to the contrary or otherwise evident from the context. The disclosure includes embodiments in which exactly one member of the group is present in, employed in, or otherwise relevant to a given product or process. The disclosure includes embodiments in which more than one, or the entire group members are present in, employed in, or otherwise relevant to a given product or process.

[0858] It is also noted that the term “comprising” is intended to be open and permits but does not require the inclusion of additional elements or steps. When the term “comprising” is used herein, the term “consisting of” is thus also encompassed and disclosed.

[0859] Where ranges are given, endpoints are included. Furthermore, it is to be understood that unless otherwise indicated or otherwise evident from the context and understanding of one of ordinary skill in the art, values that are expressed as ranges can assume any specific value or subrange within the stated ranges in different embodiments, to the tenth of the unit of the lower limit of the range, unless the context clearly dictates otherwise.

[0860] In addition, it is to be understood that any particular embodiment of the present disclosure that falls within the prior art may be explicitly excluded from any one or more of the claims. Since such embodiments are deemed to be known to one of ordinary skill in the art, they may be excluded even if the exclusion is not set forth explicitly herein. Any particular embodiment of the compositions (e.g., any antibiotic, therapeutic or active ingredient; any method of production; any method of use; etc.) can be excluded from any one or more claims, for any reason, whether or not related to the existence of prior art.

[0861] It is to be understood that the words which have been used are words of description rather than limitation, and that changes may be made within the purview of the appended claims without departing from the true scope and spirit in its broader aspects.

[0862] While the present disclosure has been described at some length and with some particularity with respect to the several described embodiments, it is not intended that it should be limited to any such particulars or embodiments or any particular embodiment, but it is to be construed with reference to the appended claims so as to provide the broadest possible interpretation of such claims in view of the prior art and, therefore, to effectively encompass the intended scope.

1. An isolated, nucleic acid comprising a transgene encoding an antibody or an antibody fragment thereof that binds to tau, comprising a heavy chain variable region (VH) and a light chain variable region (VL), wherein:
(i) the nucleotide sequence encoding the VH, comprises the nucleotide sequence of SEQ ID NO: 1839, 1841, or 2170, or a nucleotide sequence having at least 90%, 92%, 95%, 96%, 97%, 98%, or 99% sequence identity thereto; and/or
(ii) the nucleotide sequence encoding the VL comprises the nucleotide sequence of SEQ ID NO: 1957 or 4565, or a nucleotide sequence having at least 90%, 92%, 95%, 96%, 97%, 98%, or 99% sequence identity thereto.

2. The nucleic acid of claim 1, wherein:
(1) the nucleotide sequence encoding the VH comprises SEQ ID NO: 1841, or a nucleotide sequence having at least 90%, 92%, 95%, 96%, 97%, 98%, or 99% sequence identity thereto, and the nucleotide sequence encoding the VL comprises SEQ ID NO: 4565, or a nucleotide sequence having at least 90%, 92%, 95%, 96%, 97%, 98%, or 99% sequence identity thereto;
(2) the nucleotide sequence encoding the VH comprises SEQ ID NO: 1839, or a nucleotide sequence having at least 90%, 92%, 95%, 96%, 97%, 98%, or 99% sequence identity thereto, and the nucleotide sequence encoding the VL comprises SEQ ID NO: 1957, or a nucleotide sequence having at least 90%, 92%, 95%, 96%, 97%, 98%, or 99% sequence identity thereto; or,
(3) the nucleotide sequence encoding the VH comprises SEQ ID NO: 2170, or a nucleotide sequence having at least 90%, 92%, 95%, 96%, 97%, 98%, or 99% sequence identity thereto, and the nucleotide sequence encoding the VL comprises SEQ ID NO: 1957, or a nucleotide sequence having at least 90%, 92%, 95%, 96%, 97%, 98%, or 99% sequence identity thereto.

3. The nucleic acid of claim 1, which further comprises a nucleotide sequence encoding a signal sequence, optionally wherein the nucleotide sequence encoding the signal sequence:
(i) is located 5′ relative to the nucleotide sequence encoding the VH and/or 5′ relative to nucleotide sequence encoding the VL;
(ii) comprises the nucleotide sequence of signal sequence provided in Table 3 or Table 11, or a nucleotide sequence at least 90%, 92%, 95%, 96%, 97%, 98%, or 99% sequence identity thereto;
(iii) comprises the nucleotide sequence of any one of SEQ ID NOs: 1741, 4564, or 1862, or a nucleotide sequence at least 90%, 92%, 95%, 96%, 97%, 98%, or 99% sequence identity thereto;
(iv) comprises the nucleotide sequence of SEQ ID NO: 1741, or a nucleotide sequence at least 90%, 92%, 95%, 96%, 97%, 98%, or 99% sequence identity thereto and is located 5′ relative to the nucleotide sequence encoding the VH;
(v) comprises the nucleotide sequence of SEQ ID NO: 4564 or 1862, or a nucleotide sequence at least 90%, 92%, 95%, 96%, 97%, 98%, or 99% sequence identity thereto and is located 5′ relative to the nucleotide sequence encoding the VL;
(vi) comprises the nucleotide sequence of SEQ ID NO: 1741, or a nucleotide sequence at least 90%, 92%, 95%, 96%, 97%, 98%, or 99% sequence identity thereto and is located 5′ relative to the nucleotide sequence encoding the VH; and comprises the nucleotide sequence of SEQ ID NO: 4564, or a nucleotide sequence at least 90%, 92%, 95%, 96%, 97%, 98%, or 99% sequence identity thereto and is located 5′ relative to the nucleotide sequence encoding the VL; or
(vii) comprises the nucleotide sequence of SEQ ID NO: 1741, or a nucleotide sequence at least 90%, 92%, 95%, 96%, 97%, 98%, or 99% sequence identity thereto and is located 5′ relative to the nucleotide sequence encoding the VH; and comprises the nucleotide sequence of SEQ ID NO: 1862, or a nucleotide sequence at least 90%, 92%, 95%, 96%, 97%, 98%, or 99% sequence identity thereto and is located 5′ relative to the nucleotide sequence encoding the VL.

4. The nucleic acid of claim 1, wherein:
(i) the nucleotide sequence encoding the VH is located 5′ relative to the nucleotide sequence encoding the VL; or
(ii) the nucleotide sequence encoding the VL is located 5′ to the nucleotide sequence encoding the VH.

5. The nucleic acid of claim 1, comprising:
(i) a nucleotide sequence encoding a VH signal sequence comprising SEQ ID NO: 1741, a nucleotide sequence encoding the VH comprising SEQ ID NO: 1841, a nucleotide sequence encoding a VL signal sequence comprising SEQ ID NO: 4564, and a nucleotide sequence encoding the VL comprising SEQ ID NO: 4565;
(ii) a nucleotide sequence encoding a VH signal sequence comprising SEQ ID NO: 1741, a nucleotide sequence encoding the VH comprising SEQ ID NO: 2170, and a nucleotide sequence encoding the VL comprising SEQ ID NO: 1957; or,
(iii) a nucleotide sequence encoding a VH signal sequence comprising SEQ ID NO: 1862, a nucleotide sequence encoding the VL comprising SEQ ID NO: 1957, and a nucleotide sequence encoding the VH comprising SEQ ID NO: 1839.

6. The nucleic acid of claim 1, wherein: the encoded VH and VL:
(i) are connected directly, e.g., without a linker;
(ii) are connected via a linker;
(iii) are connected via a linker, wherein the linker comprises, or is encoded by a linker polynucleotide comprising:
(a) the sequence of any of the linker polynucleotide sequences provided in Table 2 or a sequence at least 90%, 92%, 95%, 96%, 97%, 98%, or 99% identical thereto;
(b) an encoded furin cleavage site and/or an encoded T2A polypeptide;
(c) an encoded hinge region, e.g., an encoded IgG1 hinge region and/or an encoded IgG3 hinge region;
(d) a (Gly4Ser)n linker, wherein n is 1-10, e.g., n is 3, 4, or 5;
(e) the sequence of any one or more of SEQ ID NOs: 1724, 1726, 1739, 2244, and/or 1730, or a sequence at least 90%, 92%, 95%, 96%, 97%, 98%, or 99% identical thereto;
(f) the sequence of SEQ ID NO: 1739 and SEQ ID NO: 2244, followed by a nucleotide sequence encoding a Furin cleavage site (e.g., SEQ ID NO: 1724), and further followed by a nucleotide sequence encoding a T2A polypeptide (e.g., SEQ ID NO: 1726);
(g) a nucleotide sequence encoding a Furin cleavage site (e.g., SEQ ID NO: 1724), followed by a nucleotide sequence encoding a T2A polypeptide (e.g., SEQ ID NO: 1726); or,
(h) a (Gly4Ser)₃ linker (e.g., SEQ ID NO: 1730).

7. (canceled)

8. The nucleic acid of claim 6, comprising, from 5′ to 3′:
(i) the nucleotide sequences of SEQ ID NOs: 1741, 1841, 1739, 2244, 1724, 1726, 4564, and 4565, or a sequence at least 90%, 92%, 95%, 96%, 97%, 98%, or 99% identical thereto;
(ii) the nucleotide sequences of SEQ ID NOs: 1741, 1841, 1724, 1726, 4564, and 4565, or a sequence at least 90%, 92%, 95%, 96%, 97%, 98%, or 99% identical thereto;
(iii) the nucleotide sequences of SEQ ID NOs: 1741, 2170, 1730, and 1957, or a sequence at least 90%, 92%, 95%, 96%, 97%, 98%, or 99% identical thereto; or,
(iv) the nucleotide sequences of SEQ ID NOs: 1862, 1957, 1730, and 1839, or a sequence at least 90%, 92%, 95%, 96%, 97%, 98%, or 99% identical thereto.

9. An isolated antibody or antibody fragment encoded by the nucleic acid of claim 1.

10. A viral genome, e.g., an adeno-associated (AAV) viral genome, which comprises a first promoter operably linked to the transgene encoded by the nucleic acid of claim 1.

11. The AAV viral genome of claim 10, which further comprises a second promoter, wherein the first promoter is operably linked to the first polynucleotide sequence, and the second promoter is operably linked to the second polynucleotide sequence, optionally wherein, the first promoter is the same as the second promoter, or the first promoter is different from the second promoter.

12. The AAV viral genome of claim 10, wherein the first promoter and/or the second promoter comprises:
(i) a ubiquitous promoter or a CNS-specific promoter, optionally wherein the CNS-specific promoter comprises a neuronal-specific promoter, glial cell-specific promoter, oligodendrocyte-specific promoter, or astrocyte-specific promoter;
(ii) a ubiquitous promoter, where in the ubiquitous promoter is:
(a) CAG (e.g., SEQ ID NO: 2080 or 2238), CBA (e.g., SEQ ID NO: 2084), CB (e.g., SEQ ID NO: 2083), CB6, CMV, EF-1α, PGK, UBC, GUSB (hGBp), UCOE, or a nucleotide sequence having at least 90%, 92%, 95%, 96%, 97%, 98%, or 99% sequence identity thereto;
(b) a CAG promoter, which comprises a minimum CBA promoter (e.g., SEQ ID NO: 2082 or 2083), and a CMVie enhancer (e.g., SEQ ID NO: 2081 or 2087); or
(c) a minimum CBA promoter (e.g., SEQ ID NO: 2082 or 2083) or a nucleotide sequence having at least 90%, 92%, 95%, 96%, 97%, 98%, or 99% sequence identity thereto, and a CMVie enhancer (e.g., SEQ ID NO: 2081 or 2087) or a nucleotide sequence having at least 90%, 92%, 95%, 96%, 97%, 98%, or 99% sequence identity thereto;
(iii) a neuronal-specific promoter, wherein the neuronal-specific promoter is synapsin (Syn) promoter (e.g., SEQ ID NO: 2086), NSE promoter, methyl-CpG binding protein 2 (MeCP2) promoter, Ca2+/calmodulin-dependent protein kinase II (CaMKII) promoter, metabotropic glutamate receptor 2 (mGluR2) promoter, neurofilament light (NFL) or heavy (NFH) promoter, β-globin minigene nβ2 promoter, preproenkephalin (PPE) promoter, enkephalin (Enk) promoter, excitatory amino acid transporter 2 (EAAT2) promoter, or a nucleotide sequence having at least 90%, 92%, 95%, 96%, 97%, 98%, or 99% sequence identity thereto; and/or
(iv) an astrocyte-specific promoter, wherein the astrocyte-specific promoter is glial fibrillary acidic protein (GFAP) promoter (e.g., SEQ ID NO: 2085), or EAAT2 promoter, or a nucleotide sequence having at least 90%, 92%, 95%, 96%, 97%, 98%, or 99% sequence identity thereto; or wherein the oligodendrocyte-specific promoter is myelin basic protein (MBP) promoter, or a nucleotide sequence having at least 90%, 92%, 95%, 96%, 97%, 98%, or 99% sequence identity thereto.

13. (canceled)

14. The AAV viral genome of claim 10, further comprising:
(i) an enhancer, optionally wherein the enhancer comprises a CMVie enhancer (e.g., SEQ ID NO: 2081 or 2087);
(ii) a polyadenylation (polyA) signal region, optionally, wherein the polyA signal region comprises the nucleotide sequence of any of SEQ ID NO: 2122-2124, or a nucleotide sequence with at least 95% identity thereto, optionally wherein the polyA signal region comprises the nucleotide sequence of SEQ ID NO: 2122, or a nucleotide sequence at least 95% identical thereto;
(iii) at least one ITR sequence, optionally wherein:
(a) one ITR sequence is positioned 5′ relative to the encoded transgene and/or one ITR sequence is positioned 3′ relative to the encoded transgene;
(b) said at least one ITR sequence comprises a nucleotide sequence of any one of SEQ ID NOs: 2076-2079, or a nucleotide sequence with at least 80%, 85%, 90%, or 95% sequence identity thereto; and/or
(c) one ITR sequence is positioned 5′ relative to the encoded transgene and comprises a nucleotide sequence of SEQ ID NO: 2076 or a nucleotide sequence with at least 80%, 85%, 90%, or 95% sequence identity thereto; and/or one ITR sequence is positioned 3′ relative to the encoded transgene and comprises a nucleotide sequence of SEQ ID NO: 2078 or a nucleotide sequence with at least 80%, 85%, 90%, or 95% sequence identity thereto;
(iv) at least 1, 2, or 3 intron regions, optionally, wherein each intron region independently comprises a nucleotide sequence of any of the intron regions listed in Table 10, or a nucleotide sequence with at least 95% identity thereto;
(v) at least 1, 2, or 3 exon regions; optionally, wherein each exon region independently comprises a nucleotide sequence of any of the exon sequences in Table 9, or a nucleotide sequence with at least 95% identity thereto;
(vi) a BSA nucleotide sequence comprising SEQ ID NO: 4563 or a nucleotide sequence at least 80% identical thereto; and/or
(vii) a Kozak sequence, optionally wherein the Kozak sequence comprises the nucleotide sequence of SEQ ID NO: 2114 or 4543.

15. The AAV viral genome of claim 14, wherein:
(i) said intron regions comprise an ie intron 1, a beta-globin intron, or a combination thereof;
(ii) said intron regions comprise the nucleotide sequence of SEQ ID NO: 2095, 2097, or a combination thereof, or a nucleotide sequence at least 95% sequence identity thereto;
(iii) said exon regions comprise an ie1 exon 1 or a beta-globin exon; and/or
(iv) said exon regions comprise the nucleotide sequence of SEQ ID NO: 2090, 2093, or a combination thereof, or a nucleotide sequence at least 95% identical thereto.

16. The AAV viral genome of claim 14, wherein the BSA sequence comprising the nucleotide sequence of SEQ ID NO: 4563 is present immediately 5′ to the nucleotide sequence encoding the most 5′ encoded VL or VH.

17. The AAV viral genome of claim 10, further comprising;
(i) a nucleotide sequence encoding a miR binding site, e.g., a miR binding site that modulates, e.g., reduces, expression of the payload encoded by the AAV viral genome in a cell or tissue where the corresponding miRNA is expressed;
(ii) at least 1-5 copies of an encoded miR binding site, e.g., at least 1, 2, 3, 4, or 5 copies;
(iii) at least 3 or 4 copies of an encoded miR binding site, optionally wherein all copies comprise the same miR binding site, or at least one, two, three or all of the copies comprise a different miR binding site, and/or,
(iv) wherein the encoded miR binding site comprises a miR122 binding site, a miR183 binding site, a miR-142-3p, or a combination thereof, optionally wherein:
(a) the encoded miR122 binding site comprises the nucleotide sequence of SEQ ID NO: 4566, or a nucleotide sequence substantially identical (e.g., having at least 90%, 92%, 95%, 97%, 98%, or 99% sequence identity) thereto; or a nucleotide sequence having at least one, two, three, four, five, six, or seven modifications, but no more than ten modifications of SEQ ID NO: 4566;
(b) the encoded miR183 binding site comprises the nucleotide sequence of SEQ ID NO: 4569, or a nucleotide sequence substantially identical (e.g., having at least 90%, 92%, 95%, 97%, 98%, or 99% sequence identity) thereto; or a nucleotide sequence having at least one, two, three, four, five, six, or seven modifications, but no more than ten modifications of SEQ ID NO: 4569; and/or
(c) the encoded miR-142-3p binding site comprises the nucleotide sequence of SEQ ID NO: 4568, or a nucleotide sequence substantially identical (e.g., having at least 90%, 92%, 95%, 97%, 98%, or 99% sequence identity) thereto; or a nucleotide sequence having at least one, two, three, four, five, six, or seven modifications, but no more than ten modifications of SEQ ID NO: 4568.

18.-20. (canceled)

21. An AAV viral genome comprising:
(i) the nucleotide sequence of any one of SEQ ID NOs: 4547, 4548, 4551, 4552, 4555, 4556, 4559, or 4560, or a nucleotide sequence having at least 90%, 92%, 95%, 96%, 97%, 98%, or 99% sequence identity thereto; or
(ii) the nucleotide sequence of any one of SEQ ID NOs: 4549, 4550, 4553, 4554, 4557, 4558, 4561, or 4562, or a nucleotide sequence having at least 90%, 92%, 95%, 96%, 97%, 98%, or 99% sequence identity thereto, optionally wherein the nucleotide sequence comprises or does not comprise a tag, e.g., comprising the nucleotide sequence of SEQ ID NO: 2118.

22. A viral particle, e.g., an AAV viral particle, comprising the AAV viral genome of claim 10, and a capsid protein.

23. The AAV viral particle of claim 22, wherein:
(i) the capsid protein comprises
a VOY101, VOY201, AAVPHP.B (PHP.B), AAVPHP.A (PHP.A), AAVG2B-26, AAVG2B-13, AAVTH1.1-32, AAVTH1.1-35, AAVPHP.B2 (PHP.B2), AAVPHP.B3 (PHP.B3), AAVPHP.N/PHP.B-DGT, AAVPHP.B-EST, AAVPHP.B-GGT, AAVPHP.B-ATP, AAVPHP.B-ATT-T, AAVPHP.B-DGT-T, AAVPHP.B-GGT-T, AAVPHP.B-SGS, AAVPHP.B-AQP, AAVPHP.B-QQP, AAVPHP.B-SNP(3), AAVPHP.B-SNP, AAVPHP.B-QGT, AAVPHP.B-NQT, AAVPHP.B-EGS, AAVPHP.B-SGN, AAVPHP.B-EGT, AAVPHP.B-DST, AAVPHP.B-DST, AAVPHP.B-STP, AAVPHP.B-PQP, AAVPHP.B-SQP, AAVPHP.B-QLP, AAVPHP.B-TMP, AAVPHP.B-TTP, AAVPHP.S/G2A12, AAVG2A15/G2Aβ (G2A3), AAVG2B4 (G2B4), AAVG2B5 (G2B5), AAVPHP.N (PHP.N), PHP.S, AAV1, AAV2, AAV2 variant, AAV2/3 variant, AAV4, AAV5, AAV6, AAV7, AAV8, AAV9.47, AAV9(hu14), AAV9, AAV9 K449R, AAV10, AAV11, AAV12, AAVrh8, AAVrh10, AAVDJ, AAVDJ8, AAV2G9, or a functional variant thereof with amino acid sequence identity of at least 70%, 75%, 80%, 85%, 90%, 91%, 92%, 93%, 94%, 95%, 96%, 97%, 98%, 99%, or greater than 99%; optionally, the capsid comprises a VOY101 capsid protein;
(ii) the capsid protein comprises any of the capsid proteins listed in Table 1 or a functional variant thereof having at least 70%, 75%, 80%, 85%, 90%, 91%, 92%, 93%, 94%, 95%, 96%, 97%, 98%, 99%, or greater than 99% sequence identity thereto;
(iii) the capsid comprises the amino acid of SEQ ID NO: 1, or an amino acid sequence at least 95% identical thereto;
(iv) the capsid comprises the amino acid sequence encoded by the nucleotide sequence of SEQ ID NO: 2, or a nucleotide sequence at least 95% identical thereto; or
(v) the nucleotide sequence encoding the capsid comprises the nucleotide sequence of SEQ ID NO: 2, or a nucleotide sequence at least 95% identical thereto.

24. (canceled)

25. A vector comprising the nucleic acid of claim 1.

26. A host cell comprising the nucleic acid of claim 1, optionally wherein the host cell is an insect cell, a bacterial cell or a mammalian cell.

27. A method of making an isolated AAV particle, the method comprising:
(i) providing a cell comprising an AAV viral genome comprising the nucleic acid of claim 1; and
(ii) incubating the cell under conditions suitable to enclose the viral genome in a capsid protein, e.g., a VOY101 capsid protein;
thereby making the isolated AAV particle.

28. A pharmaceutical composition comprising the nucleic acid of claim 1, and a pharmaceutically acceptable carrier or excipient; optionally, wherein the pharmaceutically acceptable carrier or excipient comprises 10 mM disodium phosphate, 2 mM monopotassium phosphate, 2.7 mM potassium chloride, 192 mM sodium chloride, and 0.001% Pluronic Acid (F-68).

29. A method for treating tauopathy in a subject in need thereof, the method comprising administering to said subject a therapeutically effective amount of a composition comprising the pharmaceutical composition of claim 28, thereby treating the tauopathy in the subject.

30. The methods of claim 29, wherein the tauopathy is selected from the group consisting of Alzheimer's disease (AD), frontotemporal dementia and parkinsonism linked to chromosome 17 (FTDP-17), Frontotemporal lobar degeneration (FTLD), Frontotemporal dementia, chronic traumatic encephalopathy (CTE), Progressive Supranuclear Palsy (PSP), Down's syndrome, Pick's disease, Corticobasal degeneration (CBD), Corticobasal syndrome, Amyotrophic lateral sclerosis (ALS), Prion diseases, Creutzfeldt-Jakob disease (CJD), Multiple system atrophy, Tangle-only dementia, and Progressive subcortical gliosis and other tau associated disease.

31. The method of claim 29, comprising administering the composition intravenously, intramuscularly, intravascularly, via intraparenchymal administration, intracerebrally, intracerebroventricularly, via intra-cisterna magna (ICM) injection, intrathecally, via focused ultrasound (FUS), e.g., coupled with the intravenous administration of microbubbles (FUS-MB), or MRI-guided FUS coupled with intravenous administration; optionally, the AAV particle is administered to the subject intravenously; or via intra-cisterna magna injection (ICM).

32.-35. (canceled)

The application's sequence listing, which the Patent Office published only in electronic form, follows.

SEQUENCE LISTING (4565 sequences)

SEQ ID NO: 1 - protein, 743 aa, Artificial Sequence
  Description of Artificial Sequence: Synthetic polypeptide
MAADGYLPDWLEDNLSEGIREWWALKPGAPQPKANQQHQDNARGLVLPGYKYLGPGNGLDKGEPVNAADAAALEHDKAYDQQLKAGDNPYLKYNHADAEFQERLKEDTSFGGNLGRAVFQAKKRLLEPLGLVEEAAKTAPGKKRPVEQSPQEPDSSAGIGKSGAQPAKKRLNFGQTGDTESVPDPQPIGEPPAAPSGVGSLTMASGGGAPVADNNEGADGVGSSSGNWHCDSQWLGDRVITTSTRTWALPTYNNHLYKQISNSTSGGSSNDNAYFGYSTPWGYFDFNRFHCHFSPRDWQRLINNNWGFRPKRLNFKLFNIQVKEVTDNNGVKTIANNLTSTVQVFTDSDYQLPYVLGSAHEGCLPPFPADVFMIPQYGYLTLNDGSQAVGRSSFYCLEYFPSQMLRTGNNFQFSYEFENVPFHSSYAHSQSLDRLMNPLIDQYLYYLSKTINGSGQNQQTLKFSVAGPSNMAVQGRNYIPGPSYRQQRVSTTVTQNNNSEFAWPGASSWALNGRNSLMNPGPAMASHKEGEDRFFPLSGSLIFGKQGTGRDNVDADKVMITNEEEIKTTNPVATESYGQVATNHQSDGTLAVPFKAQAQTGWVQNQGILPGMVWQDRDVYLQGPIWAKIPHTDGNFHPSPLMGGFGMKHPPPQILIKNTPVPADPPTAFNKDKLNSFITQYSTGQVSVEIEWELQKENSKRWNPEIQYTSNYYKSNNVEFAVNTEGVYSEPRPIGTRYLTRNL

SEQ ID NO: 2 - DNA, 2232 bp, Artificial Sequence
  Description of Artificial Sequence: Synthetic polynucleotide
atggctgccgatggttatcttccagattggctcgaggacaaccttagtgaaggaattcgcgagtggtgggctttgaaacctggagcccctcaacccaaggcaaatcaacaacatcaagacaacgctcgaggtcttgtgcttccgggttacaaataccttggacccggcaacggactcgacaagggggagccggtcaacgcagcagacgcggcggccctcgagcacgacaaggcctacgaccagcagctcaaggccggagacaacccgtacctcaagtacaaccacgccgacgccgagttccaggagcggctcaaagaagatacgtcttttgggggcaacctcgggcgagcagtcttccaggccaaaaagaggcttcttgaacctcttggtctggttgaggaagcggctaagacggctcctggaaagaagaggcctgtagagcagtctcctcaggaaccggactcctccgcgggtattggcaaatcgggtgcacagcccgctaaaaagagactcaatttcggtcagactggcgacacagagtcagtcccagaccctcaaccaatcggagaacctcccgcagccccctcaggtgtgggatctcttacaatggcttcaggtggtggcgcaccagtggcagacaataacgaaggtgccgatggagtgggtagttcctcgggaaattggcattgcgattcccaatggctgggggacagagtcatcaccaccagcacccgaacctgggccctgcccacctacaacaatcacctctacaagcaaatctccaacagcacatctggaggatcttcaaatgacaacgcctacttcggctacagcaccccctgggggtattttgacttcaacagattccactgccacttctcaccacgtgactggcagcgactcatcaacaacaactggggattccggcctaagcgactcaacttcaagctcttcaacattcaggtcaaagaggttacggacaacaatggagtcaagaccatcgccaataaccttaccagcacggtccaggtcttcacggactcagactatcagctcccgtacgtgctcgggtcggctcacgagggctgcctcccgccgttcccagcggacgttttcatgattcctcagtacgggtatctgacgcttaatgatggaagccaggccgtgggtcgttcgtccttttactgcctggaatatttcccgtcgcaaatgctaagaacgggtaacaacttccagttcagctacgagtttgagaacgtacctttccatagcagctacgctcacagccaaagcctggaccgactaatgaatccactcatcgaccaatacttgtactatctctcaaagactattaacggttctggacagaatcaacaaacgctaaaattcagtgtggccggacccagcaacatggctgtccagggaagaaactacatacctggacccagctaccgacaacaacgtgtctcaaccactgtgactcaaaacaacaacagcgaatttgcttggcctggagcttcttcttgggctctcaatggacgtaatagcttgatgaatcctggacctgctatggccagccacaaagaaggagaggaccgtttctttcctttgtctggatctttaatttttggcaaacaaggaactggaagagacaacgtggatgcggacaaagtcatgataaccaacgaagaagaaattaaaactactaacccggtagcaacggagtcctatggacaagtggccacaaaccaccagagtgatgggactttggcggtgccttttaaggcacaggcgcagaccggctgggttcaaaaccaaggaatacttccgggtatggtttggcaggacagagatgtgtacctgcaaggacccatttgggccaaaattcctcacacggacggcaactttcacccttctccgctgatgggagggtttggaatgaagcacccgcctcctcagatcctcatcaaaaacacacctgtacctgcggatcctccaacggccttcaacaaggacaagctgaactctttcatcacccagtattctactggccaagtcagcgtggagatcgagtgggagctgcagaaggaaaacagcaagcgctggaacccggagatccagtacacttccaactattacaagtctaataatgttgaatttgctgttaatactgaaggtgtatatagtgaaccccgccccattggcaccagatacctgactcgtaatctgtaa

SEQ ID NO: 3 - DNA, 2232 bp, Artificial Sequence
  Description of Artificial Sequence: Synthetic polynucleotide
atggctgccgatggttatcttccagattggctcgaggacaaccttagtgaaggaattcgcgagtggtgggctttgaaacctggagcccctcaacccaaggcaaatcaacaacatcaagacaacgctcgaggtcttgtgcttccgggttacaaataccttggacccggcaacggactcgacaagggggagccggtcaacgcagcagacgcggcggccctcgagcacgacaaggcctacgaccagcagctcaaggccggagacaacccgtacctcaagtacaaccacgccgacgccgagttccaggagcggctcaaagaagatacgtcttttgggggcaacctcgggcgagcagtcttccaggccaaaaagaggcttcttgaacctcttggtctggttgaggaagcggctaagacggctcctggaaagaagaggcctgtagagcagtctcctcaggaaccggactcctccgcgggtattggcaaatcgggtgcacagcccgctaaaaagagactcaatttcggtcagactggcgacacagagtcagtcccagaccctcaaccaatcggagaacctcccgcagccccctcaggtgtgggatctcttacaatggcttcaggtggtggcgcaccagtggcagacaataacgaaggtgccgatggagtgggtagttcctcgggaaattggcattgcgattcccaatggctgggggacagagtcatcaccaccagcacccgaacctgggccctgcccacctacaacaatcacctctacaagcaaatctccaacagcacatctggaggatcttcaaatgacaacgcctacttcggctacagcaccccctgggggtattttgacttcaacagattccactgccacttctcaccacgtgactggcagcgactcatcaacaacaactggggattccggcctaagcgactcaacttcaagctcttcaacattcaggtcaaagaggttacggacaacaatggagtcaagaccatcgccaataaccttaccagcacggtccaggtcttcacggactcagactatcagctcccgtacgtgctcgggtcggctcacgagggctgcctcccgccgttcccagcggacgttttcatgattcctcagtacgggtatctgacgcttaatgatggaagccaggccgtgggtcgttcgtccttttactgcctggaatatttcccgtcgcaaatgctaagaacgggtaacaacttccagttcagctacgagtttgagaacgtacctttccatagcagctacgctcacagccaaagcctggaccgactaatgaatccactcatcgaccaatacttgtactatctctcaaagactattaacggttctggacagaatcaacaaacgctaaaattcagtgtggccggacccagcaacatggctgtccagggaagaaactacatacctggacccagctaccgacaacaacgtgtctcaaccactgtgactcaaaacaacaacagcgaatttgcttggcctggagcttcttcttgggctctcaatggacgtaatagcttgatgaatcctggacctgctatggccagccacaaagaaggagaggaccgtttctttcctttgtctggatctttaatttttggcaaacaaggaactggaagagacaacgtggatgcggacaaagtcatgataaccaacgaagaagaaattaaaactactaacccggtagcaacggagtcctatggacaagtggccacaaaccaccagagtgcccaaactttggcggtgccttttaaggcacaggcgcagaccggctgggttcaaaaccaaggaatacttccgggtatggtttggcaggacagagatgtgtacctgcaaggacccatttgggccaaaattcctcacacggacggcaactttcacccttctccgctgatgggagggtttggaatgaagcacccgcctcctcagatcctcatcaaaaacacacctgtacctgcggatcctccaacggccttcaacaaggacaagctgaactctttcatcacccagtattctactggccaagtcagcgtggagatcgagtgggagctgcagaaggaaaacagcaagcgctggaacccggagatccagtacacttccaactattacaagtctaataatgttgaatttgctgttaatactgaaggtgtatatagtgaaccccgccccattggcaccagatacctgactcgtaatctgtaa

SEQ ID NO: 4 - protein, 743 aa, Artificial Sequence
  Description of Artificial Sequence: Synthetic polypeptide
MAADGYLPDWLEDNLSEGIREWWALKPGAPQPKANQQHQDNARGLVLPGYKYLGPGNGLDKGEPVNAADAAALEHDKAYDQQLKAGDNPYLKYNHADAEFQERLKEDTSFGGNLGRAVFQAKKRLLEPLGLVEEAAKTAPGKKRPVEQSPQEPDSSAGIGKSGAQPAKKRLNFGQTGDTESVPDPQPIGEPPAAPSGVGSLTMASGGGAPVADNNEGADGVGSSSGNWHCDSQWLGDRVITTSTRTWALPTYNNHLYKQISNSTSGGSSNDNAYFGYSTPWGYFDFNRFHCHFSPRDWQRLINNNWGFRPKRLNFKLFNIQVKEVTDNNGVKTIANNLTSTVQVFTDSDYQLPYVLGSAHEGCLPPFPADVFMIPQYGYLTLNDGSQAVGRSSFYCLEYFPSQMLRTGNNFQFSYEFENVPFHSSYAHSQSLDRLMNPLIDQYLYYLSRTINGSGQNQQTLKFSVAGPSNMAVQGRNYIPGPSYRQQRVSTTVTQNNNSEFAWPGASSWALNGRNSLMNPGPAMASHKEGEDRFFPLSGSLIFGKQGTGRDNVDADKVMITNEEEIKTTNPVATESYGQVATNHQSDGTLAVPFKAQAQTGWVQNQGILPGMVWQDRDVYLQGPIWAKIPHTDGNFHPSPLMGGFGMKHPPPQILIKNTPVPADPPTAFNKDKLNSFITQYSTGQVSVEIEWELQKENSKRWNPEIQYTSNYYKSNNVEFAVNTEGVYSEPRPIGTRYLTRNL

SEQ ID NO: 5 - protein, 743 aa, Artificial Sequence
  Description of Artificial Sequence: Synthetic polypeptide
MAADGYLPDWLEDNLSEGIREWWALKPGAPQPKANQQHQDNARGLVLPGYKYLGPGNGLDKGEPVNAADAAALEHDKAYDQQLKAGDNPYLKYNHADAEFQERLKEDTSFGGNLGRAVFQAKKRLLEPLGLVEEAAKTAPGKKRPVEQSPQEPDSSAGIGKSGAQPAKKRLNFGQTGDTESVPDPQPIGEPPAAPSGVGSLTMASGGGAPVADNNEGADGVGSSSGNWHCDSQWLGDRVITTSTRTWALPTYNNHLYKQISNSTSGGSSNDNAYFGYSTPWGYFDFNRFHCHFSPRDWQRLINNNWGFRPKRLNFKLFNIQVKEVTDNNGVKTIANNLTSTVQVFTDSDYQLPYVLGSAHEGCLPPFPADVFMIPQYGYLTLNDGSQAVGRSSFYCLEYFPSQMLRTGNNFQFSYEFENVPFHSSYAHSQSLDRLMNPLIDQYLYYLSRTINGSGQNQQTLKFSVAGPSNMAVQGRNYIPGPSYRQQRVSTTVTQNNNSEFAWPGASSWALNGRNSLMNPGPAMASHKEGEDRFFPLSGSLIFGKQGTGRDNVDADKVMITNEEEIKTTNPVATESYGQVATNHQSAQTLAVPFKAQAQTGWVQNQGILPGMVWQDRDVYLQGPIWAKIPHTDGNFHPSPLMGGFGMKHPPPQILIKNTPVPADPPTAFNKDKLNSFITQYSTGQVSVEIEWELQKENSKRWNPEIQYTSNYYKSNNVEFAVNTEGVYSEPRPIGTRYLTRNL

SEQ ID NO: 6 - DNA, 2232 bp, Artificial Sequence
  Description of Artificial Sequence: Synthetic polynucleotide
atggctgccgatggttatcttccagattggctcgaggacaaccttagtgaaggaattcgcgagtggtgggctttgaaacctggagcccctcaacccaaggcaaatcaacaacatcaagacaacgctcgaggtcttgtgcttccgggttacaaataccttggacccggcaacggactcgacaagggggagccggtcaacgcagcagacgcggcggccctcgagcacgacaaggcctacgaccagcagctcaaggccggagacaacccgtacctcaagtacaaccacgccgacgccgagttccaggagcggctcaaagaagatacgtcttttgggggcaacctcgggcgagcagtcttccaggccaaaaagaggcttcttgaacctcttggtctggttgaggaagcggctaagacggctcctggaaagaagaggcctgtagagcagtctcctcaggaaccggactcctccgcgggtattggcaaatcgggtgcacagcccgctaaaaagagactcaatttcggtcagactggcgacacagagtcagtcccagaccctcaaccaatcggagaacctcccgcagccccctcaggtgtgggatctcttacaatggcttcaggtggtggcgcaccagtggcagacaataacgaaggtgccgatggagtgggtagttcctcgggaaattggcattgcgattcccaatggctgggggacagagtcatcaccaccagcacccgaacctgggccctgcccacctacaacaatcacctctacaagcaaatctccaacagcacatctggaggatcttcaaatgacaacgcctacttcggctacagcaccccctgggggtattttgacttcaacagattccactgccacttctcaccacgtgactggcagcgactcatcaacaacaactggggattccggcctaagcgactcaacttcaagctcttcaacattcaggtcaaagaggttacggacaacaatggagtcaagaccatcgccaataaccttaccagcacggtccaggtcttcacggactcagactatcagctcccgtacgtgctcgggtcggctcacgagggctgcctcccgccgttcccagcggacgttttcatgattcctcagtacgggtatctgacgcttaatgatggaagccaggccgtgggtcgttcgtccttttactgcctggaatatttcccgtcgcaaatgctaagaacgggtaacaacttccagttcagctacgagtttgagaacgtacctttccatagcagctacgctcacagccaaagcctggaccgactaatgaatccactcatcgaccaatacttgtactatctctctagaactattaacggttctggacagaatcaacaaacgctaaaattcagtgtggccggacccagcaacatggctgtccagggaagaaactacatacctggacccagctaccgacaacaacgtgtctcaaccactgtgactcaaaacaacaacagcgaatttgcttggcctggagcttcttcttgggctctcaatggacgtaatagcttgatgaatcctggacctgctatggccagccacaaagaaggagaggaccgtttctttcctttgtctggatctttaatttttggcaaacaaggtaccggcagagacaacgtggatgcggacaaagtcatgataaccaacgaagaagaaattaaaactactaacccggtagcaacggagtcctatggacaagtggccacaaaccaccagagtgcccaaactttggcggtgccttttaaggcacaggcgcagaccggttgggttcaaaaccaaggaatacttccgggtatggtttggcaggacagagatgtgtacctgcaaggacccatttgggccaaaattcctcacacggacggcaactttcacccttctccgctgatgggagggtttggaatgaagcacccgcctcctcagatcctcatcaaaaacacacctgtacctgcggatcctccaacggccttcaacaaggacaagctgaactctttcatcacccagtattctactggccaagtcagcgtggagatcgagtgggagctgcagaaggaaaacagcaagcgctggaacccggagatccagtacacttccaactattacaagtctaataatgttgaatttgctgttaatactgaaggtgtatatagtgaaccccgccccattggcaccagatacctgactcgtaatctgtaa

SEQ ID NO: 7 - protein, 736 aa, Artificial Sequence
  Description of Artificial Sequence: Synthetic polypeptide
MAADGYLPDWLEDNLSEGIREWWALKPGAPQPKANQQHQDNARGLVLPGYKYLGPGNGLDKGEPVNAADAAALEHDKAYDQQLKAGDNPYLKYNHADAEFQERLKEDTSFGGNLGRAVFQAKKRLLEPLGLVEEAAKTAPGKKRPVEQSPQEPDSSAGIGKSGAQPAKKRLNFGQTGDTESVPDPQPIGEPPAAPSGVGSLTMASGGGAPVADNNEGADGVGSSSGNWHCDSQWLGDRVITTSTRTWALPTYNNHLYKQISNSTSGGSSNDNAYFGYSTPWGYFDFNRFHCHFSPRDWQRLINNNWGFRPKRLNFKLFNIQVKEVTDNNGVKTIANNLTSTVQVFTDSDYQLPYVLGSAHEGCLPPFPADVFMIPQYGYLTLNDGSQAVGRSSFYCLEYFPSQMLRTGNNFQFSYEFENVPFHSSYAHSQSLDRLMNPLIDQYLYYLSRTIQSSQTPRQTLKFSVAGPSNMAVQGRNYIPGPSYRQQRVSTTVTQNNNSEFAWPGASSWALNGRNSLMNPGPAMASHKEGEDRFFPLSGSLIFGKQGTGRDNVDADKVMITNEEEIKTTNPVATESYGQVATNHQSAQAQAQTGWVQNQGILPGMVWQDRDVYLQGPIWAKIPHTDGNFHPSPLMGGFGMKHPPPQILIKNTPVPADPPTAFNKDKLNSFITQYSTGQVSVEIEWELQKENSKRWNPEIQYTSNYYKSNNVEFAVNTEGVYSEPRPIGTRYLTRNL

SEQ ID NO: 8 - protein, 743 aa, Artificial Sequence
  Description of Artificial Sequence: Synthetic polypeptide
MAADGYLPDWLEDNLSEGIREWWALKPGAPQPKANQQHQDNARGLVLPGYKYLGPGNGLDKGEPVNAADAAALEHDKAYDQQLKAGDNPYLKYNHADAEFQERLKEDTSFGGNLGRAVFQAKKRLLEPLGLVEEAAKTAPGKKRPVEQSPQEPDSSAGIGKSGAQPAKKRLNFGQTGDTESVPDPQPIGEPPAAPSGVGSLTMASGGGAPVADNNEGADGVGSSSGNWHCDSQWLGDRVITTSTRTWALPTYNNHLYKQISNSTSGGSSNDNAYFGYSTPWGYFDFNRFHCHFSPRDWQRLINNNWGFRPKRLNFKLFNIQVKEVTDNNGVKTIANNLTSTVQVFTDSDYQLPYVLGSAHEGCLPPFPADVFMIPQYGYLTLNDGSQAVGRSSFYCLEYFPSQMLRTGNNFQFSYEFENVPFHSSYAHSQSLDRLMNPLIDQYLYYLSRTIILGTGTSQTLKFSVAGPSNMAVQGRNYIPGPSYRQQRVSTTVTQNNNSEFAWPGASSWALNGRNSLMNPGPAMASHKEGEDRFFPLSGSLIFGKQGTGRDNVDADKVMITNEEEIKTTNPVATESYGQVATNHQSAQTRTNPEAAQAQTGWVQNQGILPGMVWQDRDVYLQGPIWAKIPHTDGNFHPSPLMGGFGMKHPPPQILIKNTPVPADPPTAFNKDKLNSFITQYSTGQVSVEIEWELQKENSKRWNPEIQYTSNYYKSNNVEFAVNTEGVYSEPRPIGTRYLTRNL

SEQ ID NO: 9 - protein, 743 aa, Artificial Sequence
  Description of Artificial Sequence: Synthetic polypeptide
MAADGYLPDWLEDNLSEGIREWWALKPGAPQPKANQQHQDNARGLVLPGYKYLGPGNGLDKGEPVNAADAAALEHDKAYDQQLKAGDNPYLKYNHADAEFQERLKEDTSFGGNLGRAVFQAKKRLLEPLGLVEEAAKTAPGKKRPVEQSPQEPDSSAGIGKSGAQPAKKRLNFGQTGDTESVPDPQPIGEPPAAPSGVGSLTMASGGGAPVADNNEGADGVGSSSGNWHCDSQWLGDRVITTSTRTWALPTYNNHLYKQISNSTSGGSSNDNAYFGYSTPWGYFDFNRFHCHFSPRDWQRLINNNWGFRPKRLNFKLFNIQVKEVTDNNGVKTIANNLTSTVQVFTDSDYQLPYVLGSAHEGCLPPFPADVFMIPQYGYLTLNDGSQAVGRSSFYCLEYFPSQMLRTGNNFQFSYEFENVPFHSSYAHSQSLDRLMNPLIDQYLYYLSRTIILGTGTSQTLKFSVAGPSNMAVQGRNYIPGPSYRQQRVSTTVTQNNNSEFAWPGASSWALNGRNSLMNPGPAMASHKEGEDRFFPLSGSLIFGKQGTGRDNVDADKVMITNEEEIKTTNPVATESYGQVATNHQSAQNGGTSSSAQAQTGWVQNQGILPGMVWQDRDVYLQGPIWAKIPHTDGNFHPSPLMGGFGMKHPPPQILIKNTPVPADPPTAFNKDKLNSFITQYSTGQVSVEIEWELQKENSKRWNPEIQYTSNYYKSNNVEFAVNTEGVYSEPRPIGTRYLTRNL

SEQ ID NO: 10 - protein, 743 aa, Artificial Sequence
  Description of Artificial Sequence: Synthetic polypeptide
MAADGYLPDWLEDNLSEGIREWWALKPGAPQPKANQQHQDNARGLVLPGYKYLGPGNGLDKGEPVNAADAAALEHDKAYDQQLKAGDNPYLKYNHADAEFQERLKEDTSFGGNLGRAVFQAKKRLLEPLGLVEEAAKTAPGKKRPVEQSPQEPDSSAGIGKSGAQPAKKRLNFGQTGDTESVPDPQPIGEPPAAPSGVGSLTMASGGGAPVADNNEGADGVGSSSGNWHCDSQWLGDRVITTSTRTWALPTYNNHLYKQISNSTSGGSSNDNAYFGYSTPWGYFDFNRFHCHFSPRDWQRLINNNWGFRPKRLNFKLFNIQVKEVTDNNGVKTIANNLTSTVQVFTDSDYQLPYVLGSAHEGCLPPFPADVFMIPQYGYLTLNDGSQAVGRSSFYCLEYFPSQMLRTGNNFQFSYEFENVPFHSSYAHSQSLDRLMNPLIDQYLYYLSRTINGSGQNQQTLKFSVAGPSNMAVQGRNYIPGPSYRQQRVSTTVTQNNNSEFAWPGASSWALNGRNSLMNPGPAMASHKEGEDRFFPLSGSLIFGKQGTGRDNVDADKVMITNEEEIKTTNPVATESYGQVATNHQSAQQAVRTSLAQAQTGWVQNQGILPGMVWQDRDVYLQGPIWAKIPHTDGNFHPSPLMGGFGMKHPPPQILIKNTPVPADPPTAFNKDKLNSFITQYSTGQVSVEIEWELQKENSKRWNPEIQYTSNYYKSNNVEFAVNTEGVYSEPRPIGTRYLTRNL

SEQ ID NO: 11 - protein, 736 aa, Artificial Sequence
  Description of Artificial Sequence: Synthetic polypeptide
MAADGYLPDWLEDNLSEGIREWWALKPGAPQPKANQQHQDNARGLVLPGYKYLGPGNGLDKGEPVNAADAAALEHDKAYDQQLKAGDNPYLKYNHADAEFQERLKEDTSFGGNLGRAVFQAKKRLLEPLGLVEEAAKTAPGKKRPVEQSPQEPDSSAGIGKSGAQPAKKRLNFGQTGDTESVPDPQPIGEPPAAPSGVGSLTMASGGGAPVADNNEGADGVGSSSGNWHCDSQWLGDRVITTSTRTWALPTYNNHLYKQISNSTSGGSSNDNAYFGYSTPWGYFDFNRFHCHFSPRDWQRLINNNWGFRPKRLNFKLFNIQVKEVTDNNGVKTIANNLTSTVQVFTDSDYQLPYVLGSAHEGCLPPFPADVFMIPQYGYLTLNDGSQAVGRSSFYCLEYFPSQMLRTGNNFQFSYEFENVPFHSSYAHSQSLDRLMNPLIDQYLYYLSRTINGSGQNQQTLKFSVAGPSNMAVQGRNYIPGPSYRQQRVSTTVTQNNNSEFAWPGASSWALNGRNSLMNPGPAMASHKEGEDRFFPLSGSLIFGKQGTGRDNVDADKVMITNEEEIKTTNPVATESYGQVATNHQSAQAQAQTGWVQNQGILPGMVWQDRDVYLQGPIWAKIPHTDGNFHPSPLMGGFGMKHPPPQILIKNTPVPADPPTAFNKDKLNSFITQYSTGQVSVEIEWELQKENSKRWNPEIQYTSNYYKSNNVEFAVNTEGVYSEPRPIGTRYLTRNL

SEQ ID NO: 12 - DNA, 2211 bp, Artificial Sequence
  Description of Artificial Sequence: Synthetic polynucleotide
atggctgccgatggttatcttccagattggctcgaggacaacctctctgagggcattcgcgagtggtgggacttgaaacctggagccccgaagcccaaagccaaccagcaaaagcaggacgacggccggggtctggtgcttcctggctacaagtacctcggacccttcaacggactcgacaagggggagcccgtcaacgcggcggacgcagcggccctcgagcacgacaaggcctacgaccagcagctcaaagcgggtgacaatccgtacctgcggtataaccacgccgacgccgagtttcaggagcgtctgcaagaagatacgtcttttgggggcaacctcgggcgagcagtcttccaggccaagaagcgggttctcgaacctctcggtctggttgaggaaggcgctaagacggctcctggaaagaaacgtccggtagagcagtcgccacaagagccagactcctcctcgggcatcggcaagacaggccagcagcccgctaaaaagagactcaattttggtcagactggcgactcagagtcagtccccgatccacaacctctcggagaacctccagcaacccccgctgctgtgggacctactacaatggcttcaggcggtggcgcaccaatggcagacaataacgaaggcgccgacggagtgggtaatgcctcaggaaattggcattgcgattccacatggctgggcgacagagtcatcaccaccagcacccgcacctgggccttgcccacctacaataaccacctctacaagcaaatctccagtgcttcaacgggggccagcaacgacaaccactacttcggctacagcaccccctgggggtattttgatttcaacagattccactgccacttttcaccacgtgactggcagcgactcatcaacaacaattggggattccggcccaagagactcaacttcaaactcttcaacatccaagtcaaggaggtcacgacgaatgatggcgtcacaaccatcgctaataaccttaccagcacggttcaagtcttctcggactcggagtaccagcttccgtacgtcctcggctctgcgcaccagggctgcctccctccgttcccggcggacgtgttcatgattccgcaatacggctacctgacgctcaacaatggcagccaagccgtgggacgttcatccttttactgcctggaatatttcccttctcagatgctgagaacgggcaacaactttaccttcagctacacctttgaggaagtgcctttccacagcagctacgcgcacagccagagcctggaccggctgatgaatcctctcatcgaccaatacctgtattacctgaacagaactcaaaatcagtccggaagtgcccaaaacaaggacttgctgtttagccgtgggtctccagctggcatgtctgttcagcccaaaaactggctacctggaccctgttatcggcagcagcgcgtttctaaaacaaaaacagacaacaacaacagcaattttacctggactggtgcttcaaaatataacctcaatgggcgtgaatccatcatcaaccctggcactgctatggcctcacacaaagacgacgaagacaagttctttcccatgagcggtgtcatgatttttggaaaagagagcgccggagcttcaaacactgcattggacaatgtcatgattacagacgaagaggaaattaaagccactaaccctgtggccaccgaaagatttgggaccgtggcagtcaatttccagagcagcagcacagaccctgcgaccggagatgtgcatgctatgggagcattacctggcatggtgtggcaagatagagacgtgtacctgcagggtcccatttgggccaaaattcctcacacagatggacactttcacccgtctcctcttatgggcggctttggactcaagaacccgcctcctcagatcctcatcaaaaacacgcctgttcctgcgaatcctccggcggagttttcagctacaaagtttgcttcattcatcacccaatactccacaggacaagtgagtgtggaaattgaatgggagctgcagaaagaaaacagcaagcgctggaatcccgaagtgcagtacacatccaattatgcaaaatctgccaacgttgattttactgtggacaacaatggactttatactgagcctcgccccattggcacccgttaccttacccgtcccctgtaa

SEQ ID NO: 13 - protein, 736 aa, Adeno-associated virus 1
MAADGYLPDWLEDNLSEGIREWWDLKPGAPKPKANQQKQDDGRGLVLPGYKYLGPFNGLDKGEPVNAADAAALEHDKAYDQQLKAGDNPYLRYNHADAEFQERLQEDTSFGGNLGRAVFQAKKRVLEPLGLVEEGAKTAPGKKRPVEQSPQEPDSSSGIGKTGQQPAKKRLNFGQTGDSESVPDPQPLGEPPATPAAVGPTTMASGGGAPMADNNEGADGVGNASGNWHCDSTWLGDRVITTSTRTWALPTYNNHLYKQISSASTGASNDNHYFGYSTPWGYFDFNRFHCHFSPRDWQRLINNNWGFRPKRLNFKLFNIQVKEVTTNDGVTTIANNLTSTVQVFSDSEYQLPYVLGSAHQGCLPPFPADVFMIPQYGYLTLNNGSQAVGRSSFYCLEYFPSQMLRTGNNFTFSYTFEEVPFHSSYAHSQSLDRLMNPLIDQYLYYLNRTQNQSGSAQNKDLLFSRGSPAGMSVQPKNWLPGPCYRQQRVSKTKTDNNNSNFTWTGASKYNLNGRESIINPGTAMASHKDDEDKFFPMSGVMIFGKESAGASNTALDNVMITDEEEIKATNPVATERFGTVAVNFQSSSTDPATGDVHAMGALPGMVWQDRDVYLQGPIWAKIPHTDGHFHPSPLMGGFGLKNPPPQILIKNTPVPANPPAEFSATKFASFITQYSTGQVSVEIEWELQKENSKRWNPEVQYTSNYAKSANVDFTVDNNGLYTEPRPIGTRYLTRPL

SEQ ID NO: 14 - DNA, 4718 bp, Adeno-associated virus 1
ttgcccactccctctctgcgcgctcgctcgctcggtggggcctgcggaccaaaggtccgcagacggcagagctctgctctgccggccccaccgagcgagcgagcgcgcagagagggagtgggcaactccatcactaggggtaatcgcgaagcgcctcccacgctgccgcgtcagcgctgacgtaaattacgtcataggggagtggtcctgtattagctgtcacgtgagtgcttttgcgacattttgcgacaccacgtggccatttagggtatatatggccgagtgagcgagcaggatctccattttgaccgcgaaatttgaacgagcagcagccatgccgggcttctacgagatcgtgatcaaggtgccgagcgacctggacgagcacctgccgggcatttctgactcgtttgtgagctgggtggccgagaaggaatgggagctgcccccggattctgacatggatctgaatctgattgagcaggcacccctgaccgtggccgagaagctgcagcgcgacttcctggtccaatggcgccgcgtgagtaaggccccggaggccctcttctttgttcagttcgagaagggcgagtcctacttccacctccatattctggtggagaccacgggggtcaaatccatggtgctgggccgcttcctgagtcagattagggacaagctggtgcagaccatctaccgcgggatcgagccgaccctgcccaactggttcgcggtgaccaagacgcgtaatggcgccggaggggggaacaaggtggtggacgagtgctacatccccaactacctcctgcccaagactcagcccgagctgcagtgggcgtggactaacatggaggagtatataagcgcctgtttgaacctggccgagcgcaaacggctcgtggcgcagcacctgacccacgtcagccagacccaggagcagaacaaggagaatctgaaccccaattctgacgcgcctgtcatccggtcaaaaacctccgcgcgctacatggagctggtcgggtggctggtggaccggggcatcacctccgagaagcagtggatccaggaggaccaggcctcgtacatctccttcaacgccgcttccaactcgcggtcccagatcaaggccgctctggacaatgccggcaagatcatggcgctgaccaaatccgcgcccgactacctggtaggccccgctccgcccgcggacattaaaaccaaccgcatctaccgcatcctggagctgaacggctacgaacctgcctacgccggctccgtctttctcggctgggcccagaaaaggttcgggaagcgcaacaccatctggctgtttgggccggccaccacgggcaagaccaacatcgcggaagccatcgcccacgccgtgcccttctacggctgcgtcaactggaccaatgagaactttcccttcaatgattgcgtcgacaagatggtgatctggtgggaggagggcaagatgacggccaaggtcgtggagtccgccaaggccattctcggcggcagcaaggtgcgcgtggaccaaaagtgcaagtcgtccgcccagatcgaccccacccccgtgatcgtcacctccaacaccaacatgtgcgccgtgattgacgggaacagcaccaccttcgagcaccagcagccgttgcaggaccggatgttcaaatttgaactcacccgccgtctggagcatgactttggcaaggtgacaaagcaggaagtcaaagagttcttccgctgggcgcaggatcacgtgaccgaggtggcgcatgagttctacgtcagaaagggtggagccaacaaaagacccgcccccgatgacgcggataaaagcgagcccaagcgggcctgcccctcagtcgcggatccatcgacgtcagacgcggaaggagctccggtggactttgccgacaggtaccaaaacaaatgttctcgtcacgcgggcatgcttcagatgctgtttccctgcaagacatgcgagagaatgaatcagaatttcaacatttgcttcacgcacgggacgagagactgttcagagtgcttccccggcgtgtcagaatctcaaccggtcgtcagaaagaggacgtatcggaaactctgtgccattcatcatctgctggggcgggctcccgagattgcttgctcggcctgcgatctggtcaacgtggacctggatgactgtgtttctgagcaataaatgacttaaaccaggtatggctgccgatggttatcttccagattggctcgaggacaacctctctgagggcattcgcgagtggtgggacttgaaacctggagccccgaagcccaaagccaaccagcaaaagcaggacgacggccggggtctggtgcttcctggctacaagtacctcggacccttcaacggactcgacaagggggagcccgtcaacgcggcggacgcagcggccctcgagcacgacaaggcctacgaccagcagctcaaagcgggtgacaatccgtacctgcggtataaccacgccgacgccgagtttcaggagcgtctgcaagaagatacgtcttttgggggcaacctcgggcgagcagtcttccaggccaagaagcgggttctcgaacctctcggtctggttgaggaaggcgctaagacggctcctggaaagaaacgtccggtagagcagtcgccacaagagccagactcctcctcgggcatcggcaagacaggccagcagcccgctaaaaagagactcaattttggtcagactggcgactcagagtcagtccccgatccacaacctctcggagaacctccagcaacccccgctgctgtgggacctactacaatggcttcaggcggtggcgcaccaatggcagacaataacgaaggcgccgacggagtgggtaatgcctcaggaaattggcattgcgattccacatggctgggcgacagagtcatcaccaccagcacccgcacctgggccttgcccacctacaataaccacctctacaagcaaatctccagtgcttcaacgggggccagcaacgacaaccactacttcggctacagcaccccctgggggtattttgatttcaacagattccactgccacttttcaccacgtgactggcagcgactcatcaacaacaattggggattccggcccaagagactcaacttcaaactcttcaacatccaagtcaaggaggtcacgacgaatgatggcgtcacaaccatcgctaataaccttaccagcacggttcaagtcttctcggactcggagtaccagcttccgtacgtcctcggctctgcgcaccagggctgcctccctccgttcccggcggacgtgttcatgattccgcaatacggctacctgacgctcaacaatggcagccaagccgtgggacgttcatccttttactgcctggaatatttcccttctcagatgctgagaacgggcaacaactttaccttcagctacacctttgaggaagtgcctttccacagcagctacgcgcacagccagagcctggaccggctgatgaatcctctcatcgaccaatacctgtattacctgaacagaactcaaaatcagtccggaagtgcccaaaacaaggacttgctgtttagccgtgggtctccagctggcatgtctgttcagcccaaaaactggctacctggaccctgttatcggcagcagcgcgtttctaaaacaaaaacagacaacaacaacagcaattttacctggactggtgcttcaaaatataacctcaatgggcgtgaatccatcatcaaccctggcactgctatggcctcacacaaagacgacgaagacaagttctttcccatgagcggtgtcatgatttttggaaaagagagcgccggagcttcaaacactgcattggacaatgtcatgattacagacgaagaggaaattaaagccactaaccctgtggccaccgaaagatttgggaccgtggcagtcaatttccagagcagcagcacagaccctgcgaccggagatgtgcatgctatgggagcattacctggcatggtgtggcaagatagagacgtgtacctgcagggtcccatttgggccaaaattcctcacacagatggacactttcacccgtctcctcttatgggcggctttggactcaagaacccgcctcctcagatcctcatcaaaaacacgcctgttcctgcgaatcctccggcggagttttcagctacaaagtttgcttcattcatcacccaatactccacaggacaagtgagtgtggaaattgaatgggagctgcagaaagaaaacagcaagcgctggaatcccgaagtgcagtacacatccaattatgcaaaatctgccaacgttgattttactgtggacaacaatggactttatactgagcctcgccccattggcacccgttaccttacccgtcccctgtaattacgtgttaatcaataaaccggttgattcgtttcagttgaactttggtctcctgtccttcttatcttatcggttaccatggttatagcttacacattaactgcttggttgcgcttcgcgataaaagacttacgtcatcgggttacccctagtgatggagttgcccactccctctctgcgcgctcgctcgctcggtggggcctgcggaccaaaggtccgcagacggcagagctctgctctgccggccccaccgagcgagcgagcgcgcagagagggagtgggcaa

SEQ ID NO: 15 - DNA, 3131 bp, Artificial Sequence
  Description of Artificial Sequence: Synthetic polynucleotide
gcggccgcgaattcgcccttggctgcgtcaactggaccaatgagaactttcccttcaatgattgcgtcgacaagatggtgatctggtgggaggagggcaagatgacggccaaggtcgtggagtccgccaaggccattctcggcggcagcaaggtgcgcgtggaccaaaagtgcaagtcgtccgcccagatcgaccccacccccgtgatcgtcacctccaacaccaacatgtgcgccgtgattgacgggaacagcaccaccttcgagcaccagcagcctctccaggaccggatgtttaagttcgaactcacccgccgtctggagcacgactttggcaaggtgacaaagcaggaagtcaaagagttcttccgctgggccagtgatcacgtgaccgaggtggcgcatgagttttacgtcagaaagggcggagccagcaaaagacccgcccccgatgacgcggataaaagcgagcccaagcgggcctgcccctcagtcgcggatccatcgacgtcagacgcggaaggagctccggtggactttgccgacaggtaccaaaacaaatgttctcgtcacgcgggcatgcttcagatgctgtttccctgcaaaacgtgcgagagaatgaatcggaatttcaacatttgcttcacacacggggtcagagactgctcagagtgtttccccggcgtgtcagaatctcaaccggtcgtcagaaagaggacgtatcggaaactccgtgcgattcatcatctgctggggcgggctcccgagattgcttgctcggcctgcgatctggtcaacgtggacctggatgactgtgtttctgagcaataaatgacttaaaccaggtatggctgccgatggttatcttccagattggctcgaggacaacctctctgagggcattcgcgagtggtgggcgctgaaacctggagccccgaagcccaaagccaaccagcaaaagcaggacgacggccggggtctggtgcttcctggctacaagtacctcggacccttcaacggactcgacaagggggagcccgtcaacgcggcggacgcagcggccctcgagcacgacaaggcttacgaccagcagctgcaggcgggtgacaatccgtacctgcggtataaccacgccgacgccgagtttcaggagcgtctgcaagaagatacgtcttttgggggcaacctcgggcgagcagtcttccaggccaagaagcgggttctcgaacctctcggtctggttgaggaaggcgctaagacggctcctggaaagaagagaccggtagagccatcaccccagcgttctccagactcctctacgggcatcggcaagaaaggccaacagcccgccagaaaaagactcaattttggtcagactggcgactcagagtcagttccagaccctcaacctctcggagaacctccagcagcgccctctggtgtgggacctaatacaatggctgcaggcggtggcgcaccaatggcagacaataacgaaggcgccgacggagtgggtagttcctcgggaaattggcattgcgattccacatggctgggcgacagagtcatcaccaccagcacccgaacctgggccctgcccacctacaacaaccacctctacaagcaaatctccaacgggacatcgggaggagccaccaacgacaacacctacttcggctacagcaccccctgggggtattttgactttaacagattccactgccacctttcaccacgtgactggcagcgactcatcaacaacaactggggattccgacccaagagactcagcttcaagctcttcaacatccaggtcaaggaggtcacgcagaatgaaggcaccaagaccatcgccaataacctcaccagcaccatccaggtgtttacggactcggagtaccagctgccgtacgttctcggctctgtccaccagggctgcctgcctccgttcccggcggacgtgttcatgattccccagtacggctacctaacactcaacaacggtagtcaggccgtgggacgctcctccttctactgcctggaatactttccttcgcagatgctgagaaccggcaacaacttccagtttacttacaccttcgaggacgtgcctttccacagcagctacgcccacagctagagcttggaccggctgatgaatcctctgattgaccagtacctgtactacttgtctcggactcaaacaacaggaggcacggcaaatacgcagactctgggcttcagccaaggtgggcctaatacaatggccaatcaggcaaagaactggctgccaggaccctgttaccgccaacaacgcgtctcaacgacaaccgggcaaaacaacaatagcaactttgcctggactgctgggaccaaataccatctgaatggaagaaattcattggctaatcctggcatcgctatggcaacacacaaagacgacgaggagcgtttttttcccagtaacgggatcctgatttttggcaaacaaaatgctgccagagacaatgcggattacagcgatgtcatgctcaccagcgaggaagaaatcaaaaccactaaccctgtggctacagaggaatacggtatcgtggcagataacttgcagcagcaaaacacggctcctcaaattggaactgtcaacagccagggggccttacccggtatggtctggcagaaccgggacgtgtacctgcagggtcccatctgggccaagattcctcacacggacggcaacttccacccgtctccgctgatgggcggctttggcctgaaacatcctccgcctcagatcctgatcaagaacacgcctgtacctgcggatcctccgaccaccttcaaccagtcaaagctgaactctttcatcacgcaatacagcaccggacaggtcagcgtggaaattgaatgggagctgcagaaggaaaacagcaagcgctggaaccccgagatccagtacacctccaactactacaaatctataagtgtggactttgctgttaatacagaaggcgtgtactctgaaccccgccccattggcacccgttacctcacccgtaatctgtaattgcctgttaatcaataaaccggttgattcgtttcagttgaactttggtctctgcgaagggcgaattc

SEQ ID NO: 16 - DNA, 255 bp, Adeno-associated virus 10
ggtaattcctccggaaattggcattgcgattccacatggctgggcgacagagtcatcaccaccagcacccgaacctgggtcctgcccacctacaacaaccacatctacaagcaaatctccagcgagacaggagccaccaacgacaaccactacttcggctacagcaccccctgggggtattttgactttaacagattccactgccacttttcaccacgtgactggcagcgactcatcaacaacaactggggattc

SEQ ID NO: 17 - protein, 738 aa, Adeno-associated virus 10
MAADGYLPDWLEDNLSEGIREWWDLKPGAPKPKANQQKQDDGRGLVLPGYKYLGPFNGLDKGEPVNAADAAALEHDKAYDQQLKAGDNPYLRYNHADAEFQERLQEDTSFGGNLGRAVFQAKKRVLEPLGLVEEAAKTAPGKKRPVEPSPQRSPDSSTGIGKKGQQPAKKRLNFGQTGESESVPDPQPIGEPPAGPSGLGSGTMAAGGGAPMADNNEGADGVGSSSGNWHCDSTWLGDRVITTSTRTWALPTYNNHLYKQISNGTSGGSTNDNTYFGYSTPWGYFDFNRFHCHFSPRDWQRLINNNWGFRPKRLSFKLFNIQVKEVTQNEGTKTIANNLTSTIQVFTDSEYQLPYVLGSAHQGCLPPFPADVFMIPQYGYLTLNNGSQAVGRSSFYCLEYFPSQMLRTGNNFEFSYTFEDVPFHSSYAHSQSLDRLMNPLIDQYLYYLSRTQSTGGTQGTQQLLFSQAGPANMSAQAKNWLPGPCYRQQRVSTTLSQNNNSNFAWTGATKYHLNGRDSLVNPGVAMATHKDDEERFFPSSGVLMFGKQGAGRDNVDYSSVMLTSEEEIKTTNPVATEQYGVVADNLQQANTGPIVGNVNSQGALPGMVWQNRDVYLQGPIWAKIPHTDGNFHPSPLMGGFGLKHPPPQILIKNTPVPADPPTTFSQAKLASFITQYSTGQVSVEIEWELQKENSKRWNPEIQYTSNYYKSTNVDFAVNTEGTYSEPRPIGTRYLTRNL

SEQ ID NO: 18 - protein, 738 aa, Adeno-associated virus 10
MAADGYLPDWLEDNLSEGIREWWDLKPGAPKPKANQQKQDDGRGLVLPGYKYLGPFNGLDKGEPVNAADAAALEHDKAYDQQLKAGDNPYLRYNHADAEFQERLQEDTSFGGNLGRAVFQAKKRVLEPLGLVEEGAKTAPGKKRPVEPSPQRSPDSSTGIGKKGQQPAKKRLNFGQTGDSESVPDPQPIGEPPAGPSGLGSGTMAAGGGAPMADNNEGADGVGSSSGNWHCDSTWLGDRVITTSTRTWALPTYNNHLYKQISNGTSGGSTNDNTYFGYSTPWGYFDFNRFHCHFSPRDWQRLINNNWGFRPKRLNFKLFNIQVKEVTQNEGTKTIANNLTSTIQVFTDSEYQLPYVLGSAHQGCLPPFPADVFMIPQYGYLTLNNGSQAVGRSSFYCLEYFPSQMLRTGNNFEFSYQFEDVPFHSSYAHSQSLDRLMNPLIDQYLYYLSRTQSTGGTAGTQQLLFSQAGPNNMSAQAKNWLPGPCYRQQRVSTTLSQNNNSNFAWTGATKYHLNGRDSLVNPGVAMATHKDDEERFFPSSGVLMFGKQGAGKDNVDYSSVMLTSEEEIKTTNPVATEQYGVVADNLQQQNAAPIVGAVNSQGALPGMVWQNRDVYLQGPIWAKIPHTDGNFHPSPLMGGFGLKHPPPQILIKNTPVPADPPTTFSQAKLASFITQYSTGQVSVEIEWELQKENSKRWNPEIQYTSNYYKSTNVDFAVNTDGTYSEPRPIGTRYLTRNL

SEQ ID NO: 19 - DNA, 258 bp, Adeno-associated virus 11
ggtaattcctccggaaattggcattgcgattccacatggctgggcgacagagtcatcaccaccagcacccgaacctgggccctgccaacctacaacaaccacctctacaaacaaatctccagcgcttcaacgggggccagcaacgacaaccactactttggctacagcaccccctgggggtattttgactttaacagattccactgccacttctcaccacgtgactggcagcgactcatcaacaacaactggggattc

SEQ ID NO: 20 - DNA, 255 bp, Adeno-associated virus 12
ggtaattcctccggaaattggcattgcgattccacatggctgggcgaccgagtcattaccaccagcacccggacttgggccctgcccacctacaacaaccacctctacaagcaaatctccagccaatcgggtgccaccaacgacaaccactacttcggctacagcaccccttgggggtattttgatttcaacagattccactgccatttctcaccacgtgactggcagcgactcatcaacaacaactggggattc

SEQ ID NO: 21 - DNA, 2208 bp, Adeno-associated virus 2
atggctgccgatggttatcttccagattggctcgaggacactctctctgaaggaataagacagtggtggaagctcaaacctggcccaccaccaccaaagcccgcagagcggcataaggacgacagcaggggtcttgtgcttcctgggtacaagtacctcggacccttcaacggactcgacaagggagagccggtcaacgaggcagacgccgcggccctcgagcacgacaaagcctacgaccggcagctcgacagcggagacaacccgtacctcaagtacaaccacgccgacgcggagtttcaggagcgccttaaagaagatacgtcttttgggggcaacctcggacgagcagtcttccaggcgaaaaagagggttcttgaacctctgggcctggttgaggaacctgttaagacggctccgggaaaaaagaggccggtagagcactctcctgtggagccagactcctcctcgggaaccggaaaggcgggccagcagcctgcaagaaaaagattgaattttggtcagactggagacgcagactcagtacctgacccccagcctctcggacagccaccagcagccccctctggtctgggaactaatacgatggctacaggcagtggcgcaccaatggcagacaataacgagggcgccgacggagtgggtaattcctcgggaaattggcattgcgattccacatggatgggcgacagagtcatcaccaccagcacccgaacctgggccctgcccacctacaacaaccacctctacaaacaaatttccagccaatcaggagcctcgaacgacaatcactactttggctacagcaccccttgggggtattttgacttcaacagattccactgccacttttcaccacgtgactggcaaagactcatcaacaacaactggggattccgacccaagagactcaacttcaagctctttaacattcaagtcaaagaggtcacgcagaatgacggtacgacgacgattgccaataaccttaccagcacggttcaggtgtttactgactcggagtaccagctcccgtacgtcctcggctcggcgcatcaaggatgcctcccgccgttcccagcagacgtcttcatggtgccacagtatggatacctcaccctgaacaacgggagtcaggcagtaggacgctcttcattttactgcctggagtactttccttctcagatgctgcgtaccggaaacaactttaccttcagctacacttttgaggacgttcctttccacagcagctacgctcacagccagagtctggaccgtctcatgaatcctctcatcgaccagtacctgtattacttgagcagaacaaacactccaagtggaaccaccacgcagtcaaggcttcagttttctcaggccggagcgagtgacattcgggaccagtctaggaactggcttcctggaccctgttaccgccagcagcgagtatcaaagacatctgcggataacaacaacagtgaatactcgtggactggagctaccaagtaccacctcaatggcagagactctctggtgaatccgggcccggccatggcaagccacaaggacgatgaagaaaagttttttcctcagagcggggttctcatctttgggaagcaaggctcagagaaaacaaatgtggacattgaaaaggtcatgattacagacgaagaggaaatcaggacaaccaatcccgtggctacggagcagtatggttctgtatctaccaacctccagagaggcaacagacaagcagctaccgcagatgtcaacacacaaggcgttcttccaggcatggtctggcaggacagagatgtgtaccttcaggggcccatctgggcaaagattccacacacggacggacattttcacccctctcccctcatgggtggattcggacttaaacaccctcctccacagattctcatcaagaacaccccggtacctgcgaatccttcgaccaccttcagtgcggcaaagtttgcttccttcatcacacagtactccacgggacaggtcagcgtggagatcgagtgggagctgcagaaggaaaacagcaaacgctggaatcccgaaattcagtacacttccaactacaacaagtctgttaatgtggactttactgtggacactaatggcgtgtattcagagcctcgccccattggcaccagatacctgactcgtaatctgtaa

SEQ ID NO: 22 - protein, 735 aa, Adeno-associated virus 2 [sequence omitted]

SEQ ID NO: 23 - protein, 621 aa, Adeno-associated virus 2
MPGFYEIVIKVPSDLDGHLPGISDSFVNWVAEKEWELPPDSDMDLNLIEQAPLTVAEKLQRDFLTEWRRVSKAPEALFFVQFEKGESYFHMHVLVETTGVKSMVLGRFLSQIREKLIQRIYRGIEPTLPNWFAVTKTRNGAGGGNKVVDECYIPNYLLPKTQPELQWAWTNMEQYLSACLNLTERKRLVAQHLTHVSQTQEQNKENQNPNSDAPVIRSKTSARYMELVGWLVDKGITSEKQWIQEDQASYISFNAASNSRSQIKAALDNAGKIMSLTKTAPDYLVGQQPVEDISSNRIYKILELNGYDPQYAASVFLGWATKKFGKRNTIWLFGPATTGKTNIAEAIAHTVPFYGCVNWTNENFPFNDCVDKMVIWWEEGKMTAKVVESAKAILGGSKVRVDQKCKSSAQIDPTPVIVTSNTNMCAVIDGNSTTFEHQQPLQDRMFKFELTRRLDHDFGKVTKQEVKDFFRWAKDHVVEVEHEFYVKKGGAKKRPAPSDADISEPKRVRESVAQPSTSDAEASINYADRYQNKCSRHVGMNLMLFPCRQCERMNQNSNICFTHGQKDCLECFPVSESQPVSVVKKAYQKLCYIHHIMGKVPDACTACDLVNVDLDDCIFEQ

SEQ ID NO: 24 - DNA, 4675 bp, Adeno-associated virus 2
ttggccactccctctctgcgcgctcgctcgctcactgaggccgggcgaccaaaggtcgcccgacgcccgggctttgcccgggcggcctcagtgagcgagcgagcgcgcagagagggagtggccaactccatcactaggggttcctggaggggtggagtcgtgacgtgaattacgtcatagggttagggaggtcctgtattagaggtcacgtgagtgttttgcgacattttgcgacaccatgtggtcacgctgggtatttaagcccgagtgagcacgcagggtctccattttgaagcgggaggtttgaacgcgcagccgccatgccggggttttacgagattgtgattaaggtccccagcgaccttgacgggcatctgcccggcatttctgacagctttgtgaactgggtggccgagaaggaatgggagttgccgccagattctgacatggatctgaatctgattgagcaggcacccctgaccgtggccgagaagctgcagcgcgactttctgacggaatggcgccgtgtgagtaaggccccggaggcccttttctttgtgcaatttgagaagggagagagctacttccacatgcacgtgctcgtggaaaccaccggggtgaaatccatggttttgggacgtttcctgagtcagattcgcgaaaaactgattcagagaatttaccgcgggatcgagccgactttgccaaactggttcgcggtcacaaagaccagaaatggcgccggaggcgggaacaaggtggtggatgagtgctacatccccaattacttgctccccaaaacccagcctgagctccagtgggcgtggactaatatggaacagtatttaagcgcctgtttgaatctcacggagcgtaaacggttggtggcgcagcatctgacgcacgtgtcgcagacgcaggagcagaacaaagagaatcagaatcccaattctgatgcgccggtgatcagatcaaaaacttcagccaggtacatggagctggtcgggtggctcgtggacaaggggattacctcggagaagcagtggatccaggaggaccaggcctcatacatctccttcaatgcggcctccaactcgcggtcccaaatcaaggctgccttggacaatgcgggaaagattatgagcctgactaaaaccgcccccgactacctggtgggccagcagcccgtggaggacatttccagcaatcggatttataaaattttggaactaaacgggtacgatccccaatatgcggcttccgtctttctgggatgggccacgaaaaagttcggcaagaggaacaccatctggctgtttgggcctgcaactaccgggaagaccaacatcgcggaggccatagcccacactgtgcccttctacgggtgcgtaaactggaccaatgagaactttcccttcaacgactgtgtcgacaagatggtgatctggtgggaggaggggaagatgaccgccaaggtcgtggagtcggccaaagccattctcggaggaagcaaggtgcgcgtggaccagaaatgcaagtcctcggcccagatagacccgactcccgtgatcgtcacctccaacaccaacatgtgcgccgtgattgacgggaactcaacgaccttcgaacaccagcagccgttgcaagaccggatgttcaaatttgaactcacccgccgtctggatcatgactttgggaaggtcaccaagcaggaagtcaaagactttttccggtgggcaaaggatcacgtggttgaggtggagcatgaattctacgtcaaaaagggtggagccaagaaaagacccgcccccagtgacgcagatataagtgagcccaaacgggtgcgcgagtcagttgcgcagccatcgacgtcagacgcggaagcttcgatcaactacgcagacaggtaccaaaacaaatgttctcgtcacgtgggcatgaatctgatgctgtttccctgcagacaatgcgagagaatgaatcagaattcaaatatctgcttcactcacggacagaaagactgtttagagtgctttcccgtgtcagaatctcaacccgtttctgtcgtcaaaaaggcgtatcagaaactgtgctacattcatcatatcatgggaaaggtgccagacgcttgcactgcctgcgatctggtcaatgtggatttggatgactgcatctttgaacaataaatgatttaaatcaggtatggctgccgatggttatcttccagattggctcgaggacactctctctgaaggaataagacagtggtggaagctcaaacctggcccaccaccaccaaagcccgcagagcggcataaggacgacagcaggggtcttgtgcttcctgggtacaagtacctcggacccttcaacggactcgacaagggagagccggtcaacgaggcagacgccgcggccctcgagcacgtacaaagcctacgaccggcagctcgacagcggagacaacccgtacctcaagtacaaccacgccgacgcggagtttcaggagcgccttaaagaagatacgtcttttgggggcaacctcggacgagcagtcttccaggcgaaaaagagggttcttgaacctctgggcctggttgaggaacctgttaagacggctccgggaaaaaagaggccggtagagcactctcctgtggagccagactcctcctcgggaaccggaaaggcgggccagcagcctgcaagaaaaagattgaattttggtcagactggagacgcagactcagtacctgacccccagcctctcggacagccaccagcagccccctctggtctgggaactaatacgatggctacaggcagtggcgcaccaatggcagacaataacgagggcgccgacggagtgggtaattcctccggaaattggcattgcgattccacatggatgggcgacagagtcatcaccaccagcacccgaacctgggccctgcccacctacaacaaccacctctacaaacaaatttccagccaatcaggagcctcgaacgacaatcactactttggctacagcaccccttgggggtattttgacttcaacagattccactgccacttttcaccacgtgactggcaaagactcatcaacaacaactggggattccgacccaagagactcaacttcaagctctttaacattcaagtcaaagaggtcacgcagaatgacggtacgacgacgattgccaataaccttaccagcacggttcaggtgtttactgactcggagtaccagctcccgtacgtcctcggctcggcgcatcaaggatgcctcccgccgttcccagcagacgtcttcatggtgccacagtatggatacctcaccctgaacaacgggagtcaggcagtaggacgctcttcattttactgcctggagtactttccttctcagatgctgcgtaccggaaacaactttaccttcagctacacttttgaggacgttcctttccacagcagctacgctcacagccagagtctggaccgtctcatgaatcctctcatcgaccagtacctgtattacttgagcagaacaaacactccaagtggaaccaccacgcagtcaaggcttcagttttctcaggccggagcgagtgacattcgggaccagtctaggaactggcttcctggaccctgttaccgccagcagcgagtatcaaagacatctgcggataacaacaacagtgaatactcgtggactggagctaccaagtaccacctcaatggcagagactctctggtgaatccggccatggcaagccacaaggacgatgaagaaaagttttttcctcagagcggggttctcatctttgggaagcaaggctcagagaaaacaaatgtgaacattgaaaaggtcatgattacagacgaagaggaaatcggaacaaccaatcccgtggctacggagcagtatggttctgtatctaccaacctccagagaggcaacagacaagcagctaccgcagatgtcaacacacaaggcgttcttccaggcatggtctggcaggacagagatgtgtaccttcaggggcccatctgggcaaagattccacacacggacggacattttcacccctctcccctcatgggtggattcggacttaaacaccctcctccacagattctcatcaagaacaccccggtacctgcgaatccttcgaccaccttcagtgcggcaaagtttgcttccttcatcacacagtactccacgggacacggtcagcgtggagatcgagtgggagctgcagaaggaaaacagcaaacgctggaatcccgaaattcagtacacttccaactacaacaagtctgttaatcgtggacttaccgtggatactaatggcgtgtattcagagcctcgccccattggcaccagatacctgactcgtaatctgtaattgcttgttaatcaataaaccgtttaattcgtttcagttgaactttggtctctgcgtatttctttcttatctagtttccatggctacgtagataagtagcatggcgggttaatcattaactacaaggaacccctagtgatggagttggccactccctctctgcgcgctcgctcgctcactgaggccgggcgaccaaaggtcgcccgacgcccgggctttgcccgggcggcctcagtgagcgagcgagcgcgcagagagggagtggccaa

SEQ ID NO: 25 - DNA, 4679 bp, Adeno-associated virus 2
ttggccactccctctctgcgcgctcgctcgctcactgaggccgggcgaccaaaggtcgcccgacgcccgggctttgcccgggcggcctcagtgagcgagcgagcgcgcagagagggagtggccaactccatcactaggggttcctggaggggtggagtcgtgacgtgaattacgtcatagggttagggaggtcctgtattagaggtcacgtgagtgttttgcgacattttgcgacaccatgtggtcacgctgggtatttaagcccgagtgagcacgcagggtctccattttgaagcgggaggtttgaacgcgcagccgccatgccggggttttacgagattgtgattaaggtccccagcgaccttgacgggcatctgcccggcatttctgacagctttgtgaactgggtggccgagaaggaatgggagttgccgccagattctgacatggatctgaatctgattgagcaggcacccctgaccgtggccgagaagctgcagcgcgactttctgacggaatggcgccgtgtgagtaaggccccggaggcccttttctttgtgcaatttgagaagggagagagctacttccacatgcacgtgctcgtggaaaccaccggggtgaaatccatggttttgggacgtttcctgagtcagattcgcgaaaaactgattcagagaatttaccgcgggatcgagccgactttgccaaactggttcgcggtcacaaagaccagaaatggcgccggaggcgggaacaaggtggtggatgagtgctacatccccaattacttgctccccaaaacccagcctgagctccagtgggcgtggactaatatggaacagtatttaagcgcctgtttgaatctcacggagcgtaaacggttggtggcgcagcatctgacgcacgtgtcgcagacgcaggagcagaacaaagagaatcagaatcccaattctgatgcgccggtgatcagatcaaaaacttcagccaggtacatggagctggtcgggtggctcgtggacaaggggattacctcggagaagcagtggatccaggaggaccaggcctcatacatctccttcaatgcggcctccaactcgcggtcccaaatcaaggctgccttggacaatgcgggaaagattatgagcctgactaaaaccgcccccgactacctggtgggccagcagcccgtggaggacatttccagcaatcggatttataaaattttggaactaaacgggtacgatccccaatatgcggcttccgtctttctgggatgggccacgaaaaagttcggcaagaggaacaccatctggctgtttgggcctgcaactaccgggaagaccaacatcgcggaggccatagcccacactgtgcccttctacgggtgcgtaaactggaccaatgagaactttcccttcaacgactgtgtcgacaagatggtgatctggtgggaggaggggaagatgaccgccaaggtcgtggagtcggccaaagccattctcggaggaagcaaggtgcgcgtggaccagaaatgcaagtcctcggcccagatagacccgactcccgtgatcgtcacctccaacaccaacatgtgcgccgtgattgacgggaactcaacgaccttcgaacaccagcagccgttgcaagaccggatgttcaaatttgaactcacccgccgtctggatcatgactttgggaaggtcaccaagcaggaagtcaaagactttttccggtgggcaaaggatcacgtggttgaggtggagcatgaattctacgtcaaaaagggtggagccaagaaaagacccgcccccagtgacgcagatataagtgagcccaaacgggtgcgcgagtcagttgcgcagccatcgacgtcagacgcggaagcttcgatcaactacgcagacaggtaccaaaacaaatgttctcgtcacgtgggcatgaatctgatgctgtttccctgcagacaatgcgagagaatgaatcagaattcaaatatctgcttcactcacggacagaaagactgtttagagtgctttcccgtgtcagaatctcaacccgtttctgtcgtcaaaaaggcgtatcagaaactgtgctacattcatcatatcatgggaaaggtgccagacgcttgcactgcctgcgatctggtcaatgtggatttggatgactgcatctttgaacaataaatgatttaaatcaggtatggctgccgatggttatcttccagattggctcgaggacactctctctgaaggaataagacagtggtggaagctcaaacctggcccaccaccaccaaagcccgcagagcggcataaggacgacagcaggggtcttgtgcttcctgggtacaagtacctcggacccttcaacggactcgacaagggagagccggtcaacgaggcagacgccgcggccctcgagcacgacaaagcctacgaccggcagctcgacagcggagacaacccgtacctcaagtacaaccacgccgacgcggagtttcaggagcgccttaaagaagatacgtcttttgggggcaacctcggacgagcagtcttccaggcgaaaaagagggttcttgaacctctgggcctggttgaggaacctgttaagacggctccgggaaaaaagaggccggtagagcactctcctgtggagccagactcctcctcgggaaccggaaaggcgggccagcagcctgcaagaaaaagattgaattttggtcagactggagacgcagactcagtacctgacccccagcctctcggacagccaccagcagccccctctggtctgggaactaatacgatggctacaggcagtggcgcaccaatggcagacaataacgagggcgccgacggagtgggtaattcctccggaaattggcattgcgattccacatggatgggcgacagagtcatcaccaccagcacccgaacctgggccctgcccacctacaacaaccacctctacaaacaaatttccagccaatcaggagcctcgaacgacaatcactactttggctacagcaccccttgggggtattttgacttcaacagattccactgccacttttcaccacgtgactggcaaagactcatcaacaacaactggggattccgacccaagagactcaacttcaagctctttaacattcaagtcaaagaggtcacgcagaatgacggtacgacgacgattgccaataaccttaccagcacggttcaggtgtttactgactcggagtaccagctcccgtacgtcctcggctcggcgcatcaaggatgcctcccgccgttcccagcagacgtcttcatggtgccacagtatggatacctcaccctgaacaacgggagtcaggcagtaggacgctcttcattttactgcctggagtactttccttctcagatgctgcgtaccggaaacaactttaccttcagctacacttttgaggacgttcctttccacagcagctacgctcacagccagagtctggaccgtctcatgaatcctctcatcgaccagtacctgtattacttgagcagaacaaacactccaagtggaaccaccacgcagtcaaggcttcagttttctcaggccggagcgagtgacattcgggaccagtctaggaactggcttcctggaccctgttaccgccagcagcgagtatcaaagacatctgcggataacaacaacagtgaatactcgtggactggagctaccaagtaccacctcaatggcagagactctctggtgaatccgggcccggccatggcaagccacaaggacgatgaagaaaagttttttcctcagagcggggttctcatctttgggaagcaaggctcagagaaaacaaatgtggacattgaaaaggtcatgattacagacgaagaggaaatcaggacaaccaatcccgtggctacggagcagtatggttctgtatctaccaacctccagagaggcaacagacaagcagctaccgcagatgtcaacacacaaggcgttcttccaggcatggtctggcaggacagagatgtgtaccttcaggggcccatctgggcaaagattccacacacggacggacattttcacccctctcccctcatgggtggattcggacttaaacaccctcctccacagattctcatcaagaacaccccggtacctgcgaatccttcgaccaccttcagtgcggcaaagtttgcttccttcatcacacagtactccacgggacaggtcagcgtggagatcgagtgggagctgcagaaggaaaacagcaaacgctggaatcccgaaattcagtacacttccaactacaacaagtctgttaatgtggactttactgtggacactaatggcgtgtattcagagcctcgccccattggcaccagatacctgactcgtaatctgtaattgcttgttaatcaataaaccgtttaattcgtttcagttgaactttggtctctgcgtatttctttcttatctagtttccatggctacgtagataagtagcatggcgggttaatcattaactacaaggaacccctagtgatggagttggccactccctctctgcgcgctcgctcgctcactgaggccgggcgaccaaaggtcgcccgacgcccgggctttgcccgggcggcctcagtgagcgagcgagcgcgcagagagggagtggccaa

SEQ ID NO: 26 - protein, 725 aa, Adeno-associated virus-5
MAADGYLPDWLEDTLSEGIRQWWKLKPGPPPPKPAERHKDDSRGLVLPGYKYLGPFNGLDKGEPVNEADAAALEHDKAYDRQLDSGDNPYLKYNHADAEFQERLKEDTSFGGNLGRAVFQAKKRVLEPFGLVEEGAKTAPTGKRIDDHFPKRKKARTEEDSKPSTSSDAEAGPSGSQQLQIPAQPASSLGADTMSAGGGGPLGDNNQGADGVGNASGDWHCDSTWMGDRVVTKSTRTWVLPSYNNHQYREIKSGSVDGSNANAYFGYSTPWGYFDFNRFHSHWSPRDWQRLINNYWGFRPRSLRVKIFNIQVKEVTVQDSTTTIANNLTSTVQVFTDDDYQLPYVVGNGTEGCLPAFPPQVFTLPQYGYATLNRDNTENPTERSSFFCLEYFPSKMLRTGNNFEFTYNFEEVPFHSSFAPSQNLFKLANPLVDQYLYRFVSTNNTGGVQFNKNLAGRYANTYKNWFPGPMGRTQGWNLGSGVNRASVSAFATTNRMELEGASYQVPPQPNGMTNNLQGSNTYALENTMIFNSQPANPGTTATYLEGNMLITSESETQPVNRVAYNVGGQMATNNQSSTTAPTTGTYNLQEIVPGSVWMERDVYLQGPIWAKIPETGAHFHPSPAMGGFGLKHPPPMMLIKNTPVPGNITSFSDVPVSSFITQYSTGQVTVEMEWELKKENSKRWNPEIQYTNNYNDPQFVDFAPDSTGEYRTTRPIGTRYLTRPL

SEQ ID NO: 27 - protein, 644 aa, Artificial Sequence
  Description of Artificial Sequence: Synthetic polypeptide
  MOD_RES (434)..(434): Any amino acid
KAYDQQLKAGDNPYLRYNHADAEFQERLQEDTSFGGNLGRAVFQAKKRVLEPLGLVETPAKTAPGKKRPVDSPDSTSGIGKKGQQPAKKRLNFGQTGDSESVPDPQPIGEPPAGPSGLGSGTMAAGGGAPMADNNEGADGVGNASGNWHCDSTWLGDRVITTSTRTWALPTYNNHLYKQISSQSAGSTNDNVYFGYSTPWGYFDFNRFHCHFSPRDWQRLINNNWGFRPKKLNFKLFNIQVKEVTTNDGVTTIANNLTSTVQVFSDSEYQLPYVLGSAHQGCLPPFPADVFMIPQYGYLTLNNGSQSVGRSSFYCLEYFPSQMLRTGNNFTFSYTFEDVPFHSSYAHSQSLDRLMNPLIDQYLYYLARTQSNAGGTAGNRELQFYQGGPTTMAEQAKNWLPGPCFRQQRVSKTLDQNNNSNFAWTGATKYHLNXRNSLVNPGVAMATHKDDEERFFPSSGVLIFGKTGAANKTTLENVLMTNEEEIRPTNPVATEEYGIVSSNLQAASTAAQTQVVNNQGALPGMVWQNRDVYLQGPIWAKIPHTDGNFHPSPLMGGFGLKHPPPQILIKNTPVPANPPEVFTPAKFASFITQYSTGQVSVEIEWELQKENSKRWNPEIQYTSNFDKQTGVDFAVDSQGVYSEP

SEQ ID NO: 28 - DNA, 1933 bp, Artificial Sequence
  Description of Artificial Sequence: Synthetic polynucleotide
caaggcctacgaccagcagctcaaagcgggtgacaatccgtacctgcggtataaccacgccgacgccgagtttcaggagtgtcttcaagaagatacgtcttttgggggcaacctcgggcgagcagtcttccaggccaaaaagcgggttctcgaacctcttggtctggttgagacgccagctaagacggcacctggaaagaagcgaccggtagactcgccagactccacctcgggcatcggcaagaaaggccagcagcccgcgaaaaagagactcaactttgggcagactggcgactcagagtcagtccccgaccctcaaccaatcggagaaccaccagcaggcccctctggtctgggatctggtacaatggttgcaggcggtggcgcaccaatggctgacaataacgagggcgccgacggagtgggtaatgcctcaggaaattggcattgcgattccacatggctgggcgacagagtcatcaccaccagcacccgaacctgggccctgcccacctacaacaaccacctctacaagcaaatctccagtcagtcagcagggagcaccaacgataacgtctatttcggctacagcaccccctgggggtattttgacttcaacagattccattgccacttctcaccacgtgactggcagcgacttatcaacaacaactggggattccggcccaagaagctcaacttcaagctcttcaacatccaggtcaaggaggtcacgacgaatgacggtgtcacaaccatcgctaataaccttaccagcacggttcaggtcttttcggactcggaatatcaactgccgtacgtcctcggctccgcgcaccagggctgcctgcctccgttcccggcagacgtgttcatgattccgcagtacggatacctgactctgaacaatggcagccaatcggtaggccgttcctccttctactgcctggagtactttccttctcagatgctgagaacgggcaacaacttcacctttagctacaccttcgaggacgtgcctttccacagcagctacgcgcacagccagagtctggaccggctgatgaatcccctcatcgaccagtacctgtactacttggccagaacacagagcaacgcaggaggtactgctggcaatcgggaactgcagttttatcagggcggacctaccaccatggccgaacaagcaaagaactggctgcccggaccttgcttccggcaacagagagtatccaagacgctggatcaaaataacaacagcaactttgcctggactggtgccacaaaataccatttaaatggaagaaattcattggttaatcccggtgtcgccatggcaacccacaaggacgacgaggaacgcttctccccttcgagcggagttctaatttttggcaaaactggagcagctaataaaactacattagaaaacgtgctcatgacaaatgaagaagaaattcgtcctaccaacccggtagctaccgaggaatacgggattgtaagcagcaacttgcaggcggctagcaccgcagcccagacacaagttgttaacaaccagggagccttacctggcatggtctggcagaaccgggacgtgtacctgcaaggtcccatttgggccaagattcctcacacggacggcaactttcacccgtctcctctaatgggtggctttggactgaaacacccgcctccccagatcctgatcaaaaacacgccggtacctgctaatcctccagaagtgtttactcctgccaagtttgcttccttcatcacgcagtacagcaccgggcaagtcagcgttgagatcgagtgggagctgcagaaagagaacagcaagcgctggaacccagagattcagtacacctccaactttgacaaacagactggagtggactttgctgttgacagccagggtgtttactctgagcct

SEQ ID NO: 29 - protein, 644 aa, Artificial Sequence
  Description of Artificial Sequence: Synthetic polypeptide
KAYDQQLKAGDNPYLRYNHADAEFQECLQEDTSFGGNLGRAVFQAKKRVLEPLGLVETPAKTAPGKKRPVDSPDSTSGIGKKGQQPAKKRLNFGQTGDSESVPDPQPIGEPPAGPSGLGSGTMVAGGGAPMADNNEGADGVGNASGNWHCDSTWLGDRVITTSTRTWALPTYNNHLYKQISSQSAGSTNDNVYFGYSTPWGYFDFNRFHCHFSPRDWQRLINNNWGFRPKKLNFKLFNIQVKEVTTNDGVTTIANNLTSTVQVFSDSEYQLPYVLGSAHQGCLPPFPADVFMIPQYGYLTLNNGSQSVGRSSFYCLEYFPSQMLRTGNNFTFSYTFEDVPFHSSYAHSQSLDRLMNPLIDQYLYYLARTQSNAGGTAGNRELQFYQGGPTTMAEQAKNWLPGPCFRQQRVSKTLDQNNNSNFAWTGATKYHLNGRNSLVNPGVAMATHKDDEERFSPSSGVLIFGKTGAANKTTLENVLMTNEEEIRPTNPVATEEYGIVSSNLQAASTAAQTQVVNNQGALPGMVWQNRDVYLQGPIWAKIPHTDGNFHPSPLMGGFGLKHPPPQILIKNTPVPANPPEVFTPAKFASFITQYSTGQVSVEIEWELQKENSKRWNPEIQYTSNFDKQTGVDFAVDSQGVYSEP

SEQ ID NO: 30 - DNA, 1933 bp, Artificial Sequence
  Description of Artificial Sequence: Synthetic polynucleotide
caaggcctacgaccagcagctcaaagcgggtgacaatccgtacctgcggtataaccacgccgacgccgagtttcaggagcgtcttcaagaagatacgtcttttgggggcaacctcgggcgagcagtcttccaggccaaaaagcgggttctcgaacctcttggtctggttgagacgccagctaagacggcacctggaaagaagcgaccggtagactcgccagactccacctcgggcatcggcaagaaaggccagcagcccgcgaaaaagagactcaactttgggcagactggcgactcagagccagtccccgaccctcaaccaatcggagaaccaccagcaggcccctctggtctgggatctggtacaatggctgcaggcggtggcgcaccaatggctgacaataacgagggcgccgacggagtgggtaatgcctcaggaaattggcattgcgattccacacggctgggcgacagagtcatcaccaccagcacccgaacctgggccctgcccacctacaacaaccacctctacaagcaaatctccagtcagtcagcagggagcaccaacgataacgtctatttcggctacagcaccccctgggggtattttgacttcaacagattccattgccacttctcaccacgtgactggcagcgacttatcaacaacaactggggattccggcccaagaagctcaacttcaagctcttcaacatccaggtcaaggaggtcacgacgaatgacggcgtcacaaccatcgctaataaccttaccagcacggttcaggtcttttcggactcggaatatcaactgccgtacgtcctcggctccgcgcaccagggctgcctgcctccgttcccggcagacgtgttcatgattccgcagtacggatacctgactctgaacaatggcagccaatcggtaggccgttcctccttctactgcctggagtactttccttctcagatgctgagaacgggcaacaacttcacctttagctacaccttcgaggacgtgcctttccacagcagctacgcgcacagccagagtctgggccggctgatgaatcccctcatcgaccagtacctgtactacttggccagaacacagagcaacgcaggaggtactgctggcaatcgggaactgcagttttatcagggcggacctaccaccatggccgaacaagcaaagaactggctgcccggaccttgcttccggcaacagagagtatccaagacgctggatcaaaataacaacagcaactttgcctggactggtgccacaaaataccatttaaatggaagaaattcattggttaatcccggtgtcgccatggcaacccacaaggacgacgaggaacgcttcttcccttcgagcggagttctaatttttggcaaaactggagcagctaataaaactacattagaaaacgtgctcatgacaaatgaagaagaaattcgtcctaccaacccggtagctaccgaggaatacgggattgtaagcagcaacttgcaggcggctagcaccgcagcccagacacaagttgttaacaaccagggagccttacctggcatggtctggcagaaccgggacgtgtacctgcaaggtcccatttgggccaagattcctcacacggacggcaactttcacccgtctcctctaatgggtggctttggactgaaacacccgcctccccagatcctgatcaaaaacacaccggtacctgctaatcctccagaagtgtttactcctgccaagtttgcttccttcatcacgcagtacagcaccgggcaagtcagcgttgagatcgaatgggagctgcagaaagagaacagcaagcgctggaacccagagattcagtacacctccaactttgacaaacagactggagtggactttgctgttgacagccagggtgtttactctgagcct

SEQ ID NO: 31 - protein, 644 aa, Artificial Sequence
  Description of Artificial Sequence: Synthetic polypeptide
KAYDQQLKAGDNPYLRYNHADAEFQERLQEDTSFGGNLGRAVFQAKKRVLEPLGLVETPAKTAPGKKRPVDSPDSTSGIGKKGQQPAKKRLNFGQTGDSEPVPDPQPIGEPPAGPSGLGSGTMAAGGGAPMADNNEGADGVGNASGNWHCDSTRLGDRVITTSTRTWALPTYNNHLYKQISSQSAGSTNDNVYFGYSTPWGYFDFNRFHCHFSPRDWQRLINNNWGFRPKKLNFKLFNIQVKEVTTNDGVTTIANNLTSTVQVFSDSEYQLPYVLGSAHQGCLPPFPADVFMIPQYGYLTLNNGSQSVGRSSFYCLEYFPSQMLRTGNNFTFSYTFEDVPFHSSYAHSQSLGRLMNPLIDQYLYYLARTQSNAGGTAGNRELQFYQGGPTTMAEQAKNWLPGPCFRQQRVSKTLDQNNNSNFAWTGATKYHLNGRNSLVNPGVAMATHKDDEERFFPSSGVLIFGKTGAANKTTLENVLMTNEEEIRPTNPVATEEYGIVSSNLQAASTAAQTQVVNNQGALPGMVWQNRDVYLQGPIWAKIPHTDGNFHPSPLMGGFGLKHPPPQILIKNTPVPANPPEVFTPAKFASFITQYSTGQVSVEIEWELQKENSKRWNPEIQYTSNFDKQTGVDFAVDSQGVYSEP

SEQ ID NO: 32 - DNA, 1933 bp, Artificial Sequence; identical to SEQ ID NO: 30
  Description of Artificial Sequence: Synthetic polynucleotide

SEQ ID NO: 33 - protein, 644 aa, Artificial Sequence; identical to SEQ ID NO: 31
  Description of Artificial Sequence: Synthetic polypeptide

SEQ ID NO: 34 - DNA, 1933 bp, Artificial Sequence
  Description of Artificial Sequence: Synthetic polynucleotide
caaggcctacgaccagcagctcaaagcgggtgacaatccgtacctgcggtataaccacgccgacgccgagtttcaggagcgtcttcaagaagatacgtcttttgggggcaacctcgggcgagcagtcttccaggccaaaaagcgggttctcgaacctcttggtctggttgagacgccagctaagacggcacctggaaagaagcgaccggtagactcgccagactccacctcgggcatcggcaagaaaggccagcagcccgcgaaaaagagactcaactttgggcagactggcgactcagagtcagtccccgaccctcaaccaatcggagaaccaccagcaggcccctctggtctgggatctggtacaatggctgcaggcggtggcgcaccaatggctgacaatagcgagggcgccgacggagtgggtaatgcctcaggaaattggcattgcgattccacatggctgggcgacagagtcatcaccaccagcacccgaacctgggccctgcccacctacaacaaccacctctacaagcaaatctccagtcagtcagcagggagcaccaacgataacgtctatttcggctacagcaccccctgggggtattttgacttcaacagattccattgccacttctcaccacgtgactggcagcgacttatcaacaacaactggggattccggcccaagaagctcaacttcaagctcttcaacatccaggtcaaggaggtcacgacgaatgacggtgtcacaaccatcgctaataaccttaccagcacggttcaggtcttttcggactcggaatatcaactgccgtacgtcctcggctccgcgcaccagggctgcctgcctccgttcccggcagacgtgttcatgattccgcagtacggatacctgactctgaacaatggcagccaatcggtaggccgttcctccttctactgcctggagtactttccttctcagatgctgagaacgggcaacaacttcacctttagctacaccttcgaggacgtgcctttccacagcagctacgcgcacagccagagtctggaccggctgatgaatcccctcatcgaccagtacctgtactacttggccagaacacagagcaacgcaggaggtactgctggcaatcgggaactgcagttttatcagggcggacctaccaccatggccgaacaagcaaagaactggctgcccggaccttgcttccggcaacagagagtatccaagacgctggatcaaaataacaacagcaactttgcctggactggtgccacaaaataccatttaaatggaagaaattcattggttaatcccggtgtcgccatggcaacccacaaggacgacgaggaacgcttcttcccttcgagcggagttctaatttttggcaaaactggagcagctaataaaactacattagaaaacgtgctcatgacaaatgaagaagaaattcgtcctaccaacccggtagctaccgaggaatacgggattgtaagcagcaacttgcaggcggctagcaccgcagcccagacacaagttgttaacaaccagggagccttacctggcatggtctggcagaaccgggacgtgtacctgcaaggtcccatttgggccaagattcctcacacggacggcaactttcacccgtctcctctaatgggtggctttggactgaaacacccgcctccccagatcctgatcaaaaacacaccggtacctgctaatcctccagaagtgtttactcctgccaagcttgcttccttcatcacgcagtacagcaccgggcaagtcagcgttgagatcgagtgggagctgcagaaagagaacagcaagcgctggaacccagagattcagtacacctccaactttgacaaacagactggagtggactttgctgttgacagccagggtgtttactctgagcct

SEQ ID NO: 35 - protein, 644 aa, Artificial Sequence
  Description of Artificial Sequence: Synthetic polypeptide
KAYDQQLKAGDNPYLRYNHADAEFQERLQEDTSFGGNLGRAVFQAKKRVLEPLGLVETPAKTAPGKKRPVDSPDSTSGIGKKGQQPAKKRLNFGQTGDSESVPDPQPIGEPPAGPSGLGSGTMAAGGGAPMADNSEGADGVGNASGNWHCDSTWLGDRVITTSTRTWALPTYNNHLYKQISSQSAGSTNDNVYFGYSTPWGYFDFNRFHCHFSPRDWQRLINNNWGFRPKKLNFKLFNIQVKEVTTNDGVTTIANNLTSTVQVFSDSEYQLPYVLGSAHQGCLPPFPADVFMIPQYGYLTLNNGSQSVGRSSFYCLEYFPSQMLRTGNNFTFSYTFEDVPFHSSYAHSQSLDRLMNPLIDQYLYYLARTQSNAGGTAGNRELQFYQGGPTTMAEQAKNWLPGPCFRQQRVSKTLDQNNNSNFAWTGATKYHLNGRNSLVNPGVAMATHKDDEERFFPSSGVLIFGKTGAANKTTLENVLMTNEEEIRPTNPVATEEYGIVSSNLQAASTAAQTQVVNNQGALPGMVWQNRDVYLQGPIWAKIPHTDGNFHPSPLMGGFGLKHPPPQILIKNTPVPANPPEVFTPAKLASFITQYSTGQVSVEIEWELQKENSKRWNPEIQYTSNFDKQTGVDFAVDSQGVYSEP

SEQ ID NO: 36 - DNA, 1933 bp, Artificial Sequence
  Description of Artificial Sequence: Synthetic polynucleotide
caaggcctacgaccagcagctcaaagcgggtgacaatccgtacctgcggtataaccacgccgacgccgagtttcaggagcgtcttcaagaagatacgtcttttgggggcaacctcgggcgagcagtcttccaggccaaaaagcgggttctcgaacctcttggtctggttgagacgccagctaagacggcacctggaaagaagcgaccggtagactcgccagactccacctcgggcatcggcaagaaaggccagcagcccgcgaaaaagagactcaactttgggcagactggcgactcagagtcagtccccgaccctcaaccaatcggagaaccaccagcaggcccctctggtctgggatctggtacaatggctgcaggcggtggcgcaccaatggctgacaataacgagggcgccgacggagtgggtaatgcctcaggaaattggcattgcgattccacatggctgggcgacagagtcatcaccaccagcacccgaacctgggccctgcccacctacaacaaccacctctacaagcaaatctccagtcagtcagcagggagcaccaacgataacgtctatttcggctacagcaccccctgggggtattttgacttcaacagattccattgccacttctcaccacgtgactggcagcgacttatcaacaacaactggggattccggcccaagaagctcaacttcaagctcttcaacatccaggtcaaggaggtcacgacgaatgacggcgtcacaaccatcgctaataaccttaccagcacggttcaggtcttttcggacccggaatatcaactgccgtacgtcctcggctccgcgcaccagggctgcctgcctccgttcccggcagacgtgttcatgattccgcagtacggatacctgactctgaacaatggcagccaatcggtaggccgttcctccttctactgcctggagtactttccttctcagatgctgagaacgggcaacaacttcacctttagctacaccttcgaggacgtgcctttccacagcagctacgcgcacagccagagtctggaccggctgatgaatcccctcatcgaccagtacctgtactacttggccagaacacagagcaacgcaggaggtactgctggcaatcgggaactgcagttttatcagggcggacctaccaccatggccgaacaagcaaagaactggctgcccggaccttgcttccggcaacagagagtatccaagacgctggatcaaaataacaacagcaactttgcctggactggtgccacaaaataccatttaaatggaagaaattcattggttaatcccggtgtcgccatggcaacccacaaggacgacgaggaacgcttcttcccttcgagcggagttctaatttttggcaaaactggagcagctaataaaactacattagaaaacgtgctcatgacaaatgaagaagaaattcgtcctaccaacccggtagctaccgaggaatacgggattgtaagcagcaacttgcaggcggctagcaccgcagcccagacacaagttgttaacaaccagggagccttacctggcatggtctggcagaaccgggacgtgtacctgcaaggtcccatttgggccaagattcctcacacggacggcaactttcacccgtctcctctaatgggtggctttggactgaaacacccgcctccccagatcctgatcaaaaacacaccggtacctgctaatcctccagaagtgtttactcctgccaagattgcttccttcatcacgcagtacagcaccgggcaagtcagcgttgagatcgagtgggagctgcagaaagagaacagcaagcgctggaacccagagattcagtacacctccaactttgacaaacagactggagtggactttgctgttgacagccagggtgtttactctgagcct

SEQ ID NO: 37 - protein, 644 aa, Artificial Sequence
  Description of Artificial Sequence: Synthetic polypeptide
KAYDQQLKAGDNPYLRYNHADAEFQERLQEDTSFGGNLGRAVFQAKKRVLEPLGLVETPAKTAPGKKRPVDSPDSTSGIGKKGQQPAKKRLNFGQTGDSESVPDPQPIGEPPAGPSGLGSGTMAAGGGAPMADNNEGADGVGNASGNWHCDSTWLGDRVITTSTRTWALPTYNNHLYKQISSQSAGSTNDNVYFGYSTPWGYFDFNRFHCHFSPRDWQRLINNNWGFRPKKLNFKLFNIQVKEVTTNDGVTTIANNLTSTVQVFSDPEYQLPYVLGSAHQGCLPPFPADVFMIPQYGYLTLNNGSQSVGRSSFYCLEYFPSQMLRTGNNFTFSYTFEDVPFHSSYAHSQSLDRLMNPLIDQYLYYLARTQSNAGGTAGNRELQFYQGGPTTMAEQAKNWLPGPCFRQQRVSKTLDQNNNSNFAWTGATKYHLNGRNSLVNPGVAMATHKDDEERFFPSSGVLIFGKTGAANKTTLENVLMTNEEEIRPTNPVATEEYGIVSSNLQAASTAAQTQVVNNQGALPGMVWQNRDVYLQGPIWAKIPHTDGNFHPSPLMGGFGLKHPPPQILIKNTPVPANPPEVFTPAKIASFITQYSTGQVSVEIEWELQKENSKRWNPEIQYTSNFDKQTGVDFAVDSQGVYSEP

SEQ ID NO: 38 - protein, 738 aa, Artificial Sequence
  Description of Artificial Sequence: Synthetic polypeptide
MAADGYLPDWLEDNLSEGIREWWALKPGAPKPKANQQKQDDGRGLVLPGYKYLGPFNGLDKGEPVNAADAAALEHDKAYDQQLKAGDNPYLRYNHADAEFQERLQEDTSFGGNLGRAVFQAKKRVLEPLGLVEEGAKTAPGKKRPVEPSPQRSPDSTTGIGKKGQQPAKKRLNFGQTGDSESVPDPQPIGEPPAGPSGLGSGTMAAGGGAPMADNNEGADGVGSSSGNWHCDSTWLGDRVITTSTRTWALPTYNNHLYKQISNGTSGGSTNDNTYFGYSTPWGYFDFNRFHCHFSPRDWQRLINNNWGFRPKRLNFKLFNIQVKEVTQNEGTKTIANNLTSTIQVFTDSEYQLPYVLGSARQGCLPPFPADVFMIPQYGYLTLNNGSQAVGRSSFYCLEYFPSQMLRTGNNFEFSYQFEDVPFHSSYAHSQSLDRLMNPLIDQYLYYLSRTQSTGGTAGTQQLLFSQAGPNNMSAQAKNWLPGPCYRQQRVSTTLSQNNNSNFAWTGATKYHLNGRDSLVNPGVAMATHKDDEERFFPSSGVLMFGKQGAGKGNVDYSSVMLTSEEEIKTTNPVATEQYGVVADNLQQQNAAPIVGAVNSQGALPGMVWQNRDVYLQGPIWAKIPHTDGNFHPSPLMGGFGLKHPPPQILIKNTPVPADPPTTFSQAKLASFITQYSTGQVSVEIEWELQKENSKRWNPEIQYTSNYYKSTNVDFAVNTDGTYSEPRPIGTRYLTRNL

SEQ ID NO: 39 - DNA, 3121 bp, Artificial Sequence
  Description of Artificial Sequence: Synthetic polynucleotide
gaattcgcccttctacggctgcgtcaactggaccaatgagaactttcccttcaacgactgtgtcgacaagatggtgatctggtgggaggaggggaagatgaccgccaaggtcgtggagtcggccaaagccattctcggaggaagcaaggtgcgcgtggaccagaaatgcaagtcctcggcccagatagacccgactcccgtgatcgtcacctccaacaccaacatgtgcgccgtgattgacgggaactcaacgaccttcgaacaccagcagccgttgcaagaccggatgttcaaatttgaactcacccgccgtctggatcatgactttgggaaggtcaccaagcaggaagtcaaagactttttccggtgggcaaaggatcacgtggttgaggtggagcacgaattctacgtcaaaaagggtggagccaagaaaagacccgcccccagtgacgcagatataagtgagcccaaacgggtgcgcgagtcagttgcgcagccatcgacgtcagacgcggaagcttcgatcaactacgcagacaggtaccaaaacaaatgttctcgtcacgcgggcatgaatctgatgctgtttccctgcagacaatgcgagagaatgaatcagaattcaaatatctgcttcactcacggacagaaagactgtttagagtgctttcccgtgtcagaatctcaacccgtttctgtcgtcaaaaaggcgtatcagaaactgtgctacattcatcatatcatgggaaaggtgccagacgcttgcactgcctgcgatctggtcgatgtggatttggatgactgcatctttgaacaataaatgatttaaatcaggtatggctgccgatggttatcttccagattggctcgaggacaacctctctgagggcattcgcgagtggtgggcgctgaaacctggagccccgaagcccaaagccaaccagcaaaagcaggacggcggccggggtctggtgcttcctggctacaagtacctcggacccttcaacggactcgacaagggggagcccgtcaacgcggcggacgcagcggccctcgagcacgacaaggcctacgaccagcagctcaaagcgggtgacaatccgtacctgcggtataaccacgccgacgccgagtttcaggagcgtctgcaagaagatacgtcttttgggggcaacctcgggcgagcagtcttccaggccaagaagcgggttctcgaacctctcggtctggttgaggaaggcgctaagacggctcctggaaagaagagaccggtagagccatcaccccagcgttctccagactcctctacgggcatcggcaagaaaggccagcagcccgcgaaaaagagactcaactttgggcagactggcgactcagagtcagtgcccgaccctcaaccaatcggagaaccccccgcaggcccctctggtctgggatctggtacaatggctgcaggcggtggcgctccaatggcagacaataacgaaggcgccgacggagtgggtagttcctcaggaaattggcattgcgattccacatggctgggcgactgagtcatcaccaccagcacccgaacctgggccctccccacctacaacaaccacctctacaagcaaatctccaacgggacttcgggaggaagcaccaacgacaacacctacttcggctacagcaccccctgggggtattttgactttaacagattccactgccacttctcaccacgtgactggcagcgactcatcaacaacaactggggattccggcccaagagactcaacttcaagctcttcaacatccaggtcaaggaggtcacgcagaatgaaggcaccaagaccatcgccaataaccttaccagcacgattcaggtctttacggactcggaataccagctcccgtacgtcctcggctctgcgcaccagggctgcctgcctccgttcccggcggacgtcttcatgattcctcagtacgggtacctgactctgaacaatggcagtcaggccgtgggccgttcctccttctactgcctggagtactttccttctcaaatgctgagaacgggcaacaactttgagttcagctaccagtttgaggacgtgccttttcacagcagctacgcgcacagccaaagcctggaccggctgatgaaccccctcatcgaccagtacctgtactacctgtctcggactcagtccacgggaggtaccgcaggaactcagcagttgctattttctcaggccgggcctaataacatgtcggctcaggccaaaaactggctacccgggccctgctaccggcagtaacgcgtctccacgacactgtcgcaaaataacaacagcaactttgtctggaccggtgccaccaagtatcatctgaatggcagagactctctggtagatcccggtgtcgctatggcaacccacaaggacgacgaagagcgattttttccgtccagcggagtcataatgtttgggaaacagggagctggaaaagacaacgtggactatagcagcgtcatgctaaccagtgaggaagaaattaaaaccaccaacccagtggccacagaacagtacggcgtggtggccgataacctgcaacagcaaaacgccgctcctattgtaggggccgtcaacagtcaaggagccttacctggcatggtctggcagaaccgggacgtgtacctgcagggtcctacctgggccaagattcctcacacggacggaaactttcatccctcgccgctgatgggaggctttggactgaaacacccgcctcctcagatcctgattaagaatacacctgttcccgcggatcctccaactaccttcagtcaagctaagctggcgtcgttcatcacgcagtacagcaccggacaggtcagcgtggaaattgaatgggagctgcaggaagaaaacagcaaacgctggaacccagagattcaatacacttccaactactacaaatctacaaatgtggactttgctgttaacacagatggcacttattctgagcctcgccccatcggcacccgttacctcacccgtaatctgtaattgcttgttaatcaataaaccggttgattcgtttcagttgaactttggtctctgcgaagggcgaattc

SEQ ID NO: 40 - protein, 738 aa, Artificial Sequence
  Description of Artificial Sequence: Synthetic polypeptide
MAADGYLPDWLEDNLSEGIREWWALKPGAPKPKANQQKQDDGRGLVLPGYKYLGPFNGLDKGEPVNAADAAALEHDKAYDQQLKAGDNPYLRYNHADAEFQERLQEDTSFGGNLGRAVFQAKKRVLEPLGLVEEGAKTAPGKKRPVEPSPQRSPDSSTGIGKKGQQPAKKRLNFGQTGDSESVPDPQPIGEPPAGPSGLGSGTMAAGGGAPMADNNEGADGVGSSSGNWHCDSTWLGDGVITTSTRTWALPTYNNHLYKQISNGTSGGSTNDNTYFGYSTPWGYFDFNRFHCHFSPRDWQRLINNNWGFRPKSLNFKLFNIQVKEVTQNEGTKTIANNLTSTIQVFTDSEYQLPYVLGSAHQGCLPPFPADVFMIPQYGYLTLNNGSQAVGRSSFYCLEYFPSQMLRTGNNFEFSYQFEDVPFHSSYAHSQSLDRLMNPLIDQYLYYLSRTQSTGGTAGTQQLLFSQAGPNNMSAQAKNWLPGPCYRQQRVSTTLSQNDNSNFAWTGATKYHLNGRDSLVNPGVAMATHKDDEERFFPSSGVLMFGKQGAGKDNVDYSSVMLTSEEEIKTTNPVATEQYGVVADNLQQQNAAPIVGAVNSQGALPGMVWQNRDVYLQGPIWAKIPHTDGNFHPSPLMGGFGLKHPPPQILIKNTPVPADPPTTFSQAKLASFITQYSTGQVSVEIEWELQKENSKRWNPEIQYTSNYYKSTNVDFAVNTDGTYSEPRPIGTRYLTRNL

SEQ ID NO: 41 - DNA, 3121 bp, Artificial Sequence
  Description of Artificial Sequence: Synthetic polynucleotide
gaattcgcccttcgcgagaccaaagttcaactgaaacgaatcaaccggtttattgattaacaagcaattacagattacgggtgaggtaacgggtgccgatggggcgaggctcagaataagtgccatctgtgttaacagcaaagtccacatttgtagatttgtagtagttggaagtgtattgaatctctgggttccagcgtttgctgttttctttctgcagctcccattcaatttccacgctgacctgtccggtgctgtactgcgtgatgaacgacgccagcttagcttgactgaaggtagttggaggatccgcgggaacaggtgtattcttaatcaggatctgaggaggcgggtgtttcagtccaaagcctcccatcagcggcgagggatgaaagtttccgtccgtgtgaggaatcttggcccagataggaccctgcaggtacacgtcccggttctgccagaccatgccaggtaaggctccttgactgttgacggcccctacaataggagcggcgttttgctgttgcaggttatcggccaccacgccgtactgttctgtggccactgggttggtggttttaatttcttcctcactggttagcataacgctgctatagtccacgttgtcttttccagctccctgtttcccaaacattaagactccgctggacggaaaaaatcgctcttcgtcgtccttgtgggttgccatagcgacaccgggatttaccagagagtctctgccattcagatgatacttggtggcaccggtccaggcaaagttgctgttgtcattttgcgacagtgtcgtggagacgcgttgctgccggtagcagggcccgggtagccagtttttggcctgagccgacatgttattaggcccggcctgagaaaatagcaactgctgagttcctgcggtacctcccgtggactgagtccgagacaggtagtacaggtactggtcgatgagggggttcatcagccggtccaggctttggctgtgcgcgtagctgctgtgaaaaggcacgtcctcaaactggtagctgaactcaaagttgttgcccgttctcagcatttgagaaggaaagtactccaggcagtagaaggaggaacggcccacggcctgactgccattgttcagagtcaggtacccgtactgaggaatcatgaagacgtccgccgggaacggaggcaggcagccctggtgcgcagagccgaggacgtacgggagctggtattccgagtccgtaaagacctgaatcgtgctggtaaggttattggcgatggtcttggtgccttcattctgcgtgacctccttgacctggatgttgaagagcttgaagttgaggctcttgggccggaatccccagttgttgttgatgagtcgctgccagtcacgtggtgagaagtggcagtggaatctgttaaagtcaaaatacccccagggggtgctgtagccgaagtaggtgttgtcgttggtgcttcctcccgaagtcccgttggagatttgcttgtagaggtggttgttgtaggtggggagggcccaggttcgggtgctggtggtgatgactccgtcgcccagccatgtggaatcgcaatgccaatttcctgaggaactacccactccgtcggcgccttcgttattgtctgccattggagcgccaccgcctgcagccattgtaccagatcccagaccagaggggcctgcggggggttctccgattggttgagggtcgggcactgactctgagtcgccagtctgcccaaagttgagtctctttttcgcgggctgctggcctttcttgccgatgcccgtagaggagtctggagaacgctggggtgatggctctaccggtctcttctttccaggagccgtcttagcgccttcctcaaccagaccgagaggttcgagaacccgcttcttggcctggaagactgctcgcccgaggttgcccccaaaagacgtatcttcttgcagacgctcctgaaactcggcgtcggcgtggttataccgcaggtacggattgtcacccgctttgagctgctggtcgtaggccttgtcgtgctcgagggccgctgcgtccgccgcgttgacgggctcccccttgtcgagtccgttgaagggtccgaggtacttgtagccaggaagcaccagaccccggccgtcgtcctgcttttgctggttggctttgggcttcggggctccaggtttcagcgcccaccactcgcgaatgccctcagagaggttgtcctcgagccaatctggaagataaccatcggcagccatacctgatttaaatcatttattgttcaaagatgcagtcatccaaatccacattgaccagatcgcaggcagtgcaagcgtctggcacctttcccatgatatgatgaatgtagcacagtttctgatacgcctttttgacgacagaaacgggttgagattctgacacgggaaagcactctaaacagtctttctgtccgtgagtgaagcagatatttgaattctgattcattctctcgcattgtctgcagggaaacagcatcagattcatgcccacgtgacgagaacatttgttttggtacctgtctgcgtagttgatcgaagcttccgcgtctgacgtcgatggctgcgcaactgactcgcgcacccgtttgggctcacttatatctgcgtcactgggggcgggtcttttcttggctccaccctttttgacgtagaattcatgctccacctcaaccacgtgatcctttgcccaccggaaaaagtctttgacttcctgcttggtgaccttcccaaagtcatgatccagacggcgggtgagttcaaatttgaacatccggtcttgcaacggctgctggtgttcgaaggtcgttgagttcccgtcaatcacggcgcacatgttggtgttggaggtgacgatcacgggagtcgggtctatctgggccgaggacttgcatttctggtccacgcgcaccttgcttcctccgagaatggctttggccgactccacgaccttggcggtcatcttcccctcctcccaccagatcaccatcttgtcgacacagtcgttgaagggaaagttctcattggtccagttgacgcagccgtagaaagggcgaattc

SEQ ID NO: 42 - DNA, 2211 bp, Artificial Sequence
  Description of Artificial Sequence: Synthetic polynucleotide
atggctgctgacggttatcttccagattggctcgaggacaacctttctgaaggcattcgtgagtggtgggctctgaaacctggagtccctcaacccaaagcgaaccaacaacaccaggacaaccgtcggggtcttgtgcttccgggttacaaatacctcggacccggtaacggactcgacaaaggagagccggtcaacgaggcggacgcggcagccctcgaacacgacaaagcttacgaccagcagctcaaggccggtgacaacccgtacctcaagtacaaccacgccgacgccgagtttcaggagcgtcttcaagaagatacgtcttttgggggcaaccttggcagagcagtcttccaggccaaaaagaggatccttgagcctcttggtctggttgaggaagcagctaaaacggctcctggaaagaagggggctgtagatcagtctcctcaggaaccggactcatcatctggtgttggcaaatcgggcaaacagcctgccagaaaaagactaaatttcggtcagactggagactcagagtcagtcccagaccctcaacctctcggagaaccaccagcagcccccacaagtttgggatctaatacaatggcttcaggcggtggcgcaccaatggcagacaataacgagggtgccgatggagtgggtaattcctcaggaaattggcattgcgattcccaatggctgggcgacagagtcatcaccaccagcaccagaacctgggccctgcccacttacaacaaccatctctacaagcaaatctccagccaatcaggagcttcaaacgacaaccactactttggctacagcaccccttgggggtattttgactttaacagattccactgccacttctcaccacgtgactggcagcgactcattaacaacaactggggattccggcccaagaaactcagcttcaagctcttcaacatccaagttagaggggtcacgcagaacgatggcacgacgactattgccaataaccttaccagcacggttcaagtgtttacggactcggagtatcagctcccgtacgtgctcgggtcggcgcaccaaggctgtctcccgccgtttccagcggacgtcttcatggtccctcagtatggatacctcaccctgaacaacggaagtcaagcggtgggacgctcatccttttactgcctggagtacttcccttcgcagatgctaaggactggaaataacttccaattcagctataccttcgaggatgtaccttttcacagcagctacgctcacagccagagtttggatcgcttgatgaatcctcttattgatcagtatctgtactacctgaacagaacgcaaggaacaacctctggaacaaccaaccaatcacggctgctttttagccaggctgggcctcagtctatgtctttgcaggccagaaattggctacctgggccctgctaccggcaacagagactttcaaagactgctaacgacaacaacaacagtaactttccttggacagcggccagcaaatatcatctcaatggccgcgactcgctggtgaatccaggaccagctatggccagtcacaaggacgatgaagaaaaatttttccctatgcacggcaatctaatatttggcaaagaagggacaacggcaagtaacgcagaattagataatgtaatgattacggatgaagaagagattcgtaccaccaatcctgtggcaacagagcagtatggaactgtggcaaataacttgcagagctcaaatacagctcccacgactggaactgtcaatcatcagggggccttacctggcatggtgtggcaagatcgtgacgtgtaccttcaaggacctatctgggcaaagattcctcacacggatggacactttcatccttctcctctgatgggaggctttggactgaaacatccgcctcctcaaatcatgatcaaaaatactccggtaccggcaaatcctccgacgactttcagcccggccaagtttgcttcatttatcactcagtactccactggacaggtcagcgtggaaattgagtgggagctacagaaagaaaacagcaaacgttggaatccagagattcagtacacttccaactacaacaagtctgttaatgtggactttactgtagacactaatggtgtttatagtgaacctcgccctattggaacccggtatctcacacgaaacttgtga

SEQ ID NO: 43 - protein, 736 aa, Adeno-associated virus 3
MAADGYLPDWLEDNLSEGIREWWALKPGVPQPKANQQHQDNRRGLVLPGYKYLGPGNGLDKGEPVNEADAAALEHDKAYDQQLKAGDNPYLKYNHADAEFQERLQEDTSFGGNLGRAVFQAKKRILEPLGLVEEAAKTAPGKKGAVDQSPQEPDSSSGVGKSGKQPARKRLNFGQTGDSESVPDPQPLGEPPAAPTSLGSNTMASGGGAPMADNNEGADGVGNSSGNWHCDSQWLGDRVITTSTRTWALPTYNNHLYKQISSQSGASNDNHYFGYSTPWGYFDFNRFHCHFSPRDWQRLINNNWGFRPKKLSFKLFNIQVRGVTQNDGTTTIANNLTSTVQVFTDSEYQLPYVLGSAHQGCLPPFPADVFMVPQYGYLTLNNGSQAVGRSSFYCLEYFPSQMLRTGNNFQFSYTFEDVPFHSSYAHSQSLDRLMNPLIDQYLYYLNRTQGTTSGTTNQSRLLFSQAGPQSMSLQARNWLPGPCYRQQRLSKTANDNNNSNFPWTAASKYHLNGRDSLVNPGPAMASHKDDEEKFFPMHGNLIFGKEGTTASNAELDNVMITDEEEIRTTNPVATEQYGTVANNLQSSNTAPTTGTVNHQGALPGMVWQDRDVYLQGPIWAKIPHTDGHFHPSPLMGGFGLKHPPPQIMIKNTPVPANPPTTFSPAKFASFITQYSTGQVSVEIEWELQKENSKRWNPEIQYTSNYNKSVNVDFTVDTNGVYSEPRPIGTRYLTRNL

SEQ ID NO: 44 - DNA, 4726 bp, Adeno-associated virus 3
ttggccactccctctatgcgcactcgctcgctcggtggggcctggcgaccaaaggtcgccagacggacgtgctttgcacgtccggccccaccgagcgagcgagtgcgcatagagggagtggccaactccatcactagaggtatggcagtgacgtaacgcgaagcgcgcgaagcgagaccacgcctaccagctgcgtcagcagtcaggtgacccttttgcgacagtttgcgacaccacgtggccgctgagggtatatattctcgagtgagcgaaccaggagctccattttgaccgcgaaatttgaacgagcagcagccatgccggggttctacgagattgtcctgaaggtcccgagtgacctggacgagcgcctgccgggcatttctaactcgtttgttaactgggtggccgagaaggaatgggacgtgccgccggattctgacatggatccgaatctgattgagcaggcacccctgaccgtggccgaaaagcttcagcgcgagttcctggtggagtggcgccgcgtgagtaaggccccggaggccctcttttttgtccagttcgaaaagggggagacctacttccacctgcacgtgctgattgagaccatcggggtcaaatccatggtggtcggccgctacgtgagccagattaaagagaagctggtgacccgcatctaccgcggggtcgagccgcagcttccgaactggttcgcggtgaccaaaacgcgaaatggcgccgggggcgggaacaaggtggtggacgactgctacatccccaactacctgctccccaagacccagcccgagctccagtgggcgtggactaacatggaccagtatttaagcgcctgtttgaatctcgcggagcgtaaacggctggtggcgcagcatctgacgcacgtgtcgcagacgcaggagcagaacaaagagaatcagaaccccaattctgacgcgccggtcatcaggtcaaaaacctcagccaggtacatggagctggtcgggtggctggtggaccgcgggatcacgtcagaaaagcaatggattcaggaggaccaggcctcgtacatctccttcaacgccgcctccaactcgcggtcccagatcaaggccgcgctggacaatgcctccaagatcatgagcctgacaaagacggctccggactacctggtgggcagcaacccgccggaggacattaccaaaaatcggatctaccaaatcctggagctgaacgggtacgatccgcagtacgcggcctccgtcttcctgggctgggcgcaaaagaagttcgggaagaggaacaccatctggctctttgggccggccacgacgggtaaaaccaacatcgcggaagccatcgcccacgccgtgcccttctacggctgcgtaaactggaccaatgagaactttcccttcaacgattgcgtcgacaagatggtgatctggtgggaggagggcaagatgacggccaaggtcgtggagagcgccaaggccattctgggcggaagcaaggtgcgcgtggaccaaaagtgcaagtcatcggcccagatcgaacccactcccgtgatcgtcacctccaacaccaacatgtgcgccgtgattgacgggaacagcaccaccttcgagcatcagcagccgctgcaggaccggatgtttgaatttgaacttacccgccgtttggaccatgactttgggaaggtcaccaaacaggaagtaaaggactttttccggtgggcttccgatcacgtgactgacgtggctcatgagttctacgtcagaaagggtggagctaagaaacgccccgcctccaatgacgcggatgtaagcgagccaaaacgggagtgcacgtcacttgcgcagccgacaacgtcagacgcggaagcaccggcggactacgcggacaggtaccaaaacaaatgttctcgtcacgtgggcatgaatctgatgctttttccctgtaaaacatgcgagagaatgaatcaaatttccaatgtctgttttacgcatggtcaaagagactgtggggaatgcttccctggaatgtcagaatctcaacccgtttctgtcgtcaaaaagaagacttatcagaaactgtgtccaattcatcatatcctgggaagggcacccgagattgcctgttcggcctgcgatttggccaatgtggacttggatgactgtgtttctgagcaataaatgacttaaaccaggtatggctgctgacggttatcttccagattggctcgaggacaacctttctgaaggcattcgtgagtggtgggctctgaaacctggagtccctcaacccaaagcgaaccaacaacaccaggacaaccgtcggggtcttgtgcttccgggttacaaatacctcggacccggtaacggactcgacaaaggagagccggtcaacgaggcggacgcggcagccctcgaacacgacaaagcttacgaccagcagctcaaggccggtgacaacccgtacctcaagtacaaccacgccgacgccgagtttcaggagcgtcttcaagaagatacgtcttttgggggcaaccttggcagagcagtcttccaggccaaaaagaggatccttgagcctcttggtctggttgaggaagcagctaaaacggctcctggaaagaagggggctgtagatcagtctcctcaggaaccggactcatcatctggtgttggcaaatcgggcaaacagcctgccagaaaaagactaaatttcggtcagactggagactcagagtcagtcccagaccctcaacctctcggagaaccaccagcagcccccacaagtttgggatctaatacaatggcttcaggcggtggcgcaccaatggcagacaataacgagggtgccgatggagtgggtaattcctcaggaaattggcattgcgattcccaatggctgggcgacagagtcatcaccaccagcaccagaacctgggccctgcccacttacaacaaccatctctacaagcaaatctccagccaatcaggagcttcaaacgacaaccactactttggctacagcaccccttgggggtattttgactttaacagattccactgccacttctcaccacgtgactggcagcgactcattaacaacaactggggattccggcccaagaaactcagcttcaagctcttcaacatccaagttagaggggtcacgcagaacgatggcacgacgactattgccaataaccttaccagcacggttcaagtgtttacggactcggagtatcagctcccgtacgtgctcgggtcggcgcaccaaggctgtctcccgccgtttccagcggacgtcttcatggtccctcagtatggatacctcaccctgaacaacggaagtcaagcggtgggacgctcatccttttactgcctggagtacttcccttcgcagatgctaaggactggaaataacttccaattcagctataccttcgaggatgtaccttttcacagcagctacgctcacagccagagtttggatcgcttgatgaatcctcttattgatcagtatctgtactacctgaacagaacgcaaggaacaacctctggaacaaccaaccaatcacggctgctttttagccaggctgggcctcagtctatgtctttgcaggccagaaattggctacctgggccctgctaccggcaacagagactttcaaagactgctaacgacaacaacaacagtaactttccttggacagcggccagcaaatatcatctcaatggccgcgactcgctggtgaatccaggaccagctatggccagtcacaaggacgatgaagaaaaatttttccctatgcacggcaatctaatatttggcaaagaagggacaacggcaagtaacgcagaattagataatgtaatgattacggatgaagaagagattcgtaccaccaatcctgtggcaacagagcagtatggaactgtggcaaataacttgcagagctcaaatacagctcccacgactggaactgtcaatcatcagggggccttacctggcatggtgtggcaagatcgtgacgtgtaccttcaaggacctatctgggcaaagattcctcacacggatggacactttcatccttctcctctgatgggaggctttggactgaaacatccgcctcctcaaatcatgatcaaaaatactccggtaccggcaaatcctccgacgactttcagcccggccaagtttgcttcatttatcactcagtactccactggacaggtcagcgtggaaattgagtgggagctacagaaagaaaacagcaaacgttggaatccagagattcagtacacttccaactacaacaagtctgttaatgtggactttactgtagacactaatggtgtttatagtgaacctcgccctattggaacccggtatctcacacgaaacttgtgaatcctggttaatcaataaaccgtttaattcgtttcagttgaactttggctcttgtgcacttctttatctttatcttgtttccatggctactgcgtagataagcagcggcctgcggcgcttgcgcttcgcggtttacaactgctggttaatatttaactctcgccatacctctagtgatggagttggccactccctctatgcgcactcgctcgctcggtggggcctggcgaccaaaggtcgccagacggacgtgctttgcacgtccggccccaccgagcgagcgagtgcgcatagagggagtggccaa

SEQ ID NO: 45 - protein, 737 aa, Artificial Sequence
  Description of Artificial Sequence: Synthetic polypeptide
MAADGYLPDWLEDNLSEGIREWWDLKPGAPKPKANQQKQDNGRGLVLPGYKYLGPFNGLDKGEPVNAADAAALEHDKAYDQQLNAGDNPYLRYNHADAEFQERLQEDTSFGGNLGRAVFQAKKRVLEPLGLVEEGAKTAPAKKRPVEPSPQRSPDSSTGIGKKGQQPARKRLNFGQTGDSESVPDPQPLGEPPAAPSSVGSGTVAAGGGAPMADNNEGADGVGNASGNWHCDSTWLGDRVITTSTRTWALPTYNNHLYEQISSETAGSTNDNTYFGYSTPWGYFDFNRFHCHFSPRDWQRLINNNWGFRPKKLRFKLFNIQVKEVTTNDGVTTIANNLTSTIQVFSDSEYQLPYVLGSAHQGCLPPFPADVFMIPQYGYLTLNNGSQSVGRSSFYCLEYFPSQMLRTGNNFEFSYSFEDVPFHSSYAHSQSLDRLMNPLIDQYLYYLARTQSDPGGTAGNRELQFYQGGPSTMAEQAKNWLPGPCFRQQRVSKTLDQNNNSNFAWTGATKYHLNGRNSLVNPGVAMATHKDDEDRFFPSSGVLIFGKTGATNKTTLENVLMTNEEEIRPTNPVATEEYGIVSSNLQAANTAAQTQVVNNQGALPGMVWQNRDVYLQGPIWAKIPHTDGNFHPSPLMGGFGLKHPPPQILIKNTPVPANPPEVFTPAKFASFITQYSTGQVSVEIEWELQKENSKRWDPEIQYTSNFEKQTGVDFAVDSQGVYSEPRPIGTRYLTRNL

SEQ ID NO: 46 - DNA, 2211 bp, Artificial Sequence
  Description of Artificial Sequence: Synthetic polynucleotide
atggctgctgacggttatcttccagattggctcgaggacaacctttctgaaggcattcgtgagtggtgggctctgaaacctggagtccctcaacccaaagcgaaccaacaacaccaggacaaccgtcggggtcttgtgcttccgggttacaaatacctcggacccggtaacggactcgacaaaggagagccggtcaacgaggcggacgcggcagccctcgaacacgacaaagcttacgaccagcagctcaaggccggtgacaacccgtacctcaagtacaaccacgccgacgccgagtttcaggagcgtcttcaagaagatacgtcttttgggggcaaccttggcagagcagtcttccaggccaaaaagaggatccttgagcctcttggtctggttgaggaagcagctaaaacggctcctggaaagaagggggctgtagatcagtctcctcaggaaccggactcatcatctggtgttggcaaatcgggcaaacagcctgccagaaaaagactaaatttcggtcagactggagactcagagtcagtcccagaccctcaacctctcggagaaccaccagcagcccccacaagtttgggatctaatacaatggcttcaggcggtggcgcaccaatggcagacaataacgagggtgccgatggagtgggtaattcctcaggaaattggcattgcgattcccaatggctgggcgacagagtcatcaccaccagcaccagaacctgggccctgcccacttacaacaaccatctctacaagcaaatctccagccaatcaggagcttcaaacgacaaccactactttggctacagcaccccttgggggtattttgactttaacagattccactgccacttctcaccacgtgactggcagcgactcattaacaacaactggggattccggcccaagaaactcagcttcaagctcttcaacatccaagttagaggggtcacgcagaacgatggcacgacgactattgccaataaccttaccagcacggttcaagtgtttacggactcggagtatcagctcccgtacgtgctcgggtcggcgcaccaaggctgtctcccgccgtttccagcggacgtcttcatggtccctcagtatggatacctcaccctgaacaacggaagtcaagcggtgggacgctcatccttttactgcctggagtacttcccttcgcagatgctaaggactggaaataacttccaattcagctataccttcgaggatgtaccttttcacagcagctacgctcacagccagagtttggatcgcttgatgaatcctcttattgatcagtatctgtactacctgaacagaacgcaaggaacaacctctggaacaaccaaccaatcacggctgctttttagccaggctgggcctcagtctatgtctttgcaggccagaaattggctacctgggccctgctaccggcaacagagactttcaaagactgctaacgacaacaacaacagtaactttccttggacagcggccagcaaatatcatctcaatggccgcgactcgctggtgaatccaggaccagctatggccagtcacaaggacgatgaagaaaaatttttccctatgcacggcaatctaatatttggcaaagaagggacaacggcaagtaacgcagaattagataatgtaatgattacggatgaagaagagattcgtaccaccaatcctgtggcaacagagcagtatggaactgtggcaaataacttgcagagctcaaatacagctcccacgactggaactgtcaatcatcagggggccttacctggcatggtgtggcaagatcgtgacgtgtaccttcaaggacctatctgggcaaagattcctcacacggatggacactttcatccttctcctctgatgggaggctttggactgaaacatccgcctcctcaaatcatgatcaaaaatactccggtaccggcaaatcctccgacgactttcagcccggccaagtttgcttcatttatcactcagtactccactggacaggtcagcgtggaaattgagtgggagctacagaaagaaaacagcaaacgttggaatccagagattcagtacacttccaactacaacaagtctgttaatgtggactttactgtagacactaatggtgtttatagtgaacctcgccctattggaacccggtatctcacacgaaacttgtaa

SEQ ID NO: 47 - protein, 736 aa, Artificial Sequence; identical to SEQ ID NO: 43
  Description of Artificial Sequence: Synthetic polypeptide

SEQ ID NO: 48 - protein, 736 aa, Adeno-associated virus 3A; identical to SEQ ID NO: 43

SEQ ID NO: 49 - protein, 624 aa, Adeno-associated virus 3A
MPGFYEIVLKVPSDLDERLPGISNSFVNWVAEKEWDVPPDSDMDPNLIEQAPLTVAEKLQREFLVEWRRVSKAPEALFFVQFEKGETYFHLHVLIETIGVKSMVVGRYVSQIKEKLVTRIYRGVEPQLPNWFAVTKTRNGAGGGNKVVDDCYIPNYLLPKTQPELQWAWTNMDQYLSACLNLAERKRLVAQHLTHVSQTQEQNKENQNPNSDAPVIRSKTSARYMELVGWLVDRGITSEKQWIQEDQASYISFNAASNSRSQIKAALDNASKIMSLTKTAPDYLVGSNPPEDITKNRIYQILELNGYDPQYAASVFLGWAQKKFGKRNTIWLFGPATTGKTNIAEAIAHAVPFYGCVNWTNENFPFNDCVDKMVIWWEEGKMTAKVVESAKAILGGSKVRVDQKCKSSAQIEPTPVIVTSNTNMCAVIDGNSTTFEHQQPLQDRMFEFELTRRLDHDFGKVTKQEVKDFFRWASDHVTDVAHEFYVRKGGAKKRPASNDADVSEPKRECTSLAQPTTSDAEAPADYADRYQNKCSRHVGMNLMLFPCKTCERMNQISNVCFTHGQRDCGECFPGMSESQPVSVVKKKTYQKLCPIHHILGRAPEIACSACDLANVDLDDCVSEQ

SEQ ID NO: 50 - protein, 736 aa, Adeno-associated virus 3B
MAADGYLPDWLEDNLSEGIREWWALKPGVPQPKANQQHQDNRRGLVLPGYKYLGPGNGLDKGEPVNEADAAALEHDKAYDQQLKAGDNPYLKYNHADAEFQERLQEDTSFGGNLGRAVFQAKKRILEPLGLVEEAAKTAPGKKRPVDQSPQEPDSSSGVGKSGKQPARKRLNFGQTGDSESVPDPQPLGEPPAAPTSLGSNTMASGGGAPMADNNEGADGVGNSSGNWHCDSQWLGDRVITTSTRTWALPTYNNHLYKQISSQSGASNDNHYFGYSTPWGYFDFNRFHCHFSPRDWQRLINNNWGFRPKKLSFKLFNIQVKEVTQNDGTTTIANNLTSTVQVFTDSEYQLPYVLGSAHQGCLPPFPADVFMVPQYGYLTLNNGSQAVGRSSFYCLEYFPSQMLRTGNNFQFSYTFEDVPFHSSYAHSQSLDRLMNPLIDQYLYYLNRTQGTTSGTTNQSRLLFSQAGPQSMSLQARNWLPGPCYRQQRLSKTANDNNNSNFPWTAASKYHLNGRDSLVNPGPAMASHKDDEEKFFPMHGNLIFGKEGTTASNAELDNVMITDEEEIRTTNPVATEQYGTVANNLQSSNTAPTTRTVNDQGALPGMVWQDRDVYLQGPIWAKIPHTDGHFHPSPLMGGFGLKHPPPQIMIKNTPVPANPPTTFSPAKFASFITQYSTGQVSVEIEWELQKENSKRWNPEIQYTSNYNKSVNVDFTVDTNGVYSEPRPIGTRYLTRNL

SEQ ID NO: 51 - protein, 624 aa, Adeno-associated virus 3B
MPGFYEIVLKVPSDLDEHLPGISNSFVNWVAEKEWELPPDSDMDPNLIEQAPLTVAEKLQREFLVEWRRVSKAPEALFFVQFEKGETYFHLHVLIETIGVKSMVVGRYVSQIKEKLVTRIYRGVEPQLPNWFAVTKTRNGAGGGNKVVDDCYIPNYLLPKTQPELQWAWTNMDQYLSACLNLAERKRLVAQHLTHVSQTQEQNKENQNPNSDAPVIRSKTSARYMELVGWLVDRGITSEKQWIQEDQASYISFNAASNSRSQIKAALDNASKIMSLTKTAPDYLVGSNPPEDITKNRIYQILELNGYDPQYAASVFLGWAQKKFGKRNTIWLFGPATTGKTNIAEAIAHAVPFYGCVNWTNENFPFNDCVDKMVIWWEEGKMTAKVVESAKAILGGSKVRVDQKCKSSAQIEPTPVIVTSNTNMCAVIDGNSTTFEHQQPLQDRMFKFELTRRLDHDFGKVTKQEVKDFFRWASDHVTDVAHEFYVRKGGAKKRPASNDADVSEPKRQCTSLAQPTTSDAEAPADYADRYQNKCSRHVGMNLMLFPCKTCERMNQISNVCFTHGQRDCGECFPGMSESQPVSVVKKKTYQKLCPIHHILGRAPEIACSACDLANVDLDDCVSEQ

SEQ ID NO: 52 - DNA, 4722 bp, Adeno-associated virus 3B
tggccactccctctatgcgcactcgctcgctcggtggggcctggcgaccaaaggtcgccagacggacgtgctttgcacgtccggccccaccgagcgagcgagtgcgcatagagggagtggccaactccatcactagaggtatggcagtgacgtaacgcgaagcgcgcgaagcgagaccacgcctaccagctgcgtcagcagtcaggtgacccttttgcgacagtttgcgacaccacgtggccgctgagggtatatattctcgagtgagcgaaccaggagctccattttgaccgcgaaatttgaacgagcagcagccatgccggggttctacgagattgtcctgaaggtcccgagtgacctggacgagcacctgccgggcatttctaactcgtttgttaactgggtggccgagaaggaatgggagctgccgccggattctgacatggatccgaatctgattgagcaggcacccctgaccgtggccgaaaagcttcagcgcgagttcctggtggagtggcgccgcgtgagtaaggccccggaggccctcttttttgtccagttcgaaaagggggagacctacttccacctgcacgtgctgattgagaccatcggggtcaaatccatggtggtcggccgctacgtgagccagattaaagagaagctggtgacccgcatctaccgcggggtcgagccgcagcttccgaactggttcgcggtgaccaaaacgcgaaatggcgccgggggcgggaacaaggtggtggacgactgctacatccccaactacctgctccccaagacccagcccgagctccagtgggcgtggactaacatggaccagtatttaagcgcctgtttgaatctcgcggagcgtaaacggctggtggcgcagcatctgacgcacgtgtcgcagacgcaggagcagaacaaagagaatcagaaccccaattctgacgcgccggtcatcaggtcaaaaacctcagccaggtacatggagctggtcgggtggctggtggaccgcgggatcacgtcagaaaagcaatggattcaggaggaccaggcctcgtacatctccttcaacgccgcctccaactcgcggtcccagatcaaggccgcgctggacaatgcctccaagatcatgagcctgacaaagacggctccggactacctggtgggcagcaacccgccggaggacattaccaaaaatcggatctaccaaatcctggagctgaacgggtacgatccgcagtacgcggcctccgtcttcctgggctgggcgcaaaagaagttcgggaagaggaacaccatctggctctttgggccggccacgacgggtaaaaccaacatcgcggaagccatcgcccacgccgtgcccttctacggctgcgtaaactggaccaatgagaactttcccttcaacgattgcgtcgacaagatggtgatctggtgggaggagggcaagatgacggccaaggtcgtggagagcgccaaggccattctgggcggaagcaaggtgcgcgtggaccaaaagtgcaagtcatcggcccagatcgaacccactcccgtgatcgtcacctccaacaccaacatgtgcgccgtgattgacgggaacagcaccaccttcgagcatcagcagccgctgcaggaccggatgtttaaatttgaacttacccgccgtttggaccatgactttgggaaggtcaccaaacaggaagtaaaggactttttccggtgggcttccgatcacgtgactgacgtggctcatgagttctacgtcagaaagggtggagctaagaaacgccccgcctccaatgacgcggatgtaagcgagccaaaacggcagtgcacgtcacttgcgcagccgacaacgtcagacgcggaagcaccggcggactacgcggacaggtaccaaaacaaatgttctcgtcacgtgggcatgaatctgatgctttttccctgtaaaacatgcgagagaatgaatcaaatttccaatgtctgttttacgcatggtcaaagagactgtggggaatgcttccctggaatgtcagaatctcaacccgtttctgtcgtcaaaaagaagacttatcagaaactgtgtccaattcatcatatcctgggaagggcacccgagattgcctgttcggcctgcgatttggccaatgtggacttggatgactgtgtttctgagcaataaatgacttaaaccaggtatggctgctgacggttatcttccagattggctcgaggacaacctttctgaaggcattcgtgagtggtgggctctgaaacctggagtccctcaacccaaagcgaaccaacaacaccaggacaaccgtcggggtcttgtgcttccgggttacaaatacctcggacccggtaacggactcgacaaaggagagccggtcaacgaggcggacgcggcagccctcgaacacgacaaagcttacgaccagcagctcaaggccggtgacaacccgtacctcaagtacaaccacgccgacgccgagtttcaggagcgtcttcaagaagatacgtcttttgggggcaaccttggcagagcagtcttccaggccaaaaagaggatccttgagcctcttggtctggttgaggaagcagctaaaacggctcctggaaagaagaggcctgtagatcagtctcctcaggaaccggactcatcatctggtgttggcaaatcgggcaaacagcctgccagaaaaagactaaatttcggtcagactggcgactcagagtcagtcccagaccctcaacctctcggagaaccaccagcagcccccacaagtttgggatctaatacaatggcttcaggcggtggcgcaccaatggcagacaataacgagggtgccgatggagtgggtaattcctcaggaaattggcattgcgattcccaatggctgggcgacagagtcatcaccaccagcaccagaacctgggccctgcccacttacaacaaccatctctacaagcaaatctccagccaatcaggagcttcaaacgacaaccactactttggctacagcaccccttgggggtattttgactttaacagattccactgccacttctcaccacgtgactggcagcgactcattaacaacaactggggattccggcccaagaaactcagcttcaagctcttcaacatccaagttaaagaggtcacgcagaacgatggcacgacgactattgccaataaccttaccagcacggttcaagtgtttacggactcggagtatcagctcccgtacgtgctcgggtcggcgcaccaaggctgtctcccgccgtttccagcggacgtcttcatggtccctcagtatggatacctcaccctgaacaacggaagtcaagcggtgggacgctcatccttttactgcctggagtacttcccttcgcagatgctaaggactggaaataacttccaattcagctataccttcgaggatgtaccttttcacagcagctacgctcacagccagagtttggatcgcttgatgaatcctcttattgatcagtatctgtactacctgaacagaacgcaaggaacaacctctggaacaaccaaccaatcacggctgctttttagccaggctgggcctcagtctatgtctttgcaggccagaaattggctacctgggccctgctaccggcaacagagactttcaaagactgctaacgacaacaacaacagtaactttccttggacagcggccagcaaatatcatctcaatggccgcgactcgctggtgaatccaggaccagctatggccagtcacaaggacgatgaagaaaaatttttccctatgcacggcaatctaatatttggcaaagaagggacaacggcaagtaacgcagaattagataatgtaatgattacggatgaagaagagattcgtaccaccaatcctgtggcaacagagcagtatggaactgtggcaaataacttgcagagctcaaatacagctcccacgactagaactgtcaatgatcagggggccttacctggcatggtgtggcaagatcgtgacgtgtaccttcaaggacctatctgggcaaagattcctcacacggatggacactttcatccttctcctctgatgggaggctttggactgaaacatccgcctcctcaaatcatgatcaaaaatactccggtaccggcaaatcctccgacgactttcagcccggccaagtttgcttcatttatcactcagtactccactggacaggtcagcgtggaaattgagtgggagctacagaaagaaaacagcaaacgttggaatccagagattcagtacacttccaactacaacaagtctgttaatgtggactttactgtagacactaatggtgtttatagtgaacctcgccctattggaacccggtatctcacacgaaacttgtaatcctggttaatcaataaaccgtttaattcgtttcagttgaactttggctcttgtgcacttcttatcttatcttgtttccatggctactgcgtagataagcagcggcctgcggcgcttgcgcttcgcggtttacaactgctggttaatatttaactctcgccatacctctagtgatggagttggccactccctctatgcgcactcgctcgctcggtggggccggacgtgcaaagcacgtccgtctggcgacctttggtcgccaggccccaccgagcgagcgagtgcgcatagagggagtggccaa

SEQ ID NO: 53 - DNA, 1800 bp, Adeno-associated virus 4
  modified_base (342)..(342): a, c, t, g, unknown or other
acggctcctggaaagaagagaccgttgattgaatccccccagcagcccgactcctccacgggtatcggcaaaaaaggcaagcagccggctaaaaagaagctcgttttcgaagacgaaactggagcaggcgacggaccccctgagggatcaacttccggagccatgtctgatgacagtgagatgcgtgcagcagctggcggagctgcagtcgagggsggacaaggtgccgatggagtgggtaatgcctcgggtgattggcattgcgattccacctggtctgagggccacgtcacgaccaccagcaccagaacctgggtcttgcccacctacaacaaccacctntacaagcgactcggagagagcctgcagtccaacacctacaacggattctccaccccctggggatactttgacttcaaccgcttccactgccacttctcaccacgtgactggcagcgactcatcaacaacaactggggcatgcgacccaaagccatgcgggtcaaaatcttcaacatccaggtcaaggaggtcacgacgtcgaacggcgagacaacggtggctaataaccttaccagcacggttcagatctttgcggactcgtcgtacgaactgccgtacgtgatggatgcgggtcaagagggcagcctgcctccttttcccaacgacgtctttatggtgccccagtacggctactgtggactggtgaccggcaacacttcgcagcaacagactgacagaaatgccttctactgcctggagtactttccttcgcagatgctgcggactggcaacaactttgaaattacgtacagttttgagaaggtgcctttccactcgatgtacgcgcacagccagagcctggaccggctgatgaaccctctcatcgaccagtacctgtggggactgcaatcgaccaccaccggaaccaccctgaatgccgggactgccaccaccaactttaccaagctgcggcctaccaacttttccaactttaaaaagaactggctgcccgggccttcaatcaagcagcagggcttctcaaagactgccaatcaaaactacaagatccctgccaccgggtcagacagtctcatcaaatacgagacgcacagcactctggacggaagatggagtgccctgacccccggacctccaatggccacggctggacctgcggacagcaagttcagcaacagccagctcatctttgcggggcctaaacagaacggcaacacggccaccgtacccgggactctgatcttcacctctgaggaggagctggcagccaccaacgccaccgatacggacatgtggggcaacctacctggcggtgaccagagcaacagcaacctgccgaccgtggacagactgacagccttgggagccgtgcctggaatggtctggcaaaacagagacatttactaccagggtcccatttgggccaagattcctcataccgatggacactttcacccctcaccgctgattggtgggtttgggctgaaacacccgcctcctcaaatttttatcaagaacaccccggtacctgcgaatcctgcaacgaccttcagctctactccggtaaactccttcattactcagtacagcactggccaggtgtcggtgcagattgactgggagatccagaaggagcggtccaaacgctggaaccccgaggtccagtttacctccaactacggacagcaaaactctctgttgtgggctcccgatgcggctgggaaatacactgagcctagggctatcggtacccgctacctcacccaccacctgtaataa

SEQ ID NO: 54 - DNA, 2208 bp, Adeno-associated virus 4
  modified_base (750)..(750): a, c, t, g, unknown or other
atgactgacggttaccttccagattggctagaggacaacctctctgaaggcgttcgagagtggtgggcgctgcaacctggagcccctaaacccaaggcaaatcaacaacatcaggacaacgctcggggtcttgtgcttccgggttacaaatacctcggacccggcaacggactcgacaagggggaacccgtcaacgcagcggacgcggcagccctcgagcacgacaaggcctacgaccagcagctcaaggccggtgacaacccctacctcaagtacaaccacgccgacgcggagttccagcagcggcttcagggcgacacatcgtttgggggcaacctcggcagagcagtcttccaggccaaaaagagggttcttgaacctcttggtctggttgagcaagcgggtgagacggctcctggaaagaagagaccgttgattgaatccccccagcagcccgactcctccacgggtatcggcaaaaaaggcaagcagccggctaaaaagaagctcgttttcgaagacgaaactggagcaggcgacggaccccctgagggatcaacttccggagccatgtctgatgacagtgagatgcgtgcagcagctggcggagctgcagtcgagggsggacaaggtgccgatggagtgggtaatgcctcgggtgattggcattgcgattccacctggtctgagggccacgtcacgaccaccagcaccagaacctgggtcttgcccacctacaacaaccacctntacaagcgactcggagagagcctgcagtccaacacctacaacggattctccaccccctggggatactttgacttcaaccgcttccactgccacttctcaccacgtgactggcagcgactcatcaacaacaactggggcatgcgacccaaagccatgcgggtcaaaatcttcaacatccaggtcaaggaggtcacgacgtcgaacggcgagacaacggtggctaataaccttaccagcacggttcagatctttgcggactcgtcgtacgaactgccgtacgtgatggatgcgggtcaagagggcagcctgcctccttttcccaacgacgtctttatggtgccccagtacggctactgtggactggtgaccggcaacacttcgcagcaacagactgacagaaatgccttctactgcctggagtactttccttcgcagatgctgcggactggcaacaactttgaaattacgtacagttttgagaaggtgcctttccactcgatgtacgcgcacagccagagcctggaccggctgatgaaccctctcatcgaccagtacctgtggggactgcaatcgaccaccaccggaaccaccctgaatgccgggactgccaccaccaactttaccaagctgcggcctaccaacttttccaactttaaaaagaactggctgcccgggccttcaatcaagcagcagggcttctcaaagactgccaatcaaaactacaagatccctgccaccgggtcagacagtctcatcaaatacgagacgcacagcactctggacggaagatggagtgccctgacccccggacctccaatggccacggctggacctgcggacagcaagttcagcaacagccagctcatctttgcggggcctaaacagaacggcaacacggccaccgtacccgggactctgatcttcacctctgaggaggagctggcagccaccaacgccaccgatacggacatgtggggcaacctacctggcggtgaccagagcaacagcaacctgccgaccgtggacagactgacagccttgggagccgtgcctggaatggtctggcaaaacagagacatttactaccagggtcccatttgggccaagattcctcataccgatggacactttcacccctcaccgctgattggtgggtttgggctgaaacacccgcctcctcaaatttttatcaagaacaccccggtacctgcgaatcctgcaacgaccttcagctctactccggtaaactccttcattactcagtacagcactggccaggtgtcggtgcagattgactgggagatccagaaggagcggtccaaacgctggaaccccgaggtccagtttacctccaactacggacagcaaaactctctgttgtgggctcccgatgcggctgggaaatacactgagcctagggctatcggtacccgctacctcacccaccacctgtaataa

SEQ ID NO: 55 - DNA, 1872 bp, Adeno-associated virus 4
atgccggggttctacgagatcgtgctgaaggtgcccagcgacctggacgagcacctgcccggcatttctgactcttttgtgagctgggtggccgagaaggaatgggagctgccgccggattctgacatggacttgaatctgattgagcaggcacccctgaccgtggccgaaaagctgcaacgcgagttcctggtcgagtggcgccgcgtgagtaaggccccggaggccctcttctttgtccagttcgagaagggggacagctacttccacctgcacatcctggtggagaccgtgggcgtcaaatccatggtggtgggccgctacgtgagccagattaaagagaagctggtgacccgcatctaccgcggggtcgagccgcagcttccgaactggttcgcggtgaccaagacgcgtaatggcgccggaggcgggaacaaggtggtggacgactgctacatccccaactacctgctccccaagacccagcccgagctccagtgggcgtggactaacatggaccagtatataagcgcctgtttgaatctcgcggagcgtaaacggctggtggcgcagcatctgacgcacgtgtcgcagacgcaggagcagaacaaggaaaaccagaaccccaattctgacgcgccggtcatcaggtcaaaaacctccgccaggtacatggagctggtcgggtggctggtggaccgcgggatcacgtcagaaaagcaatggatccaggaggaccaggcgtcctacatctccttcaacgccgcctccaactcgcggtcacaaatcaaggccgcgctggacaatgcctccaaaatcatgagcctgacaaagacggctccggactacctggtgggccagaacccgccggaggacatttccagcaaccgcatctaccgaatcctcgagatgaacgggtacgatccgcagtacgcggcctccgtcttcctgggctgggcgcaaaagaagttcgggaagaggaacaccatctggctctttgggccggccacgacgggtaaaaccaacatcgcggaagccatcgcccacgccgtgcccttctacggctgcgtgaactggaccaatgagaactttccgttcaacgattgcgtcgacaagatggtgatctggtgggaggagggcaagatgacggccaaggtcgtagagagcgccaaggccatcctgggcggaagcaaggtgcgcgtggaccaaaagtgcaagtcatcggcccagatcgacccaactcccgtgatcgtcacctccaacaccaacatgtgcgcggtcatcgacggaaactcgaccaccttcgagcaccaacaaccactccaggaccggatgttcaagttcgagctcaccaagcgcctggagcacgactttggcaaggtcaccaagcaggaagtcaaagactttttccggtgggcgtcagatcacgtgaccgaggtgactcacgagttttacgtcagaaagggtggagctagaaagaggcccgcccccaatgacgcagatataagtgagcccaagcgggcctgtccgtcagttgcgcagccatcgacgtcagacgcggaagctccggtggactacgcggacaggtaccaaaacaaatgttctcgtcacgtgggtatgaatctgatgctttttccctgccggcaatgcgagagaatgaatcagaatgtggacatttgcttcacgcacggggtcatggactgtgccgagtgcttccccgtgtcagaatctcaacccgtgtctgtcgtcagaaagcggacgtatcagaaactgtgtccgattcatcacatcatggggagggcgcccgaggtggcctgctcggcctgcgaactggccaatgtggacttggatgactgtgacatggaacaataa

SEQ ID NO: 56 - DNA, 1611 bp, Adeno-associated virus 4
atgccggggttctacgagatcgtgctgaaggtgcccagcgacctggacgagcacctgcccggcatttctgactcttttgtgagctgggtggccgagaaggaatgggagctgccgccggattctgacatggacttgaatctgattgagcaggcacccctgaccgtggccgaaaagctgcaacgcgagttcctggtcgagtggcgccgcgtgagtaaggccccggaggccctcttctttgtccagttcgagaagggggacagctacttccacctgcacatcctggtggagaccgtgggcgtcaaatccatggtggtgggccgctacgtgagccagattaaagagaagctggtgacccgcatctaccgcggggtcgagccgcagcttccgaactggttcgcggtgaccaagacgcgtaatggcgccggaggcgggaacaaggtggtggacgactgctacatccccaactacctgctccccaagacccagcccgagctccagtgggcgtggactaacatggaccagtatataagcgcctgtttgaatctcgcggagcgtaaacggctggtggcgcagcatctgacgcacgtgtcgcagacgcaggagcagaacaaggaaaaccagaaccccaattctgacgcgccggtcatcaggtcaaaaacctccgccaggtacatggagctggtcgggtggctggtggaccgcgggatcacgtcagaaaagcaatggatccaggaggaccaggcgtcctacatctccttcaacgccgcctccaactcgcggtcacaaatcaaggccgcgctggacaatgcctccaaaatcatgagcctgacaaagacggctccggactacctggtgggccagaacccgccggaggacatttccagcaaccgcatctaccgaatcctcgagatgaacgggtacgatccgcagtacgcggcctccgtcttcctgggctgggcgcaaaagaagttcgggaagaggaacaccatctggctctttgggccggccacgacgggtaaaaccaacatcgcggaagccatcgcccacgccgtgcccttctacggctgcgtgaactggaccaatgagaactttccgttcaacgattgcgtcgacaagatggtgatctggtgggaggagggcaagatgacggccaaggtcgtagagagcgccaaggccatcctgggcggaagcaaggtgcgcgtggaccaaaagtgcaagtcatcggcccagatcgacccaactcccgtgatcgtcacctccaacaccaacatgtgcgcggtcatcgacggaaactcgaccaccttcgagcaccaacaaccactccaggaccggatgttcaagttcgagctcaccaagcgcctggagcacgactttggcaaggtcaccaagcaggaagtcaaagactttttccggtgggcgtcagatcacgtgaccgaggtgactcacgagttttacgtcagaaagggtggagctagaaagaggcccgcccccaatgacgcagatataagtgagcccaagcgggcctgtccgtcagttgcgcagccatcgacgtcagacgcggaagctccggtggactacgcggacagattggctagaggacaacctctctga

SEQ ID NO: 57 - DNA, 1872 bp, Adeno-associated virus 4; identical to SEQ ID NO: 55

SEQ ID NO: 58 - DNA, 1617 bp, Adeno-associated virus 4
  modified_base (162)..(162): a, c, t, g, unknown or other
atgcgtgcagcagctggcggagctgcagtcgagggsggacaaggtgccgatggagtgggtaatgcctcgggtgattggcattgcgattccacctggtctgagggccacgtcacgaccaccagcaccagaacctgggtcttgcccacctacaacaaccacctntacaagcgactcggagagagcctgcagtccaacacctacaacggattctccaccccctggggatactttgacttcaaccgcttccactgccacttctcaccacgtgactggcagcgactcatcaacaacaactggggcatgcgacccaaagccatgcgggtcaaaatcttcaacatccaggtcaaggaggtcacgacgtcgaacggcgagacaacggtggctaataaccttaccagcacggttcagatctttgcggactcgtcgtacgaactgccgtacgtgatggatgcgggtcaagagggcagcctgcctccttttcccaacgacgtctttatggtgccccagtacggctactgtggactggtgaccggcaacacttcgcagcaacagactgacagaaatgccttctactgcctggagtactttccttcgcagatgctgcggactggcaacaactttgaaattacgtacagttttgagaaggtgcctttccactcgatgtacgcgcacagccagagcctggaccggctgatgaaccctctcatcgaccagtacctgtggggactgcaatcgaccaccaccggaaccaccctgaatgccgggactgccaccaccaactttaccaagctgcggcctaccaacttttccaactttaaaaagaactggctgcccgggccttcaatcaagcagcagggcttctcaaagactgccaatcaaaactacaagatccctgccaccgggtcagacagtctcatcaaatacgagacgcacagcactctggacggaagatggagtgccctgacccccggacctccaatggccacggctggacctgcggacagcaagttcagcaacagccagctcatctttgcggggcctaaacagaacggcaacacggccaccgtacccgggactctgatcttcacctctgaggaggagctggcagccaccaacgccaccgatacggacatgtggggcaacctacctggcggtgaccagagcaacagcaacctgccgaccgtggacagactgacagccttgggagccgtgcctggaatggtctggcaaaacagagacatttactaccagggtcccatttgggccaagattcctcataccgatggacactttcacccctcaccgctgattggtgggtttgggctgaaacacccgcctcctcaaatttttatcaagaacaccccggtacctgcgaatcctgcaacgaccttcagctctactccggtaaactccttcattactcagtacagcactggccaggtgtcggtgcagattgactgggagatccagaaggagcggtccaaacgctggaaccccgaggtccagtttacctccaactacggacagcaaaactctctgttgtgggctcccgatgcggctgggaaatacactgagcctagggctatcggtacccgctacctcacccaccacctgtaa

SEQ ID NO: 59 - DNA, 939 bp, Adeno-associated virus 4
atggagctggtcgggtggctggtggaccgcgggatcacgtcagaaaagcaatggatccaggaggaccaggcgtcctacatctccttcaacgccgcctccaactcgcggtcacaaatcaaggccgcgctggacaatgcctccaaaatcatgagcctgacaaagacggctccggactacctggtgggccagaacccgccggaggacatttccagcaaccgcatctaccgaatcctcgagatgaacgggtacgatccgcagtacgcggcctccgtcttcctgggctgggcgcaaaagaagttcgggaagaggaacaccatctggctctttgggccggccacgacgggtaaaaccaacatcgcggaagccatcgcccacgccgtgcccttctacggctgcgtgaactggaccaatgagaactttccgttcaacgattgcgtcgacaagatggtgatctggtgggaggagggcaagatgacggccaaggtcgtagagagcgccaaggccatcctgggcggaagcaaggtgcgcgtggaccaaaagtgcaagtcatcggcccagatcgacccaactcccgtgatcgtcacctccaacaccaacatgtgcgcggtcatcgacggaaactcgaccaccttcgagcaccaacaaccactccaggaccggatgttcaagttcgagctcaccaagcgcctggagcacgactttggcaaggtcaccaagcaggaagtcaaagactttttccggtgggcgtcagatcacgtgaccgaggtgactcacgagttttacgtcagaaagggtggagctagaaagaggcccgcccccaatgacgcagatataagtgagcccaagcgggcctgtccgtcagttgcgcagccatcgacgtcagacgcggaagctccggtggactacgcggacagattggctagaggacaacctctctga

SEQ ID NO: 60 - DNA, 1197 bp, Adeno-associated virus 4
atggagctggtcgggtggctggtggaccgcgggatcacgtcagaaaagcaatggatccaggaggaccaggcgtcctacatctccttcaacgccgcctccaactcgcggtcacaaatcaaggccgcgctggacaatgcctccaaaatcatgagcctgacaaagacggctccggactacctggtgggccagaacccgccggaggacatttccagcaaccgcatctaccgaatcctcgagatgaacgggtacgatccgcagtacgcggcctccgtcttcctgggctgggcgcaaaagaagttcgggaagaggaacaccatctggctctttgggccggccacgacgggtaaaaccaacatcgcggaagccatcgcccacgccgtgcccttctacggctgcgtgaactggaccaatgagaactttccgttcaacgattgcgtcgacaagatggtgatctggtgggaggagggcaagatgacggccaaggtcgtagagagcgccaaggccatcctgggcggaagcaaggtgcgcgtggaccaaaagtgcaagtcatcggcccagatcgacccaactcccgtgatcgtcacctccaacaccaacatgtgcgcggtcatcgacggaaactcgaccaccttcgagcaccaacaaccactccaggaccggatgttcaagttcgagctcaccaagcgcctggagcacgactttggcaaggtcaccaagcaggaagtcaaagactttttccggtgggcgtcagatcacgtgaccgaggtgactcacgagttttacgtcagaaagggtggagctagaaagaggcccgcccccaatgacgcagatataagtgagcccaagcgggcctgtccgtcagttgcgcagccatcgacgtcagacgcggaagctccggtggactacgcggacaggtaccaaaacaaatgttctcgtcacgtgggtatgaatctgatgctttttccctgccggcaatgcgagagaatgaatcagaatgtggacatttgcttcacgcacggggtcatggactgtgccgagtgcttccccgtgtcagaatctcaacccgtgtctgtcgtcagaaagcggacgtatcagaaactgtgtccgattcatcacatcatggggagggcgcccgaggtggcctgctcggcctgcgaactggccaatgtggacttggatgactgtgacatggaacaa

SEQ ID NO: 61 - DNA, 245 bp, Adeno-associated virus 4
ctccatcatctaggtttgcccactgacgtcaatgtgacgtcctagggttagggaggtccctgtattagcagtcacgtgagtgtcgtatttcgcggagcgtagcggagcgcataccaagctgccacgtcacagccacgtggtccgtttgcgacagtttgcgacaccatgtggtcaggagggtatataaccgcgagtgagccagcgaggagctccattttgcccgcgaattttgaacgagcagcagc

SEQ ID NO: 62 - protein, 313 aa, Adeno-associated virus 4
  MOD_RES (313)..(313): Any amino acid
MELVGWLVDRGITSEKQWIQEDQASYISFNAASNSRSQIKAALDNASKIMSLTKTAPDYLVGQNPPEDISSNRIYRILEMNGYDPQYAASVFLGWAQKKFGKRNTIWLFGPATTGKTNIAEAIAHAVPFYGCVNWTNENFPFNDCVDKMVIWWEEGKMTAKVVESAKAILGGSKVRVDQKCKSSAQIDPTPVIVTSNTNMCAVIDGNSTTFEHQQPLQDRMFKFELTKRLEHDFGKVTKQEVKDFFRWASDHVTEVTHEFYVRKGGARKRPAPNDADISEPKRACPSVAQPSTSDAEAPVDYADRLARGQPLX

SEQ ID NO: 63 - protein, 399 aa, Adeno-associated virus 4
MELVGWLVDRGITSEKQWIQEDQASYISFNAASNSRSQIKAALDNASKIMSLTKTAPDYLVGQNPPEDISSNRIYRILEMNGYDPQYAASVFLGWAQKKFGKRNTIWLFGPATTGKTNIAEAIAHAVPFYGCVNWTNENFPFNDCVDKMVIWWEEGKMTAKVVESAKAILGGSKVRVDQKCKSSAQIDPTPVIVTSNTNMCAVIDGNSTTFEHQQPLQDRMFKFELTKRLEHDFGKVTKQEVKDFFRWASDHVTEVTHEFYVRKGGARKRPAPNDADISEPKRACPSVAQPSTSDAEAPVDYADRYQNKCSRHVGMNLMLFPCRQCERMNQNVDICFTHGVMDCAECFPVSESQPVSVVRKRTYQKLCPIHHIMGRAPEVACSACELANVDLDDCDMEQ

SEQ ID NO: 64 - protein, 623 aa, Adeno-associated virus 4
MPGFYEIVLKVPSDLDEHLPGISDSFVSWVAEKEWELPPDSDMDLNLIEQAPLTVAEKLQREFLVEWRRVSKAPEALFFVQFEKGDSYFHLHILVETVGVKSMVVGRYVSQIKEKLVTRIYRGVEPQLPNWFAVTKTRNGAGGGNKVVDDCYIPNYLLPKTQPELQWAWTNMDQYISACLNLAERKRLVAQHLTHVSQTQEQNKENQNPNSDAPVIRSKTSARYMELVGWLVDRGITSEKQWIQEDQASYISFNAASNSRSQIKAALDNASKIMSLTKTAPDYLVGQNPPEDISSNRIYRILEMNGYDPQYAASVFLGWAQKKFGKRNTIWLFGPATTGKTNIAEAIAHAVPFYGCVNWTNENFPFNDCVDKMVIWWEEGKMTAKVVESAKAILGGSKVRVDQKCKSSAQIDPTPVIVTSNTNMCAVIDGNSTTFEHQQPLQDRMFKFELTKRLEHDFGKVTKQEVKDFFRWASDHVTEVTHEFYVRKGGARKRPAPNDADISEPKRACPSVAQPSTSDAEAPVDYADRYQNKCSRHVGMNLMLFPCRQCERMNQNVDICFTHGVMDCAECFPVSESQPVSVVRKRTYQKLCPIHHIMGRAPEVACSACELANVDLDDCDMEQ

SEQ ID NO: 65 - protein, 537 aa, Adeno-associated virus 4
  MOD_RES (537)..(537): Any amino acid
MPGFYEIVLKVPSDLDEHLPGISDSFVSWVAEKEWELPPDSDMDLNLIEQAPLTVAEKLQREFLVEWRRVSKAPEALFFVQFEKGDSYFHLHILVETVGVKSMVVGRYVSQIKEKLVTRIYRGVEPQLPNWFAVTKTRNGAGGGNKVVDDCYIPNYLLPKTQPELQWAWTNMDQYISACLNLAERKRLVAQHLTHVSQTQEQNKENQNPNSDAPVIRSKTSARYMELVGWLVDRGITSEKQWIQEDQASYISFNAASNSRSQIKAALDNASKIMSLTKTAPDYLVGQNPPEDISSNRIYRILEMNGYDPQYAASVFLGWAQKKFGKRNTIWLFGPATTGKTNIAEAIAHAVPFYGCVNWTNENFPFNDCVDKMVIWWEEGKMTAKVVESAKAILGGSKVRVDQKCKSSAQIDPTPVIVTSNTNMCAVIDGNSTTFEHQQPLQDRMFKFELTKRLEHDFGKVTKQEVKDFFRWASDHVTEVTHEFYVRKGGARKRPAPNDADISEPKRACPSVAQPSTSDAEAPVDYADRLARGQPLX

SEQ ID NO: 66 - protein, 623 aa, Adeno-associated virus 4; identical to SEQ ID NO: 64

SEQ ID NO: 67 - protein, 544 aa, Adeno-associated virus 4
MSDDSEMRAAAGGAAVEGGQGADGVGNASGDWHCDSTWSEGHVTTTSTRTWVLPTYNNHLYKRLGESLQSNTYNGFSTPWGYFDFNRFHCHFSPRDWQRLINNNWGMRPKAMRVKIFNIQVKEVTTSNGETTVANNLTSTVQIFADSSYELPYVMDAGQEGSLPPFPNDVFMVPQYGYCGLVTGNTSQQQTDRNAFYCLEYFPSQMLRTGNNFEITYSFEKVPFHSMYAHSQSLDRLMNPLIDQYLWGLQSTTTGTTLNAGTATTNFTKLRPTNFSNFKKNWLPGPSIKQQGFSKTANQNYKIPATGSDSLIKYETHSTLDGRWSALTPGPPMATAGPADSKFSNSQLIFAGPKQNGNTATVPGTLIFTSEEELAATNATDTDMWGNLPGGDQSNSNLPTVDRLTALGAVPGMVWQNRDIYYQGPIWAKIPHTDGHFHPSPLIGGFGLKHPPPQIFIKNTPVPANPATTFSSTPVNSFITQYSTGQVSVQIDWEIQKERSKRWNPEVQFTSNYGQQNSLLWAPDAAGKYTEPRAIGTRYLTHHL

SEQ ID NO: 68 - protein, 734 aa, Adeno-associated virus 4
MTDGYLPDWLEDNLSEGVREWWALQPGAPKPKANQQHQDNARGLVLPGYKYLGPGNGLDKGEPVNAADAAALEHDKAYDQQLKAGDNPYLKYNHADAEFQQRLQGDTSFGGNLGRAVFQAKKRVLEPLGLVEQAGETAPGKKRPLIESPQQPDSSTGIGKKGKQPAKKKLVFEDETGAGDGPPEGSTSGAMSDDSEMRAAAGGAAVEGGQGADGVGNASGDWHCDSTWSEGHVTTTSTRTWVLPTYNNHLYKRLGESLQSNTYNGFSTPWGYFDFNRFHCHFSPRDWQRLINNNWGMRPKAMRVKIFNIQVKEVTTSNGETTVANNLTSTVQIFADSSYELPYVMDAGQEGSLPPFPNDVFMVPQYGYCGLVTGNTSQQQTDRNAFYCLEYFPSQMLRTGNNFEITYSFEKVPFHSMYAHSQSLDRLMNPLIDQYLWGLQSTTTGTTLNAGTATTNFTKLRPTNFSNFKKNWLPGPSIKQQGFSKTANQNYKIPATGSDSLIKYETHSTLDGRWSALTPGPPMATAGPADSKFSNSQLIFAGPKQNGNTATVPGTLIFTSEEELAATNATDTDMWGNLPGGDQSNSNLPTVDRLTALGAVPGMVWQNRDIYYQGPIWAKIPHTDGHFHPSPLIGGFGLKHPPPQIFIKNTPVPANPATTFSSTPVNSFITQYSTGQVSVQIDWEIQKERSKRWNPEVQFTSNYGQQNSLLWAPDAAGKYTEPRAIGTRYLTHHL

SEQ ID NO: 69 - protein, 598 aa, Adeno-associated virus 4
TAPGKKRPLIESPQQPDSSTGIGKKGKQPAKKKLVFEDETGAGDGPPEGSTSGAMSDDSEMRAAAGGAAVEGGQGADGVGNASGDWHCDSTWSEGHVTTTSTRTWVLPTYNNHLYKRLGESLQSNTYNGFSTPWGYFDFNRFHCHFSPRDWQRLINNNWGMRPKAMRVKIFNIQVKEVTTSNGETTVANNLTSTVQIFADSSYELPYVMDAGQEGSLPPFPNDVFMVPQYGYCGLVTGNTSQQQTDRNAFYCLEYFPSQMLRTGNNFEITYSFEKVPFHSMYAHSQSLDRLMNPLIDQYLWGLQSTTTGTTLNAGTATTNFTKLRPTNFSNFKKNWLPGPSIKQQGFSKTANQNYKIPATGSDSLIKYETHSTLDGRWSALTPGPPMATAGPADSKFSNSQLIFAGPKQNGNTATVPGTLIFTSEEELAATNATDTDMWGNLPGGDQSNSNLPTVDRLTALGAVPGMVWQNRDIYYQGPIWAKIPHTDGHFHPSPLIGGFGLKHPPPQIFIKNTPVPANPATTFSSTPVNSFITQYSTGQVSVQIDWEIQKERSKRWNPEVQFTSNYGQQNSLLWAPDAAGKYTEPRAIGTRYLTHHL

SEQ ID NO: 70 - DNA, 129 bp, Adeno-associated virus 4
ttggccactccctctatgcgcgctcgctcactcactcggccctgcggccagaggccggcagtctggagacctttggtgtccagggcagggccgagtgagtgagcgagcgcgcatagagggagtggccaa

SEQ ID NO: 71 - DNA, 125 bp, Adeno-associated virus 4
ttggccactccctctatgcgcgctcgctcactcactcggccctggagaccaaaggtctccagactgccggcctctggccggcagggccgagtgagtgagcgagcgcgcatagagggagtggccaa

SEQ ID NO: 72 - DNA, 4768 bp, Adeno-associated virus 4
  modified_base (3009)..(3009): a, c, t, g, unknown or other
ttggccactccctctatgcgcgctcgctcactcactcggccctggagaccaaaggtctccagactgccggcctctggccggcagggccgagtgagtgagcgagcgcgcatagagggagtggccaactccatcatctaggtttgcccactgacgtcaatgtgacgtcctagggttagggaggtccctgtattagcagtcacgtgagtgtcgtatttcgcggagcgtagcggagcgcataccaagctgccacgtcacagccacgtggtccgtttgcgacagtttgcgacaccatgtggtcaggagggtatataaccgcgagtgagccagcgaggagctccattttgcccgcgaattttgaacgagcagcagccatgccggggttctacgagatcgtgctgaaggtgcccagcgacctggacgagcacctgcccggcatttctgactcttttgtgagctgggtggccgagaaggaatgggagctgccgccggattctgacatggacttgaatctgattgagcaggcacccctgaccgtggccgaaaagctgcaacgcgagttcctggtcgagtggcgccgcgtgagtaaggccccggaggccctcttctttgtccagttcgagaagggggacagctacttccacctgcacatcctggtggagaccgtgggcgtcaaatccatggtggtgggccgctacgtgagccagattaaagagaagctggtgacccgcatctaccgcggggtcgagccgcagcttccgaactggttcgcggtgaccaagacgcgtaatggcgccggaggcgggaacaaggtggtggacgactgctacatccccaactacctgctccccaagacccagcccgagctccagtgggcgtggactaacatggaccagtatataagcgcctgtttgaatctcgcggagcgtaaacggctggtggcgcagcatctgacgcacgtgtcgcagacgcaggagcagaacaaggaaaaccagaaccccaattctgacgcgccggtcatcaggtcaaaaacctccgccaggtacatggagctggtcgggtggctggtggaccgcgggatcacgtcagaaaagcaatggatccaggaggaccaggcgtcctacatctccttcaacgccgcctccaactcgcggtcacaaatcaaggccgcgctggacaatgcctccaaaatcatgagcctgacaaagacggctccggactacctggtgggccagaacccgccggaggacatttccagcaaccgcatctaccgaatcctcgagatgaacgggtacgatccgcagtacgcggcctccgtcttcctgggctgggcgcaaaagaagttcgggaagaggaacaccatctggctctttgggccggccacgacgggtaaaaccaacatcgcggaagccatcgcccacgccgtgcccttctacggctgcgtgaactggaccaatgagaactttccgttcaacgattgcgtcgacaagatggtgatctggtgggaggagggcaagatgacggccaaggtcgtagagagcgccaaggccatcctgggcggaagcaaggtgcgcgtggaccaaaagtgcaagtcatcggcccagatcgacccaactcccgtgatcgtcacctccaacaccaacatgtgcgcggtcatcgacggaaactcgaccaccttcgagcaccaacaaccactccaggaccggatgttcaagttcgagctcaccaagcgcctggagcacgactttggcaaggtcaccaagcaggaagtcaaagactttttccggtgggcgtcagatcacgtgaccgaggtgactcacgagttttacgtcagaaagggtggagctagaaagaggcccgcccccaatgacgcagatataagtgagcccaagcgggcctgtccgtcagttgcgcagccatcgacgtcagacgcggaagctccggtggactacgcggacaggtaccaaaacaaatgttctcgtcacgtgggtatgaatctgatgctttttccctgccggcaatgcgagagaatgaatcagaatgtggacatttgcttcacgcacggggtcatggactgtgccgagtgcttccccgtgtcagaatctcaacccgtgtctgtcgtcagaaagcggacgtatcagaaactgtgtccgattcatcacatcatggggagggcgcccgaggtggcctgctcggcctgcgaactggccaatgtggacttggatgactgtgacatggaacaataaatgactcaaaccagatatgactgacggttaccttccagattggctagaggacaacctctctgaaggcgttcgagagtggtgggcgctgcaacctggagcccctaaacccaaggcaaatcaacaacatcaggacaacgctcggggtcttgtgcttccgggttacaaatacctcggacccggcaacggactcgacaagggggaacccgtcaacgcagcggacgcggcagccctcgagcacgacaaggcctacgaccagcagctcaaggccggtgacaacccctacctcaagtacaaccacgccgacgcggagttccagcagcggcttcagggcgacacaccgtttgggggcaacctcggcagagcagtcttccaggccaaaaagagggttcttgaacctcttggtctggttgagcaagcgggtgagacggctcctggaaagaagagaccgttgattgaatccccccagcagcccgactcctccacgggtatcggcaaaaaaggcaagcagccggctaaaaagaagctcgttttcgaagacgaaactggagcaggcgacggaccccctgagggatcaacttccggagccatgtctgatgacagtgagatgcgtgcagcagctggcggagctgcagtcgagggsggacaaggtgccgatggagtgggtaatgcctcgggtgattggcattgcgattccacctggtctgagggccacgtcacgaccaccagcaccagaacctgggtcttgcccacctacaacaaccacctntacaagcgactcggagagagcctgcagtccaacacctacaacggattctccaccccctggggatactttgacttcaaccgcttccactgccacttctcaccacgtgactggcagcgactcatcaacaacaactggggcatgcgacccaaagccatgcgggtcaaaatcttcaacatccaggtcaaggaggtcacgacgtcgaacggcgagacaacggtggctaataaccttaccagcacggttcagatctttgcggactcgtcgtacgaactgccgtacgtgatggatgcgggtcaagagggcagcctgcctccttttcccaacgacgtctttatggtgccccagtacggctactgtggactggtgaccggcaacacttcgcagcaacagactgacagaaatgccttctactgcctggagtactttccttcgcagatgctgcggactggcaacaactttgaaattacgtacagttttgagaaggtgcctttccactcgatgtacgcgcacagccagagcctggaccggctgatgaaccctctcatcgaccagtacctgtggggactgcaatcgaccaccaccggaaccaccctgaatgccgggactgccaccaccaactttaccaagctgcggcctaccaacttttccaactttaaaaagaactggctgcccgggccttcaatcaagcagcagggcttctcaaagactgccaatcaaaactacaagatccctgccaccgggtcagacagtctcatcaaatacgagacgcacagcactctggacggaagatggagtgccctgacccccggacctccaatggccacggctggacctgcggacagcaagttcagcaacagccagctcatctttgcggggcctaaacagaacggcaacacggccaccgtacccgggactctgatcttcacctctgaggaggagctggcagccaccaacgccaccgatacggacatgtggggcaacctacctggcggtgaccagagcaacagcaacctgccgaccgtggacagactgacagccttgggagccgtgcctggaatggtctggcaaaacagagacatttactaccagggtcccatttgggccaagattcctcataccgatggacactttcacccctcaccgctgattggtgggtttgggctgaaacacccgcctcctcaaatttttatcaagaacaccccggtacctgcgaatcctgcaacgaccttcagctctactccggtaaactccttcattactcagtacagcactggccaggtgtcggtgcagattgactgggagatccagaaggagcggtccaaacgctggaaccccgaggtccagtttacctccaactacggacagcaaaactctctgttgtgggctcccgatgcggctgggaaatacactgagcctagggctatcggtacccgctacctcacccaccacctgtaataacctgttaatcaataaaccggtttattcgtttcagttgaactttggtctccgtgtccttcttatcttatctcgtttccatggctactgcgtacataagcagcggcctgcggcgcttgcgcttcgcggtttacaactgccggttaatcagtaacttctggcaaaccatgatgatggagttggccactccctctatgcgcgctcgctcactcactcggccctggagaccaaaggtctccagactgccggcctctggccggcagggccgagtgagtgagcgagcgcgcatagagggagtggccaa

SEQ ID NO: 73 - DNA, 3098 bp, Artificial Sequence
  Description of Artificial Sequence: Synthetic polynucleotide
gaattcgccctttctacggctgcgtcaactggaccaatgagaactttcccttcaacgattgcgtcgacaagatggtgatctggtgggaggagggcaagatgacggccaaggtcgtggagtccgccaaggccattctcggcggcagcaaggtgcgcgtggaccaaaagtgcaagtcttccgcccagatcgatcccacccccgtgatcgtcacttccaacaccaacatgtgcgctgtgattgacgggaacagcaccaccttcgagcaccagcagccgttacaagaccggatgttcaaatttgaactcacccgccgtctggagcacgactttggcaaggtgacaaagcaggaagtcaaagagttcttccgctgggcgcaggatcacgtgaccgaggtggcgcatgagttctacgtcagaaagggtggagccaacaagagacccgcccccgatgacgcggataaaagcgagcccaagcgggcctgcccctcagtcgcggatccatcgacgtcagacgcggaaggagctccggtggactttgccgacaggtaccaaaacaaatgttctcgtcacgcgggcatgcttcagatgctgtttccctgcaagacatgcgagagaatgaatcagaatttcaacatttgcttcacgcacgggaccagagactgttcagaatgtttccccggcgtgtcagaatctcaaccggtcgtcagaaagaggacgtatcggaaactctgtgccattcatcatctgctggggcgggctcccgagattgcttgctcggcctgcgatctggtcaacgtggacctggatgaccgtgtttctgagcaataaatgacttaaaccaggtatggctgccgatggttatcttccagattggctcgaggacaacctctctgagggcattcgcgagtggtgggacttgaaacctggagccccgaaacccaaagccaaccagcaaaagcaggacgacggccggggtctggtgcttcctggctacaagtacctcggacccttcaacggactcgacaagggagagccggtcaacgaggcagacgccgcggccctcgagcacgacaaggcctacgacaagcagctcgagcagggggacaacccgtacctcaagtacaaccacgccgacgccgagtttcaggagcgtcttcaagaagatacgtcttttgggggcaacctcgggcgagcagtcttccaggccaagaagcgggttctcgaacctctcggtctggttgaggaaggcgctaagacggctcctggaaagaagagacccatagaatcccccgactcctccacgggcatcggcaagaaaggccagcagcccgctaaaaagaagctcaactttgggcagactggcgactcagagtcagtgcccgacccccaacctctcggagaacctcccgccgcgccctcaggtctgggatctggtacaatggctgcaggcggtggcgcaccaatggcagacaataacgaaggcgccgacggagtgggtaatgcctccggaaattggcattgcgattccacatggctgggcgacagagtcatcaccaccagcacccgcacctgggccctgcccacctacaacaaccacctctacaagcagatatcaagtcagagcggggctaccaacgacaaccacttcttcggctacagcaccccctggggctattttgacttcaacagattccactgccacttctcaccacgtgactggcagcgactcatcaacaacaactggggattccggcccagaaagctgcggttcaagttgttcaacatccaggtcaaggaggtcacgacgaacgacggcgttacgaccatcgctaataaccttaccagcacgattcaggtcttctcggactcggagtaccaactgccgtacgtcctcggctctgcgcaccagggctgcctccctccgttccctgcggacgtgttcatgattcctcagtacggatatctgactctaaacaacggcagtcagtctgtgggacgttcctccttctactgcctggagtactttccttctcagatgctgagaacgggcaataactttgaattcagctacacctttgaggaagtgcctttccacagcagctatgcgcacagccagagcctggaccggctgatgaatcccctcatcgaccagtacctgtactacctggcccggacccagagcactacggggtccacaagggagctgcagttccatcaggctgggcccaacaccatggccgagcaatcaaagaactggctgcccggaccctgttatcggcagcagagactgtcaaaaaacatagacagcaacaacaacagtaactttgcctggaccggggccactaaataccatctgaatggtagaaattcattaaccaacccgggcgtagccatggccaccaacaaggacgacgaggaccagttctttcccatcaacggagtgctggtttttggcgaaacgggggctgccaacaagacaacgctggaaaacgtgctaatgaccagcgaggaggagatcaaaaccaccaatcccgtggctacagaagaatacggtgtggtctccagcaacctgcaatcgtctacggccggaccccagacacagactgtcaacagccagggggctctgcccggcatggtctggcagaaccgggacgtgtacctgcagggtcccatctgggccaaaattcctcacacggacggcaactttcacccgtctcccctgatgggcggatttggactcaaacacccgcctcctcaaattctcatcaaaaacaccccggtacctgctaatcctccagaggtgtttactcctgccaagtttgcctcatttatcacgcagtacagcaccggccaggtcagcgtggagatcgagtgggaactgcagaaagaaaacagcaaacgctggaatccagagattcagtacacctcaaattatgccaagtctaataatgtggaatttgctgtcaacaacgaaggggtttatactgagcctcgccccattggcacccgttacctcacccgtaacctgtaattgcctgttaatcaataaaccggttaattcgtttcagttgaactttggtctctgcgaagggcgaattc

SEQ ID NO: 74 - protein, 728 aa, Artificial Sequence
  Description of Artificial Sequence: Synthetic polypeptide
MAADGYLPDWLEDNLSEGIREWWDLKPGAPKPKANQQKQDDGRGLVLPGYKYLGPFNGLDKGEPVNEADAAALEHDKAYDKQLEQGDNPYLKYNHADAEFQERLQEDTSFGGNLGRAVFQAKKRVLEPLGLVEEGAKTAPGKKRPIESPDSSTGIGKKGQQPAKKKLNFGQTGDSESVPDPQPLGEPPAAPSGLGSGTMAAGGGAPMADNNEGADGVGNASGNWHCDSTWLGDRVITTSTRTWALPTYNNHLYKQISSQSGATNDNHFFGYSTPWGYFDFNRFHCHFSPRDWQRLINNNWGFRPRKLRFKLFNIQVKEVTTNDGVTTIANNLTSTIQVFSDSEYQLPYVLGSAHQGCLPPFPADVFMIPQYGYLTLNNGSQSVGRSSFYCLEYFPSQMLRTGNNFEFSYTFEEVPFHSSYAHSQSLDRLMNPLIDQYLYYLARTQSTTGSTRELQFHQAGPNTMAEQSKNWLPGPCYRQQRLSKNIDSNNNSNFAWTGATKYHLNGRNSLTNPGVAMATNKDDEDQFFPINGVLVFGETGAANKTTLENVLMTSEEEIKTTNPVATEEYGVVSSNLQSSTAGPQTQTVNSQGALPGMVWQNRDVYLQGPIWAKIPHTDGNFHPSPLMGGFGLKHPPPQILIKNTPVPANPPEVFTPAKFASFITQYSTGQVSVEIEWELQKENSKRWNPEIQYTSNYAKSNNVEFAVNNEGVYTEPRPIGTRYLTRNL

SEQ ID NO: 75 - DNA, 2495 bp, Artificial Sequence
  Description of Artificial Sequence: Synthetic polynucleotide
gaattcgccctttctacggctgcgtcaactagaccaatgagaactttcccttcaacgattgcgtcgacaagatggtgatctggtgggaggagggcaagatgacggccaaggtcgtggagtccgccaaggccattcatcatctgctggggcgggctcccgagattgcttgctcggcctgcgatctggtcaacgtggacctggatgactgtgtttctgagcaataaatgacttaaaccaggtatggctgccgatggttatcttccagattggctcgaggacaacctctctgagggcattcgcgagtggtgggacttgaaacctggagccccgaaacccaaagccaaccagcaaaagcaggacgacggccggggtctggtgcttcctggctacaagtacctcggacccttcaacggactcgacaagggagagccggtcaacgaggcagacgccgcggccctcgagcacgacaaggcctacgacaagcagctcgagcagggggacaacccgtacctcaagtacaaccacgccgacgccgagtttcaggagcgtcttcaagaagatacgtcttttgggggcaacctcgggcgagcagtcttccaggccaagaagcgggttctcgaacctctcggtctggttgaggaaggcgctaagacggctcctggaaagaagagacccatagaatcccccgactcctccacgggcatcggcaagaaaggccagcagcccgctaaaaagaagctcaactttgggcagactggcgactcagagtcagtgcccgaccctcaaccaatcggagaaccccccgcaggcccctctggtctgggatctggtacaatggctgcaggcggtggcgctccaatggcagacaataacgaaggcgccgacggagtgggtaatgcctccggaaattggcattgcgattccacatggctgggcgacagagtcatcaccaccagcacccgcacctgggccctgcccacctacaacaaccacctctacaagcagatatcaagtcagagcggggctaccaacgacaaccacttcttcggctacagcaccccctggggctattttgacttcaacagattccactgccacttctcaccacgtgactggcagcgactcatcaacaacaactggggattccggcccagaaagctgcggttcaagttgttcaacatccaggtcaaggaggtcacgacgaacgacggcgttacgaccatcgctaataaccttaccagcacgattcaggtcttctcggactcggagtaccaactgccgtacgtcctcggctctgcgcaccagggctgcctccctccgttccctgcggacgtgttcatgattcctcagtacggatatctgactctaaacaacggcagtcagtctgtgggacgttcctccttctactgcctggagtactttccttctcagatgctgagaacgggcaataactttgaattcagctacacctttgaggaagtgcctttccacagcagctatgcgcacagccagagcctggaccggctgatgaatcccctcatcgaccagtacctgtactacctggcccggacccagagcactacggggtccacaagggagctgcagttccatcaggctgggcccaacaccatggccgagcaatcaaagaactggctgcccggaccctgttatcggcagcagagactgtcaaaaaacatagacagcaacaacaccagtaactttgcctggaccggggccactaaataccatctgaatggtagaaattcattaaccaacccgggcgtagccatggccaccaacaaggacgacgaggaccagttctttcccatcaacggagtgctggtttttggcaaaacgggggctgccaacaagacaacgctggaaaacgtgctaatgaccagcgaggaggagatcaaaaccaccaatcccgtggctacagaacagtacggtgtggtctccagcaacctgcaatcgtctacggccggaccccagacacagactgtcaacagccagggggctctgcccggcatggtctggcagaaccgggacgtgtacctgcagggtcccatctgggccaaaattcctcacacggacggcaactttcacccgtctcccctgatgggcggatttggactcaaacacccgcctcctcaaattctcatcaaaaacaccccggtacctgctaatcctccagaggtgtttactcctgccaagtttgcctcatttatcacgcagtacagcaccggccaggtcagcgtggagatcgagtgggaactgcagaaagaaaacagcaaacgctggaatccagagattcagtacacctcaaattatgccaagtctaataatgtggaatttgctgtcaacaacgaaggggtttatactgagcctcgccccattggcacccgttacctcacccgtaacctgtaattgcctgttaatcaataaaccggttaattcgtttcagttgaactttggtctctgcgaagggcgaattc

SEQ ID NO: 76 - protein, 728 aa, Artificial Sequence
  Description of Artificial Sequence: Synthetic polypeptide
MAADGYLPDWLEDNLSEGIREWWDLKPGAPKPKANQQKQDDGRGLVLPGYKYLGPFNGLDKGEPVNEADAAALEHDKAYDKQLEQGDNPYLKYNHADAEFQERLQEDTSFGGNLGRAVFQAKKRVLEPLGLVEEGAKTAPGKKRPIESPDSSTGIGKKGQQPAKKKLNFGQTGDSESVPDPQPIGEPPAGPSGLGSGTMAAGGGAPMADNNEGADGVGNASGNWHCDSTWLGDRVITTSTRTWALPTYNNHLYKQISSQSGATNDNHFFGYSTPWGYFDFNRFHCHFSPRDWQRLINNNWGFRPRKLRFKLFNIQVKEVTTNDGVTTIANNLTSTIQVFSDSEYQLPYVLGSAHQGCLPPFPADVFMIPQYGYLTLNNGSQSVGRSSFYCLEYFPSQMLRTGNNFEFSYTFEEVPFHSSYAHSQSLDRLMNPLIDQYLYYLARTQSTTGSTRELQFHQAGPNTMAEQSKNWLPGPCYRQQRLSKNIDSNNTSNFAWTGATKYHLNGRNSLTNPGVAMATNKDDEDQFFPINGVLVFGKTGAANKTTLENVLMTSEEEIKTTNPVATEQYGVVSSNLQSSTAGPQTQTVNSQGALPGMVWQNRDVYLQGPIWAKIPHTDGNFHPSPLMGGFGLKHPPPQILIKNTPVPANPPEVFTPAKFASFITQYSTGQVSVEIEWELQKENSKRWNPEIQYTSNYAKSNNVEFAVNNEGVYTEPRPIGTRYLTRNL

SEQ ID NO: 77 - DNA, 2504 bp, Artificial Sequence
  Description of Artificial Sequence: Synthetic polynucleotide
gaattcgccctttctacggctgcgtcaactggaccaatgagaactttcccttcaacgattgcgtcgacaagatggtgatctggtgggaggagggcaagatgacggccaaggtcgtggagtccgccaaggccattcatcatctgctggggcgggctcccgagattgcttgctcggcctgcgatctggtcaacgtggacctggatgactgtgtttctgagcaataaatgacttaaaccaggtatggctgccgatggttatcttccagattggctcgaggacaacctctctgagggcattcgcgagtggtgggacttgaaacctggagccccgaaacccaaagccaaccagcaaaagcaggacgacggccggggtctggtgcttcctggctacaagtacctcggacccttcaacggactcgacaagggagagccggtcaacgaggcagacgccgcggccctcgagcacgacaaggcctacgacaagcagctcgagcagggggacaacccgtacctcaagtacaaccacgccgacgccgagtttcaggagcgtcttcaagaagatacgtcttttgggggcaacctcgggcgagcagtcttccaggccaagaagcgggttctcgaacctctcggtctggttgaggaaggcgctaagacggctcctggaaagaagagacccatagaatcccccgactcctccacgggcatcggcaagaaaggccagcagcccgctaaaaagaagctcaactttgggcagactggcgactcagagtcagtgcccgaccctcaaccaatcggagaaccccccgcaggcccctctggtctgggatctggtacaatggctgcaggcggtggcgctccaatggcagacaataacgaaggcgccgacggagtgggtaatgcctccggaaattggcattgcgattccacatggctgggcgacagagtcatcaccaccagcacccgcacctgggccctgcccacctacaacaaccacctctacaagcagatatcaagtcagagcggggctaccaacgacaaccacttcttcggctacagcaccccctggggctattttgacttcaacagattccactgccacttctcatcacgtgactggcagcgactcatcaacaacaactggggattccggcccaagagactcaacttcaagctcttcaacatccaggtcaaggaggtcacgcagaatgaaggcaccaagaccatcgccaataaccttaccagcacgattcaggtctttacggactcggaataccggctcccgtacgtcctcggctctgcgcaccagggctgcctgcctccgttcccggcggacgtcttcatgattcctcagtacgggtacctgactctgaacaacggcagtcaggccgtgggccgttcctccttctactgcctggagtactttccttctcaaatgctgagaacgggcaacaactttgagttcagctaccagtttgaggacgtgccttttcacagcagctacgcgcacagccaaagcctggaccggctgatgaaccccctcatcgaccagtacctgtactacctgtctcggactcagtccacgggaggtaccgcaggaactcagcagttgctattttctcaggccgggcctaataacatgtcggctcaggccaaaaactggctacccgggccctgctaccggcagcaacgcgtctccacgacactgtcgcaaaataacaacagcaactttgcttggaccggtgccaccaagtatcatctgaatggcagagactctctggtaaatcccggtgtcgctatggcaacgcacaaggacgacgaagagcgattttttccatccagcggagtcttgatgtttgggaaacagggagctggaaaagacaacgtggactatagcagcgttatgctaaccagtgaggaagaaatcaaaaccaccaacccagtggccacagaacagtacggcgtggtggccgataacctgcaacagcaaaacgccgctcctattgtaggggccgtcaacagtcaaggagccttacctggcatggtctggcagaaccgggacgtgtacctgcagggtcctatctgggccaagattcctcacacggacggcaactttcatccttcgccgctgatgggaggctttggactgaaacacccgcctcctcagatcctgattaagaatacacctgttcccgcggatcctccaactaccttcagtcaagccaagccggcgtcgttcatcacgcagtacagcaccggacaggtcagcgtggaaattgaatgggagctgcagaaagagaacagcaagcgctggaacccagagattcagtatacttccaactactacaaatctacaaatgtggactttgctgtcaatactgagggtacttattcagagcctcgccccattggcacccgttacctcacccgtaacctgtaattgcctgttaatcaataaaccggttaattcgtttcagttgaactttggtctctgcgaagggcgaattc

SEQ ID NO: 78 - protein, 731 aa, Artificial Sequence
  Description of Artificial Sequence: Synthetic polypeptide
MAADGYLPDWLEDNLSEGIREWWDLKPGAPKPKANQQKQDDGRGLVLPGYKYLGPFNGLDKGEPVNEADAAALEHDKAYDKQLEQGDNPYLKYNHADAEFQERLQEDTSFGGNLGRAVFQAKKRVLEPLGLVEEGAKTAPGKKRPIESPDSSTGIGKKGQQPAKKKLNFGQTGDSESVPDPQPIGEPPAGPSGLGSGTMAAGGGAPMADNNEGADGVGNASGNWHCDSTWLGDRVITTSTRTWALPTYNNHLYKQISSQSGATNDNHFFGYSTPWGYFDFNRFHCHFSSRDWQRLINNNWGFRPKRLNFKLFNIQVKEVTQNEGTKTIANNLTSTIQVFTDSEYRLPYVLGSAHQGCLPPFPADVFMIPQYGYLTLNNGSQAVGRSSFYCLEYFPSQMLRTGNNFEFSYQFEDVPFHSSYAHSQSLDRLMNPLIDQYLYYLSRTQSTGGTAGTQQLLFSQAGPNNMSAQAKNWLPGPCYRQQRVSTTLSQNNNSNFAWTGATKYHLNGRDSLVNPGVAMATHKDDEERFFPSSGVLMFGKQGAGKDNVDYSSVMLTSEEEIKTTNPVATEQYGVVADNLQQQNAAPIVGAVNSQGALPGMVWQNRDVYLQGPIWAKIPHTDGNFHPSPLMGGFGLKHPPPQILIKNTPVPADPPTTFSQAKPASFITQYSTGQVSVEIEWELQKENSKRWNPEIQYTSNYYKSTNVDFAVNTEGTYSEPRPIGTRYLTRNL

SEQ ID NO: 79 - DNA, 3128 bp, Artificial Sequence
  Description of Artificial Sequence: Synthetic polynucleotide
gaattcgccctttctacggctgcgtcaactggaccaatgagaactttcccttcaacgattgcgtcgacaagatggtgatctggtgggaggagggcaagatgacggccaaggtcgtggagtccgccaaggccattctcggcggcagcaaggtgcgcgtggaccaaaagtgcaagtcttccgcccagatcgatcccacccccgtgatcgtcacttccaacaccaacatgtgcgccgtgattgacgggaacagcaccaccttcgagcaccagcagccgttacaagaccggatgttcaaatttgaactcacccgccgtctggagcacgactttggcaaggtgacaaagcaggaagtcaaagagttcttccgctgggcgcaggatcacgtgaccgaggtggcgcatgagttctacgtcagaaagggtggagccaacaagagacccgcccccgatgacgcggataaaagcgagcccaagcgggcctgcccctcagtcgcggatccatcgacgtcagacgcggaaggagctccggtggactttgccgacaggtaccaaaacaaatgttctcgtcacgcgggcatgcttcagatgctgtttccctgcaagacatgcgagagaatgaatcagaatttcaacatttgcttcacgcacgggaccagagactgttcagaatgtttccccggcgtgtcagaatctcaaccggtcgtcagaaagaggacgtatcggaaactctgtgccattcatcatctgctagggcgggctcccgagattgcttgctcggcctgcgatctggtcaacgtggacctggatgactgtgtttctgagcaataaatgacttaaaccaggtatggctgccgatggttatcttccagattggctcgaggacaacctctctgagggcattcgcgagtggtgggacttgaaacctggagccccgaaacccaaagccaaccagcaaaagcaggacgacggccggggtctggtgcttcctggctacaagtacctcggacccttcaacggactcgacaagggggagcccgtcaacgcggcggacgcagcggccctcgagcacgacaaggcctacgaccagcagctcaaagcgggtgacaatccgtacctgcggtataaccacgccgacgccgagtttcaggagcgtctgcaagaagatacgtcttttgggggcaacctcgggcgagcagtcttccaggccaagaagcgggttctcgaacctctcggtctggttgaggaaggcgctaagacggctcctggaaagaagagaccggtagagccatcaccccagcgttctccagactcctctacgggcatcggcaagacaggccagcagcccgcgaaaaagagactcaactttgggcagactggcgactcagagtcagtgcccgaccctcaaccaatcggagaaccccccgcaggcccctctggtctgggatctggtacaatggctgcaggcggtggcgctccaatggcagacaataacgaaggcgccgacggagtgggtagttcctcaggaaattggcattgcgattccacatggctgggcgacagagtcatcaccaccagcacccgaacctgggccctccccacctacaacaaccacctctacaagcaaatctccaacgggacatcgggaggaagcaccaacgacaacacctacttcggctacagcaccccctgggggtattttgactttaacagattccactgccacttctcaccacgtgactggcagcgactcatcaacaacaactggggattccggcccaagagactcaacttcaagctcttcaacatccaggtcaaggaggtcacgcagaatgaaggcaccaagaccatcgccaataaccttaccagcacgattcaggtctttacggactcggaataccagctcccgtacgtcctcggctctgcgcaccagggctgcctgcctccgttcccggcggacgtcttcatgattcctcagtacgggtacctgactctgaacaacggcagtcaggccgtgggccgttcctccttctactgcctggagtactttccttctcaaatgctgagaacgggcaacaactttgagttcagctaccagtttgaggacgtgccttttcacagcagctacgcgcacagccaaagcctggaccggctgatgaaccccctcatcgaccagtacctgtactacctgtctcggactcagtccacgggaggtaccgcaggaactcagcagttgctattttctcaggccgggcctaataacatgtcggctcaggccaaaaactggctacccgggccctgctaccggcagcaacgcgtctccacgacactgtcgcaaaataacaacagcaactttgcttggaccggtgccaccaagtatcatctgaatggcagagactctctggtaaatcccggtgtcgctatggcaacgcacaaggacgacgaagagcgattttttccatccagcggagtcttgatgtttgggaaacagggagctggaaaagacaacgtggactatagcagcgttatgctaaccagtgaggaagaaatcaaaaccaccaacccagtggccacagaacagtacggcgtggtggccgataacctgcaacagcaaaacgccgctcctattgtaggggccgtcaacagtcaaggagccttacctggcatggtctggcagaaccgggacgtgtacctgcagggtcctatctgggccaagattcctcacacggacggcaactttcatccttcgccgctgatgggaggctttggactgaaacacccgcctcctcagatcctgattaagaatacacctgttcccgcggatcctccaactaccttcagtcaagccaagctggcgtcgttcatcacgcagtacagcaccggacaggtcagcgtggaaattgaatgggagctgcagaaagagaacagcaagcgctggaacccagagattcagtatacttccaactactacaaatctacaaatgtggactttgctgtcaatactgagggtacttattcagagcctcgccccattggcacccgttacctcacccgtaacctgtaattgcctgttaatcaataaaccggctaattcgtttcagttgaactttggtctctgcgaagggcgaattc

SEQ ID NO: 80 - protein, 738 aa, Artificial Sequence
  Description of Artificial Sequence: Synthetic polypeptide
MAADGYLPDWLEDNLSEGIREWWDLKPGAPKPKANQQKQDDGRGLVLPGYKYLGPFNGLDKGEPVNAADAAALEHDKAYDQQLKAGDNPYLRYNHADAEFQERLQEDTSFGGNLGRAVFQAKKRVLEPLGLVEEGAKTAPGKKRPVEPSPQRSPDSSTGIGKTGQQPAKKRLNFGQTGDSESVPDPQPIGEPPAGPSGLGSGTMAAGGGAPMADNNEGADGVGSSSGNWHCDSTWLGDRVITTSTRTWALPTYNNHLYKQISNGTSGGSTNDNTYFGYSTPWGYFDFNRFHCHFSPRDWQRLINNNWGFRPKRLNFKLFNIQVKEVTQNEGTKTIANNLTSTIQVFTDSEYQLPYVLGSAHQGCLPPFPADVFMIPQYGYLTLNNGSQAVGRSSFYCLEYFPSQMLRTGNNFEFSYQFEDVPFHSSYAHSQSLDRLMNPLIDQYLYYLSRTQSTGGTAGTQQLLFSQAGPNNMSAQAKNWLPGPCYRQQRVSTTLSQNNNSNFAWTGATKYHLNGRDSLVNPGVAMATHKDDEERFFPSSGVLMFGKQGAGKDNVDYSSVMLTSEEEIKTTNPVATEQYGVVADNLQQQNAAPIVGAVNSQGALPGMVWQNRDVYLQGPIWAKIPHTDGNFHPSPLMGGFGLKHPPPQILIKNTPVPADPPTTFSQAKLASFITQYSTGQVSVEIEWELQKENSKRWNPEIQYTSNYYKSTNVDFAVNTEGTYSEPRPIGTRYLTRNL

SEQ ID NO: 81 - DNA, 3084 bp, Artificial Sequence
  Description of Artificial Sequence: Synthetic polynucleotide
gaattcgccctttctacggctgcatcaactggaccaatgagaactttcccttcaacgattgcgtcgacaagatggtgatctggtgggaggagggcaagatgacggccaaggtcgtggagtccgccaaggccattctcggcggcagcaaggtgcgcgtggaccaaaagtgcaagtcgtccgcccagatcgaccccacccccgtgatcgtcacctccaacaccaacatgtgcgccgtgattgacgggaacagcaccaccttcgagcaccagcagccgttgcaggaccggatgttcaagttcgaactcacccgccgtctggagcacgactttggcaaggtgaccaagcaggaagtcaaagagttcttccgctgggcgcaggatcacgtgaccgaggtggcgcatgagttctacgtcagaaagggcggagccagcaaaagacccgcccccgatgacgcggatataagcgagcccaagcgggcctgcccctcagtcgcggatccatcgacgtcagacgcggaaggagctccggtggactttgccgacaggtaccaaaacaaatgttctcgtcacgcgggcatgcttcagatgctgtttccctgcaaaacgtgcgagaaaatgaatcagaatttcaacatttgcttcacgcacggggtcagagactgctcagaatgtttccccggtgcatcagaatctcaaccggtcgtcagaaaaaaaacgtatcagaaactgtgtgccattcatcatctgctggggcgggcacccgagattgcttgctcggcctgcgatctggtcaacgtggacctggacgactgtgtttctgagcaataaatgacttaaaccaggtatggctgccgatggttatcttccagattggcttgaggacaacctctctgagggcattcgcgagtggtgggacctgaaacctggagccccgaaacccaaagccaaccagcaaaagcaggacgacggccggggtctggtgcttcctggctacaagtacctcggacccttcaacggactcgacaagggggagcccgtcaacgcggcggacgcagcggccctcgagcacgacaaggcctacgaccagcagctcaaagcgggtgacaatccgtacctgcggtataaccacgccgacgccgagtttcaggagcgtctgcaagaagatacgtcttttgggggcaacctcgggcgagcagtcttccaggccaagaagcgggttctcgaacctctcggtctggttgaggaaggcgctaagacggctcctggaaagaagagaccggtagagccatcacctcagcgttcccccgactcctccacgggcatcggcaagaaaggccaccagcccgcgagaaagagactgaactttgggcagactggcgactcggagtcagtccccgaccctcaaccaatcggagaaccaccagcaggcccctctggtctgggatctggtacaatggctgcaggcggtggcgctccaatggcagacaataacgaaggcgccgacggagtgggtagttcctcaggaaattggcattgcgattccacatggctgggcgacagagtcatcaccaccagcacccgaacctgggccctgcccacctacaacaaccatctctacaagcaaatctccaacgggacatcgggaggaagcactaacgacaacacctactttggctacagcaccccctgggggtattttgacttcaacagattccactgccacttctcaccacgtgactggcagcgactcatcaacaataactggggattccggcccaagagactcaacttcaagctcttcaacatccaggtcaaggaggtcacgcagaatgaaggcaccaagaccatcgccaataaccttaccagcacgattcaggtgtttacggactcggaataccagctcccgtacgtccccggctctgcgcaccagggctgcctccctccgttcccggcggacgtcttcatgattcctcagtacgggtatctgaccctaaacaatggcagtcaggctgtgggccgttcctccttctactgcctggaatacttcccttctcaaatgctgaggacgggcaacaactttgaattcagctacaccttcgaggacgtgcctttccacagcagctacgcgcacagccagagcctggaccggctgatgaaccctctcatcgaccagtacctgtattacttatccagaactcagtccacaggaggaactcaaggtactcagcaattgttattttctcaagccgggcccgcaaacatgtcggctcaggccaagaactggctacctggaccgtgttaccgtcagcaacgagtttccacgacactgtcgcaaaacaacaacagcaattttgcttggaccggtgccaccaagtatcacctgaatggcagagactccctggttaatcccggcgttgccatggctacccacaaggacgacgaggagcgcttcttcccgtcaagcggagttctaatgtttggcaagcagggggctggaaaagacaatgtggactacagcagcgtgatgctcaccagcgaagaagaaattaaaactactaacccagtggctacagagcagtatggtgtggtggcagacaacctgcagcagaccaacggagctcccattgtgggaactgtcaacagccagggggccttacctggtatggtctggcaaaaccgggacgtgtacctgcagggccccatctgggccaaaattcctcacacggacggcaactttcatccttcgccgctgatgggaggctttggactgaaacacccgcctcctcagatcctggtgaaaaacactcctgttcctgcggatcctccgaccaccttcagccaggccaagctggcttcttttatcacgcagtacagcaccggacaggtcagcgtggaaatcgaatgggagctgcagaaagaaaacagcaagcgctggaacccagagattcagtatacttccaactactacaaatctacaaatgtggactttgctgtcaatactgagggtacttattcagagcctcgccccattggcactcgttatctcacccgtaatctgtaattgcttgttaatcaataaaccggt

SEQ ID NO: 82 - protein, 738 aa, Artificial Sequence
  Description of Artificial Sequence: Synthetic polypeptide
MAADGYLPDWLEDNLSEGIREWWDLKPGAPKPKANQQKQDDGRGLVLPGYKYLGPFNGLDKGEPVNAADAAALEHDKAYDQQLKAGDNPYLRYNHADAEFQERLQEDTSFGGNLGRAVFQAKKRVLEPLGLVEEGAKTAPGKKRPVEPSPQRSPDSSTGIGKKGHQPARKRLNFGQTGDSESVPDPQPIGEPPAGPSGLGSGTMAAGGGAPMADNNEGADGVGSSSGNWHCDSTWLGDRVITTSTRTWALPTYNNHLYKQISNGTSGGSTNDNTYFGYSTPWGYFDFNRFHCHFSPRDWQRLINNNWGFRPKRLNFKLFNIQVKEVTQNEGTKTIANNLTSTIQVFTDSEYQLPYVPGSAHQGCLPPFPADVFMIPQYGYLTLNNGSQAVGRSSFYCLEYFPSQMLRTGNNFEFSYTFEDVPFHSSYAHSQSLDRLMNPLIDQYLYYLSRTQSTGGTQGTQQLLFSQAGPANMSAQAKNWLPGPCYRQQRVSTTLSQNNNSNFAWTGATKYHLNGRDSLVNPGVAMATHKDDEERFFPSSGVLMFGKQGAGKDNVDYSSVMLTSEEEIKTTNPVATEQYGVVADNLQQTNGAPIVGTVNSQGALPGMVWQNRDVYLQGPIWAKIPHTDGNFHPSPLMGGFGLKHPPPQILVKNTPVPADPPTTFSQAKLASFITQYSTGQVSVEIEWELQKENSKRWNPEIQYTSNYYKSTNVDFAVNTEGTYSEPRPIGTRYLTRNL

SEQ ID NO: 83 - DNA, 3123 bp, Artificial Sequence
  Description of Artificial Sequence: Synthetic polynucleotide
gaattcgcccttggctgcgtcaactggaccaatgagaactttcccttcaacgattgcgtcgacaagatggtgatctggtgggaggagggcaagatgacggccaaggtcgtggagtccgccaaggccattctcggcggcagcaaggtgcgcgtggaccaaaagtgcaagtcgtccgcccagatcgaccccacccccgtgatcgtcacctccaacaccaacatgtgcgccgtgattgacgggaacagcaccaccttcgagcaccagcagccgttgcaggaccggatgttcaagttcgaactcacccgccgtctggagcacgactttggcaaggtgaccaagcaggaagtcaaagagttcttccgctgggcgcaggatcacgtgaccgaggtggcgcatgagttctacgtcagaaagggcggagccagcaaaagacccgcccccgatgacgcggatataagcgagcccaagcgggcctgcccctcagtcgcggatccatcgacgtcagacgcggaaggagctccggtggactttgccgacaggtaccaaaacaaatgttctcgtcacgcgggcatgctccagatgctgtttccctgcaaaacgtgcgagagaatgaatcagaatttcaacatttgcttcacgcacggggtcagagactgctcagaatgtttccccggtgcatcagaatctcaaccggtcgtcagaaaaaaaacgtatcagaaactgtgtgccattcatcatctgctggggcgggcacccgagattgcttgctcggcctgcgatctggtcaacgtggacctggacgactgtgtttctgagcaataaatgacttaaaccaggtatggctgccgatggttatcttccagattggcttgaggacaacctctctgagggcattcgcgagtggtgggacctgaaacctggagccccgaaacccaaagccaaccagcaaaagcaggacgacggccggggtctggtgcttcctggctacaagtacctcggacccttcaacggactcgacaagggggagcccgtcaacgcggcggacgcagcggccctcgagcacgacaaggcctacgaccagcagctcaaagcgggtgacaatccgtacctgcggtataaccacgccgacgccgagtttcaggagcgtctgcaagaagatacgtcttttgggggcaacctcgggcgagcagtcttccaggccaagaagcgggttctcgaacctctcggtctggttgaggaaggcgctaagacggctcctggaaagaagagaccggtagagccatcacctcagcgttcccccgactcctccacgggcatcggcaagaaaggccaccagcccgcgagaaagagactgaactttgggcagactggcgactcggagtcagtccccgaccctcaaccaatcggagaaccaccagcaggcccctctggtctgggatctggtacaatggctgcaggcggtggcgctccaatggcagacaataacgaaggcgccgacggagtgggtagttcctcaggaaattggcattgcgattccacatggctgggcgacagagtcatcaccaccagcacccgaacctgggccctgcccacctacaacaaccatctctacaagcaaatctccaacgggacatcgggaggaagcactaacgacaacacctactttggctacagcaccccctgggggtattttgacttcaacagattccactgccacttctcaccacgtgactggcagcgactcatcaacaataactggggattccggcccaagagactcaacttcaagctcttcaacatccaggtcaaggaggtcacgcagaatgaaggcaccaagaccatcgccaataaccttaccagcacgattcaggtgtttacggactcggaataccagctcccgtacgtcctcggctctgcgcaccagggctgcctccctccgttcccggcggacgtcttcatgattcctcagtacgggtatctgaccctaaacaatggcagtcaggctgtgggccgttcctccttctactgcctggaatacttcccttctcaaatgctgaggacgggcaacaactttgaattcagctacaccttcgaggacgtgcctttccacagcagctacgcgcacagccagagcctggaccggctgatgaaccctctcatcgaccagtacctgtattacttatccagaactcagtccacaggaggaactcaaggtactcagcaattgttattttctcaagccgggcccgcaaacatgtcggctcaggccaagaactggctacctggaccgtgttaccgtcagcaacgagtttccacgacactgtcgcaaaacaacaacagcaattttgcttggaccggtgccaccaagtatcacctgaatggcagagactccctggttaatcccggcgttgccatggctacccacaaggacgacgaggagcgcttcttcccgtcaagcggagttctaatgtttggcaagcagggggctggaaaagacaatgtggactacagcagcgtgatgctcaccagcgaagaagaaattaaaactactaacccagtggctacagagcagtatggtgtggtggcagacaacctgcagcagaccaacggagctcccattgtgggaactgtcaacagccagggggccttacctggtatggtctggcaaaaccgggacgtgtacctgcagggccccatctgggccaaaattcctcacacggacggcaactttcatccttcgccgctgatgggaggctttggactgaaacacccgcctcctcagatcctggtgaaaaacactcctgttcctgcggatcctccgaccaccttcagccaggccaagctggcttcttttatcacgcagtacagcaccggacaggtcagcgtggaaatcgaatgggagctgcagaaagaaaacagcaagcgctggaacccagagattcagtatacttccaactactacaaatctacaaatgtggactttgctgtcaatactgagggtacttattcagagcctcgccccattggcactcgttatctcacccgtaatctgtaattgcttgttaatcaataaaccggttaattcgtttcagttgaactttggtctctgcgaagggcgaattc

SEQ ID NO: 84 - protein, 738 aa, Artificial Sequence
  Description of Artificial Sequence: Synthetic polypeptide
MAADGYLPDWLEDNLSEGIREWWDLKPGAPKPKANQQKQDDGRGLVLPGYKYLGPFNGLDKGEPVNAADAAALEHDKAYDQQLKAGDNPYLRYNHADAEFQERLQEDTSFGGNLGRAVFQAKKRVLEPLGLVEEGAKTAPGKKRPVEPSPQRSPDSSTGIGKKGHQPARKRLNFGQTGDSESVPDPQPIGEPPAGPSGLGSGTMAAGGGAPMADNNEGADGVGSSSGNWHCDSTWLGDRVITTSTRTWALPTYNNHLYKQISNGTSGGSTNDNTYFGYSTPWGYFDFNRFHCHFSPRDWQRLINNNWGFRPKRLNFKLFNIQVKEVTQNEGTKTIANNLTSTIQVFTDSEYQLPYVLGSAHQGCLPPFPADVFMIPQYGYLTLNNGSQAVGRSSFYCLEYFPSQMLRTGNNFEFSYTFEDVPFHSSYAHSQSLDRLMNPLIDQYLYYLSRTQSTGGTQGTQQLLFSQAGPANMSAQAKNWLPGPCYRQQRVSTTLSQNNNSNFAWTGATKYHLNGRDSLVNPGVAMATHKDDEERFFPSSGVLMFGKQGAGKDNVDYSSVMLTSEEEIKTTNPVATEQYGVVADNLQQTNGAPIVGTVNSQGALPGMVWQNRDVYLQGPIWAKIPHTDGNFHPSPLMGGFGLKHPPPQILVKNTPVPADPPTTFSQAKLASFITQYSTGQVSVEIEWELQKENSKRWNPEIQYTSNYYKSTNVDFAVNTEGTYSEPRPIGTRYLTRNL

SEQ ID NO: 85 - DNA, 3122 bp, Artificial Sequence
  Description of Artificial Sequence: Synthetic polynucleotide
gaattcgccctttctacggctgcgtcaactggaccaatgagaactttcccttcaacgattgcgtcgacaagatggtgatctggtgggaggagggcaagatgacggccaaggtcgtggagtccgccaaggccattctcggcggcagcaaggtgcgtgtggaccaaaagtgcaagtcttccgcccagatcgatcccacccccgtgatcgtcacctccaacaccaacatgtgcgccgtgattgacgggaacagcgccaccttcgagcaccagcagccgttgcaggaccggatgttcaaatttgaactcacccgccgtctggagcatgactttggcaaggtgacgaagcaggaagtcaaagagttcttccgctgggcgcaggatcacgtgaccgaggtggcgcatgagttccacgtcagaaagggtggagccaacaagagacccgcccccgatgacgcggatataagcgagcccaagcgggcctgcccctcagtcgcggatccatcgacgtcagacgcggaaggagctccggtggactttgccgacaggtaccaaaacaaatgttctcgtcacgcgggcatgcttcagatgctgtttccctgcaagacatgcgagagaatgaatcagaatttcaacatttgcttcacgcacgggaccagagactgttcagaatgtttccccggcgtgtcagaatctcaaccggtcgtcagaaagaggacgtatcggaaactctgtgcgattcatcatctgctggggcgggctcccgagattgcttgctcggcctgcgatctggtcaacgtggacctggatgactgtgtttctgagcaataaatgacttaaaccaggtatggctgccgatggttatcttccagattggctcgaggacaacctctctgagggcattcgcgagtggtgggacttgaaacctggagccccgaaacccaaagccaaccagcaaaagcaggacgacggccggggtctggtgcttcctggctacaagtacctcggacccttcaacggactcgacaagggggagcccgtcaacgcggcggacgcagcggccctcgagcacgacaaagcctacgaccagcagctcaaagcgggtgacaatccgtacctgcggtataatcacgccgacgccgagtttcaggagcgtctgcaagaagatacgtcttttgggggcaacctcgggcgagcagtcttccaggccaagaagcgggttctcgaacctctcggtctggttgaggaaggcgctaagacggctcctggaaagaagagactggtagagcagtcgccacaagagccagactcctcctcgggcatcggcaagacaggccagcagcccgctaaaaagagactcaattttggtcagactggcgactcagagtcagtccccgacccacaacctctcggagaacctccagcagccccctcaggtctgggacctaatacaatggcttcaggcggtggcgctccaatggcagacaataacgaaggcgccgacggagtgggtaattcctcgggaaattggcattgcgattccacatggctgggggacagagtcatcaccaccagcacccgaacctgggccctgcccacctacaacaaccacctctacaagcaaatctccaacggcacctcgggaggaagcaccaacgacaacacctattttggctacagcaccccctgggggtattttgacttcaacagattccactgtcacttttcaccacgtgactggcaacgactcatcaacaacaattggggattccggcccaaaagactcaacttcaagctgttcaacatccaggtcaaggaagtcacgacgaacgaaggcaccaagaccatcgccaataatctcaccagcaccgtgcaggtctttacggactcggagtaccagttaccgtacgtgctaggatccgctcaccagggatgtctgcctccgttcccggcggacgtcttcacggttcctcagtacggctatttaactttaaacaatggaagccaagccctgggacgttcctccttctactgtctggagtatttcccatcgcagatgctgagaaccggcaacaactttcagttcagctacaccttcgaggacgtgcctttccacagcagctacgcgcacagccagagcctggacaggctgatgaatcccctcatcgaccagtacctgtactacctggtcagaacgcaaacgactggaactggagggacgcagactctggcattcagccaagcgggtcctagctcaatggccaaccaggctagaaattgggtgcccggaccttgctaccggcagcagcgcgtctccacgacaaccaaccagaacaacaacagcaactttgcctggacgggagctgccaagtttaagctgaacggccgagactctctaatgaatccgggcgtggcaatggcttcccacaaggatgacgacgaccgcttcttcccttcgagcggggtcctgatttttggcaagcaaggagccgggaacgatggagtggattacagccaagtgctgattacagatgaggaagaaatcaaggctaccaaccccgtggccacagaagaatatggagcagtggccatcaacaaccaggccgccaatacgcaggcgcagaccggactcgtgcacaaccagggggtgattcccggcatggtgtggcagaatagagacgtgtacctgcagggtcccatctgggccaaaattcctcacacggacggcaactttcacccgtctcccctgatgggcggctttggactgaagcacccgcctcctcaaattctcatcaagaacacaccggttccagcggacccgccgcttaccttcaaccaggccaagctgaactctttcatcacgcagtacagcaccggacaggtcagcgtggaaatcgagtgggagctgcagaaagaaaacagcaaacgctggaatccagagattcaatacacttccaactactacaaatctacaaatgtggactttgctgtcaacacggaaggagtttatagcgagcctcgccccattggcacccgttacctcacccgcaacctgtaattacatgttaatcaataaaccggttaattcgtttcagttgaactttggtctctgcgaagggcgaattc

SEQ ID NO: 86 - protein, 736 aa, Artificial Sequence
  Description of Artificial Sequence: Synthetic polypeptide
MAADGYLPDWLEDNLSEGIREWWDLKPGAPKPKANQQKQDDGRGLVLPGYKYLGPFNGLDKGEPVNAADAAALEHDKAYDQQLKAGDNPYLRYNHADAEFQERLQEDTSFGGNLGRAVFQAKKRVLEPLGLVEEGAKTAPGKKRLVEQSPQEPDSSSGIGKTGQQPAKKRLNFGQTGDSESVPDPQPLGEPPAAPSGLGPNTMASGGGAPMADNNEGADGVGNSSGNWHCDSTWLGDRVITTSTRTWALPTYNNHLYKQISNGTSGGSTNDNTYFGYSTPWGYFDFNRFHCHFSPRDWQRLINNNWGFRPKRLNFKLFNIQVKEVTTNEGTKTIANNLTSTVQVFTDSEYQLPYVLGSAHQGCLPPFPADVFTVPQYGYLTLNNGSQALGRSSFYCLEYFPSQMLRTGNNFQFSYTFEDVPFHSSYAHSQSLDRLMNPLIDQYLYYLVRTQTTGTGGTQTLAFSQAGPSSMANQARNWVPGPCYRQQRVSTTTNQNNNSNFAWTGAAKFKLNGRDSLMNPGVAMASHKDDDDRFFPSSGVLIFGKQGAGNDGVDYSQVLITDEEEIKATNPVATEEYGAVAINNQAANTQAQTGLVHNQGVIPGMVWQNRDVYLQGPIWAKIPHTDGNFHPSPLMGGFGLKHPPPQILIKNTPVPADPPLTFNQAKLNSFITQYSTGQVSVEIEWELQKENSKRWNPEIQYTSNYYKSTNVDFAVNTEGVYSEPRPIGTRYLTRNL

SEQ ID NO: 87 - DNA, 3117 bp, Artificial Sequence
  Description of Artificial Sequence: Synthetic polynucleotide
gaattcgcccttggctgcgtcaactggaccaatgagaactttcccttcaacgattgcgtcgacaagatggtgatctggtgggaggagggcaagatgacggccaaggtcgtggagtccgccaaggccattctcggcggcagcaaggtgcgtgtggaccaaaagtgcaagtcttccgcccagatcgatcccacccccgtgatcgtcacctccaacaccaacatgtgcgccgtgattgacgggaacagcaccaccttcgagcaccagcagccgttgcaggaccggatgttcaaatttgaactcacccgccgtctggagcatgactttggcaaggtgacgaagcaggaagtcaaagagttcttccgctgggcgcaggatcacgtgaccgaggtggcgcatgagttccacgtcagaaagggtggagccaacaagagacccgcccccgatgacgcggatataagcgagcccaagcgggcctgcccctcagtcgcggatccatcgacgtcagacgcggaaggagctccggtggactttgccgacaggtaccaaaacaaatgttctcgtcacgcgggcatgcttcagatgctgtttccctgcaagacatgcgagagaatgaatcagaatttcaacatttgcttcacgcacgggaccagagactgttcagaatgtttccccggcgtgtcagaatctcaaccggtcgtcagaaagaggacgtatcggaaactctgtgcgattcatcatctgctggggcgggctcccgagattgcttgctcggcctgcgatctggtcaacgtggacctggatgactgtgtttctgagcaataaatgacttaaaccaggtatggctgccgatggttatcttccagattggctcgaggacaacctctctgagggcattcgcgagtggtgggacttgaaacctggagccccgaaacccaaagccaaccagcaaaagcaggacgacggccggggtctggtgcttcctggctacaagtacctcggacccttcaacggactcgacaagggggagcccgtcaacgcggcggacgcagcggccctcgagcacgacaaagcctacgaccagcagctcaaagcgggtgacaatccgtacctgcggtataatcacgccgacgccgagtttcaggagcgtctgcaagaagatacgtcttttgggggcaacctcgggcgagcagtcttccaggccaagaagcgggttctcgaacctctcggtctggttgaggaaggcgctaagacggctcctggaaagaagagaccggtagagcagtcgccacaagagccagactcctcctcgggcatcggcaagacaggccagcagcccgctaaaaagagactcaattttggtcagactggcgactcagagtcagtccccgacccacaacctctcggagaacctccagcagccccctcaggtctgggacctaatacaatggcttcaggcggtggcgctccaatggcagacaataacgaaggcgccgacggagtgggtaattcctcgggaaattggcattgcgattccacatggctgggggacagagtcatcaccaccagcacccgaacctgggccctgcccacctacaacaaccacctctacaagcaaatctccaacggcacctcgggaggaagcaccaacgacaacacctattttggctacagcaccccctgggggtattttgacttcaacagattccactgtcacttttcaccacgtgactggcaacgactcatcaacaacaattggggattccggcccaaaagactcaacttcaagctgttcaacatccaggtcaaggaagtcacgacgaacgaaggcaccaagaccatcgccaataatctcaccagcaccgtgcgggtctttacggactcggagtaccagttaccgtacgtgctaggatccgctcaccagggatgtctgcctccgttcccggcggacgtcttcatggttcctcagtacggctatttaactttaaacaatggaagccaagccctgggacgttcctccttctactgtctggagtatttcccatcgcagatgctgagaaccggcaacaactttcagttcagctacaccttcgaggacgtgcctttccacagcagctacgcgcacagccagagcctggacaggctgatgaatcccctcatcgaccagtacctgtactacctggtcagaacgcaaacgactggaactggagggacgcagactctggcattcagccaagcgggtcctagctcaatggccaaccaggctagaaattgggtgcccggaccttgctaccggcagcagcgcgtctccacgacaaccaaccagagcaacaacagcaactttgcctggacgggagctgccaagtttaagctgaacggccgagactctctaatgaatccgggcgtggcaatggcttcccacaaggatgacgacgaccgcttcttcccttcgagcggggtcctgatttttggcaagcaaggagccgggaacgatggagtggattacagccaagtgctgattacagatgaggaagaaatcaaggctaccaaccccgtggccacagaagaatatggagcagtggccatcaacaaccaggccgccaatacgcaggcgcagaccggactcgtgcacaaccagggggtgattcccggcatggtgtggcagaatagagacgtgtacctgcagggtcccatctgggccaaaattcctcacacggacggcaactttcacccgtctcccctgatgggcggctttggactgaagcacccgcctcctcaaattctcatcaagaacacaccggttccagcggacccgccgcttaccttcaaccaggccaagctgaactctttcatcacgcagtacagcaccggacaggtcagcgtggaaatcgagtgggagctgcagaaagaaaacagcaaacgctggaatccagagattcaatacacttccaactactacaaatctacaaatgtggactttgctgtcaacacggaaggagtttatagcgagcctcgccccattggcacccgttacctcacccgcaacctgtaattacatgttaatcaataaaccggttaattcgtttcagttgaactttggtctctgcgaagggcgaattc

SEQ ID NO: 88 - protein, 736 aa, Artificial Sequence
  Description of Artificial Sequence: Synthetic polypeptide
MAADGYLPDWLEDNLSEGIREWWDLKPGAPKPKANQQKQDDGRGLVLPGYKYLGPFNGLDKGEPVNAADAAALEHDKAYDQQLKAGDNPYLRYNHADAEFQERLQEDTSFGGNLGRAVFQAKKRVLEPLGLVEEGAKTAPGKKRPVEQSPQEPDSSSGIGKTGQQPAKKRLNFGQTGDSESVPDPQPLGEPPAAPSGLGPNTMASGGGAPMADNNEGADGVGNSSGNWHCDSTWLGDRVITTSTRTWALPTYNNHLYKQISNGTSGGSTNDNTYFGYSTPWGYFDFNRFHCHFSPRDWQRLINNNWGFRPKRLNFKLFNIQVKEVTTNEGTKTIANNLTSTVRVFTDSEYQLPYVLGSAHQGCLPPFPADVFMVPQYGYLTLNNGSQALGRSSFYCLEYFPSQMLRTGNNFQFSYTFEDVPFHSSYAHSQSLDRLMNPLIDQYLYYLVRTQTTGTGGTQTLAFSQAGPSSMANQARNWVPGPCYRQQRVSTTTNQSNNSNFAWTGAAKFKLNGRDSLMNPGVAMASHKDDDDRFFPSSGVLIFGKQGAGNDGVDYSQVLITDEEEIKATNPVATEEYGAVAINNQAANTQAQTGLVHNQGVIPGMVWQNRDVYLQGPIWAKIPHTDGNFHPSPLMGGFGLKHPPPQILIKNTPVPADPPLTFNQAKLNSFITQYSTGQVSVEIEWELQKENSKRWNPEIQYTSNYYKSTNVDFAVNTEGVYSEPRPIGTRYLTRNL

SEQ ID NO: 89 - DNA, 3121 bp, Artificial Sequence
  Description of Artificial Sequence: Synthetic polynucleotide
gaattcgcccttctacggctgcgtcaactggaccaatgagaactttcccttcaacgattgcgtcgacaagatggtgatctggtgggaggagggcaagatgacggccaaggtcgtggagtccgccaaggccattctcggcggcagcaaggtgcgtgtggaccaaaagtgcaagtcttccgcccagatcgatcccacccccgtgatcgtcacctccaacaccaacatgtgcgccgtgattgacgggaacagcaccaccttcgagcaccagcagccgttgcaggaccggatgttcaaatttgaactcacccgccgtctggagcatgactttggcaaggtgacgaagcaggaagtcaaagagttcttccgctgggcgcaggatcacgtgaccgaggtggcgcatgagttccacgtcagaaagggtggcgccaacaagagacccgcccccgatgacgcggatataagcgagcccaagcgggcctgcccctcagtcgcggatccatcgacgtcagacgcggaaggagctccggtggactttgccgacaggtaccaaaacaaatgttctcgtcacgcgggcatgcttcagatgctgtttccctgcaagacatgcgagagaatgaatcagaatttcaacatttgcttcacgcacgggaccagagactgttcagaatgtttccccggcgtgtcagaatctcaaccggtcgtcagaaagaggacgtatcggaaactctgtgcgattcatcatctgctggggcgggctcccgagattgcttgctcggcctgcgatctggtcaacgtggacctggatgactgtgtttctgagcaataaatgacttaaaccaggtatggctgccgatggttatcttccagattggctcgaggacaacctctctgagggcattcgcgagtggtgggacttgaaacctggagccccgaaacccaaagccaaccagcaaaagcaggacgacggccggggtctggtgcttcctggctacaagtacctcggacccttcaacggactcgacaagggggagcccgtcaacgcggcggacgcagcggccctcgagcacgacaaagcctacgaccagcagctcaaagcgggtgacaatccgtacctgcggtataatcacgccgacgccgagtttcaggagcgtctgcaagaagatacgtcctttgggggcaacctcgggcgagcagtcttccaggccaagaagcgggttctcgaacctctcggtctggttgaggaaggcgctaagacggctcctggaaagaagagaccggtagagcagtcgccacaagagccagactcctcctcgggcatcggcaagacaggccagcagcccgctaaaaagagactcaattttggtcagactggcgactcagagtcagtccccgacccacaacctctcggagaacctccagcagccccctcaggtctgggacctaatacaatggcttcaggcggtggcgctccaatggcagacaataacgaaggcgccgacggagtgggtaattcctcgggaaattggcattgcgattccacatggctgggggacagagtcatcaccaccagcacccgaacctgggccctgcccacctacaacaaccacctctacaagcaaatctccaacggcacctcgggaggaagcaccaacgacaacacctattttggctacagcaccccctgggggtattttgacttcaacagattccactgtcacttttcaccacgtgactggcaacgactcatcaacaacaattggggattccggcccaaaagactcaacttcaagctgttcaacatccaggtcaaggaagtcacgacgaacgaaggcaccaagaccatcgccaataatctcaccagcaccgtgcaggtctttacggacttggagtaccagttaccgtacgtgctaggatccgctcaccagggatgtctgcctccgttcccggcggacgtcttcatggttcctcagtacggctatttaactttaaacaatggaagccaagccctgggacgttcctccttctactgtctggagtatttcccatcgcagatgccgagaaccggcaacaactttcagttcagctacaccttcgaggacgtgcctttccacagcagctacgcgcacagccagagcctggacaggctgatgaatcccctcatcgaccagtacctgtactacctggtcagaacgcaaacgactggaactggagggacgcagactctggcattcagccaagcgggtcctagctcaatggccaaccaggctagaaattgggtgcccggaccttgctaccggcagcagcgcgtctccacgacaaccaaccagaacaacaacagcaactttgcctggacgggagctgccaagtttaagctgaacggccgagactctctaatgaatccgggcgtggcaatggcttcccacaaggatgacgacgaccgcttcttcccttcgagcggggtcctgatttttggcaagcaaggagccgggaacgatggagtggattacagccaagtgctgattacagatgaggaagaaatcaaggctaccaaccccgtggccacagaagaatatggagcagtggccatcaacaaccaggccgccaatacgcaggcgcagaccggactcgtgcacaaccagggggtgattcccggcatggtgtggcagaatagagacgtgtacctgcagggtcccatctgggccaaaattcctcacacggacggcaactttcacccgtctcccctgatgggcggctttggactgaagcacccgcctcctcaaattctcatcaagaacacaccggttccagcggacccgccgcttaccttcaaccaggccaagctgaactctttcatcacgcagtacagcaccggacaggtcagcgtggaaatcgagtgggagctgcagaaagaaaacagcaaacgctggaatccagagattcaatacacttccaactactacaaatctacaaatgtggactttgctgtcaacacggaaggagtttatagcgagcctcgccccattggcacccgttacctcacccgcaacctgtaattacatgttaatcaataaaccggttaattcgtttcagttgaactttggtctctgcgaagggcgaattc

SEQ ID NO: 90 - protein, 736 aa, Artificial Sequence
  Description of Artificial Sequence: Synthetic polypeptide
MAADGYLPDWLEDNLSEGIREWWDLKPGAPKPKANQQKQDDGRGLVLPGYKYLGPFNGLDKGEPVNAADAAALEHDKAYDQQLKAGDNPYLRYNHADAEFQERLQEDTSFGGNLGRAVFQAKKRVLEPLGLVEEGAKTAPGKKRPVEQSPQEPDSSSGIGKTGQQPAKKRLNFGQTGDSESVPDPQPLGEPPAAPSGLGPNTMASGGGAPMADNNEGADGVGNSSGNWHCDSTWLGDRVITTSTRTWALPTYNNHLYKQISNGTSGGSTNDNTYFGYSTPWGYFDFNRFHCHFSPRDWQRLINNNWGFRPKRLNFKLFNIQVKEVTTNEGTKTIANNLTSTVQVFTDLEYQLPYVLGSAHQGCLPPFPADVFMVPQYGYLTLNNGSQALGRSSFYCLEYFPSQMPRTGNNFQFSYTFEDVPFHSSYAHSQSLDRLMNPLIDQYLYYLVRTQTTGTGGTQTLAFSQAGPSSMANQARNWVPGPCYRQQRVSTTTNQNNNSNFAWTGAAKFKLNGRDSLMNPGVAMASHKDDDDRFFPSSGVLIFGKQGAGNDGVDYSQVLITDEEEIKATNPVATEEYGAVAINNQAANTQAQTGLVHNQGVIPGMVWQNRDVYLQGPIWAKIPHTDGNFHPSPLMGGFGLKHPPPQILIKNTPVPADPPLTFNQAKLNSFITQYSTGQVSVEIEWELQKENSKRWNPEIQYTSNYYKSTNVDFAVNTEGVYSEPRPIGTRYLTRNL

SEQ ID NO: 91 - DNA, 3122 bp, Artificial Sequence
  Description of Artificial Sequence: Synthetic polynucleotide
gaattcgccctttctacggctgcgtcaactggaccaatgagaactttcccttcaacgattgcgtcgacaagatggtgatctggtgggaggagggcaagatgacggccaaggtcgtggagtccgccaaggccattctcggcggcagcaaggtgcgtgtggaccaaaagtgcaagtcttccgcccagatcgatcccacccccgtgatcgtcacctccaacaccaacatgtgcgccgtgattgacgggaacagcaccaccttcgagcaccagcagccgttgcaggaccggatgttcaaatttgaactcacccgccgtctggagcatgactttggcaaggtgacgaagcaggaagtcaaagggttcttccgctgggcgcaggatcacgtgaccgaggtggcgcatgagttccacgtgcgagcccaagcgggcctgcccctcagtcgcggatccatcgacgtcagaccagaaagggtggagccaacaagagacccgcccccgatgacgcggatataagcggaaggagctccggtggactttgccgacaggtaccaaaacaaatgttctcgtcacgcgggcatgcttcagatgctgtttccctgcaagacatgcgagagaatgaatcagaatttcaacatttgcttcacgcacgggaccagagactgttcagaatgtttccccggcgtgtcagaatctcaaccggtcgtcagaaagaggacgtatcggaaactctgtgcgattcatcatctgctggggcgggctcccgagattgcttgctcggcctgcgatctggtcaacgtggacctggatgactgtgtttctgagcaataaatgacttaaaccaggtatggctgccgatggttatcttccagattggctcgaggacaacctctctgagggcattcgcgagtggtgggacttgaaacctggagccccgaaacccaaagccaaccagcaaaagcaggacgacggccggggtctggtgcttcctggctacaagtacctcggacccttcaacggactcgacaagggggagcccgtcaacgcggcggacgcagcggccctcgagcacgacaaagcctacgaccagcagctcaaagcgggtgacaatccgtacctgcggtataatcacgccgacgccgagtttcaggagcgtctgcaagaagatacgtcttttgggggcaacctcgggcgagcagtcttccaggccaagaagcgggttctcgaacctctcggtctggttgaggaaggcgctaagacggctcctggaaagaagagaccggtagagcagtcgccacaagagccagactcctcctcgggcatcggcaagacaggccagcagcccgctaaaaagagactcaattttggtcagactggcgactcagagtcagtccccgacccacaacctctcggagaacctccagcagccccctcaggtctgggacctaatacaatggcttcaggcggtggcgctccaatggcagacaataacgaaggcgccgacggagtgggtaattcctcgggaaattggcattgcgattccacatggctgggggacagagtcatcaccaccagcacccgaacctgggccctgcccacctacaacaaccacctctacaagcaaatctccaacggcacctcgggaggaagcaccaacgacaacacctattttggctacagcaccccctgggggtattttgacttcaacagattccactgtcacttttcaccacgtgactggcaacgactcatcaacaacaattggggattccggcccaaaagactcaacttcaagctgttcaacatccaggtcaaggaagtcacgacgaacgaaggcaccaagaccatcgccaataatctcaccagcaccgtgcaggtctttacggactcggagtaccagttaccgtacgtgctaggatccgctcaccagggatgtctgcctccgttcccggcggacgtcttcatggttcctcagtacggctatttaactttaaacaatggaagccaagccctgggacgttcctccttctactgtctggagtatttcccatcgcagatgctgagaaccggcaacaactttcagttcagctacaccttcgaggacgtgcctttccacagcagctacgcgcacagccagagcctggacaggctgatgaatcccctcatcgaccagtacctgtactacctggtcagaacgcaaacgactggaactggagggacgcagactctggcattcagccaagcgggtcctagctcaatggccaaccaggctagaaattgggtgcccggaccttgctaccggcagcagcgcgtctccacgacaaccaaccagaacaacaacagcaactttgcctggacgggagctgccaagtttaagctgaacggccgagactctctaatgaatccgggcgtggcaatggcttcccacaaggatgacgacgaccgcttcttcccttcgagcggggtcctgatttttggcaagcaaggagccgggaacgatggagtggattacagccaagtgctgattacagatgaggaagaaatcaaggctaccaaccccgtggccacagaagaatatggagcagtggccatcaacaaccaggccgccaatacgcaggcgcagaccggactcgtgcacaaccagggggtgattcccggcatggtgtggcagaatagagacgtgtacctgcagggtcccatctgggccaaaattcctcacacggacggcaactttcacccgtctcccctgatgggcggctttggactgaagcacccgcctcctcaaattctcatcaagaacacaccggttccagcggacccgccgcttaccttcaaccaggccaagctgaactctttcatcacgcagtacagcaccggacaggtcagcgtggaaatcgagtgggagctgcagaaagaaaacagcaaacgctggaatccagagattcaatacacttccaactactacaaatctacaaatgtggactttgctgtcaacacggagggggtttatagcgagcctcgccccattggcacccgttacctcacccgcaacctgtaattacatgttaatcaataaaccggttaattcgtttcagttgaactttggtctctgcgaagggcgaattc

SEQ ID NO: 92 - protein, 736 aa, Artificial Sequence
  Description of Artificial Sequence: Synthetic polypeptide
MAADGYLPDWLEDNLSEGIREWWDLKPGAPKPKANQQKQDDGRGLVLPGYKYLGPFNGLDKGEPVNAADAAALEHDKAYDQQLKAGDNPYLRYNHADAEFQERLQEDTSFGGNLGRAVFQAKKRVLEPLGLVEEGAKTAPGKKRPVEQSPQEPDSSSGIGKTGQQPAKKRLNFGQTGDSESVPDPQPLGEPPAAPSGLGPNTMASGGGAPMADNNEGADGVGNSSGNWHCDSTWLGDRVITTSTRTWALPTYNNHLYKQISNGTSGGSTNDNTYFGYSTPWGYFDFNRFHCHFSPRDWQRLINNNWGFRPKRLNFKLFNIQVKEVTTNEGTKTIANNLTSTVQVFTDSEYQLPYVLGSAHQGCLPPFPADVFMVPQYGYLTLNNGSQALGRSSFYCLEYFPSQMLRTGNNFQFSYTFEDVPFHSSYAHSQSLDRLMNPLIDQYLYYLVRTQTTGTGGTQTLAFSQAGPSSMANQARNWVPGPCYRQQRVSTTTNQNNNSNFAWTGAAKFKLNGRDSLMNPGVAMASHKDDDDRFFPSSGVLIFGKQGAGNDGVDYSQVLITDEEEIKATNPVATEEYGAVAINNQAANTQAQTGLVHNQGVIPGMVWQNRDVYLQGPIWAKIPHTDGNFHPSPLMGGFGLKHPPPQILIKNTPVPADPPLTFNQAKLNSFITQYSTGQVSVEIEWELQKENSKRWNPEIQYTSNYYKSTNVDFAVNTEGVYSEPRPIGTRYLTRNL

SEQ ID NO: 93 - DNA, 2370 bp, Artificial Sequence
  Description of Artificial Sequence: Synthetic polynucleotide
gaattcgccctttctacggctgcgtcaactggaccaatgagaactttcccttcaacgattgcgtcgacaagatggtgatctggtgggaggagggcaagatgacggccaaggtcgtggagtccgccaaggccattctcggcggcagcaaggtgcgcgtggaccaaaagtgcaagtcgtccgcccagatcgaccccacccccgtgatcgtcacctccaacaccaacatgtgcgccgtgattgacgggaacagcaccaccttcgagcaccagcagccgttgcaggaccggatgttcaagttcgaactcacccgccgtctggagcacgactttggcaaggtgaccaagcaggaagtcaaagagttcttccgctgggcgcaggatcacgtgaccgaggtggcgcatgagttctacgtcagaaagggcggagccagcaaaagacccgcccccgatgacgcggatataagcgagcccaagcgggcctgcccctcagtcgcggatccatcgacgtcagacgcggaaggagctccggtggactttgccgacaggtaccaaaacaaatgttctcgtcacgcgggcatgcttcagacgctgtttccctgcaaaacgtgcgagagaatgaatcagaatttcaacatttgcttcacgcacggggtcagagactgctcagaatgtttccccggtgcatcagaatctcaaccggtcgtcagaaaaaaaacgtatcagaaactgtgtgccattcatcatctgctggggcgggcacccgagattgcttgctcggcctgcgatctggtcaacgtggacctggacgactgtgtttctgagcaataaatgacttaaaccaggtatggctgccgatggttatcttccagattggcttgaggacaacctctctgagggcattcgcgagtggtgggacctgaaacctggagccccgaaacccaaagccaaccagcaaaagcaggacgacggccggggtctggtgcttcctggctacaagtacctcggacccttcaacggactcgacaagggggagcccgtcaacgcggcggacgcagcggccctcgagcacgacaaggcctacgaccagcagctcaaagcgggtgacaatccgtacctgcggtataaccacgccgacgccgagtttcaggagcgtctgcaagaagatacgtcttttgggggcaacctcgggcgagcagtcttccaggccaagaagcgggttctcgaacctctcggtctggttgaggaaggcgctaagacggctcctggaaagaagagaccggtagagccatcacctcagcgttcccccgactcctccacgggcatcggcaagaaaggccaccagcccgcgagaaagagactgaactttgggcagactggcgactcggagtcagtccccgaccctcaaccaatcggagaaccaccagcaggcccctctggtctgggatctggtacaatggctgcaggcggtggcgctccaatggcagacaataacgaaggcgccgacggagtgggtagttcctcaggaaattggcattgcgattccacatggctgggcgacagagtcatcaccaccagcacccgaacctgggccctgcccacctacaacaaccatctctacaagcaaatctccaacgggacatcgggaggaagcactaacgacaacacctactttggctacagcaccccctgggggtattttgacttcaacagattccactgccacttctcaccacgtgactggcagcgactcatcaacaataactggggattccggcccaagagactcaacttcaagctcttcaacatccaggtcaaggaggtcacgcagaatgaaggcaccaagaccatcgccaataaccttaccagcacgattcaggtgtttacggactcggaataccagctcccgtacgtcctcggctctgcgcaccagggctgcctccctccgttcccggcggacgtcttcatgattcctcagtacgggtatctgaccctaaacaatggcagtcaggctgtgggccgttcctccttctactgcctggaatacttcccttctcaaatgctgaggacgggcaacaactttgaattcagctacaccttcgaggacgtgcctttccacagcagctacgcgcacagccagagcctggaccggctgatgaaccctctcatcgaccagtacctgtattacttatccagaactcagtccacaggaggaactcaaggtactcagcaattgttattttctcaagccgggcccgcaaacatgtyggctcaggccaagaactggctacctggaccgtgttaccgtcagcaacgagtttccacgacactgtcgcaaaacaacaacagcaattttgctggaccggtgccacca

SEQ ID NO: 94 - protein, 738 aa, Artificial Sequence; identical to SEQ ID NO: 84
  Description of Artificial Sequence: Synthetic polypeptide

SEQ ID NO: 95 - DNA, 2205 bp, Artificial Sequence
  Description of Artificial Sequence: Synthetic polynucleotide
atgactgacggttaccttccagattggctagaggacaacctctctgaaggcgttcgagagtggtgggcgctgcaacctggagcccctaaacccaaggcaaatcaacaacatcaggacaacgctcggggtcttgtgcttccgggttacaaatacctcggacccggcaacggactcgacaagggggaacccgtcaacgcagcggacgcggcagccctcgagcacgacaaggcctacgaccagcagctcaaggccggtgacaacccctacctcaagtacaaccacgccgacgcggagttccagcagcggcttcagggcgacacatcgtttgggggcaacctcggcagagcagtcttccaggccaaaaagagggttcttgaacctcttggtctggttgagcaagcgggtgagacggctcctggaaagaagagaccgttgattgaatccccccagcagcccgactcctccacgggtatcggcaaaaaaggcaagcagccggctaaaaagaagctcgttttcgaagacgaaactggagcaggcgacggaccccctgagggatcaacttccggagccatgtctgatgacagtgagatgcgtgcagcagctggcggagctgcagtcgagggcggacaaggtgccgatggagtgggtaatgcctcgggtgattggcattgcgattccacctggtctgagggccacgtcacgaccaccagcaccagaacctgggtcttgcccacctacaacaaccacctctacaagcgactcggagagagcctgcagtccaacacctacaacggattctccaccccctggggatactttgacttcaaccgcttccactgccacttctcaccacgtgactggcagcgactcatcaacaacaactggggcatgcgacccaaagccatgcgggtcaaaatcttcaacatccaggtcaaggaggtcacgacgtcgaacggcgagacaacggtggctaataaccttaccagcacggttcagatctttgcggactcgtcgtacgaactgccgtacgtgatggatgcgggtcaagagggcagcctgcctccttttcccaacgacgtctttatggtgccccagtacggctactgtggactggtgaccggcaacacttcgcagcaacagactgacagaaatgccttctactgcctggagtactttccttcgcagatgctgcggactggcaacaactttgaaattacgtacagttttgagaaggtgcctttccactcgatgtacgcgcacagccagagcctggaccggctgatgaaccctctcatcgaccagtacctgtggggactgcaatcgaccaccaccggaaccaccctgaatgccgggactgccaccaccaactttaccaagctgcggcctaccaacttttccaactttaaaaagaactggctgcccgggccttcaatcaagcagcagggcttctcaaagactgccaatcaaaactacaagatccctgccaccgggtcagacagtctcatcaaatacgagacgcacagcactctggacggaagatggagtgccctgacccccggacctccaatggccacggctggacctgcggacagcaagttcagcaacagccagctcatctttgcggggcctaaacagaacggcaacacggccaccgtacccgggactctgatcttcacctctgaggaggagctggcagccaccaacgccaccgatacggacatgtggggcaacctacctggcggtgaccagagcaacagcaacctgccgaccgtggacagactgacagccttgggagccgtgcctggaatggtctggcaaaacagagacatttactaccagggtcccatttgggccaagattcctcataccgatggacactttcacccctcaccgctgattggtgggtttgggctgaaacacccgcctcctcaaatttttatcaagaacaccccggtacctgcgaatcctgcaacgaccttcagctctactccggtaaactccttcattactcagtacagcactggccaggtgtcggtgcagattgactgggagatccagaaggagcggtccaaacgctggaaccccgaggtccagtttacctccaactacggacagcaaaactctctgttgtgggctcccgatgcggctgggaaatacactgagcctagggctatcggtacccgctacctcacccaccacctgtaa

SEQ ID NO: 96 - protein, 734 aa, Artificial Sequence; identical to SEQ ID NO: 68
  Description of Artificial Sequence: Synthetic polypeptide

SEQ ID NO: 97 - DNA, 3128 bp, Artificial Sequence
  Description of Artificial Sequence: Synthetic polynucleotide
gaattcgccctttctacggctgcgtcaactggaccaatgagaactttcccttcaacgattgcgtcgacaagatgttgatctggtgggaggagggcaagatgacggccaaggtcgtggagtccgccaaggccattctcggcggcagcaaagtgcgcgtggaccaaaagtgcaagccgtccgcccagatcgaccccacccccgtgatcgtcacctccaacaccaacatgtgcgccgtgattgacgggaacagcaccaccttcgagcaccagcagccgttgcgggaccggatgttcaagtttgaactcacccgccgtctggagcacgactttggcaaggtgacaaagcaggaagtcagagagttcttccgctgggcgcaggatcacgtgaccgaggtggcgcacgagttctacgtcagaaagggtggagccaacaagagacccgcccccgatgacgcggataaaagcgagcccaagcgggcctgcccctcagtcgcggatccatcgacgtcagacgcggaaggagctccggtggactttgccgacaggtaccaaaacaaatgttctcgtcacgcgggcatgcttcagatgctgtttccctgcaaaacatgcgagagaatgaatcagaatttcaacatttgcttcacgcacgggaccagagactgttcagaatgtttccccggcgtgtcagaatctcaaccggtcgtcagaaaaaagacgtatcggaaactctgtgcgattcatcatctgctggggcgggcacccgagattgcttgctcggcctgcgatctggtcaacgtggacctagatgactgtgtttctgagcaataaatgacttaaaccaggtatggctgccgatggttatcttccagattggctcgaggacaacctctctgagggcattcgcgagtggtgggacttgaaacctggagccccgaaacccaaagccaaccagcaaaagcaggacgacggccggggtctggtgcttcctggctacaagtacctcggacccttcaacggactcgacaagggggagcccgtcaacgcggcggacgcagcggccctcgagcacgacaaggcctacgaccagcagctcaaagcgggtgacaatccgtacctgcggtataaccacgccgacgccgagtttcaggagcgtctgcaagaagatacgtcttttgggggcaacctcgggcgagcagtcttccaggccaagaagcgggttctcgaacctctcggtctggttgaggaaggcgctaagacggctcctggaaagaagagaccggtagagccatcaccccagcgttctccagactcctctacgggcatcggcaagaaaggccagcagcccgcgaaaaagagactcaactttgggcagactggcgactcagagtcagtgcccgaccctcaaccaatcggagaaccccccgcaggcccctctggtctgggatctggtacaatggctgcaggcggtggcgctccaatggcagacaataacgaaggcgccgacggagtgggtagttcctcaggaaattggcattgcgattccacatggctgggcgacagagtcatcaccaccagcacccgaacctgggccctccccacctacaacaaccacctctacaagcaaatctccaacgggacttcgggaggaagcaccaacgacaacacctacttcggctacagcaccccctgggggtattttgactttaacagattccactgccacttctcaccacgtgactggcagcgactcatcaacaacaactggggattccggcccaagagactcaacttcaagctcttcaacatccaggtcaaggaggtcacgcagaatgaaggcaccaagaccatcgccaataaccttaccagcacgattcaggtctttacggactcggaataccagctcccgtacgtcctcggctctgcgcaccagggctgcctgcctccgttcccggcggacgtcttcatgattcctcagtacgggtacctgactctgaacaatggcagtcaggccgtgggccgttcctccttctactgcctggagtactttccttctcaaatgctgagaacgggcaacaactttgagttcagctaccagtttgaggacgtgccttttcacagcagctacgcgcacagccaaagcctggaccggctgatgaaccccctcatcgaccagtacctgtactacctgtctcggactcagtccacgggaggtaccgcaggaactcagcagttgctattttctcaggccgggcctaataacatgtcggctcaggccaaaaactggctacccgggccctgctaccggcagcaacgcgtctccacgacactgtcgcaaaataacaacagcaactgtaaatcccggtgtcgctatggcaacccacaaggacgacgaagagcgattttgcctggaccggtgccaccaagtatcatctgaatggcagagactctctgttttccgtccagcggagtcttaatgtttgggaaacagggagctggaaaagacaacgtggactatagcagcgttatgctaaccagtgaggaagaaattaaaaccaccaacccagtggccacggaacagtacggcgtggtggccgataacctgcaacagcaaaacgccgctcctattgtaggggccgtcaacagtcaaggagccttacctggcatggtctggcagaaccgggacgtgtacctgcagggtcctatctgggccaagattcctcacacggacggaaactttcatccctcgccgctgatgggaggctttggactgaaacacccgcctcctcagatcctgattaagaatacacctgttcccgcggatcctccaactaccttcagtcaagctaagctggcgtcgttcatcacgcagtacagcaccggacaggtcagcgtggaaattgaatgggagctgcagaaagaaaacagcaaacgctggaacccagagattcaatacacttccaactactacaaatctacaaatgtggacttcgctgttaacacagatggcacttattctgagcctcgccccattggcacccgttacctcacccgtaatctgtaattgctcgttaatcaataaaccggttgattcgtttcagttgaactttggtctctgcgaagggcgaattc

SEQ ID NO: 98 - protein, 738 aa, Artificial Sequence; identical to SEQ ID NO: 18
  Description of Artificial Sequence: Synthetic polypeptide

SEQ ID NO: 99 - DNA, 3128 bp, Artificial Sequence
  Description of Artificial Sequence: Synthetic polynucleotide
gaattcgccctttctacggctgcgtcaactggaccaatgagaactttcccttcaacgattgcgtcgacaagatggtgatctggtgggaggagggcaagatgacggccaaggtcgtggagtccgccaaggccattctcggcggcagcaaagtgcgcgtggaccaaaagtgcaagtcgtccgcccagatcgaccccacccccgtgatcgtcacctccaacaccaacatgtgcgccgtgattgacgggaacagcaccaccttcgagcaccagcagccgttgcaggaccggatgttcaagtttgaactcacccgccgtctggagcacgactttggcaaggtgacaaagcaggaagtcagagagttcttccgctgggcgcaggatcacgtgaccgaggtggcgcacgagttctacgtcagaaagggtggagccaacaagagacccgcccccgatgacgcggataaaagcgagcccaagcgggcctgcccctcagtcgcggatccatcgacgtcagacgcggaaggagctccggtggactttgccgacaggtaccaaaacaaatgttctcgtcacgcgggcatgcttcagatgctgtttccctgcaaaacatgcgagagaatgaatcagaatttcaacatttgcttcacgcacgggaccagagactgttcagaatgtttccccggcgtgtcagaatctcaaccggttgtcagaaaaaagacgtatcggaaactctgtgcgattcatcatctgctggggcgggcacccgagattgcttgctcggcctgcgatctggtcaacgtggacctagatgactgtgtttctgagcaataaatgacttaaaccaggtatggctgccgatggttatcttccagattggctcgaggacaacctctctgagggcattcgcgagtggtgggacttgaaacctggagccccgaaacccaaagccaaccagcaaaagcaggacgacggccggggtctggtgcttcctggctacaagtacctcggacccttcaacggactcgacaagggggagcccgtcaacgcggcggacgcagcggccctcgagcacgacaaggcctacgaccagcagctcaaagcgggtgacaatccgtacctgcggtataaccacgccgacgccgagtttcaggagcgtctgcaagaagatacgtcttttgggggcaacctcgggcgagcagtcttccaggccaagaagcgggttctcgaacctctcggtctggttgaggaaggcgctaagacggctcctggaaagaagagaccggtagagccatcaccccagcgttctccagactcctctacgggcatcggcaagaaaggccagcagcccgcgaaaaagagactcaactttgggcagactggcgactcagagtcagtgcccgaccctcaaccaatcggagaaccccccgcaggcccctctggtctgggatctggtacaatggctgcaggcggtggcgctccaatggcagacaataacgaaggcgccgacggagtgggtagttcctcaggaaattggcattgcgattccacatggctgggcgacagagtcatcaccaccagcacccgaacctgggccctccccacctacaacaaccacctctacaagcaaatctccaacgggacttcgggaggaagcaccaacgacaacacctacttcggctacagcaccccctgggggtattttgactttaacagattccactgccacttctcaccacgtgactggcagcgactcatcaacaacaactggggattccggcccaagagacccaacttcaagctcttcaacatccaggtcaaggaggtcacgcagaatgaaggcaccaagaccatcgccaataaccttaccagcacgattcaggtctttacggactcggaataccagctcccgtacgtcctcggctctgcgcaccagggctgcctgcctccgttcccggcggacgtcttcatgattcctcagtacgggtacctgactctgaacaatggcagtcaggccgtgggccgttcctccttctactgcctggagtactttccttctcaaatgctgagaacgggcaacaactttgagttcagctaccagtttgaggacgtgccttttcacagcagctacgcgcacagccaaagcctggaccggctgatgaaccccctcatcgaccagtacctgtactacctgtctcggactcagtccacgggaggtaccgcaggaactcagcagttgctattttctcaggccgggcctaataacatgtcggctcaggccaaaaactggctacccgggccctgctaccggcagcaacgcgtctccacgacactgtcgcaaaataacaacagcaactttgcctggaccggtgccaccaagtatcatctgaatggcagagactctctggtaaatcccggtgtcgctatggcaacccacaaggacgacgaagagcgattttttccgtccagcggagtcttaatgtttgggaaacagggagctggaaaagacaacgtggactatagcagcgttatgctaaccagtgaggaagaaattaaaaccaccaacccagtggccacagaacagtacggcgtggtggccgataacctgcaacagcaaaacgccgctcctattgtaggggccgtcaacagtcaaggagccttacctggcatggtctggcagaaccgggacgtgtacctgcagggtcctatctgggccaagattcctcacacggacggaaactttcatccctcgccgctgatgggaggctttggactgaaacacccgcctcctcagatcctgattaagaatacacctgttcccgcggatcctccaactaccttcagtcaagctaagctggcgtcgttcatcacgcagtacagcaccggacaggtcagcgtggaaattgaatgggagctgcagaaagaaaacagcaaacgctggaacccagagattcaatacacttccaactactacaaatctacaaatgtggactttgctgttaacacagatggcacttattctgagcctcgccccattggcacccgttacctcacccgtaatctgtaattgcttgttaatcaataaaccggttgattcgtttcagttgaactttggtctctgcgaagggcgaattc

SEQ ID NO: 100 - protein, 738 aa, Artificial Sequence
  Description of Artificial Sequence: Synthetic polypeptide
MAADGYLPDWLEDNLSEGIREWWDLKPGAPKPKANQQKQDDGRGLVLPGYKYLGPFNGLDKGEPVNAADAAALEHDKAYDQQLKAGDNPYLRYNHADAEFQERLQEDTSFGGNLGRAVFQAKKRVLEPLGLVEEGAKTAPGKKRPVEPSPQRSPDSSTGIGKKGQQPAKKRLNFGQTGDSESVPDPQPIGEPPAGPSGLGSGTMAAGGGAPMADNNEGADGVGSSSGNWHCDSTWLGDRVITTSTRTWALPTYNNHLYKQISNGTSGGSTNDNTYFGYSTPWGYFDFNRFHCHFSPRDWQRLINNNWGFRPKRPNFKLFNIQVKEVTQNEGTKTIANNLTSTIQVFTDSEYQLPYVLGSAHQGCLPPFPADVFMIPQYGYLTLNNGSQAVGRSSFYCLEYFPSQMLRTGNNFEFSYQFEDVPFHSSYAHSQSLDRLMNPLIDQYLYYLSRTQSTGGTAGTQQLLFSQAGPNNMSAQAKNWLPGPCYRQQRVSTTLSQNNNSNFAWTGATKYHLNGRDSLVNPGVAMATHKDDEERFFPSSGVLMFGKQGAGKDNVDYSSVMLTSEEEIKTTNPVATEQYGVVADNLQQQNAAPIVGAVNSQGALPGMVWQNRDVYLQGPIWAKIPHTDGNFHPSPLMGGFGLKHPPPQILIKNTPVPADPPTTFSQAKLASFITQYSTGQVSVEIEWELQKENSKRWNPEIQYTSNYYKSTNVDFAVNTDGTYSEPRPIGTRYLTRNL

SEQ ID NO: 101 - protein, 738 aa, Artificial Sequence
  Description of Artificial Sequence: Synthetic polypeptide
MAADGYLPDWLEDNLSEGIREWWDLKPGAPKPKANQQKQDDGRGLVLPGYKYLGPFNGLDKGEPVNAADAAALEHDKAYDQQLKAGDNPYLRYNHADAEFQERLQEDTSFGGNLGRAVFQAKKRVLEPLGLVEEAAKTAPGKKRPVEPSPQRSPDSSTGIGKKGQQPAKKRLNFGQTGDSESVPDPQPIGEPPAGPSGLGSGTMAAGGGAPMADNNEGADGVGSSSGNWHCDSTWLGDRVITTSTRTWALPTYNNHLYKQISNGTSGGSTNDNTYFGYSTPWGYFDFNRFHCHFSPRDWQRLINNNWGFRPKRLSFKLFNIQVKEVTQNEGTKTIANNLTSTIQVFTDSEYQLPYVLGSAHQGCLPPFPADVFMIPQYGYLTLNNGSQAVGRSSFYCLEYFPSQMLRTGNNFEFSYTFEDVPFHSSYAHSQSLDRLMNPLIDQYLYYLSRTQSTGGTQGTQQLLFSQAGPANMSAQAKNWLPGPCYRQQRVSTTLSQNNNSNFAWTGATKYHLNGRDSLVNPGVAMATHKDDEERFFPSSGVLMFGKQGAGRDNVDYSSVMLTSEEEIKTTNPVATEQYGVVADNLQQTNTGPIVGNVNSQGALPGMVWQNRDVYLQGPIWAKIPHTDGNFHPSPLMGGFGLKHPPPQILIKNTPVPADPPTTFSQAKLASFITQYSTGQVSVEIEWELQKENSKRWNPEIQYTSNYYKSTNVDFAVNTEGTYSEPRPIGTRYLTRNL

SEQ ID NO: 102 - DNA, 2172 bp, Artificial Sequence
  Description of Artificial Sequence: Synthetic polynucleotide
atgtcttttgttgatcaccctccagattggttggaagaagttggtgaaggtcttcgcgagtttttgggccttgaagcgggcccaccgaaaccaaaacccaatcagcagcatcaagatcaagcccgtggtcttgtgctgcctggttataactatctcggacccggaaacggtctcgatcgaggagagcctgtcaacagggcagacgaggtcgcgcgagagcacgacatctcgtacaacgagcagcttgaggcgggagacaacccctacctcaagtacaaccacgcggacgccgagtttcaggagaagctcgccgacgacacatccttcgggggaaacctcggaaaggcagtctttcaggccaagaaaagggttctcgaaccttttggcctggttgaagagggtgctaagacggcccctaccggaaagcggatagacgaccactttccaaaaagaaagaaggctcggaccgaagaggactccaagccttccacctcgtcagacgccgaagctggacccagcggatcccagcagctgcaaatcccagcccaaccagcctcaagtttgggagctgatacaatgtctgcgggaggtggcggcccattgggcgacaataaccaaggtgccgatggagtgggcaatgcctcgggagattggcattgcgattccacgtggatgggggacagagtcgtcaccaagtccacccgaacctgggtgctgcccagctacaacaaccaccagtaccgagagatcaaaagcggctccgtcgacggaagcaacgccaacgcctactttggatacagcaccccctgggggtactttgactttaaccgcttccacagccactggagcccccgagactggcaaagactcatcaacaactactggggcttcagaccccggtccctcagagtcaaaatcttcaacattcaagtcaaagaggtcacggtgcaggactccaccaccaccatcgccaacaacctcacctccaccgtccaagtgtttacggacgacgactaccagctgccctacgtcgtcggcaacgggaccgagggatgcctgccggccttccctccgcaggtctttacgctgccgcagtacggttacgcgacgctgaaccgcgacaacacagaaaatcccaccgagaggagcagcttcttctgcctagagtactttcccagcaagatgctgagaacgggcaacaactttgagtttacctacaactttgaggaggtgcccttccactccagcttcgctcccagtcagaacctgttcaagctggccaacccgctggtggaccagtacttgtaccgcttcgtgagcacaaataacactggcggagtccagttcaacaagaacctggccgggagatacgccaacacctacaaaaactggttcccggggcccatgggccgaacccagggctggaacctgggctccggggtcaaccgcgccagtgtcagcgccttcgccacgaccaataggatggagctcgagggcgcgagttaccaggtgcccccgcagccgaacggcatgaccaacaacctccagggcagcaacacctatgccctggagaacactatgatcttcaacagccagccggcgaacccgggcaccaccgccacgtacctcgagggcaacatgctcatcaccagcgagagcgagacgcagccggtgaaccgcgtggcgtacaacgtcggcgggcagatggccaccaacaaccagagctccaccactgcccccgcgaccggcacgtacaacctccaggaaatcgtgcccggcagcgtgtggatggagagggacgtgtacctccaaggacccatctgggccaagatcccagagacgggggcgcactttcacccctctccggccatgggcggattcggactcaaacacccaccgcccatgatgctcatcaagaacacgcctgtgcccggaaatatcaccagcttctcggacgtgcccgtcagcagcttcatcacccagtacagcaccgggcaggtcaccgtggagatggagtgggagctcaagaaggaaaactccaagaggtggaacccagagatccagtacacaaacaactacaacgacccccagtttgtggactttgccccggacagcaccggggaatacagaaccaccagacctatcggaacccgataccttacccgacccctt

SEQ ID NO: 103 - protein, 720 aa, Artificial Sequence
  Description of Artificial Sequence: Synthetic polypeptide
MSFVDHPPDWLEEVGEGLREFLGLEAGPPKPKPNQQHQDQARGLVLPGYNYLGPGNGLDRGEPVNRADEVAREHDISYNEQLEAGDNPYLKYNHADAEFQEKLADDTSFGGNLGKAVFQAKKRVLEPFGLVEEGAKTAPTGKRIDDHFPKRKKARTEEDSKPSTSSDAEAGPSGSQQLQIPAQPASSLGADTMSAGGGGPLGDNNQGADGVGNASGDWHCDSTWMGDRVVTKSTRTWVLPSYNNHQYREIKSGSVDGSNANAYFGYSTPWGYFDFNRFHSHWSPRDWQRLINNYWGFRPRSLRVKIFNIQVKEVTVQDSTTTIANNLTSTVQVFTDDDYQLPYVVGNGTEGCLPAFPPQVFTLPQYGYATLNRDNTENPTERSSFFCLEYFPSKMLRTGNNFEFTYNFEEVPFHSSFAPSQNLFKLANPLVDQYLYRFVSTNNTGGVQFNKNLAGRYANTYKNWFPGPMGRTQGWNLGSGVNRASVSAFATTNRMELEGASYQVPPQPNGMTNNLQGSNTYALENTMIFNSQPANPGTTATYLEGNMLITSESETQPVNRVAYNVGGQMATNNQSSTTAPATGTYNLQEIVPGSVWMERDVYLQGPIWAKIPETGAHFHPSPAMGGFGLKHPPPMMLIKNTPVPGNITSFSDVPVSSFITQYSTGQVTVEMEWELKKENSKRWNPEIQYTNNYNDPQFVDFAPDSTGEYRTTRPIGTRYL

SEQ ID NO: 104 - protein, 724 aa, Adeno-associated virus 5
MSFVDHPPDWLEEVGEGLREFLGLEAGPPKPKPNQQHQDQARGLVLPGYNYLGPGNGLDRGEPVNRADEVAREHDISYNEQLEAGDNPYLKYNHADAEFQEKLADDTSFGGNLGKAVFQAKKRVLEPFGLVEEGAKTAPTGKRIDDHFPKRKKARTEEDSKPSTSSDAEAGPSGSQQLQIPAQPASSLGADTMSAGGGGPLGDNNQGADGVGNASGDWHCDSTWMGDRVVTKSTRTWVLPSYNNHQYREIKSGSVDGSNANAYFGYSTPWGYFDFNRFHSHWSPRDWQRLINNYWGFRPRSLRVKIFNIQVKEVTVQDSTTTIANNLTSTVQVFTDDDYQLPYVVGNGTEGCLPAFPPQVFTLPQYGYATLNRDNTENPTERSSFFCLEYFPSKMLRTGNNFEFTYNFEEVPFHSSFAPSQNLFKLANPLVDQYLYRFVSTNNTGGVQFNKNLAGRYANTYKNWFPGPMGRTQGWNLGSGVNRASVSAFATTNRMELEGASYQVPPQPNGMTNNLQGSNTYALENTMIFNSQPANPGTTATYLEGNMLITSESETQPVNRVAYNVGGQMATNNQSSTTAPATGTYNLQEIVPGSVWMERDVYLQGPIWAKIPETGAHFHPSPAMGGFGLKHPPPMMLIKNTPVPGNITSFSDVPVSSFITQYSTGQVTVEMEWELKKENSKRWNPEIQYTNNYNDPQFVDFAPDSTGEYRTTRPIGTRYLTRPL

SEQ ID NO: 105 - DNA, 2175 bp, Artificial Sequence
  Description of Artificial Sequence: Synthetic polynucleotide
atgtcttttgttgatcaccctccagattggttggaagaagttggtgaaggtcttcgcgagtttttgggccttgaagcgggcccaccgaaaccaaaacccaatcagcagcatcaagatcaagcccgtggtcttgtgctgcctggttataactatctcggacccggaaacggtctcgatcgaggagagcctgtcaacagggcagacgaggtcgcgcgagagcacgacatctcgtacaacgagcagcttgaggcgggagacaacccctacctcaagtacaaccacgcggacgccgagtttcaggagaagctcgccgacgacacatccttcgggggaaacctcggaaaggcagtctttcaggccaagaaaagggttctcgaaccttttggcctggttgaagagggtgctaagacggcccctaccggaaagcggatagacgaccactttccaaaaagaaagaaggctcggaccgaagaggactccaagccttccacctcgtcagacgccgaagctggacccagcggatcccagcagctgcaaatcccagcccaaccagcctcaagtttgggagctgatacaatgtctgcgggaggtggcggcccattgggcgacaataaccaaggtgccgatggagtgggcaatgcctcgggagattggcattgcgattccacgtggatgggggacagagtcgtcaccaagtccacccgaacctgggtgctgcccagctacaacaaccaccagtaccgagagatcaaaagcggctccgtcgacggaagcaacgccaacgcctactttggatacagcaccccctgggggtactttgactttaaccgcttccacagccactggagcccccgagactggcaaagactcatcaacaactactggggcttcagaccccggtccctcagagtcaaaatcttcaacattcaagtcaaagaggtcacggtgcaggactccaccaccaccatcgccaacaacctcacctccaccgtccaagtgtttacggacgacgactaccagctgccctacgtcgtcggcaacgggaccgagggatgcctgccggccttccctccgcaggtctttacgctgccgcagtacggttacgcgacgctgaaccgcgacaacacagaaaatcccaccgagaggagcagcttcttctgcctagagtactttcccagcaagatgctgagaacgggcaacaactttgagtttacctacaactttgaggaggtgcccttccactccagcttcgctcccagtcagaacctgttcaagctggccaacccgctggtggaccagtacttgtaccgcttcgtgagcacaaataacactggcggagtccagttcaacaagaacctggccgggagatacgccaacacctacaaaaactggttcccggggcccatgggccgaacccagggctggaacctgggctccggggtcaaccgcgccagtgtcagcgccttcgccacgaccaataggatggagctcgagggcgcgagttaccaggtgcccccgcagccgaacggcatgaccaacaacctccagggcagcaacacctatgccctggagaacactatgatcttcaacagccagccggcgaacccgggcaccaccgccacgtacctcgagggcaacatgctcatcaccagcgagagcgagacgcagccggtgaaccgcgtggcgtacaacgtcggcgggcagatggccaccaacaaccagagctccaccactgcccccgcgaccggcacgtacaacctccaggaaatcgtgcccggcagcgtgtggatggagagggacgtgtacctccaaggacccatctgggccaagatcccagagacgggggcgcactttcacccctctccggccatgggcggattcggactcaaacacccaccgcccatgatgctcatcaagaacacgcctgtgcccggaaatatcaccagcttctcggacgtgcccgtcagcagcttcatcacccagtacagcaccgggcaggtcaccgtggagatggagtgggagctcaagaaggaaaactccaagaggtggaacccagagatccagtacacaaacaactacaacgacccccagtttgtggactttgccccggacagcaccggggaatacagaaccaccagacctatcggaacccgataccttacccgacccctttaa

SEQ ID NO: 106 - DNA, 2208 bp, Artificial Sequence
  Description of Artificial Sequence: Synthetic polynucleotide
atggctgccgatggttatcttccagattggctcgaggacaacctctctgagggcattcgcgagtggtgggacttgaaacctggagccccgaaacccaaagccaaccagcaaaagcaggacgacggccggggtctggtgcttcctggctacaagtacctcggacccttcaacggactcgacaagggggagcccgtcaacgcggcggatgcagcggccctcgagcacgacaaggcctacgaccagcagctcaaagcgggtgacaatccgtacctgcggtataaccacgccgacgccgagtttcaggagcgtctgcaagaagatacgtcttttgggggcaacctcgggcgagcagtcttccaggccaagaagagggttctcgaaccttttggtctggttgaggaaggtgctaagacggctcctggaaagaaacgtccggtagagcagtcgccacaagagccagactcctcctcgggcattggcaagacaggccagcagcccgctaaaaagagactcaattttggtcagactggcgactcagagtcagtccccgacccacaacctctcggagaacctccagcaacccccgctgctgtgggacctactacaatggcttcaggcggtggcgcaccaatggcagacaataacgaaggcgccgacggagtgggtaatgcctcaggaaattggcattgcgattccacatggctgggcgacagagtcatcaccaccagcacccgaacatgggccttgcccacctataacaaccacctctacaagcaaatctccagtgcttcaacgggggccagcaacgacaaccactacttcggctacagcaccccctgggggtattttgatttcaacagattccactgccatttctcaccacgtgactggcagcgactcatcaacaacaattggggattccggcccaagagactcaacttcaagctcttcaacatccaagtcaaggaggtcacgacgaatgatggcgtcacgaccatcgctaataaccttaccagcacggttcaagtcttctcggactcggagtaccagttgccgtacgtcctcggctctgcgcaccagggctgcctccctccgttcccggcggacgtgttcatgattccgcagtacggctacctaacgctcaacaatggcagccaggcagtgggacggtcatccttttactgcctggaatatttcccatcgcagatgctgagaacgggcaataactttaccttcagctacaccttcgaggacgtgcctttccacagcagctacgcgcacagccagagcctggaccggctgatgaatcctctcatcgaccagtacctgtattacctgaacagaactcagaatcagtccggaagtgcccaaaacaaggacttgctgtttagccgggggtctccagctggcatgtctgttcagcccaaaaactggctacctggaccctgttaccggcagcagcgcgtttctaaaacaaaaacagacaacaacaacagcaactttacctggactggtgcttcaaaatataaccttaatgggcgtgaatctataatcaaccctggcactgctatggcctcacacaaagacgacaaagacaagttctttcccatgagcggtgtcatgatttttggaaaggagagcgccggagcttcaaacactgcattggacaatgtcatgatcacagacgaagaggaaatcaaagccactaaccccgtggccaccgaaagatttgggactgtggcagtcaatctccagagcagcagcacagaccctgcgaccggagatgtgcatgttatgggagccttacctggaatggtgtggcaagacagagacgtatacctgcagggtcctatttgggccaaaattcctcacacggatggacactttcacccgtctcctctcatgggcggctttggacttaagcacccgcctcctcagatcctcatcaaaaacacgcctgttcctgcgaatcctccggcagagttttcggctacaaagtttgcttcattcatcacccagtattccacaggacaagtgagcgtggagattgaatgggagctgcagaaagaaaacagcaaacgctggaatcccgaagtgcagtatacatctaactatgcaaaatctgccaacgttgatttcactgtggacaacaatggactttatactgagcctcgccccattggcacccgttacctcacccgtcccctg

SEQ ID NO: 107 - protein, 736 aa, Adeno-associated virus 6
MAADGYLPDWLEDNLSEGIREWWDLKPGAPKPKANQQKQDDGRGLVLPGYKYLGPFNGLDKGEPVNAADAAALEHDKAYDQQLKAGDNPYLRYNHADAEFQERLQEDTSFGGNLGRAVFQAKKRVLEPFGLVEEGAKTAPGKKRPVEQSPQEPDSSSGIGKTGQQPAKKRLNFGQTGDSESVPDPQPLGEPPATPAAVGPTTMASGGGAPMADNNEGADGVGNASGNWHCDSTWLGDRVITTSTRTWALPTYNNHLYKQISSASTGASNDNHYFGYSTPWGYFDFNRFHCHFSPRDWQRLINNNWGFRPKRLNFKLFNIQVKEVTTNDGVTTIANNLTSTVQVFSDSEYQLPYVLGSAHQGCLPPFPADVFMIPQYGYLTLNNGSQAVGRSSFYCLEYFPSQMLRTGNNFTFSYTFEDVPFHSSYAHSQSLDRLMNPLIDQYLYYLNRTQNQSGSAQNKDLLFSRGSPAGMSVQPKNWLPGPCYRQQRVSKTKTDNNNSNFTWTGASKYNLNGRESIINPGTAMASHKDDKDKFFPMSGVMIFGKESAGASNTALDNVMITDEEEIKATNPVATERFGTVAVNLQSSSTDPATGDVHVMGALPGMVWQDRDVYLQGPIWAKIPHTDGHFHPSPLMGGFGLKHPPPQILIKNTPVPANPPAEFSATKFASFITQYSTGQVSVEIEWELQKENSKRWNPEVQYTSNYAKSANVDFTVDNNGLYTEPRPIGTRYLTRPL

SEQ ID NO: 108 - protein, 623 aa, Adeno-associated virus 6
MPGFYEIVIKVPSDLDEHLPGISDSFVNWVAEKEWELPPDSDMDLNLIEQAPLTVAEKLQRDFLVQWRRVSKAPEALFFVQFEKGESYFHLHILVETTGVKSMVLGRFLSQIRDKLVQTIYRGIEPTLPNWFAVTKTRNGAGGGNKVVDECYIPNYLLPKTQPELQWAWTNMEEYISACLNLAERKRLVAHDLTHVSQTQEQNKENLNPNSDAPVIRSKTSARYMELVGWLVDRGITSEKQWIQEDQASYISFNAASNSRSQIKAALDNAGKIMALTKSAPDYLVGPAPPADIKTNRIYRILELNGYDPAYAGSVFLGWAQKRFGKRNTIWLFGPATTGKTNIAEAIAHAVPFYGCVNWTNENFPFNDCVDKMVIWWEEGKMTAKVVESAKAILGGSKVRVDQKCKSSAQIDPTPVIVTSNTNMCAVIDGNSTTFEHQQPLQDRMFKFELTRRLEHDFGKVTKQEVKEFFRWAQDHVTEVAHEFYVRKGGANKRPAPDDADKSEPKRACPSVADPSTSDAEGAPVDFADRYQNKCSRHAGMLQMLFPCKTCERMNQNFNICFTHGTRDCSECFPGVSESQPVVRKRTYRKLCAIHHLLGRAPEIACSACDLVNVDLDDCVSEQ

SEQ ID NO: 109 - DNA, 4683 bp, Adeno-associated virus 6
ttggccactccctctctgcgcgctcgctcgctcactgaggccgggcgaccaaaggtcgcccgacgcccgggctttgcccgggcggcctcagtgagcgagcgagcgcgcagagagggagtggccaactccatcactaggggttcctggaggggtggagtcgtgacgtgaattacgtcatagggttagggaggtcctgtattagaggtcacgtgagtgttttgcgacattttgcgacaccatgtggtcacgctgggtatttaagcccgagtgagcacgcagggtctccattttgaagcgggaggtttgaacgcgcagcgccatgccggggttttacgagattgtgattaaggtccccagcgaccttgacgagcatctgcccggcatttctgacagctttgtgaactgggtggccgagaaggaatgggagttgccgccagattctgacatggatctgaatctgattgagcaggcacccctgaccgtggccgagaagctgcagcgcgacttcctggtccagtggcgccgcgtgagtaaggccccggaggccctcttctttgttcagttcgagaagggcgagtcctacttccacctccatattctggtggagaccacgggggtcaaatccatggtgctgggccgcttcctgagtcagattagggacaagctggtgcagaccatctaccgcgggatcgagccgaccctgcccaactggttcgcggtgaccaagacgcgtaatggcgccggaggggggaacaaggtggtggacgagtgctacatccccaactacctcctgcccaagactcagcccgagctgcagtgggcgtggactaacatggaggagtatataagcgcgtgtttaaacctggccgagcgcaaacggctcgtggcgcacgacctgacccacgtcagccagacccaggagcagaacaaggagaatctgaaccccaattctgacgcgcctgtcatccggtcaaaaacctccgcacgctacatggagctggtcgggtggctggtggaccggggcatcacctccgagaagcagtggatccaggaggaccaggcctcgtacatctccttcaacgccgcctccaactcgcggtcccagatcaaggccgctctggacaatgccggcaagatcatggcgctgaccaaatccgcgcccgactacctggtaggccccgctccgcccgccgacattaaaaccaaccgcatttaccgcatcctggagctgaacggctacgaccctgcctacgccggctccgtctttctcggctgggcccagaaaaggttcggaaaacgcaacaccatctggctgtttgggccggccaccacgggcaagaccaacatcgcggaagccatcgcccacgccgtgcccttctacggctgcgtcaactggaccaatgagaactttcccttcaacgattgcgtcgacaagatggtgatctggtgggaggagggcaagatgacggccaaggtcgtggagtccgccaaggccattctcggcggcagcaaggtgcgcgtggaccaaaagtgcaagtcgtccgcccagatcgatcccacccccgtgatcgtcacctccaacaccaacatgtgcgccgtgattgacgggaacagcaccaccttcgagcaccagcagccgttgcaggaccggatgttcaaatttgaactcacccgccgtctggagcatgactttggcaaggtgacaaagcaggaagtcaaagagttcttccgctgggcgcaggatcacgtgaccgaggtggcgcatgagttctacgtcagaaagggtggagccaacaagagacccgcccccgatgacgcggataaaagcgagcccaagcgggcctgcccctcagtcgcggatccatcgacgtcagacgcggaaggagctccggtggactttgccgacaggtaccaaaacaaatgttctcgtcacgcgggcatgcttcagatgctgtttccctgcaaaacatgcgagagaatgaatcagaatttcaacatttgcttcacgcacgggaccagagactgttcagaatgtttccccggcgtgtcagaatctcaaccggtcgtcagaaagaggacgtatcggaaactctgtgccattcatcatctgctggggcgggctcccgagattgcttgctcggcctgcgatctggtcaacgtggatctggatgactgtgtttctgagcaataaatgacttaaaccaggtatggctgccgatggttatcttccagattggctcgaggacaacctctctgagggcattcgcgagtggtgggacttgaaacctggagccccgaaacccaaagccaaccagcaaaagcaggacgacggccggggtctggtgcttcctggctacaagtacctcggacccttcaacggactcgacaagggggagcccgtcaacgcggcggatgcagcggccctcgagcacgacaaggcctacgaccagcagctcaaagcgggtgacaatccgtacctgcggtataaccacgccgacgccgagtttcaggagcgtctgcaagaagatacgtcttttgggggcaacctcgggcgagcagtcttccaggccaagaagagggttctcgaaccttttggtctggttgaggaaggtgctaagacggctcctggaaagaaacgtccggtagagcagtcgccacaagagccagactcctcctcgggcattggcaagacaggccagcagcccgctaaaaagagactcaattttggtcagactggcgactcagagtcagtccccgacccacaacctctcggagaacctccagcaacccccgctgctgtgggacctactacaatggcttcaggcggtggcgcaccaatggcagacaataacgaaggcgccgacggagtgggtaatgcctcaggaaattggcattgcgattccacatggctgggcgacagagtcatcaccaccagcacccgaacatgggccttgcccacctataacaaccacctctacaagcaaatctccagtgcttcaacgggggccagcaacgacaaccactacttcggctacagcaccccctgggggtattttgatttcaacagattccactgccatttctcaccacgtgactggcagcgactcatcaacaacaattggggattccggcccaagagactcaacttcaagctcttcaacatccaagtcaaggaggtcacgacgaatgatggcgtcacgaccatcgctaataaccttaccagcacggttcaagtcttctcggactcggagtaccagttgccgtacgtcctcggctctgcgcaccagggctgcctccctccgttcccggcggacgtgttcatgattccgcagtacggctacctaacgctcaacaatggcagccaggcagtgggacggtcatccttttactgcctggaatatttcccatcgcagatgctgagaacgggcaataactttaccttcagctacaccttcgaggacgtgcctttccacagcagctacgcgcacagccagagcctggaccggctgatgaatcctctcatcgaccagtacctgtattacctgaacagaactcagaatcagtccggaagtgcccaaaacaaggacttgctgtttagccgggggtctccagctggcatgtctgttcagcccaaaaactggctacctggaccctgttaccggcagcagcgcgtttctaaaacaaaaacagacaacaacaacagcaactttacctggactggtgcttcaaaatataaccttaatgggcgtgaatctataatcaaccctggcactgctatggcctcacacaaagacgacaaagacaagttctttcccatgagcggtgtcatgatttttggaaaggagagcgccggagcttcaaacactgcattggacaatgtcatgatcacagacgaagaggaaatcaaagccactaaccccgtggccaccgaaagatttgggactgtggcagtcaatctccagagcagcagcacagaccctgcgaccggagatgtgcatgttatgggagccttacctggaatggtgtggcaagacagagacgtatacctgcagggtcctatttgggccaaaattcctcacacggatggacactttcacccgtctcctctcatgggcggctttggacttaagcacccgcctcctcagatcctcatcaaaaacacgcctgttcctgcgaatcctccggcagagttttcggctacaaagtttgcttcattcatcacccagtattccacaggacaagtgagcgtggagattgaatgggagctgcagaaagaaaacagcaaacgctggaatcccgaagtgcagtatacatctaactatgcaaaatctgccaacgttgatttcactgtggacaacaatggactttatactgagcctcgccccattggcacccgttacctcacccgtcccctgtaattgtgtgttaatcaataaaccggttaattcgtgtcagttgaactttggtctcatgtcgttattatcttatctggtcaccatagcaaccggttacacattaactgcttagttgcgcttcgcgaatacccctagtgatggagttgcccactccctctatgcgcgctcgctcgctcggtggggccggcagagcagagctctgccgtctgcggacctttggtccgcaggccccaccgagcgagcgagcgcgcatagagggagtgggcaa

SEQ ID NO: 110 - DNA, 2211 bp, Artificial Sequence
  Description of Artificial Sequence: Synthetic polynucleotide
atggctgccgatggttatcttccagattggctcgaggacaacctctctgagggcattcgcgagtggtgggacttgaaacctggagccccgaaacccaaagccaaccagcaaaagcaggacgacggccggggtctggtgcttcctggctacaagtacctcggacccttcaacggactcgacaagggggagcccgtcaacgcggcggatgcagcggccctcgagcacgacaaggcctacgaccagcagctcaaagcgggtgacaatccgtacctgcggtataaccacgccgacgccgagtttcaggagcgtctgcaagaagatacgtcttttgggggcaacctcgggcgagcagtcttccaggccaagaagagggttctcgaaccttttggtctggttgaggaaggtgctaagacggctcctggaaagaaacgtccggtagagcagtcgccacaagagccagactcctcctcgggcattggcaagacaggccagcagcccgctaaaaagagactcaattttggtcagactggcgactcagagtcagtccccgacccacaacctctcggagaacctccagcaacccccgctgctgtgggacctactacaatggcttcaggcggtggcgcaccaatggcagacaataacgaaggcgccgacggagtgggtaatgcctcaggaaattggcattgcgattccacatggctgggcgacagagtcatcaccaccagcacccgaacatgggccttgcccacctataacaaccacctctacaagcaaatctccagtgcttcaacgggggccagcaacgacaaccactacttcggctacagcaccccctgggggtattttgatttcaacagattccactgccatttctcaccacgtgactggcagcgactcatcaacaacaattggggattccggcccaagagactcaacttcaagctcttcaacatccaagtcaaggaggtcacgacgaatgatggcgtcacgaccatcgctaataaccttaccagcacggttcaagtcttctcggactcggagtaccagttgccgtacgtcctcggctctgcgcaccagggctgcctccctccgttcccggcggacgtgttcatgattccgcagtacggctacctaacgctcaacaatggcagccaggcagtgggacggtcatccttttactgcctggaatatttcccatcgcagatgctgagaacgggcaataactttaccttcagctacaccttcgaggacgtgcctttccacagcagctacgcgcacagccagagcctggaccggctgatgaatcctctcatcgaccagtacctgtattacctgaacagaactcagaatcagtccggaagtgcccaaaacaaggacttgctgtttagccgggggtctccagctggcatgtctgttcagcccaaaaactggctacctggaccctgttaccggcagcagcgcgtttctaaaacaaaaacagacaacaacaacagcaactttacctggactggtgcttcaaaatataaccttaatgggcgtgaatctataatcaaccctggcactgctatggcctcacacaaagacgacaaagacaagttctttcccatgagcggtgtcatgatttttggaaaggagagcgccggagcttcaaacactgcattggacaatgtcatgatcacagacgaagaggaaatcaaagccactaaccccgtggccaccgaaagatttgggactgtggcagtcaatctccagagcagcagcacagaccctgcgaccggagatgtgcatgttatgggagccttacctggaatggtgtggcaagacagagacgtatacctgcagggtcctatttgggccaaaattcctcacacggatggacactttcacccgtctcctctcatgggcggctttggacttaagcacccgcctcctcagatcctcatcaaaaacacgcctgttcctgcgaatcctccggcagagttttcggctacaaagtttgcttcattcatcacccagtattccacaggacaagtgagcgtggagattgaatgggagctgcagaaagaaaacagcaaacgctggaatcccgaagtgcagtatacatctaactatgcaaaatctgccaacgttgatttcactgtggacaacaatggactttatactgagcctcgccccattggcacccgttacctcacccgtcccctgtaa

SEQ ID NO: 111 - protein, 736 aa, Artificial Sequence; identical to SEQ ID NO: 107
  Description of Artificial Sequence: Synthetic polypeptide

SEQ ID NO: 112 - protein, 736 aa, Artificial Sequence
  Description of Artificial Sequence: Synthetic polypeptide
MAADGYLPDWLEDNLSEGIREWWDLKPGAPKPKANQQKQDDGRGLVLPGYKYLGPFNGLDKGEPVNAADAAALEHDKAYDQQLKAGDNPYLRYNHADAEFQERLQEDTSFGGNLGRAVFQAKKRVLEPFGLVEEGAKTAPGKKRPVEQSPQEPDSSSGIGKTGQQPAKKRLNFGQTGDSESVPDPQPLGEPPATPAAVGPTTMASGGGAPMADNNEGADGVGNASGNWHCDSTWLGDRVITTSTRTWALPTYNNHLYKQISSASTGASNDNHYFGYSTPWGYFDFNRFHCHFSPRDWQRLINNNWGFRPKRLNFKLFNIQVKEVTTNDGVTTIANNLTSTVQVFSDSEYQLPYVLGSAHQGCLPPFPADVFMIPQYGYLTLNNGSQAVGRSSFYCLEYFPSQMLRTGNNFTFSYTFEDVPFHSSYAHSQSLDRLMNPLIDQYLYYLNRTQNQSGSAQNKDLLFSRGSPAGMSVQPKNWLPGPCYRQQRVSKTKTDNNNSNFTWTGASKYNLNGRESIINPGTAMASHKDDEDKFFPMSGVMIFGKESAGASNTALDNVMITDEEEIKATNPVATERFGTVAVNLQSSSTDPATGDVHVMGALPGMVWQDRDVYLQGPIWAKIPHTDGHFHPSPLMGGFGLKHPPPQILIKNTPVPANPPAEFSATKFASFITQYSTGQVSVEIEWELQKENSKRWNPEVQYTSNYAKSANVDFTVDNNGLYTEPRPIGTRYLTRPL

SEQ ID NO: 113 - protein, 736 aa, Artificial Sequence
  Description of Artificial Sequence: Synthetic polypeptide
MAADGYLPDWLEDNLSEGIREWWDLKPGAPKPKANQQKQDDGRGLVLPGYKYLGPFNGLDKGEPVNAADAAALEHDKAYDQQLKAGDNPYLRYNHADAEFQERLQEDTSFGGNLGRAVFQAKKRVLEPLGLVEEGAKTAPGKKRPVEQSPQEPDSSSGIGKTGQQPAKKRLNFGQTGDSESVPDPQPLGEPPATPAAVGPTTMASGGGAPMADNNEGADGVGNASGNWHCDSTWLGDRVITTSTRTWALPTYNNHLYKQISSASTGASNDNHYFGYSTPWGYFDFNRFHCHFSPRDWQRLINNNWGFRPKRLNFKLFNIQVKEVTTNDGVTTIANNLTSTVQVFSDSEYQLPYVLGSAHQGCLPPFPADVFMIPQYGYLTLNNGSQAVGRSSFYCLEYFPSQMLRTGNNFTFSYTFEDVPFHSSYAHSQSLDRLMNPLIDQYLYYLNRTQNQSGSAQNKDLLFSRGSPAGMSVQPKNWLPGPCYRQQRVSKTKTDNNNSNFTWTGASKYNLNGRESIINPGTAMASHKDDEDKFFPMSGVMIFGKESAGASNTALDNVMITDEEEIKATNPVATERFGTVAVNLQSSSTDPATGDVHVMGALPGMVWQDRDVYLQGPIWAKIPHTDGHFHPSPLMGGFGLKHPPPQILIKNTPVPANPPAEFSATKFASFITQYSTGQVSVEIEWELQKENSKRWNPEVQYTSNYAKSANVDFTVDNNGLYTEPRPIGTRYLTRPL

SEQ ID NO: 114 - protein, 736 aa, Artificial Sequence
  Description of Artificial Sequence: Synthetic polypeptide
MAADGYLPDWLEDNLSEGIREWWDLKPGAPKPKANQQKQDDGRGLVLPGYKYLGPFNGLDKGEPVNAADAAALEHDKAYDQQLKAGDNPYLRYNHADAEFQERLQEDTSFGGNLGRAVFQAKKRVLEPLGLVEEGAKTAPGKKRPVEQSPQEPDSSSGIGKTGQQPAKKRLNFGQTGDSESVPDPQPLGEPPATPAAVGPTTMASGGGAPMADNNEGADGVGNASGNWHCDSTWLGDRVITTSTRTWALPTYNNHLYKQISSASTGASNDNHYFGYSTPWGYFDFNRFHCHFSPRDWQRLINNNWGFRPKRLNFKLFNIQVKEVTTNDGVTTIANNLTSTVQVFSDSEYQLPYVLGSAHQGCLPPFPADVFMIPQYGYLTLNNGSQAVGRSSFYCLEYFPSQMLRTGNNFTFSYTFEDVPFHSSYAHSQSLDRLMNPLIDQYLYYLNRTQNQSGSAQNKDLLFSRGSPAGMSVQPKNWLPGPCYRQQRVSKTKTDNNNSNFTWTGASKYNLNGRESIINPGTAMASHKDDKDKFFPMSGVMIFGKESAGASNTALDNVMITDEEEIKATNPVATERFGTVAVNLQSSSTDPATGDVHVMGALPGMVWQDRDVYLQGPIWAKIPHTDGHFHPSPLMGGFGLKHPPPQILIKNTPVPANPPAEFSATKFASFITQYSTGQVSVEIEWELQKENSKRWNPEVQYTSNYAKSANVDFTVDNNGLYTEPRPIGTRYLTRPL

SEQ ID NO: 115 - DNA, 2214 bp, Artificial Sequence
  Description of Artificial Sequence: Synthetic polynucleotide
atggctgccgatggttatcttccagattggctcgaggacaacctctctgagggcattcgcgagtggtgggacctgaaacctggagccccgaaacccaaagccaaccagcaaaagcaggacaacggccggggtctggtgcttcctggctacaagtacctcggacccttcaacggactcgacaagggggagcccgtcaacgcggcggacgcagcggccctcgagcacgacaaggcctacgaccagcagctcaaagcgggtgacaatccgtacctgcggtataaccacgccgacgccgagtttcaggagcgtctgcaagaagatacgtcatttgggggcaacctcgggcgagcagtcttccaggccaagaagcgggttctcgaacctctcggtctggttgaggaaggcgctaagacggctcctgcaaagaagagaccggtagagccgtcacctcagcgttcccccgactcctccacgggcatcggcaagaaaggccagcagcccgccagaaagagactcaatttcggtcagactggcgactcagagtcagtccccgaccctcaacctctcggagaacctccagcagcgccctctagtgtgggatctggtacagtggctgcaggcggtggcgcaccaatggcagacaataacgaaggtgccgacggagtgggtaatgcctcaggaaattggcattgcgattccacatggctgggcgacagagtcattaccaccagcacccgaacctgggccctgcccacctacaacaaccacctctacaagcaaatctccagtgaaactgcaggtagtaccaacgacaacacctacttcggctacagcaccccctgggggtattttgactttaacagattccactgccacttctcaccacgtgactggcagcgactcatcaacaacaactggggattccggcccaagaagctgcggttcaagctcttcaacatccaggtcaaggaggtcacgacgaatgacggcgttacgaccatcgctaataaccttaccagcacgattcaggtattctcggactcggaataccagctgccgtacgtcctcggctctgcgcaccagggctgcctgcctccgttcccggcggacgtcttcatgattcctcagtacggctacctgactctcaacaatggcagtcagtctgtgggacgttcctccttctactgcctggagtacttcccctctcagatgctgagaacgggcaacaactttgagttcagctacagcttcgaggacgtgcctttccacagcagctacgcacacagccagagcctggaccggctgatgaatcccctcatcgaccagtacttgtactacctggccagaacacagagtaacccaggaggcacagctggcaatcgggaactgcagttttaccagggcgggccttcaactatggccgaacaagccaagaattggttacctggaccttgcttccggcaacaaagagtctccaaaacgctggatcaaaacaacaacagcaactttgcttggactggtgccaccaaatatcacctgaacggcagaaactcgttggttaatcccggcgtcgccatggcaactcacaaggacgacgaggaccgctttttcccatccagcggagtcctgatttttggaaaaactggagcaactaacaaaactacattggaaaatgtgttaatgacaaatgaagaagaaattcgtcctactaatcctgtagccacggaagaatacgggatagtcagcagcaacttacaagcggctaatactgcagcccagacacaagttgtcaacaaccagggagccttacctggcatggtctggcagaaccgggacgtgtacctgcagggtcccatctgggccaagattcctcacacggatggcaactttcacccgtctcctttgatgggcggctttggacttaaacatccgcctcctcagatcctgatcaagaacactcccgttcccgctaatcctccggaggtgtttactcctgccaagtttgcttcgttcatcacacagtacagcaccggacaagtcagcgtggaaatcgagtgggagctgcagaaggaaaacagcaagcgctggaacccggagattcagtacacctccaactttgaaaagcagactggtgtggactttgccgttgacagccagggtgtttactctgagcctcgccctattggcactcgttacctcacccgtaatctgtaa

SEQ ID NO: 116 - protein, 738 aa, Artificial Sequence
  Description of Artificial Sequence: Synthetic polypeptide
MAADGYLPDWLEDNLSEGIREWWALKPGAPKPKANQQKQDDGRGLVLPGYKYLGPFNGLDKGEPVNAADAAALEHDKAYDQQLQAGDNPYLRYNHADAEFQERLQEDTSFGGNLGRAVFQAKKRVLEPLGLVEEGAKTAPGKKRPVEPSPQRSPDSSTGIGKKGQQPARKRLNFGQTGDSESVPDPQPLGEPPAAPSGVGPNTMAAGGGAPMADNNEGADGVGSSSGNWHCDSTWLGDRVITTSTRTWALPTYNNHLYKQISNGTSGGATNDNTYFGYSTPWGYFDFNRFHCHFSPRDWQRLINNNWGFRPKRLSFKLFNIQVKEVTQNEGTKTIANNLTSTIQVFTDSEYQLPYVLGSAHQGCLPPFPADVFMIPQYGYLTLNNGSQAVGRSSFYCLEYFPSQMLRTGNNFQFTYTFEDVPFHSSYAHSQSLDRLMNPLIDQYLYYLSRTQTTGGTANTQTLGFSQGGPNTMANQAKNWLPGPCYRQQRVSTTTGQNNNSNFAWTAGTKYHLNGRNSLANPGIAMATHKDDEERFFPSNGILIFGKQNAARDNADYSDVMLTSEEEIKTTNPVATEEYGIVADNLQQQNTAPQIGTVNSQGALPGMVWQNRDVYLQGPIWAKIPHTDGNFHPSPLMGGFGLKHPPPQILIKNTPVPADPPTTFNQSKLNSFITQYSTGQVSVEIEWELQKENSKRWNPEIQYTSNYYKSTSVDFAVNTEGVYSEPRPIGTRYLTRNL

SEQ ID NO: 117 - protein, 737 aa, Adeno-associated virus 7
MAADGYLPDWLEDNLSEGIREWWDLKPGAPKPKANQQKQDNGRGLVLPGYKYLGPFNGLDKGEPVNAADAAALEHDKAYDQQLKAGDNPYLRYNHADAEFQERLQEDTSFGGNLGRAVFQAKKRVLEPLGLVEEGAKTAPAKKRPVEPSPQRSPDSSTGIGKKGQQPARKRLNFGQTGDSESVPDPQPLGEPPAAPSSVGSGTVAAGGGAPMADNNEGADGVGNASGNWHCDSTWLGDRVITTSTRTWALPTYNNHLYKQISSETAGSTNDNTYFGYSTPWGYFDFNRFHCHFSPRDWQRLINNNWGFRPKKLRFKLFNIQVKEVTTNDGVTTIANNLTSTIQVFSDSEYQLPYVLGSAHQGCLPPFPADVFMIPQYGYLTLNNGSQSVGRSSFYCLEYFPSQMLRTGNNFEFSYSFEDVPFHSSYAHSQSLDRLMNPLIDQYLYYLARTQSNPGGTAGNRELQFYQGGPSTMAEQAKNWLPGPCFRQQRVSKTLDQNNNSNFAWTGATKYHLNGRNSLVNPGVAMATHKDDEDRFFPSSGVLIFGKTGATNKTTLENVLMTNEEEIRPTNPVATEEYGIVSSNLQAANTAAQTQVVNNQGALPGMVWQNRDVYLQGPIWAKIPHTDGNFHPSPLMGGFGLKHPPPQILIKNTPVPANPPEVFTPAKFASFITQYSTGQVSVEIEWELQKENSKRWNPEIQYTSNFEKQTGVDFAVDSQGVYSEPRPIGTRYLTRNL

SEQ ID NO: 118 - protein, 623 aa, Adeno-associated virus 7
MPGFYEIVIKVPSDLDEHLPGISDSFVNWVAEKEWELPPDSDMDLNLIEQAPLTVAEKLQRDFLVQWRRVSKAPEALFFVQFEKGESYFHLHVLVETTGVKSMVLGRFLSQIREKLVQTIYRGVEPTLPNWFAVTKTRNGAGGGNKVVDECYIPNYLLPKTQPELQWAWTNMEEYISACLNLAERKRLVAQHLTHVSQTQEQNKENLNPNSDAPVIRSKTSARYMELVGWLVDRGITSEKQWIQEDQASYISFNAASNSRSQIKAALDNAGKIMALTKSAPDYLVGPSLPADIKTNRIYRILELNGYDPAYAGSVFLGWAQKKFGKRNTIWLFGPATTGKTNIAEAIAHAVPFYGCVNWTNENFPFNDCVDKMVIWWEEGKMTAKVVESAKAILGGSKVRVDQKCKSSAQIDPTPVIVTSNTNMCAVIDGNSTTFEHQQPLQDRMFKFELTRRLEHDFGKVTKQEVKEFFRWASDHVTEVAHEFYVRKGGASKRPAPDDADISEPKRACPSVADPSTSDAEGAPVDFADRYQNKCSRHAGMIQMLFPCKTCERMNQNFNICFTHGVRDCLECFPGVSESQPVVRKKTYRKLCAIHHLLGRAPEIACSACDLVNVDLDDCVSEQ

SEQ ID NO: 119 - DNA, 4721 bp, Adeno-associated virus 7
ttggccactccctctatgcgcgctcgctcgctcggtggggcctgcggaccaaaggtccgcagacggcagagctctgctctgccggccccaccgagcgagcgagcgcgcatagagggagtggccaactccatcactaggggtaccgcgaagcgcctcccacgctgccgcgtcagcgctgacgtaaatcacgtcataggggagtggtcctgtattagctgtcacgtgagtgcttttgcgacattttgcgacaccacgtggccatttgaggtatatatggccgagtgagcgagcaggatctccattttgaccgcgaaatttgaacgagcagcagccatgccgggtttctacgagatcgtgatcaaggtgccgagcgacctggacgagcacctgccgggcatttctgactcgtttgtgaactgggtggccgagaaggaatgggagctgcccccggattctgacatggatctgaatctgatcgagcaggcacccctgaccgtggccgagaagctgcagcgcgacttcctggtccaatggcgccgcgtgagtaaggccccggaggccctgttctttgttcagttcgagaagggcgagagctacttccaccttcacgttctggtggagaccacgggggtcaagtccatggtgctaggccgcttcctgagtcagattcgggagaagctggtccagaccatctaccgcggggtcgagcccacgctgcccaactggttcgcggtgaccaagacgcgtaatggcgccggcggggggaacaaggtggtggacgagtgctacatccccaactacctcctgcccaagacccagcccgagctgcagtgggcgtggactaacatggaggagtatataagcgcgtgtttgaacctggccgaacgcaaacggctcgtggcgcagcacctgacccacgtcagccagacgcaggagcagaacaaggagaatctgaaccccaattctgacgcgcccgtgatcaggtcaaaaacctccgcgcgctacatggagctggtcgggtggctggtggaccggggcatcacctccgagaagcagtggatccaggaggaccaggcctcgtacatctccttcaacgccgcctccaactcgcggtcccagatcaaggccgcgctggacaatgccggcaagatcatggcgctgaccaaatccgcgcccgactacctggtggggccctcgctgcccgcggacattaaaaccaaccgcatctaccgcatcctggagctgaacgggtacgatcctgcctacgccggctccgtctttctcggctgggcccagaaaaagttcgggaagcgcaacaccatctggctgtttgggcccgccaccaccggcaagaccaacattgcggaagccatcgcccacgccgtgcccttctacggctgcgtcaactggaccaatgagaactttcccttcaacgattgcgtcgacaagatggtgatctggtgggaggagggcaagatgacggccaaggtcgtggagtccgccaaggccattctcggcggcagcaaggtgcgcgtggaccaaaagtgcaagtcgtccgcccagatcgaccccacccccgtgatcgtcacctccaacaccaacatgtgcgccgtgattgacgggaacagcaccaccttcgagcaccagcagccgttgcaggaccggatgttcaaatttgaactcacccgccgtctggagcacgactttggcaaggtgacgaagcaggaagtcaaagagttcttccgctgggccagtgatcacgtgaccgaggtggcgcatgagttctacgtcagaaagggcggagccagcaaaagacccgcccccgatgacgcggatataagcgagcccaagcgggcctgcccctcagtcgcggatccatcgacgtcagacgcggaaggagctccggtggactttgccgacaggtaccaaaacaaatgttctcgtcacgcgggcatgattcagatgctgtttccctgcaaaacgtgcgagagaatgaatcagaatttcaacatttgcttcacacacggggtcagagactgtttagagtgtttccccggcgtgtcagaatctcaaccggtcgtcagaaaaaagacgtatcggaaactctgcgcgattcatcatctgctggggcgggcgcccgagattgcttgctcggcctgcgacctggtcaacgtggacctggacgactgcgtttctgagcaataaatgacttaaaccaggtatggctgccgatggttatcttccagattggctcgaggacaacctctctgagggcattcgcgagtggtgggacctgaaacctggagccccgaaacccaaagccaaccagcaaaagcaggacaacggccggggtctggtgcttcctggctacaagtacctcggacccttcaacggactcgacaagggggagcccgtcaacgcggcggacgcagcggccctcgagcacgacaaggcctacgaccagcagctcaaagcgggtgacaatccgtacctgcggtataaccacgccgacgccgagtttcaggagcgtctgcaagaagatacgtcatttgggggcaacctcgggcgagcagtcttccaggccaagaagcgggttctcgaacctctcggtctggttgaggaaggcgctaagacggctcctgcaaagaagagaccggtagagccgtcacctcagcgttcccccgactcctccacgggcatcggcaagaaaggccagcagcccgccagaaagagactcaatttcggtcagactggcgactcagagtcagtccccgaccctcaacctctcggagaacctccagcagcgccctctagtgtgggatctggtacagtggctgcaggcggtggcgcaccaatggcagacaataacgaaggtgccgacggagtgggtaatgcctcaggaaattggcattgcgattccacatggctgggcgacagagtcattaccaccagcacccgaacctgggccctgcccacctacaacaaccacctctacaagcaaatctccagtgaaactgcaggtagtaccaacgacaacacctacttcggctacagcaccccctgggggtattttgactttaacagattccactgccacttctcaccacgtgactggcagcgactcatcaacaacaactggggattccggcccaagaagctgcggttcaagctcttcaacatccaggtcaaggaggtcacgacgaatgacggcgttacgaccatcgctaataaccttaccagcacgattcaggtattctcggactcggaataccagctgccgtacgtcctcggctctgcgcaccagggctgcctgcctccgttcccggcggacgtcttcatgattcctcagtacggctacctgactctcaacaatggcagtcagtctgtgggacgttcctccttctactgcctggagtacttcccctctcagatgctgagaacgggcaacaactttgagttcagctacagcttcgaggacgtgcctttccacagcagctacgcacacagccagagcctggaccggctgatgaatcccctcatcgaccagtacttgtactacctggccagaacacagagtaacccaggaggcacagctggcaatcgggaactgcagttttaccagggcgggccttcaactatggccgaacaagccaagaattggttacctggaccttgcttccggcaacaaagagtctccaaaacgctggatcaaaacaacaacagcaactttgcttggactggtgccaccaaatatcacctgaacggcagaaactcgttggttaatcccggcgtcgccatggcaactcacaaggacgacgaggaccgctttttcccatccagcggagtcctgatttttggaaaaactggagcaactaacaaaactacattggaaaatgtgttaatgacaaatgaagaagaaattcgtcctactaatcctgtagccacggaagaatacgggatagtcagcagcaacttacaagcggctaatactgcagcccagacacaagttgtcaacaaccagggagccttacctggcatggtctggcagaaccgggacgtgtacctgcagggtcccatctgggccaagattcctcacacggatggcaactttcacccgtctcctttgatgggcggctttggacttaaacatccgcctcctcagatcctgatcaagaacactcccgttcccgctaatcctccggaggtgtttactcctgccaagtttgcttcgttcatcacacagtacagcaccggacaagtcagcgtggaaatcgagtgggagctgcagaaggaaaacagcaagcgctggaacccggagattcagtacacctccaactttgaaaagcagactggtgtggactttgccgttgacagccagggtgtttactctgagcctcgccctattggcactcgttacctcacccgtaatctgtaattgcatgttaatcaataaaccggttgattcgtttcagttgaactttggtctcctgtgcttcttatcttatcggtttccatagcaactggttacacattaactgcttgggtgcgcttcacgataagaacactgacgtcaccgcggtacccctagtgatggagttggccactccctctatgcgcgctcgctcgctcggtggggcctgcggaccaaaggtccgcagacggcagagctctgctctgccggccccaccgagcgagcgagcgcgcatagagggagtggccaa

SEQ ID NO: 120 - DNA, 2214 bp, Artificial Sequence; identical to SEQ ID NO: 115
  Description of Artificial Sequence: Synthetic polynucleotide

SEQ ID NO: 121 - protein, 737 aa, Artificial Sequence; identical to SEQ ID NO: 117
  Description of Artificial Sequence: Synthetic polypeptide

SEQ ID NO: 122 - DNA, 2217 bp, Artificial Sequence
  Description of Artificial Sequence: Synthetic polynucleotide
atggctgccgatggttatcttccagattggctcgaggacaacctctctgagggcattcgcgagtggtgggcgctgaaacctggagccccgaagcccaaagccaaccagcaaaagcaggacgacggccggggtctggtgcttcctggctacaagtacctcggacccttcaacggactcgacaagggggagcccgtcaacgcggcggacgcagcggccctcgagcacgacaaggcctacgaccagcagctgcaggcgggtgacaatccgtacctgcggtataaccacgccgacgccgagtttcaggagcgtctgcaagaagatacgtcttttgggggcaacctcgggcgagcagtcttccaggccaagaagcgggttctcgaacctctcggtctggttgaggaaggcgctaagacggctcctggaaagaagagaccggtagagccatcaccccagcgttctccagactcctctacgggcatcggcaagaaaggccaacagcccgccagaaaaagactcaattttggtcagactggcgactcagagtcagttccagaccctcaacctctcggagaacctccagcagcgccctctggtgtgggacctaatacaatggctgcaggcggtggcgcaccaatggcagacaataacgaaggcgccgacggagtgggtagttcctcgggaaattggcattgcgattccacatggctgggcgacagagtcatcaccaccagcacccgaacctgggccctgcccacctacaacaaccacctctacaagcaaatctccaacgggacatcgggaggagccaccaacgacaacacctacttcggctacagcaccccctgggggtattttgactttaacagattccactgccacttttcaccacgtgactggcagcgactcatcaacaacaactggggattccggcccaagagactcagcttcaagctcttcaacatccaggtcaaggaggtcacgcagaatgaaggcaccaagaccatcgccaataacctcaccagcaccatccaggtgtttacggactcggagtaccagctgccgtacgttctcggctctgcccaccagggctgcctgcctccgttcccggcggacgtgttcatgattccccagtacggctacctaacactcaacaacggtagtcaggccgtgggacgctcctccttctactgcctggaatactttccttcgcagatgctgagaaccggcaacaacttccagtttacttacaccttcgaggacgtgcctttccacagcagctacgcccacagccagagcttggaccggctgatgaatcctctgattgaccagtacctgtactacttgtctcggactcaaacaacaggaggcacggcaaatacgcagactctgggcttcagccaaggtgggcctaatacaatggccaatcaggcaaagaactggctgccaggaccctgttaccgccaacaacgcgtctcaacgacaaccgggcaaaacaacaatagcaactttgcctggactgctgggaccaaataccatctgaatggaagaaattcattggctaatcctggcatcgctatggcaacacacaaagacgacgaggagcgtttttttcccagtaacgggatcctgatttttggcaaacaaaatgctgccagagacaatgcggattacagcgatgtcatgctcaccagcgaggaagaaatcaaaaccactaaccctgtggctacagaggaatacggtatcgtggcagataacttgcagcagcaaaacacggctcctcaaattggaactgtcaacagccagggggccttacccggtatggtctggcagaaccgggacgtgtacctgcagggtcccatctgggccaagattcctcacacggacggcaacttccacccgtctccgctgatgggcggctttggcctgaaacatcctccgcctcagatcctgatcaagaacacgcctgtacctgcggatcctccgaccaccttcaaccagtcaaagctgaactctttcatcacgcaatacagcaccggacaggtcagcgtggaaattgaatgggagctgcagaaggaaaacagcaagcgctggaaccccgagatccagtacacctccaactactacaaatctacaagtgtggactttgctgttaatacagaaggcgtgtactctgaaccccgccccattggcacccgttacctcacccgtaatctgtaa

SEQ ID NO: 123 - DNA, 2213 bp, Adeno-associated virus 8
atggctgccgatggttatcttccagattggctcgaggacaacctctctgagggcattcgcgagtggtgggcgctgaaacctggagccccgaagcccaaagccaaccagcaaaagcaggacgacggccggggtctggtgcttcctggctacaagtacctcggacccttcaacggactcgacaagggggagcccgtcaacgcggcggacgcagcggccctcgagcacgacaaggcctacgaccagcagctgcaggcgggtgacaatccgtacctgcggtataaccacgccgacgccgagtttcaggagcgtctgcaagaagatacgtcttttgggggcaacctcgggcgagcagtcttccaggccaagaagcgggttctcgaacctctcggtctggttgaggaaggcgctaagacggctcctggaaagaagagaccggtagagccatcaccccagcgttctccagactcctctacgggcatcggcaagaaaggccaacagcccgccagaaaaagactcaattttggtcagactggcgactcagagtcagttccagaccctcaacctctcggagaacctccagcagcgccctctggtgtgggacctaatacaatggctgcaggcggtggcgcaccaatggcagacaataacgaaggcgccgacggagtgggtagttcctcgggaaattggcattgcgattccacatggctgggcgacagagtcatcaccaccagcacccgaacctgggccctgcccacctacaacaaccacctctacaagcaaatctccaacgggacatcgggaggagccaccaacgacaacacctacttcggctacagcaccccctgggggtattttgactttaacagattccactgccacttttcaccacgtgactggcagcgactcatcaacaacaactggggattccggcccaagagactcagcttcaagctcttcaacatccaggtcaaggaggtcacgcagaatgaaggcaccaagaccatcgccaataacctcaccagcaccatccaggtgtttacggactcggagtaccagctgccgtacgttctcggctctgcccaccagggctgcctgcctccgttcccggcggacgtgttcatgattccccagtacggctacctaacactcaacaacggtagtcaggccgtgggacgctcctccttctactgcctggaatactttccttcgcagatgctgagaaccggcaacaacttccagtttacttacaccttcgaggacgtgcctttccacagcagctacgcccacagccagagcttggaccggctgatgaatcctctgattgaccagtacctgtactacttgtctcggactcaaacaacaggaggcacggcaaatacgcagactctgggcttcagccaaggtgggcctaatacaatggccaatcaggcaaagaactggctgccaggaccctgttaccgccaacaacgcgtctcaacgacaaccgggcaaaacaacaatagcaactttgcctggactgctgggaccaaataccatctgaatggaagaaattcattggctaatcctggcatcgctatggcaacacacaaagacgacgaggagcgtttttttcccagtaacgggatcctgatttttggcaaacaaaatgctgccagagacaatgcggattacagcgatgtcatgctcaccagcgaggaagaaatcaaaaccactaaccctgtggctacagaggaatacggtatcgtggcagataacttgcagcagcaaaacacggctcctcaaattggaactgtcaacagccagggggccttacccggtatggtctggcagaaccgggacgtgtacctgcagggtcccatctgggccaagattcctcacacggacggcaacttccacccgtctccgctgatgggcggctttggcctgaaacatcctccgcctcagatcctgatcaagaacacgcctgtacctgcggatcctccgaccaccttcaaccagtcaaagctgaactctttcatcacgcaatacagcaccggacaggtcagcgtggaaattgaatgggagctgcagaaggaaaacagcaagcgctggaaccccgagatccagtacacctccaactactacaaatctacaagtgtggactttgctgtaatacagaaggcgtgtactctgaaccccgccccattggcacccgttacctcacccgtaatctg

SEQ ID NO: 124 - DNA, 4393 bp, Adeno-associated virus 8
cagagagggagtggccaactccatcactaggggtagcgcgaagcgcctcccacgctgccgcgtcagcgctgacgtaaattacgtcataggggagtggtcctgtattagctgtcacgtgagtgcttttgcggcattttgcgacaccacgtggccatttgaggtatatatggccgagtgagcgagcaggatctccattttgaccgcgaaatttgaacgagcagcagccatgccgggcttctacgagatcgtgatcaaggtgccgagcgacctggacgagcacctgccgggcatttctgactcgtttgtgaactgggtggccgagaaggaatgggagctgcccccggattctgacatggatcggaatctgatcgagcaggcacccctgaccgtggccgagaagctgcagcgcgacttcctggtccaatggcgccgcgtgagtaaggccccggaggccctcttctttgttcagttcgagaagggcgagagctactttcacctgcacgttctggtcgagaccacgggggtcaagtccatggtgctaggccgcttcctgagtcagattcgggaaaagcttggtccagaccatctacccgcggggtcgagccccaccttgcccaactggttcgcggtgaccaaagacgcggtaatggcgccggcgggggggaacaaggtggtggacgagtgctacatccccaactacctcctgcccaagactcagcccgagctgcagtgggcgtggactaacatggaggagtatataagcgcgtgcttgaacctggccgagcgcaaacggctcgtggcgcagcacctgacccacgtcagccagacgcaggagcagaacaaggagaatctgaaccccaattctgacgcgcccgtgatcaggtcaaaaacctccgcgcgctatatggagctggtcgggtggctggtggaccggggcatcacctccgagaagcagtggatccaggaggaccaggcctcgtacatctccttcaacgccgcctccaactcgcggtcccagatcaaggccgcgctggacaatgccggcaagatcatggcgctgaccaaatccgcgcccgactacctggtggggccctcgctgcccgcggacattacccagaaccgcatctaccgcatcctcgctctcaacggctacgaccctgcctacgccggctccgtctttctcggctgggctcagaaaaagttcgggaaacgcaacaccatctggctgtttggacccgccaccaccggcaagaccaacattgcggaagccatcgcccacgccgtgcccttctacggctgcgtcaactggaccaatgagaactttcccttcaatgattgcgtcgacaagatggtgatctggtgggaggagggcaagatgacggccaaggtcgtggagtccgccaaggccattctcggcggcagcaaggtgcgcgtggaccaaaagtgcaagtcgtccgcccagatcgaccccacccccgtgatcgtcacctccaacaccaacatgtgcgccgtgattgacgggaacagcaccaccttcgagcaccagcagcctctccaggaccggatgtttaagttcgaactcacccgccgtctggagcacgactttggcaaggtgacaaagcaggaagtcaaagagttcttccgctgggccagtgatcacgtgaccgaggtggcgcatgagttttacgtcagaaagggcggagccagcaaaagacccgcccccgatgacgcggataaaagcgagcccaagcgggcctgcccctcagtcgcggatccatcgacgtcagacgcggaaggagctccggtggactttgccgacaggtaccaaaacaaatgttctcgtcacgcgggcatgcttcagatgctgtttccctgcaaaacgtgcgagagaatgaatcagaatttcaacatttgcttcacacacggggtcagagactgctcagagtgtttccccggcgtgtcagaatctcaaccggtcgtcagaaagaggacgtatcggaaactctgtgcgattcatcatctgctggggcgggctcccgagattgcttgctcggcctgcgatctggtcaacgtggacctggatgactgtgtttctgagcaataaatgacttaaaccaggtatggctgccgatggttatcttccagattggctcgaggacaacctctctgagggcattcgcgagtggtgggcgctgaaacctggagccccgaagcccaaagccaaccagcaaaagcaggacgacggccggggtctggtgcttcctggctacaagtacctcggacccttcaacggactcgacaagggggagcccgtcaacgcggcggacgcagcggccctcgagcacgacaaggcctacgaccagcagctgcaggcgggtgacaatccgtacctgcggtataaccacgccgacgccgagtttcaggagcgtctgcaagaagatacgtcttttgggggcaacctcgggcgagcagtcttccaggccaagaagcgggttctcgaacctctcggtctggttgaggaaggcgctaagacggctcctggaaagaagagaccggtagagccatcaccccagcgttctccagactcctctacgggcatcggcaagaaaggccaacagcccgccagaaaaagactcaattttggtcagactggcgactcagagtcagttccagaccctcaacctctcggagaacctccagcagcgccctctggtgtgggacctaatacaatggctgcaggcggtggcgcaccaatggcagacaataacgaaggcgccgacggagtgggtagttcctcgggaaattggcattgcgattccacatggctgggcgacagagtcatcaccaccagcacccgaacctgggccctgcccacctacaacaaccacctctacaagcaaatctccaacgggacatcgggaggagccaccaacgacaacacctacttcggctacagcaccccctgggggtattttgactttaacagattccactgccacttttcaccacgtgactggcagcgactcatcaacaacaactggggattccggcccaagagactcagcttcaagctcttcaacatccaggtcaaggaggtcacgcagaatgaaggcaccaagaccatcgccaataacctcaccagcaccatccaggtgtttacggactcggagtaccagctgccgtacgttctcggctctgcccaccagggctgcctgcctccgttcccggcggacgtgttcatgattccccagtacggctacctaacactcaacaacggtagtcaggccgtgggacgctcctccttctactgcctggaatactttccttcgcagatgctgagaaccggcaacaacttccagtttacttacaccttcgaggacgtgcctttccacagcagctacgcccacagccagagcttggaccggctgatgaatcctctgattgaccagtacctgtactacttgtctcggactcaaacaacaggaggcacggcaaatacgcagactctgggcttcagccaaggtgggcctaatacaatggccaatcaggcaaagaactggctgccaggaccctgttaccgccaacaacgcgtctcaacgacaaccgggcaaaacaacaatagcaactttgcctggactgctgggaccaaataccatctgaatggaagaaattcattggctaatcctggcatcgctatggcaacacacaaagacgacgaggagcgtttttttcccagtaacgggatcctgatttttggcaaacaaaatgctgccagagacaatgcggattacagcgatgtcatgctcaccagcgaggaagaaatcaaaaccactaaccctgtggctacagaggaatacggtatcgtggcagataacttgcagcagcaaaacacggctcctcaaattggaactgtcaacagccagggggccttacccggtatggtctggcagaaccgggacgtgtacctgcagggtcccatctgggccaagattcctcacacggacggcaacttccacccgtctccgctgatgggcggctttggcctgaaacatcctccgcctcagatcctgatcaagaacacgcctgtacctgcggatcctccgaccaccttcaaccagtcaaagctgaactctttcatcacgcaatacagcaccggacaggtcagcgtggaaattgaatgggagctgcagaaggaaaacagcaagcgctggaaccccgagatccagtacacctccaactactacaaatctacaagtgtggactttgctgttaatacagaaggcgtgtactctgaaccccgccccattggcacccgttacctcacccgtaatctgtaattgcctgttaatcaataaaccggttgattcgtttcagttgaactttggtctctgcg

SEQ ID NO: 125 - protein, 738 aa, Adeno-associated virus 8; identical to SEQ ID NO: 116

SEQ ID NO: 126 - protein, 737 aa, Adeno-associated virus 8
MAADGYLPDWLEDNLSEGIREWWALKPGAPKPKANQQKQDDGRGLVLPGYKYLGPFNGLDKGEPVNAADAAALEHDKAYDQQLQAGDNPYLRYNHADAEFQERLQEDTSFGGNLGRAVFQAKKRVLEPLGLVEEGAKTAPGKKRPVEPSPQRSPDSSTGIGKKGQQPARKRLNFGQTGDSESVPDPQPLGEPPAAPSGVGPNTMAAGGGAPMADNNEGADGVGSSSGNWHCDSTWLGDRVITTSTRTWALPTYNNHLYKQISNGTSGGATNDNTYFGYSTPWGYFDFNRFHCHFSPRDWQRLINNNWGFRPKRLSFKLFNIQVKEVTQNEGTKTIANNLTSTIQVFTDSEYQLPYVLGSAHQGCLPPFPADVFMIPQYGYLTLNNGSQAVGRSSFYCLEYFPSQMLRTGNNFQFTYTFEDVPFHSSYAHSQSLDRLMNPLIDQYLYYLSRTQTTGGTANTQTLGFSQGGPNTMANQAKNWLPGPCYRQQRVSTTTGQNNNSNFAWTAGTKYHLNGRNSLANPGIAMATHKDDEERFFPSNGILIFGKQNAARDNADYSDVMLTSEEEIKTTNPVATEEYGIVADNLQQQNTAPQIGTVNSQGALPGMVWQNRDVYLQGPIWAKIPHTDGNFHPSPLMGGFGLKHPPPQILIKNTPVPADPPTTFNQSKLNSFITQYSTGQVSVEIEWELQKENSKRWNPEIQYTSNYYKSTSVDFAVIQKACTLNPAPLAPVTSPVI

SEQ ID NO: 127 - DNA, 2217 bp, Artificial Sequence; identical to SEQ ID NO: 122
  Description of Artificial Sequence: Synthetic polynucleotide

SEQ ID NO: 128 - DNA, 2214 bp, Artificial Sequence
  Description of Artificial Sequence: Synthetic polynucleotide
atggctgccgatggttatcttccagattggctcgaggacaacctctctgagggcattcgcgagtggtgggcgctgaaacctggagccccgaagcccaaagccaaccagcaaaagcaggacgacggccggggtctggtgcttcctggctacaagtacctcggacccttcaacggactcgacaagggggagcccgtcaacgcggcggacgcagcggccctcgagcacgacaaggcctacgaccagcagctgcaggcgggtgacaatccgtacctgcggtataaccacgccgacgccgagtttcaggagcgtctgcaagaagatacgtcttttgggggcaacctcgggcgagcagtcttccaggccaagaagcgggttctcgaacctctcggtctggttgaggaaggcgctaagacggctcctggaaagaagagaccggtagagccatcaccccagcgttctccagactcctctacgggcatcggcaagaaaggccaacagcccgccagaaaaagactcaattttggtcagactggcgactcagagtcagttccagaccctcaacctctcggagaacctccagcagcgccctctggtgtgggacctaatacaatggctgcaggcggtggcgcaccaatggcagacaataacgaaggcgccgacggagtgggtagttcctcgggaaattggcattgcgattccacatggctgggcgacagagtcatcaccaccagcacccgaacctgggccctgcccacctacaacaaccacctctacaagcaaatctccaacgggacatcgggaggagccaccaacgacaacacctacttcggctacagcaccccctgggggtattttgactttaacagattccactgccacttttcaccacgtgactggcagcgactcatcaacaacaactggggattccggcccaagagactcagcttcaagctcttcaacatccaggtcaaggaggtcacgcagaatgaaggcaccaagaccatcgccaataacctcaccagcaccatccaggtgtttacggactcggagtaccagctgccgtacgttctcggctctgcccaccagggctgcctgcctccgttcccggcggacgtgttcatgattccccagtacggctacctaacactcaacaacggtagtcaggccgtgggacgctcctccttctactgcctggaatactttccttcgcagatgctgagaaccggcaacaacttccagtttacttacaccttcgaggacgtgcctttccacagcagctacgcccacagccagagcttggaccggctgatgaatcctctgattgaccagtacctgtactacttgtctcggactcaaacaacaggaggcacggcaaatacgcagactctgggcttcagccaaggtgggcctaatacaatggccaatcaggcaaagaactggctgccaggaccctgttaccgccaacaacgcgtctcaacgacaaccgggcaaaacaacaatagcaactttgcctggactgctgggaccaaataccatctgaatggaagaaattcattggctaatcctggcatcgctatggcaacacacaaagacgacgaggagcgtttttttcccagtaacgggatcctgatttttggcaaacaaaatgctgccagagacaatgcggattacagcgatgtcatgctcaccagcgaggaagaaatcaaaaccactaaccctgtggctacagaggaatacggtatcgtggcagataacttgcctgagcggacggcgatgagtcttccgggaactgtcaacagccagggggccttacccggtatggtctggcagaaccgggacgtgtacctgcagggtcccatctgggccaagattcctcacacggacggcaacttccacccgtctccgctgatgggcggctttggcctgaaacatcctccgcctcagatcctgatcaagaacacgcctgtacctgcggatcctccgaccaccttcaaccagtcaaagctgaactctttcatcacgcaatacagcaccggacaggtcagcgtggaaattgaatgggagctgcagaaggaaaacagcaagcgctggaaccccgagatccagtacacctccaactactacaaatctacaagtgtggactttgctgttaatacagaaggcgtgtactctgaaccccgccccattggcacccgttacctcacccgtaatctg

SEQ ID NO: 129 - protein, 738 aa, Artificial Sequence
  Description of Artificial Sequence: Synthetic polypeptide
MAADGYLPDWLEDNLSEGIREWWALKPGAPKPKANQQKQDDGRGLVLPGYKYLGPFNGLDKGEPVNAADAAALEHDKAYDQQLQAGDNPYLRYNHADAEFQERLQEDTSFGGNLGRAVFQAKKRVLEPLGLVEEGAKTAPGKKRPVEPSPQRSPDSSTGIGKKGQQPARKRLNFGQTGDSESVPDPQPLGEPPAAPSGVGPNTMAAGGGAPMADNNEGADGVGSSSGNWHCDSTWLGDRVITTSTRTWALPTYNNHLYKQISNGTSGGATNDNTYFGYSTPWGYFDFNRFHCHFSPRDWQRLINNNWGFRPKRLSFKLFNIQVKEVTQNEGTKTIANNLTSTIQVFTDSEYQLPYVLGSAHQGCLPPFPADVFMIPQYGYLTLNNGSQAVGRSSFYCLEYFPSQMLRTGNNFQFTYTFEDVPFHSSYAHSQSLDRLMNPLIDQYLYYLSRTQTTGGTANTQTLGFSQGGPNTMANQAKNWLPGPCYRQQRVSTTTGQNNNSNFAWTAGTKYHLNGRNSLANPGIAMATHKDDEERFFPSNGILIFGKQNAARDNADYSDVMLTSEEEIKTTNPVATEEYGIVADNLPERTAMSLPGTVNSQGALPGMVWQNRDVYLQGPIWAKIPHTDGNFHPSPLMGGFGLKHPPPQILIKNTPVPADPPTTFNQSKLNSFITQYSTGQVSVEIEWELQKENSKRWNPEIQYTSNYYKSTSVDFAVNTEGVYSEPRPIGTRYLTRNL

SEQ ID NO: 130 - DNA, 2214 bp, Artificial Sequence
  Description of Artificial Sequence: Synthetic polynucleotide
atggctgccgatggttatcttccagattggctcgaggacaacctctctgagggcattcgcgagtggtgggcgctgaaacctggagccccgaagcccaaagccaaccagcaaaagcaggacgacggccggggtctggtgcttcctggctacaagtacctcggacccttcaacggactcgacaagggggagcccgtcaacgcggcggacgcagcggccctcgagcacgacaaggcctacgaccagcagctgcaggcgggtgacaatccgtacctgcggtataaccacgccgacgccgagtttcaggagcgtctgcaagaagatacgtcttttgggggcaacctcgggcgagcagtcttccaggccaagaagcgggttctcgaacctctcggtctggttgaggaaggcgctaagacggctcctggaaagaagagaccggtagagccatcaccccagcgttctccagactcctctacgggcatcggcaagaaaggccaacagcccgccagaaaaagactcaattttggtcagactggcgactcagagtcagttccagaccctcaacctctcggagaacctccagcagcgccctctggtgtgggacctaatacaatggctgcaggcggtggcgcaccaatggcagacaataacgaaggcgccgacggagtgggtagttcctcgggaaattggcattgcgattccacatggctgggcgacagagtcatcaccaccagcacccgaacctgggccctgcccacctacaacaaccacctctacaagcaaatctccaacgggacatcgggaggagccaccaacgacaacacctacttcggctacagcaccccctgggggtattttgactttaacagattccactgccacttttcaccacgtgactggcagcgactcatcaacaacaactggggattccggcccaagagactcagcttcaagctcttcaacatccaggtcaaggaggtcacgcagaatgaaggcaccaagaccatcgccaataacctcaccagcaccatccaggtgtttacggactcggagtaccagctgccgtacgttctcggctctgcccaccagggctgcctgcctccgttcccggcggacgtgttcatgattccccagtacggctacctaacactcaacaacggtagtcaggccgtgggacgctcctccttctactgcctggaatactttccttcgcagatgctgagaaccggcaacaacttccagtttacttacaccttcgaggacgtgcctttccacagcagctacgcccacagccagagcttggaccggctgatgaatcctctgattgaccagtacctgtactacttgtctcggactcaaacaacaggaggcacggcaaatacgcagactctgggcttcagccaaggtgggcctaatacaatggccaatcaggcaaagaactggctgccaggaccctgttaccgccaacaacgcgtctcaacgacaaccgggcaaaacaacaatagcaactttgcctggactgctgggaccaaataccatctgaatggaagaaattcattggctaatcctggcatcgctatggcaacacacaaagacgacgaggagcgtttttttcccagtaacgggatcctgatttttggcaaacaaaatgctgccagagacaatgcggattacagcgatgtcatgctcaccagcgaggaagaaatcaaaaccactaaccctgtggctacagaggaatacggtatcgtggcagataacttgagttttagtcgtgcggttctttgtgatggaactgtcaacagccagggggccttacccggtatggtctggcagaaccgggacgtgtacctgcagggtcccatctgggccaagattcctcacacggacggcaacttccacccgtctccgctgatgggcggctttggcctgaaacatcctccgcctcagatcctgatcaagaacacgcctgtacctgcggatcctccgaccaccttcaaccagtcaaagctgaactctttcatcacgcaatacagcaccggacaggtcagcgtggaaattgaatgggagctgcagaaggaaaacagcaagcgctggaaccccgagatccagtacacctccaactactacaaatctacaagtgtggactttgctgttaatacagaaggcgtgtactctgaaccccgccccattggcacccgttacctcacccgtaatctg

SEQ ID NO: 131 - protein, 738 aa, Artificial Sequence
  Description of Artificial Sequence: Synthetic polypeptide
MAADGYLPDWLEDNLSEGIREWWALKPGAPKPKANQQKQDDGRGLVLPGYKYLGPFNGLDKGEPVNAADAAALEHDKAYDQQLQAGDNPYLRYNHADAEFQERLQEDTSFGGNLGRAVFQAKKRVLEPLGLVEEGAKTAPGKKRPVEPSPQRSPDSSTGIGKKGQQPARKRLNFGQTGDSESVPDPQPLGEPPAAPSGVGPNTMAAGGGAPMADNNEGADGVGSSSGNWHCDSTWLGDRVITTSTRTWALPTYNNHLYKQISNGTSGGATNDNTYFGYSTPWGYFDFNRFHCHFSPRDWQRLINNNWGFRPKRLSFKLFNIQVKEVTQNEGTKTIANNLTSTIQVFTDSEYQLPYVLGSAHQGCLPPFPADVFMIPQYGYLTLNNGSQAVGRSSFYCLEYFPSQMLRTGNNFQFTYTFEDVPFHSSYAHSQSLDRLMNPLIDQYLYYLSRTQTTGGTANTQTLGFSQGGPNTMANQAKNWLPGPCYRQQRVSTTTGQNNNSNFAWTAGTKYHLNGRNSLANPGIAMATHKDDEERFFPSNGILIFGKQNAARDNADYSDVMLTSEEEIKTTNPVATEEYGIVADNLSFSRAVLCDGTVNSQGALPGMVWQNRDVYLQGPIWAKIPHTDGNFHPSPLMGGFGLKHPPPQILIKNTPVPADPPTTFNQSKLNSFITQYSTGQVSVEIEWELQKENSKRWNPEIQYTSNYYKSTSVDFAVNTEGVYSEPRPIGTRYLTRNL

SEQ ID NO: 132 - DNA, 4385 bp, Adeno-associated virus 9
cagagagggagtggccaactccatcactaggggtaatcgcgaagcgcctcccacgctgccgcgtcagcgctgacgtagattacgtcataggggagtggtcctgtattagctgtcacgtgagtgcttttgcgacattttgcgacaccacatggccatttgaggtatatatggccgagtgagcgagcaggatctccattttgaccgcgaaatttgaacgagcagcagccatgccgggcttctacgagattgtgatcaaggtgccgagcgacctggacgagcacctgccgggcatttctgactcttttgtgaactgggtggccgagaaggaatgggagctgcccccggattctgacatggatcggaatctgatcgagcaggcacccctgaccgtggccgagaagctgcagcgcgacttcctggtccaatggcgccgcgtgagtaaggccccggaggccctcttctttgttcagttcgagaagggcgagagctactttcacctgcacgttctggtcgagaccacgggggtcaagtccatggtgctaggccgcttcctgagtcagattcgggagaagctggtccagaccatctaccgcgggatcgagccgaccctgcccaactggttcgcggtgaccaagacgcgtaatggcgccggcggggggaacaaggtggtggacgagtgctacatccccaactacctcctgcccaagactcagcccgagctgcagtgggcgtggactaacatggaggagtatataagcgcgtgcttgaacctggccgagcgcaaacggctcgtggcgcagcacctgacccacgtcagccagacgcaggagcagaacaaggagaatctgaaccccaattctgacgcgcccgtgatcaggtcaaaaacctccgcgcgctacatggagctggtcgggtggctggtggaccggggcatcacctccgagaagcagtggatccaggaggaccaggcctcgtacatctccttcaacgccgcctccaactcgcggtcccagatcaaggccgcgctggacaatgccggcaagatcatggcgctgaccaaatccgcgcccgactacctggtaggcccttcacttccggtggacattacgcagaaccgcatctaccgcatcctgcagctcaacggctacgaccctgcctacgccggctccgtctttctcggctgggcacaaaagaagttcgggaaacgcaacaccatctggctgtttgggccggccaccacgggaaagaccaacatcgcagaagccattgcccacgccgtgcccttctacggctgcgtcaactggaccaatgagaactttcccttcaacgattgcgtcgacaagatggtgatctggtgggaggagggcaagatgacggccaaggtcgtggagtccgccaaggccattctcggcggcagcaaggtgcgcgtggaccaaaagtgcaagtcgtccgcccagatcgaccccactcccgtgatcgtcacctccaacaccaacatgtgcgccgtgattgacgggaacagcaccaccttcgagcaccagcagcctctccaggaccggatgtttaagttcgaactcacccgccgtctggagcacgactttggcaaggtgacaaagcaggaagtcaaagagttcttccgctgggccagtgatcacgtgaccgaggtggcgcatgagttttacgtcagaaagggcggagccagcaaaagacccgcccccgatgacgcggataaaagcgagcccaagcgggcctgcccctcagtcgcggatccatcgacgtcagacgcggaaggagctccggtggactttgccgacaggtaccaaaacaaatgttctcgtcacgcgggcatgcttcagatgctgcttccctgcaaaacgtgcgagagaatgaatcagaatttcaacatttgcttcacacacggggtcagagactgctcagagtgtttccccggcgtgtcagaatctcaaccggtcgtcagaaagaggacgtatcggaaactctgtgcgattcatcatctgctggggcgggctcccgagattgcttgctcggcctgcgatctggtcaacgtggacctggatgactgtgtttctgagcaataaatgacttaaaccaggtatggctgccgatggttatcttccagattggctcgaggacaacctctctgagggcattcgcgagtggtgggcgctgaaacctggagccccgaagcccaaagccaaccagcaaaagcaggacgacggccggggtctggtgcttcctggctacaagtacctcggacccttcaacggactcgacaagggggagcccgtcaacgcggcggacgcagcggccctcgagcacggcaaggcctacgaccagcagctgcaggcgggtgacaatccgtacctgcggtataaccacgccgacgccgagtttcaggagcgtctgcaagaagatacgtcttttgggggcaacctcgggcgagcagtcttccaggccaagaagcgggttctcgaacctctcggtctggttgaggaaggcgctaagacggctcctggaaagaagagaccggtagagccatcaccccagcgttctccagactcctctacgggcatcggcaagaaaggccaacagcccgccagaaaaagactcaattttggtcagactggcgactcagagtcagttccagaccctcaacctctcggagaacctccagcagcgccctctggtgtgggacctaatacaatggctgcaggcggtggcgcaccaatggcagacaataacgaaggcgccgacggagtgggtaattcctcgggaaattggcattgcgattccacatggctgggggacagagtcatcaccaccagcacccgaacctgggcattgcccacctacaacaaccacctctacaagcaaatctccaatggaacatcgggaggaagcaccaacgacaacacctactttggctacagcaccccctgggggtattttgacttcaacagattccactgccacttctcaccacgtgactggcagcgactcatcaacaacaactggggattccggccaaagagactcaacttcaagctgttcaacatccaggtcaaggaggttacgacgaacgaaggcaccaagaccatcgccaataaccttaccagcaccgtccaggtctttacggactcggagtaccagctaccgtacgtcctaggctctgcccaccaaggatgcctgccaccgtttcctgcagacgtcttcatggttcctcagtacggctacctgacgctcaacaatggaagtcaagcgttaggacgttcttctttctactgtctggaatacttcccttctcagatgctgagaaccggcaacaactttcagttcagctacactttcgaggacgtgcctttccacagcagctacgcacacagccagagtctagatcgactgatgaaccccctcatcgaccagtacctatactacctggtcagaacacagacaactggaactgggggaactcaaactttggcattcagccaagcaggccctagctcaatggccaatcaggctagaaactgggtacccgggccttgctaccgtcagcagcgcgtctccacaaccaccaaccaaaataacaacagcaactttgcgtggacgggagctgctaaattcaagctgaacgggagagactcgctaatgaatcctggcgtggctatggcatcgcacaaagacgacgaggaccgcttctttccatcaagtggcgttctcatatttggcaagcaaggagccgggaacgatggagtcgactacagccaggtgctgattacagatgaggaagaaattaaagccaccaaccctgtagccacagaggaatacggagcagtggccatcaacaaccaggccgctaacacgcaggcgcaaactggacttgtgcataaccagggagttattcctggtatggtctggcagaaccgggacgtgtacctgcagggccctatttgggctaaaatacctcacacagatggcaactttcacccgtctcctctgatgggtggatttggactgaaacacccacctccacagattctaattaaaaatacaccagtgccggcagatcctcctcttaccttcaatcaagccaagctgaactctttcatcacgcagtacagcacgggacaagtcagcgtggaaatcgagtgggagctgcagaaagaaaacagcaagcgctggaatccagagatccagtatacttcaaactactacaaatctacaaatgtggactttgctgtcaataccaaaggtgtttactctgagcctcgccccattggtactcgttacctcacccgtaatttgtaattgcctgttaatcaataaaccggttaattcgtttcagttgaactttggtctctgcg

SEQ ID NO: 133 - DNA, 4382 bp, Adeno-associated virus 9
cagagagggagtggccaactccatcactaggggtaatcgcgaagcgcctcccacgctgccgcgtcagcgctgacgtagattacgtcataggggagtggtcctgtattagctgtcacgtgagtgcttttgcgacattttgcgacaccacatggccatttgaggtatatatggccgagtgagcgagcaggatctccattttgaccgcgaaatttgaacgagcagcagccatgccgggcttctacgagattgtgatcaaggtgccgagcgacctggacgagcacctgccgggcatttctgactcttttgtgaactgggtggccgagaaggaatgggagctgcccccggattctgacatggatcggaatctgatcgagcaggcacccctgaccgtggccgagaagctgtagcgcgacttcctggtccaatggcgccgcgtgagtaaggccccggaggccctcttctttgttcagttcgagaagggcgagagctactttcacctgcacgttctggtcgagaccacgggggtcaagtccatggtgctaggccgcttcctgagtcagattcgggagaagctggtccagaccatctaccgcgggatcgagccgaccctgcccaactggttcgcggtgaccaagacgcgtaatggcgccggcggggggaacaaggtggtggacgagtgctacatccccaactacctcctgcccaagactcagcccgagctgcagtgggcgtggactaacatggaggagtatataagcgcgtgcttgaacctggccgagcgcaaacggctcgtggcgcagcacctgacccacgtcagccagacgcaggagcagaacaaggagaatctgaaccccaattctgacgcgcccgtgatcaggtcaaaaacctccgcgcgctacatggagctggtcgggtggctggtggaccggggcatcacctccgagaagcagtggatccaggaggaccaggcctcgtacatctccttcaacgccgcctccaactcgcggtcccagatcaaggccgcgctggacaatgccggcaagatcatggcgctgaccaaatccgcgcccgactacctggtaggcccttcacttccggtggacattacgcagaaccgcatctaccgcatcctgcagctcaacggctacgaccctgcctacgccggctccgtctttctcggctgggcacaaaagaagttcgggaaacgcaacaccatctggctgtttgggccggccaccacgggaaagaccaacatcgcagaagccattgcccacgccgtgcccttctacggctgcgtcaactggaccaatgagaactttcccttcaacgattgcgtcgacaagatggtgatctggtgggaggagggcaagatgacggccaaggtcgtggagtccgccaaggccattctcggcggcagcaaggtgcgcgtggaccaaaagtgcaagtcgtccgcccagatcgaccccactcccgtgatcgtcacctccaacaccaacatgtgcgccgtgattgacgggaacagcaccaccttcgagcaccagcagcctctccaggaccggatgtttaagttcgaactcacccgccgtctggagcacgactttggcaaggtgacaaagcaggaagtcaaagagttcttccgctgggccagtgatcacgtgaccgaggtggcgcatgagttttacgtcagaaagggcggagccagcaaaagacccgcccccgatgacgcggataaaagcgagcccaagcgggcctgcccctcagtcgcggatccatcgacgtcagacgcggaaggagctccggtggactttgccgacaggtaccaaaacaaatgttctcgtcacgcgggcatgcttcagatgctgcttccctgcaaaacgtgcgagagaatgaatcagaatttcaacatttgcttcacacacggggtcagagactgctcagagtgtttccccggcgtgtcagaatctcaaccggtcgtcagaaagaggacgtatcggaaactctgtgcgattcatcatctgctggggcgggctcccgagattgcttgctcggcctgcgatctggtcaacgtggacctggatgactgtgtttctgagcaataaatgacttaaaccaggtatggctgccgatggttatcttccagattggctcgaggacaacctctctgagggcattcgcgagtggtgggacctgaaacctggagccccgaaacccaaagccaaccagcaaaagcaggacgacggccggggtctggtgcttcctggctacaagtacctcggacccttcaacggactcgacaagggggagcccgtcaacgcggcggacgcagcggccctcgagcacgacaaggcctacgaccagcagctcaaagcgggtgacaatccgtacctgcggtataaccacgccgacgccgagtttcaggagcgtctgcaagaagatacgtcttttgggggcaacctcgggcgagcagtcttccaggccaagaagcgggttctcgaacctctcggtctggttgaggaaggcgctaagacggctcctggaaagaagagaccggtagagcagtcaccccaagaaccagactcatcctcgggcatcggcaaatcaggccagcagcccgctaaaaagagactcaattttggtcagactggcgactcagagtcagtccccgacccacaacctctcggagaacctccagaagccccctcaggtctgggacctaatacaatggcttcaggcggtggcgctccaatggcagacaataacgaaggcgccgacggagtgggtaattcctcgggaaattggcattgcgattccacatggctgggggacagagtcatcaccaccagcacccgaacctgggcattgcccacctacaacaaccacctctacaagcaaatctccaatggaacatcgggaggaagcaccaacgacaacacctactttggctacagcaccccctgggggtattttgacttcaacagattccactgccacttctcaccacgtgactggcagcgactcatcaacaacaactggggattccggccaaagagactcaacttcaagctgttcaacatccaggtcaaggaggttacgacgaacgaaggcaccaagaccatcgccaataaccttaccagcaccgtccaggtctttacggactcggagtaccagctaccgtacgtcctaggctctgcccaccaaggatgcctgccaccgtttcctgcagacgtcttcatggttcctcagtacggctacctgacgctcaacaatggaagtcaagcgttaggacgttcttctttctactgtctggaatacttcccttctcagatgctgagaaccggcaacaactttcagttcagctacactttcgaggacgtgcctttccacagcagctacgcacacagccagagtctagatcgactgatgaaccccctcatcgaccagtacctatactacctggtcagaacacagacaactggaactgggggaactcaaactttggcattcagccaagcaggccctagctcaatggccaatcaggctagaaactgggtacccgggccttgctaccgtcagcagcgcgtctccacaaccaccaaccaaaataacaacagcaactttgcgtggacgggagctgctaaattcaagctgaacgggagagactcgctaatgaatcctggcgtggctatggcatcgcacaaagacgacgaggaccgcttctttccatcaagtggcgttctcatatttggcaagcaaggagccgggaacgatggagtcgactacagccaggtgctgattacagatgaggaagaaattaaagccaccaaccctgtagccacagaggaatacggagcagtggccatcaacaaccaggccgctaacacgcaggcgcaaactggacttgtgcataaccagggagttattcctggtatggtctggcagaaccgggacgtgtacctgcagggccctatttgggctaaaatacctcacacagatggcaactttcacccgtctcctctgatgggtggatttggactgaaacacccacctccacagattctaattaaaaatacaccagtgccggcagatcctcctcttaccttcaatcaagccaagctgaactctttcatcacgcagtacagcacgggacaagtcagcgtggaaatcgagtgggagctgcagaaagaaaacagcaagcgctggaatccagagatccagtatacttcaaactactacaaatctacaaatgtggactttgctgtcaataccgaaggtgtttactctgagcctcgccccattggtactcgttacctcacccgtaatttgtaattgcctgttaatcaataaaccggttaattcgtttcagttgaactttggtctctgcg

SEQ ID NO: 134 - protein, 736 aa, Adeno-associated virus 9
MAADGYLPDWLEDNLSEGIREWWALKPGAPQPKANQQHQDNARGLVLPGYKYLGPGNGLDKGEPVNAADAAALEHDKAYDQQLKAGDNPYLKYNHADAEFQERLKEDTSFGGNLGRAVFQAKKRLLEPLGLVEEAAKTAPGKKRPVEQSPQEPDSSAGIGKSGAQPAKKRLNFGQTGDTESVPDPQPIGEPPAAPSGVGSLTMASGGGAPVADNNEGADGVGSSSGNWHCDSQWLGDRVITTSTRTWALPTYNNHLYKQISNSTSGGSSNDNAYFGYSTPWGYFDFNRFHCHFSPRDWQRLINNNWGFRPKRLNFKLFNIQVKEVTDNNGVKTIANNLTSTVQVFTDSDYQLPYVLGSAHEGCLPPFPADVFMIPQYGYLTLNDGSQAVGRSSFYCLEYFPSQMLRTGNNFQFSYEFENVPFHSSYAHSQSLDRLMNPLIDQYLYYLSKTINGSGQNQQTLKFSVAGPSNMAVQGRNYIPGPSYRQQRVSTTVTQNNNSEFAWPGASSWALNGRNSLMNPGPAMASHKEGEDRFFPLSGSLIFGKQGTGRDNVDADKVMITNEEEIKTTNPVATESYGQVATNHQSAQAQAQTGWVQNQGILPGMVWQDRDVYLQGPIWAKIPHTDGNFHPSPLMGGFGMKHPPPQILIKNTPVPADPPTAFNKDKLNSFITQYSTGQVSVEIEWELQKENSKRWNPEIQYTSNYYKSNNVEFAVNTEGVYSEPRPIGTRYLTRNL

SEQ ID NO: 135 - protein, 736 aa, Adeno-associated virus 9
MAADGYLPDWLEDNLSEGIREWWDLKPGAPKPKANQQKQDDGRGLVLPGYKYLGPFNGLDKGEPVNAADAAALEHDKAYDQQLKAGDNPYLRYNHADAEFQERLQEDTSFGGNLGRAVFQAKKRVLEPLGLVEEGAKTAPGKKRPVEQSPQEPDSSSGIGKSGQQPAKKRLNFGQTGDSESVPDPQPLGEPPEAPSGLGPNTMASGGGAPMADNNEGADGVGNSSGNWHCDSTWLGDRVITTSTRTWALPTYNNHLYKQISNGTSGGSTNDNTYFGYSTPWGYFDFNRFHCHFSPRDWQRLINNNWGFRPKRLNFKLFNIQVKEVTTNEGTKTIANNLTSTVQVFTDSEYQLPYVLGSAHQGCLPPFPADVFMVPQYGYLTLNNGSQALGRSSFYCLEYFPSQMLRTGNNFQFSYTFEDVPFHSSYAHSQSLDRLMNPLIDQYLYYLVRTQTTGTGGTQTLAFSQAGPSSMANQARNWVPGPCYRQQRVSTTTNQNNNSNFAWTGAAKFKLNGRDSLMNPGVAMASHKDDEDRFFPSSGVLIFGKQGAGNDGVDYSQVLITDEEEIKATNPVATEEYGAVAINNQAANTQAQTGLVHNQGVIPGMVWQNRDVYLQGPIWAKIPHTDGNFHPSPLMGGFGLKHPPPQILIKNTPVPADPPLTFNQAKLNSFITQYSTGQVSVEIEWELQKENSKRWNPEIQYTSNYYKSTNVDFAVNTEGVYSEPRPIGTRYLTRNL

SEQ ID NO: 136 - protein, 623 aa, Adeno-associated virus 9
MPGFYEIVIKVPSDLDEHLPGISDSFVNWVAEKEWELPPDSDMDRNLIEQAPLTVAEKLQRDFLVQWRRVSKAPEALFFVQFEKGESYFHLHVLVETTGVKSMVLGRFLSQIREKLVQTIYRGIEPTLPNWFAVTKTRNGAGGGNKVVDECYIPNYLLPKTQPELQWAWTNMEEYISACLNLAERKRLVAQHLTHVSQTQEQNKENLNPNSDAPVIRSKTSARYMELVGWLVDRGITSEKQWIQEDQASYISFNAASNSRSQIKAALDNAGKIMALTKSAPDYLVGPSLPVDITQNRIYRILQLNGYDPAYAGSVFLGWAQKKFGKRNTIWLFGPATTGKTNIAEAIAHAVPFYGCVNWTNENFPFNDCVDKMVIWWEEGKMTAKVVESAKAILGGSKVRVDQKCKSSAQIDPTPVIVTSNTNMCAVIDGNSTTFEHQQPLQDRMFKFELTRRLEHDFGKVTKQEVKEFFRWASDHVTEVAHEFYVRKGGASKRPAPDDADKSEPKRACPSVADPSTSDAEGAPVDFADRYQNKCSRHAGMLQMLLPCKTCERMNQNFNICFTHGVRDCSECFPGVSESQPVVRKRTYRKLCAIHHLLGRAPEIACSACDLVNVDLDDCVSEQ

SEQ ID NO: 137 - DNA, 2211 bp, Artificial Sequence
  Description of Artificial Sequence: Synthetic polynucleotide
atggctgccgatggttatcttccagattggctcgaggacaaccttagtgaaggaattcgcgagtggtgggctttgaaacctggagcccctcaacccaaggcaaatcaacaacatcaagacaacgctcgaggtcttgtgcttccgggttacaaataccttggacccggcaacggactcgacaagggggagccggtcaacgcagcagacgcggcggccctcgagcacgacaaggcctacgaccagcagctcaaggccggagacaacccgtacctcaagtacaaccacgccgacgccgagttccaggagcggctcaaagaagatacgtcttttgggggcaacctcgggcgagcagtcttccaggccaaaaagaggcttcttgaacctcttggtctggttgaggaagcggctaagacggctcctggaaagaagaggcctgtagagcagtctcctcaggaaccggactcctccgcgggtattggcaaatcgggtgcacagcccgctaaaaagagactcaatttcggtcagactggcgacacagagtcagtcccagaccctcaaccaatcggagaacctcccgcagccccctcaggtgtgggatctcttacaatggcttcaggtggtggcgcaccagtggcagacaataacgaaggtgccgatggagtgggtagttcctcgggaaattggcattgcgattcccaatggctgggggacagagtcatcaccaccagcacccgaacctgggccctgcccacctacaacaatcacctctacaagcaaatctccaacagcacatctggaggatcttcaaatgacaacgcctacttcggctacagcaccccctgggggtattttgacttcaacagattccactgccacttctcaccacgtgactggcagcgactcatcaacaacaactggggattccggcctaagcgactcaacttcaagctcttcaacattcaggtcaaagaggttacggacaacaatggagtcaagaccatcgccaataaccttaccagcacggtccaggtcttcacggactcagactatcagctcccgtacgtgctcgggtcggctcacgagggctgcctcccgccgttcccagcggacgttttcatgattcctcagtacgggtatctgacgcttaatgatggaagccaggccgtgggtcgttcgtccttttactgcctggaatatttcccgtcgcaaatgctaagaacgggtaacaacttccagttcagctacgagtttgagaacgtacctttccatagcagctacgctcacagccaaagcctggaccgactaatgaatccactcatcgaccaatacttgtactatctctcaaagactattaacggttctggacagaatcaacaaacgctaaaattcagtgtggccggacccagcaacatggctgtccagggaagaaactacatacctggacccagctaccgacaacaacgtgtctcaaccactgtgactcaaaacaacaacagcgaatttgcttggcctggagcttcttcttgggctctcaatggacgtaatagcttgatgaatcctggacctgctatggccagccacaaagaaggagaggaccgtttctttcctttgtctggatctttaatttttggcaaacaaggaactggaagagacaacgtggatgcggacaaagtcatgataaccaacgaagaagaaattaaaactactaacccggtagcaacggagtcctatggacaagtggccacaaaccaccagagtgcccaagcacaggcgcagaccggctgggttcaaaaccaaggaatacttccgggtatggtttggcaggacagagatgtgtacctgcaaggacccatttgggccaaaattcctcacacggacggcaactttcacccttctccgctgatgggagggtttggaatgaagcacccgcctcctcagatcctcatcaaaaacacacctgtacctgcggatcctccaacggccttcaacaaggacaagctgaactctttcatcacccagtattctactggccaagtcagcgtggagatcgagtgggagctgcagaaggaaaacagcaagcgctggaacccggagatccagtacacttccaactattacaagtctaataatgttgaatttgctgttaatactgaaggtgtatatagtgaaccccgccccattggcaccagatacctgactcgtaatctgtaa

SEQ ID NO: 138 - protein, 736 aa, Artificial Sequence; identical to SEQ ID NO: 134
  Description of Artificial Sequence: Synthetic polypeptide

SEQ ID NO: 139 - DNA, 2460 bp, Artificial Sequence
  Description of Artificial Sequence: Synthetic polynucleotide
ggtaattcctccggaaattggcattgcgattccacatggctgggcgaccgagtcattaccaccagcacccggacttgggccctgcccacctacaacaaccacctctacaagcaaatctccagccaatcgggtgccaccaacgacaaccactacttcggctacagcaccccttgggggtattttgatttcaacagattccactgccatttctcaccacgtgactggcagcgactcatcaacaacaactggggattcatggctgccgatggttatcttccagattggctcgaggacactctctctgaaggaatcagacagtggtggaagctcaaacctggcccaccaccgccgaaacctaaccaacaacaccgggacgacagtaggggtcttgtgcttcctgggtacaagtacctcggacccttcaacggactcgacaaaggagagccggtcaacgaggcagacgccgcggccctcgagcacgacaaagcctacgaccaccagctcaagcaaggggacaacccgtacctcaaatacaaccacgcggacgctgaatttcaggagcgtcttcaagaagatacgtctttcgggggcaacctcgggcgagcagtcttccaggccaaaaagagggtactcgagcctcttggtctggttgaggaagctgttaagacggctcctggaaaaaagagacctatagagcagtctcctgcagaaccggactcttcctcgggcatcggcaaatcaggccagcagcccgctaagaaaagactcaattttggtcagactggcgacacagagtcagtcccagaccctcaaccaatcggagaaccccccgcagccccctctggtgtgggatctaatacaatggcttcaggcggtggggcaccaatggcagacaataacgaaggcgccgacggagtgggtaattcctcgggaaattggcattgcgattccacatggatgggcgacagagttatcaccaccagcacaagaacctgggccctccccacctacaataatcacctctacaagcaaatctccagcgaatcgggagccaccaacgacaaccactacttcggctacagcaccccctgggggtattttgactttaacagattccactgtcacttctcaccacgtgactggcagcgactcatcaacaacaactggggatttagacccaagaaactcaatttcaagctcttcaacatccaagtcaaggaggtcacgcagaatgatggaaccacgaccatcgccaataaccttaccagcacggtgcaggtcttcacagactctgagtaccagctgccctacgtcctcggttcggctcaccagggctgccttccgccgttcccagcagacgtcttcatgattcctcagtacggctacttgactctgaacaatggcagccaagcggtaggacgttcttcattctactgtctagagtattttccctctcagatgctgaggacgggaaacaacttcaccttcagctacacttttgaagacgtgcctttccacagcagctacgcgcacagccagagtctggatcggctgatgaatcctctcattgaccagtacctgtattacctgagcaaaactcagggtacaagtggaacaacgcagcaatcgagactgcagttcagccaagctgggcctagctccatggctcagcaggccaaaaactggctaccgggacccagctaccgacagcagcgaatgtctaagacggctaatgacaacaacaacagtgaatttgcttggactgcagccaccaaatattacctgaatggaagaaattctctggtcaatcccgggcccccaatggccagtcacaaggacgatgaggaaaagtatttccccatgcacggaaatctcatctttggaaaacaaggcacaggaactaccaatgtggacattgaatcagtgcttattacagacgaagaagaaatcagaacaactaatcctgtggctacagaacaatacggacaggttgccaccaaccatcagagtcagaacaccacagcttcctatggaagtgtggacagccagggaatcttacctggaatggtgtggcaggaccgcgatgtctatcttcaaggtcccatttgggccaaaactcctcacacggacggacactttcatccttctccgctcatgggaggctttggactgaaacaccctcctccccagatcctgatcaaaaacacacctgtgccagcgaatcccgcgaccactttcactcctggaaagtttgcttcgttcattacccagtattccaccggacaggtcagcgtggaaatagagtgggagctgcagaaagaaaacagcaaacgctggaacccagaaattcagtacacctccaactacaacaagtcggtgaatgtggagtttaccgtggacgcaaacggtgtttattctgaaccccgccctattggcactcgttaccttacccggaacttg

SEQ ID NO: 140 - DNA, 3123 bp, Artificial Sequence
  Description of Artificial Sequence: Synthetic polynucleotide
gaattcgccctttctacggctgcgtcaactggaccaatgaaaactttcccttcaacgattgcgtcgacaagatggtgatctggtgggaggagggaaagatgaccgccaaggtcgtggaatctgccaaagccattctgggtggaggcaaggttcgtgtggaccagaaatgcaagtcttcggcccagatcgacccgactccggtgattgtcacctctaacaccaacatgtgcgccgtgattgacggaaactcgaccaccttcgagcaccagcagccgttgcaagaccggatgttcaaatttgaacttacccgccgtttggatcatgactttgggaaggtcaccaagcaggaagtcaaagactttttccggtgggctcaagatcacgtgactgaggtggagcatgagttctacgtcaaaaagggtggagccaagaaaaggcccgcccccgatgatgtatatataaatgagcccaagcgggcgcgcgagtcagttgcgcagccatcgacgtcagacgcggaagcttcgataaactacgcggacaggtaccaaaacaaatgttctcgtcacgtgggcatgaatctgatgctgtttccctgtcgacaatgcgaaagaatgaatcagaattcaaatatctgcttcacacacgggcaaaaagactgtttggaatgctttcccgtgtcagaatctcaacccgtttctgtcgtcagaaaaacgtatcagaaactttgttacattcatcatatcatgggaaaagtaccagacgcctgcactgcctgcgacctggtaaatgtggacttggatgactgtatttctgagcaataaatgacttaaatcaggtatggctgctgacggttatcttccagattggctcgaggacactctctctgaaggaatcagacagtggtggaagctcaaacctggcccaccaccgccgaaacctaaccaacaacaccgggacgacagtaggggtcttgtgcttcctgggtacaagtacctcggacccttcaacggactcgacaaaggagagccggtcaacgaggcagacgccgcggccctcgagcacgacaaagcctacgaccaccagctcaagcaaggggacaacccgtacctcaaatacaaccacgcggacgctgaatttcaggagcgtcttcaagaagatacgtctttcgggggcaacctcgggcgagcagtcttccaggccaaaaagagggtactcgagcctcttggtctggttgaggaagctgttaagacggctcctggaaaaaagagacctatagagcagtctcctgcagaaccggactcttcctcgggcatcggcaaatcaggccagcagcccgctaagaaaagactcaattttggtcagactggcgacacagagtcagtcccaggccctcaaccaatcggagaaccccccgcagccccctctggtgtgggatctaatacaatggcttcaggcggtggggcaccaatggcagacaataacgaaggcgccgacggagtgggtaattcctcgggaaattggcattgcgattccacatggatgggcgacagagttatcaccaccagcacaagaacctgggccctccccacctacaataatcacctctacaagcaaatctccagcgaatcgggagccaccaacgacaaccactacttcggctacagcaccccctgggggtattttgactttaacagattccactgtcacttctcaccacgtgactggcagcgactcatcaacaacaactggggatttagacccaagaaactcaatttcaagctcttcaacatccaagtcaaggaggtcacgcagaatgatggaaccacgaccatcgccaataaccttaccagcgcggtgcaggtcttcacagactctgagtaccagctgccctacgtcctcggttcggctcaccagggctgccttccgccgttcccagcagacgtcttcatgattcctcagtacggctacttgactctgaacaatggcagccaagcggtaggacgttcttcattctactgtctagagtattttccctctcagatgctgaggacgggaaacaacttcaccttcagctacacttttgaagacgtgcctttccacagcagctacgcgcacagccagagtctggatcggctgatgaatcctctcattgaccagtacctgtattacctgagcaaaactcagggtacaagtggaacaacgcagcaatcgagactgcagttcagccaagctgggcctagctccatggctcagcaggccaaaaactggctaccgggacccagctaccgacagcagcgaatgtctaagacggctaatgacaacaacaacagtgaatttgcttggactgcagccaccaaatattacctgaatggaagaaattctctggtcaatcccgggcccccagtggccagtcacaaggacgatgaggaaaagtatttccccatgcacggaaatctcatctttggaaaacaaggcacaggaactaccaatgtggacattgaatcagtgcttattacagacgaagaagaaatcagaacaactaatcctgtggctacagaacaatacggacaggttgccaccaaccatcagagtcagaacaccacagcttcctatggaagtgtggacagccagggaatcttacctggaatggtgtggcaggaccgcgatgtctatcttcaaggtcccatttgggccaaaactcctcacacggacggacactttcatccttctccgctcatgggaggctttggactgaaacaccctcctccccagatcctgatcaaaaacacacctgtgccagcgaatcccgcgaccactttcactcctggaaagtttgcttcgttcattacccagtattccacctgacaggtcagcgtggaaatagagtgggagctgcagaaagaaaacagcaaacgctggaacccagaaattcagtacacctccaactacaacaagtcggtgaatgtggagtttaccgtggacgcaaacggtgtttattctgaaccccgccctattggcactcgttaccttacccggaacttgtaatttcctgttaatgaataagccgatttatgcgtttcagttgaactttggtctctgcgaagggcgaattcgtttaaacct

SEQ ID NO: 141 - protein, 735 aa, Artificial Sequence
  Description of Artificial Sequence: Synthetic polypeptide
MAADGYLPDWLEDTLSEGIRQWWKLKPGPPPPKPNQQHRDDSRGLVLPGYKYLGPFNGLDKGEPVNEADAAALEHDKAYDHQLKQGDNPYLKYNHADAEFQERLQEDTSFGGNLGRAVFQAKKRVLEPLGLVEEAVKTAPGKKRPIEQSPAEPDSSSGIGKSGQQPAKKRLNFGQTGDTESVPGPQPIGEPPAAPSGVGSNTMASGGGAPMADNNEGADGVGNSSGNWHCDSTWMGDRVITTSTRTWALPTYNNHLYKQISSESGATNDNHYFGYSTPWGYFDFNRFHCHFSPRDWQRLINNNWGFRPKKLNFKLFNIQVKEVTQNDGTTTIANNLTSAVQVFTDSEYQLPYVLGSAHQGCLPPFPADVFMIPQYGYLTLNNGSQAVGRSSFYCLEYFPSQMLRTGNNFTFSYTFEDVPFHSSYAHSQSLDRLMNPLIDQYLYYLSKTQGTSGTTQQSRLQFSQAGPSSMAQQAKNWLPGPSYRQQRMSKTANDNNNSEFAWTAATKYYLNGRNSLVNPGPPVASHKDDEEKYFPMHGNLIFGKQGTGTTNVDIESVLITDEEEIRTTNPVATEQYGQVATNHQSQNTTASYGSVDSQGILPGMVWQDRDVYLQGPIWAKTPHTDGHFHPSPLMGGFGLKHPPPQILIKNTPVPANPATTFTPGKFASFITQYSTGQVSVEIEWELQKENSKRWNPEIQYTSNYNKSVNVEFTVDANGVYSEPRPIGTRYLTRNL

SEQ ID NO: 142 - DNA, 3123 bp, Artificial Sequence
  Description of Artificial Sequence: Synthetic polynucleotide
gaattcgccctttctacggctgcgtcaactggaccaatgaaaactttcccttcaacgattgcgtcgacaagatggtgatctggtgggaggagggaaagatgaccgccaaggtcgtggaatctgccaaagccattctgggtggaagcaaggttcgtgtggaccagaaatgcaagtcttcggcccagatcgacccgactccggtgattgtcacctctaacaccaacatgtgcgccgtgattgacggaaactcgaccaccttcgagcaccagcagccgttgcaagaccggatgttcaaatttgaacttacccgccgtttggatcatgactttgggaaggtcaccaagcaggaagtcaaagactttttccggtgggctcaagatcacgtgactgaggtggagcatgagttctacgtcaaaaagggtggagccaagaaaaggcccgcccccgatgatgtatatataaatgagcccaagcgggcgcgcgagtcagttgcgcagccatcgacgtcagacgcggaagcttcgataaactacgcgggcaggtaccaaaacaaatgttctcgtcacgtgggcatgaatctgatgctgtttccctgtcgacaatgcgaaagaatgaatcagaattcaaatatctgcttcacacacgggcaaaaagactgtttggaatgctttcccgtgtcagaatctcaacccgtttctgtcgtcagaaaaacgtatcagaaactttgttacattcatcatatcatgggaaaagaaccagacgcctgcactgcctgcgacctggtaaatgtggacttggatgactgtatttctgagcaataaatgacttaaatcaggtatggctgctgacggttatcttccagattggctcgaggacactctctctgaaggaatcagacagtggtggaagctcaaacctggcccaccaccgccgaaacctaaccaacaacaccgggacgacagtaggggtcttgtgcttcctgggtacaagtacctcggacccttcaacggactcgacaaaggagagccggtcaacgaggcagacgccgcggccctcgagcacgacaaagcctacgaccaccagctcaagcaaggggacaacccgtacctcaaatacaaccacgcggacgctgaatttcaggagcgtcttcaagaagatacgtctttcgggggcaacctcgggcgagcagtcttccaggccaaaaagagggtactcgagcctcttggtctggttgaggaagctgttaagacggctcctggaaaaaagagacctatagagcagtctcctgcagaaccggactcttcctcgggcatcggcgaatcaggccagcagcccgctaagaaaagactcaattttggtcagactggcgacacagagtcagtcccagaccctcaaccaatcggagaaccccccgcagccccctctggtgtgggatctaatacaatggcttcaggcggtggggcaccaatggcagacgataacgaaggcgccgacggagtgggtaattcctcgggaaattggcattgcgattccacatggatgggcgacagagttatcaccaccagcacaagaacctgggccctccccacctacaataatcacctctacaagcaaatctccagcgaatcgggagccaccaacgacaaccactacttcggctacagcaccccctgggggtattttgactttaacagattccactgtcacttctcaccacgtgactggcagcgactcatcaacaacaactggggatttagacccaagaaactcaatttcaagctcttcaacatccaagtcaaggaggtcacgcagaatgatggaaccacgaccatcgccaataaccttaccagcacggtgcaggtcttcacagactctgagtaccagctgccctacgtcctcggttcggctcaccagggctgccttccgccgttcccagcagacgtcttcatgattcctcagtacggctacttgactctgaacaatggcagccaagcggtaggacgttcttcattctactgtctagagtattttccctctcagatgctgaggacgggaaacaacttcaccttcagctacacttttgaagacgtgcctttccacagcagctacgcgcacagccagagtctggatcggctgatgaatcctctcattgaccagtacctgtattacctgagcaaaactcagggtacaagtggaacaacgcagcaatcgagactgcagttcagccaagctgggcctagctccatggctcagcaggccaaaaactggctaccgggacccagctaccgacagcagcgaatgtctaagacggctaatgacaacaacaacagtgaatttgcttggactgcagccaccaaatattacctgaatggaagaaattctctggtcaatcccgggcccccaatggccagtcacaaggacgatgaggaaaagtatttccccatgcacggaaatctcatctttggaaaacaaggcacaggaactaccaatgtggacattgaatcagtgcttattacagacgaagaagaaatcagaacaactaatcctgtggctacagaacaatacggacaggttgccaccaaccatcagagtcaggacaccacagcttcctatggaagtgtggacagccagggaatcttacctggaatggtgtggcaggaccgcgatgtctatcttcaaggtcccatttgggccaaaactcctcacacggacggacactttcatccttctccgctcatgggaggctttggactgaaacaccctcctccccagatcctgatcaaaaacacacctgtgccagcgaatcccgcgaccactttcactcctggaaagtttgcttcgttcattacccagtattccaccggacaggtcagcgtggaaatagagtgggagctgcagaaagaaaacagcaaacgctggaacccagaaattcagtacacctccaactacaacaagtcggtgaatgtggagtttaccgtggacgcaaacggtgtttattctgaaccccgccctattggcactcgttaccttacccggaacttgtaatttcctgttaatgaataaaccgatttatgcgtttcagttgaactttggtctctgcgaagggcgaattcgcggccgcta

SEQ ID NO: 143 - protein, 735 aa, Artificial Sequence
  Description of Artificial Sequence: Synthetic polypeptide
MAADGYLPDWLEDTLSEGIRQWWKLKPGPPPPKPNQQHRDDSRGLVLPGYKYLGPFNGLDKGEPVNEADAAALEHDKAYDHQLKQGDNPYLKYNHADAEFQERLQEDTSFGGNLGRAVFQAKKRVLEPLGLVEEAVKTAPGKKRPIEQSPAEPDSSSGIGESGQQPAKKRLNFGQTGDTESVPDPQPIGEPPAAPSGVGSNTMASGGGAPMADDNEGADGVGNSSGNWHCDSTWMGDRVITTSTRTWALPTYNNHLYKQISSESGATNDNHYFGYSTPWGYFDFNRFHCHFSPRDWQRLINNNWGFRPKKLNFKLFNIQVKEVTQNDGTTTIANNLTSTVQVFTDSEYQLPYVLGSAHQGCLPPFPADVFMIPQYGYLTLNNGSQAVGRSSFYCLEYFPSQMLRTGNNFTFSYTFEDVPFHSSYAHSQSLDRLMNPLIDQYLYYLSKTQGTSGTTQQSRLQFSQAGPSSMAQQAKNWLPGPSYRQQRMSKTANDNNNSEFAWTAATKYYLNGRNSLVNPGPPMASHKDDEEKYFPMHGNLIFGKQGTGTTNVDIESVLITDEEEIRTTNPVATEQYGQVATNHQSQDTTASYGSVDSQGILPGMVWQDRDVYLQGPIWAKTPHTDGHFHPSPLMGGFGLKHPPPQILIKNTPVPANPATTFTPGKFASFITQYSTGQVSVEIEWELQKENSKRWNPEIQYTSNYNKSVNVEFTVDANGVYSEPRPIGTRYLTRNL

SEQ ID NO: 144 - DNA, 3113 bp, Artificial Sequence
  Description of Artificial Sequence: Synthetic polynucleotide
gaattcgccctttctacggctgcgtcaactggaccaatgaaaactttcccttcaacgattgcgtcgacaagatggtgatctggtgggaggagggaaagatgaccgccaaggtcgtggaatctgccaaagccattctgggtggaagcaaggttcgtgtggaccagaaatgcaagtcttcggcccagatcgacccgactccggtgattgtcacctctaacaccaacatgtgcgccgtgattgacggaaactcgaccaccttcgagcaccagcagccgttgcaagaccggatgttcaaatttgaacttacccgccgtttggatcatgactttgggaaggtcaccaagcaggaagtcaaagactttttccggtgggctcaagatcacgtgactgaggtggagcatgagttctacgtcaaaaagggtggagccaagaaaaggcccgcccccgatgatgtatatataaatgagcccaagcgggcgcgcgagtcagttgcgcagccatcgacgtcagacgcggaagcttcgataaactacgcggacaggtaccaaaacaaatgttctcgtcacgtgggcatgaatctgatgctgtttccctgtcgacaatgcgaaagaatgaatcagaattcaaatatctgcttcacacacgggcaaaaagactgtttggaatgctttcccgtgtcagaatctcaacccgttcctgtcgtcagaaaaacgtatcagaaactttgttacattcatcatatcatgggaaaagtaccagacgcctgcactgcctgcgacctggtaaatgtggacttggatgactgtatttctgagcaataaatgacttaaatcaggtatggctgctgacggttatcttccagattggctcgaggacactctctctgaaggaatcagacagtggtggaagctcaaacctggcccaccaccgccgaaacctaaccaacaacaccgggacgacagtaggggtcttgtgcttcctgggtacaagtacctcggacccttcaacggactcgacaaaggagagccggtcaacgaggcagacgccgcggccctcgagcacgacaaagcctacgaccaccagctcaagcaaggggacaacccgtacctcaaatacaaccacgcggacgctgaatttcaggagcgtcttcaagaagatacgtctttcgggggcaacctcgggcgagcagtcttccaggccaaaaagagggtactcgagcctcttggtctggttgaggaagctgttaagacggctcctggaaaaaagagacctatagagcagtctcctgcagaaccggactcttcctcgggcatcggcaaatcaggccagcagcccgctaagaaaagactcaattttggtcagactggcgacacagagtcagtcccagaccctcaaccaatcggagaaccccccgcagccccctctggtgtgggatctaatacaatggcttcaggcggtggggcaccaatggcagacaataacgaaggcgccgacggagtgggtaattcctcgggaaattggcattgcgattccacatggatgggcgacagagttatcaccaccagcacaagaacctgggccctccccacctacaataatcacctctacaagcaaatctccagcgaatcgggagccaccaacgacaaccactacttcggctacagcaccccctgggggtattttgactttaacagattccactgtcacttctcaccacgtgactggcagcgactcatcaataacaactggggatttagacccaagaaactcaatttcaagctcttcaacatccaagtcaaggaggtcacgcagaatgatggaaccacgaccatcgccaataaccttaccagcacggtgcaggtcttcacagactctgagtaccagctgccctacgtcctcggttcggctcaccagggctgccttccgccgttcccagcagacgtcttcatgattcctcagtacggctacttgactctgaacaatggcagccaagcggtaggacgttcttcattctactgtctagagtattttccctctcagatgctgaggacgggaaacaacttcaccttcagctacacttttgaagacgtgcctttccacagcagctacgcgcacagccagagtctggatcggctgatgaatcctctcattgaccagtacctgtattacctgagcaaaactcagggtacaagtggaacaacgcagcaatcgagactgcagttcaaccaagctgggcctagctccatggctcagcaggccaaaaactggctaccgggacccagctaccgacagcagcgaatgtctaagacggctaatgacaacaacaacagtgaatttgcttggactgcagccaccaaatattacccgaatggaagaaattctctggtcaatcccgggcccccaatggccagtcacaaggacgatgaggaaaagtatttccccatgcacggaaatctcatctttggaaaacaaggcacaggaactaccaatgtggacattgaatcagtgcttattacagacgaagaagaaatcagaacgactaatcctgtggctacagaacaatacggacaggttgccaccaaccgtcagagtcagaacaccacagcttcctatggaagtgtggacagccagggaatcttacctggaatggtgtggcaggaccgcgatgtctatcttcaaggtcccatttgggccaaaactcctcacacggacggacactttcatccttctccgctcatgggaggctttggactgaaacaccctcctccccagatcctgatcaaaaacacacctgtgccagcgaatcccgcgaccactttcactcctggaaagtttgcttcgttcattacccagtattccaccggacaggtcagcgtggaaatagagtgggagctgcagaaagaaaacagcaaacgctggaacccggaaattcagtacacctccaactacaacaagtcggtgaatgtggagtttaccgtggacgcaaacggtgtttattctgaaccccgccctattggcactcgttaccttacccggaacttgtaatttcctgttaatgaataaaccgatttatgcgtttcagttgaactttggtctctgcgaagggcgaattc

SEQ ID NO: 145 - protein, 735 aa, Artificial Sequence
  Description of Artificial Sequence: Synthetic polypeptide
MAADGYLPDWLEDTLSEGIRQWWKLKPGPPPPKPNQQHRDDSRGLVLPGYKYLGPFNGLDKGEPVNEADAAALEHDKAYDHQLKQGDNPYLKYNHADAEFQERLQEDTSFGGNLGRAVFQAKKRVLEPLGLVEEAVKTAPGKKRPIEQSPAEPDSSSGIGKSGQQPAKKRLNFGQTGDTESVPDPQPIGEPPAAPSGVGSNTMASGGGAPMADNNEGADGVGNSSGNWHCDSTWMGDRVITTSTRTWALPTYNNHLYKQISSESGATNDNHYFGYSTPWGYFDFNRFHCHFSPRDWQRLINNNWGFRPKKLNFKLFNIQVKEVTQNDGTTTIANNLTSTVQVFTDSEYQLPYVLGSAHQGCLPPFPADVFMIPQYGYLTLNNGSQAVGRSSFYCLEYFPSQMLRTGNNFTFSYTFEDVPFHSSYAHSQSLDRLMNPLIDQYLYYLSKTQGTSGTTQQSRLQFNQAGPSSMAQQAKNWLPGPSYRQQRMSKTANDNNNSEFAWTAATKYYPNGRNSLVNPGPPMASHKDDEEKYFPMHGNLIFGKQGTGTTNVDIESVLITDEEEIRTTNPVATEQYGQVATNRQSQNTTASYGSVDSQGILPGMVWQDRDVYLQGPIWAKTPHTDGHFHPSPLMGGFGLKHPPPQILIKNTPVPANPATTFTPGKFASFITQYSTGQVSVEIEWELQKENSKRWNPEIQYTSNYNKSVNVEFTVDANGVYSEPRPIGTRYLTRNL

SEQ ID NO: 146 - DNA, 3122 bp, Artificial Sequence
  Description of Artificial Sequence: Synthetic polynucleotide
agcggccgcgaattcgccctttctacggctgcgtcaactggaccaatgaaaactttcccttcaacgattgcgtcgacaagatggtgatctggtgggaggagggaaagatgaccgccaaggtcgtggaatctgccaaagccattctgggtggaagcaaggttcgtgtggaccagaaatgcaggtcttcggcccagatcgacccgactccggtgattgtcacctctaacaccaacatgtgcgccgtgattgacggaaactcgaccaccttcgagcaccagcagccgttgcaagaccggatgttcaaatttgaacttacccgccgtttggatcatgactttgggaaggtcaccaagcaggaagtcaaagactttttccggtgggctcaagatcacgtgactgaggtggagcatgagttctacgtcaaaaagggtggagccaagaaaaggcccgcccccgatgatgtatatataaatgagcccaagcgggcgcgcgagtcagttgcgcagccatcgacgtcagacgcggaagcttcgataaactacgcggacaggtaccaaaacaaatgttctcgtcacgtgggcatgaatctgatgctgtttccctgtcgacaatgcgaaagaatgaatcagaattcaaatatctgcttcacacacgggcaaaaagactgtttggaatgctttcccgtgtcagaatctcaacccgtttctgtcgtcagaaaaacgtatcagaaactttgttacattcatcatatcatgggaaaagtaccagacgcctgcactgcctgcgacctggtaaatgtggacttggatgactgtatttctgagcaataaatgacttaaatcaggtatggctgctgacggttatcttccagattggctcgaggacactctctctgaaggaatcagacagtggtggaagctcaaacctggcccaccaccgccgaaacctaaccaacaacaccgggacgacagtaggggtcttgtgcttcctgggtacaagtacctcggacccttcaacggactcgacaaaggagagccggtcaacgaggcagacgccgcggccctcgagcacgacaaagcctacgaccaccagctcaagcaaggggacaacccgtacctcaaatacaaccacgcggacgctgaatttcaggagcgtcttcaagaagatacgtctttcgggggcaacctcgggcgagcagtcttccaggccaaaaagagggtactcgagcctcttggtctggttgaggaagctgttaagacggctcctggaaaaaagagacctatagagcagtctcctgcagaaccggactcttcctcgggcatcggcaaatcaggccagcagcccgctaagaaaagactcaattttggtcagactggcgacacagagtcagtcccagaccctcaaccaatcggagaaccccccgcagccccctctggtgtgggatctaatacaatggcttcaggcggtggggcaccaatggcagacaataacgaaggcgccgacggagtgggtaattcctcgggaaattggcattgcgattccacatggatgggcgacagagttatcaccaccagcacaagaacctgggccctccccacctacaataatcgcctctacaagcaaatctccagcgaatcgggagccaccaacgacaaccactacttcggctacagcaccccctgggggtattttgactttaacagattccactgtcacttctcaccacgtgactggcagcgactcatcaacaacaactggggatttagacccaagaaactcaatttcaagctcttcaacatccaagtcaaggaggtcacgcagaatgatggaaccacgaccatcgccaataaccttaccagcacggtgcaggtcttcacagactctgagtaccagctgccctacgtcctcggttcggctcaccagggctgccttccgccgttcccagcagacgtcttcatgattcctcagtacggctacttgactctgaacaatggcagccaagcggtaggacgttcttcattctactgtctagagtattttccctctcagatgctgaggacgggaaacaacttcaccttcagctacacttttgaagacgtgcctttccacagcagctacgcgcacagccagagtctggatcggctgatgaatcctctcattgaccagtacctgtattacctgagcaaaactcagggtacaagtggaacaacgcagcaatcgagactgcagttcagccaagctgggcctagctccatggctcagcaggccaaaaactggctaccgggacccagctaccgacagcagcgaatgtctaagacggctaatgacaacaacaacagtgaatttgcttggactgcagccaccaaatattacctgaatggaagaaattctctggtcaatcccgggcccccaatggccagtcacaaggacgatgaggaaaagtatttccccatgcacggaaatctcatctttggaaaacaaggcacaggaactaccaatgtggacattgaatcagtgcttattacagacgaagaagaaatcagaacaactaatcctgtggctacagaacaatacggacaggttgccaccaaccatcagagtcagaacaccacagcttcctatggaagtgtggacagccagggaatcttacctggaatggtgtggcaggaccgcgatgtctatcttcaaggtcccatttgggccaaaactcctcacacggacggacactttcatccttctccgctcatgggaggctttggactgaaacaccctcctccccagatcctgatcaaaaacacacctgtgccagcgaatcccgcgaccactttcactcctggaaagtttgcttcgttcattacccagtattccaccggacaggtcagcgtggaaatagagtgggagctgcagaaagaaaacagcaaacgctggaacccagaaattcagtacacctccaactacaacaagtcggtgaatgtggagtttaccgtggacgcaaacggtgtttattctgaaccccgccctattggcactcgttaccttacccggaacttgtaatttcctgttaatgaataaaccgatttatgcgtttcagttgaactttggtctctgcgaagggcgaattc

SEQ ID NO: 147 - protein, 735 aa, Artificial Sequence
  Description of Artificial Sequence: Synthetic polypeptide
MAADGYLPDWLEDTLSEGIRQWWKLKPGPPPPKPNQQHRDDSRGLVLPGYKYLGPFNGLDKGEPVNEADAAALEHDKAYDHQLKQGDNPYLKYNHADAEFQERLQEDTSFGGNLGRAVFQAKKRVLEPLGLVEEAVKTAPGKKRPIEQSPAEPDSSSGIGKSGQQPAKKRLNFGQTGDTESVPDPQPIGEPPAAPSGVGSNTMASGGGAPMADNNEGADGVGNSSGNWHCDSTWMGDRVITTSTRTWALPTYNNRLYKQISSESGATNDNHYFGYSTPWGYFDFNRFHCHFSPRDWQRLINNNWGFRPKKLNFKLFNIQVKEVTQNDGTTTIANNLTSTVQVFTDSEYQLPYVLGSAHQGCLPPFPADVFMIPQYGYLTLNNGSQAVGRSSFYCLEYFPSQMLRTGNNFTFSYTFEDVPFHSSYAHSQSLDRLMNPLIDQYLYYLSKTQGTSGTTQQSRLQFSQAGPSSMAQQAKNWLPGPSYRQQRMSKTANDNNNSEFAWTAATKYYLNGRNSLVNPGPPMASHKDDEEKYFPMHGNLIFGKQGTGTTNVDIESVLITDEEEIRTTNPVATEQYGQVATNHQSQNTTASYGSVDSQGILPGMVWQDRDVYLQGPIWAKTPHTDGHFHPSPLMGGFGLKHPPPQILIKNTPVPANPATTFTPGKFASFITQYSTGQVSVEIEWELQKENSKRWNPEIQYTSNYNKSVNVEFTVDANGVYSEPRPIGTRYLTRNL

SEQ ID NO: 148 - DNA, 3121 bp, Artificial Sequence
  Description of Artificial Sequence: Synthetic polynucleotide
gaattcgcccttcgcagagaccaaagttcaactgaaacgaatcaaccggtttattgattaacaagcaattacagattacgggtgaggtaacgggtgccgatggggcgaggctcagaataagtgccatctgtgttaacagcaaagtccacatttgtagatttgtagtagttggaagtgtattgaatctctgggttccagcgtttgctgttttctttctgcagctcccattcaatttccacgctgacctgtccggtgctgtactgcgtgatgaacgacgccagcttagcttgactgaaggtagttggaggatccgcgggaacaggtgtattcttaatcaggatctgaggaggcgggtgtttcagtccaaagccccccatcagcggcgagggatgaaagtttccgtccgtgtgaggaatcttggcccagataggaccctgcaggtacacgtcccggttctgccagaccatgccaggtaaggctccttgactgttgacggcccctacaataggagcggcgttttgctgttgcaggttatcggccaccacgccgtactgttctgtggccactgggttggtggttttaatttcttcctcactggttagcataacgctgctatagtccacgttgccttttccagctccctgtttcccaaacattaagactccgctggacggaaaaaatcgctcttcgtcgtccttgtgggttgccatagcgacaccgggatttaccagagagtctctgccattcagatgatacttggtggcaccggtccaggcaaagttgctgttgttattttgcgacagtgtcgtggagacgcgttgctgccggtagcagggcccgggtagccagtttttggcctgagccgacatgttattaggcccggcctgagaaaatagcaactgctgagttcctgcggtacctcccgtggactgagtccgagacaggtagtacaggtactggtcgatgagggggttcatcagccggtccaggctttggctgtgcgcgtagctgctgtgaaaaggcacgtcctcaaactggtagctgaactcaaagttgttgcccgttctcagcatttgagaaggaaagtactccaggcagtagaaggaggaacggcccacggcctgactgccattgttcagagtcaggtacccgtactgaggaatcatgaagacgtccgccgggaacggaggcaggcagccctggcgcgcagagccgaggacgtacgggagctggtattccgagtccgtaaagacctgaatcgtgctggtaaggttattggcgatggtcttggtgccttcattctgcgtgacctccttgacctggatgttgaagagcttgaagttgagtctcttgggccggaatccccagttgttgttgatgagtcgctgccagtcacgtggtgagaagtggcagtggaatctgttaaagtcaaaatacccccagggggtgctgtagccgaagtaggtgttgtcgttggtgcttcctcccgaagtcccgttggagatttgcttgtagaggtggttgttgtaggtggggagggcccaggttcgggtgctggtggtgatgactctgtcgcccagccatgtggaatcgcaatgccaatttcctgaggaactacccactccgtcggcgccttcgttattgtctgccattggagcgccaccgcctgcagccattgtaccagatcccagaccagaggggcctgcggggggttctccgattggttgagggtcgggcactgactctgagtcgccagtctgcccaaagttgagtctctttttcgcgggctgctggcctttcttgccgatgcccgtagtggagtctggagaacgctggggtgatggctctaccggtctcttctttccaggagccgtcttagcgccttcctcaaccagaccgagaggttcgagaacccgcttcttggcctggaagactgctcgtccgaggttgcccccaaaagacgtatcttcttgcagacgctcctgaaactcggcgtcggcgtggttataccgcaggtacggattgtcacccgctttgagctgctggtcgtaggccttgtcgtgctcgagggccgctgcgtccgccgcgttgacgggctcccccttgtcgagtccgttgaagggtccgaggtacttgtagccaggaagcaccagaccccggccgtcgtcctgcttttgctggttggctttgggcttcggggctccaggtttcagcgcccaccactcgcgaatgccctcagagaggttgtcctcgagccaatctggaagataaccatcggcagccatacctgatctaaatcatttattgttcaaagatgcagtcatccaaatccacattgaccagatcgcaggcagtgcaagcgtctggcacctttcccatgatatgatgaatgtagcacagtttctgatacgcctttttgacgacagaaacgggttgagattctgacacgggaaagcactctaaacagtctttctgtccgtgagtgaagcagatatttgaattctgattcattctctcgcattgtctgcagggaaacagcatcagattcatgcccacgtgacgagaacatttgttttggtacctgtccgcgtagttgatcgaagcttccgcgtctgacgtcgatggctgcgcaactgactcgcgcacccgtttgggctcacttatatctgcgtcactgggggcgggtcttttcttggctccaccctttttgacgtagaattcatgctccacctcaaccacgtgatcctttgcccaccggaaaaagtctttgacttcctgcttggtgaccttcccaaagtcatgatccagacggcgggtgagttcaaatttgaacatccggtcttgcaacggctgctggtgttcgaaggtcgttgagttcccgtcaatcacggcgcacatgttggtgttggaggtgacgatcacgggagtcgggtctatctgggccgaggacttgcatttctggtccacgcgcaccttgcttcctccgagaatggctttggccgactccacgaccttggcggtcatcttcccctcctcccaccagatcaccatcttgtcgacacagtcgttgaagggaaagttctcattggtccagttgacgcagccgtagaagggcgaattc

SEQ ID NO: 149 - protein, 733 aa, Artificial Sequence
  Description of Artificial Sequence: Synthetic polypeptide
MAADGYLPDWLEDNLSEGIREWWDLKPGAPKLKANQQKQDDGRGLVLPGYKYLGPFHGLDKGEPVNAADAAALEHDKAYDQQLKAGDNPYLRYNHADAEFQERLQEDTSFGGNLGRAVFQAKKRVLEPLGLVEEGAKTAPGKKRPLESPQEPDSSSGIGKKGKQPAKKRLNFEEDTGAGDGPPEGSDTSAMSSDIEMRAAPGGNAVDAGQGSDGVGNASGDWHCDSTWSEGKVTTTSTRTWVLPTYNNHLYLRLGTTSNSNTYNGFSTPWGYFDFNRFHCHFSPRDWQRLINNNWGLRPKAMRVKIFNIQVKEVTTSNGETTVANNLTSTVQIFADSSYELPYVMDAGQEGSLPPFPNDVFMVPQYGYCGIVTGENQNQTDRNAFYCLEYFPSQMLRTGNNFEMAYNFEKVPFHSMYAHSQSLDRLMNPLLDQYLWHLQSTTSGETLNQGNAATTFGKIRSGDFAFYRKNWLPGPCVKQQRFSKTASQNYKIPASGGNALLKYDTHYTLNNRWSNIAPGPPMATAGPSDGDFSNAQLIFPGPSVTGNTTTSANNLLFTSEGEIAATNPRDTDMFGQIADNNQNATTAPITGNVTAMGVLPGMVWQNRDIYYQGPIWAKIPHADGHFHPSPLIGGFGLKHPPPQIFIKNTPVPANPATTFTAARVDSFITQYSTGQVAVQIEWEIEKERSKRRNPEVQFTSNYGNQSSMLWAPDTTGKYTEPRVIGSRYLTNHL

SEQ ID NO: 150 - protein, 735 aa, Artificial Sequence
  Description of Artificial Sequence: Synthetic polypeptide
MAADGYLPDWLEDTLSEGIRQWWKLKPGPPPPKPNQQHRDDSRGLVLPGYKYLGPFNGLDKGEPVNEADAAALEHDKAYDHQLKQGDNPYLKYNHADAEFQERLQEDTSFGGNLGRAVFQAKKRVLEPLGLVEEAVKTAPGKKRPIEQSPAEPDSSSGIGKSGQQPAKKRLNFGQTGDTESVPDPQPIGEPPAAPSGVGSNTMASGGGAPMADNNEGADGVGNSSGNWHCDSTWMGDRVITTSTRTWALPTYNNHLYKQISSESGATNDNHYFGYSTPWGYFDFNRFHCHFSPRDWQRLINNNWGFRPKKLNFKLFNIQVKEVTQNDGTTTIANNLTSTVQVFTDSEYQLPYVLGSAHQGCLPPFPADVFMIPQYGYLTLNNGSQAVGRSSFYCLEYFPSQMLRTGNNFTFSYTFEDVPFHSSYAHSQSLDRLMNPLIDQYLYYLSKTQGTSGTTQQSRLQFSQAGPSSMAQQAKNWLPGPSYRQQRMSKTANDNNNSEFAWTAATKYYLNGRNSLVNPGPPMASHKDDEEKYFPMHGNLIFGKQGTGTTNVDIESVLITDEEEIRTTNPVATEQYGQVATNHQSQNTTASYGSVDSQGILPGMVWQDRDVYLQGPIWAKIPHTDGHFHPSPLMGGFGLKHPPPQILIKNTPVPANPATTFTPGKFASFITQYSTGQVSVEIEWELQKENSKRWNPEIQYTSNYNKSVNVEFTVDANGVYSEPRPIGTRYLTRNL

SEQ ID NO: 151 - DNA, 3127 bp, Artificial Sequence
  Description of Artificial Sequence: Synthetic polynucleotide
gcggccgcgaattcgcccttcgcagagaccaaagttcaactgaaacgaatcaaccggtttattgattaacatgcaattacagattacgggtgaggtaacgagtgccaatagggcgaggctcagagtaaacaccctggctgtcaacggcaaagtccacaccagtctgcttttcaaagttggaggtgtactgaatctccgggtcccagcgcttgctgttttccttctgcagctcccactcgatttccacgctgacttgtccggtgctgtactgtgtgatgaacgaagcaaacttggcaggagtaaacacctccggaggattagcgggaacgggagtgttcttgatcaggatctgaggaggcggatgtttaagtccaaagccgcccatcaaaggagacgggtgaaagttgccatccgtgtgaggaatcttggcccagatgggaccctgcaggtacacgtcccggttctgccagaccatgccaggtaaggctccctggttgttgacaacttgtgtctgggctgcagtattagccgcttgtaagttgctgctgactatcccgtattcttccgtggctacaggattagtaggacgaatttcttcttcatttgtcattaacacattttccaatgtagttttgttagttgctccagtttttccaaaaatcaggactccgctggatgggaaaaagcggtcctcgtcgtccttgtgagttgccatggcgacgccgggattaaccaacgagtttctgccgttcaggtgatatttggtggcaccagtccaagcaaagttgctgttgttgttttgatccagcgttttggagaccctttgttgccggaagcagggtccaggtaaccaattcttggcttgttcggccatagttgaaggcccgccctggtaaaactgcagttcccgattgccagctgtgcctcctgggtcactctgtgttctggccaggtagtacaagtactggtcgatgaggggattcatcagccggtccaggctctggctgtgtgcgtagctgctgtggaaaggcacgtcctcgaagctgtagctgaactcaaagttgttgcccgttctcagcatctgagaggggaagtactccaggcagtagaaggaggaacgtcccacagactgactgccattgttgagagtcaggtagccgtactgaggaatcatgaagacgtccgccgggaacggaggcaggcagccctggtgcgcagagccgaggacgtacggcagctggtattccgagtccgagaatacctgaatcgtgctggtaaggttattagcgatggtcgtaacgccgtcattcgtcgtgacctccttgacctggatgttgaagagcttgaaccgcagcttcttgggccggaatccccagttgttgttgatgagtcgctgccagtcacgtggtgagaagtggcagtggaatctgttaaagtcaaaatacccccagggggtgctgtagccgaagtaggtgttgtcgttggtactacctgcagtttcactggagatttgctcgtagaggtggttgttgtaggtgggcagggcccaggttcgggtgctggtggtaatgactctgtcgcccagccatgtggaatcgcaatgccaatttcctgaggcattacccactccgtcggcaccttcgttattgtctgccattggtgcgccaccgcctgcagccactgtaccagatcccacactagagggcgctgctggaggttctccgagaggttgagggtcggggactgactctgagtcgccagtctgaccgaaattgagtctctttctggcgggctgctggcccttcttgccgatgcccgtggaggagtcgggggaacgctgaggtgacggctctaccggtctcttctttgcaggagccgtcttagcgccttcctcaaccagaccgagaggttcgagaacccgcttcttggcctggaagactgctcgcccgaggttgcccccaaatgacgtatcttcttgcagacgctcctgaaactcggcgtcggcgtggttataccgcaggtacgggttgtcacccgcattgagctgctggtcgtaggccttgtcgtgctcgagggccgctgcgtccgccgcgttgacgggctcccccttgtcgagtccgttgaagggtccgaggtacttgtagccaggaagcaccagaccccggccgttgtcctgcttttgctggttggctttgggtttcggggctccaggtttcaggtcccaccactcgcgaatgccctcagagaggttgtcctcgagccaatctggaagataaccatcggcagccatacctgatttaaatcatttattgttcaaagatgcagtcatccaaatccacattgaccagatcgcaggcagtgcaagcgtctggcacctttcccatgatatgatgaatgtagcacagtttctgatacgcctttttgacgacagaaacgggtttagattctgacacgggaaagcactctaaacagtctttctgtccgtgagtgaagcagatatttgaattctgattcattctctcgcattgtctgcagggaaacagcatcagattcatgcccacgtgacgagaacatttgttttggtacctgtctgcgtagttgatcgaagcttccgcgtctgacgtcgatggctgcgcaactgactcgcgcacccgtttgggctcacttatatctgcgtcactgggggcgggtcttttcttggctccaccctttttgacgtagaattcatgctccacctcaaccacgtaatcctttgcccaccggaaaaagtctttgacttcctgcttggtgaccttcccaaagtcatgatccagacggcgggtgagttcaaatttgaacatccggtcttgcaacggctgctggtgttcgaaggtcgttgagttcccgtcgatcacggcgcacatgttggtgttggagatgacgatcgcgggagtcgggtctatctgggccgaggacttgcatttctggtccacgcgcaccttgcttcctccgagaatggctttggccgactccacgaccttggcggtcatcttcccctcctcccaccagatcaccatcttgtcgacacagtcgttgaagggaaagttctcattggtccagttgacgcagccgtagaaagggcgaattc

SEQ ID NO: 152 - protein, 728 aa, Artificial Sequence
  Description of Artificial Sequence: Synthetic polypeptide
MAADGYLPDWLEDNLSEGIREWWDLKPGAPKPKANQQKQDDGRGLVLPGYKYLRPFNGLDKGEPVNEADAAALEHDKAYDKQLEQGDNPYLKYNHADAEFQERLQEDTSFGGNLGRAVFQAKKRVLEPLGLVEEVAKTAPGKKRPIESPDSSTGIGKKGQQPAKKKLNFGQTGDSESVPDPQPLGEPPAAPSGLGSGTMAAGGGAPMADNNEGADGVGNASGNWHCDSTWLGDRVITTSTRTWALPTYNNHLYKQISSQSGATNDNHFFSYSTPWGYFDFNRFHCHFSPRDWQRLINNNWGFRPRKLRFKLFNIQVKEVTTNDGVTTIANNLTSTIQVFSDSEYQLPYVLGSAHQGCLPPFPADVFMIPQYGYLTLNNGSQSVGRSSFYCLEYFPSQMLRTGNNFEFSYTFEEVPFHSSYVHSQSLDRLMNPLIDQYLYYLARTQSTTGSTRELQFHQAGPNTMAEQSKNWLPGPCYRQQRLSKNIDSNNNSNFAWTGATKYHLNGRNSLTNPGVAMATNKDDEDQFFPINGVLVFGKTGAANKTTLENVLMTSEEEIKTTNPVATEEYGVVSSNLQSSTAGPQTQTVNSQGALPGMVWQNRDVCLQGPIWAKIPHTDGNFHPSPLMGGFGLKHPPPQILIKNTPVPANPPEVFTPAKFASFITQYSTGQVSVEIEWELQKENSKRWNPEIQYTSNYAKSNNVEFAVNNEGVYTEPRPIGTRYLTRNL

SEQ ID NO: 153 - DNA, 3106 bp, Artificial Sequence
  Description of Artificial Sequence: Synthetic polynucleotide
gcggccgcgaattcgcccttcgcagagaccaaagttcaactgaaacgaatcaaccggtttattgattaacaagtaattacaggttacgggtgaggtaacgggtgccaatggggcgaggctcagtataaaccccttcgttgttgacagcaaattccacattattagacttggcataatttgaggtgtactgaatctctggattccagcgtttgctgttttctttctgcagttcccactcgatctccacgctgacctggccggtgctgtactgcgtgataaatgaggcaaacttggcaggagtaaacacctctggaggattagcaggtaccggggtgtttttgatgagaatttgaggaggcgggtgtttgagtccaaatccgcccatcaggggagacgggtgaaagttgccgtccgtgtgaggaattttggcccagatgggaccctgcaggcacacgtcccggttctgccagaccatgccgggcagagccccctggctgttgacagtctgtgtctggggtccggccgtagacgattgcaggttgctggagaccacaccgtattcttctgtagccacgggattggtggttttgatctcctcctcgctggtcattagcacgttttccagcgttgtcttgttggcagcccccgttttgccaaaaaccagcactccgttgatgggaaagaactggtcctcgtcgtccttgttggtggccatggctacgcccgggttggttaatgaatttctaccattcagatggtatttagtggccccggtccaggcaaagttactgttgttgttgctgtctatgttttttgacagtctctgctgccgataacagggtccgggcagccagttctttgattgctcggccatggtgttgggcccagcctgatggaactgcagctcccttgtggaccccgtagtgctctgggtccgggccaggtagtacaggtactggtcgatgaggggattcatcagccggtctaggctctggctgtgcacatagctgctgtggaaaggcacttcctcaaaggtgtagctgaattcaaagttattgcccgttctcagcatctgagaaggaaagtactccaggcagtagaaggaggaacgtcccacagactgactgccgttgtttagagtcagatatccgtactgaggaatcatgaacacgtccgcagggaacggagggaggcagccctggtgcgcagagccgaggacgtacggcagttggtactccgagtccgagaagacctgaatcgtgctggtaaggttattagcgatggtcgtaacgccgtcgttcgtcgtgacctccttgacctggatgttgaacaacttgaaccgcagctttctgggccggaatccccagttgttgttgatgagtcgctgccagtcacgtggtgagaagtggcagtggaatctgttgaagtcaaaatagccccagggggtgctgtagctgaagaagtggttgtcgttggtagccccgctctgacttgatatctgcttgtagaggtggttgttgtaggtgggcagggcccaggtgcgggtgctggtggtgatgactctgtcgcccagccatgtggaatcgcaatgccaatttccggaggcattacccactccgtcggcgccttcgttattgtctgccattggtgcgccaccgcctgcagccattgtaccagatcccagacctgagggcgcggcgggaggttctccgagaggttgggggtcgggcactgactctgagtcgccagtctgcccaaagttgagcttctttttagcgggctgctggcctttcttgccgatgcccgtggaggagtcgggggattctatgggtctcttctttccaggagccgtcttagcgacttcctcaaccagaccgagaggttcgagaacccgcttcttggcctggaagactgctcgcccgaggttgcccccaaaagacgtatcttcttgaagacgctcctgaaactcggcgtcggcgtggttgtacttgaggtacgggttgtccccctgctcgagctgcttgtcgtaggccttgtcgtgctcgagggccgcggcgtctgcctcgttgaccggctctcccttgtcgagtccgttgaagggtctgaggtacttgtagccaggaagcaccagaccccggccgtcgtcctgcttttgctggttggctttgggtttcggggctccaggtttcaagtcccaccactcgcgaatgccctcagagaggttgtcctcgagccaatctggaagataaccatcggcagccatacctggtttaagtcatttattgctcagaaacacagtcatccaggtccacgttgaccagatcgcaggccgagcaagcaatctcgggagcccgccccagcagatgatgaatggcacagagtttccgatacgtcctctttctgacgaccggttgagattctgacacgccggggaaacattctgaacagtctctggtcccgtgcgtgaagcaaatgttgaaattctgattcactctctcgcatgtcttgcagggaaacagcatctgaagcatgcccgcgtgacgagaacatttgttttggtacctgtcggcaaagtccaccggagctccttccgcgtctgacgtcgatggattcgcgactgaggggcaggcccgcttgggctcgcttttatccgcgtcatcgggggcgggtctcttgttggccccaccctttctgacgtagaacccatgcgccacctcggtcacgtgatcctgcgcccagcggaagaaccttttgacttcctgctttgtcaccttgccaaagttatgctccagacggcgggtgggttcaaatttgaacatccggtcctgcaacggctgctggtgctcgaaggtggcgctgttcccgtcaatcacggcgcacatgttggtgttggaggtgacggtcacgggggtggggtcgatctgggcggacgacttgcacttttggtccacgcgcaccttgctgccgccgagaatggccttggcggactccacgaccttggccgtcatcttgccctcctcccaccagatcaccatcttgtcggcgcaatcgttgaagggaaagttctcattggtccagttgacgcagccgtagaaagggcgaattc

SEQ ID NO: 154 - protein, 728 aa, Artificial Sequence
  Description of Artificial Sequence: Synthetic polypeptide
MAADGYLPDWLEDNLSEGIREWWDLKPGAPKPKANQQKQDDGRGLVLPGYKYLGPFNGLDKGEPVNEADAAALEHDKAYDKQLEQGDNPYLKYNHADAEFQERLQEDTSFGGNLGRAVFQAKKRVLEPLGLVEEGAKTASGKKRPIESPDSSTGIGKKGQQPAKKKLNFGQTGDSESVPDPQPLGEPPAAPSGLGSGTMAAGGGAPMADNNEGADGVGNASGNWHCDSTWLGDRVITTSTRTWALPTYNNHLYKQISSQSGATNDNHFFGYSTPWGYFDFNRFHCHFSPRDWQRLINNNWGFRPRKLRFKLFNIQVKEVTTNDGVTTIANNLTSTIQVFSDSEYQLPYVLGSAHQGCLPPFPADVFMIPQYGYLTLNNGSQSVGRSSFCCLEYFPSQMLRTGNNFEFSYTFEEVPFHSSYAHSQSLDRLMNPLIDQYLYYLARTQSTTGSTRELQFHQAGPNTVAEQSKNWLPGPCYRQQRLSKNIDSNNNSNFAWTGATKYHLNGRNSLTNPGVAMATNKDDEDQFLPINGVLVFGKTGAANKTTLENVLMTSEEEIKTTNPVATEEYGVVSSNLQSSTAGPRTQTVNSQGALPGMVWQNRDVYLQGPIWAEIPHTDGNFHPSPLMGGFGLKHPPPQILIKNTPVPANPPEVFTPAKFASFITQYSTGQVSVEIEWELQKENSKRWNPEIQYTSNYAKSNNVEFAVNNEGVYTEPRPIGTRYLTRNL

SEQ ID NO: 155 - DNA, 3102 bp, Artificial Sequence
  Description of Artificial Sequence: Synthetic polynucleotide
gcggccgcgaattcgcccttcgcagagaccaaagttcaactgaaacgaatcaaccggtttattgattaacaagtaattacaggttacgggtgaggtaacgggtgccaatggggcgaggctcagtataaaccccttcgttgttgacagcaaattccacattattagacttggcataatttgaggtgtactgaatctctggattccagcgtttgctgttttctttctgcagttcccactcgatctccacgctgacctggccggtgctgtactgcgtgataaatgaggcaaacttggcaggagtaaacacctctggaggattagcaggtaccggggtgtttttgatgagaatttgaggaggcgggtgtttgagtccaaatccgcccatcaggggagacgggtgaaagttgccgtccgtgtgaggaatttcggcccagatgggaccctgcaggtacacgtcccggttctgccagaccatgccgggcagagccccctggctgttgacagtctgtgtccggggtccggccgtagacgattgcaggttgctggagaccacaccgtattcttctgtagccacgggattggtggttttgatctcctcctcgctggtcattagcacgttttccagcgttgtcttgttggcagcccccgttttgccaaaaaccagcactccgttgatgggaaggaactggtcctcgtcgtccttgttggtggccatggctacgcccgggttggttaatgaatttctaccattcagatggtatttagtggccccggtccaggcaaagttactgttgttgttgctgtctatgttttttgacagtctctgctgccgataacagggtccgggcagccagttctttgattgctcggccacggtgttgggcccagcctgatggaactgcagctcccttgtggaccccgtagtgctctgggtccgggccaggtagtacaggtactggtcgatgaggggattcatcagccggtccaggctctggctgtgcgcatagctgctgtggaaaggcacttcctcaaaggtgtagctgaattcaaagttattgcccgttctcagcatctgagaaggaaagtactccaggcagcagaaggaggaacgtcccacagactgactgccgttgtttagagtcagatatccgtactgaggaatcatgaacacgtccgcagggaacggagggaggcagccctggtgcgcagagccgaggacgtacggcagttggtactccgagtccgagaagacctgaatcgtgctggtaaggttattagcgatggtcgtaacgccgtcgttcgtcgtgacctccttgacctggatgttgaacaacttgaaccgcagctttctgggccggaatccccagttgttgttgatgagtcgctgccagtcacgtggtgagaagtggcagtggaatctgttgaagtcaaaatagccccagggggtgctgtagccgaagaagtggttgtcgttggtagccccgctctgacttgatatctgcttgtagaggtggttgttgtaggtgggcagggcccaggtgcgggtgctggtggtgatgactctgtcgcccagccatgtggaatcgcaatgccaatttccggaggcattacccactccgtcggcgccttcgttattgtctgccattggtgcgccaccgcctgcagccattgtaccagatcccagacctgagggcgcggcgggaggttctccgagaggttgggggtcgggcactgactctgagtcgccagtctgcccaaagttgagcttctttttagcgggctgctggcctttcttgccgatgcccgtggaggagtcgggggattctatgggtctcttctttccggaagccgtcttagcgccttcctcaaccagaccgagaggttcgagaacccgcttcttggcctggaagactgctcgcccgaggttgcccccaaaagacgtatcttcttgaagacgctcctgaaactcggcgtcggcgtggttgtacttgaggtacgggttgtccccctgctcgagctgcttgtcgtaggccttgtcgtgctcgagggccgcggcgtctgcctcgttgaccggctctcccttgtcgagtccgttgaagggtccgaggtacttgtagccaggaagcaccagaccccggccgtcgtcctgcttttgctggttggctttgggtttcggggctccaggtttcaagtcccaccactcgcgaatgccctcagagaggttgtcctcgagccaatctggaagataaccatcggcagccatacctggtttaagtcatttattgctcagaaacacagtcatccaggtccacgttgaccagatcgcaggccgagcaagcaatctcgggagcccgccccagcagatgatgaatggcacagagtttccgatacgtcctctttctgacgaccggttgagattctgacacgccggggaaacattctgaacagtctctggtcccgtgcgtgaagcaaatgttgaaattctgattcattctctcgcatgtcttgcagggaaacagcatctgaagcatgcccgcgtgacgagaacatttgttttggtacctgtcggcaaagtccaccggagctccttccgcgtctgacgtcgatggatccgcgactgaggggcaagcccgcttgggctcgcttttatccgcgtcatcgggggcgggtctcttgttggctccaccctttctgacgtagaactcatgcgccacctcggtcacgtgatcctgcgcccagcggaagaactctttgacttcctgctttgtcaccttgccaaagtcatgctccagacggcgggtgagttcaaatttgaacatccggtcttgtaacggctgctggtgctcgaaggtggtgctgttcccgtcaatcacggcgcacatgttggtgttggaagtgacgatcacgggggtgggatcgatctgggcggacgacttgcacttttggtccacgcgcaccttgctgccgccgagaatggccttggcggactccacgaccttggccgtcatcttgccctcctcccaccagatcaccatcttgtcgacgcaatcgttgaagggaaagttctcattggtccagttgacgcagccgaagggcgaattc

SEQ ID NO: 156 - protein, 728 aa, Artificial Sequence
  Description of Artificial Sequence: Synthetic polypeptide
MAADGYLPDWLEDNLSEGIREWWDLKPGAPKPKANQQKQDDGRGLVLPGYRYLGPFNGLDKGEPVNEADAAALEHDKAYDKQLEQGDNPYLKYNHADAEFQERLQEDTSFGGNLGRAVFQAKKRVLEPLGLVEEGAKTAPGKKRPIESPDSSTGIGKNGQPPAKKKLNFGQTGDSESVPDPQPLGEPPAAPSGLGSGTMAAGGGAPMADNNEGADGVGNASGNWHCDSTWLGDRVITTSTRTWALPTYNNHLYKQISSQSGATNDNHFFGYSTPWGYFDFNRFHCHFSPRDWQRLINNNWGFRPRKLRFKLFNIQVKEVTTNDGVTTIANNLTSTIQVFSDSEYQLPYVLGSAHQGCLPPFPADVFMIPQYGYLTLNNGSQSVGRSSFYCLEYFPSQMLRTGNNFEFSYTFEEVPFHSSYAHSQSLDRLMNPLIDQYLYYLARTQSTTGSTRELQFHQAGPNTMAEQSKNWLPGPCYRQQRLSKNIDSNNNSNFAWTGATKYHLNGRNSLTNPGVAMATNKDDEDQFFPINGVLVFGKTGAANKTTLENVLMTSEEEIKTTNPVATEEYGVVSSNLQSSTAGPQTQTVNSQGALPGMVWQNRDVYLQGPIWAKIPHTDGNFHPSPLMGGFGLKHPPPQILIKNTPVPANPPEVFTPAKFASFITQYSTGQVSVEIEWELQKENSKRWNPEIQYTSNYAKSNNVEFAVNNEGVYTEPRPIGTRYLTRNL

SEQ ID NO: 157 - protein, 728 aa, Artificial Sequence
  Description of Artificial Sequence: Synthetic polypeptide
MAADGYLPDWLEGNLSEGIREWWDLKPGAPKPKANQQKQDDGRGLVLPGYRYLGPFNGLDKGEPVNEADAAALEHDKAYDKQLEQGDNPYLKYNHADAEFQERLQEDTSFGGNLGRAVFQAKKRVLEPLGLVEEGAKTAPGKKRPIESPDSSTGIGKNGQPPAKKKLNFGQTGDSESVPDPQPLGEPPAAPSGLGSGTMAAGGGAPMADNNEGADGVGNASGNWHCDSTWLGDRVITTSTRTWALPTYNNHLYKQISSQSGATNDNHFFGYSTPWGYFDFNRFHCHFSPRDWQRLINNNWGFRPRKLRFKLFNIQVKEVTTNDGVTTIANNLTSTIQVFSDSEYQLPYVLGSAHQGCLPPFPADVFMIPQYGYLTLNNGSQSVGRSSFYCLEYFPSQMLRTGDNFEFSYTFEEVPFHSSYAHSQSLDRLMNPLIDQYLYYLARTQSTTGSTRELQFHQAGPNTMAEQSKNWLPGPCYRQQRLSKNIDSNNNSNFAWTGATKYHLNGRNSLTNPGVAMATNKDDEDQFFPINGVLVFGKTGAANKTTLENVLMTSEEEIKTTNPVATEEYGVVSSNLQSSTAGPQTQTVNSQGALPGMVWQNRDVYLQGPIWAKIPHTDGNFHPSPLMGGFGLKHPPPQILIKNTPVPANPPEVFTPAKFASFITQYSTGQVSVEIEWELQKENSKRWNPEIQYTSNYAKSNNVEFAVNNEGVYTEPRPIGTRYLTRNL

SEQ ID NO: 158 - DNA, 3106 bp, Artificial Sequence
  Description of Artificial Sequence: Synthetic polynucleotide
gcggccgcgaattcgcccttcgcagagaccaaagttcaactgaaacgaatcagccggtttattgattaacaagtaattacaggttacgggtgaggtaacgggtgccaatggggcgaggctcagtataaaccccttcgttgttgacagcaaattccacattattagacttggcataatttgaggtgtactgaatctctggattccagcgtttgctgttttctttctgcagttcccactcgatctccacgctgacctggccggtgctgtactgcgtgataaatgaggcaaacttggcaggagtaaacacctctggaggattagcaggtaccggggtgtttttgatgagaatttgaggaggcgggtgtttgagtccaaatccgcccatcaggggagacgggtgaaagttgccgtccgtgtgaggaattttggcccagatgggaccctgcaggtacacgtcccggttctgccagaccatgccgggcagagccccctggctgttgacagtctgtgtctggggtccggccgtagacgattgcaggttgctggagaccacaccgtattcttctgtagccacgggattggtggttttgatctcctcctcgctggtcattagcacgttttccagcgttgtcttgttggcagcccccgttttgccaaaaaccagcactccgttgatgggaaagaactggtcctcgtcgtccttgttggtggccatggctacgcccgggttggttaatgaatttctaccattcagatggtatttagtggccccggtccaggcaaagttactgttgttgttgctgtctatgttttttgacagtctctgctgccgataacagggtccgggcagccagttctttgattgctcggccatggtgttgggcccagcctgatggaactgcagctcccttgtggaccccgtagtgctctgggtccgggccaggtagtacaggtactggtcgatgaggggattcatcagccggtccaggctctggctgtgcgcatagctgctgtggaaaggcacttcctcaaaggtgtagctgaattcaaagttatcgcccgttctcagcatctgagaaggaaagtactccaggcagtagaaggaggaacgtcccacagactgactgccgttgtttagagtcagatatccgtactgaggaatcatgaacacgtccgcagggaacggagggaggcagccctggtgcgcagagccgaggacgtacggcagttggtactccgagtccgagaagacctgaatcgtgctggtaaggttattagcgatggtcgtaacgccgtcgttcgtcgtgacctccttgacctggatgttgaacaacttgaaccgcagctttctgggccggaatccccagttgttgttgatgagtcgctgccagtcacgtggtgagaagtggcagtggaatctgttgaagtcaaaatagccccagggggtgctgtagccgaagaagtggttgtcgttggtagccccgctctgacttgatatctgcttgtagaggtggttgttgtaggtgggcagggcccaggtgcgggtgctggtggtgatgactctgtcgcccagccatgtggaatcgcaatgccaatttccggaggcattacccactccgtcggcgccttcgttattgtctgccattggtgcgccaccgcctgcagccattgtaccagatcccagacctgagggcgcggcgggaggttctccgagaggttgggggtcgggcactgactctgagtcgccagtctgcccaaagttgagcttctttttagcgggcggctggccgttcttgccgatgcccgtggaggagtcgggggattctatgggtctcttctttccaggagccgtcttagcgccttcctcaaccagaccgagaggttcgagaacccgcttcttggcctggaagactgctcgcccgaggttgcccccaaaagacgtatcttcttgaagacgctcctgaaactcggcgtcggcgtggttgtacttgaggtacgggttgtccccctgctcgagctgcttgtcgtaggccttgtcgtgctcgagggccgcggcgtctgcctcgttgaccggctctcccttgtcgagtccgttgaagggtccgaggtacctgtagccaggaagcaccagaccccggccgtcgtcctgcttttgctggttggctttgggtttcggggctccaggtttcaagtcccaccactcgcgaatgccctcagagaggttgccctcgagccaatctggaagataaccatcggcagccatacctggtttaagtcatttattgctcagaaacacagtcatccaggtccacgttggccagatcgcaggccgagcaagcaatctcgggagcccgccccagcagatgatgaatggcacagagtttccgatacgtcctctttctgacgaccggttgagattctgacacgccggggaaacattctgaacagtctctggtcccgtgcgtgaagcaaatgttgaaattctgattcattctctcgcatgtcttgcaggggaacagcatctgaagcatgcccgcgtgacgagaacatttgttttggtacctgtcggcaaagtccaccggagctccttccgcgtctgacgtcgatggatccgcgactgaggggcaggcccgcttgggctcgcttttatccgcgtcatcgggggcgggtctcttgttggctccaccctttctgacgtagaactcatacgccacctcggtcacgtgatcctgcgcccagcggaagaactctttgacttcctgctttgtcaccttgccaaagtcatgctccagacggcgggtgagttcaaatttgaacatccggtcttgtaacggctgctggtgctcgaaggtggtgctgttcccgtcaatcacggcgcacatgttggtgttggaagtgacgatcacgggggtgggatcgatctgggcggacgacttgcacttttggtccacgcgcaccttgctgccgccgagaatggccttggcggactccacgaccttggccgtcatcctgccctcctcccaccagatcaccatcttgtcgacgcaatcgttgaagggaaagttctcattggtccagttgacgcagccgtagaaagggcgaattc

SEQ ID NO: 159 - protein, 728 aa, Artificial Sequence
  Description of Artificial Sequence: Synthetic polypeptide
MAADGYLPDWLEDNLSEGIREWWDLKPGAPKPKANQQKQDDGRGLVLPGYKYLGPFNGLDKGEPVNEADAAALEHDKAYDKQLEQGDNPYLKYNHADAEFQERLQEDTSFGGNLGRAVFQAKKRVLEPLGLVEEGAKTAPGKKRPIESPDSSTGIGKKGQQPAKKKLNFGQTGDSESVPDPQPLGEPPAAPSGLGSGTMAAGGGAPMADNNEGADGVGNASGNWHCDSTWLGDRVITTSTRTWALPTYNNHLYKQISSQSGATNDNHFFGYSTPWGYFDFNRFHCHFSPRDWQRLINNNWGFRPRKLRFKLFNIQVKEVTTNDGVTTIANNLTSTIQVFSDSEYQLPYVLGSAHQGCLPPFPADVFMIPQYGYLTLNNGSQSMGRSSFYCLEYFPSQMLRTGNNFEFSYTFEEVPFHSSYAHSQSLDRLMNPLIDQYLYYLARTQSTTGSTRELQFHQAGPNTMAEQSKNWLPGPCYRQQRLSKNIDSNNNSNFAWTGATKYHLNGRNSLTNPGVAMATNKDDEGQFFPINGVLVFGKTGAANKTTLENVLMTSEEEIKTTNPVATEEYGVVSSNLQSSTAGPQTQTVNSQGALPGMVWQNRDVYLQGPIWAKIPHTDGNFHPSPLMGGFGLKHPPPQILIKNTPVPANPPGVFTPALFASFITQYSTGQVSVEIEWELQKENSKRWNPEIQYTSNYAKSNNVEFAVNNEGVYTEPRPIGTRYLTRNL

SEQ ID NO: 160 - DNA, 3098 bp, Artificial Sequence
  Description of Artificial Sequence: Synthetic polynucleotide
gaattcgcccttcgcagagaccaaagttcaactgaaacgaatcaaccggtttattgattaacaagtaattacaggttacgggtgaggtaacgggtgccaatggggcgaggctcagtataaaccccttcgttgttgacagcaaattccacattattagacttggcataatttgaggtgtactgaatctctggattccagcgtttgctgttttctttctgcagttcccactcgatctccacgctgacctggccggtgctgtactgcgtgataaatgaggcaaactaggcaggagtaaacacccctggaggattagcaggtaccggggtgtttttgatgagaatttgaggaggcgggtgtttgagtccaaatccgcccatcaggggagacgggtgaaagttgccgtccgtgtgaggaattttggcccagatgggaccctgcaggtacacgtcccggttctgccagaccatgccgggcagagccccctggctgttgacagtctgtgtctggggtccggccgtagacgattgcaggttgctggagaccacaccgtattcttctgtagccacgggattggtggttttgatctcctcctcgctggtcattagcacgttttccagcgttgtcttgttggcagcccccgttttgccaaaaaccagcactccgttgatgggaaagaactggccctcgtcgtccttgttggtggccatggctacgcccgggttggttaatgaatttctaccattcagatggtatttagtggccccggtccaggcaaagttactgttgttgttgctgtctatgttttttgacagtctctgctgccgataacagggtccgggcagccagttctttgattgctcggccatggtgttgggcccagcctgatggaactgcagctcccttgtggaccccgtagtgctctgggtccgggccaggtagtacaggtactggtcgatgaggggattcatcagccggtccaggctctggctgtgcgcatagctgctgtggaaaggcacttcctcaaaggtgtagctgaattcaaagttattgcccgttctcagcatctgagaaggaaagtactccaggcagtagaaggaggaacgtcccatagactgactgccgttgtttagagtcagatatccgtactgaggaatcatgaacacgtccgcagggaacggagggaggcagccctggtgcgcagagccgaggacgtacggcagttggtactccgagtccgagaagacctgaatcgtgctggtaaggttattagcgatggtcgtaacgccgtcgttcgtcgtgacctccttgacctggatgttgaacaacttgaaccgcagctttctgggccggaatccccagttgttgttgatgagtcgctgccagtcacgtggtgagaagtggcagtggaatctgttgaagtcaaaatagccccagggggtgctgtagccgaagaagtggttgtcgttggtagccccgctctgacttgatatctgcttgtagaggtggttgttgtaggtgggcagggcccaggtgcgggtgctggtggtgatgactctgtcgcccagccatgtggaatcgcaatgccaatttccggaggcattacccactccgtcggcgccttcgttattgtctgccattggtgcgccaccgcctgcagccattgtaccagatcccagacctgagggcgcggcgggaggttctccgagaggttgggggtcgggcactgactctgagtcgccagtctgcccaaagttgagcttctttttagcgggctgctggcctttcttgccgatgcccgtggaggagtcgggggattctatgggtctcttctttccaggagccgtcttagcgccttcctcaaccagaccgagaggttcgagaacccgcttcttggcctggaagactgctcgcccgaggttgcccccaaaagacgtatcttcttgaagacgctcctgaaactcagcgtcggcgtggttgtacttgaggtacgggttgtccccctgctcgagctgcttgtcgtaggccttgtcgtgctcgagggccgcggcgtctgcctcgttgaccggctctcccttgtcgagtccgttgaagggtccgaggtacttgtagccaggaagcaccagaccccggccgtcgtcctgcttttgctggttggctttgggtttcggggctccaggtttcaagtcccaccactcgcgaatgccctcagagaggttgtcctcgagccaatctggaagataaccatcggcagccatacctggtttaagtcatttattgctcagaaacacagtcatccaggtccacgttgaccagatcgcaggccgagcaagcaatctcgggagcccgccccagcagatgatgaatggcacagagtttccgatacgtcctctttctgacgaccggttgagattctgacacgccggggaaacattctgaacagtctctggtcccgtgcgtgaagcaaatgttgaaattctgattcattctctcgcatgtcttgcagggaaacagcatctgaagcatgcccgcgtgacgagaacatttgttttggtacctgtcggcaaagtccaccggagctccttccgcgtctgacgtcgatggatccgcgactgaggggcaggcccgcttgggctcgcttttatccgcgtcatcgggggcgggcctcttgttggctccaccctttctgacgtagaactcatgcgccacctcggtcacgtgatcctgcgcccagcggaagaactctttgacttcctgctttgtcaccttgccaaagtcctgctccagacggcgggtgagttcaaatttgaacatccggtcttgtaacggctgctggtgctcgaaggtggtgctgttcccgtcaatcacggcgcacatgttggtgttggaagtgacgatcacgggggtgggatcgatctgggcggacgacttgcacttttggtccacgcgcaccttgctgccgccgagaatggccttggcggactccacgaccttggccgtcatcttgccctcctcccaccagatcaccatcttgtcgacgcaatcgttgaagggaaagttctcattggtccagttgacgcagccgtagaaagggcgaattc

SEQ ID NO: 161 - DNA, 2187 bp, Artificial Sequence
  Description of Artificial Sequence: Synthetic polynucleotide
atggctgccgatggttatcttccagattggctcgagggcaacctctctgagggcattcgcgagtggtgggacttgaaacctggagccccgaaacccaaagccaaccagcaaaagcaggacgacggccggggtctggtgcttcctggctacaggtacctcggacccttcaacggactcgacaagggagagccggtcaacgaggcagacgccgcggccctcgagcacgacaaggcctacgacaagcagctcgagcagggggacaacccgtacctcaagtacaaccacgccgacgccgagtttcaggagcgtcttcaagaagatacgtcttttgggggcaacctcgggcgagcagtcttccaggccaagaagcgggttctcgaacctctcggtctggttgaggaaggcgctaagacggctcctggaaagaagagacccatagaatcccccgactcctccacgggcatcggcaagaacggccagccgcccgctaaaaagaagctcaactttgggcagactggcgactcagagtcagtgcccgacccccaacctctcggagaacctcccgccgcgccctcaggtctgggatctggtacaatggctgcaggcggtggcgcaccaatggcagacaataacgaaggcgccgacggagtgggtaatgcctccggaaattggcattgcgattccacatggctgggcgacagagtcatcaccaccagcacccgcacctgggccctgcccacctacaacaaccacctctacaagcagatatcaagtcagagcggggctaccaacgacaaccacttcttcggctacagcaccccctggggctattttgacttcaacagattccactgccacttctcaccacgtgactggcagcgactcatcaacaacaactggggattccggcccagaaagctgcggttcaagttgttcaacatccaggtcaaggaggtcacgacgaacgacggcgttacgaccatcgctaataaccttaccagcacgattcaggtcttctcggactcggagtaccaactgccgtacgtcctcggctctgcgcaccagggctgcctccctccgttccctgcggacgtgttcatgattcctcagtacggatatctgactctaaacaacggcagtcagtctgtgggacgttcctccttctactgcctggagtactttccttctcagatgctgagaacgggcgataactttgaattcagctacacctttgaggaagtgcctttccacagcagctatgcgcacagccagagcctggaccggctgatgaatcccctcatcgaccagtacctgtactacctggcccggacccagagcactacggggtccacaagggagctgcagttccatcaggctgggcccaacaccatggccgagcaatcaaagaactggctgcccggaccctgttatcggcagcagagactgtcaaaaaacatagacagcaacaacaacagtaactttgcctggaccggggccactaaataccatctgaatggtagaaattcattaaccaacccgggcgtagccatggccaccaacaaggacgacgaggaccagttctttcccatcaacggagtgctggtttttggcaaaacgggggctgccaacaagacaacgctggaaaacgtgctaatgaccagcgaggaggagatcaaaaccaccaatcccgtggctacagaagaatacggtgtggtctccagcaacctgcaatcgtctacggccggaccccagacacagactgtcaacagccagggggctctgcccggcatggtctggcagaaccgggacgtgtacctgcagggtcccatctgggccaaaattcctcacacggacggcaactttcacccgtctcccctgatgggcggatttggactcaaacacccgcctcctcaaattctcatcaaaaacaccccggtacctgctaatcctccagaggtgtttactcctgccaagtttgcctcatttatcacgcagtacagcaccggccaggtcagcgtggagatcgagtgggaactgcagaaagaaaacagcaaacgctggaatccagagattcagtacacctcaaattatgccaagtctaataatgtggaatttgctgtcaacaacgaaggggtttatactgagcctcgccccattggcacccgttacctcacccgtaacctgtaa

SEQ ID NO: 162 - protein, 728 aa, Artificial Sequence; identical to SEQ ID NO: 157
  Description of Artificial Sequence: Synthetic polypeptide

SEQ ID NO: 163 - protein, 728 aa, Artificial Sequence
  Description of Artificial Sequence: Synthetic polypeptide
MAADGYLPDWLEDNLSEGIREWWDLKPGAPKPKANQQKQDDGRGLVLPGYRYLGPFNGLDKGEPVNEADAAALEHDKAYDKQLEQGDNPYLKYNHADAEFQERLQEDTSFGGNLGRAVFQAKKRVLEPLGLVEEGAKTAPGKKRPIESPDSSTGIGKNGQPPAKKKLNFGQTGDSESVPDPQPLGEPPAAPSGLGSGTMAAGGGAPMADNNEGADGVGNASGNWHCDSTWLGDRVITTSTRTWALPTYNNHLYKQISSQSGATNDNHFFGYSTPWGYFDFNRFHCHFSPRDWQRLINNNWGFRPRKLRFKLFNIQVKEVTTNDGVTTIANNLTSTIQVFSDSEYQLPYVLGSAHQGCLPPFPADVFMIPQYGYLTLNNGSQSVGRSSFYCLEYFPSQMLRTGDNFEFSYTFEEVPFHSSYAHSQSLDRLMNPLIDQYLYYLARTQSTTGSTRELQFHQAGPNTMAEQSKNWLPGPCYRQQRLSKNIDSNNNSNFAWTGATKYHLNGRNSLTNPGVAMATNKDDEDQFFPINGVLVFGKTGAANKTTLENVLMTSEEEIKTTNPVATEEYGVVSSNLQSSTAGPQTQTVNSQGALPGMVWQNRDVYLQGPIWAKIPHTDGNFHPSPLMGGFGLKHPPPQILIKNTPVPANPPEVFTPAKFASFITQYSTGQVSVEIEWELQKENSKRWNPEIQYTSNYAKSNNVEFAVNNEGVYTEPRPIGTRYLTRNL

SEQ ID NO: 164 - protein, 728 aa, Artificial Sequence; identical to SEQ ID NO: 156
  Description of Artificial Sequence: Synthetic polypeptide

SEQ ID NO: 165 - protein, 728 aa, Artificial Sequence
  Description of Artificial Sequence: Synthetic polypeptide
MAADGYLPDWLEDNLSEGIREWWDLKPGAPKPKANQQKQDDGRGLVLPGYKYLGPFNGLDKGEPVNEADAAALEHDKAYDKQLEQGDNPYLKYNHADAEFQERLQEDTSFGGNLGRAVFQAKKRVLEPLGLVEEGAKTAPGKKRPIESPDSSTGIGKNGQPPAKKKLNFGQTGDSESVPDPQPLGEPPAAPSGLGSGTMAAGGGAPMADNNEGADGVGNASGNWHCDSTWLGDRVITTSTRTWALPTYNNHLYKQISSQSGATNDNHFFGYSTPWGYFDFNRFHCHFSPRDWQRLINNNWGFRPRKLRFKLFNIQVKEVTTNDGVTTIANNLTSTIQVFSDSEYQLPYVLGSAHQGCLPPFPADVFMIPQYGYLTLNNGSQSVGRSSFYCLEYFPSQMLRTGNNFEFSYTFEEVPFHSSYAHSQSLDRLMNPLIDQYLYYLARTQSTTGSTRELQFHQAGPNTMAEQSKNWLPGPCYRQQRLSKNIDSNNNSNFAWTGATKYHLNGRNSLTNPGVAMATNKDDEDQFFPINGVLVFGKTGAANKTTLENVLMTSEEEIKTTNPVATEEYGVVSSNLQSSTAGPQTQTVNSQGALPGMVWQNRDVYLQGPIWAKIPHTDGNFHPSPLMGGFGLKHPPPQILIKNTPVPANPPEVFTPAKFASFITQYSTGQVSVEIEWELQKENSKRWNPEIQYTSNYAKSNNVEFAVNNEGVYTEPRPIGTRYLTRNL

SEQ ID NO: 166 - protein, 728 aa, Artificial Sequence
  Description of Artificial Sequence: Synthetic polypeptide
MAADGYLPDWLEDNLSEGIREWWDLKPGAPKPKANQQKQDDGRGLVLPGYKYLGPFNGLDKGEPVNEADAAALEHDKAYDKQLEQGDNPYLKYNHADAEFQERLQEDTSFGGNLGRAVFQAKKRVLEPLGLVEEGAKTAPGKKRPIESPDSSTGIGKKGQQPAKKKLNFGQTGDSESVPDPQPLGEPPAAPSGLGSGTMAAGGGAPMADNNEGADGVGNASGNWHCDSTWLGDRVITTSTRTWALPTYNNHLYKQISSQSGATNDNHFFGYSTPWGYFDFNRFHCHFSPRDWQRLINNNWGFRPRKLRFKLFNIQVKEVTTNDGVTTIANNLTSTIQVFSDSEYQLPYVLGSAHQGCLPPFPADVFMIPQYGYLTLNNGSQSVGRSSFYCLEYFPSQMLRTGNNFEFSYTFEEVPFHSSYAHSQSLDRLMNPLIDQYLYYLARTQSTTGSTRELQFHQAGPNTMAEQSKNWLPGPCYRQQRLSKNIDSNNNSNFAWTGATKYHLNGRNSLTNPGVAMATNKDDEDQFFPINGVLVFGKTGAANKTTLENVLMTSEEEIKTTNPVATEEYGVVSSNLQSSTAGPQTQTVNSQGALPGMVWQNRDVYLQGPIWAKIPHTDGNFHPSPLMGGFGLKHPPPQILIKNTPVPANPPEVFTPAKFASFITQYSTGQVSVEIEWELQKENSKRWNPEIQYTSNYAKSNNVEFAVNNEGVYTEPRPIGTRYLTRNL

SEQ ID NO: 167 - DNA, 2215 bp, Artificial Sequence
  Description of Artificial Sequence: Synthetic polynucleotide
atggctgccgatggttatcttccagattggctcgaggacactctctctgaaggaataagacagtggtggaagctcaaacctggcccaccaccaccaaagcccgcagagcggcataaggacgacagcaggggtcttgtgcttcctgggtacaagtacctcggacccttcaacggactcgacaagggagagccggtcaacgaggcagacgccgcggccctcgagcacgacaaagcctacgaccggcagctcgacagcggagacaacccgtacctcaagtacaaccacgccgacgccgagttccaggagcggctcaaagaagatacgtcttttgggggcaacctcgggcgagcagtcttccaggccaaaaagaggcttcttgaacctcttggtctggttgaggaagcggctaagacggctcctggaaagaagaggcctgtagagcactctcctgtggagccagactcctcctcgggaaccggaaaggcgggccagcagcctgcaagaaaaagattgaattttggtcagactggagacgcagactcagtcccagaccctcaaccaatcggagaacctcccgcagccccctcaggtgtgggatctcttacaatggctgcaggcggtggcgcaccaatggcagacaataacgagggcgccgacggagtgggtaattcctcgggaaattggcattgcgattccacatggatgggcgacagagtcatcaccaccagcacccgaacctgggccctgcccacctacaacaaccacctctacaagcaaatctccaacagcacatctggaggatcttcaaatgacaacgcctacttcggctacagcaccccctgggggtattttgactttaacagattccactgccacttttcaccacgtgactggcagcgactcatcaacaacaactggggattccggcccaagagactcagcttcaagctcttcaacatccaggtcaaggaggtcacgcagaatgaaggcaccaagaccatcgccaataacctcaccagcaccatccaggtgtttacggactcggagtaccagctgccgtacgttctcggctctgcccaccagggctgcctgcctccgttcccggcggacgtgttcatgattccccagtacggctacctaacactcaacaacggtagtcaggccgtgggacgctcctccttctactgcctggaatactttccttcgcagatgctgagaaccggcaacaacttccagtttacttacaccttcgaggacgtgcctttccacagcagctacgcccacagccagagcttggaccggctgatgaatcctctgattgaccagtacctgtactacttgtctcggactcaaacaacaggaggcacgacaaatacgcagactctgggcttcagccaaggtgggcctaatacaatggccaatcaggcaaagaactggctgccaggaccctgttaccgccagcagcgagtatcaaagacatctgcggataacaacaacagtgaatactcgtggactggagctaccaagtaccacctcaatggcagagactctctggtgaatccgggcccggccatggcaagccacaaggacgatgaagaaaagtttttttcctcagagcggggttctcatctttgggaagcaaggctcagagaaaacaaatgtggacattgaaaaggtcatgattacagacgaagaggaaatcaggacaaccaatcccgtggctacggagcagtatggttctgtatctaccaacctccagagaggcaacagacaagcagctaccgcagatgtcaacacacaaggcgttcttccaggcatggtctggcaggacagagatgtgtaccttcaggggcccatctgggcaaagattccacacacggacggacattttcacccctctcccctcatgggtggattcggacttaaacaccctccgcctcagatcctgatcaagaacacgcctgtacctgcggatcctccgaccaccttcaaccagtcaaagctgaactctttcatcacccagtattctactggccaagtcagcgtggagatcgagtgggagctgcagaaggaaaacagcaagcgctggaaccccgagatccagtacacctccaactactacaaatctacaagtgtggactttgctgttaatacagaaggcgtgtactctgaaccccgccccattggcacccgttacctcacccgtaatctgtaa

SEQ ID NO: 168 - protein, 737 aa, Artificial Sequence
  Description of Artificial Sequence: Synthetic polypeptide
MAADGYLPDWLEDTLSEGIRQWWKLKPGPPPPKPAERHKDDSRGLVLPGYKYLGPFNGLDKGEPVNEADAAALEHDKAYDRQLDSGDNPYLKYNHADAEFQERLKEDTSFGGNLGRAVFQAKKRLLEPLGLVEEAAKTAPGKKRPVEHSPVEPDSSSGTGKAGQQPARKRLNFGQTGDADSVPDPQPIGEPPAAPSGVGSLTMAAGGGAPMADNNEGADGVGNSSGNWHCDSTWMGDRVITTSTRTWALPTYNNHLYKQISNSTSGGSSNDNAYFGYSTPWGYFDFNRFHCHFSPRDWQRLINNNWGFRPKRLSFKLFNIQVKEVTQNEGTKTIANNLTSTIQVFTDSEYQLPYVLGSAHQGCLPPFPADVFMIPQYGYLTLNNGSQAVGRSSFYCLEYFPSQMLKTGNNFQFTYTFEDVPFHSSYAHSQSLDRLMNPLIDQYLYYLSRTQTTGGTTNTQTLGFSQGGPNTMANQAKNWLPGPCYRQQRVSKTSADNNNSEYSWTGATKYHLNGRDSLVNPGPAMASHKDDEEKFFPQSGVLIFGKQGSEKTNVDIEKVMITDEEEIRTTNPVATEQYGSVSTNLQRGNRQAATADVNTQGVLPGMVWQDRDVYLQGPIWAKIPHTDGHFHPSPLMGGFGLKHPPPQILIKNTPVPADPPTTFNQSKLNSFITQYSTGQVSVEIEWELQKENSKRWNPEIQYTSNYYKSTSVDFAVNTEGVYSEPRPIGTRYLTRNL

SEQ ID NO: 169 - protein, 737 aa, Artificial Sequence
  Description of Artificial Sequence: Synthetic polypeptide
MAADGYLPDWLEDTLSEGIRQWWKLKPGPPPPKPAERHKDDSRGLVLPGYKYLGPFNGLDKGEPVNEADAAALEHDKAYDRQLDSGDNPYLKYNHADAEFQERLKEDTSFGGNLGRAVFQAKKRLLEPLGLVEEAAKTAPGKKRPVEHSPVEPDSSSGTGKAGQQPARKRLNFGQTGDADSVPDPQPIGEPPAAPSGVGSLTMAAGGGAPMADNNEGADGVGNSSGNWHCDSTWMGDRVITTSTRTWALPTYNNHLYKQISNSTSGGSSNDNAYFGYSTPWGYFDFNRFHCHFSPRDWQRLINNNWGFRPKRLSFKLFNIQVKEVTQNEGTKTIANNLTSTIQVFTDSEYQLPYVLGSAHQGCLPPFPADVFMIPQYGYLTLNNGSQAVGRSSFYCLEYFPSQMLKTGNNFQFTYTFEDVPFHSSYAHSQSLDRLMNPLIDQYLYYLSRTQTTGGTTNTQTLGFSQGGPNTMANQAKNWLPGPCYRQQRVSKTSADNNNSEYSWTGATKYHLNGRDSLVNPGPAMASHKDDEEKFFPQSGVLIFGKQGSEKTNVDIEKVMITDEEEIRTTNPVATEQYGSVSTNLQQGNTQAATADVNTQGVLPGMVWQDRDVYLQGPIWAKIPHTDGHFHPSPLMGGFGLKHPPPQILIKNTPVPADPPTTFNQSKLNSFITQYSTGQVSVEIEWELQKENSKRWNPEIQYTSNYYKSTSVDFAVNTEGVYSEPRPIGTRYLTRNL

SEQ ID NO: 170 - protein, 737 aa, Artificial Sequence
  Description of Artificial Sequence: Synthetic polypeptide
MAADGYLPDWLEDTLSEGIRQWWKLKPGPPPPKPAERHKDDSRGLVLPGYKYLGPFNGLDKGEPVNEADAAALEHDKAYDRQLDSGDNPYLKYNHADAEFQERLKEDTSFGGNLGRAVFQAKKRLLEPLGLVEEAAKTAPGKKRPVEHSPVEPDSSSGTGKAGQQPARKRLNFGQTGDADSVPDPQPIGEPPAAPSGVGSLTMAAGGGAPMADNNEGADGVGNSSGNWHCDSTWMGDRVITTSTRTWALPTYNNHLYKQISNSTSGGSSNDNAYFGYSTPWGYFDFNRFHCHFSPRDWQRLINNNWGFRPKRLSFKLFNIQVKEVTQNEGTKTIANNLTSTIQVFTDSEYQLPYVLGSAHQGCLPPFPADVFMIPQYGYLTLNNGSQAVGRSSFYCLEYFPSQMLRTGNNFQFTYTFEDVPFHSSYAHSQSLDRLMNPLIDQYLYYLSRTQTTGGTTNTQTLGFSQGGPNTMANQAKNWLPGPCYRQQRVSKTSADNNNSEYSWTGATKYHLNGRDSLVNPGPAMASHKDDEEKFFPQSGVLIFGKQGSEKTNVDIEKVMITDEEEIRTTNPVATEQYGSVSTNLQQGNTQAATADVNTQGVLPGMVWQDRDVYLQGPIWAKIPHTDGHFHPSPLMGGFGLKHPPPQILIKNTPVPADPPTTFNQSKLNSFITQYSTGQVSVEIEWELQKENSKRWNPEIQYTSNYYKSTSVDFAVNTEGVYSEPRPIGTRYLTRNL

SEQ ID NO: 171 - protein, 729 aa, Artificial Sequence
  Description of Artificial Sequence: Synthetic polypeptide
MAADGYLPDWLEDNLSEGIREWWDLKPGAPKPKANQQKQDDGRGLVLPGYKYLGPFNGLDKGEPVNAADAAALEHDKAYDQQLKAGDNPYLRYNHADAEFQERLQEDTSFGGNLGRAVFQAKKRVLEPLGLVEEGAKTAPGKKRPIDSPDSSTGIGKKGQQPAKKKLNFGQTGDSESVPDPQPLGEPPAAPSSVGSGTMAAGGGAPTADNNEGADGVGNASGNWHCDSTWLGDRVITTSTRTWALPTYNNHLYKQISSSSSGATNDNHYFGYSTPWGYFDFNRFHCHFSPRDWQRLINNNWGFRPKKLRFKLFNIQVKEVTTNDGVTTIANNLTSTVQVFSDSEYQLPYVLGSAHQGCLPPFPADVFMIPQYGYLTLNNGSQSVGRSSFYCLEYFPSQMLRTGNNFEFSYSFEDVPFHSSYAHSQSLDRLMNPLIDQYLYYLARTQSTTGSTRELQFHQAGPNTMAEQSKNWLPGPCYRQQRLSKNLDFNNNSNFAWTAATKYHLNGRNSLTNPGIPMATNKDDEDQFFPINGVLVFGKTGAANKTTLENVLMTSEEEIKTTNPVATEEYGVVSSNLQSSTAGPQSQTINSQGALPGMVWQNRDVYLQGPIWAKIPHTDGNFHPSPLMGGFGLEHPPPQILIKNTPVPANPPEVFTPAKFASFITQYSTGQVSVEIEWELQKENSKRWNPEIQYTSNYAKSNNVEFAVNPDGVYTEPRPIGTRYLTRNL

SEQ ID NO: 172 - DNA, 3075 bp, Artificial Sequence
  Description of Artificial Sequence: Synthetic polynucleotide
tgagaactttcctttcaacgattgcgtcggacaagatggtgatctggtgggaggaggggaagatgaccgccaaggtcgtggagtcggccaaagccattcttggaggaagcaaggtgcgtgtggaccagaaatgcaagtcctcggcccagatagacccgactcccgtgatcgtcacctccaacaccaacatgtgcgccgtgattgacgggaactcaacgaccttcgagcaccagcagccgttgcaagaccggatgttcaaatttgaacttacccgccgtctggatcatgactttggaaaggtcaccaagcaggaagtgaaagactttttccggtgggcaaaggatcacgtggttgaggtggagcatgaattctacgtcaaaaagggtggagctaagaaaagacccgcccccagtgacgcagatataagtgagcccaaacgggcgcgcgagtcagttgcgcagccatcaacgtcagacgcggaagcttcgatcaactacgcggacaggtaccaaaaacaaatgttctcgtcacgtgggcatgaatctgatgctgtttccctgcagacaatgcgagagaatgaatcagaattcaaatatctgcttcactcacggacagaaagactgtttagagtgctttcccgtgtcagaatctcaacccgtttctgtcgtcaaaaaggcgtatcagaaactgtgctacattcatcatatcatgggaaaggtgccagacgcttgcactgcctgcgatctggtcaatgtggatttggatgactgcatctctgaacaataaatgatttaaatcaggtatggctgccgatggttatcctccagattggctcgaggacactctctctgaagggataagacagtggtggaagctcaaacctggcccaccaccaccaaagcccgcagagcggcataaggacgacagcaggggtcttgtgcttcctgggtacaagtacctcggacccttcaacggactcgacaagggggagccggtcaacgaggcagacgccgcggccctcgagcacgacaaggcctacgaccggcagctcgacagcggagacaacccgtacctcaagtacaaccacgccgacgcagagtttcaggagcgccttaaagaagatacgtcttttgggggcaacctcggacgagcagtcttccaggcgaaaaagagggttcttgaacctctgggcctggttgaggaacctgttaagacggctccgggaaaaaagaggccggtagagcactctcctgtggagccagactcctcctcgggaaccggaaaagcgggccagcggcctgcaagaaaaagattaaattttggtcagactggagacgcagactccgtacctgacccccagcctctcggacagccaccagcagccccctctggtctgggatctactacaatggctacaggcagtggcgcaccaatggcagacaataacgagggtgccgatggagtgggtaattcctcaggaaattggcattgcgattcccaatggctgggcgacagagtcatcaccaccagcacccgaacctgggccctgcccacatacaacaaccacctctacaagcaaatctccagccaatcaggagccagcaacgacaaccactactttggctacagcaccccctgggggtattttgacttcaacagattccactgccacttttcaccacgtgactggcaaagactcatcaacaacaactggggattccggcccaaaagactcaacttcaagctctttaatattcaagtcaaagaggtcacgcagaatgacggtacgacgacgattgccaataaccttaccagcacggttcaggtgtttactgactcggagtaccagctcccgtacgtcctgggctcggcgcatcaaggatgcctcccgccgtttccagcggacgtcttcatggtcccacagtatggatacctcaccctgaacaacgggagtcaggcggtaggacgctcttccttttactgcctggagtactttccttctcagatgctgcgtactggaaacaactttcagttcagctacacttttgaagacgtgcctttccacagcagctacgctcacagccagagtctggatcggctgatgaatcctctgatcgaccagtacctgtattatctgaacaagacacaaacaaatagtggaactcttcagcagtctcggctactgtttagccaagctggaccaaccaacatgtctcttcaagctaaaaactggctgcctggaccttgctacagacagcagcgtctgtcaaaacaggcaaacgacaacaacaacagcaactttccctggactgcagctacaaagtatcatctaaatggccgggactcgttggttaatccaggaccagctatggccagtcacaaggatgacgaagaaaagtttttccccatgcatggaaccctgatatttggtaaacaaggaacaaatgccaacgacgcggatttggaaaatgtcatgattacagatgaagaagaaatcagggccaccaatcccgtggctacggagcagtacgggactgtgtcaaataatttgcaaaactcaaacactggtccaactactggaactgtcaatcgccaaggagcgttacctggtatggtgtggcaggatcgagacgtgtacctgcagggacccatttgggccaagattcctcacaccgatggacactttcatccttctccactgatgggaggttttggactcaaacacccgcctcctcagatcatgatcaaaaacactcccgttccagccaatcctcccacaaacttcagttctgccaagtttgcttctttcatcacacagtattccacgggacaggtcagcgtggagatcgagtgggagctgcagaaggagaacagcaaacgctggaatcccgaaattcagtacacttccaactacaacaagtctgttaatgtggactttactgtggacactaatggtgtgtattcagagcctcgccccattggcaccagatacctgactcgtaatctgtaattgcttgttaatcaataaaccgtttaattcgtttcagttgaactttggtctctgcgaagggcgaa

SEQ ID NO: 173 - DNA, 3142 bp, Artificial Sequence
  Description of Artificial Sequence: Synthetic polynucleotide
aaaacgacgggccagtgattgtaatacgactcactatagggcgaaattgaaattagcggccgcgaattcgcctttcgcagagaccaaagttcaactgaaacgaattaaacggtttattgattaacaagcaattacagattacgagtcaggtatctggtgccaatggggcgaggctctgaatacacaccattagtgtccacagtaaagtccacattaacagacttgttgtagttggaagtgtactgaatttcgggattccagcgtttgctgttctccttctgcagctcccactcgatctccacgctgacctgtcccgtggaatactgtgtgatgaaagaagcaaacttggcagaactgaagtttgtgggaggattggctggaacgggagtgtttttgatcatgatctgaggaggcgggtgtttgagtccaaaacctcccatcagtggagaaggatgaaagtgtccatcggtgtgaggaatcttggcccaaatgggtccctgcaggtacacgtctcgatcctgccacaccataccaggtaacgctccttggtgattgacagttccagtagttggaccagtgtttgagttttgcaaattatttgacacagtcccgtactgctccgtagccacgggattggtggccctgatttcttcttcatctgtaatcatgacattttccaaatccgcgtcgttggcatttgttccttgtttaccaaatatcagggttccatgcatggggaaaaacttttcttcgtcatccttgtgactggccatagctggtcctggattaaccaacgagtcccggccatttagatgatactttgtagctgcagtccagggaaagttgctgttgttgttgtcgtttgcctgttttgacagacgctgctgtctgtagcaaggtccaggcagccagtttttagcttgaagagacatgttggttggtccagcttggctaaacagtagccgagactgctgaagagttccactatttgtttgtgtcttgttcagataatacaggtactggtcgatcagaggattcatcagccgatccagactctggctgtgagcgtagctgctgtggaaaggcacgtcttcaaaagtgtagctgaactgaaagttgtttccagtacgcagcatctgagaaggaaagtactccaggcagtaaaaggaagagcgtcctaccgcctgactcccgttgttcagggtgaggtatccatactgtgggaccatgaagacgtccgctggaaacggcgggaggcatccttgatgcgccgagcccaggacgtacgggagctggtactccgagtcagtaaacacctgaaccgtgctggtaaggttattggcaatcgtcgtcgtaccgtcattctgcgtgacctctttgacttgaatattaaagagcttgaagttgagtcttttgggccggaatccccggttgttgttgacgagtctttgccagtcacgtggtgaaaagtggcagtggaatctgttgaagtcaaaatacccccagggggtgctgtagccaaagtagtggttgtcgttgctggctcctgattggctggagatttgcttgtagaggtggttgttgtatgtgggcagggcccaggttcgggtgctggtggtgatgactctgtcgcccagccattgggaatcgcaatgccaatttcctgaggaattacccactccatcggcaccctcgttattgtctgccattggtgcgccactgcctgtagccattgtagtagatcccagaccagagggggctgctggtggctgtccgagaggctgggggtcaggtacggagtctgcgtctccagtctgaccaaaatttaatctttttcttgcaggctgctggcccgcttttccggttcccgaggaggagtctggctccacaggagagtgctctaccggcctcttttttcccggagccgtcttaacaggctcctcaaccaggcccagaggttcaagaaccctctttttcgcctggaagactgctcgtccgaggttgcccccaaaagacgtatcttctttaaggcgctcctgaaactctgcgtcggcgtggttgtacttgaggtacgggttgtctccgctgtcgagctgccggtcgtaggccttgtcgtgctcgagggccgcggcgtctgcctcgttgaccggctcccccttgtcgagtccgttgaagggtccgaggtacttgtacccaggaagcacaagacccctgctgtcgtccttatgccgctctgcgggctttggtggtggtgggccaggtttgagcttccaccactgtcttattccttcagagagagtgtcctcgagccaatctggaagataaccatcggcagccatacctgatttaaatcatttattgttcagagatgcagtcatccaaatccacattgaccagatcgcaggcagtgcaagcgtctggcacctttcccatgatatgatgaatgtagcacagtttctgatacgcctttttgacgacagaaacgggttgagattctgacacgggaaagcactctaaacagtctttctgtccgtgagtgaagcagatatttgaattctgattcattctctcgcattgtctgcagggaaacagcatcagattcatgcccacgtgacgagaacatttgttttggtacctgtccgcgtagttgatcgaagcttccgcgtctgacgtcgatggctgcgcaactgactcgcgcgcccgtttgggctcacttatatctgcgtcactgggggcgggtcttttcttagctccaccctttttgacgtagaattcatgctccacctcaaccacgtgatcctttgcccaccggaaaaagtctttcacttcctgcttggtgacctttccaaagtcatgatccagacggcgggtaagttcaaatttgaacatccggtcttgcaacggctgctggtgctcgaaggtcgttgagttcccgtcaatcacggcgcacatgttggtgttggaggtgacgatcacgggagtcgggtctatctgggccgaggacttgcatttctggtccacacgcaccttgcttcctccaagaatggctttggccgactccacgaccttggcggtcatcttcccctcctcccaccagatcaccatcttgtcgacgcaatggtaaaaggaaagttctcattgg

SEQ ID NO: 174 - protein, 735 aa, Adeno-associated virus-2
MAADGYLPDWLEDTLSEGIRQWWKLKPGPPPPKPAERHKDDSRGLVLPGYKYLGPFNGLDKGEPVNEADAAALEHDKAYDRQLDSGDNPYLKYNHADAEFQERLKEDTSFGGNLGRAVFQAKKRVLEPLGLVEEPVKTAPGKKRPVEHSPVEPDSSSGTGKAGQQPARKRLNFGQTGDADSVPDPQPLGEPPATPAAVGPTTMASGGGAPMADNNEGADGVGNASGNWHCDSTWLGDRVITTSTRTWALPTYNNHLYKQISSASTGASNDNHYFGYSTPWGYFDFNRFHCHFSPRDWQRLINNNWGFRPKRLNFKLFNIQVKEVTQNDGTTTIANNLTSTVQVFTDSEYQLPYVLGSAHQGCLPPFPADVFMIPQYGYLTLNNGSQAVGRSSFYCLEYFPSQMLRTGNNFTFSYTFEDVPFHSSYAHSQSLDRLMNPLIDQYLYYLNRTQNQSGSAQDKALLFSRGSPAGMSVQPKNWLPGPCYRQQRVSKTKTDNNNSNFTWTGASKYNLNGRESIINPGTAMASHKDDKDKFFPMSGVMIFGKESAGASNTALDNVMITDEEEIKATNPVATERFGTVAVNFQSSSTDPATGDVHVMGALPGMVWQDRDVYLQGPIWAKIPHTDGHFHPSPLMGGFGLKHPPPQILIKNTPVPANPPAEFSATKFASFITQYSTGQVSVEIEWELQKENSKRWNPEVQYTSNYAKSANVDFTVDNNGLYTEPRPIGTRYLTRP

SEQ ID NO: 175 - protein, 740 aa, Adeno-associated virus-2
MAADGYLPDWLEDTLSEGIRQWWKLKPGPPPPKPAERHKDDSRGLVLPGYKYLGPFNGLDKGEPVNAADAAALEHDKAYDRQLDSGDNPYLKYNHADAEFQERLKEDTSFGGNLGRAVFQAKKRVLEPLGLVEEPVKTAPGKKRPVEHSPVEPDSSSGTGKAGQQPARKRLNFGQTGDADSVPDPQPLGQPPAAPSGLGTNTMATGSGAPMADNNEGADGVGNSSGNWHCDSTWMGDRVITTSTRTWALPTYNNHLYKQISSQSGASNDNHYFGYSTPWGYFDFNRFHCHFSPRDWQRLINNNWGFRPKRLNFKLFNIQVKEVTQNDGTTTIANNLTSTVQVFTDSEYQLPYVLGSAHQGCLPPFPADVFMVPQYGYLTLNNGSQAVGRSSFYCLEYFPSQMLRTGNNFTFSYTFEDVPFHSSYAHSQSLDRLMNPLIDQYLYYLSRTNTPSGTTTQSGLQFSQAGASDIRDQSRNWLPGPCYRQQRVSKTSADNNNSEYSWTGATKYHLNGRDSLVNPGPAMASHKDDEEKFFPQSGVLIFGKQGSEKTNVDIEKVMITDEEEIRTTNPVATEQYGSVSTNLQRGNRQAATADVNTQGVLPGMVWQDRDVYLQGPIWAKIPHTDGHFHPSPLMGGFGLKHPPPQILIKNTPVPANPSTTFSAAKFASFITQYSTGQVSVEIEWELQKENSKRWNPEIQYTSNYNKSVNVDFTVDTNGVYSEPRPIGTRYLTRNLLLAAA

SEQ ID NO: 176 - protein, 734 aa, Adeno-associated virus-2
MAADGYLPDWLEDTLSEGIRQWWKLKPGPPPPKPAERHKDDSRGLVLPGYKYLGPFNGLDKGEPVNEADAAALEHDKAYDRQLDSGDNPYLKYNHADAEFQERLKEDTSFGGNLGRAVFQAKKRVLEPLGLVEEPVKTAPGKKRPVEHSPVEPDSSSGTGKAGQQPARKRLNFGQTGDADSVPDPQPLGQPPAAPSGLGTNTMATGSGAPMADNNEGADGVGNSSGNWHCDSTWMGDRVITTSTRTWALPTYNNHLYKQISSQSGASNDNHYFGYSTPWGYFDFNRFHCHFSPRDWQRLINNNWGFRPKRLNFKLFNIQVKEVTQNDGTTTIANNLTSTVQVFTDSEYQLPYVLGSAHQGCLPPFPADVFMVPQYGYLTLNNGSQAVGRSSFYCLEYFPSQMLRTGNNFTFSYTFEDVPFHSSYAHSQSLDRLMNPLIDQYLYYLSRTNTPSGTTTQSGLQFSQAGASDIRDQSRNWLPGPCYRQQRVSKTSADNNNSEYSWTGATMYHLNGRDSLVNPGPAMASHKDDEEKFFPQSGVLIFGKQGSEKTNVDIEKVMITDEEEIRTTNPVATEQYGSVSTNLQRGNRQAATADVNTQGVLPGMVWQDRDVYLQGPIWAKIPHTDGHFHPSPLMGGFGLKHPPPQILIKNTPVPANPSTTFSAAKFASFITQYSTGQVSVEIEWELQKENSKRWNPEIQYTSNYNKSINVDFTVDTNGVYSEPRPIGTRYLTRN

SEQ ID NO: 177 - protein, 734 aa, Adeno-associated virus-2
MAADGYLPDWLEDTLSEGIRQWWKLKPGPPPPKPAERHKDDSRGLVLPGYKYLGPFNGLDKGEPVNEADAAALEHDKAYDRQLDSGDNPYLKYNHADAEFQERLKEDTSFGGNLGRAVFQAKKRVLEPLGLVEEPVKTAPGKKRPVEHSPVEPDSSSGTGKAGQQPARKRLNFGQTGDADSVPDPQPLGQPPAAPSGLGTNTMATGSGAPMADNNEGADGVGNSSGNWHCDSTWMGDRVITTSTRTWALPTYNNHLYKQISSQSGASNDNHYFGYSTPWGYFDFNRFHCHFSPRDWQRLINNNWGFRPKRLNFKLFNIQVKEVTQNDGTTTIANNLTSTVQVFTDSEYQLPYVLGSAHQGCLPPFPADVFMVPQYGYLTLNNGSQAVGRSSFYCLEYFPSQMLRTGNNFTFSYTFEDVPFHSSYAHSQSLDRLMNPLIDQYLYYLSRTNTPSGTTTQSGLQFSQAGASDIRDQSRNWLPGPCYRQQRVSKTSADNNNSEYSWTGATKYHLNGRDSLVNPGPAMASHKDDEEKFFPQSGVLIFGKQGSEKTNVDIEKVMITDEEEIRTTNPVATEQYGSVSTNLQRGNRQAATADVNTQGVLPGMVWQDRDVYLQGPIWAKIPHTDGHFHPSPLMGGFGLKHPPPQILIKNTPVPANPSTTFSEAKFASFITQYSTGQVSVEIEWELQKENSKRWNPEIQYTSNYNKSVNVDFTVDTNGVYSEPRPIGTRYLTRN

SEQ ID NO: 178 - protein, 739 aa, Adeno-associated virus-2
MAADGYLPDWLEDTLSEGIRQWWKLKPGPPPPKPAERHKDDSRGLVLPGYKYLGPFNGLDKGEPVNEADAAALEHDKAYDRQLDSGDNPYLKYNHADAEFQERLKEDTSFGGNLGRAVFQAKKRVLEPLGLVEEPVKTAPGKKRPVEHSPVEPDSSSGTGKAGQQPARKRLNFGQTGDADSVPDPQPLGQPPAAPSGLGTNTMATGSGAPMADNNEGADGVGNSSGNWHCDSTWMGDRVITTSTRTWALPTYNNHLYKQISSQSGASNDNHYFGYSTPWGYFDFNRFHCHFSPRDWQRLINNNWGFRPKRLNFKLFNIQVKEVTQNDGTTTIANNLTSTVQVFTDSEYQLPYVLGSAHQGCLPPFPADVFMVPQYGYLTLNNGSQAVGRSSFYCLEYFPSQMLRTGNNFTFSYTFEDVPFHSSYAHSQSLDRLMNPLIDQYLYYLSRTNTPSGTTTQSGLQFSQAGASDIRDQSRNWLPGPCYRQQRVSKTSADNNNSEYSWTGATKYHLNGRDSLVNPGPAMASHKDDEEKFFPQSGVLIFGKQGSEKTNVDIEKVMITDEEEIRTTNPVATEQYGSVSTNLQRGNRQAATADVNTQGVLPGMVWQDRDVYLQGPIWAKIPHTDGHFHPSPLMGGFGLKHPPPQILIKNTPVPANPSTTFSAAKFASFITQYSTGQVSVEIEWELQKENSKRWNPEIQYTSNYNKSVNVDFTVDTNGVYSEPRPIGTRYLTRNLLLAA

SEQ ID NO: 179 - protein, 725 aa, Adeno-associated virus-2
MAADGYLPDWLEDTLSEGIRQWWKLKPGPPPPKPAERHKDDSRGLVLPGYKYLGPFNGLDKGEPVNEADAAALEHDKAYDRQLDSGDNPYLKYNHADAEFQERLKEDTSFGGNLGRAVFQAKKRVLEPLGLVEEPVKTAPGKKRPVEHSPVEPDSSSGTGKAGQQPARKRLNFGQTGDADSVPDPQPLGQPPAAPSGLGTNTMATGSGAPMADNNEGADGVGNSSGNWHCDSTWMGDRVITTSTRTWALPTYNNHLYKQISSQSGASNDNHYFGYSTPWGYFDFNRFHCHFSPRDWQRLINNNWGFRPKRLNFKLFNIQVKEVTQNDGTTTIANNLTSTVQVFTDSEYQLPYVLGSAHQGCLPPFPADVFMVPQYGYLTLNNGSQAVGRSSFYCLEYFPSQMLRTGNNFTFSYTFEDVPFHSSYAHSQSLDRLMNPLIDQYLYYLSRTNTPSGTTTQSGLQFSQAGASDIRDQSRNWLPGPCYRQQRVSKTSADNNNSEYSWTGATKYHLNGRDSLVNPGPAMASHKDDEEKFFPQSGVLIFGKQGSEKTNVDIEKVMITDEEEIRTTNPVATEQYGSVSTNLQRGNRQAATADVNTQGVLPGMVWQDRDVYLQGPIWAKIPHTDGHFHPSPLMGGFGLKHPPPQILIKNTPVPANPSTTFSAAKFASFITQYSTGQVSVEIEWELQKENSKRWNPEIQYTSNYNKSVNVDFTVDTNGVYSEPRP

SEQ ID NO: 180 - protein, 707 aa, Adeno-associated virus-2
MAADGYLPDWLEDTLSEGIRQWWKLKPGPPPPKPAERHKDDSRGLVLPGYKYLGPFNGLDKGEPVNEADAAALEHDKAYDRQLDSGDNPYLKYNHADAEFQERLKEDTSFGGNLGRAVFQAKKRVLEPLGLVEEPVKTAPGKKRPVEHSPVEPDSSSGTGKAGQQPARKRLNFGQTGDADSVPDPQPLGQPPAAPSGLGTNTMATGSGAPMADNNEGADGVGNSSGNWHCDSTWMGDRVITTSTRTWALPTYNNHLYKQISSQSGASNDNHYFGYSTPWGYFDFNRFHCHFSPRDWQRLINNNWGFRPKRLNFKLFNIQVKEVTQNDGTTTIANNLTSTVQVFTDSEYQLPYVLGSAHQGCLPPFPADVFMVPQYGYLTLNNGSQAVGRSSFYCLEYFPSQMLRTGNNFTFSYTFEDVPFHSSYAHSQSLDRLMNPLIDQYLYYLSRTNTPSGTTTQSGLQFSQAGASDIRDQSRNWLPGPCYRQQRVSKTSADNNNSEYSWTGATKYHLNGRDSLVNPGPAMASHKDDEEKFFPQSGVLIFGKQGSEKTNVDIEKVMITDEEEIRTTNPVATEQYGSCIYQPPERQQTSSYRRCQHTRRSSRHGLAGQRCVPSGAHLGKDSTHGRTFSPLSPHGWIRTTPSSTDSHQEHPGTCESFDHLQCGKVCFLHHTVLHGTGQRGDRVRAAEGKQQTLESRNSVHFQLQQVC

SEQ ID NO: 181 - protein, 739 aa, Adeno-associated virus-2; identical to SEQ ID NO: 178

SEQ ID NO: 182 - protein, 737 aa, Adeno-associated virus-2
MASDGYLPDWLEDNLSEGIREWWDLKPGAPKPKANQQKQDDGRGLVLPGYKYLGPFNGLDKGEPVNAADAAALEHDKAYDQQLKAGDNPYLRYNHADAEFQERLQEDTSFGGNLGRAVFQAKKRVLEPFGLVEEGAKTAPGKKRPVEQSPQEPDSSSGIGKTGQQPAKKRLNFGQTGDSESVPDPQPLGEPPATPAAVGPTTMASGGGAPMADNNEGADGVGNASGNWHCDSTWLGDRVITTSTRTWALPTYNNHLYKQISSASTGASNDNHYFGYSTPWGYFDFNRFHCHFSPRDWQRLINNNWGFRPKRLNFKLFNIQVKEVTTNDGTTTIANNLTSTVQVFTDSEYQLPYVLGSAHQGCLPPFPADVFMVPQYGYLTLNNGSQAVGRSSFYCLEYFPSQMLRTGNNFTFSYTFEDVPFHSSYAHSQSLDRLMNPLIDQYLYYLSRTNTPSGTTTQSGLQFSQAGASDIRDQSRNWLPGPCYRQQRVSKTSADNNNSEYSWTGATKYHLNGRDSLVNPGPAMASHKDDEEKFFPQSGVLIFGKQGSEKTNVDIEKVMITDEEEIRTTNPVATEQYGSVSTNLQRGNRQAATADVNTQGVLPGMVWQDRDVYLQGPIWAKIPHTDGHFHPSPLMGGFGLKHHPPQILIKNTPVPANPSTTFSAAKFASFITQYSTGQVSVEIEWELQKENSKRWNPEIQYTSNYNKSVNVDFTVDTNGVYSEPRPIGTRYLTRNLL

SEQ ID NO: 183 - protein, 741 aa, Adeno-associated virus-2
MAADGYLPDWLEDTLSEGIREWWALKPGAPKPKANQQKQDDGRGLVLPGYKYLGPFNGLDKGEPVNEADAAALEHDKAYDQQLQAGDNPYLRYNHADAEFQERLQEDTSFGGNLGRAVFQAKKRVLEPLGLVEEPVKTAPGKKRPVEHSPVEPDSSSGTGKSGQQPARKRLNFGQTGDADSVPDPQPLGQPPAAPSGLGTNTMATGSGAPMADNNEGADGVGNSSGNWHCDSTWMGDRVITTSTRTWALPTYNNHLYKQISSQSGASNDNHYFGYSTPWGYFDFNRFHCHFSPRDWQRLINNNWGFRPKRLNFKLFNIQVKEVTQNDGTTTIANNLTSTVQVFTDSEYQLPYVLGSAHQGCLPPFPADVFMVPQYGYLTLNNGSQAVGRSSFYCLEYFPSQMLRTGNNFTFSYTFEDVPFHSSYAHSQSLDRLMNPLIDQYLYYLSRTNTPSGTTTQSGLQFSQAGASDIRDQSRNWLPGPCYRQQRVSKTSADNNNSEYSWTGATKYHLNGRDSLVNPGPAMASHKDDEEKFFPQSGVLIFGKQGSEKTNVDIEKVMITDEEEIRTTNPVATEQYGSVSTNLQRGNLANHNNTTNARQAATADVNTQGVLPGMVWQDRDVYLQGPIWAKIPHTDGHFHPSPLMGGFGLKHPPPQILIKNTPVPANPSTTFSAAKFASFITQYSTGQVSVEIEWELQKENSKRWNPEIQYTSNYNKSINVDFTVDTNGVYSEPRPIGTRYL

SEQ ID NO: 184 - protein, 730 aa, Adeno-associated virus-2
MASDGYLPDWLEDNLSEGIREWWDLKPGAPKPKANQQKQDDGRGLVLPGYKYLGPFNGLDKGEPVNAADAAALEHDKAYDQQLKAGDNPYLRYNHADAEFQERLQEDTSFGGNLGRAVFQAKKRVLEPFGLVEEGAKTAPGKKRPVEQSPQEPDSSSGIGKTGQQPAKKRLNFGQTGDSESVPDPQPLGEPPATPAAVGPTTMASGGGAPMADNNEGADGVGNASGNWHCDSTWLGDRVITTSTRTWALPTYNNHLYKQISSASTGASNDNHYFGYSTPWGYFDFNRFHCHFSPRDWQRLINNNWGFRPKRLNFKLFNIQVKEVTTNDGVTTIANNLTSTVQVFSDSEYQLPYVLGSAHQGCLPPFPADVFMIPQYGYLTLNNGSQAVGRSSFYCLEYFPSQMLRTGNNFTFSYTFEDVPFHSSYAHSQSLDRLMNPLIDQYLYYLNRTQNQSGSAQNNDLLFSRGSPAGMSVQPKNWLPGPCYRQQRVSKTKTDNNNSNFTWTGASKYNLNGRESIINPGTAMASHKDDKDKFFPMSGVMIFGKESAGASNTALDNVMITDEEEIKATNPVATERFGTVAVNLQSSSTDPATGDVHVMGALPGMVWQDRDVYLQGPIWAKIPHTDGHFHPSPLMGGFGLKNPPPQILIKNTPVPANPPAEFSATKFASFITQYSTGQVSVEIEWELQKENSKRWNPEVQYTSNYAKSANVDFTVDNNGLYTEPRPIGTR

SEQ ID NO: 185 - protein, 735 aa, Adeno-associated virus-2
  MOD_RES (239)..(239): Any amino acid
MASDGYLPDWLEDNLSEGIREWWDLKPGAPKPKANQQKQDDGRGLVLPGYKYLGPFNGLDKGEPVNAADAAALEHDKAYDQQLKAGDNPYLRYNHADAEFQERLQEDTSFGGNLGRAVFQAKKRVLEPFGLVEEGAKTAPGKKRPVEQSPQEPDSSSGIGKTGQQPAKKRLNFGQTGDSESVPDPQPLGEPPATPAAVGPTTMASGGGAPMADNNEGADGVGNASGNWHCDSTWLGDRXITTSTRTWALPTYNNHLYKQISSASTGASNDNHYFGYSTPWGYFDFNRFHCHFSPRDWQRLINNNWGFRPKRLNFKLFNIQVKEVTTNDGVTTIANNLTSTVQVFSDSEYQLPYVLGSAHQGCLPPFPADVFMIPQYGYLTLNNGSQAVGRSSFYCLEYFPSQMLRTGNNFTFSYTFEDVPFHSSYAHSQSLDRLMNPLIDQYLYYLNRTQNQSGSAQNNDLLFSRGSPAGMSVQPKNWLPGPCYRQQRVSKTKTDNNNSNFTWTGASKYNLNGRESIINPGTAMASHKDDKDKFFPMSGVMIFGKESAGASNTALDNVMITDEEEIKATNPVATERFGTVAVNLQSSSTDPATGDVHVMGALPGMVWQDRDVYLQGPIWAKIPHTDGHFHPSPLMGGFGLKNPPPQILIKNTPVPANPPAEFSATKFASFITQYSTGQVSVEIEWELQKENSKRWNPEVQYTSNYAKSANVDFTVDNNGLYTEPRPIGTRYLTRP

SEQ ID NO: 186 - protein, 733 aa, Adeno-associated virus-2
MASDGYLPDWLEDNLSEGIREWWDLKPGAPKPKANQQKQDDGRGLVLPGYKYLGPFNGLDKGEPVNAADAAALEHDKAYDQQLKAGDNPYLRYNHADAEFQERLQEDTSFGGNLGRAVFLAKKRVLEPFGLVEEGAKTAPGKKRPVEQSPQEPDSSSGIGKTGQQPAKKRLNFGQTGDSESVPDPQPLGEPPATPAAVGPTTMASGGGAPMADNNEGADGVGNASGNWHCDSTWLGDRVITTSTRTWALPTYNNHLYKQISSASTGASNDNHYFGYSTPWGYFDFNRFHCHFSPRDWQRLINNNWGFRPKRLNFKLFNIQVKEVTTNDGVTTIANNLTSTVQVFSDSEYQLPYVLGSAHQGCLPPFPADVFMIPQYGYLTLNNGSQAVGRSSFYCLEYFPSQMLRTGNNFTFSYTFEDVPFHSSYAHSQSLDRLMNPLIDQYLYYLNRTQNQSGSAQNNDLLFSRGSPAGMSVQPKNWLPGPCYRQQRVSKTKTDNNNSNFTWTGASKYNLNGRESIINPGTAMASHKDDKDKFFPMSGVMIFGKESAGASNTALDNVMITDEEEIKATNPVATERFGTVAVNLQSSSTDPATGDVHVMGALPGMVWQDRDVYLQGPIWAKIPHTDGHFHPSPLMGGFGLKNPPPQILIKNTPVPANPPAEFSATKFASFITQYSTGQVSVEIEWELQKENSKRWNPEVQYTSNYAKSANVDFTVDNNGLYTEPRPIGTRYLT

SEQ ID NO: 187 - protein, 734 aa, Adeno-associated virus-2
MAADGYLPDWLEDTLSEGIRQWWKLKPGPPPPKPAERHKDDSRGLVLPGCKYLGPFNGLDKGEPVNEADAAALEHDKAYDRQLDSGDNPYLKYNHADAEFQERLKEDTSFGGNLGRAVFQAKKRVLEPLGLVEEPVKTAPGKKRPVEHSPVEPDSSSGTGKAGQQPARKRLNFGQTGDADSVPDPQPLGQPPAAPSGLGTNTMATGSGAPMADNNEGADGVGNSSGNWHCDSTWMGDRVITTSTRTWALPTYNNHLYKQISSQSGASNDNHYFGYSTPWGYFDFNRFHCHFSPRDWQRLINNNWGFRPKRLNFKLFNIQVKEVTQNDGTTTIANNLTSTVQVFSDSEYQLPYVLGSAHQGCLPPFPADVFMIPQYGYLTLNNGSQAVGRSSFYCLEYFPSQMLRTGNNFTFNYTFEDVPFHSSYAHSQSLDRLMNPLIDQYLYYLNRTQNQSGSAQNNDLLFSRGSPAGMSVQPKNWLPGPCYRQQRVSKTKTDNNNSNFTWTGASKYNLNGRESIINPGTAMASHKDDKDKFFPMSGVMIFGKESAGASNTALDNVMITDEEEIKATNPVATERFGTVAVNLQSSSTDPATGDVHVMGALPGMVWQDRDVYLQGPIWAKIPHTDGHFHPSPLMGGFGLKNPPPQILIKNTPVPANPPAEFSATKFASFITQYSTGQVSVEIEWELQKENSKRWNPEVQYTSNYAKSANVDFTVDNNGLYTEPRPIGTRYLTRP

SEQ ID NO: 188 - protein, 734 aa, Adeno-associated virus-2
MAADGYLPDWLEDTLSEGIRQWWKLKPGPPPPKPAERHKDDSRGLVLPGYKYLGPFNGLDKGEPVNEADAAALEHDKAYDRQLDSGDNPYLKYNHADAEFQERLKEDTSFGGNLGRAVFQAKKRVLEPLGLVEEPVKTAPGKKRPVEHSPVEPDSSSGTGKAGQQPARKRLNFGQTGDADSVPDPQPLGQPPAAPSGLGTNTMATGSGAPMADNNEGADGVGNSSGNWHCDSTWMGDRVITTSTRTWALSTYNNHLYKQISSQSGASNDNHYFGYSTPWGYFDFNRFHCHFSPRDWQRLINNNWGFRPKRLNFKLFNIQVKEVTQNDGTTTIANNLTSTVQVFTDSEYQLPYVLGSAHQGCLPPFPADVFMVPQYGYLTLNNGSQAVGRSSFYCLEYFPSQMLRTGNNFTFSYTFEDVPFHSSYAHSQSLDRLMNPLIDQYLYYLSRTNTPSGTTTQSRLQFSQAGASDIRDQSRNWLPGPCYRQQRVSKTSADNNNSEYSWTGATKYHLNGRDSLVNPGPAMASHKDDEEKFFPQSGVLIFGKQGSEKTNVDIEKVMITDEEEIRTTNPVATEQYGSVSTNLQRGNRQAATADVNTQGVLPGMVWQDRDVYLQGPIWAKIPHTDGHFHPSPLMGGFGLKHPPPQILIKNTPVPANPSTTFSAAKFASFITQYSTGQVSVEIEWELQKENSKRWNPEIQYTSNYNKSINVDFTVDTNGVYSEPRPIGTRYLTRN

SEQ ID NO: 189 - protein, 738 aa, Adeno-associated virus-2
MAADGYLPDWLEDTLSEGIRQWWKLKPGPPPPKPAERHKDDSRGLVLPGYKYLGPFNGLDKGEPVNEADAAALEHDKAYDRQLDGGDNPYLKYNHADAEFQERLKEDTSFGGNLGRAVFQAKKRVLEPLGLVEEPVKTAPGKKRPVEHSPVEPDSSSGTGKAGQQPARKRLNFGQTGDADSVPDPQPLGQPPAAPSGLGTNTMATGSGAPMADNNEGADGVGNSSGNWHCDSTWMGDRVITTSTRTWALPTYNNHLYKQISSQSGASNDNHYFGYSTPWGYFDFNRFHCHFSPRDWQRLINNNWGFRPKRLNFKLFNIQVKEVTQNDGTTTIANNLTSTVQVFTDSEYQLPYVLGSAHQGCLPPFPADVFMVPQYGYLTLNNGSQAVGRSSFYCLEYFPSQMLRTGNNFTFSYTFEDVPFHSSYAHSQSLDRLMNPLIDQYLYYLSRTNTPSGTTTQSGLQFSQAGASDIRDQSRNWLPGPCYRQQRVSKTSADNNNSEYSWTGATKYHLNGRDSLVNPGPAMASHKDDEEKFFPQSGVLIFGKQGSEKTNVDIEKVMITDEEEIRTTNPVATEQYGSVSTNLQRGNRQAATADVNTQGVLPGMVWQDRDVYLQGPIWAKIPHTDGHFHPSPLMGGFGLKHPPPQILIKNTPVPANPSTTFSAAKFASFITQYSTGQVSVEIEWELQKENSKRWNPEIQYTSNYNKSVNVDFTVDTNGVYSEPRPIGTRYLTRNLLRP

SEQ ID NO: 190 - DNA, 2208 bp, Artificial Sequence
  Description of Artificial Sequence: Synthetic polynucleotide
atggctgccgatggttatcttccagattggctcgaggacactctctctgaaggaataagacagtggtggaagctcaaacctggcccaccaccaccaaagcccgcagagcggcataaggacgacagcaggggtcttgtgcttcctgggtacaagtacctcggacccttcaacggactcgacaagggggagccggtcaacgaggcagacgccgcggccctcgagcacgacaaggcctacgaccggcagctcgacagcggagacaacccgtacctcaagtacaaccacgccgacgcagagtttcaggagcgccttaaagaagatacgtcttttgggggcaacctcggacgagcagtcttccaggcgaaaaagagggttcttgaacctctgggcctggttgaggaacctgttaagacggctccgggaaaaaagaggccggtagagcactctcctgtggagccagactcctcctcgggaaccggaaaagcgggccagcagcctgcaagaaaaagattaaattttggtcagactggagacgcagactccgtacctgacccccagcctctcggacagccaccagcagccccctctggtctgggatctactacaatggctacaggcagtggcgcaccaatggcagacaataacgagggtgccgatggagtgggtaattcctcaggaaattggcattgcgattcccaatggctgggcgacagagtcatcaccaccagcacccgaacctgggccctgcccacatacaacaaccacctctacaagcaaatctccagccaatcaggagccagcaacgacaaccactactttggctacagcaccccctgggggtattttgacttcaacagattccactgccacttttcaccacgtgactggcaaagactcatcaacaacaactggggattccggcccaaaagactcaacttcaagctctttaatattcaagtcaaagaggtcacgcagaatggcggtacgacgacgattgccaataaccttaccagcacggttcaggtgtttactgactcggagtaccagctcccgtacgtcctgggctcggcgcatcaaggatgcctcccgccgtttccagcggacgtcttcatggtcccacagtatggatacctcaccctgaacaacgggagtcaggcggtaggacgctcttccttttactgcctggagtactttccttctcagatgctgcgtactggaaacaactttcagttcagctacacttttgaagacgtgcctttccacagcagctacgctcacagccagagtctggatcggctgatgaatcctctgatcgaccagtacctgtattatctgaacaagacacaaacaaatagtggaactcttcagcagtctcggctactgtttagccaagctggaccaaccaacatgtctcttcaagctaaaaactggctgcctggaccttgctacagacagcagcgtctgtcaaaacaggcaaacggcaacaacaacagcaactttccctggactgcagctacaaagtatcatctaaatggccgggactcgttggttaatccaggaccagctatggccagtcacaaggatgacgaagaaaagtttttccccatgcatggaaccctgatatttggtaaacaaggaacaaatgccaacgacgcggatttggaaaatgtcatgattacagatgaagaagaaatcagggccaccaatcccgtggctacggagcagtacgggactgtgtcaaataatttgcaaaactcaaacactggtccaactactggaactgtcaatcaccaaggagcgttacctggtatggtgtggcaggatcgagacgtgtacctgcagggacccatttgggccaagattcctcacaccgatggacactttcatccttctccactgacgggaggttttggactcaaacacccgcctcctcagatcatgatcaaaaacactcccgttccagccaatcctcccacaaacttcagttctgccaagtttgcttctttcatcacacagtattccacgggacaggtcagcgtggagatcgagtgggagctgcagaaggagaacagcaaacgctggaatcccgaaattcagtacacttccaactacaacaagtctgttaatgtggactttactgtggacactaatggtgtgtattcagagcctcgccccattggcaccagatacctgactcgtaatctgtaa

SEQ ID NO: 191 - protein, 735 aa, Artificial Sequence
  Description of Artificial Sequence: Synthetic polypeptide
MAADGYLPDWLEDTLSEGIRQWWKLKPGPPPPKPAERHKDDSRGLVLPGYKYLGPFNGLDKGEPVNEADAAALEHDKAYDRQLDSGDNPYLKYNHADAEFQERLKEDTSFGGNLGRAVFQAKKRVLEPLGLVEEPVKTAPGKKRPVEHSPVEPDSSSGTGKAGQQPARKRLNFGQTGDADSVPDPQPLGQPPAAPSGLGSTTMATGSGAPMADNNEGADGVGNSSGNWHCDSQWLGDRVITTSTRTWALPTYNNHLYKQISSQSGASNDNHYFGYSTPWGYFDFNRFHCHFSPRDWQRLINNNWGFRPKRLNFKLFNIQVKEVTQNGGTTTIANNLTSTVQVFTDSEYQLPYVLGSAHQGCLPPFPADVFMVPQYGYLTLNNGSQAVGRSSFYCLEYFPSQMLRTGNNFQFSYTFEDVPFHSSYAHSQSLDRLMNPLIDQYLYYLNKTQTNSGTLQQSRLLFSQAGPTNMSLQAKNWLPGPCYRQQRLSKQANGNNNSNFPWTAATKYHLNGRDSLVNPGPAMASHKDDEEKFFPMHGTLIFGKQGTNANDADLENVMITDEEEIRATNPVATEQYGTVSNNLQNSNTGPTTGTVNHQGALPGMVWQDRDVYLQGPIWAKIPHTDGHFHPSPLTGGFGLKHPPPQIMIKNTPVPANPPTNFSSAKFASFITQYSTGQVSVEIEWELQKENSKRWNPEIQYTSNYNKSVNVDFTVDTNGVYSEPRPIGTRYLTRNL

SEQ ID NO: 192 - DNA, 2208 bp, Artificial Sequence
  Description of Artificial Sequence: Synthetic polynucleotide
atggctgccgatggttatcttccagattggctcgaggacactctctctgaaggaataagacagtggtggaagctcaaacctggcccaccaccaccaaagctcgcagagcggcatcaggacgacagcaggggtcttgtgcttcctgggtacaagtacctcggacccttcaacggactcgacaaaggagagccggtcaacgaggcagacgccgcggccctcgagcacgacaaggcctacgaccggcagctcgacagcggagacaacccgtacctcaagtacaaccacgccgacgcggagtttcaggagcgtcttaaagaagatacgtcttttgggggcaacctcggacgagcagtcttccaggcgaaaaagagggttcttgaacctctgggcctggttgaggaacctgttaagacggctccgggaaaaaagaggccggtagagcactctcctgtggagccagactcctcctcgggaaccggaaaggcgggccatcagcctgcgagaaagagattgaattttggtcagactggagacgcagactccgtacctgacccccagcctctcggacagccaccagcagcccccacaagtctgggatctactacaatggctacaggcagtggcgcaccaatggcagacaataacgagggtgccgatggagtgggtaattcctcaggaaattggcattgcgattcccaatggctgggcgacagagtcatcaccaccagcacccgaacctgggccctgcccacctacaacaaccacctctacaagcaaatctccagccaatcaggagcctcgaacgacaaccactactttggctacagcaccccctgggggtattttgacttcaacagattccactgtcacttctccccacgtgattggcaaagactcatcaacaacaactggggattccgacccaagagactcaacttcaagctctttaacattcaagtcaaagaggtcacgcagaatgacggtacgacgacgattgccaataaccttaccagcacggttcaggtgtttactgactcggagtaccagctcccgtacgtcctcggctcggcgcatcaaggatgcctcccgccgtttccagcggacgtcttcacggtcccacagtatggatacctcaccctgaacaacgggagtcaggcggtaggacgctcttccttttactgcctggagtactttccttctcagatgctgcgtactggaaacaaccttaccttcagctacacctttgaggacgttcctttccacagcagctacgctcacagccagagtttggaccggctgatgaatcctctgatcgaccagtatctatattatctgaacaggacacaatcaaatagtggaactcttcagcagtctaggctactgtttagccaagctggacccaccagcatgtctcttcaagctaaaaactggctgcctggaccttgctacagacagcagcgtctttcaaagcaggcaaacgacaacaacaacagcaactttccctggactgcggctacaaagtatcatctaaatggccgggactcgttggttaatccaggaccagctatggccagccacaaagacgatgaagaaaagtttttccccatgcatggaaccctgatatttggtaaacaaggaacaaatgctaacgacgcggatttggagcatgttatgattacagatgaagaagaaatcaggaccaccaatcctgtggctacagagcagtacggaaacgtgtcaaataatttgcaaaactcaaatactggtccaactacagaaaatgtcaatcaccagggagcgttacctggtatggtgtggcaggatcgagacgtgtacctgcagggacccatttgggccaagattcctcacaccgacggacactttcacccttctccactgatgggaggttttggactcaaacacccgcctcctcaaatcatgatcaaaaacactcccgttccagccaatcctcccacaaactacagttctgccaagtttgcttctttcatcacacagtattccacgggccaggtcagcgtggagattgagtgggagctgcggaaggagaacagcaaacgctggaaccccgagatccagtatacttccaactacaacaaatctgttaatgtggactttactgtggacactaatggtgtgtattcagagcctcgccccattggcaccagatacctgactcgtaatctgtaa

SEQ ID NO: 193 - protein, 735 aa, Artificial Sequence
  Description of Artificial Sequence: Synthetic polypeptide
MAADGYLPDWLEDTLSEGIRQWWKLKPGPPPPKLAERHQDDSRGLVLPGYKYLGPFNGLDKGEPVNEADAAALEHDKAYDRQLDSGDNPYLKYNHADAEFQERLKEDTSFGGNLGRAVFQAKKRVLEPLGLVEEPVKTAPGKKRPVEHSPVEPDSSSGTGKAGHQPARKRLNFGQTGDADSVPDPQPLGQPPAAPTSLGSTTMATGSGAPMADNNEGADGVGNSSGNWHCDSQWLGDRVITTSTRTWALPTYNNHLYKQISSQSGASNDNHYFGYSTPWGYFDFNRFHCHFSPRDWQRLINNNWGFRPKRLNFKLFNIQVKEVTQNDGTTTIANNLTSTVQVFTDSEYQLPYVLGSAHQGCLPPFPADVFTVPQYGYLTLNNGSQAVGRSSFYCLEYFPSQMLRTGNNLTFSYTFEDVPFHSSYAHSQSLDRLMNPLIDQYLYYLNRTQSNSGTLQQSRLLFSQAGPTSMSLQAKNWLPGPCYRQQRLSKQANDNNNSNFPWTAATKYHLNGRDSLVNPGPAMASHKDDEEKFFPMHGTLIFGKQGTNANDADLEHVMITDEEEIRTTNPVATEQYGNVSNNLQNSNTGPTTENVNHQGALPGMVWQDRDVYLQGPIWAKIPHTDGHFHPSPLMGGFGLKHPPPQIMIKNTPVPANPPTNYSSAKFASFITQYSTGQVSVEIEWELRKENSKRWNPEIQYTSNYNKSVNVDFTVDTNGVYSEPRPIGTRYLTRNL

SEQ ID NO: 194 - DNA, 2208 bp, Artificial Sequence
  Description of Artificial Sequence: Synthetic polynucleotide
atggctgccgatggttatcttccagattggctcgaggacactctctctgaaggaataagacagtggtggaagctcaaacctggcccaccaccaccaaagcccgcagagcggcatcaggacgacagcaggggtcttgtgcttcctgggtacaagtacctcggacccttcaacggactcgacaaaggagagccggtcaacgaggcagacgccgcggccctcgagcacgacaaggcctacgaccggcagctcgacagcggagacaacccgtacctcaagtacaaccacgccgacgcggagtttcaggagcgtcttaaagaagatacgtcttttgggggcaacctcggacgagcagtcttccaggcgaaaaagagggttcttgaacctctgggcctggttgaggaacctgttaagacggctccgggaaaaaagaggccggtagagcactctcctgtggagccagactcctcctcgggaaccggaaaagcgggccatcagcctgcgagaaagagattgaattttggtcagactggagacgcagactccgtacctgacccccagcctctcggacagccaccagcagcccccacaagtttgggatctactacaatggctacaggcagtggcgcaccaatggcagacaataacgagggtgccgatggagtgggtaattcctcaggaaattggcattgcgattcccaatggctgggcgacagagtcatcaccaccagcacccgaacctgggccctgcccacctacaacaaccacctctacaagcaaatctccagccaatcaggagcctcgaacgacaaccactactttggctacagcaccccctgggggtattttgacttcaacagattccactgtcacttctccccacgtgattggcaaagactcatcaacaacaactggggattccgacccaagagactcaacttcaagctctttaacattcaagtcaaggaggtcacgcagaatgacggtacgacgacgattgccaataaccttaccagcacggttcaggtgtttactgactcggagtaccagctcccgtacgtcctcggctcggcgcatcaaggatgcctcccgccgtttccagcggacgtcttcatggtcccacagtatggatacctcaccctgaacaacgggagtcaggcggtaggacgctcttccttttactgcctggagtactttccttctcagatgctgcgtactggaaacaactttaccttcagctacacctttgaggacgttcctttccacagcagctacgctcacagccagagtttggaccggctgatgaatcctctgatcgaccagtatctatattatctgaacaggacacaatcaaatagtggaactcttcagcagtctaggctactgtttagccaagctggacccaccagcatgtctcttcaagctaaaaactggctgcctggaccttgctacagacagcagcgtctttcaaagcaggcaaacgacaacaacaacagcaactttccctggactgcggctacaaagtatcgtctaaatggccgggactcgttggttaatccaggaccagctatggccagccacaaagacgatgaagaaaagtttttccccatgcatggaaccctgatatttggtaaacaaggaacaaatgctaacgacgcggatttggagcatgttatgattacagatgaagaagaaatcaggaccaccaatcctgtggctacagagcagtacggaaacgtgtcaaataatttgcaaaactcaaatactggtccaactacagaaaatgtcaatcaccagggagcgttacctggtatggtgtggcaggatcgagacgtgtacctgcagggacccatttgggccaagattcctcacaccgacggacactttcacccttctccactgatgggaggttttggactcaaacacccgcctcctcaaatcatgatcaaaaacactcccgttccagccaatcctcccacaaacttcagttctgccaagtttgcttctttcatcacacagtattccacgggccaggtcagcgtggagattgagtgggagctgcagaaggagaacagcaaacgctggaaccccgagatccagtatacttccaactacaacaaatctgttaatgtggactttactgtggacactaatggtgtgtattcagagcctcgccccattggcaccagatacctgactcgtaatctgtaa

SEQ ID NO: 195 - protein, 735 aa, Artificial Sequence
  Description of Artificial Sequence: Synthetic polypeptide
MAADGYLPDWLEDTLSEGIRQWWKLKPGPPPPKPAERHQDDSRGLVLPGYKYLGPFNGLDKGEPVNEADAAALEHDKAYDRQLDSGDNPYLKYNHADAEFQERLKEDTSFGGNLGRAVFQAKKRVLEPLGLVEEPVKTAPGKKRPVEHSPVEPDSSSGTGKAGHQPARKRLNFGQTGDADSVPDPQPLGQPPAAPTSLGSTTMATGSGAPMADNNEGADGVGNSSGNWHCDSQWLGDRVITTSTRTWALPTYNNHLYKQISSQSGASNDNHYFGYSTPWGYFDFNRFHCHFSPRDWQRLINNNWGFRPKRLNFKLFNIQVKEVTQNDGTTTIANNLTSTVQVFTDSEYQLPYVLGSAHQGCLPPFPADVFMVPQYGYLTLNNGSQAVGRSSFYCLEYFPSQMLRTGNNFTFSYTFEDVPFHSSYAHSQSLDRLMNPLIDQYLYYLNRTQSNSGTLQQSRLLFSQAGPTSMSLQAKNWLPGPCYRQQRLSKQANDNNNSNFPWTAATKYRLNGRDSLVNPGPAMASHKDDEEKFFPMHGTLIFGKQGTNANDADLEHVMITDEEEIRTTNPVATEQYGNVSNNLQNSNTGPTTENVNHQGALPGMVWQDRDVYLQGPIWAKIPHTDGHFHPSPLMGGFGLKHPPPQIMIKNTPVPANPPTNFSSAKFASFITQYSTGQVSVEIEWELQKENSKRWNPEIQYTSNYNKSVNVDFTVDTNGVYSEPRPIGTRYLTRNL

SEQ ID NO: 196 - DNA, 2208 bp, Artificial Sequence
  Description of Artificial Sequence: Synthetic polynucleotide
atggctgccgatggttatcttccagattggctcgaggacactctctctgaaggaataagacagtggtggaagctcaaacctggcccaccaccaccaaagcccgcagagcggcatcaggacgacagcaggggtcttgtgcttcctgggtacaagtacctcggacccttcaacggactcgacaaaggagagccggtcaacgaggcagacgccgcggccctcgagcacgacaaggcctacgaccggcagctcgacagcggagacaacccgtacctcaagtacaaccacgccgacgcggagtttcaggagcgtcttaaagaagatacgtcttttgggggcaacctcggacgagcagtcttccaggcgaaaaagagggttcttgaacctctgggcctggttgaggaacctgttaagacggctccgggaaaaaagaggccggtagagcactctcctgtggagccagactcctcctcgggaaccggaaaagcgggccatcagcctgcgagaaagagattgaattttggtcagactggagacgcagactccgtacctgacccccagcctctcggacagccaccagcagcccccacaagtttgggatctactacaatggctacaggcagtggcgcaccaatggcagacaataacgagggtgccgatggagtgggtaattcctcaggaaattggcattgcgattcccaatggctgggcgacagagtcatcaccaccagcacccgaacctgggccctgcccacctacaacaaccacctctacaagcaaatctccagccaatcaggagcctcgaacgacaaccactactttggctacagcaccccctgggggtattttgacttcaacagattccactgtcacttctccccacgtgattggcaaagactcatcaacaacaactggggattccgacccaagagactcaacttcaagctctttaacattcaagtcaaagaggtcacgcagaatgacggtacgacgacgattgccaataaccttaccagcacggttcaggtgtttactgactcggagtaccagctcccgtacgtcctcggctcggcgcatcaaggatgcctcccgccgtttccagcggacgtcttcatggtcccacagtatggatacctcaccctgaacaacgggagtcaggcggtaggacgcccttccttttactgcctggagtactttccttctcagatgctgcgtactggaaacaactttaccttcagctacacctttgaggacgttcctttccacagcagctacgctcacagccagagtttggaccggctgatgaatcctctgatcgaccagtatctatattatctgaacaggacacaatcaaatagtggaactcttcagcagtctaggctactgtttagccaagctggacccaccagcatgtctcttcaagctaaaaactggctgcctggaccttgctacagacagcagcgtctttcaaagcaggcaaacgacaacaacaacagcaactttccctggactgcggctacaaagtatcatctaaatggccgggactcgttggttaatccaggaccagctatggccagccacaaagacgatgaagaaaagtttttccccatgcatgggaccctgatatttggtaaacaaggaacaaatgctaacgacgcggatttggagcatgttatgattacagatgaagaagaaatcaggaccaccaatcctgtggctacagagcagtacggaaacgtgtcaaataatttgcaaaactcaaatactggtccaactacagaaaatgtcaatcaccagggagcgttacctggtatggtgtggcaggatcgagacgtgtacctgcagggacccatttgggccaagattcctcacaccgacggacactttcacccttctccactgatgggaggttttggactcaaacacccgcctcctcaaatcatgatcaaaaacactcccgttccagccaatcctcccacaaacttcagttctgccaagtttgcttctttcatcacacagtattccacgggccaggtcagcgtggagattgagtgggagctgcagaaggagaacagcaaacgctggaaccccgagatccagtatacttccaactacaacaaatctgttaatgtggactttactgtggacactaatggtgtgtattcagagcctcgccccattggcaccagatacctgactcgtaatctgtaa

SEQ ID NO: 197 - protein, 735 aa, Artificial Sequence
  Description of Artificial Sequence: Synthetic polypeptide
MAADGYLPDWLEDTLSEGIRQWWKLKPGPPPPKPAERHQDDSRGLVLPGYKYLGPFNGLDKGEPVNEADAAALEHDKAYDRQLDSGDNPYLKYNHADAEFQERLKEDTSFGGNLGRAVFQAKKRVLEPLGLVEEPVKTAPGKKRPVEHSPVEPDSSSGTGKAGHQPARKRLNFGQTGDADSVPDPQPLGQPPAAPTSLGSTTMATGSGAPMADNNEGADGVGNSSGNWHCDSQWLGDRVITTSTRTWALPTYNNHLYKQISSQSGASNDNHYFGYSTPWGYFDFNRFHCHFSPRDWQRLINNNWGFRPKRLNFKLFNIQVKEVTQNDGTTTIANNLTSTVQVFTDSEYQLPYVLGSAHQGCLPPFPADVFMVPQYGYLTLNNGSQAVGRPSFYCLEYFPSQMLRTGNNFTFSYTFEDVPFHSSYAHSQSLDRLMNPLIDQYLYYLNRTQSNSGTLQQSRLLFSQAGPTSMSLQAKNWLPGPCYRQQRLSKQANDNNNSNFPWTAATKYHLNGRDSLVNPGPAMASHKDDEEKFFPMHGTLIFGKQGTNANDADLEHVMITDEEEIRTTNPVATEQYGNVSNNLQNSNTGPTTENVNHQGALPGMVWQDRDVYLQGPIWAKIPHTDGHFHPSPLMGGFGLKHPPPQIMIKNTPVPANPPTNFSSAKFASFITQYSTGQVSVEIEWELQKENSKRWNPEIQYTSNYNKSVNVDFTVDTNGVYSEPRPIGTRYLTRNL

SEQ ID NO: 198 - DNA, 2208 bp, Artificial Sequence
  Description of Artificial Sequence: Synthetic polynucleotide
atggctgccgatggttatcttccagattggctcgaggacactctctctgaaggaataagacagtggtggaagctcaaacctggcccaccaccaccaaagcccgcagagcggcataaggacgacagcaggggtcttgtgcttcctgggtacaagtacctcggacccttcaacggactcgacaagggagagccggtcaacgaggcagacgccgcggccctcgagcacgacaaggcctacgaccggcagctcgacagcggagacaacccgtacctcaagtacaaccacgccgacgcggagtttcaggagcgccttaaagaagatacgtcttttgggggcaacctcggacgagcagtcttccaggcaaaaaagagggttcttgaacctctgggcctggttgaggagcctgttaaaacggctccgggaaaaaagaggccggtagagcactctcctgcggagccagactcctcctcgggaaccggaaaagcgggccagcagcctgcaagaaaaagattgaatttcggtcagactggagacgcagactccgtacctgacccccagcctctcggacagccaccagcagccccctctggtctgggaactaatacgatggcttcaggcagtggcgcaccaatggcagacaataacgagggcgccgacggagtgggtaattcctcgggaaattggcattgcgattccacatggatgggcgacagagtcatcaccaccagcacccgaacttgggccctgcccacctacaacaaccatctctacaagcaaatctccagccaatcaggagccagcaacgacaaccactactttggctacagcaccccttgggggtattttgacttcaacagattccactgccacttttcaccacgtgactggcaaagactcatcaacaacaactggggattccggcccaagagactcaacttcaagctctttaacattcaagtcaaagaggtcacgcagaatgacggtacgacgacgattgccaataaccttaccagcacggttcaggtgtttactgactcggagtaccagctcccgtacgtcctcggctcggcgcatcaaggatgcctcccgccgttcccagcagacgtcttcatggtgccacagtatggatacctcaccctgaacaacgggagtcaggcagtaggacgctcttcattttactgcctggagtactttccttctcagatgctgcgtaccggaaacaactttaccttcagctacacctttgaggacgttcctttccacagcagctacgctcacagccagagtttggaccgtctcatgaatcctctcatcgaccagtacctgtattacttgagcagaacaaacactccaagcggaaccaccacgcagtccaggcttcagttttctcaggccggagcaagtgacattcgggaccagtctaggaactggcttcctggaccctgttaccgccagcagcgagtatcaaagacatctgcggataacaacaacagtgaatactcgtggactggagctaccaagtaccacctcaatggcagagactctctggtgaatccgggcccggccatggccagccacaaggacgatgaagaaaagttttttcctcagagcggggttctcatctttgggaagcaaggctcagagaaaacaaatgtggacattgaaaaggtcatgattacagacgaagaggaaatcaggaccaccaatcccgtggctacggagcagtatggttctgtatctaccaacctgcagggcggcaacacacaagcagctaccgcagatgtcaacacacaaggcgttcttccaggcatggtctggcaggacagagacgtgtacctgcaggggcccatctgggcaaagattccacacacggacggacattttcacccctctcccctcatgggcggattcggacttaaacaccctcctccacagattctcatcaagaacaccccggtacctgcgaatccttcgaccaccttcagtgcggcaaagtttgcttctttcatcacacagtattccacggggcaggtcagcgtggagatcgagtgggagctgcagaaggagaacagcaaacgctggaatcccgagatccagtacacttccaactacaacaaatctgttaatgtggactttactgttgacactaatggcgtgtattcagagcctcgccccattggcaccagatacctgactcgtaatctgtaa

SEQ ID NO: 199 - protein, 735 aa, Artificial Sequence
  Description of Artificial Sequence: Synthetic polypeptide
MAADGYLPDWLEDTLSEGIRQWWKLKPGPPPPKPAERHKDDSRGLVLPGYKYLGPFNGLDKGEPVNEADAAALEHDKAYDRQLDSGDNPYLKYNHADAEFQERLKEDTSFGGNLGRAVFQAKKRVLEPLGLVEEPVKTAPGKKRPVEHSPAEPDSSSGTGKAGQQPARKRLNFGQTGDADSVPDPQPLGQPPAAPSGLGTNTMASGSGAPMADNNEGADGVGNSSGNWHCDSTWMGDRVITTSTRTWALPTYNNHLYKQISSQSGASNDNHYFGYSTPWGYFDFNRFHCHFSPRDWQRLINNNWGFRPKRLNFKLFNIQVKEVTQNDGTTTIANNLTSTVQVFTDSEYQLPYVLGSAHQGCLPPFPADVFMVPQYGYLTLNNGSQAVGRSSFYCLEYFPSQMLRTGNNFTFSYTFEDVPFHSSYAHSQSLDRLMNPLIDQYLYYLSRTNTPSGTTTQSRLQFSQAGASDIRDQSRNWLPGPCYRQQRVSKTSADNNNSEYSWTGATKYHLNGRDSLVNPGPAMASHKDDEEKFFPQSGVLIFGKQGSEKTNVDIEKVMITDEEEIRTTNPVATEQYGSVSTNLQGGNTQAATADVNTQGVLPGMVWQDRDVYLQGPIWAKIPHTDGHFHPSPLMGGFGLKHPPPQILIKNTPVPANPSTTFSAAKFASFITQYSTGQVSVEIEWELQKENSKRWNPEIQYTSNYNKSVNVDFTVDTNGVYSEPRPIGTRYLTRNL

SEQ ID NO: 200 - DNA, 3161 bp, Artificial Sequence
  Description of Artificial Sequence: Synthetic polynucleotide
gattgaatttagcggccgcgaattcgcccttgctgcgtcaactggaccaatgagaactttccattcaatgattgcgtcgacaagatggtgatctggtgggaggagggaaagatgaccgccaaggtcatggagtcggccaaagccattctcggaggaagcaaggtgcgcgtggaccagaaatgtaagtcctcggcccagatagacccgactcccgtgattgtcacctccaacaccaacatgtgcgccgtgattgacgggaactcaacgaccttcgagcaccagcagccgttgcaagaccggatgttcaaatttgaactcacccgccgtctggatcatgactttgggaaggtcaccaagcaggaagtcaaagactttttccggtgggcaaaggatcacgtggttgaggtggagcatgaattctacgtcaaaaagggtggagccaagaaaagacccgcccccagtgacgcagatataagtgagcccaaacgggcgcgcgggtcagttgcgcagccatcgacgtcagacgcggaagcttcgatcaactacgcggacaggtaccaaaacaaatgttctcgtcacgtgggcatgaatctgatgctgtttccctgcagacaatgcgagagaatgaatcaaaattcaaatatctgcttcactcacggacagaaggactgtttagagtgctttcccgtgtcagaatctcaacccgtttctgtcgtcaaaaaggcgtatcagaaactttgctacattcatcatatcatgggaaaggtgccagacgcttgcactgcctgcgatctggtcaatgtggatttggatgactgcatctctgaacaataaatgatttaaatcaggtatggctgccgatggttatcttccagattggctcaaggacactctctctgaaggaataagacagtggtggaagctcaaacctggcccaccaccaccaaagcccgcagagcggcataaggacgacagcgggggtcttgtgcttcctgggtacaagtacctcggacccttcaacggactcgacaagggagagccggtcaacgaggcagacgccgcggccctcgagtacgacaaggcctacgaccggcagctcgacagcggagacaacccgtacctcaagtacaaccacgccgacgcggagtttcaggagcgccttaaagaagatacgtcttttgggggcaacctcggacgagcagtcttccaggcgaaaaagagggttcttgaacctctgggcctggttgaggaacctgttaagacggctccgggaaaaaagaggccggtagagcactctcctgtggagccagactcctcctcgggaacaggaaaagcgggccagcagcctgcgagaaagagattgaattttggtcagactggagacgcagactccgtacctgacccccagcctctcggacagccaccagcagccccctctggtctgggaactaatacgatggctacaggcagtggcgcaccaatggcagacaataacgagggcgccgacggagtgggtaattcctcgggaagttggcattgcgattccacatggatgggcgacagagtcatcaccaccagcacccgaacctgggctctgcccacctacaacaaccatctgtacaagcagatctccagccaatcaggagccagcaacgacaaccactactttggctacagcaccccttgggggtattttgacttcaacagattccactgccacttttcaccacgtgactggcaaagactcatcaacaacaactggggattccggcccaagagactcaacttcaagctctttaacattcaagtcaaggaggtcacgcagaatgacggtacgacgacgattgccaataaccttaccagcacggttcaggtgtttactgactcggagtaccagctcccgtacgtccccggctcggcgcatcaaggatgcctcccgccgttcccagcagacgtcttcatggtgccacagtatggatacctcaccctgaacaacgggagtcaggcagtaggacgctcttcattttactgcctggagtactttccttctcagatgcttcgtaccggaaacaactttaccttcagctacacctttgaggatgttcctttccacagcagctacgctcacagccagagtttggaccgtctcatgaatcctctcatcgaccagtacctgtattacttgagcagaacaaacactccaagcggaaccaccacgcagtccaggcttcagttttctcaggccggagcaagtgacattcgggaccagtctaggaactggcttcctggaccctgttaccgccagcagcgagtatcaaagacagctgcggacaacaacaacagtgaatactcgtggactggagctaccaagtaccacctcaatggcagagactctctggtgaatccgggcccggccatggccagccacaaggacgatgaagaaaagttttttcctcaaagcggggttctcatctttgggaagcaaggctcagagaaaacaaatgtggacattgaaaaggtcatgattacagacgaagaggaaatcagaaccaccaatcccgtggccacggagcagtatggttctgtatctaccaacctccagagcggcaacacacaagcagctactgcagatgtcaacacacaaggcgttcttccaggcatggtctggcaggacagagacgtgcacctgcaggggcctatctgggcaaagattccacacacggacggacattttcacccctctcccctcatgggcggatttggacttaaacaccctcctccacagattctcatcaagaacaccccggtacctgcaaatccttcgaccaccttcagtgcggcaaagtttgcttccttcatcacacagtattccacagggcaggtcagcgtggagatcgagtgggagctgcagaaggagaacagcaaacgctggaaccccgagatccagtacacttccaactacaacaaatctgttaatgtggactttactgtggacactaatggtgtgtattcagagcctcgccccattggcaccagatacctgactcgtaatctgtaattgcttgttaatcaataaaccgtttaattcgtttcagttgaactttggtctctgcgaagggcgaattcgtttaaaccctgcaggactagtccctttagtgagg

SEQ ID NO: 201 - DNA, 3162 bp, Artificial Sequence
  Description of Artificial Sequence: Synthetic polynucleotide
gaattgaatttagcggccgcgaattcgcccttcgcagagaccaaagttcaactgaaacgaattaaacggtttattgattaacaagcaattacagattacgagtcaggtatctggtgccaatggggcgaggctctgaatacacgccattagtgtccacagtaaagtccacattaacagacttgttgtagttggaagtgtactgaatttcgggattccagcgtttgctgttttccttctgcagctcccactcgatctccacgctgacctgtcccgtggagtactgtgtgatgaaggaagcaaactttgccgcactgaaggtggtcgaaggattcgcaggtaccggggtgttcttgatgagaatctgtggaggagggtgtttaagtccgaatccacccatgaggggagaggggtgaaaatgtccgtccgtgtgtggaatctttgcccagatgggcccctgaaggtacacatctctgtcctgccagaccatgcctggaagaacgccttgtgtgttgacatctgcggtagctgcttgtctgttgcctctctggaggttggtagatacagaaccgtactgctccgtagccacgggattggttgtcctgatttcctcttcgtctgtaatcatgaccttttcaatgtccacatttgttttctctgagccttgcttcccaaagatgagaaccccgctctgaggaaaaaacttttcttcattgtccttgtggcttgccatggccgggcccggattcaccagagagtctctgccattgaggtggtacttggtagctccagtccacgagtattcactgttgttgttatccgcagatgtctttgatactcgctgctggcggtaacagggtccaggaagccagttcctagactggtcccgaatgtcactcgctccggcctgagaaaactgaagccttgactgcgtggtggttccacttggagtgtttgttgtgctcaagtaatacaggtactggtcgatgagaggattcatgagacggtccagactctggctgtgagcgtagccgctgtggaaaggaacgtcctcaaaagtgtagctgaaggtaaagttgtttccggtacgcagcatctgagaaggaaagtactccaggcagtaaaatgaagagcgtcctactgcctgactcccgttgttcagggtgaggtatccatactgtggcaccatgaagacgtctgctgggaacggcgggaggcatccttgatgcgccgagccgaggacgtacgggagctggtactccgagtcagtaaacacctgaaccgtgctggtaaggttattggcaatcgtcgtcgtaccgtcattctgcgtgacctctttgacttgaatgttaaagagcttgaagttgagtctcttgggtcggaatccccagttgttgttgatgagtctttgccagtcacgtggtgaaaagtggcagtggaatctgttgaagtcaaaatacccccaaggggtgctgtagccaaagtagtgattgtcgttcgaggctcctgattggctggaaatttgtttgtagaggtggttgttgtaggtgggcagggcccaggttcgggtgctggtggtgatgactctgtcgcccatccatgtggaatcgcaatgccaatttcccgaggaattacccactccgtcggcgccctcgttattgtctgccattggtgcgccactgcctgtagccatcgtattagttcccagaccagagggggctgctggtggctgtccgagaggctgggggtcaggtactgagtctgcgtctccagtctgaccaaaattcaatctttttcttgcaggctgctggcccgcctttccggttcccgaggaggagtctggctccacaggagagtgctctaccggcctcttttttcctggagccgtcttgacaggttccccaaccaggcccagaggttcaagaaccctctttttcgcctggaagactgctcgtccgaggttgcccccaaaagacgtatcttctttaaggcgctcctgaaactccgcgtcggcgtggttgtacttgaggtacgggttgtctccgctgtcgagctgccggtcgtaggctttgtcgtgctcgagggccgcggcgtctgcctcgttgaccggctctcccttgtcgagtccgttgaagggtccgaggtacttgtacccaggaagcacaagacccctgctgtcgtccttatgccgctctgcgggctttggtggtggtgggccaggtttgagcttccaccactgtcttattccttcagagagagtgtcctcgagccaatctggaagataaccatcggcagccatacctgatttaaatcatttattgttcaaagatgcagtcatccaaatccacattgaccagatcgcaggcagtgcaagcgtctggcacctttcccatgatatgatgaatgtagcacagtttctgatacgcctttttgacgacagaaacgggttgagattctgacacgggaaagcactctaaacagtctttctgtccgtgagtgaagcagatatttgaattctgattcattctctcgcattgtctgcagggaaacagcatcagattcatgcccacgtgacgagaacatttgttttggtacctgtctgcgtagttgatcgaagcttccgcgtctgacgtcgatggctgcgcaactgactcgcgcacccgtttgggctcacttatatctgcgtcactgggggcgggtcttttcttggctccaccctttttgacgtagaattcatgctccacctcaaccacgtgatcctttgcccaccggaaaaagtctttgacttcctgcttggtgaccttcccaaagtcatgatccagacggcgggtgagttcaaatttgaacatccggtcttgcaacggctgctggtgttcgaaggtcgttgagttcccgtcaatcacggcgcacatgttggtgttggaggtgacgatcacgggagtcgggtctatctgggccgaggacttgcatttctggtccacgcgcaccttgcttcctccgagaatggctttggccgactccacgaccttggcggtcatcttcccctcctcccaccagatcaccatcttgtcgacacagtcgttgaagggaaagttctcattggtccagttgacgcagcaagggcgaattcgtttaaacctgcaggactagtccctttagtgaggg

SEQ ID NO: 202 - DNA, 3164 bp, Artificial Sequence
  Description of Artificial Sequence: Synthetic polynucleotide
gcgaattgaatttagcggccgcgaattcgcccttcgcagagaccaaagttcaactgaaacgaattaaacggtttattgattaacaagcaattacaaattacgagtcaggtatctggtgccaatggggcgaggctctgaatacacgccattagtgtccacagtaaagtccacattaacagacttgttgtagttggaagtgtactgaatttcgggattccagcgtttgctgttttccttctgcagctcccactcgatctccacgctgacctgtcccgtggagtactgtgtgatgaaggaagcaaactttgccgcactgaaggtggtcgaaggattcgcaggtaccggggtgttcttgatgagaatctgtggaggagggtgtttaggtccgaatccacccatgaggggagaggggtgaaaatgtccgtccgtgtgtggaatctttgcccagatgggcccctgaaggtacacatctctgtcctgccagaccatgcctggaagaacgccttgtgtgttgacatctgcggtagctgcttgtctgttgcctctctggaggttggtagatacagaaccatactgctccgtagccacgggattggttgtcctgatttcctcttcgtctgtaatcatgaccttttcaatgtccacatttgttttctctgagccttgcttcccaaagatgagaaccccgctctgaggaaaaaacttttcttcattgtccttgtggcttgccatggccgggcccggattcaccagagagtctctgccattgaggtggtacttggtagctccagtccacgagtattcactgttgttgttatccgcagatgtctttgatactcgctgctggcggtaacagggtccaggaagccagttcctagactggtcccgaatgtcactcgctccggcctgagaaaactgaagccttgactgcgtggtggttccacttggagtgtttgttgtgctcaagtaatacaggtactggtcgatgagaggattcatgagacggtccagactctggctgtgagcgtagctgctgtggaaaggaacgtcctcaaaagtgtagctgaaggtaaagttgtttccggtacgcagcatctgagaaggaaagtactccgggcagtaaaatgaagagcgtcctactgcctgactcccgttgctcagggtgaggtatccatactgtggcaccatgaagacgtctgctgggaacggcgggaggcatccttgatgcgccgagccgaggacgtacgggagctggtactccgagtcagtaaacacctgaaccgtgctggtaaggttattggcaatcgtcgtcgtaccgtcattctgcgtgacctctttgacttgaatgttaaagagcttgaagttgagtctcttgggtcggaatccccagttgttgttgatgagtctttgccagtcacgtggtgaaaagtggcagtggaatctgttgaagtcaaaatacccccaaggggtgctgtagccaaagtagtgattgtcgttcgaggctcctgattggctggaaatttgtctgtagaggtggttgttgtaggtgggcagggcccaggttcgggtgctggtggtgatgactctgtcgcccatccatgtggaatcgcaatgccgatttcccgaggaattacccactccgtcggcgccctcgttattgtctgccattggtgcgccactgcctgtagccatcgtattagttcccagaccagagggggctgctggtggctgtccgagaggctgggggtcaggtactgagtctgcgtctccagtctgaccaaaattcaatctttttcttgcaggctgctggcccgcctttccggttcccgaggaggagtctggctccacaggagagtgctctaccggcctcttttttcccggagccgtcttaacaggttccccaaccaggcccagaggttcaagaaccctctttttcgcctggaagactgctcgtccgaggttgcccccaaaagacgtatcttctttaaggcgctcctgaaactccgcgtcggcgtggttgtacttgaggtacgggttgtctccgctgtcgagctgccggtcgtaggctttgtcgtgctcgagggccgcggcgtctgcctcgttgaccggctctcccttgtcgagtccgttgaagggtccgaggtacttgtacccaggaagcacaagacccctgctgtcgtccttatgccgctctgcgggctttggtggtggtgggccaggtttgagcttccaccactgtcttattccttcagagagagtgtcctcgagccaatctggaagataaccatcggcagccatacctgatttaaatcatttattgttcaaagatgcagtcatccaaatccacattgaccagatcgcaggcagtgcaagcgtctggcacctttcccatgatatgatgaatgtagcacagtttctgatacgcctttttgacgacagaaacgggttgagattctgacacgggaaagcactctaaacagtctttctgtccgtgagtgaagcagatatttgaattctgattcattctctcgcattgtctgcagggaaacagcatcagattcatgcccacgtgacgagaacatttgttttggtacctgtctgcgtagttgatcgaagcttccgcgtctgacgtcgatggctgcgcaactgactcgcgcacccgtttgggcccacttatatctgcgtcactgggggcgggtcttttcttggctccaccctttttgacgtagaattcatgctccacctcaaccacgtgatcctttgcccaccggaaaaagtctttgacttcctgcttggtgaccttcccaaagtcatgatccagacggcgggtgagttcaaatttgaacatccggtcttgcaacggctgctggtgttcgaaggtcgttgagttcccgtcaatcacggcgcacatgttggtgttggaggtgacgatcacgggagtcgggtctatctgggccgaggacttgcatttctggtccacgcgcaccttgcttcctccgagaatggctttggccgactccacgaccttggcggtcatcttcccctcctcccaccagatcaccatcttgtcgacacagtcgttgaagggaaagttctcattggtccagttgacgcagcaagggcgaattcgtttaaacctgcaggactagtccctttagtgaggg

SEQ ID NO: 203 - DNA, 3163 bp, Artificial Sequence
  Description of Artificial Sequence: Synthetic polynucleotide
accctcactaaagggactagtcctgcaggtttaaacgaattcgcccttgctgcgtcaactggagcaatgagaactttcccttcaacgactgtgtcgacaagatggtgatttggtgggaggaggggaagatgaccgccaaggtcgtggagtcggccaaagccattctcggaggaagcaaggtgcgcgtggaccagaaatgcaagtcctcggcccagatagatccgactcccgtgatcgtcacctccaacaccaacatgtgcgccgtgattgacgggaactcaacgaccttcgaacaccagcagccgttgcaagaccggatgttcaaatttgaactcacccgccgtctggatcatgactttgggaaggtcaccaagcaggaagtcaaagactttttccggtgggcaaaggatcacgtggttgaggtggagcatggattctacgtcaaaaagggtggagccaagaaaagacccgcccctagtgacgcagatataagtgagcccaaacgggtgcgcgagtcagttgcgcagccatcgacgtcggacgcggaagcttcgatcaactacgcggacaggtaccaaaacaaatgttctcgtcacgtgggcatgaatctgatgctgtttccctgcagacaatgcgagagaatgaatcaaaattcaaatatctgcttcactcacggacagaaagactgtttagagtgctttcccgtgtcagaatctcaacctgtttctgtcgtcaaaaaggcgtatcagaaactgcgctacattcatcatatcatgggaaaggtgccagacgcttgcactgcctgcgatctggtcaatgtggatttggatgactgcatctctgaacaataaatgatttaaatcaggtatggctgccgatggttatcttccagattggctcgaggacactctctctgaaggaataagacagtggtggaagctcaaacctggcccaccaccaccaaagcccgcagagcggcataaggacgacagcaggggtcttgtgcttcctgggtacaagtacctcggacccttcaacggactcgacaagggagagccggtcaacgaggcagacgccgcggccctcgagcacgacaaggcctacgaccggcagctcgacagcggagacaacccgtacctcaagtacaaccacgccgacgcggagtttcaggagcgtcttaaagaagatacgtcttttgggggcaacctcggacgagcagtcttccaggcgaaaaagagggttcttgaacctctgggcctggttgaggaacctgttaagacggctccgggaaaaaagaggccggtagagcactctcctgcggagccagactcctcctcgggaaccggaaaagcgggccagcagcctgcaagaaaaagactgaatttcggtcagactggagacgcagactccgtacctgacccccagcctctcggacagccaccagcagcccccacaagtttgggatctactacaatggctacaggcagtggcgcaccaatggcagacaataacgagggtgccgatggagtgggtaattcctcaggaaattggcattgcgattcccaatggctgggcgacagagtcatcaccaccagcacccgaacctgggccctgcccacctacaacaaccacctttacaagcaaatctccagccaatcaggagcctcaaacgacaaccactactttggctacagcaccccctgggggtattttgacttcaacagattccactgccacttttcaccacgtgactggcaaagactcatcaacaacaactggggattccgacccaagagactcaacttcaagctctttaacattcaagtcaaagaggtcacgcagaatgacggtacgacgacgattgccaataaccttaccagcacggttcaggtgtttactgactcggagtaccagctcccgtacgtcctcggctcggcgcatcaaggatgcctcccgccgtttccagcggacgtcttcatggtcccacagtatggatacctcaccctgaacaacgggagtcaggcggtaggacgctcttccttttactgcctggagtgctttccttctcagatgctgcgtactggaaacaactttcagttcagctacacttttgaagacgtgcctttccacagcagctacgctcacagccagagtttggatcggctgatgaatcctctgatcgaccagtacctgtattatctaaacagaacacaaacagctagtggaactcagcagtctcggctactgtttagccaagctggacccacaagcatgtctcttcaagctaaaaactggctgcctggaccgtgttatcgccagcagcgtttgtcaaagcaggcaaacgacaacaacaacagcaactttccctggactggagctaccaagtaccacctcaatggcagagactctttggtgaacccgggcccggccatggccagccacaaggacgatgaagaaaagtttttccccatgcatggaaccctaatatttggtaaagaaggaacaaatgctaccaacgcggaattggaaaatgtcatgattacagatgaagaggaaatcaggaccaccaatcccgtggctacagagcagtacggatatgtgtcaaataatttgcaaaactcaaatactgctgcaagtactgaaactgtgaatcaccaaggagcattacctggtatggtgtggcaggatcgagacgtgtacctgcagggacccatttgggccaagattcctcacaccgatggacactttcatccttctccactgatgggaggttttggactcaaacacccgcctcctcagattatgatcaaaaacactcccgttccagccaatcctcccacaaacttcagttctgccaagtttgcttccttcatcacacagtattccacgggacaggtcagcgtggagatcgagtgggagctgcagaaggagaacagcaaacgctggaatcccgaaattcagtacacttccaactacaacaaatctgttaatgtggactttactgtggacactaatggtgtgtattcagagcctcgccccattggcaccagatacctgactcgtaatctgtaattgcttgttaatcaataaaccgtttaattcgtttcagttgaactttggtctctgcgaagggcgaattcgcggccgctaaattcaattcgcc

SEQ ID NO: 204 - protein, 735 aa, Artificial Sequence
  Description of Artificial Sequence: Synthetic polypeptide
MAADGYLPDWLEDTLSEGIRQWWKLKPGPPPPKPAERHKDDSRGLVLPGYKYLGPFNGLYKGEPVDEADAAALEHDKAYDRQLDSGDNPYLKYNHADAEFQERLKEDTSFGGNLGRAVFQAKKRVLEPLGLVGEPVKTAPGKKRPVEHSPVEPDSSSGTGKAGNQPARKRLNFGQTGDADSVPDPQPLGQPPAAPSGLGSTTMATGSGAPVADNNEGADGVGNSSGNWHCDSQWLGDRVITTSTRTWALPTYNNHLYKQISSQSGASNDNHYFGYSTPWGYFDFNRFHCHFSPRDRQRLINNNWGFRPKRLNFKLFNIQVKEVTQNDGTTTIANNLTSTVQVFTDSGYQLPYVLGLAHQGCLPPFPADVFMVPQYGYLTLNNGSQAVGRSSFYCLEYFPSQMLRTGNNFQFSYTFEDVPFHSSYAHSQSLDRLMNPLIDQYLYYLNKTQSNSGTLQQSRLLFSQAGPTSMSLQAKNWLPGPCYRQQRLSKQANDNNNSNFPWTAATKYHLNGRDSLVNPGPAMASHKDDEEKFFPMHGTLIFGKQGTNANDADLDNVMITDEEEIRTTNPVATEQYGYVSNNLQNSNTGPTTGTVNHQGALPGMVWQDRDVYLQGPIWAKIPHTDGHFHPSPLMGGFGLKHPPPQIMIKNTPVPANPPTNFSSAKFASFITQYSTGQVSVEIEWELQKEDSKRWNPEIQYTSNYNKPVNVDFTVDTNGVYSEPRPIGTRYLTRNL

SEQ ID NO: 205 - DNA, 2208 bp, Artificial Sequence
  Description of Artificial Sequence: Synthetic polynucleotide
atggctgccgatggttatcttccagattggctcgaggacactctctctgaaggaataagacagtggtggaagctcaaacctggcccaccaccaccaaagcccgcagagcggcataaggacgacagcaggggtcttgtgcttcctgggtacaagtacctcggacccttcaacggactctacaagggagagccggtcgacgaggcagacgccgcggccctcgagcacgacaaggcctacgaccggcagctcgacagcggagacaacccgtacctcaagtacaaccacgccgacgcggagtttcaggagcgccttaaagaagatacgtcttttgggggcaacctcggacgagcagtcttccaggccaaaaagagggttcttgaacctctgggcttggttggggagcctgttaaaacggctccgggaaaaaagaggccggtagagcactctcctgtggagccagactcctcctcgggaaccggaaaagcgggcaaccagcctgcaagaaaaagattgaattttggtcagactggagacgcagactccgtacctgacccccagcctctcggacagccaccagcagccccctctggtctgggatctactacaatggctacaggcagtggcgcaccagtggcagacaataacgagggtgccgatggagtgggtaattcctcaggaaattggcattgcgattcccaatggctgggcgacagagtcatcaccaccagcacccgaacctgggctctgcccacctacaataaccacctctacaagcaaatctccagccaatcaggagcctcaaacgacaaccactactttggctacagcaccccctgggggtattttgacttcaacagattccactgccacttttcaccacgtgaccggcaaagactcatcaacaacaactggggattccgaccaaaaagactcaacttcaagctctttaacattcaagtcaaagaggtcacgcagaatgacggtacgacgacgattgccaataaccttaccagcacggttcaggtgtttactgactcggggtaccagctcccgtacgtcctcggcttggcgcatcaaggatgcctcccgccgttcccagcagacgtcttcatggtgccacagtatggatacctcaccctgaacaacgggagtcaggcggtaggacgctcttccttttactgcctggagtactttccttctcagatgctgcgtactggaaacaactttcagttcagctacacctttgaagacgttcctttccacagcagctacgctcacagccagagtctggatcggctgatgaatcctctgatcgaccagtacctgtattatctgaacaagacacaatcaaatagtggaactcttcagcagtctcggctactgtttagccaagctggacccaccagcatgtctcttcaagctaaaaactggctgcctggaccttgctacagacagcagcgtctgtcaaagcaggcaaacgacaacaacaacagcaactttccctggactgcggctacaaagtatcatctaaatggccgggactcgttggttaatccaggaccagctatggccagccacaaagacgatgaagaaaagtttttccccatgcatggaaccctgatatttggtaaacaaggaacaaatgctaacgacgcggatttggacaatgtcatgattacagatgaagaagaaatccgcaccaccaatcccgtggctacggagcagtacggatatgtgtcaaataatttgcaaaactcaaatactggtccaactactggaactgtcaatcaccaaggagcgttacctggtatggtgtggcaggatcgagacgtgtacctgcagggacccatttgggccaagattcctcacaccgatggacactttcatccttctccacttatgggaggttttggactcaaacacccacctcctcagatcatgattaaaaacactcccgttccagccaatcctcccacaaacttcagttctgccaagtttgcttctttcatcacacagtattccacgggacaagtcagcgtggagatcgagtgggagctgcagaaggaggacagcaaacgctggaaccccgagatccagtacacttccaactataacaaacctgttaatgtggactttactgtggacactaatggtgtgtattcagagcctcgccccattggcaccagatacctgactcgtaatctgtaa

SEQ ID NO: 206 - DNA, 3161 bp, Artificial Sequence
  Description of Artificial Sequence: Synthetic polynucleotide
cgaattgatttagcggccgcgaattcgcccttcgcagagaccaaagttcaactgaaacgaattaaacggtttattgattaacaagcaattacagattacgagtcaggtatctggtgccaatggggcgaggctctgaatacacaccattagtgtccacagtaaagtccacattaacagatttgttgtagttggaagtgtactggatctcgggattccagcgtttgctgttctccttctgtagctcccactcgatctccacgctgacccgccccgtggaatactgtgtgatgaaggaagcaaactttgccgcactgaaggtggtcgaaggattcgcaggtaccggggtgtttttgatgagaatctgtggaggagggtgtttaagtccgaatccgcccatgaggggagaggggtgaaaatgtccgtccgtgtgcggaatctttgcccagataggcccctgcaggtacacgtctctgtcctgccagaccatgcctggaagaacgccttgtgtgttgacatctgcagtagatgcttgtgtgttgccgctctggaggttggtagatacagaaccatactgctccgtggccacgggattggtggttctgatttcctcttcgtctgtaatcatgaccttttcaatgtccacatttgttttctctgatccttgttttccaaagatgagaaccccgctctgaggaaaaaacttttcttcatcgtccttgtggctggccattgccgggcccggattcaccagagagtctctgccattgaggtggtacttggtagctccaatccacgagtattcactgttgttgttgtccgcagatgtctttgatactcgctgctggcggtaacagggtccaggaagccagttcctagactgatcccgaatgtcactcgctccggcctgagaaaactgaagcctggactgcgtggtggttccgcttggagtgtttgttctgctcaagtaatacaggtactggtcgatgagaggattcatgagacggtccaaactctggctgtgagcgtagctgctgtggaaaggaacatcctcaaaggtgtagctgaaggtaaagttgtttccggtacgcagcatctgagaagggaagtactccaggcagtaaaatgaagagcgtcctactgcctgactcccgttgttcagggtgaggtatccatactgtggcaccatgaagacgtctgctgggaacggcgggaggcatccttgatgcgccgagccgaggacgtacgggagctggtactccgagtcagtaaacacctgaaccgtgctggtaaggttattggcaatcgtcgtcgtaccatcattctgcgtgacctctctgacttgaatgttaaagagcttgaagttgagtctcttgggccggaatccccagttgttgttgatgagtctttgccagtcacgtggtgaaaagtggcagtggaatctgttgaagtcaaaatacccccaaggggtgctgtagccaaagtagtggttgtcgttgctggctcctgattggctggaaatctgcttgtacagatggttgttgtaggtgggcagagcccaggttcgggtgctggtggtgatgactctgtcgcccatccatgtggaatcgcaatgccaatttcccgaggaattacccactccgtcggcgccatcgttattgtctgccattggtgcgccactgcctgtagccatcgtattagttcccagaccagagggggctgctggtggctgtccgagaggctgggggtcaggtacggagtctgcgtctccagtctgaccgaaattcaatctctttcttgcaggctggttgcccgcttttccggttcccgaggaggagtctggctccacaggagagtgctctaccggcctcttttttcccggagccgtcttaacaggctcctcaaccaggcccagaggttcaagaaccctcttttttgcctggaagactgctcgtccgaggttgcccccaaaagacgtatcttctttaaggcgctcctgaaactccgcgtcggcgtggtcgtacttgaggtacgggttgtctccgctgtcgagctgccggtcgtaggccttgtcgtgctcgagggccgcggcgtctgcctcgttgaccggctctcccttgtcgagtccgttgaagggtccgaggtacttgtacccaggaagcacaagacccctgctgtcgtccttatgccgctctgcgggctttggtggtggtgggccaggtttgagcttccaccactgtcttattccttcagagagagtgtcctcgagccaatctggaagataaccatcggcagccatacctgatttaaatcatttattgttcagagatgcagtcatccaaatccacattgaccagatcgcaggcagtgcaagcgtctggcacctttcccatgatatgatgaatgtagcaaagtttctgatacgcctttttgacgacagaaacgggttgagattctgacacgggaaagcactctaaacagtctttctgtccgtgagtgaagcagatatttgaattctgattcattctctcgcattgtctgcagggaaacagcatcagattcatgcccacgtgacgagaacatttgttttggtacctgtccgcgtagttgatcgaagcttccgcgtctgacgtcgatggctgcgcaactgactcgcgcgcccgtttgggctcacttatatctgcgtcactgggggcgggtcttttcttggctccaccctttttgacgtagaattcatgctccacctcaaccacgtgatcctttgcccaccggaaaaagtctttcacttcctgcttggtgaccttcccaaagtcatgatccagacggcgggttagttcaaatttgaacatccggtcttgcaacggctgctggtgttcgaaggtcgttgagttcccgtcaatcacggcgcacatgttggtgttggaggtggcgatcacgggagtcgggtctatctgggccgaggacttgcacttttggtccacgcgcaccttgcttcctccgagaatggcttcggccgattccacgaccttggcggtcatctttccctcctcccaccagatcaccatcttgtcgacacagtcgttgaagggaaagttctcattggtccagttgacgcagcaagggcgaattcgtttaaacctgcaggaactagtcccttagtgagg

SEQ ID NO: 207 - protein, 735 aa, Artificial Sequence
  Description of Artificial Sequence: Synthetic polypeptide
MAADGYLPDWLEDTLSEGIRQWWKLKPGPPPPKPAERHKDDSRGLVLPGYKYLGPFNGLYKGEPVNEADAAALEHDKAYDRQLDSGDNPYLKYNHAGAEFQERLKEDTSFGGNLGRAVFQAKKRVLEPLGLVEEPVKTAPGKKRPVEHSPVEPDSSSGTGKAGNQPARKRLNFGQTGDADSVPDPQPLGQPPAAPSGLGSTTMATGSGAPVADNNEGADGVGNSSGNWHCDSQWLGDRVITTSTRTWALPTYNNHLYKQISSQSGASNDNHYFGYSTPWGYFDFNRFHCHFSPRDWQRLINNNWGFRPKRLNFKLFNIQVKEVTQNDGTTTIANNLTSTVQVFTDSEYQLPYVLGSAHQGCLPPFPADVFMVPQYGYLTLNNGSQAVGRSSFYCLEYFPSQMLRTGNNFQFSYTFEDVPFHSSYAHSQSLDRLMNPLIDQYLYYLNKTQSNSGTLQQSRLLFSQAGPTSMSLQAKNWLPGPCYRQQRLSKQANDNNNSNFPWTAATKYHLNGRDSLVNPGPAMASHKDDEEKFFPMHGTLIFGKQGTNANDADLDNVMITDEEEIRTTNPVATEQYGYVSNNLQDSNTGPTTGTVNHQGALPGMVWQDRDVYLQGPIWAKIPHTDGHFHPSPLMGGFGLKHPPPQIMIKNTPVPANPPTNFSSAKFASFITQYSTGQVSVEIEWELQKENSKRWNPEIQYTSNYNKSVNVDFTVDTNGVYSEPRPIGTRYLTRNL

SEQ ID NO: 208 - DNA, 2208 bp, Artificial Sequence
  Description of Artificial Sequence: Synthetic polynucleotide
atggctgccgatggttatcttccagattggctcgaggacactctctctgaaggaataagacagtggtggaagctcaaacctggcccaccaccgccaaagcccgcagagcggcataaggacgacagcaggggtcttgtgcttcctgggtacaagtacctcggacccttcaacggactctacaagggagagccggtcaacgaggcagacgccgcggccctcgagcacgacaaggcctacgaccggcagctcgacagcggagacaacccgtacctcaagtacaaccacgccggcgcggagtttcaggagcgccttaaagaagatacgtcttttgggggcaacctcggacgagcagtcttccaggccaaaaagagggttcttgaacctctgggcttggttgaggagcctgttaaaacggctccgggaaaaaagaggccggtagagcactctcctgtggagccagactcctcctcgggaaccggaaaagcgggcaaccagcctgcaagaaaaagattgaattttggtcagactggagacgcagactccgtacctgacccccagcctctcggacagccaccagcagccccctctggtctgggatctactacaatggctacaggcagtggcgcaccagtggcagacaataacgagggtgccgatggagtgggtaattcctcaggaaattggcattgcgattcccaatggctgggcgacagagtcatcaccaccagcacccgaacctgggctctgcccacctacaacaaccacctctacaagcaaatctccagccaatcaggagcctcaaacgacaaccactactttggctacagcaccccctgggggtattttgacttcaacagattccactgccacttttcaccacgtgactggcaaagactcatcaacaacaactggggattccgaccaaagagactcaacttcaagctctttaacattcaagtcaaagaggtcacgcagaatgacggtacgacgacgattgccaataaccttaccagcacggttcaggtgtttactgactcggagtaccagctcccgtacgtcctcggctcggcgcatcaaggatgcctcccgccgttcccagcagacgtcttcatggtgccacagtatggatacctcaccctgaacaacgggagtcaggcggtaggacgctcttccttttactgcctggagtactttccttctcagatgctgcgtactggaaacaactttcagttcagctacacctttgaagacgttcctttccacagcagctacgctcacagccagagtctggatcggctgatgaatcctctgatcgaccagtacctgtattatctgaacaagacacaatcaaatagtggaacccttcagcagtctcggctactgtttagccaagctggacccaccagcatgtctcttcaagctaaaaactggctgcctggaccttgctacagacagcagcgtctgtcaaagcaggcaaacgacaacaacaacagcaactttccctggactgcggctacaaagtatcatctaaatggccgggactcgttggttaatccaggaccagctatggccagccacaaagacgatgaagaaaagtttttccccatgcatggaaccctgatatttggtaaacaaggaacaaatgctaacgacgcggatttggacaatgtcatgattacagatgaagaagaaatccgcaccaccaatcccgtggctacggagcagtacggatatgtgtcaaataatttgcaagactcaaatactggtccaactactggaactgtcaatcaccaaggagcgttacctggtatggtgtggcaggatcgagacgtgtacctgcagggacccatttgggccaagattcctcacaccgatggacactttcatccttctccacttatgggaggttttggactcaaacacccacctcctcagatcatgattaaaaacactcccgttccagccaatcctcccacaaacttcagttctgccaagtttgcttctttcatcacacagtattccacgggacaagtcagcgtagagatcgagtgggagctgcagaaggagaacagcaaacgctggaaccccgagatccagtacacttccaactataacaaatctgttaatgtggactttactgtggacactaatggtgtgtattcagagcctcgccccattggcaccagatacctgactcgtaatctgtaa

SEQ ID NO: 209 - protein, 738 aa, Artificial Sequence
  Description of Artificial Sequence: Synthetic polypeptide
MAADGYLPDWLEDNLSEGIREWWDLKPGAPKPKANQQKQDDGRGLVLPGCKYLGPFNGLDKGEPVNAADAAALEHDKAYDQQLKAGDNPYLRYNHADAEFQERLQEDTSFGGNLGRAVFQAKKRVLEPLGLVEEGAKTAPGKKRPVEPSPQRSPDSSTGIGKTGQQPAKKRLNFGQTGDSESVPDPQPIGEPPAGPSGLGSGTMAAGGGAPMADNNEGADGVGSSSGNWHCDSTWLGDRVITTSTRTWALPTYNNHLYKQISNGTSGGSTNDNTYFGYSTPWGYFDFNRFHCHFSPRDWQRLINNNWGFRPKRLNFKLFNIQVKEVTQNEGTKTIANNLTSTIQVFTDSEYQLPYVLGSAHQGCPPPFPADVFMIPQYGYLTLNNGSQAVGRSSFYCLEYFPSQMRRTGNNFEFSYQFEDVPFHSSYAHSQSLDRLMNPLIDQYLYYLSRTQSTGGTAGTQQLLFSQAGPNNMSAQAKNWLPGPCYRQQRVSTTLSQNNNSNFAWTGATKYHLNGRDSLVNPGVAMATHKDDEERFFPSSGVLMFGKQGAGKDNVDYSSVMLTSEEEIKTTNPVATEQYGVVADNLQQQNAAPIVGAVNSQGALPGMVWQNRDVYLQGPIWAKIPHTDGNFHPSPLMGGFGLKHPPPQILIKNTPVPADPPTTFSQAKLASFITQYSTGQVSVEIEWELQKENSKRWNPEIQYTSNYNKSVNVDFTVDTNGVYSEPRPIGTRYLTRNL

SEQ ID NO: 210 - DNA, 2217 bp, Artificial Sequence
  Description of Artificial Sequence: Synthetic polynucleotide
atggctgccgatggttatcttccagattggctcgaggacaacctctctgagggcattcgcgagtggtgggacttgaaacctggagccccgaaacccaaagccaaccagcaaaagcaggacgacggccggggtctggtgcttcctggctgcaagtacctcggacccttcaacggactcgacaagggggagcccgtcaacgcggcggacgcagcggccctcgagcacgacaaggcctacgaccagcagctcaaagcgggtgacaatccgtacctgcggtataaccacgccgacgccgagtttcaggagcgtctgcaagaagatacgtcttttgggggcaacctcgggcgagcagtcttccaggccaagaagcgggttctcgaacctctcggtctggttgaggaaggcgctaagacggctcctggaaagaagagaccggtagagccatcaccccagcgttctccagactcctctacgggcatcggcaagacaggccagcagcccgcgaaaaagagactcaactttgggcagactggcgactcagagtcagtgcccgaccctcaaccaatcggagaaccccccgcaggcccctctggtctgggatctggtacaatggctgcaggcggtggcgctccaatggcagacaataacgaaggcgccgacggagtgggtagttcctcaggaaattggcattgcgattccacatggctgggcgacagagtcatcaccaccagcacccgaacctgggccctccccacctacaacaaccacctctacaagcaaatctccaacgggacatcgggaggaagcaccaacgacaacacctacttcggctacagcaccccctgggggtattttgactttaacagattccactgccacttctcaccacgtgactggcagcgactcatcaacaacaactggggattccggcccaagagactcaacttcaagctcttcaacatccaggtcaaggaggtcacgcagaatgaaggcaccaagaccatcgccaataaccttaccagcacgattcaggtctttacggactcggaataccagctcccgtacgtcctcggctctgcgcaccagggctgcccgcctccgttcccggcggacgtcttcatgattcctcagtacgggtacctgactctgaacaacggcagtcaggccgtgggccgttcctccttctactgcctggagtactttccttctcaaatgcggagaacgggcaacaactttgagttcagctaccagtttgaggacgtgccttttcacagcagctacgcgcatagccaaagcctggaccggctgatgaaccccctcatcgaccagtacctgtactacctgtctcggactcagtccacgggaggtaccgcaggaactcagcagttgctattttctcaggccgggcctaataacatgtcggctcaggccaaaaactggctacccgggccctgctaccggcagcaacgcgtctccacgacactgtcgcaaaataacaacagcaactttgcttggaccggtgccaccaagtatcatctgaatggcagagactctctggtaaatcccggtgtcgctatggcaacgcacaaggacgacgaagagcgattttttccatccagcggagtcttgatgtttgggaaacagggagctggaaaagacaacgtggactatagcagcgttatgctaaccagtgaggaagaaatcaaaaccaccaacccagtggccacagaacagtacggcgtggtggccgataacctgcaacagcaaaacgccgctcctattgtaggggccgtcaacagtcaaggagccttacctggcatggtctggcagaaccgggacgtgtacctgcagggtcctatctgggccaagattcctcacacggacggcaactttcatccttcgccgctgatgggaggctttggactgaaacacccgcctcctcagatcctgattaagaatacacctgttcccgcggatcctccaactaccttcagtcaagccaagctggcgtcgttcatcacgcagtacagcaccggacaggtcagcgtggaaattgaatgggagctgcagaaagagaacagcaagcgctggaacccagagattcagtatacttccaactataacaaatctgttaatgtggactttactgtggacactaatggtgtgtattcagagcctcgccccattggcaccagatacctgactcgtaatctgtaa

SEQ ID NO: 211 - DNA, 3167 bp, Artificial Sequence
  Description of Artificial Sequence: Synthetic polynucleotide
attgaatttagcggccgcgaattcgcccttcgcagagaccaaagttcaactgaaacgaattaaacggtttattgattaacaagcaattacagattacgagtcaggtacctggtgccaatggggcgaggctctgaatacacaccattagtgtccacagtaaagtccacattaacagatttgttgtagttggaagtgtactgaatctcgggattccagcgtttgctgttctccttctgcagctcccactcgatctccacgctgacctgccccgtggagtactgtgtaatgaaggaagcaaactttgccgcactgaaggtagtcgaaggattcgcaggtaccggggtgttcttgatgagaatctgcgggggagggtgtttaagtccgaatccgcccatgaggggagaggggtgaaaatgtccgtccgtgtgtggaatctttgcccagatgggcccctgcaggtacacgtctctgtcctgccacaccatgcctggaagaacgccttgtgtgttgacatctgaggtagctgcttgtgtgttgccgctctggaggttggtagatacagaaccatactgctccgtagccacgggattggtggtcctgatttcctcttcgtctgtaatcatgaccttttcaatgtccacattagtttttcccgagtcttgttttccaaagatgagaaccccgctctgaggaaaaaacttttcttcatcgtccttgtggctggccatggccgggcccggattcaccagagagtctcttccattaaggtggtacttggtagctccagtccacgagtattcactgttgttgttatccgcagatgtctttgatactcgctgctggcggtaacagggtccaggaagccagttcctagactggtcccgaatgtcacttgctccggcctgagaaaactgaagccttgactgcgtggtggttccgcttggagtgtttgttctgctcaagtaatacaggtactggtcgatgagaggattcatgagacggtccaaactctggctgtgggcgtagctgctgtggaaaggaacgtcctcaaaggtgtagctgaaggtaaagttgtttccggtacgcagcatctgagaaggaaagtactccaggcagtaaaatgaagagcgtcctactgcctgactcccgttgttcagggtgaggtatccatactgtggcaccatgaagacgtctgctgggaacggcgggaggcatccttgatgcgccgagccgaggacgtacgggagctggtactccgagtcagtaaacacctgaaccgtgctggtaaggttattggcaatcgtcgtcgtaccgtcattctgcgtgacctccttgacttgaatgttaaagagcttgaagttgagtcttttgggccggaatccccaattgttgttgatgagtctttgccagtcacgtggcgaaaagtggcagtggaatctgttgaagtcaaaatacccccaaggggtgctgtagccaaagtagtggttgtcgtttgaggctcctgattggctggaaatctgcttgtagaggtggttgttgtaggtgggcagagcccaggtgcgggtgctggtggtgatgactctgtcgcccatccatgtggaatcgcaatgccaatttcccgaggaattacccactccgtcggcgccctcgttattgtctgccattggtgcgccactgcctgtagccatcgtattagttcccagaccagagggggctgctggtggctgtccgagaggctgggggtcaggtacggagtctgcgtctccagtctgaccgaaattcaatctctttcttgcaggctgctggcccgcttttccggttcccgaggaggagtctggctccgcaggagagtgctctaccggcctcttttttcccggagccgtcttaacaggttcctcaaccaggcccagaggttcaagaaccctctttttcgcctggaagactgctcgtccgaggttgcccccaaaagacgtatcttctttaagacgctcctggaactccgcgtcggcgtggttgtacttggggtacgggttgtctccgctgtcgagctgccggtcgtaggccttgtcgtgctcgagggccgcggcgtctgcctcgttgaccggctctcccttgtcgagtccgttgaagggtccaaggtacttgtacccaggaagcacaagacccctgctgtcgtccttatgccgctctgcgggctttggtggtggtgggccaggtttgagcttccaccactgtcttattccttcagagagagtgtcctcgagccaatctggaagataaccatcggcagccatacctgatttaaatcatttattgttcagagatgcagtcatccaaatccacattgaccagatcgcaagcagtgcaagcgtctggcacctttcccatgatatgatgaatgtagcacagtttctgatacgcctttttgacgacagaaacgggttgagattctgacacgggaaagcactctaaacagtctttctgtccgtgagtgaagcagatatttgaattctgattcattctctcgcattgtctgcagggaaacagcatcagattcatgcccacgtgacgagaacatttgttttggtacctgtccgcgtagttgattgaagcttccgcgtctgacgtcgatggctgcgcaactgactcgcgcgcccgtttgggctcacttatatctgcgtcactgggggcgggtctttttttggctccaccctttttgacgtagaattcatgctctacctcaaccacgtgatcctttgcccaccggaaaaagtctttgacttcctgcttggtgaccttcccaaagtcatgatccagacggcgggtgagttcaaatttgaacatccggtcttgcaacggctgctggtgttcgaaggtcgttgagttcccgtcaatcactgcgcacatgttggtgttggaggtgacaatcacgggagtcgggtctatctgggccgaggacttgcatttctggtccacgcgcaccttgcttcctccgagaatggctttggccgactccacgaccttggcggtcatcttcccctcctcccaccagatcaccatcttgtcgacgcaatcattgaaaggaaagttctcattggtccagttgacgcagccgtagaaagggcgaattcgtttaaacctgcaggactagtccctttagtgagggt

SEQ ID NO: 212 - DNA, 3161 bp, Artificial Sequence
  Description of Artificial Sequence: Synthetic polynucleotide
aattgaatttagcggccgcgaattcgcccttcgcagagaccaaagttcaactgaaacgaattaaacggtttattgattaacaagcaattacagattacgagtcaggtatctggtgccaatggggcgaggctctgaatacacaccattagtgtccacagtaaagtccacattaacagatttgttgtagttggaagtgtactgaatctcgggattccagcgtttgctgttctccttctgcagctcccactcgatctccacgctgacctgccccgtggagtactgtgtaatgaaggaagcaaactttgccgcactgaaggtagtcgaaggattcgcaggtaccggggtgttcttgatgagaatctgcgggggagggtgtttaagtccgaatccgcccatgaggggagaggggtgaaaatgtccgtccgtgtgtggaatctttgcccagatgggcccctgcaggtacacgtctctgtcctgccacaccatgcctggaagaacgccttgtgtgttgacatctgaggtagctgcttgtgtgttgccgctctggaggttggtagatacagaaccatactgctccgtagccacgggattggtggtcctgatttcctcttcgtctgtaatcatgaccttttcaatgtccacattagtttttcccgagtcttgttttccaaagatgagaaccccgctctgaggaaaaaacttttcttcatcgtccttgtggctggccatggccgggcccggattcaccagagagtctcttccattaaggtggtacttggtagctccagtccacgagtattcactgttgttgttatccgcagatgtctttgatactcgctgctggcggtaacagggtccaggaagccagttcctagactggtcccgaatgtcacttgctccggcctgagaaaactgaagccttgactgcgtggtggttccgcttggagtgtttgttctgctcaagtaatacaggtactggtcgacgagaggattcatgagacggtccaaactctggctgtgggcgtagctgctgtggaaaggaacgtcctcaaaggtgtagctgaaggtaaagttgtttccggtacgcagcatctgagaaggaaagtactccaggcagtaaaatgaagagcgtcctactgcctgactcccgttgttcagggtgaggtatccatactgtggcaccatgaagacgtctgctgggaacggcgggaggcatccttgatgcgccgagccgaggacgtacgggagctggtactccgagtcagtaaacacctgaaccgtgctggtaaggttattggcaatcgtcgtcgtaccgtcattctgcgtgacctccttgacttgaatgttaaagagcttgaagttgagtcttttgggccgggatccccaattgttgttgatgagtctttgccagtcacgtggcgaaaagtggcagtggaatctgttgaagtcaaaatacccccaaggggtgctgtagccaaagtagtggttgtcgtttgaggctcctgattggctggaaatctgcctgtagaggtggttgttgtaggtgggcagagcccaggtgcgggtgctggtggtgatgactctgtcgcccatccatgtggaatcgcaatgccaatttcccgaggaattacccactccgtcggcgccctcgttattgtctgccattggtgcgccactgcctgtagccatcgtattagttcccagaccagagggggctgctggtggctgtccgagaggctgggggtcaggtacggagtctgcgtctccagtctgaccgaaattcaatctccttcttgcaggctgctggcccgcttttccggttcccgaggaggagtctggctccgcaagagagtgctctaccggcctcttttttcccggagccgtcttaacaggttcctcaaccaggcccagaggttcaagaaccctctttttcgcctggaagactgctcgtccgaggttgcccccaaaagacgtatcttctttaagacgctcctggaactccgcgtcggcgtggttgtacttgaggtacgggttgtctccgccgtcgagctgccggtcgtaggccttgtcgtgctcgagggccgcggcgtctgcctcgttgaccggctctcccttgtcgagtccgttgaagggtccaaggtacttgtacccaggaagcacaagacccctgctgtcgtccttatgccgctctgcgggctttggtggtggtgggccaggtttgagcttccaccactgtcttattccttcagagagagtgtcctcgagccaatctggaagataaccatcggcagccatacctgatttaaatcatttattgttcagagatgcagtcatccaaatccacattgaccagatcgcaagcagtgcaagcgtctggcacctttcccatgatatgatgaatgtagcacagtttctgatacgcctttttgacgacagaaacgggttgagattctgacacgggaaagcactctaaacagtctttctgtccgtgagtgaagcagatatttgaattctgattcattctctcgcattgtctgcagggaaacagcatcagattcatgcccacgtgacgagaacatttgttttggtacctgtccgcgtagttgattgaagcttccgcgtctgacgtcgatggctgcgcaactgactcgcgcgcccgtttgggctcacttatatctgcgtcactgggggcgggtctttttttggctccaccctttttgacgtagaattcatgctctacctcaaccacgtgatcctttgcccaccggaaaaagtctttgacttcctgcttggtgaccttcccaaagtcatgatccagacggcgggtgagttcaaatttgaacatccggtcttgcaacggctgctggtgttcgaaggtcgttgagttcccgtcaatcactgcgcacatgttggtgttggaggtgacaatcacgggagtcgggtctatctgggccgaggacttgcatttctggtccacgcgcaccttgcttcctccgagaatggctttggccgactccacgaccttggcggtcatcttcccctcctcccaccagatcaccatcttgtcgacgcaatcattgaaaggaaagttctcattggtccagttgacgcagcaagggcgaattcgtttaaacctgcaggactagtccctttagtgaggg

SEQ ID NO: 213 - DNA, 3172 bp, Artificial Sequence
  Description of Artificial Sequence: Synthetic polynucleotide
gattgaatttagcggccgcgaattcgcccttgctgcgtcaactggaccaatgagaactttcccttcaacgattgcgtcgacaagatggtgatctggtgggaggagggcaagatgaccgccaaggtcgtggagtccgccaaggccattctgggtggaagcaaggtgcgcgtggaccaaaagtgcaagtcatcggcccagatcgaccccacgcccgtgatcgtcacctccaacaccaacatgtgcgccgtgatcgacgggaacagcaccaccttcgagcaccagcagcccctgcaggaccgcatgttcaagttcgagctcacccgccgtctggagcacgactttggcaaggtgaccaagcaggaagtcaaagagttcttccgctgggctcaggatcacgtgactgaggtggcgcatgagttctacgtcagaaagggcggagccaccaaaagacccgcccccagtgacgcggatataagcgagcccaagcgggcctgcccctcagttgcggagccatcgacgtcagacgcggaagcaccggtggactttgcggacaggtaccaaaacaaatgttctcgtcacgcgggcatgcttcagatgctgtttccctgcaagacatgcgagagaatgaatcagaatttcaacgtctgcttcacgcacggggtcagagactgctcagagtgcttccccggcgcgtcggaatctcaacccgtcgtcagaaaaaagacgtatcagaaactgtgcgcgattcatcatctgctggggcgggcacccgagattgcgtgttcggcctgcgatctcgtcaacgtggacttggatgactgtgtttctgagcaataaatgacttaaaccaggtatggctgctgacggttatcttccagattggctcgaggacaacctctctgagggcattcgcgagtggtgggacctgaaacctggagcccccaagcccaaggccaaccagcagaagcaggacgacggccggggtctggtgcttcctggctacaagtacctcggacccttcaacggactcgacaagggggagcccgtcaacgcggcggacgcagcggccctcgagcacgacaaggcctacgaccagcagctcaaagcgggtgacaatccgtacctgcggtataaccacgccgacgccgagtttcaggagcgtctgcaagaagatacgtcttttgggggcaacctcgggcgagcagtcttccaggccaagaagcgggttctcgaacctctcggtctggttgaggaagctgctaagacggctcctggaaagaagagaccggtagaaccgtcacctcagcgttcccccgactcctccgcgggcatcggcaagaaaggccagcagcccgctaaaaagagactgaactttggtcagactggcgactcagagtcagtccccgaccctcaaccaatcggagaaccaccagcaggcccctctggtctgggatctggtacaatggctgcaggcggtggcgctccaatggcagacaataacgaaggcgccgacggagtgggtagttcctcaggaaattggcattgcgattccacatggctgggcgacagagtcatcaccaccagcacccgaacctgggccctgcccacctacaacaaccacctctacaagcaaatatccaatgggacatcgggaggaagcaccaacgacaacacctacttcggctacagcaccccctgggggtattttgacttcaacagattccactgccacttctcaccacgtgactggcagcgactcatcaacaacaactggggattccggccaaaaagactcagcttcaagctcttcaacatccaggtcaaggaggtcacgcagaatgaaggcaccgagaccatcgccaataaccttaccagcacgattcaggtatttacggactcggaataccagctgccgtacgtcctcggctccgcgcaccagggctgcctgcctccgttcccggcggacgtcttcatgattccccagtacggctaccttacactgaacaatggaagtcaagccgtaggccgttcctccttctactgcctggaatattttccatctcaaatgctgcgaactggaaacaattttgaattcagctacaccttcgaggacgtgcctttccacagcagctgcgcacacagccagagctcggaccgactgatgaatcctctcatcgaccagtacctgtactacttatccagaactcggtccacaggaggaactcaaggtacccagcaattgttattttctcaagctgggcctgcaaacatgtcggctcaggctaagaactggctacctggaccttgctaccggcagcagcgagtctctacgacactgtcgcaaaacaacaacagcaactttgcttggactggtgccaccaaatatcacctgaacggaagagactctttggtaaatcccggtgtcgccatggcaacccacaaggacgacgaggaacgcttcttcccgtcgagtggagtcctgatgtttggaaaacagggtgctggaagagacaatgtggactacagcagcgttatgctaaccagcgaagaagaaattaaaaccactaaccctgtagccacagaacaatacggtgtggtggctgacaacttgcagcaaaccaatacagggcctattgtgggaaatgtcaacagccaaggagccttacctggcatggtctggcagaaccgagacgtgtacctgcagggtcccatctgggccaagattcctcacacggacggcaacttccacccttcaccgctaatgggaggatttggactgaagcacccacctcctcagatcctgatcaagaacacgccggtacctgcggatcctccaacaacgttcagccaggcgaaattggcttccttcattacgcagtacagcaccggacaggtcagcgtggaaatcgagtgggagctgcagaaggagaacagcaaacgctggaacccagagattcagtacacttcaaactactacaaatctacaaatgtggactttgctgtcaatacagagggaacttattctgagcctcgccccattggtactcgttacctcacccgtaatctgtaattgctggttaatcaataaaccgtttgattcgtttcagttgaactttggtctctgcgaagggcgaattcgtttaaacctgcaggactagtccctttagtgagg

SEQ ID NO: 214 - DNA, 3172 bp, Artificial Sequence
  Description of Artificial Sequence: Synthetic polynucleotide
gattgaatttagcggccgcgaattcgcccttgctgcgtcaactggaccaatgagaactttcccttcaacgattgcgtcgacaagatggtgatctggtgggaggagggcaagatgaccgccaaggtcgtggagtccgccaaggccattctgggtggaagcaaggtgcgcgtggaccaaaagtgcaagtcatcggcccagatcgaccccacgcccgtgatcgtcacctccaacaccaacatgtgcgccgtgatcggcgggaacagcaccaccttcgagcaccagcagcccctgcaggaccgcatgttcaagttcgagctcacccgccgtctggagcacgactttggcaaggtgaccaagcaggaagtcaaagagttcttccgctgggctcaggatcacgtgactgaggtggcgcatgagttctacgtcagaaagggcggagccaccaaaagacccgcccccagtgacgcggatataagcgagcccaagcgggcctgcccctcagttgcggagccatcgacgtcagacgcggaagcaccggtggactttgcggacaggtaccaaaacaaatgttctcgtcacgcgggcatgcttcagatgctgtttccctgcaagacatgcgagagaatgaatcagaatttcaacgtctgcttcacgcacggggtcagagactgctcagagtgcctccccggcgcgtcagaatctcaacccgtcgtcagaaaaaagacgtatcagaaactgtgcgcgattcatcatctgctggggcgggcacccgagattgcgtgttcggcctgcgatctcgtcaacgtggacttggatgactgtgtttctgagcaataaatgacttaaaccaggtatggctgctgacggttatcttccagattggctcgaggacaacctctctgagggcattcgcgagtggtgggacctgaaacctggagcccccaagcccaaggccaaccagcagaagcaggacgacggccggggtctggtgcttcttggctacaagtacctcggacccttcaacggactcgacaagggggagcccgtcaatgcggcggacgcagcggccctcgagcacgacaaggcctacgaccagcagctcaaagcgggtgacaatccgtacctgcggtataaccacgccgacgccgagtttcaggagcgtctgcaagaagatacgtcttttgggggcaacctcgggcgagcagtcttccaggccaagaagcgggttctcgaacctctcggtctggttgaggaagctgctaagacggctcctggaaagaagagaccggtagaaccgtcacctcagcgttcccccgactcctccacgggcatcggcaagaaaggccagcagcccgctaaaaagagactgaactttggtcagactggcgactcagagtcagtccccgaccctcaaccaatcggagaaccaccagcaggcccctctggtctgggatctggtacaatggctgcaggcggtggcgctccaatggcagacaataacgaaggcgccgacggagtgggtagttcctcaggaaattggcattgcgattccacatggctgggcgacagagtcatcaccaccagcacccgaacctgggccctgcccacctacaacaaccacctctacaagcaaatatccaatgggacatcgggaggaagcaccaacgacaacacctacttcggctacagcaccccctgggggtattttgacttcaacagattccactgccacttctcaccacgtgactggcagcgactcatcaacaacaactggggattccggccaaaaagactcagcttcaagctcttcaacatccaggtcaaggaggtcacgcagaatgaaggcaccaagaccatcgccaataaccttaccagcacgattcaggtatttacggactcggaataccagctgccgtacgtcctcggctccgcgcaccagggctgcctgcctccgttcccggcggacgtcttcatgattccccagtacggctaccttacactgaacaatggaagtcaagccgtaggccgttcctccttctactgcctggaatattttccatctcaaatgctgcgaactggaaacaattttgaattcagctacaccttcgaggacgtgcctttccacagcggctacgcacacagccagagcttggaccgactgatgaatcctctcatcgaccagtacctgtactacttatccagaactcagtccacaggaggaactcaaggtacccagcaattgttattttctcaagctgggcctgcaaacatgtcggctcaggctaagaactggctacctggaccttgctaccggcagcagcgagtctctacgacactgtcgcaaaacaacaacagcaactttgcttggactggtgccaccaaatatcacctgaacggaagagactctttggtaaatcccggtgtcgccatggcaacccacaaggacgacgaggaacgcttcttcccgtcgagtggagtcctgatgtttggaaaacagggtgctggaagagacaatgtggactacagcagcgttatgctaaccagcgaagaagaaattaaaaccactaaccctgtagccacagaacaatacggtgtggtggctgacaacttgcagcaaaccaatacagggcctattgtgggaaatgtcaacagccaaggagccttacctggcatggtctggcagaaccgagacgtgtacctgcagggtcccatctgggccaagattcctcacacggacggcaacttccacccttcaccgctaatgggaggatttggactgaagcacccacctcctcagatcctgatcaagaacacgccggtacctgcggatcctccaacgacgttcagccaggcgaaattggcttccttcattacgcagtacagcaccggacaggtcagcgtggaaatcgagtgggagctgcagaaggagaacagcaaacgctggaacccagagattcagtacacttcaaactactacaaatctacaaatgtggactttgctgtcaatacagagggaacttattctgagcctcgccccattggtactcgttacctcacccgtaatctgtaattgctggttaatcaataaaccgtttgattcgtttcagttgaactttggtctctgcgaagggcgaattcgtttaaacctgcaggactagtccctttagtgagg

SEQ ID NO: 215 - DNA, 2208 bp, Artificial Sequence
  Description of Artificial Sequence: Synthetic polynucleotide
atggctgccgatggttatcttccagattggctcgaggacactctctctgaaggaataagacagtggtggaagctcaaacctggcccaccaccaccaaagcccgcagagcggcataaggacgacagcaggggtcttgtgcttcctgggtacaagtacctcggacccttcaacggactcgacaagggagagccggtcaacgaggcagacgccgcggccctcgagcacgacaaggcctacgaccggcagctcgaaagcggagacaacccgtacctcaagtacaaccacgccgacgcggagtttcaggagcgtcttaaagaagatacgtcttttgggggcaacctcggacgagcagtcttccaggcgaaaaagagggttcttgaacctctgggcctggttgaggagcctgttaaaacggctccgggaaaaaagaggccggtagagcactctcctgtggagccagactcctcctcgggaaccggaaaagcgggccagcagcctgcgagaaaaagattgaattttggtcagactggagacgcagactccgtacctgacccccagcctctcggacagccaccagcagccccctctggtctgggatctactacaatggcttcaggcagtggcgcaccagtggcagacaataacgagggtgccgatggagtgggtaattcctcaggaaattggcattgcgattcccaatggctgggcgacagagtcatcaccaccagcacccgaacctgggccctgcccacctacaacaaccacctctacaagcaaatctccagccaatcaggagcctcaaacgacaaccactactttggctacagcaccccctgggggtattttgacttcaacagattccactgccacttttcaccacgtgactggcaaagactcatcaacaacagctggggattccgacccaaaagactcaacttcaagctctttaacattcaagtcaaagaggtcacgcagaatgacggtacgacgacgattgccaataaccttaccagcacggttcaagtgtttaccgactcggagtaccagctcccgtacgtcctcggctcggcgcatcaaggatgcctcccgccgttcccagcagacgtctttatggtcccacagtatggatacctcaccctgaacaacgggagtcaggcggtaggacgctcttccttttactgcctggagtactttccttctcagatgctgcgtactggaaacaactttcagttcagctacacctttgaagacgttcccttccacagcagctacgctcacagccagagtctggatcggctgctgaatcctctgatcgaccagtacctatattatctgaacaagacacaatcaaatagtggaactcttcagcagtctcggctactgtttagccaagctggacccaccagcatgtctcttcaagctaaaaactggctgcctggaccttgctacagacagcagcgtctgtcaaagcaggcaaacgacaacaacaacagcaactttccctggactgcggctacaaagtatcatctaaatggccgggactcgttggttaatccaggaccagctatggccagccacaaagacgatgaagaaaagtttttccccatgcatggaaccctgatatttggtaaacaaggaacaaatgctaacgacgcggatttggacaatgtcatgattacagatgaagaagaaatccgcaccaccaatcccgtggctacggagcagtacggatatgtgtcaaataatttgcaaaactcaaatactggtccaactactggaactgtcaatcaccaaggagcgttacctggtatggtgtggcaggatcgagacgtgtacctgcagggacccatttgggccaagattcctcacacggacgggcactttcatccttctccactaatgggaggttttgggctcaaacacccgcctcctcagatcatgatcaaaaacactcccgttccagccaatcctcctacaaacttcagttcttccaagtttgcttctttcatcacacagtattccacggggcaggtcagcgtggagatcgagtgggagctgcagaaggagaacagcaaacgctggaatcccgaaattcagtatacttccaactacaacaaatctgttaatgtggactttactgtggacactaatggtgtgtattcagagcctcgccccattggcaccagatacccgactcgtaatctgtaa

SEQ ID NO: 216 - protein, 735 aa, Artificial Sequence
  Description of Artificial Sequence: Synthetic polypeptide
MAADGYLPDWLEDTLSEGIRQWWKLKPGPPPPKPAERHKDDSRGLVLPGYKYLGPFNGLDKGEPVNEADAAALEHDKAYDRQLESGDNPYLKYNHADAEFQERLKEDTSFGGNLGRAVFQAKKRVLEPLGLVEEPVKTAPGKKRPVEHSPVEPDSSSGTGKAGQQPARKRLNFGQTGDADSVPDPQPLGQPPAAPSGLGSTTMASGSGAPVADNNEGADGVGNSSGNWHCDSQWLGDRVITTSTRTWALPTYNNHLYKQISSQSGASNDNHYFGYSTPWGYFDFNRFHCHFSPRDWQRLINNSWGFRPKRLNFKLFNIQVKEVTQNDGTTTIANNLTSTVQVFTDSEYQLPYVLGSAHQGCLPPFPADVFMVPQYGYLTLNNGSQAVGRSSFYCLEYFPSQMLRTGNNFQFSYTFEDVPFHSSYAHSQSLDRLLNPLIDQYLYYLNKTQSNSGTLQQSRLLFSQAGPTSMSLQAKNWLPGPCYRQQRLSKQANDNNNSNFPWTAATKYHLNGRDSLVNPGPAMASHKDDEEKFFPMHGTLIFGKQGTNANDADLDNVMITDEEEIRTTNPVATEQYGYVSNNLQNSNTGPTTGTVNHQGALPGMVWQDRDVYLQGPIWAKIPHTDGHFHPSPLMGGFGLKHPPPQIMIKNTPVPANPPTNFSSSKFASFITQYSTGQVSVEIEWELQKENSKRWNPEIQYTSNYNKSVNVDFTVDTNGVYSEPRPIGTRYPTRNL

SEQ ID NO: 217 - DNA, 2208 bp, Artificial Sequence
  Description of Artificial Sequence: Synthetic polynucleotide
atggctgccgatggttatcttccagattggctcgaggacactctctctgaaggaataagacagtggtggaagctcaaacctggcccaccaccaccaaagcccgcagagcggcataaggacgacagcaggggtcttgtgcttcctgggtacaagtacctcggacccttcaacggactcgacaagggagagccggtcaacgaggcagacgccgcggccctcgagcacgacaaggcctacgaccggcagctcgacagcggagacaacccgtacctcaagtacaaccacgccgacgcggagtttcaggagcgtcttaaagaagatacgtcttttgggggcaacctcggacgagcagtcttccaggccaaaaagaggattcttgaacctctgggcctggttgaggaacctgttaagacggctccgggagaaaagaggccggtagagcactctcctgcggagccagactcctcctcgggaaccggaaaagcgggccagcagcctgcaagaaagagattgaattttggccagactggagacgcagactcagtacctgacccccagcctctcggacagccaccagcagccccctctggtctgggaactaatacgatggcttcaggcagtggcgcaccaatggcagacaataacgagggcgccgacggagtgggtaattcctcgggaaattggtattgcgattccacatggatgggcgacagagtcatcaccaccagcacccgcacctgggccctgcccacctacaacaaccatctgtacaagcaaatctccagccagtctggagccagcaacgacaaccactactttggctacagcaccccctgggggtattttgacttcaacagattccactgccacttctccccacgtgactggcaaagactcatcaacaacaactggggattccggcccaagagactcagcttcaagctctttaacattcaagtcaaagaggtcacgcagaatgacggtacgacgacgattgccaataaccttaccagcacggttcaggtgtttactgactcggagtaccagctcccgtacgtcctcggctcggcgcatcaaggatgcctcccgccgttcccagcagacgtcttcatggtgccacagtatggatacctcaccctgaacaacggcagtcaggcggtaggacgctcttccttttactgcctggagtactttccttctcagatgcttcgtaccggaaacaactttaccttcagctacacctttgaagacgttcctttccatagcagctacgctcacagccaaagtctggaccgtctcatgaatcctctcatcgaccagtacctgtattacttgagcagaacaaacactccaagcggaaccaccacgatgtccaggcttcagttttctcaggccggagcaagtgacattcgggaccagtctagaaactggcttcctggaccctgttaccgccagcagcgagtatcaaagacagctgcggacaacaacaacagtgattactcgtggactggagctaccaagtaccacctcaatggaagagactctctggtgaatccgggcccagctatggccagccacaaggacgatgaagaaaaatattttcctcagagcggggttctcatctttggaaaacaagactcgggaaaaactaatgtggacattgaaaaggttatgattacagacgaagaggaaatcaggaccaccaatcccgtggctacggagcagtatggttctgtatctaccaacctccagagcggcaacacacaagcagctacctcagatgtcaacacacaaggcgttcttccaggcatggtctggcaggacagagacgtgtacctgcaggggcccatctgggcaaagattccacacacggacggacattttcacccctctcccctcgtgggcggattcggacttaaacaccctcctccacaaattctcatcaagaacaccccggtacctgcgaatccttcgaccactttcagtgcggcaaagtttgcttccttcatcacacagtactccacggggcaggtcagcgtggagatcgagtgggagctgcagaaggagaacagcaaacgctggaatcccgaaattcagtacacttccaactacaacaaatctgttaatgtggactttactgtggacactaatggtgtgtattcagagcctcgccccattggcaccagatacctgactcgtaatctgtaa

SEQ ID NO: 218 - protein, 735 aa, Artificial Sequence
  Description of Artificial Sequence: Synthetic polypeptide
MAADGYLPDWLEDTLSEGIRQWWKLKPGPPPPKPAERHKDDSRGLVLPGYKYLGPFNGLDKGEPVNEADAAALEHDKAYDRQLDSGDNPYLKYNHADAEFQERLKEDTSFGGNLGRAVFQAKKRILEPLGLVEEPVKTAPGEKRPVEHSPAEPDSSSGTGKAGQQPARKRLNFGQTGDADSVPDPQPLGQPPAAPSGLGTNTMASGSGAPMADNNEGADGVGNSSGNWYCDSTWMGDRVITTSTRTWALPTYNNHLYKQISSQSGASNDNHYFGYSTPWGYFDFNRFHCHFSPRDWQRLINNNWGFRPKRLSFKLFNIQVKEVTQNDGTTTIANNLTSTVQVFTDSEYQLPYVLGSAHQGCLPPFPADVFMVPQYGYLTLNNGSQAVGRSSFYCLEYFPSQMLRTGNNFTFSYTFEDVPFHSSYAHSQSLDRLMNPLIDQYLYYLSRTNTPSGTTTMSRLQFSQAGASDIRDQSRNWLPGPCYRQQRVSKTAADNNNSDYSWTGATKYHLNGRDSLVNPGPAMASHKDDEEKYFPQSGVLIFGKQDSGKTNVDIEKVMITDEEEIRTTNPVATEQYGSVSTNLQSGNTQAATSDVNTQGVLPGMVWQDRDVYLQGPIWAKIPHTDGHFHPSPLVGGFGLKHPPPQILIKNTPVPANPSTTFSAAKFASFITQYSTGQVSVEIEWELQKENSKRWNPEIQYTSNYNKSVNVDFTVDTNGVYSEPRPIGTRYLTRNL

SEQ ID NO: 219 - DNA, 2209 bp, Artificial Sequence
  Description of Artificial Sequence: Synthetic polynucleotide
atggctgccgatggttatcctccagattggctcgaggacactctctctgaagggataagacagtggtggaagctcaaacctggcccaccaccaccaaagcccgcagagcggcataaggacgacagcaggggtcttgtgcttcctgggtacaagtacctcggacccttcaacggactcgacaagggggagccggtcaacgaggcagacgccgcggccctcgagcacgacaaggcctacgaccggcagctcgacagcggagacaacccgtacctcaagtacaaccacgccgacgcagagtttcaggagcgccttaaagaagatacgtcttttgggggcaacctcggacgagcagtcttccaggcgaaaaagagggttcttgaacctctgggcctggttgaggaacctgttaagacggctccgggaaaaaagaggccggtagagcactctcctgtggagccagactcctcctcgggaaccggaaaagcgggccagcggcctgcaagaaaaagattaaattttggtcagactggagacgcagactccgtacctgacccccagcctctcggacagccaccagcagccccctctggtctgggatctactacaatggctacaggcagtggcgcaccaatggcagacaataacgagggtgccgatggagtgggtaattcctcaggaaattggcattgcgattcccaatggctgggcgacagagtcatcaccaccagcacccgaacctgggccctgcccacatacaacaaccacctctacaagcaaatctccagccaatcaggagccagcaacgacaaccactactttggctacagcaccccctgggggtattttgacttcaacagattccactgccacttttcaccacgtgactggcaaagactcatcaacaacaactggggattccggcccaaaagactcaacttcaagctctttaatattcaagtcaaagaggtcacgcagaatgacggtacgacgacgattgccaataaccttaccagcacggttcaggtgtttactgactcggagtaccagctcccgtacgtcctgggctcggcgcatcaaggatgcctcccgccgtttccagcggacgtcttcatggtcccacagtatggatacctcaccctgaacaacgggagtcaggcggtaggacgctcttccttttactgcctggagtactttccttctcagatgctgcgtactggaaacaactttcagttcagctacacttttgaagacgtgcctttccacagcagctacgctcacagccagagtctggatcggctgatgaatcctctgatcgaccagtacctgtattatctgaacaagacacaaacaaatagtggaactcttcagcagtctcggctactgtttagccaagctggaccaaccaacatgtctcttcaagctaaaaactggctgcctggaccttgctacagacagcagcgtctgtcaaaacaggcaaacgacaacaacaacagcaactttccctggactgcagctacaaagtatcatctaaatggccgggactcgttggttaatccaggaccagctatggccagtcacaaggatgacgaagaaaagtttttccccatgcatggaaccctgatatttggtaaacaaggaacaaatgccaacgacgcggatttggaaaatgtcatgattacagatgaagaagaaatcagggccaccaatcccgtggctacggagcagtacgggactgtgtcaaataatttgcaaaactcaaacactggtccaactactggaactgtcaatcgccaaggagcgttacctggtatggtgtggcaggatcgagacgtgtacctgcagggacccatttgggccaagattcctcacaccgatggacactttcatccttctccactgatgggaggttttggactcaaacacccgcctcctcagatcatgatcaaaaacactcccgttccagccaatcctcccacaaacttcagttctgccaagtttgcttctttcatcacacagtattccacgggacaggtcagcgtggagatcgagtgggagctgcagaaggagaacagcaaacgctggaatcccgaaattcagtacacttccaactacaacaagtctgttaatgtggactttactgtggacactaatggtgtgtattcagagcctcgccccattggcaccagatacctgactcgtaatctgtaat

SEQ ID NO: 220 - protein, 735 aa, Artificial Sequence
  Description of Artificial Sequence: Synthetic polypeptide
MAADGYPPDWLEDTLSEGIRQWWKLKPGPPPPKPAERHKDDSRGLVLPGYKYLGPFNGLDKGEPVNEADAAALEHDKAYDRQLDSGDNPYLKYNHADAEFQERLKEDTSFGGNLGRAVFQAKKRVLEPLGLVEEPVKTAPGKKRPVEHSPVEPDSSSGTGKAGQRPARKRLNFGQTGDADSVPDPQPLGQPPAAPSGLGSTTMATGSGAPMADNNEGADGVGNSSGNWHCDSQWLGDRVITTSTRTWALPTYNNHLYKQISSQSGASNDNHYFGYSTPWGYFDFNRFHCHFSPRDWQRLINNNWGFRPKRLNFKLFNIQVKEVTQNDGTTTIANNLTSTVQVFTDSEYQLPYVLGSAHQGCLPPFPADVFMVPQYGYLTLNNGSQAVGRSSFYCLEYFPSQMLRTGNNFQFSYTFEDVPFHSSYAHSQSLDRLMNPLIDQYLYYLNKTQTNSGTLQQSRLLFSQAGPTNMSLQAKNWLPGPCYRQQRLSKQANDNNNSNFPWTAATKYHLNGRDSLVNPGPAMASHKDDEEKFFPMHGTLIFGKQGTNANDADLENVMITDEEEIRATNPVATEQYGTVSNNLQNSNTGPTTGTVNRQGALPGMVWQDRDVYLQGPIWAKIPHTDGHFHPSPLMGGFGLKHPPPQIMIKNTPVPANPPTNFSSAKFASFITQYSTGQVSVEIEWELQKENSKRWNPEIQYTSNYNKSVNVDFTVDTNGVYSEPRPIGTRYLTRNL

SEQ ID NO: 221 - DNA, 2208 bp, Artificial Sequence
  Description of Artificial Sequence: Synthetic polynucleotide
atggctgccgatggttatcttccagattggctcgaggacactctctctgaaggaataagacagtggtggaagctcaaacctggcccaccaccaccaaagcccgcagagcggcataaggacgacagcaggggtcttgtgcttcctgggtacaggtacctcggacccttcaacggactcgacaagggagagccggtcaacgaggcagacgccgcggccctcgagcacgacaaggcctacgaccggcagctcgacagcggagacaacccgtacctcaagtacaaccacgtcgacgcggagtttcaggagcgtcttaaagaagatacgtcttttgggggcaacctcggacgagcagtcttccaggccaaaaagaggattcttgaacctctgggcctggttgaggaacctgttaaggcggctccgggagaaaagaggccggtagagcactctcctgcggagccagactcctcctcgggaaccggaaaagcgggccagcagcctgcaagaaagagattgaattttggtcagactggagacgcagactcagtacctgacccccagcctctcggacagccaccagcagccccctctggtctgggaactaatacgatggcttcaggcagtggcgcaccaatggcagacaataacgagggcgccgacggagtgggtaattcctcgggaaattggcattgcgattccacatggatgggcgacagagtcatcaccaccagcacccgcacctgggccctgcccacctacaacaaccatctgtacaagcaaatctccagccagtctggagccagcaacgacaaccactactttggctacagcaccccctgggggcattttgacttcaacagattccactgccacttctccccacgtgactggcaaagactcatcaacaacaactggggattccggcccaagagactcagcttcaagctctttaacattcaagtcaaagaggtcacgcagaatgacggtacgacgacgattgccaataaccttaccagcacggttcaggtgtttactgactcggagtaccagctcccgtacgtcctcggctcggcgcatcaaggatgcctcccgccgttcccagcagacgtcttcatggtgccacagtatggatacctcaccctgaacaacggcagtcaggcggtaggacgctcttccttttactgcctggagtactttccttctcagatgcttcgtaccggaaacaactttaccttcagctacacctttgaagacgttcctttccatagcagctacgctcacagccaaagtctggaccgtctcatgaatcctctcatcgaccagtacctgtattacttgagcagaacaaacactccaagcggaaccaccacgatgtccaggcttcagttttctcaggccggagcaagtgacattcgggaccagtctagaaactggcttcctggaccctgttaccgccagcagcgagtatcaaagacagctgcggacaacaacaacagtgattactcgtggactggagctaccaagtaccacctcaatggaagagactctctggtgaatccgggcccagctatggccagccacaaggacgatgaagaaaaatattttcctcagagcggggttctcatctttggaaaacaagactcgggaaaaactaatgtggacattgaaaaggttatgattacagacgaagaggaaatcaggaccaccaatcccgtggctacggagcagtatggttctgtatctaccaacctccagagcggcaacacacaagcagctacctcagatgtcaacacacaaggcgttcttccaggcatggtctggcaggacagagacgtgtacctgcaggggcccatctgggcaaagattccacacacggacggacattttcacccctctccccccatgggcggattcggacttaaacaccctcctccacaaattctcatcaagaacaccccggtacctgcgaatccttcgaccactttcagtgcggcaaagtttgcttccttcatcacacagtactccacggggcaggtcagcgtggagatcgagtgggagctgcagaaggagaacagcaaacgctggaatcccgaaattcagtacacttccaactacaacaaatctgttaatgtggactttactgtggacactaatggtgtgtattcagagcctcgccccattggcgccagatacctgactcgtaatctgtaa

SEQ ID NO: 222 - protein, 735 aa, Artificial Sequence
  Description of Artificial Sequence: Synthetic polypeptide
MAADGYLPDWLEDTLSEGIRQWWKLKPGPPPPKPAERHKDDSRGLVLPGYRYLGPFNGLDKGEPVNEADAAALEHDKAYDRQLDSGDNPYLKYNHVDAEFQERLKEDTSFGGNLGRAVFQAKKRILEPLGLVEEPVKAAPGEKRPVEHSPAEPDSSSGTGKAGQQPARKRLNFGQTGDADSVPDPQPLGQPPAAPSGLGTNTMASGSGAPMADNNEGADGVGNSSGNWHCDSTWMGDRVITTSTRTWALPTYNNHLYKQISSQSGASNDNHYFGYSTPWGHFDFNRFHCHFSPRDWQRLINNNWGFRPKRLSFKLFNIQVKEVTQNDGTTTIANNLTSTVQVFTDSEYQLPYVLGSAHQGCLPPFPADVFMVPQYGYLTLNNGSQAVGRSSFYCLEYFPSQMLRTGNNFTFSYTFEDVPFHSSYAHSQSLDRLMNPLIDQYLYYLSRTNTPSGTTTMSRLQFSQAGASDIRDQSRNWLPGPCYRQQRVSKTAADNNNSDYSWTGATKYHLNGRDSLVNPGPAMASHKDDEEKYFPQSGVLIFGKQDSGKTNVDIEKVMITDEEEIRTTNPVATEQYGSVSTNLQSGNTQAATSDVNTQGVLPGMVWQDRDVYLQGPIWAKIPHTDGHFHPSPPMGGFGLKHPPPQILIKNTPVPANPSTTFSAAKFASFITQYSTGQVSVEIEWELQKENSKRWNPEIQYTSNYNKSVNVDFTVDTNGVYSEPRPIGARYLTRNL

SEQ ID NO: 223 - DNA, 2208 bp, Artificial Sequence
  Description of Artificial Sequence: Synthetic polynucleotide
atggctgccgatggttatcttccagattggctcgaggacaccctctctgaaggaataagacagtggtggaagctcaaacctggcccaccaccaccaaagcccgcagagcggcataaggacgacagcaggggtcttgtgcttcctgggtacaagtacctcggacccttcaacggactcgacaagggagagccggtcaacgaggcagacgccgcggccctcgagcacgacaaggcctacgaccggcagctcgacagcggagataacccgtacctcaagtacaaccacgccgacgcggagtttcaggagcgccttaaagaggatacgtcttttgggggcaacctcggacgagcagtcttccaggccaaaaagaggattcttgaacctctgggcctggttgaggaacctgttaagacggctccgggaaaaaagaggccggtagagcactctcctgcggagccagactcctcctcgggaaccggaaaagcgggccagcagcctgcaagaaagagattgaattttggtcagactggagacgcagactcagtacctgacccccggcctctcggacagccaccagcagccccctctggtctgggaactaatacgatggcttcaggcagtggcgcaccaatggcagacaataacgagggcgccgacggagtgggtaattcctcgggaaattggcattgcgattccacatggatgggcgacagagtcatcaccaccagcacccgcacctgggccctgcccacctacaacaaccatctgtacaagcaaatctccagccagtctggagccagcaacgacaaccactactttggctacagcaccccctgggggtattttgacttcaacagattccactgccacttctccccacgtgactggcaaagactcatcaacaacaactggggattccggcccaagagactcagcttcaagctctttaacattcaagtcaaagaggtcacgcagaatgacggtacgacgacgattgccaataaccttaccagcacggttcaggtgtttactgactcggagtaccagctcccgtacgtcctcggctcggcgcatcaaggatgcctcccgccgttcccagcagacgtcttcatggtgccacagtatggatacctcaccctgaacaacggcagtcaggcggtaggacgctcttccttttactgcctggagtactttccttctcagatgcttcgtaccggaaacaactttaccttcagctacacctttgaagacgttcctttccatagcagctacgctcacagccaaagtctggaccgtctcatgaatcctctcatcgaccagtacctgtattacttgagcagaacaaacactccaagcggaaccaccacgatgtccaggcttcagttttctcaggccggagcaagtgacattcgggaccagtctagaaactggcttcctggaccctgttaccgccagcagcgagtatcaaagacagctgcggacaacaacaacagtgattactcgtggactggagctaccaagtaccacctcaatggaagagactctctggtgaatccgggcccagctatggccagccacaaggacgatgaagaaaaatattttcctcagagcggggttctcatctttggaaaacaagactcgggaaaaactaatgtggacattgaaaaggttatgattacagacgaagaggaaatcaggaccaccaatcccgtggctacggagcagtatggttctgtatctaccaacctccagagcggcaacacacaagcagctacctcagatgtcaacacacaaggcgttcttccaggcatggtctggcaggacagagacgtgtacctgcaggggcccatctgggcaaagattccacacacggacggacattttcacccctctcccctcatgggcggattcggacttaaacaccctcctccacaaattctcatcaagaacaccccggtacctgcgaatccttcgaccactttcagtgcggcaaagtttgcttccttcatcacacagtactccacggggcaggtcagcgtggagatcgagtgggagctgcagaaggagaacagcaaacgctggaatcccgaaattcagtacacttccaactacaacaaatctgttaatgtggactttactgtggacactaatggtgtgtattcagagcctcgccccattggcaccagatacctgactcgtaatctgtaa

SEQ ID NO: 224 - protein, 735 aa, Artificial Sequence
  Description of Artificial Sequence: Synthetic polypeptide
MAADGYLPDWLEDTLSEGIRQWWKLKPGPPPPKPAERHKDDSRGLVLPGYKYLGPFNGLDKGEPVNEADAAALEHDKAYDRQLDSGDNPYLKYNHADAEFQERLKEDTSFGGNLGRAVFQAKKRILEPLGLVEEPVKTAPGKKRPVEHSPAEPDSSSGTGKAGQQPARKRLNFGQTGDADSVPDPRPLGQPPAAPSGLGTNTMASGSGAPMADNNEGADGVGNSSGNWHCDSTWMGDRVITTSTRTWALPTYNNHLYKQISSQSGASNDNHYFGYSTPWGYFDFNRFHCHFSPRDWQRLINNNWGFRPKRLSFKLFNIQVKEVTQNDGTTTIANNLTSTVQVFTDSEYQLPYVLGSAHQGCLPPFPADVFMVPQYGYLTLNNGSQAVGRSSFYCLEYFPSQMLRTGNNFTFSYTFEDVPFHSSYAHSQSLDRLMNPLIDQYLYYLSRTNTPSGTTTMSRLQFSQAGASDIRDQSRNWLPGPCYRQQRVSKTAADNNNSDYSWTGATKYHLNGRDSLVNPGPAMASHKDDEEKYFPQSGVLIFGKQDSGKTNVDIEKVMITDEEEIRTTNPVATEQYGSVSTNLQSGNTQAATSDVNTQGVLPGMVWQDRDVYLQGPIWAKIPHTDGHFHPSPLMGGFGLKHPPPQILIKNTPVPANPSTTFSAAKFASFITQYSTGQVSVEIEWELQKENSKRWNPEIQYTSNYNKSVNVDFTVDTNGVYSEPRPIGTRYLTRNL

SEQ ID NO: 225 - DNA, 2208 bp, Artificial Sequence
  Description of Artificial Sequence: Synthetic polynucleotide
atggctgccgatggttatcttccagattggctcgaggacactctctctgaaggaataagacagtggtggaagctcaaacctggcccaccaccaccaaagcccgcagagcggcataaggacgacagcaggggtcttgtgcttcctgggtacaagtacctcggacccttcaacggactcgacaagggagagccggtcaacgaggcagacgccgcggccctcgagcacgacaaggcctacgaccggcagctcgacagcggagacaacccgtacctcaagtacaaccacgccgacgcggagtttcaggagcgccttaaaggagatacgtcttttgggggcaacctcggacgagcagtcttccaggccaaaaagaggattcttgaacctctgggcctggttgaggaacctgttaagacggctccgggaaaaaagaggccggtagagcactctcctgcggagccagactcctcctcgggaaccggaaaagcgggccagcagcctgcaagaaagagattgaattttggtcagactggagacgcagactcagtacctgacccccagcctctcggacagccaccagcagccccctctggtctgggaactaatacgatggcttcaggcagtggcgcaccaatggcagacaataacgagggcgccgacggagtgggtaattcctcgggaaattggcattgcgattccacatggatgggcggcagagtcatcaccaccagcacccgcacctgggccctgcccacctacaacaaccatctgtacaagcaaatctccagccagtctggagccagcaacgacaaccactactttggctacagcaccccctgggggtattttgacttcaacagattccactgccacttctccccacgtgactggcaaagactcatcaacaacaactggggattccggcccaagagactcagcttcaagctctttaacattcaagtcaaagaggtcacgcagaatgacggtacgacgacgattgccaataaccttaccagcacggttcaggtgtttactgactcggagtaccagctcccgtacgtcctcggctcggcgcatcaaggatgcctcccgccgttcccagcagacgtcttcatggtgccacagtatggatacctcaccctgaacaacggcagtcaggcggtaggacgctcttccttttactgcctggagtactttccttctcagacgcttcgtaccggaaacaactttaccttcagctacacctttgaagacgttcctttccatagcagctacgctcacagccaaagtctggaccgtctcatgaatcctctcatcgaccagtacctgtattacttgagcagaacaaacactccaagcggaaccaccacgatgtccaggcttcagttttctcaggccggagcaagtgacattcgggaccagtctagaaactggcttcctggaccctgttaccgccagcagcgagtatcaaagacagctgcggacaacaacaacagtgattactcgtggactggagctaccaagtaccacctcaatggaagagactctctggtgaatccgggcccagctatggccagccacaaggacgatgaagaaaaatattttcctcagagcggggttctcatctttggaaaacaagactcgggaaaaactaatgtggacattgaaaaggttatgattacagacgaagaggaaatcaggaccaccaatcccgtggctacggagcagtatggttctgtatctaccaacctccagagcggcaacacacaagcagctacctcagatgtcaacacacaaggcgttcttccaggcatggtctggcaggacagagacgtgtacctgcaggggcccatctgggcaaagattccacacacggacggacattttcacccctctcccctcatgggcggattcggacttaaacaccctcctccacaaattctcatcaagaacaccccggtacctgcgaatccttcgaccactttcagtgcggcaaagtttgcttccttcatcacacagtactccacggggcaggtcagcgtggagatcgagtgggagctgcagaaggagaacagcaaacgctggaatcccgaaattcagtacacttccaactacaacaaatctgttaatgtggactttactgtggacactaatggtgtgtattcagagcctcgccccattggcaccagatacctgactcgtaatctgtaa

SEQ ID NO: 226 - protein, 735 aa, Artificial Sequence
  Description of Artificial Sequence: Synthetic polypeptide
MAADGYLPDWLEDTLSEGIRQWWKLKPGPPPPKPAERHKDDSRGLVLPGYKYLGPFNGLDKGEPVNEADAAALEHDKAYDRQLDSGDNPYLKYNHADAEFQERLKGDTSFGGNLGRAVFQAKKRILEPLGLVEEPVKTAPGKKRPVEHSPAEPDSSSGTGKAGQQPARKRLNFGQTGDADSVPDPQPLGQPPAAPSGLGTNTMASGSGAPMADNNEGADGVGNSSGNWHCDSTWMGGRVITTSTRTWALPTYNNHLYKQISSQSGASNDNHYFGYSTPWGYFDFNRFHCHFSPRDWQRLINNNWGFRPKRLSFKLFNIQVKEVTQNDGTTTIANNLTSTVQVFTDSEYQLPYVLGSAHQGCLPPFPADVFMVPQYGYLTLNNGSQAVGRSSFYCLEYFPSQTLRTGNNFTFSYTFEDVPFHSSYAHSQSLDRLMNPLIDQYLYYLSRTNTPSGTTTMSRLQFSQAGASDIRDQSRNWLPGPCYRQQRVSKTAADNNNSDYSWTGATKYHLNGRDSLVNPGPAMASHKDDEEKYFPQSGVLIFGKQDSGKTNVDIEKVMITDEEEIRTTNPVATEQYGSVSTNLQSGNTQAATSDVNTQGVLPGMVWQDRDVYLQGPIWAKIPHTDGHFHPSPLMGGFGLKHPPPQILIKNTPVPANPSTTFSAAKFASFITQYSTGQVSVEIEWELQKENSKRWNPEIQYTSNYNKSVNVDFTVDTNGVYSEPRPIGTRYLTRNL

SEQ ID NO: 227 - DNA, 2208 bp, Artificial Sequence
  Description of Artificial Sequence: Synthetic polynucleotide
atggctgccgatggttatcttccagattggctcgaggacactctctctgaaggaataagacagtggtggaagctcaaacctggcccaccaccaccaaagcccgcagagcggcataaggacgacagcaggggtcttgtgcttcctgggtacaagtacctcggacccttcaacggactcgacaagggagagccggtcaacgaggcagacgccgcggccctcgagcacgacaaggcctacgaccggcagctcgacagcggagacaacccgtacctcaagtacaaccacgccgacgcggagtttcaggagcgtcttaaagaagatacgtcttttgggggcaacctcggacgagcagtcttccaggccaaaaagaggattcttgaacctctgggcctggttgaggaacctgttaagacggctccgggaaaaaagaggccggtagagcactctcctgcggagccagactcctcctcgggaaccggaaaagcgggccagcagcctgcaagaaagagattgaattttggtcagactggagacgcagactcagtacctgacccccagcctctcggacagccaccagcagccccctctggtctgggaactaatacgatggcttcaggcagtggcgcaccaatggcagacaataacgagggcgccgacggagtgggtaattcctcgggaaattggcattgcgattccacatggatgggcgacagagtcatcaccaccagcacccgcacctgggccctgcccacctgcaacaaccatctgtacaagcaaatctccagccagtctggagccagcaacgacaaccactactttggctacagcaccccctgggggtattttgacttcaacagattccactgccacttctccccacgtgactggcaaagactcatcaacaacaactggggattccggcccaagagactcagcttcaagctctttaacattcaagtcaaagaggtcacgcagaatgacggtacgacgacgattgccaataaccttaccagcacggttcaggtgtttactgactcggagtaccagctcccgtacgtcctcggctcggcgcatcaaggatgcctcccgccgttcccagcagacgtcttcatggtgccacagtatggatacctcaccctgaacaacggcagtcaggcggtaggacgctcttccttttactgcctggagtattttccttctcagatgcttcgtaccggaaacaactttaccttcagctacacctttgaagacgttcctttccatagcagctacgctcacagccaaagtctggaccgtctcatgaatcctctcatcgaccagtacctgtattacttgagcagaacaaacactccaagcggaaccaccacgatgtccaggcttcagttttctcaggccggagcaagtgacattcgggaccagtctagaaactggcttcctggaccctgttaccgccagcagcgagtatcaaagacagctgcggacaacaacaacagtgattactcgtggactggagctaccaagtaccacctcaatggaagagactctctggtgaatccgggcccagctatggccagccacaaggacgatgaagaaaaatattttcctcagagcggggttctcatctttggaaaacaagactcgggaaaaactaatgtggacattgaaaaggttatgattacagacgaagaggaaatcaggaccaccaatcccgtggctacggagcagtatggttctgtatctacctacctccagagcggcaacacacaagcagctacctcagatgtcaacacacaaggcgttcttccaggcatggtctggcaggacagagacgtgtacctgcgggggcccatctgggcaaagattccacacacggacggacattttcacccctctcccctcatgggcggatttggacttaaacaccctcctccacaaattctcatcaagaacaccccggtacctgcgaatccttcgaccactttcagtgcggcaaagtttgcttccttcatcacacagtactccacggggcaggtcagcgtggagatcgagtgggagctgcagaaggagaacagcaaacgctggaatcccgaaattcagtacacttccaactacaacaaatctgttaatgtggactttactgtggacactaatggtgtgtattcagagcctcgccccattggcaccagatacctgactcgtaatctgtaa

SEQ ID NO: 228 - protein, 735 aa, Artificial Sequence
  Description of Artificial Sequence: Synthetic polypeptide
MAADGYLPDWLEDTLSEGIRQWWKLKPGPPPPKPAERHKDDSRGLVLPGYKYLGPFNGLDKGEPVNEADAAALEHDKAYDRQLDSGDNPYLKYNHADAEFQERLKEDTSFGGNLGRAVFQAKKRILEPLGLVEEPVKTAPGKKRPVEHSPAEPDSSSGTGKAGQQPARKRLNFGQTGDADSVPDPQPLGQPPAAPSGLGTNTMASGSGAPMADNNEGADGVGNSSGNWHCDSTWMGDRVITTSTRTWALPTCNNHLYKQISSQSGASNDNHYFGYSTPWGYFDFNRFHCHFSPRDWQRLINNNWGFRPKRLSFKLFNIQVKEVTQNDGTTTIANNLTSTVQVFTDSEYQLPYVLGSAHQGCLPPFPADVFMVPQYGYLTLNNGSQAVGRSSFYCLEYFPSQMLRTGNNFTFSYTFEDVPFHSSYAHSQSLDRLMNPLIDQYLYYLSRTNTPSGTTTMSRLQFSQAGASDIRDQSRNWLPGPCYRQQRVSKTAADNNNSDYSWTGATKYHLNGRDSLVNPGPAMASHKDDEEKYFPQSGVLIFGKQDSGKTNVDIEKVMITDEEEIRTTNPVATEQYGSVSTYLQSGNTQAATSDVNTQGVLPGMVWQDRDVYLRGPIWAKIPHTDGHFHPSPLMGGFGLKHPPPQILIKNTPVPANPSTTFSAAKFASFITQYSTGQVSVEIEWELQKENSKRWNPEIQYTSNYNKSVNVDFTVDTNGVYSEPRPIGTRYLTRNL

SEQ ID NO: 229 - DNA, 2208 bp, Artificial Sequence; identical to SEQ ID NO: 223
  Description of Artificial Sequence: Synthetic polynucleotide

SEQ ID NO: 230 - protein, 735 aa, Artificial Sequence; identical to SEQ ID NO: 224
  Description of Artificial Sequence: Synthetic polypeptide

SEQ ID NO: 231 - DNA, 2208 bp, Artificial Sequence
  Description of Artificial Sequence: Synthetic polynucleotide
atggctgccgatggttatcttccagattggctcgaggacactctctctgaaggaataagacagtggtggaagctcaaacctggcccaccaccaccaaagcccgcagagcggcataaggacggcagcaggggtcttgtgcttcctgggtacaagtacctcggacccttcaacggactcgacaagggagagccggtcaacgaggcagacgccgcggccctcgagcacgacaaggcctacgaccggcagctcaacagcggagacaacccgtacctcaagtacaaccacgccgacgcggagtttcaggagcgccttaaagaagatacgtcttttgggggcaacctcggacgagcagtcttccaggcaaaaaagagggttcttgaacctctgggcctggttgaggagcctgttaaaacggctccgggaaaaaagagaccggtagagcactctcctgcggagccagactcctcctcgggaaccggaaaagcgggccagcagcctgcaagaaagagattgaattttggtcagactggagacgcagactccgtacctgacccccagcctctcggacagccaccagcagccccctctggtctgggatctactacaatggctacaggcagtggcgcaccaatggcagacaataacgagggtgccgatggagtgggtaattcctcaggaaattggcattgcgattcccaatggctgggcgacagagtcatcaccacaagcactcgaacctgggccctgcccacctacaacaaccacctctacaagcaaatctccagccaatcaggagcctcaaacgacaaccactattttggctacagcaccccttgggggtattttgacttcaacagattccactgccacttttcaccacgtgactggcaaagactcatcaacaacaactggggattccgacccaagagactcaacttcaagctctttaacattcaagtcaaagaggtcacgcagaatgacggtacgacgacgattgccaataaccttaccagcacggttcaggtgtttactgactcggagtaccagctcccgtacgtcctcggctcggcgcatcaaggatgcctcccgccgttcccagcggacgtcttcatggtcccacagtatggatacctcaccctgaacaacgggagtcaggcggtaggacgctctcccttttactgcctggagtactttccttctcagatgctgcgtactggaaacaactttcagttcagctacacttttgaagacgtgcctttccacagcagctacgctcacagccagagtctggatcggctgatgaatcctctgatcgaccagtacctgtattatctgaacaagacacaaacaaatagtggaactcttcagcagtctcggctactgtttagccaagctggacccaccaacatgtctcttcaagctaaaaactggctgcctggaccttgctacagacagcagcgtctgtcaaagcaggcaaacgacaacaacaacagcaactttccctggactgcagctacaaagtatcatctaaatggccgggactcgttggttaatccaggaccagctatggccagtcacaaggatgacgaagaaaagtttttccccatgcatggaaccctgatatttggtaaacaaggaacaaatgccaacgacgcggatttggaaaatgtcatgattacagatgaagaagaaatcaggaccaccaatcccgtggctacggagcagtacgggactgtgtcaaataatttgcaaaactcaaacactggtccaactactggaactgtcaatcaccaaggagcgttacctggtatggtgtggcaggatcgagatgtgtaccttcagggacccatttgggccaagattcctcacaccgatggacactttcatccttctccactgatgggaggttttggactcaaacacccgcctcctcagattatgatcaaaaacactcccgttccagccaatcctcctacaaacttcagttctgccaagtttgcttctttcatcacacagtattccacggggcaggtcagcgtggagatcgagtgggagctgcagaaggagaacagcaaacgctggaatcccgaaattcagtacacttccaactacaacaaatctgttaatgtggactttactgtggacaataatggcgtgtactcagagcctcgccccattggcaccagatacctgactcgtaatctgtaa

SEQ ID NO: 232 - protein, 735 aa, Artificial Sequence
  Description of Artificial Sequence: Synthetic polypeptide
MAADGYLPDWLEDTLSEGIRQWWKLKPGPPPPKPAERHKDGSRGLVLPGYKYLGPFNGLDKGEPVNEADAAALEHDKAYDRQLNSGDNPYLKYNHADAEFQERLKEDTSFGGNLGRAVFQAKKRVLEPLGLVEEPVKTAPGKKRPVEHSPAEPDSSSGTGKAGQQPARKRLNFGQTGDADSVPDPQPLGQPPAAPSGLGSTTMATGSGAPMADNNEGADGVGNSSGNWHCDSQWLGDRVITTSTRTWALPTYNNHLYKQISSQSGASNDNHYFGYSTPWGYFDFNRFHCHFSPRDWQRLINNNWGFRPKRLNFKLFNIQVKEVTQNDGTTTIANNLTSTVQVFTDSEYQLPYVLGSAHQGCLPPFPADVFMVPQYGYLTLNNGSQAVGRSPFYCLEYFPSQMLRTGNNFQFSYTFEDVPFHSSYAHSQSLDRLMNPLIDQYLYYLNKTQTNSGTLQQSRLLFSQAGPTNMSLQAKNWLPGPCYRQQRLSKQANDNNNSNFPWTAATKYHLNGRDSLVNPGPAMASHKDDEEKFFPMHGTLIFGKQGTNANDADLENVMITDEEEIRTTNPVATEQYGTVSNNLQNSNTGPTTGTVNHQGALPGMVWQDRDVYLQGPIWAKIPHTDGHFHPSPLMGGFGLKHPPPQIMIKNTPVPANPPTNFSSAKFASFITQYSTGQVSVEIEWELQKENSKRWNPEIQYTSNYNKSVNVDFTVDNNGVYSEPRPIGTRYLTRNL

SEQ ID NO: 233 - DNA, 2208 bp, Artificial Sequence
  Description of Artificial Sequence: Synthetic polynucleotide
atggctgccgatggttatcttccagattggctcgaggacactctctctgaaggaataagacagtggtggaagctcaaacctggcccaccaccaccaaagcccgcagagcggcataaggacgacagcaggggtcttgtgcttcctgggtacaagtacctcggacccttcaacggactcgacaagggagagccggtcaacgaggcagacgccgcggccctcgagcacgacaaggcctacgaccggcagctcgacagcggagacaacccgtacctcaagtacaaccacgccgacgcggagtttcaggagcgtcttaaagaagatacgtcttttgggggcaacctcggacgagcagtcttccaggccaaaaagaggattcttgaacctctgggcctggttgaggaacctgttaagacggctccgggaaaaaagaggccggtagagcactctcctgcggagccagactcctcctcgggaaccggaaaagcgggccagcagcctgcaagaaagagattgaattttggtcagactggagacgcagactcagtacctgacccccagcctctcggacagccaccagcagccccctctggtctgggaactaatacgatggcttcaggcagtggcgcaccaatggcagacaataacgagggcgccgacggagtgggtaattcctcgggaaattggcattgcgattccacatggatgggcgacagagtcatcaccaccagcacccgcacctgggccctgcccacctacaacaaccatctgtacaagcaaatctccagccagtctggagccagcaacgacaaccactactttggctacagcaccccctgggggtattttgacttcaacagattccactgccacttctccccacgtgactggcaaagactcatcaacaacaactggggattccggcccaagagactcagcttcaagctctttaacattcaagtcaaagaggtcacgcagaatgacggtacgacgacgattgccaataaccttaccagcacggttcaggtgtttactgactcggagtaccagctcccgtacgtcctcggctcggcgcatcaaggatgcctcccgccgttcccagcagacgtcttcatggtgccacagtatggatacctcaccctgaacaacggcagtcaggcggtaggacgctcttccttttactgcctggagtactttccttctcagatgcttcgtaccggaaacaactttaccttcagctacacctttgaagacgttcctttccatagcagctacgctcacagccaaagtctggaccgtctcatgaatcctctcatcgaccagtacctgtattacttgagcagaacaaacactccaagcggaaccaccacgatgtccaggcttcagttttctcaggccggagcaagtgacattcgggaccagtctagaaactggcttcctggaccctgttaccgccagcagcgagtatcaaagacagctgcggacaacaacaacagtgattactcgtggactggagctaccaagtaccacctcaatggaagagactctctggtgaatccgggcccagctatggccagccacaaggacgatgaagaaaaatattttcctcagagcggggttctcatctttggaaaacaagactcgggaaaaactaatgtggacattgaaaaggttatgattacagacgaagaggaaatcaggaccaccaatcccgtggctacggagcagtatggttctgtatctaccaacctccagagcggcaacacacaagcagctacctcagatgtcaacacacaaggcgttcttccaggcatggtctggcaggacagagacgtgtacctgcaggggcccatctgggcaaagattccacacacggacggacattttcacccctctcccctcatgggcggattcggacttaaacaccctcctccacaaattctcatcaagaacaccccggtacctgcgaatccttcgaccactttcagtgcggcaaagtttgcttccttcatcacacagtactccacggggcaggtcagcgtggagatcgagtgggagctgcagaaggagaacagcaaacgctggaatcccgaaattcagtacacttccaactacaacaaatctgttaatgtggactttactgtggacactaatggtgtgtattcagagcctcgccccattggcaccagatacctgactcgtaatctgtaa

SEQ ID NO: 234 - protein, 735 aa, Artificial Sequence
  Description of Artificial Sequence: Synthetic polypeptide
MAADGYLPDWLEDTLSEGIRQWWKLKPGPPPPKPAERHKDDSRGLVLPGYKYLGPFNGLDKGEPVNEADAAALEHDKAYDRQLDSGDNPYLKYNHADAEFQERLKEDTSFGGNLGRAVFQAKKRILEPLGLVEEPVKTAPGKKRPVEHSPAEPDSSSGTGKAGQQPARKRLNFGQTGDADSVPDPQPLGQPPAAPSGLGTNTMASGSGAPMADNNEGADGVGNSSGNWHCDSTWMGDRVITTSTRTWALPTYNNHLYKQISSQSGASNDNHYFGYSTPWGYFDFNRFHCHFSPRDWQRLINNNWGFRPKRLSFKLFNIQVKEVTQNDGTTTIANNLTSTVQVFTDSEYQLPYVLGSAHQGCLPPFPADVFMVPQYGYLTLNNGSQAVGRSSFYCLEYFPSQMLRTGNNFTFSYTFEDVPFHSSYAHSQSLDRLMNPLIDQYLYYLSRTNTPSGTTTMSRLQFSQAGASDIRDQSRNWLPGPCYRQQRVSKTAADNNNSDYSWTGATKYHLNGRDSLVNPGPAMASHKDDEEKYFPQSGVLIFGKQDSGKTNVDIEKVMITDEEEIRTTNPVATEQYGSVSTNLQSGNTQAATSDVNTQGVLPGMVWQDRDVYLQGPIWAKIPHTDGHFHPSPLMGGFGLKHPPPQILIKNTPVPANPSTTFSAAKFASFITQYSTGQVSVEIEWELQKENSKRWNPEIQYTSNYNKSVNVDFTVDTNGVYSEPRPIGTRYLTRNL

SEQ ID NO: 235 - DNA, 2208 bp, Artificial Sequence
  Description of Artificial Sequence: Synthetic polynucleotide
atggctgccgatggttatcttccagattggctcgaggacactctctctgaaggaataagacagtggtggaagctcaaacctggcccaccaccaccaaagcccgcagagcggcataaggacgacagcaggggtcttgtgcttcctgggtacaagtacctcggacccttcaacggactcgacaagggagagccggtcaacgaggcagacgccgcggccctcgagcacgacaaggcctacgaccggcagctcgacagcggagacaacccgtacctcaagtacaaccacgccgacgcggagtttcaggagcgtcttaaagaagatacgtcttttgggggcaacctcggacgagcagtcttccaggccaaaaagaggattcttgaacctctgggcctggttgaggaacctgttaagacggctccgggaaaaaagaggccggtagagcactctcctgcggagccagactcctcctcgggaaccggaaaagcgggccagcagcctgcaagaaagagattgaattttggtcagactggagacgcagactcagtacctgacccccagcctctcggacagccaccagcagccccctctggtctgggaactaatacgatggcttcaggcagtggcgcaccaatggcagacaataacgagggcgccgacggagtgggtaattcctcgggaaattggcattgcgattccacatggatgggcgacagagtcatcaccaccagcacccgcacctgggccctgcccacctacaacaaccatctgtacaagcaaatctccagccagtctggagccagcaacgacaaccactactttggctacagcaccccctgggggtatttcgacttcaacagattccactgccacttctccccacgtgactggcaaagactcatcaacaacaactggggattccggcccaagagactcagcttcaagctctttaacattcaagtcaaagaggtcacgcagaatgacggtacgacgacgattgccaataaccttaccagcacggttcaggtgtttactgactcggggtaccagctcccgtacgtcctcggctcggcgcatcaaggatgccttccgccgttcccagcagacgtcttcatggtgccacagtatggatacctcaccctgaacaacggcagtcaggcggtaggacgctcttccttttactgcctggagtactttccttctcagatgcttcgtaccggaaacaactttaccttcagctacacctttgaagacgttcctttccatagcagctacgctcacggccaaagtctggaccgtctcatgaatcctctcatcgaccagtacctgtattacttgagcagaacaaacactccaagcggaaccaccacgatgtccaggcttcagttttctcaggccggagcaagtgacgttcgggaccagtctagaaactggcttcctggaccctgttaccgccagcagcgagtatcaaagacagctgcggacaacaacaacagtgattactcgtggactggagctaccaagtaccacctcaatggaagagactctctggtgaatccgggcccagctatggccagccacaaggacgatgaagaaaaatattttcctcagagcggggttctcgtctttggaaaacaagactcgggaaaaactaatgtggacattgaaaaggttatgattacagacgaagaggaaatcaggaccaccaatcccgcggctacggagcagtatggttctgtatctaccaacctccagagcggcaacacacaagcagctacctcagatgtcaacacacaaggcgttcttccaggcatggtctggcaggacagagacgtgtacctgcaggggcccatctgggcaaagattccacacacggacggacattttcacccctctcccctcatgggcggattcggacttaaacaccctcctccacaaattctcatcaagaacaccccggtacctgcgaatccttcgaccactttcagtgcggcaaagtttgtttccttcatcacacagtactccacggggcaggtcagcgtggagatcgagtgggagctgcagaaggagaacagcaaacgctggaatcccgaaattcagtacacttccaactacaacaaatctgttaatgtggactttactgtggacactaatggtgtgtattcagagcctcgccccattggcaccagatacctgactcgtaatctgtaa

SEQ ID NO: 236 - protein, 735 aa, Artificial Sequence
  Description of Artificial Sequence: Synthetic polypeptide
MAADGYLPDWLEDTLSEGIRQWWKLKPGPPPPKPAERHKDDSRGLVLPGYKYLGPFNGLDKGEPVNEADAAALEHDKAYDRQLDSGDNPYLKYNHADAEFQERLKEDTSFGGNLGRAVFQAKKRILEPLGLVEEPVKTAPGKKRPVEHSPAEPDSSSGTGKAGQQPARKRLNFGQTGDADSVPDPQPLGQPPAAPSGLGTNTMASGSGAPMADNNEGADGVGNSSGNWHCDSTWMGDRVITTSTRTWALPTYNNHLYKQISSQSGASNDNHYFGYSTPWGYFDFNRFHCHFSPRDWQRLINNNWGFRPKRLSFKLFNIQVKEVTQNDGTTTIANNLTSTVQVFTDSGYQLPYVLGSAHQGCLPPFPADVFMVPQYGYLTLNNGSQAVGRSSFYCLEYFPSQMLRTGNNFTFSYTFEDVPFHSSYAHGQSLDRLMNPLIDQYLYYLSRTNTPSGTTTMSRLQFSQAGASDVRDQSRNWLPGPCYRQQRVSKTAADNNNSDYSWTGATKYHLNGRDSLVNPGPAMASHKDDEEKYFPQSGVLVFGKQDSGKTNVDIEKVMITDEEEIRTTNPAATEQYGSVSTNLQSGNTQAATSDVNTQGVLPGMVWQDRDVYLQGPIWAKIPHTDGHFHPSPLMGGFGLKHPPPQILIKNTPVPANPSTTFSAAKFVSFITQYSTGQVSVEIEWELQKENSKRWNPEIQYTSNYNKSVNVDFTVDTNGVYSEPRPIGTRYLTRNL

SEQ ID NO: 237 - DNA, 2208 bp, Artificial Sequence
  Description of Artificial Sequence: Synthetic polynucleotide
atggctgccgatggttatcttccagattggctcgaggacactctctctgaaggaataagacagtggtggaaactcaaacctggcccaccaccaccaaagcccgcagagcggcataaggacgacagcaggggtcttgtgcttcctgggtacaagtacctcggacccttcaacggactcgacaagggagagccggtcaacgaggcagacgccgcggccctcgagcacgacaaggcctacgaccggcagctcgacagcggagacaacccgtacctcaagtacaaccacgccgacgcggagtttcaggagcgccttaaagaagatacgtcttttgggggcaacctcggacgagcagtcttccaggcaaaaaagagggttctggaacctctgagcctggttgaggagcctgttaagacggctccgggaaaaaagaggccggtagagcactctcccgcagagccagattcctcctccggaactggaaagtcgggcaaccagcctgcaagaaagagattgaatttcggtcagactggagactcagactccgtacctgacccccagcctctcggacagccaccagcagccccctctggtctgggaactaatacgatggctacaggcagtggcgcaccaatggcagacaataacgagggcgccgacggagtgggtaattcctcgggaaattggcattgcgattccacatggatgggcgacagagtcatcaccaccagcacccgaacctgggccctgcccacctacaacaaccatctgtacaagcaaatatccagccagtctggagccagcaacgacaatcactactttggctacagcaccccctgggggtattttgacttcaacagattccactgccacttttcaccacgtgactggcaaagactcatcaacaacaactggggattccgacccaagagactcaacttcaagctctttaacattcaagtcaaagaggtcacgcagaatgacggtacgacgacgattgccaataaccttaccagcacggttcaggtgtttactgactcggagtaccagctcccgtacgtcctcggctcggcgcatcaaggatgcctcccgccgttcccagcagacgtcttcatggtgccacagtatggatacctcaccctgaacaacgggagtcaggcagtaggacgctcttcattttactgcctagagtactttccttctcagatgctgcgtaccggaaacaactttaccttcagctacacctttgaggacgttcctttccacagcagctacgctcacagccagagtttggaccgtctcatgaatcctctcatcgaccagtacctgtattacttgagcagaacaaacactccaagcggaaccaccacgcagtccaggcttcagttttctcaggccggagcgagtgacattcaggaccagtctaggaactggcttcctggaccctgttaccgtcagcagcgagtatcaaagacatctgcggataacaacaacagtgaatactcgtggactggagctaccaagtaccacctcaatggcagagactctctggtgaatccgggcccggccatggccagccacaaagacgatgaagaaaagttttttcctcagagcggggttcttatctttgggaagcaaggctcagagaaaacaaatgtggatattgaaaaggtcatgattacagacgaagaggaaatcaggaccaccaatcccgtggctacggagcagtatggttctgtatctaccaacctccagagcggcaacacacaagcagctaccgcagatgtcaacacacaaggcgttcttccaggcatggtcgggcaagacagagacgtgtacctgcaggggcctacttgggcaaagattccacacacggacggacattttcacccctctcccctcatgggcggatttggacttaaacaccctcctccacagattctcatcaagaacaccccggtacctgcgaatccttcgaccaccttcagtgcggcaaagtttgcttccttcattacacagtactccacggggcaggtcagcgtggagatcgagtgggagctgcagaaggagaacagcaaacgctggaatcccgagatccagtacacttccaactacaacaagtctgttaatgtggactttactgtggacactaatggcgtgtattcagagcctcgccccattggcaccagatacctgactcgtaatctgtaa

SEQ ID NO: 238 - protein, 735 aa, Artificial Sequence
  Description of Artificial Sequence: Synthetic polypeptide
MAADGYLPDWLEDTLSEGIRQWWKLKPGPPPPKPAERHKDDSRGLVLPGYKYLGPFNGLDKGEPVNEADAAALEHDKAYDRQLDSGDNPYLKYNHADAEFQERLKEDTSFGGNLGRAVFQAKKRVLEPLSLVEEPVKTAPGKKRPVEHSPAEPDSSSGTGKSGNQPARKRLNFGQTGDSDSVPDPQPLGQPPAAPSGLGTNTMATGSGAPMADNNEGADGVGNSSGNWHCDSTWMGDRVITTSTRTWALPTYNNHLYKQISSQSGASNDNHYFGYSTPWGYFDFNRFHCHFSPRDWQRLINNNWGFRPKRLNFKLFNIQVKEVTQNDGTTTIANNLTSTVQVFTDSEYQLPYVLGSAHQGCLPPFPADVFMVPQYGYLTLNNGSQAVGRSSFYCLEYFPSQMLRTGNNFTFSYTFEDVPFHSSYAHSQSLDRLMNPLIDQYLYYLSRTNTPSGTTTQSRLQFSQAGASDIQDQSRNWLPGPCYRQQRVSKTSADNNNSEYSWTGATKYHLNGRDSLVNPGPAMASHKDDEEKFFPQSGVLIFGKQGSEKTNVDIEKVMITDEEEIRTTNPVATEQYGSVSTNLQSGNTQAATADVNTQGVLPGMVGQDRDVYLQGPTWAKIPHTDGHFHPSPLMGGFGLKHPPPQILIKNTPVPANPSTTFSAAKFASFITQYSTGQVSVEIEWELQKENSKRWNPEIQYTSNYNKSVNVDFTVDTNGVYSEPRPIGTRYLTRNL

SEQ ID NO: 239 - DNA, 2208 bp, Artificial Sequence
  Description of Artificial Sequence: Synthetic polynucleotide
atggctgccgatggttatcttccagattggctcgaggacactctctctgaaggaataagacagtggtggaagctcaaacctggcccaccaccaccaaagcccgcagagcggcataaggacgacagcaggggtcttgtgcttcctgggtacaagtacctcggacccttcaacggactcgacaagggagagccggtcaacgaggcagacgccgcggccctcgagcacgacaaggcctacgaccggcagctcgacagcggagacaacccgtacctcaagtacaaccacgccgacgcagagtttcaggagcgccttaaagaagatacgtcttttgggggcaacctcggacgagcagtcttccaggcaaaaaagagggttctggaacctctgggcctggttgaggagcctgttaagacggctccgggaaaaaagaggccggtagagcactctcctgcagagccagattcctcctccggaactggaaagtcgggcaaccagcctgcaagaaagagattgaatttcggtcagactggagactcagactccgtacctgacccccagcctctcggacagccaccagcagccccctctggtctgggaactaatacgatggctacaggcagtggcgcaccaatggcagacaataacgagggcgccgacggagtgggtaattcctcgggaaattggcattgcgattccacatggatgggcgacagagtcatcaccaccagcacccgaacctgggccctgcccacctacaacaaccatctgtacaagcaaatatccagccagtctggagccagcaacgacaatcactactttggctacagcaccccctgggggtattttgacttcaacagattccactgccacttttcaccacgtgactggcaaagactcatcaacaacaactggggattccgacccaagagactcaacttcaagctctttaacattcaagtcaaagaggtcacgcagaatgacggtacgacgacgattgccaataaccttaccagcacggttcaggtgtttactgactcggagtaccagctcccgtacgtcctcggctcggcgcatcaaggatgcctcccgccgttcccagcagacgtcttcatggtgccacagtatggatacctcaccctgaacaacgggagtcaggcagtaggacgctcttcattttactgcctagggtactttccttctcagatgctgcgtaccggaaacaactttaccttcagctacacctttgaggacgttcctttccacagcagctacgctcacagccagagtttggaccgtctcatgaatcctctcatcgaccagtacctgtattacttgagcagaacaaacactccaagcggaaccaccacgcagtccaggcttcagttttctcaggccggagcgagtgacattcgggaccagtctaggaactggcttcctggaccctgttaccgtcagcagcgagtatcaaagacatctgcggataacaacaacagtgaatactcgtggactggagctaccaagtaccacctcaatggcagagactctctggtgaatccgggcccggccatggccagccacaaagacgatgaagaaaagttttttcctcagagcggggttcttatctttgggaagcaaggcccagagaaaacaaatgtggatattgaaaaggtcatgattacagacgaagaggaaatcaggaccaccaatcccgtggctacggagcagtatggttctgtatctaccaacctccagagcggcaacacacaagcagctaccgcagatgtcaacacacaaggcgttcttccaggcatggtctggcaagacagagacgtgtacctgcaggggcctatttgggcaaagattccacacacggacggacattttcacccctctcccctcatgggcggatttggacttaaacaccctcctccacagattctcatcaagaacaccccggtacctgcgaatccttcgaccaccttcagtgcggcaaagtttgcttccttcattacacagtactccacggggcaggtcagcgtggagatcgagtgggagctgcagaaggagaacagcaaacgctggaatcccgagatccagtacacttccaactacaacaagtctgttaatgtggactttactgtggacactaatggcgtgtattcagagcctcgccccattggcaccagatacctgactcgtaatctgtaa

SEQ ID NO: 240 - protein, 735 aa, Artificial Sequence
  Description of Artificial Sequence: Synthetic polypeptide
MAADGYLPDWLEDTLSEGIRQWWKLKPGPPPPKPAERHKDDSRGLVLPGYKYLGPFNGLDKGEPVNEADAAALEHDKAYDRQLDSGDNPYLKYNHADAEFQERLKEDTSFGGNLGRAVFQAKKRVLEPLGLVEEPVKTAPGKKRPVEHSPAEPDSSSGTGKSGNQPARKRLNFGQTGDSDSVPDPQPLGQPPAAPSGLGTNTMATGSGAPMADNNEGADGVGNSSGNWHCDSTWMGDRVITTSTRTWALPTYNNHLYKQISSQSGASNDNHYFGYSTPWGYFDFNRFHCHFSPRDWQRLINNNWGFRPKRLNFKLFNIQVKEVTQNDGTTTIANNLTSTVQVFTDSEYQLPYVLGSAHQGCLPPFPADVFMVPQYGYLTLNNGSQAVGRSSFYCLGYFPSQMLRTGNNFTFSYTFEDVPFHSSYAHSQSLDRLMNPLIDQYLYYLSRTNTPSGTTTQSRLQFSQAGASDIRDQSRNWLPGPCYRQQRVSKTSADNNNSEYSWTGATKYHLNGRDSLVNPGPAMASHKDDEEKFFPQSGVLIFGKQGPEKTNVDIEKVMITDEEEIRTTNPVATEQYGSVSTNLQSGNTQAATADVNTQGVLPGMVWQDRDVYLQGPIWAKIPHTDGHFHPSPLMGGFGLKHPPPQILIKNTPVPANPSTTFSAAKFASFITQYSTGQVSVEIEWELQKENSKRWNPEIQYTSNYNKSVNVDFTVDTNGVYSEPRPIGTRYLTRNL

SEQ ID NO: 241 - protein, 735 aa, Artificial Sequence
  Description of Artificial Sequence: Synthetic polypeptide
MAADGYLPDWLEDTLSEGIRQWWKLKPGPPPPKPAERHKDDSRGLVLPGYKYLGPFNGLDKGEPVNEADAAALEHDKAYDRQLDSGDNPYLKYNHADAEFQERLKEDTSFGGNLGRAVFQAKKRVLEPLGLVEEPVKTAPGKKRPVEHSPAEPDSSSGTGKSGNQPARKRLNFGQTGDSDSVPDPQPLGQPPAAPSGLGTNTMATGSGAPMADNNEGADGVGNSSGNWHCDSTWMGDRVITTSTRTWALPTYNNHLYKQISSQSGASNDNHYFGYSTPWGYFDFNRFHCHFSPRDWQRLINNNWGFRPKRLNFKLFNIQVKEVTQNDGTTTIANNLTSTVQVFTDSEYQLPYVLGSAHQGCLPPFPADVFMVPQYGYLTLNNGSQAVGRSSFYCLEYFPSQMLRTGNNFTFSYTFEDVPFHSSYAHSQSLDRLMNPLIDQYLYYLSRTNTPSGTTTQSRLQFSQAGASDIRDQSRNWLPGPCYRQQRVSKTSADNNNSEYSWTGATKYHLNGRDSLVNPGPAMASHKDDEEKFFPQSGVLIFGKQGPEKTNVDIEKVMITDEEEIRTTNPVATEQYGSVSTNLQSGNTQAATADVNTQGVLPGMVWQDRDVYLQGPIWAKIPHTDGHFHPSPLMGGFGLKHPPPQILIKNTPVPANPSTTFSAAKFASFITQYSTGQVSVEIEWELQKENSKRWNPEIQYTSNYNKSVNVDFTVDTNGVYSEPRPIGTRYLTRNL

SEQ ID NO: 242 - protein, 735 aa, Artificial Sequence; identical to SEQ ID NO: 241
  Description of Artificial Sequence: Synthetic polypeptide

SEQ ID NO: 243 - DNA, 2211 bp, Artificial Sequence
  Description of Artificial Sequence: Synthetic polynucleotide
atggctgccgatggttatcttccagattggctcgaggacactctctctgaaggaataagacagtggtggaagctcaaacctggcccaccaccaccaaagcccgcagagcggcataaggacgacagcaggggtcttgtgcttcctgggtacaagtacctcggacccttcaacggactcgacaagggggagccggtcaacgaggcagacgccgcggccctcgagcacgacaaggcctacgaccggcagctcgacagcggagacaacccgtacctcaagtacaaccacgccgacgcagagtttcaggagcgccttaaagaagatacgtcttttgggggcaacctcggacgagcagtcttccaggcgaaaaagagggttcttgaacctctgcggcctggtttgaggaaacctgttaagacggctccgggaaaaaagaggccggtagagcactctcctgtggagccagactcctcctcgggaaccggaaaagcgggccagcagcctgcaagaaaaagattaaattttggtcagactggagacgcagactccgtacctgacccccagcctctcggacagccaccagcagccccctctggtctgggatctactacaatggctacaggcagtggcgcaccaatggcagacaataacgagggtgccgatggagtgggtaattcctcaggaaattggcattgcgattcccaatggctggacgacagagtcatcgccaccagcacccgaacctgggccctgcccacatacaacaaccacctctacaagcaaatctccagccaatcaggagcctgcaacgacaaccactactttggctacagcaccccctgggggtattttgacttcaacagattccactgccacttttcaccacgtgactggcaaagactcatcaacagcaactggggattccggcccaaaagactcaacttcaagctctttaatattcaagtcaaagaggtcacgcagaatgacggtacgacgacgattgccaataaccttaccagcacggttcaggtgtttactgactcggagtaccagctcccgtacgtcccgggctcggcgcatcaaggatgcctcccgccgtttccagcggacgtcttcatggtcccacagtatggatacctcaccctgaacaacgggagtcaggcggtaggacgctcttccttttactgcctggagtactttccttctcagatgctgcgtactggaaacaactttcagttcagctacacttttgaagacgtgcctttccacagcagctacgctcactgccagagtctggatcggctgatgaatcctctgatcgaccagtacctgtattatctgaacaagacacaaacaaatagtggaactcttcagcagtctcggctactgtttagccaagctggaccaaccaacatgtctcttcaagctaaaaactggctgcctggaccttgctacagacagcagcgtctgtcaaaacaggcaaacgacaataacaactgcaactttccctggactgcagctacaaagtatcatctaaatggccgggactcgttggttaatccaggaccagctatggccagtcacaaggatgacgaagaaaagtttttccccatgcatggaaccctgatatttggtaaacaaggaacaaatgccaacgacgcggatttggaaaatgtcatgattacagatgaagaagaaatcaggcccaccaatcccgtggctacggagcagtacgggactgtgtcaaataatttgcaaaactcaaacactggtccaactacaggaactgtcaatcaccaaggagcgttacctggtatggtgtggcaggatcgagacgtgtacctgcagggacccatttgggccaagattcctcacaccgatggacactttcatccttctccactgatgggaggttttggactcaaacacccgcctcctcagatcatgatcaaaagcactcccgttccagccaatcctcccacaaacttcagttctgccaagtttgcttcttccatcacacagtattccacgggacaggtcagcgtggagatcgagtgggagctgcagaaggagaacagcaaacgctggaatcccgaaattcagtacacttccaactacaacaagtctgttaatgtggactttactgtggacactaatggtgtgtattcagagcctcgccccattggcaccagatacctgactcgtaatctgtaa

SEQ ID NO: 244 - protein, 736 aa, Artificial Sequence
  Description of Artificial Sequence: Synthetic polypeptide
MAADGYLPDWLEDTLSEGIRQWWKLKPGPPPPKPAERHKDDSRGLVLPGYKYLGPFNGLDKGEPVNEADAAALEHDKAYDRQLDSGDNPYLKYNHADAEFQERLKEDTSFGGNLGRAVFQAKKRVLEPLRPGLRKPVKTAPGKKRPVEHSPVEPDSSSGTGKAGQQPARKRLNFGQTGDADSVPDPQPLGQPPAAPSGLGSTTMATGSGAPMADNNEGADGVGNSSGNWHCDSQWLDDRVIATSTRTWALPTYNNHLYKQISSQSGACNDNHYFGYSTPWGYFDFNRFHCHFSPRDWQRLINSNWGFRPKRLNFKLFNIQVKEVTQNDGTTTIANNLTSTVQVFTDSEYQLPYVPGSAHQGCLPPFPADVFMVPQYGYLTLNNGSQAVGRSSFYCLEYFPSQMLRTGNNFQFSYTFEDVPFHSSYAHCQSLDRLMNPLIDQYLYYLNKTQTNSGTLQQSRLLFSQAGPTNMSLQAKNWLPGPCYRQQRLSKQANDNNNCNFPWTAATKYHLNGRDSLVNPGPAMASHKDDEEKFFPMHGTLIFGKQGTNANDADLENVMITDEEEIRPTNPVATEQYGTVSNNLQNSNTGPTTGTVNHQGALPGMVWQDRDVYLQGPIWAKIPHTDGHFHPSPLMGGFGLKHPPPQIMIKSTPVPANPPTNFSSAKFASSITQYSTGQVSVEIEWELQKENSKRWNPEIQYTSNYNKSVNVDFTVDTNGVYSEPRPIGTRYLTRNL

SEQ ID NO: 245 - DNA, 2208 bp, Artificial Sequence
  Description of Artificial Sequence: Synthetic polynucleotide
atggctgccgatggttatcttccagattggctcgaggacactctctctgaaggaataagacagtggtggaagctcaaacctggcccaccaccaccaaagcccgcagagcggcataaggacgacagcaggggtcttgtgcttcctgggtacaagtacctcggacccttcaacggactcgacaagggagagccggtcaacgaggcagacgccgcggccctcgagcacgacaaggcctacgaccggcagctcgacagcggagacaacccgtacctcaagtacaaccacgccgacgcggagtttcaggagcgccttaaagaggatacgtcttttgggggcaacctcggacgagcagtcttccaggcaaaaaagagggttctggaacctctgggcctggttgaggagcctgttaagacggctccgggaaaaaagaggccggtagagcactctcctgcagagccagattcctcctccggaactggaaagtcgggcaaccagcctgcaagaaagagattgaatttcggtcagactggagactcagactccgtacctgacccccagcctctcggacagccaccagcagccccctctggtctgggaactaatacgatggctacaggcagtggcgcaccaatggcagacaataacgagggcgccgacggagtgggtaattcctcgggaaattggcattgcgattccacatggatgggcgacagagtcatcaccaccagcacccgaacctgggccctgcccacctacaacaaccatctgtacaagcaaatatccagccagtctggagccagcaacgacaatcactactttggctacagcaccccctgggggtattttgacttcaacagattccactgccacttttcaccacgtgactggcaaagactcatcaacaacaactggggattccgacccaagagactcaacttcaagctctttaacattcaagtcaaagaggtcacgcagaatgacggtacgacgacgattgccaataaccttaccagcacggttcaggtgtttactgactcggagtaccagctcccgtacgtcctcggctcggcgcatcaaggatgcctcccgccgttcccagcagacgtcttcatggtgccacagtatggatacctcaccctgaacaacgggagtcaggcagtaggacgctcttcattttactgcctagagtactttccttctcagatgctgcgtaccggaaacagctttaccttcagctacacctttgaggacgttcctttccacagcagctacgctcacagccagagtttggaccgtctcatgaatcctctcatcgaccagtacctgtattacttgagcagaacaaacactccaagcggaaccaccacgcagtccaggcttcagttttctcaggccggagcgagtgacattcgggaccagtctaggaactggcttcctggaccctgttaccgtcagcagcgagtatcaaagacatctgcggataacaacaacagtgaatactcgtggactggagctaccaagtaccacctcaatggcagagactctctggtgaatccgggcccggccatggccagccacaaagacgatgaagaaaagttctttcctcagagcggggttcttatctttgggaagcaaggctcagagaaaacaaatgtggatattgaaaaggtcatgattacagacgaagaggaaatcaggaccaccaatcccgtggctacggagcagtatggttctgtatctaccaacctccagagcggcaacacacaagcagctaccgcagatgtcaacacacaaggcgttcttccaggcatggtctggcaagacagagacgtgtacctgcaggggcctatttgggcaaagattccacacacggacggacattttcacccctctcccctcatgggcggatttggacttaaacaccctcctccacagattctcatcaagaacaccccggtacctgcgaatccttcgaccaccttcagtgcggcaaagtttgcttccttcattacacagtactccacggggcaggtcagcgtggagatcgagtgggagctgcagaaggagaacagcaaacgctggaatcccgagatccagtacacttccaactacaacaagtctgttaatgtggactttactgtggacactaatggcgtgtattcagagcctcgccccattggcaccagatacctgactcgtaatctgtaa

SEQ ID NO: 246 - protein, 735 aa, Artificial Sequence
  Description of Artificial Sequence: Synthetic polypeptide
MAADGYLPDWLEDTLSEGIRQWWKLKPGPPPPKPAERHKDDSRGLVLPGYKYLGPFNGLDKGEPVNEADAAALEHDKAYDRQLDSGDNPYLKYNHADAEFQERLKEDTSFGGNLGRAVFQAKKRVLEPLGLVEEPVKTAPGKKRPVEHSPAEPDSSSGTGKSGNQPARKRLNFGQTGDSDSVPDPQPLGQPPAAPSGLGTNTMATGSGAPMADNNEGADGVGNSSGNWHCDSTWMGDRVITTSTRTWALPTYNNHLYKQISSQSGASNDNHYFGYSTPWGYFDFNRFHCHFSPRDWQRLINNNWGFRPKRLNFKLFNIQVKEVTQNDGTTTIANNLTSTVQVFTDSEYQLPYVLGSAHQGCLPPFPADVFMVPQYGYLTLNNGSQAVGRSSFYCLEYFPSQMLRTGNSFTFSYTFEDVPFHSSYAHSQSLDRLMNPLIDQYLYYLSRTNTPSGTTTQSRLQFSQAGASDIRDQSRNWLPGPCYRQQRVSKTSADNNNSEYSWTGATKYHLNGRDSLVNPGPAMASHKDDEEKFFPQSGVLIFGKQGSEKTNVDIEKVMITDEEEIRTTNPVATEQYGSVSTNLQSGNTQAATADVNTQGVLPGMVWQDRDVYLQGPIWAKIPHTDGHFHPSPLMGGFGLKHPPPQILIKNTPVPANPSTTFSAAKFASFITQYSTGQVSVEIEWELQKENSKRWNPEIQYTSNYNKSVNVDFTVDTNGVYSEPRPIGTRYLTRNL

SEQ ID NO: 247 - DNA, 2211 bp, Artificial Sequence; identical to SEQ ID NO: 137
  Description of Artificial Sequence: Synthetic polynucleotide

SEQ ID NO: 248 - protein, 736 aa, Artificial Sequence
  Description of Artificial Sequence: Synthetic polypeptide
MAADGYLPDWLEDTLSEGIRQWWKLKPGPPPPKPAERHKDDSRGLVLPGYKYLGPGNGLDKGEPVNAADAAALEHDKAYDQQLKAGDNPYLKYNHADAEFQERLKEDTSFGGNLGRAVFQAKKRLLEPLGLVEEAAKTAPGKKRPVEQSPQEPDSSAGIGKSGSQPAKKKLNFGQTGDTESVPDPQPIGEPPAAPSGVGSLTMASGGGAPVADNNEGADGVGSSSGNWHCDSQWLGDRVITTSTRTWALPTYNNHLYKQISNSTSGGSSNDNAYFGYSTPWGYFDFNRFHCHFSPRDWQRLINNNWGFRPKRLNFKLFNIQVKEVTDNNGVKTIANNLTSTVQVFTDSDYQLPYVLGSAHEGCLPPFPADVFMIPQYGYLTLNDGGQAVGRSSFYCLEYFPSQMLRTGNNFQFSYEFENVPFHSSYAHSQSLDRLMNPLIDQYLYYLSKTINGSGQNQQTLKFSVAGPSNMAVQGRNYIPGPSYRQQRVSTTVTQNNNSEFAWPGASSWALNGRNSLMNPGPAMASHKEGEDRFFPLSGSLIFGKQGTGRDNVDADKVMITNEEEIKTTNPVATESYGQVATNHQSAQAQAQTGWVQNQGILPGMVWQDRDVYLQGPIWAKIPHTDGNFHPSPLMGGFGMKHPPPQILIKNTPVPADPPTAFNKDKLNSFITQYSTGQVSVEIEWELQKENSKRWNPEIQYTSNYYKSNNVEFAVSTEGVYSEPRPIGTRYLTRNL

SEQ ID NO: 249 - DNA, 2211 bp, Artificial Sequence
  Description of Artificial Sequence: Synthetic polynucleotide
atggctgccgatggttatcttccagattggctcgaggacactctctctgaaggaataagacagtggtggaagctcaaacctggcccaccaccaccaaagcccgcagagcggcataaggacgacagcaggggtcttgtgcttcctgggtacaagtacctcggacccggcaacggactcgacaagggggagccggtcaacgcagcagacgcggcggccctcgagcacgacaaggcctacgaccagcagctcaaggccggagacaacccgtacctcaagtacaaccacgccgacgccgagttccaggagcggctcaaagaagatacgtcttttgggggcaacctcgggcgagcagtcttccaggccaaaaagaggcttcttgaacctcttggtctggttgaggaagcggctaagacggctcctggaaagaagaggcctgtagagcagtctcctcaggaaccggactcctccgcgggtattggcaaatcgggttcacagcccgctaaaaagaaactcaatttcggtcagactggcgacacagagtcagtccccgaccctcaaccaatcggagaacctcccgcagccccctcaggtgtgggatctcttacaatggcttcaggtggtggcgcaccagtggcagacaataacgaaggtgccgatggagtgggtagttcctcgggaaattggcattgcgattcccaatggctgggggacagagtcatcaccaccagcacccgaacctgggccctgcccacctacaacaatcacctctacaagcaaatctccaacagcacatctggaggatcttcaaatgacaacgcctacttcggctacagcaccccctgggggtattttgacttcaacagattccactgccacttctcaccacgtgactggcagcgactcatcaacaacaactggggattccggcctaagcgactcaacttcaagctcttcaacattcaggtcaaagaggttacggacaacaatggagtcaagaccatcgccaataaccttaccagcacggtccaggtcttcacggactcagactatcagctcccgtacgtgctcgggtcggctcacgagggctgcctcccgccgttcccagcggacgttttcatgattcctcagtacgggtatctgacgcttaatgatgggagccaggccgtgggtcgttcgtccttttactgcctggaatatttcccgtcgcaaatgctaagaacgggtaacaacttccagttcagctacgagtttgagaacgtacctttccatagcagctacgctcacagccaaagcctggaccgactaatgaatccactcatcgaccaatacttgtactatctctcaaagactattaacggttctggacagaatcaacaaacgctaaaattcagcgtggccggacccagcaacatggctgtccagggaagaaactacatacctggacccagctaccgacaacaacgtgtctcaaccactgtgactcaaaacaacaacagcgaatttgcttggcctggagcttcttcttgggctctcaatggacgtaatagcttgatgaatcctggacctgctatggccagccacaaagaaggagaggaccgtttctttcctttgtctggatctttaatttttggcaaacaaggaactggaagagacaacgtggatgcggacaaagtcatgataaccaacgaagaagaaattaaaactactaacccggtagcaacggagtcctatggacaagtggccacaaaccaccagagtgcccaagcacaggcgcagaccggctgggttcaaaaccaaggaatacttccgggtatggtttggcaggacagagatgtgtacctgcaaggacccatttgggccaaaattcctcacacggacggcaactttcacccttctccgctaatgggagggtttggaatgaagcacccgcctcctcagatcctcatcaaaaacacacctgtacctgcggatcctccaacggctttcaataaggacaagctgaactctttcatcacccagtattctactggccaagtcagcgtggagattgagtgggagctgcagaaggaaaacagcaagcgctggaacccggagatccagtacacttccaactattacaagtctaataatgttgaatttgctgttaatactgaaggtgtatatagtgaaccccgccccattggcaccagatacctgactcgtaatctgtaa

SEQ ID NO: 250 - protein, 736 aa, Artificial Sequence
  Description of Artificial Sequence: Synthetic polypeptide
MAADGYLPDWLEDTLSEGIRQWWKLKPGPPPPKPAERHKDDSRGLVLPGYKYLGPGNGLDKGEPVNAADAAALEHDKAYDQQLKAGDNPYLKYNHADAEFQERLKEDTSFGGNLGRAVFQAKKRLLEPLGLVEEAAKTAPGKKRPVEQSPQEPDSSAGIGKSGSQPAKKKLNFGQTGDTESVPDPQPIGEPPAAPSGVGSLTMASGGGAPVADNNEGADGVGSSSGNWHCDSQWLGDRVITTSTRTWALPTYNNHLYKQISNSTSGGSSNDNAYFGYSTPWGYFDFNRFHCHFSPRDWQRLINNNWGFRPKRLNFKLFNIQVKEVTDNNGVKTIANNLTSTVQVFTDSDYQLPYVLGSAHEGCLPPFPADVFMIPQYGYLTLNDGSQAVGRSSFYCLEYFPSQMLRTGNNFQFSYEFENVPFHSSYAHSQSLDRLMNPLIDQYLYYLSKTINGSGQNQQTLKFSVAGPSNMAVQGRNYIPGPSYRQQRVSTTVTQNNNSEFAWPGASSWALNGRNSLMNPGPAMASHKEGEDRFFPLSGSLIFGKQGTGRDNVDADKVMITNEEEIKTTNPVATESYGQVATNHQSAQAQAQTGWVQNQGILPGMVWQDRDVYLQGPIWAKIPHTDGNFHPSPLMGGFGMKHPPPQILIKNTPVPADPPTAFNKDKLNSFITQYSTGQVSVEIEWELQKENSKRWNPEIQYTSNYYKSNNVEFAVNTEGVYSEPRPIGTRYLTRNL

SEQ ID NO: 251 - DNA, 2208 bp, Artificial Sequence
  Description of Artificial Sequence: Synthetic polynucleotide
atggctgccgatggttatcttccagattggctcgaggacactctctctgaaggaataagacagcggtggaagctcaaacctggcccaccaccaccagagcccgcagagcggcataaggacgacagcaggggtcttgtgcttcctgggtacaagtacctcggacccttcaacggactcgacaagggagagccggtcaacgaggcagacgccgcggccctcgagcacgacaaagcctacgaccggcagctcgacagcggagacaacccgtacctcaagtacaaccacgccgacgcggagtttcaggagcgccttaaagaagatacgtcttttgggggcaacctcggacgagcagtcttccaggcgaaaaagagggtacttgaacctctgggcctggttgaggaacctgttaagacggctccgggaaaaaagaggccggtagagcactctcctgtggagccagactcctcctcgggaaccggaaaggcgggccagcagcctgcaagaaaaagattgaattttggtcagactggagacgcagactcagtacctgacccccagcctctcggacagccaccagcagccccctctggtctgggaactaatacgatggctacaggcagtggcgcaccaatggcagacaataacgagggcgccgacggagtgggtaattcctcgggaaattggcattgcgattccacatggatgggcgacagagtcatcaccaccagcacccgaacctgggccctgcccacctacaacaaccacctctacaaacaaatttccagccaatcaggagcctcgaacgacaatcactactttggctacagcaccccttgggggtattttgacttcaacagattccactgccacttttcaccacgtgactggcaaagactcatcaacaacaactggggattccgacccaagagactcaacttcaagctctttaacattcaagtcaaagaggtcacgcagaatgacggtacgacgacgattgccaataaccttaccggcacggttcaggtgtttactgactcggagtaccagctcccgtacgtcctcggctcggcgcatcaaggatgcctcccgccgttcccagcagacgtcttcatggtgccacagtatggatacctcaccctgaacaacgggagtcaggcagtaggacgctcttcattttactgcctggagtactttccttctcagatgctgcgtaccggaaacaactttaccttcagctacacttttgaggacgttcctttccacagcagctacgctcacagccagagtctgggccgtctcatgaatcctctcatcgaccagtacctgtattacttgagcagaacaaacactccaagtggaaccaccacgcagtcaaggcttcagttttctcaggccggagcgagtgacattcgggaccagtctaggaactggcttcctggaccctgttaccgccagcagcgagtatcaaagacatctgcggataacaacaacagtgaatactcgtggactggagctaccaagtaccacctcaatggcagagactctctggtgaatccgggcccggccatggcaagccacaaggacgatgaagaaaagttttttcctcagagcggggttctcatctttgggaagcaaggctcagagaaaacaaatgtggacattgaaaaggtcatgattacagacgaagaggaaatcaggacaaccaatcccgtggctacggagcagtatggttctgtatctaccaacctccagagaggcaacagacaagcagctaccgcagatgtcaacacacaaggcgttcttccaggcatggtctggcaggacagagatgtgtaccttcaggggcccatctgggcaaagattccacacacggacggacattttcacccctctcccctcatgggtggattcggacttaaacaccctcctccacagattctcatcaagaacaccccggtacctgcgaatccttcgaccaccttcagtgcggcaaagtttgcttccttcatcacacagtactccacgggacaggtcagcgtggagatcgagtgggagctgcagaaggaaaacagcaaacgctggaatcccgaaattcagtacacttccaactacaacaagtctgttaatgtggactttactgtggacactaatggcgtgtattcagagcctcgccccattggcaccagatacctgactcgtaatctgtaa

SEQ ID NO: 252 - protein, 735 aa, Artificial Sequence
  Description of Artificial Sequence: Synthetic polypeptide
MAADGYLPDWLEDTLSEGIRQRWKLKPGPPPPEPAERHKDDSRGLVLPGYKYLGPFNGLDKGEPVNEADAAALEHDKAYDRQLDSGDNPYLKYNHADAEFQERLKEDTSFGGNLGRAVFQAKKRVLEPLGLVEEPVKTAPGKKRPVEHSPVEPDSSSGTGKAGQQPARKRLNFGQTGDADSVPDPQPLGQPPAAPSGLGTNTMATGSGAPMADNNEGADGVGNSSGNWHCDSTWMGDRVITTSTRTWALPTYNNHLYKQISSQSGASNDNHYFGYSTPWGYFDFNRFHCHFSPRDWQRLINNNWGFRPKRLNFKLFNIQVKEVTQNDGTTTIANNLTGTVQVFTDSEYQLPYVLGSAHQGCLPPFPADVFMVPQYGYLTLNNGSQAVGRSSFYCLEYFPSQMLRTGNNFTFSYTFEDVPFHSSYAHSQSLGRLMNPLIDQYLYYLSRTNTPSGTTTQSRLQFSQAGASDIRDQSRNWLPGPCYRQQRVSKTSADNNNSEYSWTGATKYHLNGRDSLVNPGPAMASHKDDEEKFFPQSGVLIFGKQGSEKTNVDIEKVMITDEEEIRTTNPVATEQYGSVSTNLQRGNRQAATADVNTQGVLPGMVWQDRDVYLQGPIWAKIPHTDGHFHPSPLMGGFGLKHPPPQILIKNTPVPANPSTTFSAAKFASFITQYSTGQVSVEIEWELQKENSKRWNPEIQYTSNYNKSVNVDFTVDTNGVYSEPRPIGTRYLTRNL

SEQ ID NO: 253 - DNA, 2208 bp, Artificial Sequence
  Description of Artificial Sequence: Synthetic polynucleotide
atggctgccgatggttatcttccagattggctcgaggacactctctctgaaggaataagacagcggtggaagctcaaacctggcccaccaccaccagagcccgcagagcggcataaggacgacagcaggggtcttgtgcttcctgggtacaagtacctcggacccttcaacggactcgacaagggagagccggtcaacgaggcagacgccgcggccctcgagcacgacaaagcctacgaccggcagctcgacagcggagacaacccgtacctcaagtacaaccacgccgacgcggagtttcaggagcgccttaaagaagatacgtcctttgggggcaacctcggacgagcagtcttccaggcgaaaaagagggtacttgaacctctgggcctggttgaggaacctgttaagacggctccgggaaaaaagaggccggtagagcactctcctgtggagccagactcctcctcgggaaccggaaaggcgggccagcagcctgcaagaaaaagattgaattttggtcagactggagacgcagactcagtacctgacccccagcctctcggacagccaccagcagccccctctggtctgggaactaatacgatggctacaggcagtggcgcaccaatggcagacaataacgagggcgccgacggagtgggtaattcctcgggaaattggcattgcgattccacatggatgggcgacagagtcatcaccaccagcacccgaacctgggccctgcccacctacaacaaccacctctacaaacaaatttccagccaatcaggagcctcgaacgacaatcactactttggctacagcaccccttgggggtattttgacttcaacagattccactgccacttttcaccacgtgactggcaaagactcatcaacaacaactggggattccgacccaagagactcaacttcaagctctttaacattcaagtcaaagaggtcacgcagaatgacggtacgacgacgattgccaataaccttaccagcacggttcaggtgtttactgactcggagtaccagctcccgtacgtcctcggctcggcgcatcaaggatgcctcccgccgttcccagcagacgtcttcatggtgccacagtatggatacctcaccctgaacaacgagagtcaggcagtaggacgctcttcattttactgcctggagtactttccttctcagatgctgcgtaccggaaacaactttaccttcagctacacttttgaggacgttcctttccacagcagctacgctcacagccagagtctgggccgtctcatgaatcctctcatcgaccagtacctgtattacttgagcagaacaaacactccaagtggaaccaccacgcagtcaaggcttcagttttctcaggccggagcgagtgacattcgggaccagtctaggaactggcttcctggaccctgttaccgccagcagcgagtatcaaagacatctgcggataacaacaacagtgaatactcgtggactggagctaccaagtaccacctcaatggcagagactctctggtgaatccgggcccggccatggcaagccacaaggacgatgaagaaaagttttttcctcagagcggggttctcatctttgggaagcaaggctcagagaaaacaaatgtggacattgaaaaggtcatgattacagacgaagaggaaatcaggacaaccaatcccgtggctacggagcagtatggttctgtatctaccaacctccagagaggcaacagacaagcagctaccgcagatgtcaacacacaaggcgttcttccaggcatggtctggcaggacagagatgtgtaccttcaggggcccatctgggcaaagattccacacacggacggacattttcacccctctcccctcatgggtggattcggacttaaacaccctcctccacagattctcatcaagaacaccccggtacctgcgaatccttcgaccaccttcagtgcggcaaagtttgcttccttcatcacacagtactccacgggacaggtcagcgtggagatcgagtgggagctgcagaaggaaaacagcaaacgctggaatcccgaaattcagtacacttccaactacaacaagtctgttaatgtggactttactgtggacactaatggcgtgtattcagagcctcgccccattggcaccagatacctgactcgtaatctgtaa

SEQ ID NO: 254 - protein, 735 aa, Artificial Sequence
  Description of Artificial Sequence: Synthetic polypeptide
MAADGYLPDWLEDTLSEGIRQRWKLKPGPPPPEPAERHKDDSRGLVLPGYKYLGPFNGLDKGEPVNEADAAALEHDKAYDRQLDSGDNPYLKYNHADAEFQERLKEDTSFGGNLGRAVFQAKKRVLEPLGLVEEPVKTAPGKKRPVEHSPVEPDSSSGTGKAGQQPARKRLNFGQTGDADSVPDPQPLGQPPAAPSGLGTNTMATGSGAPMADNNEGADGVGNSSGNWHCDSTWMGDRVITTSTRTWALPTYNNHLYKQISSQSGASNDNHYFGYSTPWGYFDFNRFHCHFSPRDWQRLINNNWGFRPKRLNFKLFNIQVKEVTQNDGTTTIANNLTSTVQVFTDSEYQLPYVLGSAHQGCLPPFPADVFMVPQYGYLTLNNESQAVGRSSFYCLEYFPSQMLRTGNNFTFSYTFEDVPFHSSYAHSQSLGRLMNPLIDQYLYYLSRTNTPSGTTTQSRLQFSQAGASDIRDQSRNWLPGPCYRQQRVSKTSADNNNSEYSWTGATKYHLNGRDSLVNPGPAMASHKDDEEKFFPQSGVLIFGKQGSEKTNVDIEKVMITDEEEIRTTNPVATEQYGSVSTNLQRGNRQAATADVNTQGVLPGMVWQDRDVYLQGPIWAKIPHTDGHFHPSPLMGGFGLKHPPPQILIKNTPVPANPSTTFSAAKFASFITQYSTGQVSVEIEWELQKENSKRWNPEIQYTSNYNKSVNVDFTVDTNGVYSEPRPIGTRYLTRNL

SEQ ID NO: 255 - DNA, 2208 bp, Artificial Sequence
  Description of Artificial Sequence: Synthetic polynucleotide
atggctgccgatggttatcttccagattggctcgaggacactctctctgaaggaataagacagcggtggaagctcaaacctggcccaccaccaccagagcccgcagagcggcataaggacgacagcaggggtcttgtgcttcctgggtacaagtacctcggacccttcaacggactcgacaagggagagccggtcaacgaggcagacgccgcggccctcgagcacgacaaagcctacgaccggcagctcgacagcggagacaacccgtacctcaagtacaaccacgccgacgcggagtttcaggagcgccttaaagaagatacgtcttttgggggcaacctcggacgagcagtcttccaggcgaaaaagagggtacttgaacctctgggcctggttgaggaacctgttaagacggctccgggaaaaaagaggccggtagagcactctcctgtggagccagactcctcctcgggaaccggaaaggcgggccagcagcctgcaagaaaaagattgaattttggtcagactggagacgcagactcagtacctgacccccagcctctcggacagccaccagcagccccctctggtctgggaactaatacgatggctacaggcagtggcgcaccaatggcagacaataacgagggcgccgacggagtgggtaattcctcgggaaattggcattgcgattccacatggatgggcgacagagtcatcaccaccagcacccgaacctgggccctgcccacctacaacaaccacctctacaaacaaatttccagccaatcaggagcctcgaacgacaatcactactttggctacagcaccccttgggggtattttgacttcaacagattccactgccacttttcaccacgtgactggcaaagactcatcaacaacaactggggattccgacccaagagactcaacttcaagctctttaacattcaagtcaaagaggtcacgcagaatgacggtacgacgacgattgccaataaccttaccagcacggttcaggtgtttactgactcggagtaccagctcccgtacgtcctcggctcggcgcatcaaggatgcctcccgccgttcccagcagacgtcttcatggtaccacagtatggatacctcaccctgaacaacgggagtcaggcagtaggacgctcttcattttactgcctggagtactttccttctcagatgctgcgtaccggaaacaactttaccttcagctacacttttgaggacgttcctttccacagcagctacgctcacagccagagtctgggccgtctcatgaatcctctcatcgaccagtacctgtattacttgagcagaacaaacactccaagtggaaccaccacgcagtcaaggcttcagttttctcaggccggagcgagtgacattcgggaccagtctaggaactggcttcctggaccctgttaccgccagcagcgagtatcaaagacatctgcggataacaacaacagtgaatactcgtggactggagctaccaagtaccacctcaatggcagagactctctggtgaatccgggcccggccatggcaagccacaaggacgatgaagaaaagttttttcctcagagcggggttctcatctttgggaagcaaggctcagagaaaacaaatgtggacattgaaaaggtcatgattacagacgaagaggaaatcaggacaaccaatcccgtggctacggagcagtatggttctgtatctaccaacctccagagaggcaacagacaagcagctaccgcagatgtcaacacacaaggcgttcttccaggcatggtctggcaggacagagatgtgtaccttcaggggcccatctgggcaaagattccacacacggacggacattttcacccctctcccctcatgggtggattcggacttaaacaccctcctccacagattctcatcaagaacaccccggtacctgcgaatccttcgaccaccttcagtgcggcaaagtttgcttccttcatcacacagtactccacgggacaggtcagcgtggagatcgagtgggagctgcagaaggaaaacagcaaacgctggaatcccgaaattcagtacacttccaactacaacaagtctgttaatgtggactttactgtggacactaatggcgtgtattcagagcctcgccccattggcaccagatacctgactcgtaatctgtaa

SEQ ID NO: 256 - protein, 735 aa, Artificial Sequence
  Description of Artificial Sequence: Synthetic polypeptide
MAADGYLPDWLEDTLSEGIRQRWKLKPGPPPPEPAERHKDDSRGLVLPGYKYLGPFNGLDKGEPVNEADAAALEHDKAYDRQLDSGDNPYLKYNHADAEFQERLKEDTSFGGNLGRAVFQAKKRVLEPLGLVEEPVKTAPGKKRPVEHSPVEPDSSSGTGKAGQQPARKRLNFGQTGDADSVPDPQPLGQPPAAPSGLGTNTMATGSGAPMADNNEGADGVGNSSGNWHCDSTWMGDRVITTSTRTWALPTYNNHLYKQISSQSGASNDNHYFGYSTPWGYFDFNRFHCHFSPRDWQRLINNNWGFRPKRLNFKLFNIQVKEVTQNDGTTTIANNLTSTVQVFTDSEYQLPYVLGSAHQGCLPPFPADVFMVPQYGYLTLNNGSQAVGRSSFYCLEYFPSQMLRTGNNFTFSYTFEDVPFHSSYAHSQSLGRLMNPLIDQYLYYLSRTNTPSGTTTQSRLQFSQAGASDIRDQSRNWLPGPCYRQQRVSKTSADNNNSEYSWTGATKYHLNGRDSLVNPGPAMASHKDDEEKFFPQSGVLIFGKQGSEKTNVDIEKVMITDEEEIRTTNPVATEQYGSVSTNLQRGNRQAATADVNTQGVLPGMVWQDRDVYLQGPIWAKIPHTDGHFHPSPLMGGFGLKHPPPQILIKNTPVPANPSTTFSAAKFASFITQYSTGQVSVEIEWELQKENSKRWNPEIQYTSNYNKSVNVDFTVDTNGVYSEPRPIGTRYLTRNL

SEQ ID NO: 257 - DNA, 2208 bp, Artificial Sequence
  Description of Artificial Sequence: Synthetic polynucleotide
atggctgccgatggttatcttccagattggctcgaggacactctctctgaaggaataagacagcggtggaagctcaaacctggcccaccaccaccagagcccgcagagcggcataaggacgacagcaggggtcttgtgcttcctgggtacaagtacctcggacccttcaacggactcgacaagggagagccggtcaacgaggcagacgccgcggccctcgagcacgacaaagcctacgaccggcagctcgacagcggagacaacccgtacctcaagtacaaccacgccgacgcggagtttcaggagcgccttaaagaagatacgtcttttgggggcaacctcggacgagcagtcttccaggcgaaaaagagggtactcgaacctctgggcctggttgaggaacctgttaagacggctccgggaaaaaagaggccggtagagcactctcctgtggagccagactcctcctcgggaaccggaaaggcgggccagcagcctgcaagaaaaagattgaattttggtcagactggagacgcagactcagtacctgacccccagcctctcggacagccaccagcagccccctctggtctgggaactaatacgatggctacaggcagtggcgcaccaatggcagacaataacgagggcgccgacggagtgggtaattcctcgggaaattggcattgcgattccacatggatgggcgacagagtcatcaccaccagcacccgaacctgggccctgcccacctacaacaaccacctctacaaacaaatttccagccaatcaggagcctcgaacgacaatcactactttggctacagcaccccttgggggtattttgacttcaacagattccactgccacttttcaccacgtgactggcaaagactcatcaacaacaactggggattccgacccaagagactcaacttcaagctctttaacattcaagtcaaagaggtcacgcagaatgacggtacgacgacgattgccaataaccttaccagcacggttcaggtgtttactgactcggagtaccagctcccgtacgtcctcggctcggcgcatcaaggatgcctcccgccgttcccagcagacgtcttcatggtgccacagtatggatacctcaccctgaacaacgggagtcaggcagcaggacgctcttcattttactgcctggagtactttccttctcagatgctgcgtaccggaaacaactttaccttcagctacacttttgaggacgttcctttccacagcagctacgctcacagccagagtctgggccgtctcatgaatcctctcatcgaccagtacctgtattacttgagcagaacaaacactccaagtggaaccaccacgcagtcaaggcttcagttttctcaggccggagcgagtgacattcgggaccagtctaggaactggcttcctggaccctgttaccgccagcagcgagtatcaaagacatctgcggataacaacaacagtgaatactcgtggactggagctaccaagtaccacctcaatggcagagactctctggtgaatccgggcccggccatggcaagccacaaggacgatgaagaaaagttttttcctcagagcggggttctcatctttgggaagcaaggctcagagaaaacaaatgtggacattgaaaaggtcatgattacagacgaagaggaaatcaggacaaccaatcccgtggctacggagcagtatggttctgtatctaccaacctccagagaggcaacagacaagcagctaccgcagatgtcaacacacaaggcgttcttccaggcatggtctggcaggacagagatgtgtaccttcaggggcccatctgggcaaagattccacacacggacggacattttcacccctctcccctcatgggtggattcggacttaaacaccctcctccacagattctcatcaagaacaccccggtacctgcgaatccttcgaccaccttcagtgcggcaaagtttgcttccttcatcacacagtactccacgggacaggtcagcgtggagatcgagtgggagctgcagaaggaaaacagcaaacgctggaatcccgaaattcagtacacttccaactacaacaagtccgttaatgtggactttactgtggacactaatggcgtgtattcagagcctcgccccattggcaccagatacctgactcgtaatctgtaa

SEQ ID NO: 258 - protein, 735 aa, Artificial Sequence
  Description of Artificial Sequence: Synthetic polypeptide
MAADGYLPDWLEDTLSEGIRQRWKLKPGPPPPEPAERHKDDSRGLVLPGYKYLGPFNGLDKGEPVNEADAAALEHDKAYDRQLDSGDNPYLKYNHADAEFQERLKEDTSFGGNLGRAVFQAKKRVLEPLGLVEEPVKTAPGKKRPVEHSPVEPDSSSGTGKAGQQPARKRLNFGQTGDADSVPDPQPLGQPPAAPSGLGTNTMATGSGAPMADNNEGADGVGNSSGNWHCDSTWMGDRVITTSTRTWALPTYNNHLYKQISSQSGASNDNHYFGYSTPWGYFDFNRFHCHFSPRDWQRLINNNWGFRPKRLNFKLFNIQVKEVTQNDGTTTIANNLTSTVQVFTDSEYQLPYVLGSAHQGCLPPFPADVFMVPQYGYLTLNNGSQAAGRSSFYCLEYFPSQMLRTGNNFTFSYTFEDVPFHSSYAHSQSLGRLMNPLIDQYLYYLSRTNTPSGTTTQSRLQFSQAGASDIRDQSRNWLPGPCYRQQRVSKTSADNNNSEYSWTGATKYHLNGRDSLVNPGPAMASHKDDEEKFFPQSGVLIFGKQGSEKTNVDIEKVMITDEEEIRTTNPVATEQYGSVSTNLQRGNRQAATADVNTQGVLPGMVWQDRDVYLQGPIWAKIPHTDGHFHPSPLMGGFGLKHPPPQILIKNTPVPANPSTTFSAAKFASFITQYSTGQVSVEIEWELQKENSKRWNPEIQYTSNYNKSVNVDFTVDTNGVYSEPRPIGTRYLTRNL

SEQ ID NO: 259 - protein, 738 aa, Artificial Sequence; identical to SEQ ID NO: 101
  Description of Artificial Sequence: Synthetic polypeptide

SEQ ID NO: 260 - DNA, 2217 bp, Artificial Sequence
  Description of Artificial Sequence: Synthetic polynucleotide
atggctgctgacggttatcttccagattggctcgaggacaacctctctgagggcattcgcgagtggtgggacctgaaacctggagcccccaagcccaaggccaaccagcagaagcaggacgacggccggggtctggtgcttcctggctacaagtacctcggacccttcaacggactcgacaagggggagcccgtcaacgcggcggacgcagcggccctcgagcacgacaaggcctacgaccagcagctcaaagcgggtgacaatccgtacctgcggtataaccacgccgacgccgagtttcaggagcgtctgcaagaagatacgtcttttgggggcaacctcgggcgagcagtcttccaggccaagaagcgggttctcgaacctctcggtctggttgaggaagctgctaagacggctcctggaaagaagagaccggtagaaccgtcacctcagcgttcccccgactcctccacgggcatcggcaagaaaggccagcagcccgctaaaaagagactgaactttggtcagactggcgactcagagtcagtccccgaccctcaaccaatcggagaaccaccagcaggcccctctggtctgggatctggtacaatggctgcaggcggtggcgctccaatggcagacaataacgaaggcgccgacggagtgggtagttcctcaggaaattggcattgcgattccacatggctgggcgacagagtcatcaccaccagcacccgaacctgggccctgcccacctacaacaaccacctctacaagcaaatatccaatgggacatcgggaggaagcaccaacgacaacacctacttcggctacagcaccccctgggggtattttgacttcaacagattccactgccacttctcaccacgtgactggcagcgactcatcaacaacaactggggattccggccaaaaagactcagcttcaagctcttcaacatccaggtcaaggaggtcacgcagaatgaaggcaccaagaccatcgccaataaccttaccagcacgattcaggtatttacggactcggaataccagctgccgtacgtcctcggctccgcgcaccagggctgcctgcctccgttcccggcggacgtcttcatgattccccagtacggctaccttacactgaacaatggaagtcaagccgtaggccgttcctccttctactgcctggaatattttccatctcaaatgctgcgaactggaaacaattttgaattcagctacaccttcgaggacgtgcctttccacagcagctacgcacacagccagagcttggaccgactgatgaatcctctcatcgaccagtacctgtactacttatccagaactcagtccacaggaggaactcaaggtacccagcaattgttattttctcaagctgggcctgcaaacatgtcggctcaggctaagaactggctacctggaccttgctaccggcagcagcgagtctctacgacactgtcgcaaaacaacaacagcaactttgcttggactggtgccaccaaatatcacctgaacggaagagactctttggtaaatcccggtgtcgccatggcaacccacaaggacgacgaggaacgcttcttcccgtcgagtggagtcctgatgttcggaaaacagggtgctggaagagacaatgtggactacagcagcgttatgctaaccagcgaagaagaaattaaaaccactaaccccgtagccacagaacaatacggtgtggtggctgacaacttgcagcaaaccaatacagggcctattgtgggaaatgtcaacagccaaggagccttacctggcatggtctggcagaaccgagacgtgtacctgcagggtcccatctgggccaagattcctcacacggacggcaacttccacccttcaccgctaatgggaggatttggactgaagcacccacctcctcagatcctgatcaagaacacgccggtacctgcggatcctccaacaacgttcagccaggcgaaattggcttccttcattacgcagtacagcaccggacaggtcagcgtggaaatcgagtgggagctgcagaaggagaacagcaaacgctggaacccagagattcagtacacttcaaactactacaaatctacaaatgtggactttgctgtcaatacagagggaacttattctgagcctcgccccattggtactcgttacctcacccgtaatctgtaa

SEQ ID NO: 261 - protein, 738 aa, Artificial Sequence
  Description of Artificial Sequence: Synthetic polypeptide
MAADGYLPDWLEDNLSEGIREWWDLKPGAPKPKANQQKQDDGRGLVLPGYKYLGPFNGLDKGEPVNAADAAALEHDKAYDQQLKAGDNPYLRYNHADAEFQERLQEDTSFGGNLGRAVFQAKKRVLEPLGLVEEAAKTAPGKKRPVEPSPQRSPDSSTGIGKKGQQPAKKRLNFGQTGDSESVPDPQPIGEPPAGPSGLGSGTMAAGGGAPMADNNEGADGVGSSSGNWHCDSTWLGDRVITTSTRTWALPTYNNHLYKQISNGTSGGSTNDNTYFGYSTPWGYFDFNRFHCHFSPRDWQRLINNNWGFRPKRLSFKLFNIQVKEVTQNEGTKTIANNLTSTIQVFTDSEYQLPYVLGSAHQGCLPPFPADVFMIPQYGYLTLNNGSQAVGRSSFYCLEYFPSQMLRTGNNFEFSYTFEDVPFHSSYAHSQSLDRLMNPLIDQYLYYLSRTQSTGGTQGTQQLLFSQAGPANMSAQAKNWLPGPCYRQQRVSTTLSQNNNSNFAWTGATKYHLNGRDSLVNPGVAMATHKDDEERFFPSSGVLMFGKQGAGRDNVDYSSVMLTSEEEIKTTNPVATEQYGVVADNLQQTNTGPIVGNVNSQGALPGMVWQNRDVYLQGPIWAKIPHTDGNCHPSPLMGGFGLKHPPPQILIKNTPVPADPPTTFSQAKLASFITQYSTGQVSVEIEWELQKENSKRWNPEIQYTSNYYKSTNVDFAVNTEGTYSEPRPIGTRYLTRNL

SEQ ID NO: 262 - protein, 738 aa, Artificial Sequence
  Description of Artificial Sequence: Synthetic polypeptide
MAADGYLPDWLEDNLSEGIREWWDLKPGAPKPKANQQKQDDGRGLVLPGYKYLGPFNGLDKGEPVNAADAAALEHDKAYDQQLKAGDNPYLRYNHADAEFQERLQEDTSFGGNLGRAVFQAKKRVLEPLGLVEEGAKTAPGKKRPVEPSPQRSPDSSTGIGKKGQQPARKRLNFGRTGDSESVPDPQPIGEPPAAPSSVGSGTMAAGGGAPMADNNEGADGVGSSSGNWHCDSTWLGDRVITTSTRTWALPTYNNHLYKQISNGTSGGSTNDNTYFGYSTPWGYLDFNRFHCHFSPRDWQRLINNNWGFRPKRLSFKLFNIQVKEVTQNEGTKTIANNLASTIQVFTDSEYQPPYVLGSAHQGCLPPFPADVFMIPQYGYLTLNNGSQAVGRSSFYCLEYFPSQMLRTGNNFSFSYTFEDVPFHSSYAHSQSLDRLMNPLIDQYLYYLSRTQSTGGTAGTQQLLFSRAGPSNMSAQARNWLPGPCYRQQRVSTTLSQNNNSNFAWTGATKYHLNGRDSLVNPGVAMATNKDDEDRFFPSSGILMFGKQGAGKDNVDYSNVMLTSEEEIKTTNPVATEQYGVVADNLQQQNTAPTVGAVNSQGALPGMVWQNRDVYLQGPIWAKIPHTDGNFHPSPLMGGFGLKHPPPQILIKNTPVPADPPTAFNQAKLNSFIAQYSTGQVSVEIEWELQKENSKRWNPEIQYTSNYYKSTNADFAVNTEGVYSEPRPIGTRYLTRNL

SEQ ID NO: 263 - DNA, 2217 bp, Artificial Sequence
  Description of Artificial Sequence: Synthetic polynucleotide
atggctgccgatggttatcttccagattggctcgaggacaacctctctgagggcattcgcgagtggtgggacctgaaacctggagccccgaaacccaaagccaaccagcaaaagcaggacgacggccggggtctggtgcttcctggctacaagtacctcggacccttcaacggactcgacaagggggagcccgtcaacgcggcggacgcagcggccctcgagcacgacaaggcctacgaccagcagctcaaagcgggtgacaatccgtacctgcggtataatcacgccgacgccgagtttcaggagcgtctgcaagaagatacgtcttttgggggcaacctcgggcgagcagtcttccaggccaagaagcgggttctcgaacctctcggtctggttgaggaaggcgctaagacggctcctggaaagaagagaccggtagagccgtcaccacagcgttcccccgactcctccacgggcatcggcaagaaaggccagcagcccgccagaaagagactcaatttcggtcggactggcgactcagagtcagtccccgaccctcaacctatcggagaacctccagcagcgccctctagtgtgggatctggtacaatggctgcaggcggtggcgcaccaatggcagacaataacgaaggtgccgacggagtgggtagttcctcgggaaattggcattgcgattccacatggctgggcgacagagttatcaccaccagcacccgaacctgggccctgcccacctacaacaaccacctctacaagcaaatctccaacgggacctcgggaggcagcaccaacgacaacacctactttggctacagcaccccctgggggtatcttgactttaacagattccactgccacttctcaccacgtgactggcagcgactcatcaacaacaactggggattccggcccaagagactcagcttcaagctcttcaacatccaggtcaaagaggtcacgcagaatgaaggcaccaagaccatcgccaataacctcgccagcaccatccaggtgtttacggactcggaataccagccgccgtacgtcctcggctctgcccaccagggctgcctgcctccgttcccggcggacgtcttcatgattcctcagtacggctacctgactctcaacaacggtagtcaggccgtgggacgttcctccttctactgcctggagtacttcccctctcagatgctgagaacgggcaacaacttttccttcagctacactttcgaggacgtgcctttccacagcagctacgcgcacagccagagtttggacaggctgatgaatcctctcatcgaccagtacctgtactacctgtcaagaacccagtctacgggaggcacagcgggaacccagcagttgctgttttctcgggccgggcctagcaacatgtcggctcaggccagaaactggctgcctggaccctgctacagacagcagcgcgtctccacgacactgtcgcaaaacaacaacagcaactttgcctggactggtgccaccaagtatcatctgaacggcagagactctctggtgaatccgggcgtcgccatggcaaccaacaaggacgacgaggaccgcttcttcccatccagcggcatcctcatgtttggcaagcagggagctggaaaagacaacgtggactatagcaacgtgatgctaaccagcgaggaagaaatcaagaccaccaaccccgtggccacagaacagtatggcgtggtggctgataacctacagcagcaaaacaccgctcctactgtgggggccgtcaacagccagggagccttacctggcatggtctggcagaaccgggacgtgtacctgcagggtcctatttgggccaagattcctcacacagatggcaactttcacccgtctcctttaatgggcggctttggacttaaacatccgcctcctcagatcctcatcaaaaacactcctgttcctgcggatcctccaacagcgttcaaccaggccaagctgaattctttcatcgcgcagtacagcaccggacaagtcagcgtggagatcgagtgggagctgcagaaggagaacagcaagcgctggaacccagagattcagtatacttccaactactacaaatctacaaatgcggactttgctgttaatactgagggtgtttactctgagcctcgccccattggcactcgttacctcacccgtaatctgtaa

SEQ ID NO: 264 - DNA, 2208 bp, Artificial Sequence
  Description of Artificial Sequence: Synthetic polynucleotide
atggctgccgatggttatcttccagattggctcgaggacactctctctgaaggaataagacagtggtggaagctcaaacctggcccaccaccaccaaagcccgcagagcggcataaggacgacagcaggggtcttgtgcttcctgggtacaagtacctcggacccttcaacggactcgacaagggggagccggtcaacgaggcagacgccgcggccctcgagcacgacaaggcctacgaccggcagctcgacagcggagacaacccgtacctcaagtacaaccacgccgacgcagagtttcaggagcgccttaaagaagatacgtcttttgggggcaacctcggacgagcagtcttccaggcgaaaaagagggttcttgaacctctgggcctggttgaggagcctgttaagacggctccgggaaaaaagaggccggtagagcactctcctgtggagccagactcctcctcgggaaccggaaaagcgggccagcagcctgcaagaaaaagattaaattttggtcagactggagacgcagactccgtacctgacccccagcctctcggacagccaccagcagccccctctggtctgggatctactacaatggctacaggcagtggcgcaccaatggcagacaataacgagggtgccgatggagtgggtaattcctcaggaaattggcattgcgattcccaatggctgggcgacagagtcatcaccaccagcacccgaacctgggccctgcccacatacaacaaccacctctacaagcaaatctccagccaatcaggagccagcaacgacaaccactactttggctacagcaccccctgggggtattttgacttcaacagattccactgccacttttcaccacgtgactggcaaagactcgtcaacaacaaccggggattccggcccaaaagactcaacttcaagctctttaatattcaagtcaaagaggtcacgcagaatgacggtacgacgacgattgccaataaccttaccagcacggttcaggtgtttactgactcggagtaccagctcccgtacgtcctgggctcggcgcatcaaggatgcctcccgccgtttccagcggacgtcttcatggtcccacagtatggatacctcaccctgaacaacgggagtcaggcggtaggacgctcttccttttactgcctggagtactttccttctcagatgctgcgtactggaaacaactttcagttcagctacacttttgaagacgtgcctttccacagcagctacgctcacagccagagtctggatcggctgatgaatcctctgatcgaccagtacctgtattatctgaacaagacacaaacaaatagtggaactcttcagcagtctcggctactgtttagccaagctggaccaaccaacatgtctcttcaagctaaaaactggctgcctggaccttgctacagacagcagcgtctgtcaaaacaggcaaacgacaacaacaacagcaactttccctggactgcagctacaaagtatcatctaaatggccgggactcgttggttaatccaggaccagctatggccagtcacaaggatgacgaagaaaagtttttccccatgcatggaaccctgatatttggtaaacaaggaacaaatgccaacgacgcggatttggaaaatgtcatgattacagatgaagaagaaatcagggccaccaatcccgtggctacggagcagtacgggactgtgtcaaataatttgcaaaactcaaacactggtccaactactggaactgtcaatcaccaaggagcgttacctggtatggtgtggcaggatcgagacgtgtacctgcagggacccatttgggccaagattcctcacaccgatggacactttcatccttctccactgatgggaggttttggactcaaacacccgcctcctcagatcatgatcaaaaacactcccgttccagccaatcctcccacaaacttcagttctgccaagtttgcttctttcatcacacagtattccacgggacaggtcagcgtggagatcgagtgggagctgcagaaggagaacagcaaacgctggaatcccgaaattcagtacacttccaactacaacaagtctgttaatgtggactttactgtggacactaatggtgtgtattcagagcctcgccccattggcaccagatacctgactcgtaatctgtaa

SEQ ID NO: 265 - protein, 735 aa, Artificial Sequence
  Description of Artificial Sequence: Synthetic polypeptide
MAADGYLPDWLEDTLSEGIRQWWKLKPGPPPPKPAERHKDDSRGLVLPGYKYLGPFNGLDKGEPVNEADAAALEHDKAYDRQLDSGDNPYLKYNHADAEFQERLKEDTSFGGNLGRAVFQAKKRVLEPLGLVEEPVKTAPGKKRPVEHSPVEPDSSSGTGKAGQQPARKRLNFGQTGDADSVPDPQPLGQPPAAPSGLGSTTMATGSGAPMADNNEGADGVGNSSGNWHCDSQWLGDRVITTSTRTWALPTYNNHLYKQISSQSGASNDNHYFGYSTPWGYFDFNRFHCHFSPRDWQRLVNNNRGFRPKRLNFKLFNIQVKEVTQNDGTTTIANNLTSTVQVFTDSEYQLPYVLGSAHQGCLPPFPADVFMVPQYGYLTLNNGSQAVGRSSFYCLEYFPSQMLRTGNNFQFSYTFEDVPFHSSYAHSQSLDRLMNPLIDQYLYYLNKTQTNSGTLQQSRLLFSQAGPTNMSLQAKNWLPGPCYRQQRLSKQANDNNNSNFPWTAATKYHLNGRDSLVNPGPAMASHKDDEEKFFPMHGTLIFGKQGTNANDADLENVMITDEEEIRATNPVATEQYGTVSNNLQNSNTGPTTGTVNHQGALPGMVWQDRDVYLQGPIWAKIPHTDGHFHPSPLMGGFGLKHPPPQIMIKNTPVPANPPTNFSSAKFASFITQYSTGQVSVEIEWELQKENSKRWNPEIQYTSNYNKSVNVDFTVDTNGVYSEPRPIGTRYLTRNL

SEQ ID NO: 266 - protein, 738 aa, Artificial Sequence
  Description of Artificial Sequence: Synthetic polypeptide
MAADGYLPDWLEDNLSEGIREWWDLKPGAPKPKANQQKQDDGRGLVLPGYKYLGPFNGLDKGEPVNAADAAALEHDKAYDQQLKAGDNPYLRYNHADAEFQERLQEDTSFGGNLGRAVFQAKKRVLEPLGLVEEAAKTAPGKKRPVEPSPQRSPDSSTGIGKKGQQPAKKRLSFGQTGDSESVPDPQPIGEPPAGPSGLGSGTMAAGGGAPMADNNEGADGVGSSSGNWHCDSTWLGDRVITTSTRTWALPTYNNHLYKQISNGTSGGSTNDNTYFGYSTPWGYFDFNRFHCHFSPRDWQRLINNNWGFRPKRLSFKLFNIQVKEVTQNEGTKTIANNLTSTIQVFTDSEYQLPYVLGSAHQGCLPPFPADVFMIPQYGYLTLNNGSQAVGRSSFYCLEYFPSQMLRTGNNSEFSYTFEDVPFHSSYAHSQSLDRLMNPLIDQYLYYLSRTQSTGGTQGTQQLLFSQAGPANMSAQAKNWLPGPCYRQQRVSTTLSQNNNSNFAWTGATKYHLNGRDSLVNPGVAMATHKDDEERFFPSSGVLMFGKQGAGRDNVDYSSVMLTSEEEIKTTNPVATEQYGVVADNLQQTNTGPIVGNVNSQGALPGMVWQNRDVYLQGPIWAKIPHTDGNFHPSPLMGGFGLKHPPPQILIKNTPVPADPPTTFSQAKLASFITQYSTGQVSVEIEWELQKENSKRWNPEIQYTSNYYKSTNVDFAVNTEGTYSEPRPIGTRYLTRNL

SEQ ID NO: 267 - DNA, 2217 bp, Artificial Sequence
  Description of Artificial Sequence: Synthetic polynucleotide
atggctgctgacggttatcttccagattggctcgaggacaacctctctgagggcattcgcgagtggtgggacctgaaacctggagcccccaagcccaaggccaaccagcagaagcaggacgacggccggggtctggtgcttcctggctacaagtacctcggacccttcaacggactcgacaagggggagcccgtcaacgcggcggacgcagcggccctcgagcacgacaaggcctacgaccagcagctcaaagcgggtgacaatccgtacctgcggtataaccacgccgacgccgagtttcaggagcgtctgcaagaagatacgtcttttgggggcaacctcgggcgagcagtcttccaggccaagaagcgggttctcgaacctctcggtctggttgaggaagctgctaagacggctcctggaaagaagagaccggtagaaccgtcacctcagcgttcccccgactcctccacgggcatcggcaagaaaggccagcagcccgctaaaaagagactgagctttggtcagactggcgactcagagtcagtccccgaccctcaaccaatcggagaaccaccagcaggcccctctggtctgggatctggtacaatggctgcaggcggtggcgctccaatggcagacaataacgaaggcgccgacggagtgggtagttcctcaggaaattggcattgcgattccacatggctgggcgacagagtcatcaccaccagcacccgaacctgggccctgcccacctacaacaaccacctctacaagcaaatatccaatgggacatcgggaggaagcaccaacgacaacacctacttcggctacagcaccccctgggggtattttgacttcaacagattccactgccacttctcaccacgtgactggcagcgactcatcaacaacaactggggattccggccaaaaagactcagcttcaagctcttcaacatccaggtcaaggaggtcacgcagaatgaaggcaccaagaccatcgccaataaccttaccagcacgattcaggtatttacggactcggaataccagctgccgtacgtcctcggctccgcgcaccagggctgcctgcctccgttcccggcggacgtcttcatgattccccagtacggctaccttacactgaacaatggaagtcaagccgtaggccgttcctccttctactgcctggaatattttccatctcaaatgctgcgaactggaaacaattctgaattcagctacaccttcgaggacgtgcctttccacagcagctacgcacacagccagagcttggaccgactgatgaatcctctcatcgaccagtacctgtactacttatccagaactcagtccacaggaggaactcaaggtacccagcaattgttattttctcaagctgggcctgcaaacatgtcggctcaggctaagaactggctacctggaccttgctaccggcagcagcgagtctctacgacactgtcgcaaaacaacaacagcaactttgcttggactggtgccaccaaatatcacctgaacggaagagactctttggtaaatcccggtgtcgccatggcaacccacaaggacgacgaggaacgcttcttcccgtcgagtggagtcctgatgtttggaaaacagggtgctggaagagacaatgtggactacagcagcgttatgctaaccagcgaagaagaaattaaaaccactaaccctgtagccacagaacaatacggtgtggtggctgacaacttgcagcaaaccaatacagggcctattgtgggaaatgtcaacagccaaggagccttacctggcatggtctggcagaaccgagacgtgtacctgcagggtcccatctgggccaagattcctcacacggacggcaacttccacccttcaccgctaatgggaggatttggactgaagcacccacctcctcagatcctgatcaagaacacgccggtacctgcggatcctccaacaacgttcagccaggcgaaattggcttccttcattacgcagtacagcaccggacaggtcagcgtggaaatcgagtgggagctgcagaaggagaacagcaaacgctggaacccagagattcagtacacttcaaactactacaaatctacaaatgtggactttgctgtcaatacagagggaacttattctgagcctcgccccattggtactcgttacctcacccgtaatctgtaa

SEQ ID NO: 268 - protein, 738 aa, Artificial Sequence
  Description of Artificial Sequence: Synthetic polypeptide
MAADGYLPDWLEDNLSEGIREWWDLKPGAPKPKANQQKQDDGRGLVLPGYKYLGPFNGLDKGEPVNAADAAALEHDKAYDQQLKAGDNPYLRYNHADAEFQERLQEDTSFGGNLGRAVFQAKKRVLEPLGPVEEAAKTAPGKKRPVEPPPQRSPDSSTGIGKKGQQPAKKRLNFGQTGDSESVPDPQPIGEPPAGPSGLGSGTMAAGGGAPMADNNEGADGVGSSSGNWHCDSTWLGDRVITTSTRTWALPTYNNHLYKQISNGTSGGSTNDNTYFGYSTPWGYFDFNRFHCHFSPRDWQRLINNNWGFRPKRLSFKLFNIQVKEVTQNEGTKTVANNLTSTIQVFTDSEYQLPYVLGSAHQGCLPPFPADVFMIPQYGYLTLNNGSQAVGRSSFYCLEYFPSQMLRTGNNFEFSYTFEDVPFHSSYAHSQSLDRLMNPLIDQYLYYLSRTQSTGGTQGTQQLLFSQAGPANMSAQAKNWLPGPCYRQQRVSTTLSQNNNSNFAWTGATKYHLNGRDSLVNPGVAMATHKDDEERFFPSSGVLMFGKQGAGRDNVDYSSVMLTSEEEIKTTNPVATEQYGVVADNLQQTNTGPIVGNVNSQGALPGMVWQNRDVYLQGPIWAKIPHTDGNFHPSPLMGGFGLKHPPPQILIKNTPVPADPPTTFSQAKLASFITQYSTGQVSVEIEWELQKENSKRWNPEIQYTSNYYKSTNVDFAVNTEGTYSEPRPIGTRYLTRNL

SEQ ID NO: 269 - DNA, 2217 bp, Artificial Sequence
  Description of Artificial Sequence: Synthetic polynucleotide
atggctgctgacggttatcttccagattggctcgaggacaacctctctgagggcattcgcgagtggtgggacctgaaacctggagcccccaagcccaaggccaaccagcagaagcaggacgacggccggggtctggtgcttcctggctacaagtacctcggacccttcaacggactcgacaagggggagcccgtcaacgcggcggacgcagcggccctcgagcacgacaaggcctacgaccagcagctcaaagcgggtgacaatccgtacctgcggtataaccacgccgacgccgagtttcaggagcgtctacaagaagatacgtcttttgggggcaacctcgggcgagcagtcttccaggccaagaagcgggttctcgaacctctcggtccggttgaggaagctgctaagacggctcctggaaagaagagaccggtagaaccgccacctcagcgttcccccgactcctccacgggcatcggcaagaaaggccagcagcccgctaaaaagagactgaactttggtcagactggcgactcagagtcagtccccgaccctcaaccaatcggagaaccaccagcaggcccctctggtctgggatctggtacaatggctgcaggcggtggcgctccaatggcagacaataacgaaggcgccgacggagtgggtagttcctcaggaaattggcattgcgattccacatggctgggcgacagagtcatcaccaccagcacccgaacctgggccctgcccacctacaacaaccacctctacaagcaaatatccaatgggacatcgggaggaagcaccaacgacaacacctacttcggctacagcaccccctgggggtattttgacttcaacagattccactgccacttctcaccacgtgactggcagcgactcatcaacaacaactggggattccggccaaaaagactcagcttcaagctcttcaacatccaggtcaaggaggtcacgcagaatgaaggcaccaagaccgtcgccaataaccttaccagcacgattcaggtatttacggactcggaataccagctgccgtacgtcctcggctccgcgcaccagggctgcctgcctccgttcccggcggacgtcttcatgattccccagtacggctaccttacactgaacaatggaagtcaagccgtaggccgttcctccttctactgcctggaatattttccatctcaaatgctgcgaactggaaacaattttgaattcagctacaccttcgaggacgtgcctttccacagcagctacgcacacagccagagcttggaccgactgatgaatcctctcatcgaccagtacctgtactacttatccagaactcagtccacaggaggaactcaaggtacccagcaattgttattttctcaagctgggcctgcaaacatgtcggctcaggctaagaactggctacctggaccttgctaccggcagcagcgagtctctacgacactgtcgcaaaacaacaacagcaactttgcttggactggtgccaccaaatatcacctgaacggaagagactctttggtaaatcccggtgtcgccatggcaacccacaaggacgacgaggaacgcttcttcccgtcgagtggagtcctgatgtttggaaaacagggtgctggaagagacaatgtggactacagcagcgttatgctaaccagcgaagaagaaattaaaaccactaaccctgtagccacagaacaatacggtgtggtggctgacaacttgcagcaaaccaatacagggcctattgtgggaaatgtcaacagccaaggagccttacctggcatggtctggcagaaccgagacgtgtacctgcagggtcccatctgggccaagattcctcacacggacggcaacttccacccttcaccgctaatgggaggatttggactgaagcacccacctcctcagatcctgatcaagaacacgccggtacctgcggatcctccaacaacgttcagccaggcgaaattggcttccttcattacgcagtacagcaccggacaggtcagcgtggaaatcgagtgggagctgcagaaggagaacagcaaacgttggaacccagagattcagtacacttcaaactactacaaatctacaaatgtggactttgctgtcaatacagagggaacttattctgagcctcgccccattggtactcgttacctcacccgtaatctgtaa

SEQ ID NO: 270 - protein, 738 aa, Artificial Sequence
  Description of Artificial Sequence: Synthetic polypeptide
MAADGYLPDWLEDNLSEGIREWWDLKPGAPKPKANQQKQDDGRGLVLPGYKYLGPFNGLDKGEPVNAADAAALEHDKAYDQQLKAGDNPYLRYNHADAEFQERLQEDTSFGGNLGRAVFQAKKRVLEPLGLVEEAAKTAPGKKRPVEPSPQRSPDSSTGIGKKGQQPAKKRLNFGQTGDSESVPDPQPIGEPPAGPSGLGSGTMAAGGGAPMADNNEGADGVGSSSGNWHCDSTWLGDRVITTSTRTWALPTYNNHLYKQISNGTSGGSTNDNTYFGYSTPWGYFDFNRFHCHFSPRDWQRLINNNWGFRPKRLSFKLFNIQVKEVTQNEGTKTIANNLTSTIQVFTDSEYQLPYVLGSAHQGCLPPFPADVFMIPQYGYLTLNNGSQAVGRSSFYCLEYFPSQMLRTGNNFEFSYTFEDVPFHSSYAHSQSLDRLMNPLIDQYLYYLSRTQSTGGTQGTQQLLFSQAGPANMSAQAKNWLPGPCYRQQRVSTTLSQSNNSNFAWTGATKYHLNGRDSLVNPGVAMATHKDDEERFFPSSGVLMFGKQGAGRDNVDYSSVMLTSEEEIKTTNPVATEQYGVVADNLQQTNTGPIVGNVNSQGALPGMVWQNRDVYLQGPIWAKIPHTDGNFHPSPLMGGLGLKHPPPQILIKNTPVPADPPTTFSQAKLASFITQYSTGQVSVEIEWELQKENSKRWNPEIQYTSNYYKSTNVDFAVNTEGTYSEPRPIGTRYLTRNL

SEQ ID NO: 271 - DNA, 2217 bp, Artificial Sequence
  Description of Artificial Sequence: Synthetic polynucleotide
atggctgctgacggttatcttccagattggctcgaggacaacctctctgagggcattcgcgagtggtgggacctgaaacctggagcccccaagcccaaggccaaccagcagaagcaggacgacggccggggtctggtgcttcctggctacaagtacctcggacccttcaacggactcgacaagggggagcccgtcaacgcggcggacgcagcggccctcgagcacgacaaggcctacgaccagcagctcaaagcgggtgacaatccgtacctgcggtataaccacgccgacgccgagtttcaggagcgtctgcaagaagatacgtcttttgggggcaacctcgggcgagcagtcttccaggccaagaagcgggttctcgaacctctcggtctggttgaggaagcggctaagacggctcctggaaagaagagaccggtagaaccgtcacctcagcgttcccccgactcctccacgggcatcggcaagaaaggccagcagcccgctaaaaagagactgaactttggtcagactggcgactcagagtcagtccccgaccctcaaccaatcggagaaccaccagcaggcccctctggtctgggatctggtacaatggctgcaggcggtggcgctccaatggcagacaataacgaaggcgccgacggagtgggtagttcctcaggaaattggcattgcgattccacatggctgggcgacagagtcatcaccaccagcacccgaacctgggccctgcccacctacaacaaccacctctacaagcaaatatccaatgggacatcgggaggaagcaccaacgacaacacctacttcggctacagcaccccctgggggtattttgacttcaacagattccactgccacttctcaccacgtgactggcagcgactcatcaacaacaactggggattccggccaaaaagactcagcttcaagctcttcaacatccaggtcaaggaggtcacgcagaatgaaggcaccaagaccatcgccaataaccttaccagcacgattcaggtatttacggactcggaataccagctgccgtacgtcctcggctccgcgcaccagggctgcctgcctccgttcccggcggacgtcttcatgattccccagtacggctaccttacactgaacaatggaagtcaagccgtaggccgttcctccttctactgcctggaatattttccatctcaaatgctgcgaactggaaacaattttgaattcagctacaccttcgaggacgtgcctttccacagcagctacgcacacagccagagcttggaccgactgatgaatcctctcatcgaccagtacctgtactacttatccagaactcagtccacaggaggaactcaaggtacccagcaattgttattttctcaagctgggcctgcaaacatgtcggctcaggctaagaactggctacctggaccttgctaccggcagcagcgagtctctacgacactgtcgcaaagcaacaacagcaactttgcttggactggtgccaccaaatatcacctgaacggaagagactctttggtaaatcccggtgtcgccatggcaacccacaaggacgacgaggaacgcttcttcccgtcgagtggagtcctgatgtttggaaaacagggtgctggaagagacaatgtggactacagcagcgttatgctaaccagcgaagaagaaattaaaaccactaaccctgtagccacagaacaatacggtgtggtggctgacaacttgcagcaaaccaatacagggcctattgtgggaaatgtcaacagccaaggagccttacctggcatggtctggcagaaccgagacgtgtacctgcagggtcccatctgggccaagattcctcacacggacggcaacttccacccttcaccgctaatgggaggacttggactgaagcacccacctcctcagatcctgatcaagaacacgccggtacctgcggatcctccaacaacgttcagccaggcgaaattggcttccttcattacgcagtacagcaccggacaggtcagcgtggaaatcgagtgggagctgcagaaggagaacagcaaacgctggaacccagagattcagtacacttcaaactactacaaatctacaaatgtggactttgctgtcaatacagagggaacttattctgagcctcgccccattggtactcgttacctcacccgtaatctgtaa

SEQ ID NO: 272 - protein, 737 aa, Artificial Sequence
  Description of Artificial Sequence: Synthetic polypeptide
MAADGYLPDWLEDNLSEGIREWWDLKPGAPKPKANQQKQDDGRGLVLPGYKYLGPFNGLDKGEPVNAADAAALEHDKAYDQQLKAGDNPYPRYNHADAEFQERLQEDTPFGGNLGRAVFQAKKRVLEPLGLVEEAAKTAPGKKRPVEPSPQRSPDSSTGIGKKGQQPAKKRLNFGQTGDSESVPDPQPIGEPPAGPSGLGSGTMAAGGGAPMADNNEGADGVGNASGNWHCDSTWLGDRVITTSTRTWALPTYNNHLYKQISSASTGASNDNHYFGYSTPWGYFDFNRFHCHFSPRDWQRLINNNWGFRPKRLNFKLFNIQVKEVTTNDGVTTIANNLTSTVQVFSDSEYQLPYVLGSAHQGCLPPFPADVFMIPQYGYLTLNNGSQAVGRSSFYCLEYFPSQMLRTGNNFTFSYTFEEVPLHSSYAHSQSLDRLMNPLIVQYLYYLNRTQNQSGSAQNKDLLFSRGSPAGMSVQPKNWLPGPCYRQQRVSKTKTDNNNSNFTWTGASKYNLNGRESIINPGTAMASHKDDEDKFFPMSGVMIFGKESAGASNTALDNVMITDEEEIKATNPVATERFGTVAVNFQSSSTDPATGDVHAMGALPGMVWQDRDVYLQGPIWAKIPHTDGHFHPSPLMGGFGLKNPPPQILIKNTPVPANPPAEFSATKFASFITQYSTGQVSVEIEWELQKENSKRWNPEVQYTSNYAKSASVDFTVDNNGLYTEPRPIGTRYLTRPL

SEQ ID NO: 273 - protein, 737 aa, Artificial Sequence
  Description of Artificial Sequence: Synthetic polypeptide
MAADGYLPDWLEDNLSEGIREWWDLKPGAPKPKANQQKQDDGRGLVLPGYKYLGPFNGLDKGEPVNAADAAALEHDKAYDQQLKAGDNPYPRYNHADAEFQERLQEDTSFGGNLGRAVFQAKKRVLEPLGLVEEAAKTAPGKKRPVEPSPQRSPDSSTGIGKKGQQPAKKRLNFGQTGDSESVPDPQPIGEPPAGPSGLGSGTMAAGGGAPMADNNEGADGVGNASGNWHCDSTWLGDRVITTSTRTWALPTYNNHLYKQISSASTGASNDNHYFGYSTPWGYFDFNRFHCHFSPRDWQRLINNNWGFRPKRLNFKLFNIQVKEVTTNDGVTTIANNLTSTVQVFSDSEYQLPYVLGSAHQGCLPPFPADVFMIPQYGYLTLNNGSQAVGRSSFYCLEYFPSQMLRTGNNFTFSYTFEEVPLHSSYAHSQSLDRLMNPLIDQYLYYLNRTQNQSGSAQNKDLLFSRGSPAGMSVQPKNWLPGPCYRQQRVSKTKTDNNNSNFTWTGASKYNLNGRESIINPGTAMASHKDDEDKFFPMSGVMIFGKESAGASNTALDNVMITDEEEIKATNPVATERFGTVAVNFQSSSTDPATGDVHAMGALPGMVWQDRDVYLQGPIWAKIPHTDGHFHPSPLMGGFGLKNPPPQILIKNTPVPANPPAEFSATKFASFITQYSTGQVSVEIEWELQKENSKRWNPEVQYTSNYAKSASVDFTVDNNGLYTEPRPIGTRYLTRPL

SEQ ID NO: 274 - DNA, 2214 bp, Artificial Sequence
  Description of Artificial Sequence: Synthetic polynucleotide
atggctgctgacggttatcttccagattggctcgaggacaacctctctgagggcattcgcgagtggtgggacctgaaacctggagcccccaagcccaaggccaaccagcagaagcaggacgacggccggggtctggtgcttcctggctacaagtacctcggacccttcaacggactcgacaagggggagcccgtcaacgcggcggacgcagcggccctcgagcacgacaaggcctacgaccagcagctcaaagcgggtgacaatccgtacccgcggtataaccacgccgacgccgagtttcaggagcgtctgcaagaagatacgccttttgggggcaacctcgggcgagcagtcttccaggccaagaagcgggttctcgaacctctcggtctggttgaggaagctgctaagacggctcctggaaagaagagaccggtagaaccgtcacctcagcgttcccccgactcctccacgggcatcggcaagaaaggccagcagcccgctaaaaagagactgaactttggtcagactggcgactcagagtcagtccccgaccctcaaccaatcggagaaccaccagcaggcccctctggtctgggatctggtacaatggctgcaggcggtggcgctccaatggcagacaataacgaaggcgccgacggagtgggtaatgcctcaggaaattggcattgcgattccacatggctgggcgacagagtcatcaccaccagcacccgcacctgggccttgcccacctacaataaccacctctacaagcaaatctccagtgcttcaacgggggccagcaacgacaaccactacttcggctacagcaccccctgggggtattttgatttcaacagattccactgccacttttcaccacgtgactggcagcgactcatcaacaacaattggggattccggcccaagagactcaacttcaaactcttcaacatccaagtcaaggaggtcacgacgaatgatggcgtcacaaccatcgctaataaccttaccagcacggttcaagtcttctcggactcggagtaccagcttccgtacgtcctcggctctgcgcaccagggctgcctccctccgttcccggcggacgtgttcatgattccgcaatacggctacctgacgctcaacaatggcagccaagccgtgggacgttcatccttttactgcctggaatatttcccttctcagatgctgagaacgggcaacaactttaccttcagctacacctttgaggaagtgcctctccacagcagctacgcgcacagccagagcctggaccggctgatgaatcctctcatcgtccaatacctgtattacctgaacagaactcaaaatcagtccggaagtgcccaaaacaaggacttgctgttcagccgtgggtctccagctggcatgtctgttcagcccaaaaactggctacctggaccctgttatcggcagcagcgcgtttctaaaacaaaaacagacaacaacaacagcaattttacctggactggtgcttcaaaatataacctcaatgggcgtgaatccatcatcaaccctggcactgctatggcctcacacaaagacgacgaagacaagttctttcccatgagcggtgtcatgatttttggaaaagagagcgccggagcttcaaacactgcattggacaatgtcatgattacagacgaagaggaaattaaagccactaaccctgtggccaccgaaagatttgggaccgtggcagtcaatttccagagcagcagcacagaccctgcgaccggagatgtgcatgctatgggagcattacctggcatggtgtggcaagatagagacgtgtacctgcagggtcccatttgggccaaaattcctcacacagatggacactttcacccgtctcctcttatgggcggctttggactcaagaacccgcctcctcagatcctcatcaaaaacacgcctgttcctgcgaatcctccggcggagttttcagctacaaagtttgcttcattcatcacccaatactccacaggacaagtgagtgtggaaattgaatgggagctgcagaaagaaaacagcaagcgctggaatcccgaagtgcagtacacatccaattatgcaaaatctgccagcgttgattttactgtggacaacaatggactttatactgagcctcgccccattggcacccgttaccttacccgtcccctgtaa

SEQ ID NO: 275 - protein, 736 aa, Artificial Sequence
  Description of Artificial Sequence: Synthetic polypeptide
MAADGYLPDWLEDTLSEGIRQWWKLRPGPPPPKPAERHKDDSRGLVLPGYKYLGPFNGLDKGEPVNEADAAALEHDKAYDRQLDSGDNPYLKYNHADAEFQERLKEDTSFGGNLGRAVFQAKKRVLEPLGLVEEGAETAPGKKRPVEQSPQGPDSSSGIGKTGQQPAKKRLNFGQTGDSESVPDPQPLGEPPATPAAVGPTTMASGGGAPMADNNEGADGVGNASGNWHCDSTWLGDRVITTSTRTWALPTYNNHLYKQISSASTGASNDNHYFGYSTPWGYFDFNRFHCHFSPRDWQRLINNNWGFRPKRLNFKLFNIQVKEVTTNDGVTTIANNLTSTVQVFSDSEYQLPYVLGSAHQGCLPPFPADVFMIPQYGYLTLNNGSQAVGRSSFYCLEYFPSQMLRTGNNFTFSYTFEEVPFHSSYAHSQSLDRLMNPLIDQYLYYPNRTQNQSGSAQNKDLLFSRGSPAGMSVQPKNWLPGPCYRQQRVSKTKTDNNNSNFTWTGASKYNLNGRESIINPGTAMASHKDDEDKFFPMSGVMIFGKESAGASNTALDNVMITDEEEIKATNPVATERFGTVAVNFQSSSTDPATGDVHAMGALPGMVWQGRDVYLQGPIWAKIPHTDGHFHPSPLMGGFGLKNPPPQILIKNTPVPANPPAEFSATKFASFITQYSTGQVSVEIEWELQKENSKRWNPEVQYTSNYAKSANVDFTVDNNGLYTEPRPIGTRYLTRPL

SEQ ID NO: 276 - DNA, 2211 bp, Artificial Sequence
  Description of Artificial Sequence: Synthetic polynucleotide
atggctgccgatggttatcttccagattggctcgaggacactctctctgaaggaataagacagtggtggaagctcagacctggcccaccaccaccaaagcccgcagagcggcataaggacgacagcaggggtcttgtgcttcctgggtacaagtacctcggacccttcaacggactcgacaagggagagccggtcaacgaggcagacgccgcggccctcgagcacgacaaagcctacgaccggcagctcgacagcggagacaacccgtacctcaagtacaaccacgccgacgcggagtttcaggagcgccttaaagaagatacgtcttttgggggcaacctcgggcgagcagtcttccaggccaagaagcgggttctcgaacctctcggtctggttgaggaaggcgctgagacggctcctggaaagaaacgtccggtagagcagtcgccacaagggccagactcctcctcgggcatcggcaagacaggccagcagcccgctaaaaagagactcaattttggtcagactggcgactcagagtcagtccccgatccacaacctctcggagaacctccagcaacccccgctgctgtgggacctactacaatggcttcaggcggtggcgcaccaatggcagacaataacgaaggcgccgacggagtgggtaatgcctcaggaaattggcattgcgattccacatggctgggcgacagagtcatcaccaccagcacccgcacctgggccttgcccacctacaataaccacctctacaagcaaatctccagtgcttcaacgggggccagcaacgacaaccactacttcggctacagcaccccctgggggtattttgatttcaacagattccactgccacttttcaccacgtgactggcagcgactcatcaacaacaattggggattccggcccaagagactcaacttcaaactcttcaacatccaagtcaaggaggtcacgacgaatgatggcgtcacaaccatcgctaataaccttaccagcacggttcaagtcttctcggactcggagtaccagcttccgtacgtcctcggctctgcgcaccagggctgcctccctccgttcccggcggacgtgttcatgattccgcaatacggctacctgacgctcaacaatggcagccaagccgtgggacgttcatccttttactgcctggaatatttcccttctcagatgctgagaacgggcaacaactttaccttcagctacacctttgaggaagtgcctttccacagcagctacgcgcacagccagagcctggaccggctgatgaatcctctcatcgaccaatacctgtattacccgaacagaactcaaaatcagtccggaagtgcccaaaacaaggacttgctgtttagccgtgggtctccagctggcatgtctgttcagcccaaaaactggctacctggaccctgttatcggcagcagcgcgtttctaaaacaaaaacagacaacaacaacagcaattttacctggactggtgcttcaaaatataacctcaatgggcgtgaatccatcatcaaccctggcactgctatggcctcacacaaagacgacgaagacaagttctttcccatgagcggtgtcatgatttttggaaaagagagcgccggagcttcaaacactgcattggacaatgtcatgattacagacgaagaggaaattaaagccactaaccctgtggccaccgaaagatttgggaccgtggcagtcaatttccagagcagcagcacagaccctgcgaccggagatgtgcatgctatgggagcattacctggcatggtgtggcaaggtagagacgtgtacctgcagggtcccatttgggccaaaattcctcacacagatggacactttcacccgtctcctcttatgggcggctttggactcaagaacccgcctcctcagatcctcatcaaaaacacgcctgttcctgcgaatcctccggcggagttttcagctacaaagtttgcttcattcatcacccaatactccacaggacaagtgagtgtggaaattgaatgggagctgcagaaagaaaacagcaagcgctggaatcccgaagtgcagtacacatccaattatgcaaaatctgccaacgttgattttactgtggacaacaatggactttatactgagcctcgccccattggcacccgttaccttacccgtcccctgtaa

SEQ ID NO: 277 - protein, 736 aa, Artificial Sequence
  Description of Artificial Sequence: Synthetic polypeptide
MAADGYLPDWLEDTLSEGIRQWWKLRPGPPPPKPAERHKDDSRGLVLPGYKYLGPFNGLDKGEPVNEADAAALEHDKAYDRQLDSGDNPYLKYNHADAEFQERLKEDTSFGGNLGRAVFQAKKRVLEPLGLVEEGAKTAPGKKRPVEQSPQGPDSSSGIGKTGQQPAKKRLNFGQTGDSESVPDPQPLGEPPATPAAVGPTTMASGGGAPMADNNEGADGVGNASGNWHCDSTWLGDRVITTSTRTWALPTYNNHLYKQISSASTGASNDNHYFGYSTPWGYFDFNRFHCHFSPRDWQRLINNNWGFRPKRLNFKLFNIQVKEVTTNDGVTTIANNLTSTVQVFSDSEYQLPYVLGSAHQGCLPPFPADVFMIPQYGYLTLNNGSQAVGRSSFYCLEYFPSQMLRTGNNFTFSYTFEEVPFHSSYAHSQSLDRLMNPLIDQYLYYPNRTQNQSGSAQNKDLLFSRGSPAGMSVQPKNWLPGPCYRQQRVSKTKTDNNNSNFTWTGASKYNLNGRESIINPGTAMASHKDDEDKFFPMSGVMIFGKESAGASNTALDNVMITDEEEIKATNPVATERFGTVAVNFQSSSTDPATGDVHAMGALPGMVWQGRDVYLQGPIWAKIPHTDGHFHPSPLMGGFGLKNPPPQILIKNTPVPANPPAEFSATKFASFITQYSTGQVSVEIEWELQKENSKRWNPEVQYTSNYAKSANVDFTVDNNGLYTEPRPIGTRYLTRPL

SEQ ID NO: 278 - protein, 736 aa, Artificial Sequence
  Description of Artificial Sequence: Synthetic polypeptide
MAADGYLPDWLEDTLSEGIRQWWKLRPGPPPPKPAERHKDDSRGLVLPGYKYLGPFNGLDKGEPVNEADAAALEHDKAYDRQLDSGDNPYLKYNHADAEFQERLKEDTSFGGNLGRAVFQAKKRVLEPLGLVEEGAKTAPGKKRPVEQSPQGPDSSSGIGKTGQQPAKKRLNFGQTGDSESVPDPQPLGEPPATPAAVGPTTMASGGGAPMADNNEGADGVGNASGNWHCDSTWLGDRVITTSTRTWALPTYNNHLYKQISSASTGASNDNHYFGYSTPWGYFDFNRFHCHFSPRDWQRLINNNWGFRPKRLNFKLFNIQVKEVTTNDGVTTIANNLTSTVQVFSDSEYQLPYVLGSAHQGCLPPFPADVFMIPQYGYLTLNNGSQAVGRSSFYCLEYFPSQMLRTGNNFTFSYTFEEVPFHSSYAHSQSLDRLMNPLIDQYLYYLNRTQNQSGSAQNKDLLFSRGSPAGMSVQPKNWLPGPCYRQQRVSKTKTDNNNSNFTWTGASKYNLNGRESIINPGTAMASHKDDEDKFFPMSGVMIFGKESAGASNTALDNVMITDEEEIKATNPVATERFGTVAVNFQSSSTDPATGDVHAMGALPGMVWQGRDVYLQGPIWAKIPHTDGHFHPSPLMGGFGLKNPPPQILIKNTPVPANPPAEFSATKFASFITQYSTGQVSVEIEWELQKENSKRWNPEVQYTSNYAKSANVDFTVDNNGLYTEPRPIGTRYLTRPL

SEQ ID NO: 279 - protein, 736 aa, Artificial Sequence
  Description of Artificial Sequence: Synthetic polypeptide
MAADGYLPDWLEDTLSEGIRQWWKLRPGPPPPKPAERHKDDSRGLVLPGYKYLGPFNGLDKGEPVNEADAAALEHDKAYDRQLDSGDNPYLKYNHADAEFQERLKEDTSFGGNLGRAVFQAKKRVLEPLGLVEEGAKTAPGKKRPVEQSPQGPDSSSGIGKTGQQPAKKRLNFGQTGDSESVPDPQPLGEPPATPAAVGPTTMASGGGAPMADNNEGADGVGNASGNWHCDSTWLGDRVITTSTRTWALPTYNNHLYKQISSASTGASNDNHYFGYSTPWGYFDFNRFHCHFSPRDWQRLINNNWGFRPKRLNFKLFNIQVKEVTTNDGVTTIANNLTSTVQVFSDSEYQLPYVLGSAHQGCLPPFPADVFMIPQYGYLTLNNGSQAVGRSSFYCLEYFPSQMLRTGNNFTFSYTFEEVPFHSSYAHSQSLDRLMNPLIDQYLYYLNRTQNQSGSAQNKDLLFSRGSPAGMSVQPKNWLPGPCYRQQRVSKTKTDNNNSNFTWTGASKYNLNGRESIINPGTAMASHKDDEDKFFPMSGVMIFGKESAGASNTALDNVMITDEEEIKATNPVATERFGTVAVNFQSSSTDPATGDVHAMGALPGMVWQDRDVYLQGPIWAKIPHTDGHFHPSPLMGGFGLKNPPPQILIKNTPVPANPPAEFSATKFASFITQYSTGQVSVEIEWELQKENSKRWNPEVQYTSNYAKSANVDFTVDNNGLYTEPRPIGTRYLTRPL

SEQ ID NO: 280 - DNA, 2208 bp, Artificial Sequence
  Description of Artificial Sequence: Synthetic polynucleotide
atggctgccgatggctatcttccagattggctcgaggacactctctctgaaggaataagacagtggtggaagctcaaacctggcccaccaccaccaaagcccgcagagcggcatagggacgacagcaggggtcttgtgcttcctgggtacaagtacctcggacccttcaacggactcgacaagggagagccggtcaacgaggcagacgccgcggccctcgagcacgacaaagcctacgaccggcagctcgacagcggagacaacccgtacctcaagtacaaccacgccgacgcggagtttcaggagcgccttaaagaagatacgtcttttgggggcaacctcggacgagcagtcttccaggcgaaaaagagggttcttgaacctctgggcctggttgaggaacctgttaagacggctccgggaaaaaagaggccggtagagcactctcctgtggagccagactcctcctcgggaaccggaaaggcgggccagcagcctgcaagaaaaagattgaattttggtcagactggagacgcagactcagtacctgacccccagcctctcggacagccaccagcagccccctctggtctgggaactaatacgatggctacaggcagtggcgcaccaatggcagacaataacgagggcgccgacggagtgggtaattcctcgggaaattggcattgcgattccacatggatgggcgacagagtcatcaccaccagcacccgaacctgggccctgcccacctacaacaaccacctctacaaacaaatttccagccaatcaggagcctcgaacgacaatcactactttggctacagcaccccttgggggtattttgacttcaacagattccactgccacttttcaccacgtgactggcaaagactcatcaacaacaactggggattccgacccaagagactcaacttcaagctctttaacattcaagtcaaagaggtcacgcagaatgacggtacgacgacgattgccaataaccttaccagcacggttcaggtgtttactgactcggggtaccagctcccgtacgtcctcggctcggcgcatcaaggatgcctcccgccgttcccagcagacgtcttcatggtgccacagtatggataccccaccctgaacaacgggagtcaggcagtaggacgctcttcattttactgcctggagtactttccttctcagatgctgcgtaccggaaacaactttaccttcagctacacttttgaggacgttcctttccacagcagctacgctcacagccagagtctggaccgtctcatgaatcctctcatcgaccagtacctgtattacttgagcacaacaaacactccaagtggaaccaccacgcagtcaaggcttcagttttctcaggccggagcgagtgacattcgggaccagtctaggaactggcttcctggaccctgttaccgccagcagcgagtatcaaagacatctgcggataacaacaacagtgaatactcgtggactggagctaccaagtaccacctcaatggcagagactctctggtgaatccgggcccggccgtggcaagccacaaggacgatgaagaaaagttttttcctcagagcggggttctcatctttgggaagcaaggctcagagaaaacaaatgtggacattgaaaaggtcatgattacagacgaagaggaaatcaggacaaccaatcccgtggctacggagcagtatggttctgtatctaccaacctccagagaggcaacagacaagcagctaccgcagatgtcaacacacaaggcgttcttccaggcatggtctggcaggacagagatgtgtaccttcaggggcccatctgggcaaagattccacacacggacggacattttcacccctctcccctcatgggtggattcggacttaaacaccctcctccacagattctcatcaagaacaccccggtacctgcgaatccttcgaccaccttcagtgcggcaaagtttgcttccttcatcacacagtactccacgggacaggtcagcgtggagatcgagtgggagctgcagaaggaaaacagcaaacgctggaatcccgaaattcagtacacttccaactacaacaagtctgttaatgtggactttactgtggacactaatggcgtgtattcagagcctcgccccattggcaccagatacctgactcgtaatctgtaa

SEQ ID NO: 281 - protein, 735 aa, Artificial Sequence
  Description of Artificial Sequence: Synthetic polypeptide
MAADGYLPDWLEDTLSEGIRQWWKLKPGPPPPKPAERHRDDSRGLVLPGYKYLGPFNGLDKGEPVNEADAAALEHDKAYDRQLDSGDNPYLKYNHADAEFQERLKEDTSFGGNLGRAVFQAKKRVLEPLGLVEEPVKTAPGKKRPVEHSPVEPDSSSGTGKAGQQPARKRLNFGQTGDADSVPDPQPLGQPPAAPSGLGTNTMATGSGAPMADNNEGADGVGNSSGNWHCDSTWMGDRVITTSTRTWALPTYNNHLYKQISSQSGASNDNHYFGYSTPWGYFDFNRFHCHFSPRDWQRLINNNWGFRPKRLNFKLFNIQVKEVTQNDGTTTIANNLTSTVQVFTDSGYQLPYVLGSAHQGCLPPFPADVFMVPQYGYPTLNNGSQAVGRSSFYCLEYFPSQMLRTGNNFTFSYTFEDVPFHSSYAHSQSLDRLMNPLIDQYLYYLSTTNTPSGTTTQSRLQFSQAGASDIRDQSRNWLPGPCYRQQRVSKTSADNNNSEYSWTGATKYHLNGRDSLVNPGPAVASHKDDEEKFFPQSGVLIFGKQGSEKTNVDIEKVMITDEEEIRTTNPVATEQYGSVSTNLQRGNRQAATADVNTQGVLPGMVWQDRDVYLQGPIWAKIPHTDGHFHPSPLMGGFGLKHPPPQILIKNTPVPANPSTTFSAAKFASFITQYSTGQVSVEIEWELQKENSKRWNPEIQYTSNYNKSVNVDFTVDTNGVYSEPRPIGTRYLTRNL

SEQ ID NO: 282 - DNA, 2211 bp, Artificial Sequence
  Description of Artificial Sequence: Synthetic polynucleotide
atggctgccgacggttatcttccagattggctcgaggacactctctctgaaggaataagacagtggtggaagctcaaacctggcccaccaccaccaaagcccgcagagcggcataaggacgacagcaggggtcttgtgcttcctgggtacaagtacctcggacccttcaacggactcgacaagggagagccggtcaacgaggcagacgccgcggccctcgagcacgacaaagcctacgaccggcagctcgacagcggagacaacccgtacctcaagtacaaccacgccgacgcggagtttcaggagcgccttaaagaagatacgtcttttgggggcaacctcgggcgggcagtcttccaggccaagaagcgggttctcgaacctctcggtctggttgaggaaggcgctaagacggctcctggaaagaaacgtccggtagagcagtcgccacaagagccagactccccctcgggcatcggcaagacaggccagcagcccgctaaaaagagactcaattttggtcagactggcgactcagagtcagtccccgatccacaacctctcggagaacctccagcaacccccgctgctgtgggacctactacaatggcttcaggcggtggcgcaccaatggcagacaataacgaaggcgccgacggagtgggtaatgcctcaggaaattggcactgcgattccacatggctgggcgacagagtcatcaccaccagcacccgcacctgggccttgcccacctacaataaccacctctacaagcaaatctccagtgcttcaacgggggccagcaacgacaaccactacttcggctacagcaccccctgggggtattttgatttcaacagattccactgccacttttcaccacgtgactggcagcgactcatcaacaacaattggggattccggcccaagagactcaacttcaaactcttcaacatccaagtcaaggaggtcacgacgaatgatggcgtcacaaccatcgctaataaccttaccagcacggttcaagtcttctcggactcggagtaccagcttccgtacgtcctcggctctgcgcaccagggccgcctccctccgttcccggcggacgtgttcatgattccgcaatacggctacctgacgctcaacaatggcagccaagccgtgggacgttcatcctcttactgcctggaatatttcccttctcagatgctgagaacgggcaacaactttaccttcagctacacctttgaggaagtgcctctccacagcagctgcgcgcacagccagagcctggaccggctgatgaatcctctcatcgaccaatacctgtattacctgaacagaactcaaaatcagtccggaagtgcccaaaacagggacttgctgttcagccgtgggtctccagctggcatgtctgttcagcccaaaaactggctacctggaccctgttatcggcagcagcgcgtttctaaaacaaaaacagacaacaacaacagcaattttacctggactggtgcttcaaaatataacctcaatgggcgtgaatccatcatcaaccctggcactgctatggcctcacacaaagacgacgaagacaagttctttcccatgagcggtgtcatgatttttggaaaagagagcgccggagcttcaaacactgcattggacaatgtcatgattacagacgaagaggaaattaaagccactaaccctgtggccaccgaaagatttgggaccgtggcagtcaatttccagagcagcagcacagaccctgcgaccggagatgtgcatgctatgggagcattacctggcatggtgtggcaagatagagacgtgtacctgcagggtcccatttgggccaaaattcctcacacagatggacactttcacccgtctcctcttatgggcggctttggactcaagaacccgcctcctcagatcctcatcaaaaacacgcctgttcctgcgaatcctccggcggagttttcagctacaaagtttgcttcattcatcacccaatactccgcaggacaagtgagtgtggaaattgaatgggagctgcagaaagaaaacagcaagcgctggaatcccgaagtgcagtacacatccaattatgcaaaatctgccaacgttgattttactgtggacaacaatggactttatactgagcctcgccccattggcacccgttaccttacccgtcccctgtaa

SEQ ID NO: 283 - protein, 736 aa, Artificial Sequence
  Description of Artificial Sequence: Synthetic polypeptide
MAADGYLPDWLEDTLSEGIRQWWKLKPGPPPPKPAERHKDDSRGLVLPGYKYLGPFNGLDKGEPVNEADAAALEHDKAYDRQLDSGDNPYLKYNHADAEFQERLKEDTSFGGNLGRAVFQAKKRVLEPLGLVEEGAKTAPGKKRPVEQSPQEPDSPSGIGKTGQQPAKKRLNFGQTGDSESVPDPQPLGEPPATPAAVGPTTMASGGGAPMADNNEGADGVGNASGNWHCDSTWLGDRVITTSTRTWALPTYNNHLYKQISSASTGASNDNHYFGYSTPWGYFDFNRFHCHFSPRDWQRLINNNWGFRPKRLNFKLFNIQVKEVTTNDGVTTIANNLTSTVQVFSDSEYQLPYVLGSAHQGRLPPFPADVFMIPQYGYLTLNNGSQAVGRSSSYCLEYFPSQMLRTGNNFTFSYTFEEVPLHSSCAHSQSLDRLMNPLIDQYLYYLNRTQNQSGSAQNRDLLFSRGSPAGMSVQPKNWLPGPCYRQQRVSKTKTDNNNSNFTWTGASKYNLNGRESIINPGTAMASHKDDEDKFFPMSGVMIFGKESAGASNTALDNVMITDEEEIKATNPVATERFGTVAVNFQSSSTDPATGDVHAMGALPGMVWQDRDVYLQGPIWAKIPHTDGHFHPSPLMGGFGLKNPPPQILIKNTPVPANPPAEFSATKFASFITQYSAGQVSVEIEWELQKENSKRWNPEVQYTSNYAKSANVDFTVDNNGLYTEPRPIGTRYLTRPL

SEQ ID NO: 284 - protein, 736 aa, Artificial Sequence
  Description of Artificial Sequence: Synthetic polypeptide
MAADGYLPDWLEDTLSEGIRQWWKLKPGPPPPKPAERHKDDSRGLVLPGYKYLGPFNGLDKGEPVNEADAAALEHDKAYDRQLDSGDNPYLKYNHADAEFQERLKEDTSFGGNLGRAVFQAKKRVLEPLGLVEEGAKTAPGKKRPVEQSPQEPDSSSGIGKTGQQPAKKRLNFGQTGDSESVPDPQPLGEPPATPAAVGPTTMASGGGAPMADNNEGADGVGNASGNWHCDSTWLGDRVITTSTRTWALPTYNNHLYKQISSASTGASNDNHYFGYSTPWGYFDFNRFHCHFSPRDWQRLINNNWGFRPKRLNFKLFNIQVKEVTTNDGVTTIANNLTSTVQVFSDSEYQLPYVLGSAHQGCLPPFPADVFMIPQYGYLTLNNGSQAVGRSSFYCLEYFPSQMLRTGNNFTFSYTFEEVPLHSSCAHSQSLDRLMNPLIDQYLYYLNRTQNQSGSAQNRDLLFSRGSPAGMSVQPKNWLPGPCYRQQRVSKTKTDNNNSNFTWTGASKYNLNGRESIINPGTAMASHKDDEDKFFPMSGVMIFGKESAGASNTALDNVMITDEEEIKATNPVATERFGTVAVNFQSSSTDPATGDVHAMGALPGMVWQDRDVYLQGPIWAKIPHTDGHFHPSPLMGGFGLKNPPPQILIKNTPVPANPPAEFSATKFASFITQYSTGQVSVEIEWELQKENSKRWNPEVQYTSNYAKSANVDFTVDNNGLYTEPRPIGTRYLTRPL

SEQ ID NO: 285 - DNA, 2208 bp, Artificial Sequence
  Description of Artificial Sequence: Synthetic polynucleotide
atggctgccgatggctatcttccagattggctcgaggacactctctctgaaggaataagacagtggtggaagctcaaacctggcccaccaccaccaaagcccgcagagcggcatagggacgacagcaggggtcttgtgcttcctgggtacaagtacctcggacccttcaacggactcgacaagggagagccggtcaacgaggcagacgccgcggccctcgagcacgacaaagcctacgaccggcagctcgacagcggagacaacccgtacctcaagtacaaccacgccgacgcggagtttcaggagcgccttaaagaagatacgtcttttgggggcaacctcggacgagcagtcttccaggcgaaaaagagggttcttgaacctctgggcctggttggggaacctgttaagacggctccgggaaaaaagaggccggtagagcactctcctgtggagccagactcctcctcgggaaccggaaaggcgggccagcagcctgcaagaaaaagattgaattttggtcagactggagacgcagactcagtacctgacccccagcctctcggacagccaccagcagccccctctggtctgggaactaatacgatggctacaggcagtggcgcaccaatggcagacaataacgagggcgccgacggagtgggtaattcctcgggaaattggcattgcgattccacatggatgggcgacagagtcatcaccaccagcacccgaacctgggccctgcccacctacaacaaccacctctacaaacaaatttccagccaatcaggagcctcgaacgacagtcactactttggctacagcaccccttgggggtattttgacttcaacagattccactgccacttttcaccacgtgactggcaaagactcatcaacaacaactggggattccgacccaagagactcaacttcaagctctttaacattcaagtcaaagaggtcacgcagaatgacggtacgacgacgattgccaataaccttaccagcacggttcaggtgtttactgactcggagtaccagctcccgtacgtcctcggctcggcgcatcaaggatgcctcccgccgttcccagcagacgtcttcatggtgccacagtatggatacctcaccctgaacaacgggagtcaggcagtaggacgctcttcattttactgcctggagtactttccttctcagatgctgcgtaccggaaacaactttaccttcagctacacttttgaggacgttcctttccacagcagctacgctcacagccagagtctggaccgtctcatgaatcctctcatcgaccagtacctgtattacttgagcacaacaaacactccaagtggaaccaccacgcagtcaaggctccagttttctcaggccggagcgagtgacattcgggaccagtctaggaactggcttcctggaccctgttaccgccagcagcgagtatcaaagacatctgcggataacaacaacagtgaatactcgtggactggagctaccaagtaccacctcaatggcagagactctctggtgaatccgggcccggccatggcaagccacaaggacaatgaagaaaagttttttcctcagagcggggttctcatctttgggaagcaaggctcagagaaaacaaatgtggacattgaaaaggtcatgattacagacgaagaggaaatcaggacaaccaatcccgtggctacggagcagtatggttctgtatctaccaacctccagagaggcaacagacaagcagctaccgcagatgtcaacacacaaggcgttcttccaggcatggtctggcaggacagagatgtgtaccttcaggggcccatctgggcaaagattccacacacggacggacattttcacccctctcccctcatgggtggattcggacttaaacaccctcctccacagattctcatcaagaacaccccggtacctgcgaatccttcgaccaccttcagtgcggcaaagtttgcttccttcatcacacagtactccacgggacaggtcagcgtggagatcgagtgggagctgcagaaggaaaacagcaaacgctggaatcccgaaattcagtacacttccaactacaacaagtctgttaatgtggactttactgtggacactaatggcgtgtattcagagcctcgccccattggcaccagatacctgactcgtaatctgtaa

SEQ ID NO: 286 - protein, 735 aa, Artificial Sequence
  Description of Artificial Sequence: Synthetic polypeptide
MAADGYLPDWLEDTLSEGIRQWWKLKPGPPPPKPAERHRDDSRGLVLPGYKYLGPFNGLDKGEPVNEADAAALEHDKAYDRQLDSGDNPYLKYNHADAEFQERLKEDTSFGGNLGRAVFQAKKRVLEPLGLVGEPVKTAPGKKRPVEHSPVEPDSSSGTGKAGQQPARKRLNFGQTGDADSVPDPQPLGQPPAAPSGLGTNTMATGSGAPMADNNEGADGVGNSSGNWHCDSTWMGDRVITTSTRTWALPTYNNHLYKQISSQSGASNDSHYFGYSTPWGYFDFNRFHCHFSPRDWQRLINNNWGFRPKRLNFKLFNIQVKEVTQNDGTTTIANNLTSTVQVFTDSEYQLPYVLGSAHQGCLPPFPADVFMVPQYGYLTLNNGSQAVGRSSFYCLEYFPSQMLRTGNNFTFSYTFEDVPFHSSYAHSQSLDRLMNPLIDQYLYYLSTTNTPSGTTTQSRLQFSQAGASDIRDQSRNWLPGPCYRQQRVSKTSADNNNSEYSWTGATKYHLNGRDSLVNPGPAMASHKDNEEKFFPQSGVLIFGKQGSEKTNVDIEKVMITDEEEIRTTNPVATEQYGSVSTNLQRGNRQAATADVNTQGVLPGMVWQDRDVYLQGPIWAKIPHTDGHFHPSPLMGGFGLKHPPPQILIKNTPVPANPSTTFSAAKFASFITQYSTGQVSVEIEWELQKENSKRWNPEIQYTSNYNKSVNVDFTVDTNGVYSEPRPIGTRYLTRNL

SEQ ID NO: 287 - protein, 737 aa, Artificial Sequence
  Description of Artificial Sequence: Synthetic polypeptide
RMAADGYLPDWLEDNLSEGIREWWDLKPGAPKPKANQQKQDDGRGLVLPGYKYLGPFNGLDKGEPVNAADAAALEHDKAYDQQLKAGDNPYLRYNHADAEFQERLQEDTSFGGNLGRAVFQAKKRVLEPLGLVEEGAKTAPGKKRPVEQSPQEPDSSSGIGKTGQQPAKKRLNFGQTGDSESVPDPQPLGEPPATPAAVGPTTMASGGGAPMADNNEGADGVGNASGNWHCDSTWLGDRVITTSTRTWALPTYNNHLYKQISSTSTGASNDNHYFGYGTPWGYFDFNRFHCHFSPRDWQRLINNNWGFRPKRLNFKLFNIQVEEVTTNDGVTTIANNLTSTVQVFSDSEYQLPYVLGSAHQGCLPPFPADVFMIPQYGYLTLNNGSQAVGRSSFYCLEYFPSQMLRTGNNFTFSYTFEEVPFHSSYAHSQSLDRLMNPLIDQYLYYLNRTQNQSGSAQNKDLLFSRGSPAGMSVQPKNWLPGPCYRQQRVSKTKTDNNNSNFTWTGASKYNLNGRESIINPGTAVASHKDDEDKFFPMSGVMIFGKESAGASSTALDNVMITDEEEIKATNPVATERFGTVAVNFQSSSTDPATGDVHAMGALPGMVWQDRDVYLQGPIWAKIPHTDGHFHPSPLMGGFGLKNPPPQILIKNTPVPANPPAEFSATKFASFITQYSTGQVSVEIEWELQKENSKRWNPEVQYTSNYAKSANVDFTVDNNGLYTEPRPIGTRYLTRPL

SEQ ID NO: 288 - protein, 736 aa, Artificial Sequence
  Description of Artificial Sequence: Synthetic polypeptide
MAADGYLPDWLEDNLSEGIREWWDLKPGAPKPKANQQKQDDGRGLVLPGYKYLGPFNGLDKGEPVNAADAAALEHDKAYDQQLKAGDNPYLRYNHADAEFQERLQEDTSFGGNLGRAVFQAKKRVLEPLGLVEEGAKTAPGKKRPVEQSPQEPDSSSGIGKTGQQPAKKRLNFGQTGDSESVPDPQPLGEPPATPAAVGPTTMASGGGAPMADNNEGADGVGNASGNWHCDSTWLGDRVITTSTRTWALPTYNNHLYKQISSTSTGASNDNHYFGYGTPWGYFDFNRFHCHFSPRDWQRLINNNWGFRPKRLNFKLFNIQVEEVTTNDGVTTIANNLTSTVQVFSDSEYQLPYVLGSAHQGCLPPFPADVFMIPQYGYLTLNNGSQAVGRSSFYCLEYFPSQMLRTGNNFTFSYTFEEVPFHSSYAHSQSLDRLMNPLIDQYLYYLNRTQNQSGSAQNKDLLFSRGSPAGMSVQPKNWLPGPCYRQQRVSKTKTDNNNSNFTWTGASKYNLNGRESIINPGTAVASHKDDEDKFFPMSGVMIFGKESAGASSTALDNVMITDEEEIKATNPVATERFGTVAVNFQSSSTDPATGDVHAMGALPGMVWQDRDVYLQGPIWAKIPHTDGHFHPSPLMGGFGLKNPPPQILIKNTPVPANPPAEFSATKFASFITQYSTGQVSVEIEWELQKENSKRWNPEVQYTSNYAKSANVDFTVDNNGLYTEPRPIGTRYLTRPL

SEQ ID NO: 289 - DNA, 2211 bp, Artificial Sequence
  Description of Artificial Sequence: Synthetic polynucleotide
atggctgccgatggttatcttccagattggctcgaggacaacctctctgagggcattcgcgagtggtgggacttgaaacctggagccccgaagcccaaagccaaccagcaaaagcaggacgacggccggggtctggtgcttcctggctacaagtacctcggacccttcaacggactcgacaagggggagcccgtcaacgcggcggacgcagcggccctcgagcacgacaaggcctacgaccagcagctcaaagcgggtgacaatccgtacctgcggtataaccacgccgacgccgagtttcaggagcgtctgcaagaagatacgtcttttgggggcaacctcgggcgagcagtcttccaggccaagaagcgggttctcgaacctctcggtctggttgaggaaggcgctaagacggctcctggaaagaaacgtccggtagagcagtcgccacaagagccagactcctcctcgggcatcggcaagacaggccagcagcccgctaaaaagagactcaattttggccagactggcgactcagagtcagtccccgatccacaacctctcggagaacctccagcaacccccgctgctgtgggacctactacaatggcttcaggcggtggcgcaccaatggcagacaataacgaaggcgccgacggagtgggtaatgcctcaggaaattggcattgcgattccacatggctgggcgacagagtcatcaccaccagcacccgcacctgggccttgcccacctacaataaccacctctacaagcaaatctccagtacttcaacgggggccagcaacgacaaccactacttcggctacggcaccccctgggggtattttgatttcaacagattccactgccacttttcaccacgtgactggcagcgactcatcaacaacaattggggattccggcccaagagactcaacttcaaactcttcaacatccaagtcgaggaggtcacgacgaatgatggcgtcacaaccatcgctaataaccttaccagcacggttcaagtcttctcggactcggagtaccagcttccgtacgtcctcggctctgcgcaccagggctgcctccctccgttcccggcggacgtgttcatgattccgcaatacggctacctgacgctcaacaatggcagccaagccgtgggacgttcatccttttactgcctggaatatttcccttctcagatgctgagaacgggcaacaactttaccttcagctacacctttgaggaagtgcctttccacagcagctacgcgcacagccagagcctggaccggctgatgaatcctctcatcgaccaatacctgtattacctgaacagaacacaaaatcagtccggaagtgcccaaaacaaggacttgctgtttagccgtgggtctccagctggcatgtctgttcagcccaaaaactggctacctggaccctgttatcggcagcagcgcgtttctaaaacaaaaacagacaacaacaacagcaattttacctggactggtgcttcaaaatataacctcaatgggcgtgaatccatcatcaaccctggcaccgctgtggcctcacacaaagacgacgaagacaagttctttcccatgagcggtgtcatgatttttggaaaagagagcgccggagcttcaagcactgcattggacaatgtcatgattacagacgaagaggaaattaaagccactaaccctgtggccaccgaaagatttgggaccgtggcagtcaatttccagagcagcagcacagaccctgcgaccggagatgtgcatgctatgggagcattacctggcatggtgtggcaagatagagacgtgtacctgcagggtcccatttgggccaaaattcctcacacagatggacactttcacccgtctcctcttatgggcggctttggactcaagaacccgcctcctcagatcctcatcaaaaacacgcctgttcctgcgaatcctccggcggagttttcagctacaaagtttgcttcattcatcacccaatactccacaggacaagtgagtgtggaaattgaatgggagctgcagaaagaaaacagcaagcgctggaatcccgaagtgcagtacacatccaattatgcaaaatctgccaacgttgattttactgtggacaacaatggactttatactgagcctcgccccattggcacccgttaccttacccgtcccctgtaa

SEQ ID NO: 290 - protein, 737 aa, Artificial Sequence
  Description of Artificial Sequence: Synthetic polypeptide
RMAADGYLPDWLEDNLSEGIREWWDLKPGAPKPKANQQKQDDGRGLVLPGYKYLGPFNGLDKGEPVNAADAAALEHDKAYDQQLKAGDNPYLRYNHADAEFQERLQEDTSFGGNLGRAVFQAKKRVLEPLGLVEEGAKTAPGKKRPVEQSPQEPDSSSGIGKTGQQPAKKRLNFGQTGDSESVPDPQPLGEPPATPAAVGPTTMASGGGAPMADNNEGADGVGNASGNWHCDSTWLGDRVITTSTRTWALPTYNNHLYKQISSTSTGASNDNHYFGYSTPWGYFDFNRFHCHFSPRDWQRLINNNWGFRPKRLNFKLFNIQVEEVTTNDGVTTIANNLTSTVQVFSDSEYQLPYVLGSAHQGCLPPFPADVFMIPQYGYLTLNNGSQAVGRSSFYCLEYFPSQMLRTGNNFTFSYTFEEVPFHSSYAHSQSLDRLMNPLIDQYLYYLNRTQNQSGSAQNKDLLFSRGSPAGMSVQPKNWLPGPCYRQQRVSKTKTDNNNSNFTWTGASKYNLNGRESIINPGTAVASHKDDEDKFFPMSGVMIFGKESAGASSTALDNVMITDEEEIKATNPVATERFGTVAVNFQSSSTDPATGDVHAMGALPGMVWQDRDVYLQGPIWAKIPHTDGHFHPSPLMGGFGLKNPPPQILIKNTPVPANPPAEFSATKFASFITQYSTGQVSVEIEWELQKENSKRWNPEVQYTSNYAKSANVDFTVDNNGLYTEPRPIGTRYLTRPL

SEQ ID NO: 291 - protein, 737 aa, Artificial Sequence
  Description of Artificial Sequence: Synthetic polypeptide
RMAADGYLPDWLEDNLSEGIREWWDLKPGAPKPKANQQKQDDGRGLVLPGYKYLGPFNGLDKGEPVNAADAAALEHDKAYDQQLKAGDNPYLRYNHADAEFQERLQEDTSFGGNLGRAVFQAKKRVLEPLGLVEEGAKTAPGKKRPVEQSPQEPDSSSGIGKTGQQPAKKRLNFGQTGDSESVPDPQPLGEPPATPAAVGPTTMASGGGAPMADNNEGADGVGNASGNWHCDSTWLGDRVITTSTRTWALPTYNNHLYKQISSTSTGASNDNHYFGYSTPWGYFDFNRFHCHFSPRDWQRLINNNWGFRPKRLNFKLFNIQVKEVTTNDGVTTIANNLTSTVQVFSDSEYQLPYVLGSAHQGCLPPFPADVFMIPQYGYLTLNNGSQAVGRSSFYCLEYFPSQMLRTGNNFTFSYTFEEVPFHSSYAHSQSLDRLMNPLIDQYLYYLNRTQNQSGSAQNKDLLFSRGSPAGMSVQPKNWLPGPCYRQQRVSKTKTDNNNSNFTWTGASKYNLNGRESIINPGTAVASHKDDEDKFFPMSGVMIFGKESAGASSTALDNVMITDEEEIKATNPVATERFGTVAVNFQSSSTDPATGDVHAMGALPGMVWQDRDVYLQGPIWAKIPHTDGHFHPSPLMGGFGLKNPPPQILIKNTPVPANPPAEFSATKFASFITQYSTGQVSVEIEWELQKENSKRWNPEVQYTSNYAKSANVDFTVDNNGLYTEPRPIGTRYLTRPL

SEQ ID NO: 292 - protein, 737 aa, Artificial Sequence
  Description of Artificial Sequence: Synthetic polypeptide
RMAADGYLPDWLEDNLSEGIREWWDLKPGAPKPKANQQKQDDGRGLVLPGYKYLGPFNGLDKGEPVNAADAAALEHDKAYDQQLKAGDNPYLRYNHADAEFQERLQEDTSFGGNLGRAVFQAKKRVLEPLGLVEEGAKTAPGKKRPVEQSPQEPDSSSGIGKTGQQPAKKRLNFGQTGDSESVPDPQPLGEPPATPAAVGPTTMASGGGAPMADNNEGADGVGNASGNWHCDSTWLGDRVITTSTRTWALPTYNNHLYKQISSTSTGASNDNHYFGYSTPWGYFDFNRFHCHFSPRDWQRLINNNWGFRPKRLNFKLFNIQVKEVTTNDGVTTIANNLTSTVQVFSDSEYQLPYVLGSAHQGCLPPFPADVFMIPQYGYLTLNNGSQAVGRSSFYCLEYFPSQMLRTGNNFTFSYTFEEVPFHSSYAHSQSLDRLMNPLIDQYLYYLNRTQNQSGSAQNKDLLFSRGSPAGMSVQPKNWLPGPCYRQQRVSKTKTDNNNSNFTWTGASKYNLNGRESIINPGTAVASHKDDEDKFFPMSGVMIFGKESAGANSTALDNVMITDEEEIKATNPVATERFGTVAVNFQSSSTDPATGDVHAMGALPGMVWQDRDVYLQGPIWAKIPHTDGHFHPSPLMGGFGLKNPPPQILIKNTPVPANPPAEFSATKFASFITQYSTGQVSVEIEWELQKENSKRWNPEVQYTSNYAKSANVDFTVDNNGLYTEPRPIGTRYLTRPL

SEQ ID NO: 293 - DNA, 2208 bp, Artificial Sequence
  Description of Artificial Sequence: Synthetic polynucleotide
atggctgccgatggttatcttccagattggctcaaggacactctctctgaaggaataagacagtggtggaagctcaaacctggcccaccaccaccaaagcccgcagagcggcataaggacgacagcgggggtcttgtgcttcctgggtacaagtacctcggacccttcaacggactcgacaagggagagccggtcaacgaggcagacgccgcggccctcgagtacgacaaggcctacgaccggcagctcgacagcggagacaacccgtacctcaagtacaaccacgccgacgcggagtttcaggagcgccttaaagaagatacgtcttttgggggcaacctcggacgagcagtcttccaggcgaaaaagagggttcttgaacctctgggcctggttgaggaacctgttaagacggctccgggaaaaaagaggccggtagagcactctcctgtggagccagactcctcctcgggaacaggaaaagcgggccagcagcctgcgagaaagagattgaattttggtcagactggagacgcagactccgtacctgacccccagcctctcggacagccaccagcagccccctctggtctgggaactaatacgatggctacaggcagtggcgcaccaatggcagacaataacgagggcgccgacggagtgggtaattcctcgggaagttggcattgcgattccacatggatgggcgacagagtcatcaccaccagcacccgaacctgggctctgcccacctacaacaaccatctgtacaagcagatctccagccaatcaggagccagcaacgacaaccactactttggctacagcaccccttgggggtattttgacttcaacagattccactgccacttttcaccacgtgactggcaaagactcatcaacaacaactggggattccggcccaagagactcaacttcaagctctttaacattcaagtcaaggaggtcacgcagaatgacggtacgacgacgattgccaataaccttaccagcacggttcaggtgtttactgactcggagtaccagctcccgtacgtccccggctcggcgcatcaaggatgcctcccgccgttcccagcagacgtcttcatggtgccacagtatggatacctcaccctgaacaacgggagtcaggcagtaggacgctcttcattttactgcctggagtactttccttctcagatgcttcgtaccggaaacaactttaccttcagctacacctttgaggatgttcctttccacagcagctacgctcacagccagagtttggaccgtctcatgaatcctctcatcgaccagtacctgtattacttgagcagaacaaacactccaagcggaaccaccacgcagtccaggcttcagttttctcaggccggagcaagtgacattcgggaccagtctaggaactggcttcctggaccctgttaccgccagcagcgagtatcaaagacagctgcggacaacaacaacagtgaatactcgtggactggagctaccaagtaccacctcaatggcagagactctctggtgaatccgggcccggccatggccagccacaaggacgatgaagaaaagttttttcctcaaagcggggttctcatctttgggaagcaaggctcagagaaaacaaatgtggacattgaaaaggtcatgattacagacgaagaggaaatcagaaccaccaatcccgtggccacggagcagtatggttctgtatctaccaacctccagagcggcaacacacaagcagctactgcagatgtcaacacacaaggcgttcttccaggcatggtctggcaggacagagacgtgcacctgcaggggcctatctgggcaaagattccacacacggacggacattttcacccctctcccctcatgggcggatttggacttaaacaccctcctccacagattctcatcaagaacaccccggtacctgcaaatccttcgaccaccttcagtgcggcaaagtttgcttccttcatcacacagtattccacagggcaggtcagcgtggagatcgagtgggagctgcagaaggagaacagcaaacgctggaaccccgagatccagtacacttccaactacaacaaatctgttaatgtggactttactgtggacactaatggtgtgtattcagagcctcgccccattggcaccagatacctgactcgtaatctgtaa

SEQ ID NO: 294 - protein, 735 aa, Artificial Sequence
  Description of Artificial Sequence: Synthetic polypeptide
MAADGYLPDWLKDTLSEGIRQWWKLKPGPPPPKPAERHKDDSGGLVLPGYKYLGPFNGLDKGEPVNEADAAALEYDKAYDRQLDSGDNPYLKYNHADAEFQERLKEDTSFGGNLGRAVFQAKKRVLEPLGLVEEPVKTAPGKKRPVEHSPVEPDSSSGTGKAGQQPARKRLNFGQTGDADSVPDPQPLGQPPAAPSGLGTNTMATGSGAPMADNNEGADGVGNSSGSWHCDSTWMGDRVITTSTRTWALPTYNNHLYKQISSQSGASNDNHYFGYSTPWGYFDFNRFHCHFSPRDWQRLINNNWGFRPKRLNFKLFNIQVKEVTQNDGTTTIANNLTSTVQVFTDSEYQLPYVPGSAHQGCLPPFPADVFMVPQYGYLTLNNGSQAVGRSSFYCLEYFPSQMLRTGNNFTFSYTFEDVPFHSSYAHSQSLDRLMNPLIDQYLYYLSRTNTPSGTTTQSRLQFSQAGASDIRDQSRNWLPGPCYRQQRVSKTAADNNNSEYSWTGATKYHLNGRDSLVNPGPAMASHKDDEEKFFPQSGVLIFGKQGSEKTNVDIEKVMITDEEEIRTTNPVATEQYGSVSTNLQSGNTQAATADVNTQGVLPGMVWQDRDVHLQGPIWAKIPHTDGHFHPSPLMGGFGLKHPPPQILIKNTPVPANPSTTFSAAKFASFITQYSTGQVSVEIEWELQKENSKRWNPEIQYTSNYNKSVNVDFTVDTNGVYSEPRPIGTRYLTRNL

SEQ ID NO: 295 - DNA, 2208 bp, Artificial Sequence
  Description of Artificial Sequence: Synthetic polynucleotide
atggctgccgatggttatcttccagattggctcgaggacactctctctgaaggaataagacagtggtggaagctcaaacctggcccaccaccaccaaagcccgcagagcggcataaggacgacagcaggggtcttgtgcttcctgggtacaagtacctcggacccttcaacggactcgacaagggggagccggtcaacgaggcagacgccgcggccctcgagcacgacaaggcctacgaccggcagctcgacagcggagacaacccgtacctcaagtacaaccacgccgacgcagagtttcaggagcgccttaaagaagatacgtcttttgggggcaacctcggacgagcagtcttccaggcgaaaaagagggttcttgaacctctgggcctggttgaggaacctgttaagacggctccgggaaaaaagaggccggtagagcactctcctgtggagccagactcctcctcgggaaccggaaaagcgggccagcagcctgcaagaaaaagattaaattttggtcagactggagacgcagactccgtacctgacccccagcctctcggacagccaccagcagccccctctggtctgggatctactacaatggctacaggcagtggcgcaccaatggcagacaataacgagggtgccgatggagtgggtaattcctcaggaaattggcattgcgattcccaatggctgggcgacagagtcatcaccaccagcacccgaacctgggccctgcccacatacaacaaccacctctacaagcaaatctccagccaatcaggagccagcaacgacaaccactactttggctacagcaccccctgggggtattttgacttcaacagattccactgccacttttcaccacgtgactggcaaagactcatcaacaacaactggggattccggcccaaaagactcaacttcaagctctttaatattcaagtcaaagaggtcacgcagaatgacggtacgacgacgattgccaataaccttaccagcacggttcaggtgtttactgactcggagtaccagctcccgtacgtcctgggctcggcgcatcaaggatgcctcccgccgtttccagcggacgtcttcatggtcccacagtatggatacctcaccctgaacaacgggagtcaggcggtaggacgctcttccttttactgcctggagtactttccttctcagatgctgcgtactggaaacaactttcagttcagctacacttttgaagacgtgcctttccacagcagctacgctcacagccagagtctggatcggctgatgaatcctctgatcgaccagtacctgtattatctgaacaagacacaaacaaatagtggaactcttcagcagtctcggctactgtttagccaagctggaccaaccaacatgtctcttcaagctaaaaactggctgcctggaccttgctacagacagcagcgtctgtcaaaacaggcaaacgacaacaacaacagcaactttccctggactgcagctacaaagtatcatctaaatggccgggactcgttggttaatccaggaccagctatggccagtcgcaaggatgacgaagaaaagtttttccccatgcatggaaccctgatatttggtaaacaaggaacaaatgccaacgacgcggatttggaaaatgtcatgattacagatgaagaagaaatcagggccaccaatcccgtggctacggagcagtacgggactgtgtcaaataatttgcaaaactcaaacactggtccaactactggaactgtcaatcaccaaggagcgttacctggtatggtgtggcaggatcgagacgtgtacctgcagggacccatttgggccaagattcctcacaccgatggacactttcatccttctccactgatgggaggttttggactcaaacacccgcctcctcagatcatgatcaaaaacactcccgttccagccaatcctcccacaaacttcagttctgccaagtttgcttctttcatcacacagtattccacgggacaggtcagcgtggagatcgagtgggagctgcagaaggagaacagcaaacgctggaatcccgaaattcagtacacttccaactacaacaagtctgttaatgtggactttactgtggacactaatggtgtgtattcagagcctcgccccattggcaccagatacctgactcgtaatctgtaa

SEQ ID NO: 296 - protein, 735 aa, Artificial Sequence
  Description of Artificial Sequence: Synthetic polypeptide
MAADGYLPDWLEDTLSEGIRQWWKLKPGPPPPKPAERHKDDSRGLVLPGYKYLGPFNGLDKGEPVNEADAAALEHDKAYDRQLDSGDNPYLKYNHADAEFQERLKEDTSFGGNLGRAVFQAKKRVLEPLGLVEEPVKTAPGKKRPVEHSPVEPDSSSGTGKAGQQPARKRLNFGQTGDADSVPDPQPLGQPPAAPSGLGSTTMATGSGAPMADNNEGADGVGNSSGNWHCDSQWLGDRVITTSTRTWALPTYNNHLYKQISSQSGASNDNHYFGYSTPWGYFDFNRFHCHFSPRDWQRLINNNWGFRPKRLNFKLFNIQVKEVTQNDGTTTIANNLTSTVQVFTDSEYQLPYVLGSAHQGCLPPFPADVFMVPQYGYLTLNNGSQAVGRSSFYCLEYFPSQMLRTGNNFQFSYTFEDVPFHSSYAHSQSLDRLMNPLIDQYLYYLNKTQTNSGTLQQSRLLFSQAGPTNMSLQAKNWLPGPCYRQQRLSKQANDNNNSNFPWTAATKYHLNGRDSLVNPGPAMASRKDDEEKFFPMHGTLIFGKQGTNANDADLENVMITDEEEIRATNPVATEQYGTVSNNLQNSNTGPTTGTVNHQGALPGMVWQDRDVYLQGPIWAKIPHTDGHFHPSPLMGGFGLKHPPPQIMIKNTPVPANPPTNFSSAKFASFITQYSTGQVSVEIEWELQKENSKRWNPEIQYTSNYNKSVNVDFTVDTNGVYSEPRPIGTRYLTRNL

SEQ ID NO: 297 - DNA, 2208 bp, Artificial Sequence
  Description of Artificial Sequence: Synthetic polynucleotide
atggctgccgatggttatcttccagattggctcgaggacactctctctgaaggaataagacagtggtggaagctcaaacctggcccaccaccaccaaagcccgcagagcggcataaggacgacagcaggggtcttgtgcttcctgggtacaagtacctcggacccttcaacggactcgacaagggagagccggtcaacgaggcagacgccgcggccctcgagcacgacaaagcctacgaccggcagctcgacagcggagacaacccgtacctcaagtacaaccacgccgacgcggagtttcaggagcgccttaaagaagatacgtcttttgggggcaacctcggacgagcagtcttccaggcgaaaaagagggttcttgaacctctgggcctggttggggaacctgtcaagacggctccaggaaaaaagaggccggtagagcactctcctgtggagccagactcctcctcgggaaccggaaaggcgggccagcagcctgcaagaaaaagattgaattttggtcagactggagacgcagactcagtacctgacccccagcctctcggacagccaccagcagccccctctggtctgggaactaatacgatggctacaggcagtggcgcaccaatggcagacaataacgagggcgccgacggagtgggtaattcctcgggaaattggcattgcgattccacatggatgggcgacagagtcatcaccaccagcacccgaacctgggccctgcccacctacaacaaccacctctacaaacaaatttccagccaatcaggagcctcgaacgacaatcactactttggctacagcaccccttgggggtattttgacttcaacagattccactgccacttttcaccacgtgactggcaaagactcatcaacaacaactggggattccgacccaagagactcaacttcaagctctttaacattcaagtcaaagaggtcacgcagaatgacggtacgacgacgattgccaataaccttaccagcacggttcaggtgtttactgactcggagtaccagctcccgtacgtcctcggctcggcgcatcaaggatgcctcccgccgttcccagcagacgtcttcatggtgccacagtatggatacctcaccctgaacaacgggagtcaggcagtaggacgctcttcattttactgcctggagtactttccttctcagatgctgcgtaccggaaacaactttaccttcagctacacttttgaggacgttcctttccacagcggctacgctcacagccagagtctggaccgtctcatgaatcctctcatcgaccagtacctgtattacttgagcacaacaaacactccaagtggaaccaccacgcagtcaaggcttcagttttctcaggccggagcgagtgacattcgggaccagtctaggaactggcttcctggaccctgttaccgccagcagcgagtatcaaagacatctgcggataacaacaacagtgaatactcgtggactggagctaccaagtaccacctcaatggcagagactctctggtgaatccgggcccggccatggcaagccacaaggacaatgaagaaaagttttttcctcagagcggggttctcatctttgggaagcaaggctcagagaaaacaaatgtggacattgaaaaggtcatgattacagacgaagaggaaatcaggacaaccaatcccgtggctacggagcagtacggttctgtatctaccaacctccagagaggcaacagacaagcagctaccgcagatgtcaacacacaaggcgttcttccaggcatggtctggcaggacagagatgtgtaccttcaggggcccatctgggcaaagattccacacacggacggacattttcacccctctcccctcatgggtggattcggacttaaacaccctcctccacagattctcatcaagaacaccccggtacctgcgaatccttcgaccaccttcagtgcggcaaagtttgcttccttcatcacacagtactccacgggacaggtcagcgtggagatcgagtgggagctgcagaaggaaaacagcaaacgctggaatcccgaaattcagtacacttccaactacaacaagtctgttaatgtggactttactgtggacactaatggcgtgtattcagagcctcgccccattggcaccagatacctgactcgtaatctgtaa

SEQ ID NO: 298 - protein, 735 aa, Artificial Sequence
  Description of Artificial Sequence: Synthetic polypeptide
MAADGYLPDWLEDTLSEGIRQWWKLKPGPPPPKPAERHKDDSRGLVLPGYKYLGPFNGLDKGEPVNEADAAALEHDKAYDRQLDSGDNPYLKYNHADAEFQERLKEDTSFGGNLGRAVFQAKKRVLEPLGLVGEPVKTAPGKKRPVEHSPVEPDSSSGTGKAGQQPARKRLNFGQTGDADSVPDPQPLGQPPAAPSGLGTNTMATGSGAPMADNNEGADGVGNSSGNWHCDSTWMGDRVITTSTRTWALPTYNNHLYKQISSQSGASNDNHYFGYSTPWGYFDFNRFHCHFSPRDWQRLINNNWGFRPKRLNFKLFNIQVKEVTQNDGTTTIANNLTSTVQVFTDSEYQLPYVLGSAHQGCLPPFPADVFMVPQYGYLTLNNGSQAVGRSSFYCLEYFPSQMLRTGNNFTFSYTFEDVPFHSGYAHSQSLDRLMNPLIDQYLYYLSTTNTPSGTTTQSRLQFSQAGASDIRDQSRNWLPGPCYRQQRVSKTSADNNNSEYSWTGATKYHLNGRDSLVNPGPAMASHKDNEEKFFPQSGVLIFGKQGSEKTNVDIEKVMITDEEEIRTTNPVATEQYGSVSTNLQRGNRQAATADVNTQGVLPGMVWQDRDVYLQGPIWAKIPHTDGHFHPSPLMGGFGLKHPPPQILIKNTPVPANPSTTFSAAKFASFITQYSTGQVSVEIEWELQKENSKRWNPEIQYTSNYNKSVNVDFTVDTNGVYSEPRPIGTRYLTRNL

SEQ ID NO: 299 - DNA, 2208 bp, Artificial Sequence
  Description of Artificial Sequence: Synthetic polynucleotide
atggctgccgatggttatcttccagattggctcgaggacactctctctgaaggaataagacagtggtggaagctcaaacctggcccaccaccaccaaagcccgcagagcggcataaggacgacagcaggggtcttgtgcttcctgggtacaagtacctcggacccttcaacggactcgacaagggagagccggtcaacgaggcagacgccgcggccctcgagcacgacaaagcctacgaccggcagctcgacagcggagacaacccgtacctcaagtacaaccacgccgacgcggagtttcaggagcgccttaaagaagatacgtcttttgggggcaacctcggacgagcagtcttccaggcgaaaaagagggttcttgaacctctgggcctggttggggaacctgttaagacggctccgggaaaaaagaggccggtagagcactctcctgtggagccagactcctcctcgggaaccggaaaggcgggccagcagcctgcaagaaaaagattgaattttggtcagactggagacgcagactcagtacctgacccccagcctctcggacagccaccagcagccccctctggtctgggaactaatacgatggctacaggcagtggcgcaccaatggcagacaataacgagggcgccgacggagtgggtaattcctcgggaaatcggcattgcgattccacatggatgggcgacagagtcatcaccaccagcacccgaacctgggccctgcccacctacaacaaccacctctacagacaaatttccagccaatcaggagcctcgaacgacaatcactactttggctacagcaccccttgggggtattttgacttcaacagattccactgccacttttcaccacgtgactggcaaagactcatcaacaacaactggggattccgacccaagagactcaacttcaagctctttaacattcaagtcaaagaggtcacgcagaatgacggtacgacgacgattgccaataaccttaccagcacggttcaggtgtttactgactcggagtaccagctcccgtacgtcctcggctcggcgcatcaaggatgcctcccgccgttcccagcagacgtcttcatggtgccacagtatggatacctcaccctgagcaacgggagtcaggcagtaggacgctcttcattttactgcccggagtactttccttctcagatgctgcgtaccggaaacaactttaccttcagctacacttttgaggacgttcctttccacagcagctacgctcacagccagagtctggaccgtctcatgaatcctctcatcgaccagtacctgtattacttgagcacaacaaacactccaagtggaaccaccacgcagtcaaggcttcagttttctcaggccggagcgagtgacattcgggaccagtctaggaactggcttcctggaccctgttaccgccagcagcgagtatcaaagacatctgcggataacaacaacagtgaatactcgtggactggagctaccaagtaccacctcaatggcagagactctctggtgaatccgggcccggccatggcaagccacaaggacaatgaagaaaagttttttcctcagagcggggttctcatctttgggaagcaaggctcagagaaaacaaatgtggacattgaaaaggtcatgattacagacgaagaggaaatcaggacaaccaatcccgtggctacggagcagtatggttctgtatctaccaacctccagagaggcaacagacaagcagctaccgcagatgtcaacacacaaggcgttcttccaggcatggtctggcaggacagagatgtgtaccttcaggggcccatctgggcaaagattccacacacggacggacattttcacccctctcccctcatgggtggattcggacctaaacaccctcctccacagattctcatcaagaacaccccggtacctgcgaatccttcgaccaccttcagtgcggcaaagtttgcttccttcatcacacagtactccacgggacaggtcagcgtggagatcgagtgggagctgcagaaggaaaacagcaaacgctggaatcccgaaattcagtacacttccaactacaacaagtctgttaatgtggactttactgtggacactaatggcgtgtattcagagcctcgccccattggcaccagatacctgactcgtaatttgtaa

SEQ ID NO: 300 - protein, 735 aa, Artificial Sequence
  Description of Artificial Sequence: Synthetic polypeptide
MAADGYLPDWLEDTLSEGIRQWWKLKPGPPPPKPAERHKDDSRGLVLPGYKYLGPFNGLDKGEPVNEADAAALEHDKAYDRQLDSGDNPYLKYNHADAEFQERLKEDTSFGGNLGRAVFQAKKRVLEPLGLVGEPVKTAPGKKRPVEHSPVEPDSSSGTGKAGQQPARKRLNFGQTGDADSVPDPQPLGQPPAAPSGLGTNTMATGSGAPMADNNEGADGVGNSSGNRHCDSTWMGDRVITTSTRTWALPTYNNHLYRQISSQSGASNDNHYFGYSTPWGYFDFNRFHCHFSPRDWQRLINNNWGFRPKRLNFKLFNIQVKEVTQNDGTTTIANNLTSTVQVFTDSEYQLPYVLGSAHQGCLPPFPADVFMVPQYGYLTLSNGSQAVGRSSFYCPEYFPSQMLRTGNNFTFSYTFEDVPFHSSYAHSQSLDRLMNPLIDQYLYYLSTTNTPSGTTTQSRLQFSQAGASDIRDQSRNWLPGPCYRQQRVSKTSADNNNSEYSWTGATKYHLNGRDSLVNPGPAMASHKDNEEKFFPQSGVLIFGKQGSEKTNVDIEKVMITDEEEIRTTNPVATEQYGSVSTNLQRGNRQAATADVNTQGVLPGMVWQDRDVYLQGPIWAKIPHTDGHFHPSPLMGGFGPKHPPPQILIKNTPVPANPSTTFSAAKFASFITQYSTGQVSVEIEWELQKENSKRWNPEIQYTSNYNKSVNVDFTVDTNGVYSEPRPIGTRYLTRNL

SEQ ID NO: 301 - DNA, 2205 bp, Artificial Sequence
  Description of Artificial Sequence: Synthetic polynucleotide
atggctgccgatggttatcttccagattggctcgaggacactctctctgaaggaataagacagtggtggaagctcaaacctggcccaccaccaccaaagcccgcagagcggcataaggacgacagcaggggtcttgtgcttcctgggtacaagtacctcggacccttcaacggactcgacaagggagagccggtcaacgaggcagacgccgcggccctcgagcacgacaaggcctacgaccggcagctcgacagcggagacaacccgtacctcaagtacaaccacgccgacgcggagtttcaggagcgtcttaaagaagatacgtcttttgggggcaacctcggacgagcagtcttccaggcgaaaaagagggttcttgaacctctgggcctggttgaggaacctgttaagacggctccgggaaaaaagaggccggtagagcactctcctgcggagccagactcctcctcgggaaccggaaaagcgggccagcagcctgcaagaaaaagactgaatttcggtcagactggagacgcagactccgtacctgacccccagcctctcagacagccaccagcagcccccacaagtttgggatctactacaatggctacaggcagtggcgcaccaatggcagacaataacgagggtgccgatggagtgggtaattcctcaggaaattggcattgcgattcccaatggctgggcgacagagtcatcaccaccagcacccgaacctgggccctgcccacctacaacaaccacctttacaagcaaatctccagccaatcaggagcctcaaacgacaaccactactttggctacagcaccccctgggggtattttgacttcaacagattccactgccacttttcaccacgtgactggcaaagactcatcaacaacaactggggattccgacccaagagactcaacttcaagctctttaacattcaagtcaaagaggtcacgcagaatgacggtacgacgacgattgccaataaccttaccagcacggttcaggtgtttactgactcggagtaccagctcccgtacgtcctcggctcggcgcatcaaggatgcctcccgccgtttccagcggacgtcttcatggtcccacagtatggatacctcaccctgaacaacgggagtcaggcggtaggacgctcttccttttactgcctggagtactttccttctcagatgctgcgtactggaaacaactttcagttcagctacacttttgaagacgtgcctttccacagcagctacgctcacagccagagtttggatcggctgatgaatcctctgatcgaccagtacctgtattatctaaacagaacacaaacagctagtggaactcagcagtctcggctactgtttagccaagctggacccacaagcatgtctcttcaagctaaaaactggctgcctggaccgtgttatcgccagcagcgtttgtcaaagcaggcaaacgacaacaacaacagcaactttccctggactggagctaccaagtactacctcaatggcagagactctttggtgaacccgggcccggccatggccagccacaaggacgatgaagaaaagtttttccccatgcatggaaccctaatatttggtaaagaaggaacaaatgctaccaacgcggaattggaaaatgtcatgattacagatgaagaggaaatcaggaccaccaatcccgtggctacagagcagtacggatatgtgtcaaataatttgcaaaactcaaatactgctgcaagtactgaaactgtgaatcaccaaggagcattacctggtatggtgtggcaggatcgagacgtgtacctgcagggacccatttgggccaagattcctcacaccgatggacactttcatccttctccactgatgggaggttttggactcaaacacccgcctcctcagattatgatcaaaaacactcccgttccagccaatcctcccacaaacttcagttctgccaagtttgcttccttcatcacacagtattccacgggacaggtcagcgtggagatcgagtgggagctgcagaaggagaacagcaaacgctggaatcccgaaattcagtacacttccaactacaacaaatctgttaatgtggactttactgtggacactaatggtgtgtattcagagcctcgccccattggcaccagatacctgactcgtaatctgtaa

SEQ ID NO: 302 - protein, 734 aa, Artificial Sequence
  Description of Artificial Sequence: Synthetic polypeptide
MAADGYLPDWLEDTLSEGIRQWWKLKPGPPPPKPAERHKDDSRGLVLPGYKYLGPFNGLDKGEPVNEADAAALEHDKAYDRQLDSGDNPYLKYNHADAEFQERLKEDTSFGGNLGRAVFQAKKRVLEPLGLVEEPVKTAPGKKRPVEHSPAEPDSSSGTGKAGQQPARKRLNFGQTGDADSVPDPQPLRQPPAAPTSLGSTTMATGSGAPMADNNEGADGVGNSSGNWHCDSQWLGDRVITTSTRTWALPTYNNHLYKQISSQSGASNDNHYFGYSTPWGYFDFNRFHCHFSPRDWQRLINNNWGFRPKRLNFKLFNIQVKEVTQNDGTTTIANNLTSTVQVFTDSEYQLPYVLGSAHQGCLPPFPADVFMVPQYGYLTLNNGSQAVGRSSFYCLEYFPSQMLRTGNNFQFSYTFEDVPFHSSYAHSQSLDRLMNPLIDQYLYYLNRTQTASGTQQSRLLFSQAGPTSMSLQAKNWLPGPCYRQQRLSKQANDNNNSNFPWTGATKYYLNGRDSLVNPGPAMASHKDDEEKFFPMHGTLIFGKEGTNATNAELENVMITDEEEIRTTNPVATEQYGYVSNNLQNSNTAASTETVNHQGALPGMVWQDRDVYLQGPIWAKIPHTDGHFHPSPLMGGFGLKHPPPQIMIKNTPVPANPPTNFSSAKFASFITQYSTGQVSVEIEWELQKENSKRWNPEIQYTSNYNKSVNVDFTVDTNGVYSEPRPIGTRYLTRNL

SEQ ID NO: 303 - DNA, 3160 bp, Artificial Sequence
  Description of Artificial Sequence: Synthetic polynucleotide
acccttcactaaagggactagtcctgcaggtttaaacgaattcgcccttgctgcgtcaactggaccaatgagaactttcccttcaacgactgtgtcgacaagatggtgatttggtgggaggaggggaagatgaccgccaaggtcgtggagtcggccaaagccattctcggaggaagcaaggtgcgcgtggaccagaaatgcaagtcctcggcccagatagatccgactcccgtgatcgtcacctccaacaccaacatgtgcgccgtgattgacgggaactcaacgaccttcgaacaccagcagccgttgcaagaccggatgttcaaatttgaactcacccgccgtctggatcatgactttgggaaggtcaccaagcgggaagtcaaagactttttccggtgggcaaaggatcacgtggttgaggtggagcatgaattctacgtcaaaaagggtggagccaagaaaagacccgcccctagtgacgcagatataagtgagcccaaacgggtgcgcgagtcagttgcgcagccatcgacgtcagacgcggaagcttcgatcaactacgcggacaggtaccaaaacaaatgttctcgtcacgtgggcatgaatctgatgctgtttccctgcagacaatgcgagagaatgaatcaaaattcaaatatctgcttcactcacggacagaaagactgtttagagtgctttcccgtgtcagaatctcaacctgtttctgtcgtcaaaaaggcgtatcagaaactgtgctacattcatcatatcatgggaaaggtgccagacgcttgcactgcctgcgatctggtcaatgtggatttggatgactgcatctctgaacaataaatgatttaaatcaggtatggctgccgatggttatcttccagattggctcgaggacactctctctgaaggaataagacagtggtggaagctcaaacctggcccaccaccaccaaagcccgcagagcggcataaggacgacagcaggggtcttgtgcttcctgggtacaagtacctcggacccttcaacggactcgacaagggagagccggtcaacgaggcagacgccgcggccctcgagcacgacaaggcctacgaccggcagctcgacagcggagacaacccgtacctcaagtacaaccacgccgacgcggagtttcaggagcgtcttaaagaagatacgtcttttgggggcaacctcggacgagcagtcttccaggcgaaaaagagggttcttgaacctctgggcctggttgaggaacctgttaagacggctccgggaaaaaagaggccggtagagcactctcctgcggagccagactcctcctcgggaaccggaaaagcgggccagcagcctgcaagaaaaagactgaatttcggtcagactggagacgcagactccgtacctgacccccagcctctcagacagccaccagcagcccccacaagtttgggatctactacaatggctacaggcagtggcgcaccaatggcagacaataacgagggtgccgatggagtgggtaattcctcaggaaattggcattgcgattcccaatggctgggcgacagagtcatcaccaccagcacccgaacctgggccctgcccacctacaacaaccacctttacaagcaaatctccagccaatcaggagcctcaaacgacaaccactactttggctacagcaccccctgggggtattttgacttcaacagattccactgccacttttcaccacgtgactggcaaagactcatcaacaacaactggggattccgacccaagagactcaacttcaagctctttaacattcaagtcaaagaggtcacgcagaatgacggtacgacgacgattgccaataaccttaccagcacggttcaggtgtttactgactcggagtaccagctcccgtacgtcctcggctcggcgcatcaaggatgcctcccgccgtttccagcggacgtcttcatggtcccacagtatggatacctcaccctgaacaacgggagtcaggcggtaggacgctcttccttttactgcctggagtactttccttctcagatgctgcgtactggaaacaactttcagttcagctacacttttgaagacgtgcctttccacagcagctacgctcacagccagagtttggatcggctgatgaatcctctgatcgaccagtacctgtattatctaaacagaacacaaacagctagtggaactcagcagtctcggctactgtttagccaagctggacccacaagcatgtctcttcaagctaaaaactggctgcctggaccgtgttatcgccagcagcgtttgtcaaagcaggcaaacgacaacaacaacagcaactttccctggactggagctaccaagtactacctcaatggcagagactctttggtgaacccgggcccggccatggccagccacaaggacgatgaagaaaagtttttccccatgcatggaaccctaatatttggtaaagaaggaacaaatgctaccaacgcggaattggaaaatgtcatgattacagatgaagaggaaatcaggaccaccaatcccgtggctacagagcagtacggatatgtgtcaaataatttgcaaaactcaaatactgctgcaagtactgaaactgtgaatcaccaaggagcattacctggtatggtgtggcaggatcgagacgtgtacctgcagggacccatttgggccaagattcctcacaccgatggacactttcatccttctccactgatgggaggttttggactcaaacacccgcctcctcagattatgatcaaaaacactcccgttccagccaatcctcccacaaacttcagttctgccaagtttgcttccttcatcacacagtattccacgggacaggtcagcgtggagatcgagtgggagctgcagaaggagaacagcaaacgctggaatcccgaaattcagtacacttccaactacaacaaatctgttaatgtggactttactgtggacactaatggtgtgtattcagagcctcgccccattggcaccagatacctgactcgtaatctgtaattgcttgttaatcaataaaccgtttaattcgtttcagttgaactttggtctctgcgaagggcgaattcgcggccgctaaatcaatcg

SEQ ID NO: 304 - protein, 734 aa, Artificial Sequence
  Description of Artificial Sequence: Synthetic polypeptide
MAADGYLPDWLEDTLSEGIRQWWKLKPGPPPPKPAERHKDDSRGLVLPGYKYLGPFNGLDKGEPVNEADAAALEHDKAYDRQLDSGDNPYLKYNHADAEFQERLKEDTSFGGNLGRAVFQAKKRVLEPLGLVEEPVKTAPGKKRPVEHSPAEPDSSSGTGKAGQQPARKRLNFGQTGDADSVPDPQPLGQPPAAPTSLGSTTMATGSGAPMADNNEGADGVGNSSGNWHCDSQWLGDRVITTSTRTWALPTYNNHLYKQISSQSGASNDNHYFGYSTPWGYFDFNRFHCRFSPRDWQRLINNNWGFRPKRLNFKLFNIQVKEVTQNDGTTTIANNLTSTVQVFTDSEYQLPYVLGSAHQGCLPPFPADVFMVPQYGYLTLNNGSQAVGRSSFYCLEYFPSQMLRTGNNFQFSYTFEDVPFHSSYAHSQGLDRLMNPLIDQYLYYLNRTQTASGTQQSRLLFSQAGPTSMSLQAKNWLPGPCYRQQRLSKQANDNNNSNFPWTGATKYHLNGGDSLVNPGPAMASHKDDEEKFFPMHGTLIFGKEGTNATNAELENVMITDEEEIRTTNPVATEQYGYVSNNLQNSNTAASTETVNHQGALPGMVWQDRDVYLRGPIWAKIPHADGHFHPSPLMGGFGLKHPPPQIMIKNTPVPANPPTNFSSAKFASFITQYSTGQVSVEIEWELQKENSKRWNPEIQYTSNYNKSVNVDFTVDTNGVYSEPRPIGTRYLTRNL

SEQ ID NO: 305 - DNA, 3157 bp, Artificial Sequence
  Description of Artificial Sequence: Synthetic polynucleotide
ctcactaagggactagtcctgcaggtttaaacgaattcgcccttgctgcgtcaactggaccaatgagaactttcccttcaacgactgtgtcgacaagatggtgatttggtgggaggaggggaagatgaccgccaaggtcgtggagtcggccaaagccactctcggaggaagcaaggtgcgcgtggaccagaaacgcaagtcctcggcccagatagatccgactcccgtgatcgtcacctccaacaccaacatgtgcgccgtgattgacgggaactcaacgaccttcgaacaccagcagccgttgcaagaccgaatgttcaaatttgaactcacccgccgtctggatcatgacttcgggaaggtcaccaagcaggaagtcaaagactttttccggtgggcaaaggatcacgtggttgaggtggagcatgaattctacgtcaaaaagggtggagccaagaaaagacccgcccctagtgacgcagatataagtgagcccaaacgggtgcgcgagtcagttgcgcagccatcgacgtcagacgcggaagcttcgatcaactacgcggacaggtaccaaaacaaatgttctcgtcacgtgggcatgaatctgatgctgtttccctgcagacaatgcgagagaatgaatcaaaattcaaatatctgcttcactcacggacagaaagactgtttagagtgctttcccgtgtcagaatctcaacctgtttctgtcgtcaaaaaggcgtatcagaaactgtgctacattcatcatatcatgggaaaggtgccagacgcttgcactgcctgcgatctggtcaatgtggatttggatgactgcatctctgaacaataaatgatttaaatcaggtatggctgccgatggttatcttccagattggctcgaggacactctctctgaaggaataagacagtggtggaagctcaaacctggcccaccaccaccaaagcccgcagagcggcataaggacgacagcaggggtcttgtgcttcctgggtacaagtacctcggacccttcaacggactcgacaagggagagccggtcaacgaggcagacgccgcggctctcgagcacgacaaggcctacgaccggcagctcgacagcggagacaacccgtacctcaagtacaaccacgccgacgcggagtttcaggagcgtcttaaagaagatacgtcttttgggggcaacctcggacgagcagtcttccaggcgaaaaagagggttcttgaacctctgggcctggttgaggaacctgttaagacggctccgggaaaaaagaggccggtagagcactctcctgcggagccagactcctcctcgggaaccggaaaagcgggccagcagcctgcaagaaaaagactgaatttcggtcagactggagacgcagactccgtacctgacccccagcctctcggacagccaccagcagcccccacaagtttgggatctactacaatggctacaggcagtggcgcaccaatggcagacaataacgagggtgccgatggagtgggtaattcctcaggaaattggcattgcgattcccaatggctgggcgacagagtcatcaccaccagcacccgaacctgggccctgcccacctacaacaaccacctttacaagcaaatctccagccaatcaggagcctcaaacgacaaccactactttggctacagcaccccctgggggtattttgacttcaacagattccactgccgcttttcaccacgtgactggcaaagactcatcaacaacaactggggattccgacccaagagactcaacttcaagctctttaacattcaagtcaaagaggtcacgcagaatgacggtacgacgacgattgccaataaccttaccagcacggttcaggtgtttactgactcggagtaccagctcccgtacgtcctcggctcggcgcatcaaggatgcctcccgccgtttccagcggacgtcttcatggtcccacagtatggatacctcaccctgaacaacgggagtcaggcggtaggacgctcttccttttactgcctggagtactttccttctcagatgctgcgtactggaaacaactttcagttcagctacacttttgaagacgtgcctttccacagcagctacgctcacagccagggtttggatcggctgatgaatcctctgatcgaccagtacctgtattatctaaacagaacacaaacagctagtggaactcagcagtctcggctactgtttagccaagctggacccacaagcatgtctcttcaagctaaaaactggctgcctggaccgtgttatcgccagcagcgtttgtcaaagcaggcaaacgacaacaacaacagcaactttccctggactggagctaccaagtaccacctcaatggcggagactctttggtgaacccgggcccggccatggccagccacaaggacgatgaagaaaagtttttccccatgcatggaaccctaatatttggtaaagaaggaacaaatgctaccaacgcggaattggaaaatgtcatgattacagatgaagaggaaatcaggaccaccaatcccgtggctacagagcagtacggatatgtgtcaaataatttgcaaaactcaaatactgctgcaagtactgaaactgtgaatcaccaaggagcattacctggtatggtgtggcaggatcgagacgtgtacctgcggggacccatttgggccaagattcctcacgccgatggacactttcatccttctccactgatgggaggttttggactcaaacacccgcctcctcagattatgatcaaaaacactcccgttccagccaatcctcccacaaacttcagttctgccaagtttgcttccttcatcacacagtattccacgggacaggtcagcgtggagatcgagtgggagctgcagaaggagaacagcaaacgctggaatcccgaaattcagtacacttccaactacaacaaatctgttaatgtggactttactgtggacactaatggtgtgtattcagagcctcgccccattggcaccagatacctgactcgtaatctgtaattgcttgttaatcaataaaccgtttaattcgtttcagttgaactttggtctctgcgaagggcgaattcgcggccgctaaattcaattcg

SEQ ID NO: 306 - protein, 734 aa, Artificial Sequence
  Description of Artificial Sequence: Synthetic polypeptide
MAADGYLPDWLEDTLSEGIRQWWKLKPGPPPPKPAERHKDDSRGLVLPGYKYLGPFNGLDKGEPVNEADAAALEHDKAYDRQLDSGDNPYLKYNHADAEFQERLKEDTSFGGNLGRAVFQAKKRVLEPLGLVEEPVKTAPGKKRPVEHSPAEPDSSSGTGKAGQQPARKRLNFGQTGDADSVPDPQPLGQPPAAPTSLGSTTMATGSGAPMADNNEGADGVGNSSGNWHCDSQWLGDRVITTSTRTWALPTYNNHLYKQISSQSGASNDNHYFGYSTPWGYFDFNRFHCHFSPRDWQRLINNNWGFRPKRLNFKLFNIQVKEVTQNDGTTTIANNLTSTVQVFTDSEYQLPYVLGSAHQGCLPPFPADVFMVPQYGYLTLNNGSQAVGRSSFYCLECFPSQMLRTGNNFQFSYTFEDVPFHSSYAHSQSLDRLMNPLIDQYLYYLNRTQTASGTQQSRLLFSQAGPTSMSLQAKNWLPGPCYRQQRLSKQANDNNNSNFPWTGATKYHLNGRDSLVNPGPAMASHKDDEEKFFPMHGTLIFGKEGTNATNAELENVMITDEEEIRTTNPVATEQYGYVSNNLQNSNTAASTETVNHQGALPGMVWQDRDVYLQGPIWAKIPHTDGHFHPSPLMGGFGLKHPPPQIMIKNTPVPANPPTNFSSAKFASFITQYSTGQVSVEIEWELQKENSKRWNPEIQYTSNYNKSVNVDFTVDTNGVYSEPRPIGTRYLTRNL

SEQ ID NO: 307 - DNA, 2208 bp, Artificial Sequence
  Description of Artificial Sequence: Synthetic polynucleotide
atggctgccgatggttatcttccagattggctcgaggacactctctctgaaggaataagacagtggtggaagctcaaacctggcccaccaccaccaaagcccgcagagcggcataaggacgacagcaggggtcttgtgcttcctggatacaagtacctcggacccttcaacggactcgacaagggagagccggtcaacgaggcagacgccgcggccctcgagcacgacaaggcctacgaccggcagctcgacagcggagacaacccgtacctcaagtacaaccacgccgacgcggagtttcaggagcgccttaaagaagatacgtcttttgggggcaacctcggacgagcagtcttccaggcgaaaaagagggttcttgaacctctgggcctggttgaggaacctgttaagacggctccgggaaaaaagaggccggtagagcactctcctgtggagccagactcctcctcgggaaccggaaaagcgggcaaccagcctgcaagaaaaagattgaatttcggtcagactggagacgcagactccgtacctgacccccagcctctcggacagccaccagcatccccctctggtctgggaactaatacgatggctacaggcagtggcgcaccaatggcagacaataacgagggcgccgacggagtgggtaattcctcgggaaattggcattgcgattccacatggatgggcgacagagtcgtcaccaccagcacccgcacctgggccctgcccacctacaacaaccacctctacaagcagatttccagccaatcaggagccagcaacgacaaccactactttggctacagcaccccttgggggtattttgacttcaacagattccactgccacttttcgccacgcgactggcagagactcatcaacaacaactggggattccggcccaaaagactcaacttcaagctgtttaacattcaagtcaaggaggtcacgcagaatgacggtacgacgacgattgccaataaccttaccagcacggttcaggtgtttactgacttggagtaccagctcccgtacgtcctcggctcggcgcatcaaggatgcctcccgccgttcccagcagacgtcttcatggtgccacagtatggatacctcaccctgaacaacgggagtcaggcggtaggacgctcttccttttactgcctggagtactttccttctcagatgcttcgcaccggaaacaactttaccttcagctacacttttgaagacgttcctttccacagcagctacgctcacagtcaaagtctggaccgtctcatgaatcctctcatcgaccagtacctgtattacttgagcagaacaaacactccaagcggaaccactacgcagtccaggcttcagttttctcaggccggagcgagtgacattcgggaccagtctaggaactggcttcctggaccctgttaccgccagcagcgagtatcaaagacagctgcggataacaacaacagtgaatactcgtggactggagctaccaagtaccacctcaatggcagagactctctggtgaatccgggcccggccatggccagccacaaggacgatgaagaaaagttttttcctcaaagcggggttctcatctttgggaagcaaggctcagagaaaacaaatgtggacattgaaaaggtcatgattacagacgaagaggaaatcaggaccaccaatcccgtggctacggagcagtatggttctgtatctaccaacctccagagcggcaacacacaagcagctacctcagatgtcaacacacaaggcgttcttccaggcatggtctggcaggacagagacgtgtacctgcaggggcccatctgggcaaaaattccacacacggacggacattttcacccctctcccctcatgggcggatttggacttaaacaccctcctccacagattctcattaagaataccccggtacctgcgaatccttcgaccaccttcagcgcggcaaagtttgcttccttcatcacacagtattccacggggcaggtcagcgtggagatcgagtgggagctgcagaaggagaacagcaaacgctggaatcccgaaattcagtacacttccaactacaacaaatctgttaatgtggactttactgtggacactaatggggtgtattcagagcctcgccctattggcaccagatacctgactcgtaatctgtaa

SEQ ID NO: 308 - DNA, 3159 bp, Artificial Sequence
  Description of Artificial Sequence: Synthetic polynucleotide
gattgatttagcggccgcgaattcgcccttgctgcgtcaactggaccaatgagaactttcccttcaacgattgcgtcgacaagatggtgatctggtgggaggagggaaagatgaccgccaaggtcgtggagtcggccaaagccattctcggaggaagcaaggtgcgtgtggaccaaaagtgcaagtcttcggcccagatcgacccgactcccgtgatcgtcacctccaacaccaacatgtgcgccgtgattgatggaaactcaacgaccttcgagcaccagcagccgttgcaagaccggatgttcaaatttgaacttacccgccgtctggatcatgactttggaaaggtcaccaagcaggaagtgaaagactttttccggtgggcaaaggatcacgtggttgaggtggagcatgagttctacgtcaaaaagggtggagccaaaaaaagacccgcccccagtgacgcagatataagtgagcccaaacgggcgcgcgagtcagttgcgcagccatcgacgtcagacgcggaagcttcgatcaactacgcggacaggtaccaaaacaaatgttctcgtcacgtgggcatgaatctgatgctgtttccctgcagacaatgcgagagaatgaatcagaattcaaatatctgcttcactcacggacagaaagactgtccatagtgctttcccgtgtcagaatctcaacccgtttctgtcgtcaaaaaggcgtatcagaaactgtgctacattcatcacatcatgggaaaggtgccagacgcttgcactgcttgcgacctggtcaatgtggatttggatgactgcatctctgaacaataaatgatttaaatcaggtatggctgccgatggttatcttccagattggctcgaggacactctctctgaaggaataagacagtggtggaagctcaaacctggcccaccaccaccaaagcccgcagagcggcataaggacgacagcaggggtcttgtgcttcctggatacaagtacctcggacccttcaacggactcgacaagggagagccggtcaacgaggcagacgccgcggccctcgagcacgacaaggcctacgaccggcagctcgacagcggagacaacccgtacctcaagtacaaccacgccgacgcggagtttcaggagcgccttaaagaagatacgtcttttgggggcaacctcggacgagcagtcttccaggcgaaaaagagggttcttgaacctctgggcctggttgaggaacctgttaagacggctccgggaaaaaagaggccggtagagcactctcctgtggagccagactcctcctcgggaaccggaaaagcgggcaaccagcctgcaagaaaaagattgaatttcggtcagactggagacgcagactccgtacctgacccccagcctctcggacagccaccagcatccccctctggtctgggaactaatacgatggctacaggcagtggcgcaccaatggcagacaataacgagggcgccgacggagtgggtaattcctcgggaaattggcattgcgattccacatggatgggcgacagagtcgtcaccaccagcacccgcacctgggccctgcccacctacaacaaccacctctacaagcagatttccagccaatcaggagccagcaacgacaaccactactttggctacagcaccccttgggggtattttgacttcaacagattccactgccacttttcgccacgcgactggcagagactcatcaacaacaactggggattccggcccaaaagactcaacttcaagctgtttaacattcaagtcaaggaggtcacgcagaatgacggtacgacgacgattgccaataaccttaccagcacggttcaggtgtttactgacttggagtaccagctcccgtacgtcctcggctcggcgcatcaaggatgcctcccgccgttcccagcagacgtcttcatggtgccacagtatggatacctcaccctgaacaacgggagtcaggcggtaggacgctcttccttttactgcctggagtactttccttctcagatgcttcgcaccggaaacaactttaccttcagctacacttttgaagacgttcctttccacagcagctacgctcacagtcaaagtctggaccgtctcatgaatcctctcatcgaccagtacctgtattacttgagcagaacaaacactccaagcggaaccactacgcagtccaggcttcagttttctcaggccggagcgagtgacattcgggaccagtctaggaactggcttcctggaccctgttaccgccagcagcgagtatcaaagacagctgcggataacaacaacagtgaatactcgtggactggagctaccaagtaccacctcaatggcagagactctctggtgaatccgggcccggccatggccagccacaaggacgatgaagaaaagttttttcctcaaagcggggttctcatctttgggaagcaaggctcagagaaaacaaatgtggacattgaaaaggtcatgattacagacgaagaggaaatcaggaccaccaatcccgtggctacggagcagtatggttctgtatctaccaacctccagagcggcaacacacaagcagctacctcagatgtcaacacacaaggcgttcttccaggcatggtctggcaggacagagacgtgtacctgcaggggcccatctgggcaaaaattccacacacggacggacattttcacccctctcccctcatgggcggatttggacttaaacaccctcctccacagattctcattaagaataccccggtacctgcgaatccttcgaccaccttcagcgcggcaaagtttgcttccttcatcacacagtattccacggggcaggtcagcgtggagatcgagtgggagctgcagaaggagaacagcaaacgctggaatcccgaaattcagtacacttccaactacaacaaatctgttaatgtggactttactgtggacactaatggggtgtattcagagcctcgccctattggcaccagatacctgactcgtaatctgtaattgcttgttaatcaataaaccgtttaattcgtttcagttgaactttggtctctgcgaagggcgaattcgtttaaacctgcaggactagtccctttagtgagg

SEQ ID NO: 309 - protein, 735 aa, Artificial Sequence
  Description of Artificial Sequence: Synthetic polypeptide
MAADGYLPDWLEDTLSEGIRQWWKLKPGPPPPKPAERHKDDSRGLVLPGYKYLGPFNGLDKGEPVNEADAAALEHDKAYDRQLDSGDNPYLKYNHADAEFQERLKEDTSFGGNLGRAVFQAKKRVLEPLGLVEEPVKTAPGKKRPVEHSPVEPDSSSGTGKAGNQPARKRLNFGQTGDADSVPDPQPLGQPPASPSGLGTNTMATGSGAPMADNNEGADGVGNSSGNWHCDSTWMGDRVVTTSTRTWALPTYNNHLYKQISSQSGASNDNHYFGYSTPWGYFDFNRFHCHFSPRDWQRLINNNWGFRPKRLNFKLFNIQVKEVTQNDGTTTIANNLTSTVQVFTDLEYQLPYVLGSAHQGCLPPFPADVFMVPQYGYLTLNNGSQAVGRSSFYCLEYFPSQMLRTGNNFTFSYTFEDVPFHSSYAHSQSLDRLMNPLIDQYLYYLSRTNTPSGTTTQSRLQFSQAGASDIRDQSRNWLPGPCYRQQRVSKTAADNNNSEYSWTGATKYHLNGRDSLVNPGPAMASHKDDEEKFFPQSGVLIFGKQGSEKTNVDIEKVMITDEEEIRTTNPVATEQYGSVSTNLQSGNTQAATSDVNTQGVLPGMVWQDRDVYLQGPIWAKIPHTDGHFHPSPLMGGFGLKHPPPQILIKNTPVPANPSTTFSAAKFASFITQYSTGQVSVEIEWELQKENSKRWNPEIQYTSNYNKSVNVDFTVDTNGVYSEPRPIGTRYLTRNL

SEQ ID NO: 310 - DNA, 2205 bp, Artificial Sequence
  Description of Artificial Sequence: Synthetic polynucleotide
atggctgccgatggttatcttccagattggctcgaggacactctctctgaaggaataagacagtggtggaagctcaaacctggcccaccaccaaagcccgcagagcggcataaggacgacagcaggggtcttgtgcttcctggatacaagtacctcggacccttcaacggactcgacaagggagagccggtcaacgaggcagacgccgcggccctcgagcacgacaaggcctacgaccggcagctcgacagcggagacaacccgtacctcaagtacaaccacgccgacgcggagtttcaggagcgccttaaagaagatacgtcttttgggggcaacctcggacgagcagtcttccaggcgaaaaagagggttcttgaacctctgggcctggttgaggaacctgttaagacggctccgggaaaaaagaggcccgtagagcactctcctgtggagccagactcctcctcgggaaccggaaaagcgggcaaccagcctgcaagaaaaagattgaatttcggtcagactggagacgcagactccgtacctgacccccagcctctcggacagccaccagcagccccctctggtctgggaactaatacgatggctacaggcagtggcgcaccaatggcagacaataacgagggcgccgacggagtgggtaattcctcgggagattggcattgcgattccacatggatgggcgacagagtcatcaccaccagcacccgcacctgggccctgcccacctacaacaaccacctctacaagcagatttccagccaatcaggagccagcaatgacaaccactactttggctacagcaccccttgggggtattttgacttcaacagattccactgccacttttcgccacgcgactggcagagactcatcaacaacaactggggattccggcccaaaagactcaacctcaagctgtttaacattcaagtcaaggaggtcacgcagaatgacggtacgacgacgattgccaataaccttaccagcacggttcaggtgtttactgacttggagtaccagctcccgtacgtcctcggctcggcgcatcaaggatgcctcccgccgttcccagcagacgtcttcatggtgccacagtatggatacctcaccctgaacaacgggagtcaggcggtaggacgctcttccttttactgcctggagtactttccttctcagatgcttcgtaccggaaacaactttaccttcagctacacttttgaagacgttcctttccacagcagctacgctcacagtcaaagtctggaccgtctcatgaatcctctcatcgaccagtacctgtattacttgagcagaacaaacactccaagcggaaccactacgcagtccaggcttcagttttctcaggccggagcgagtgacattcgggaccagtctaggaactggcttcctggaccctgttaccgccagcagcgagtatcaaagacagctgcggataacaacaacggtgaatactcgtggactggagctaccaagtaccacctcaatggcagagactctctggtgaatccgggcccggccatggccagccacaaggacgatgaagaaaagttttttcctcaaagcggggttctcatctttgggaagcaaggctcagagaaaacaaatgtggacattgaaaaggtcatgattacagacgaagaggaaatcaggaccaccaatcccgtggctacggagcagtatggttctgtatctaccaacctccagagcggcaacacacgagcagctacctcagatgtcaacacacaaggcgttcttccaggcatggtctggcaggacagagacgtgtacctgcaggggcccatctgggcaaaaattccacacacggacggacattttcacccctctcccctcatgggcggatttggacttaaacaccctcctccacagattctcattaagaataccccggtacctgcgaatccttcgaccaccttcagcgcggcaaagtttgcttccttcatcacacagtattccacggggcaggtcagcgtggagatcgagtgggagctgcagaaggagaacagcaaacgctggaatcccgaaattcagtacacttccaactacaacaaatctgttaatgtggactttactgtggacactaatggggtgtattcagagcctcgccctattggcaccagatacctgactcgtaatctgtaa

SEQ ID NO: 311 - DNA, 3156 bp, Artificial Sequence
  Description of Artificial Sequence: Synthetic polynucleotide
cgattgaatttagcggccgcgaattcgcccttgctgcgtcaacggaccaatgagaactttcccttcaacgattgcgtcgacaagatggtgatctggtgggaggagggaaagatgaccgccaaggtcgtggagtcggccaaagccattctcggaggaagcaaggtgcgtgtggaccaaaagtgcaagtcttcggcccagatcgacccgactcccgtgatcgtcacctccaacaccaacatgtgcgccgtgattgatggaaactcaacgaccttcgagcaccagcagccgttgcaagaccggatgttcaaatttgaacttacccgccgtctggatcatgactttggaaaggtcaccaagcaggaagtgaaagactttttccggtgggcaaaggatcacgtggttgaggtggagcatgagttctacgtcaaaaagggtggagccaaaaaaagacccgcccccagtgacgcagatataagtgagcccaaacgggcgcgcgagtcagttgcgcagccatcgacgtcagacgcggaagcttcgatcaactacgcggacaggtaccaaaacaaatgttctcgtcacgtgggcatgaatctgatgctgtttccctgcagacaatgcgagcgaatgaatcagaattcaaatatctgcttcactcacggacagaaagactgtttagagtgctttcccgtgtcagaatctcaacccgtttctgtcgtcaaaaaggcgtatcagaaactgtgctacattcatcacatcatgggaaaggtgccagacgcttgcactgcttgcgacctggtcaatgtggatttggatgactgcatctctgaacaataaatgatttaaatcaggtatggctgccgatggttatcttccagattggctcgaggacactctctctgaaggaataagacagtggtggaagctcaaacctggcccaccaccaaagcccgcagagcggcataaggacgacagcaggggtcttgtgcttcctggatacaagtacctcggacccttcaacggactcgacaagggagagccggtcaacgaggcagacgccgcggccctcgagcacgacaaggcctacgaccggcagctcgacagcggagacaacccgtacctcaagtacaaccacgccgacgcggagtttcaggagcgccttaaagaagatacgtcttttgggggcaacctcggacgagcagtcttccaggcgaaaaagagggttcttgaacctctgggcctggttgaggaacctgttaagacggctccgggaaaaaagaggcccgtagagcactctcctgtggagccagactcctcctcgggaaccggaaaagcgggcaaccagcctgcaagaaaaagattgaatttcggtcagactggagacgcagactccgtacctgacccccagcctctcggacagccaccagcagccccctctggtctgggaactaatacgatggctacaggcagtggcgcaccaatggcagacaataacgagggcgccgacggagtgggtaattcctcgggagattggcattgcgattccacatggatgggcgacagagtcatcaccaccagcacccgcacctgggccctgcccacctacaacaaccacctctacaagcagatttccagccaatcaggagccagcaatgacaaccactactttggctacagcaccccttgggggtattttgacttcaacagattccactgccacttttcgccacgcgactggcagagactcatcaacaacaactggggattccggcccaaaagactcaacctcaagctgtttaacattcaagtcaaggaggtcacgcagaatgacggtacgacgacgattgccaataaccttaccagcacggttcaggtgtttactgacttggagtaccagctcccgtacgtcctcggctcggcgcatcaaggatgcctcccgccgttcccagcagacgtcttcatggtgccacagtatggatacctcaccctgaacaacgggagtcaggcggtaggacgctcttccttttactgcctggagtactttccttctcagatgcttcgtaccggaaacaactttaccttcagctacacttttgaagacgttcctttccacagcagctacgctcacagtcaaagtctggaccgtctcatgaatcctctcatcgaccagtacctgtattacttgagcagaacaaacactccaagcggaaccactacgcagtccaggcttcagttttctcaggccggagcgagtgacattcgggaccagtctaggaactggcttcctggaccctgttaccgccagcagcgagtatcaaagacagctgcggataacaacaacggtgaatactcgtggactggagctaccaagtaccacctcaatggcagagactctctggtgaatccgggcccggccatggccagccacaaggacgatgaagaaaagttttttcctcaaagcggggttctcatctttgggaagcaaggctcagagaaaacaaatgtggacattgaaaaggtcatgattacagacgaagaggaaatcaggaccaccaatcccgtggctacggagcagtatggttctgtatctaccaacctccagagcggcaacacacgagcagctacctcagatgtcaacacacaaggcgttcttccaggcatggtctggcaggacagagacgtgtacctgcaggggcccatctgggcaaaaattccacacacggacggacattttcacccctctcccctcatgggcggatttggacttaaacaccctcctccacagattctcattaagaataccccggtacctgcgaatccttcgaccaccttcagcgcggcaaagtttgcttccttcatcacacagtattccacggggcaggtcagcgtggagatcgagtgggagctgcagaaggagaacagcaaacgctggaatcccgaaattcagtacacttccaactacaacaaatctgttaatgtggactttactgtggacactaatggggtgtattcagagcctcgccctattggcaccagatacctgactcgtaatctgtaattgcttgttaatcaataaaccgtttaattcgtttcagttgaactttggtctctgcgaagggcgaattcgtttaaacctgcaggactagtccctttagtgag

SEQ ID NO: 312 - protein, 734 aa, Artificial Sequence
  Description of Artificial Sequence: Synthetic polypeptide
MAADGYLPDWLEDTLSEGIRQWWKLKPGPPPKPAERHKDDSRGLVLPGYKYLGPFNGLDKGEPVNEADAAALEHDKAYDRQLDSGDNPYLKYNHADAEFQERLKEDTSFGGNLGRAVFQAKKRVLEPLGLVEEPVKTAPGKKRPVEHSPVEPDSSSGTGKAGNQPARKRLNFGQTGDADSVPDPQPLGQPPAAPSGLGTNTMATGSGAPMADNNEGADGVGNSSGDWHCDSTWMGDRVITTSTRTWALPTYNNHLYKQISSQSGASNDNHYFGYSTPWGYFDFNRFHCHFSPRDWQRLINNNWGFRPKRLNLKLFNIQVKEVTQNDGTTTIANNLTSTVQVFTDLEYQLPYVLGSAHQGCLPPFPADVFMVPQYGYLTLNNGSQAVGRSSFYCLEYFPSQMLRTGNNFTFSYTFEDVPFHSSYAHSQSLDRLMNPLIDQYLYYLSRTNTPSGTTTQSRLQFSQAGASDIRDQSRNWLPGPCYRQQRVSKTAADNNNGEYSWTGATKYHLNGRDSLVNPGPAMASHKDDEEKFFPQSGVLIFGKQGSEKTNVDIEKVMITDEEEIRTTNPVATEQYGSVSTNLQSGNTRAATSDVNTQGVLPGMVWQDRDVYLQGPIWAKIPHTDGHFHPSPLMGGFGLKHPPPQILIKNTPVPANPSTTFSAAKFASFITQYSTGQVSVEIEWELQKENSKRWNPEIQYTSNYNKSVNVDFTVDTNGVYSEPRPIGTRYLTRNL

SEQ ID NO: 313 - DNA, 2208 bp, Artificial Sequence
  Description of Artificial Sequence: Synthetic polynucleotide
atggctgccgatggttatcttccagattggctcgaggacactctctctgaaggaataagacagtggtggaagctcaaacctggcccaccaccaccaaagcccgcagagcggcataaggacgacagcaggggtcttgtgcttcctgggtacaagtacctcggacccttcaacggactcgacaagggagagccggtcaacgaggcagacgccgcggccctcgagcacgacaaggcctacgaccggcagctcgacagcggagacaacccgtacctcaagtacgaccacgccgacgcggagtttcaggagcgccttaaagaagatacgtcttttgggggcaacctcggacgagcagtcttccaggcaaaaaagagggttcttgaacctctgggcctggttgaggagcctgttaagacggctccgggaaaaaagaggccggtagagcactctcctgtggagccagactcctcctcgggaaccggaaaagcgggcaaccagcctgcaagaaagagattgaatttcggtcagactggagacgcagactccgtacctgacccccagcctctcggacagccaccagcagccccctctggtctgggaactaatacgatggctacaggcagtggcgcaccaatggcagacaataacgatggcgccgacggagtgggtaattcctcgggaaattggcattgcgattccacatggatgggcgacagagtcatcaccaccagcacccgaacctgggctctgcccacctacaacaaccatctgtacaagcagatttccagccaatcaggagccagcaacgacaaccactactttggctacagcaccccttgggggtattttgacttcaacagattccactgccacttttcaccacgtgactggcaaagactcatcaacaacaactggggattccggcccaagagactcaacttcaagctctttaacattcaagtcagagaggtcacgcagaatgatggtacgacgacgattgccaataaccttaccagcacggttcaggtgtttactgactcggagtaccagctcccgtacgtcctcggctcggcgcatcaaggatgcctcccgccgttcccagcagacgtcttcatggtgccacagtatggatacctcaccctgaacaacgggagtcaggcagtaggacgctcttcattttactgcctggagtacttcccttctcagatgctgcgtaccggaaacaactttaccttcagctacacctttgaggatgttcctttccacagcagctacgctcacagccagagtttggaccgtctcatgaatcctctcatcgaccagtacctgtattacttgagcagaacaaacactccaagcggaaccaccacgcagtccaggcttcagttttctcaggccggagcgagtgacattcgggatcagtctaggaactggcttcctggaccctgttaccgccagcagcgagtatcaaagacatctgcggacaacaacaacagtgaatactcgtggattggagctaccaagtaccacctcaatggcagagactctctggtgaatccgggcccggcaatggccagccacaaggacgatgaagaaaagttttttcctcagagcggggttctcatctttggaaaacaaggatcagagaaaacaaatgtggacattgaaaaggtcatgattacagacgaagaggaaatcagaaccaccaatcccgtggccacggagcagtatggttctgtatctaccaacctccagagcggcaacacacaagcatctactgcagatgtcaacacacaaggcgttcttccaggcatggtctggcaggacagagacgtgtacctgcaggggcctatctgggcaaagattccgcacacggacggacattttcacccctctcccctcatgggcggattcggacttaaacaccctcctccacagattctcatcaaaaacaccccggtacctgcgaatccttcgaccaccttcagtgcggcaaagtttgcttccttcatcacacagtattccacggggcgggtcagcgtggagatcgagtgggagctacagaaggagaacagcaaacgctggaatcccgagatccagtacacttccaactacaacaaatctgttaatgtggactttactgtggacactaatggtgtgtattcagagcctcgccccattggcaccagatacctgactcgtaatctgtaa

SEQ ID NO: 314 - protein, 735 aa, Artificial Sequence
  Description of Artificial Sequence: Synthetic polypeptide
MAADGYLPDWLEDTLSEGIRQWWKLKPGPPPPKPAERHKDDSRGLVLPGYKYLGPFNGLDKGEPVNEADAAALEHDKAYDRQLDSGDNPYLKYDHADAEFQERLKEDTSFGGNLGRAVFQAKKRVLEPLGLVEEPVKTAPGKKRPVEHSPVEPDSSSGTGKAGNQPARKRLNFGQTGDADSVPDPQPLGQPPAAPSGLGTNTMATGSGAPMADNNDGADGVGNSSGNWHCDSTWMGDRVITTSTRTWALPTYNNHLYKQISSQSGASNDNHYFGYSTPWGYFDFNRFHCHFSPRDWQRLINNNWGFRPKRLNFKLFNIQVREVTQNDGTTTIANNLTSTVQVFTDSEYQLPYVLGSAHQGCLPPFPADVFMVPQYGYLTLNNGSQAVGRSSFYCLEYFPSQMLRTGNNFTFSYTFEDVPFHSSYAHSQSLDRLMNPLIDQYLYYLSRTNTPSGTTTQSRLQFSQAGASDIRDQSRNWLPGPCYRQQRVSKTSADNNNSEYSWIGATKYHLNGRDSLVNPGPAMASHKDDEEKFFPQSGVLIFGKQGSEKTNVDIEKVMITDEEEIRTTNPVATEQYGSVSTNLQSGNTQASTADVNTQGVLPGMVWQDRDVYLQGPIWAKIPHTDGHFHPSPLMGGFGLKHPPPQILIKNTPVPANPSTTFSAAKFASFITQYSTGRVSVEIEWELQKENSKRWNPEIQYTSNYNKSVNVDFTVDTNGVYSEPRPIGTRYLTRNL

SEQ ID NO: 315 - DNA, 2217 bp, Artificial Sequence
  Description of Artificial Sequence: Synthetic polynucleotide
atggctgccgatggttatcttccagattggctcgaggacaacctctctgagggcattcgcgagtggtgggacttgaaacctggagccccgaaacccaaagccaaccagcaaaagcaggacgacggccggggtctggtgcttcctggctacaagtacctcggacccttcaacggactcgacaagggggagcccgtcaacgcggcggacgcagcggccctcgagcacgacaaggcctacgaccagcagctcaaagcgggtgacaatccgtacctgcggtataaccacgccgacgccgagtttcaggagcgtctgcaagaagatacgtcttttgggggcaacctcgggcgagcagtcttccaggccaagaagcgggttctcgaacctctcggtctggttgaggaaggcgctaagacggctcctggaaagaagagaccggtagagccatcaccccagcgttctccagactcctctacgggcatcggcaagacaggccagcagcccgcgaaaaagagactcaactttgggcagactggcgactcagagtcagtgcccgaccctcaaccaatcggagaaccccccgcaggcccctctggtctgggatctggtacaatggctgcaggcggtggcgctccaatggcagacaataacgaaggcgccgacggagtgggtagttcctcaggaaattggcattgcgattccgcatggctgggcgacagagtcatcaccaccagcacccgaccctgggccctccccacctacaacaaccacctctacaagcaaatctccaacgggacatcgggaggaagcaccaacgacaacacctacttcggctacagcaccccctgggggtattttgactttaacagattccactgccacttctcaccacgtgactggcagcgactcatcaacaacaactggggattccggcccaagagactcaacttcaagctcttcaacatccaggtcaaggaggtcacgcagaatgaaggcaccaagaccatcgccaataaccttaccagcacgattcaggtctttacggactcggaataccagctcccgtacgtcctcggctctgcgcaccagggctgcccgcctccgttcccggcggacgtcttcatgattcctcagtacgggtacctgactctgaacaacggcagtcaggccgtgggccgttcctccttctactgcctggagtactttccttctcaaatgcggagaacgggcaacaactttgagttcagctaccagtttgaggacgtgccttttcacagcagctacgcgcatagccaaagcctggaccggctgatgaaccccctcatcgaccagtacctgtactacctgtctcggactcagtccacgggaggtaccgcaggaactcagcagttgctattttctcaggccgggcctaataacatgtcggctcaggccaaaaactggctacccgggccctgctaccggcagcaacgcgtctccacgacactgtcgcaaaataacaacagcaactttgcttggaccggtgccaccaagtatcatctgaatggcagagactctctggtaaatcccggtgtcgctatggcaacgcacaaggacgacgaagagcgattttttccatccagcggagtcttgatgtttgggaaacagggagctggaaaagacaacgtggactatagcagcgttatgctaaccagtgaggaagaaatcaaaaccaccaacccagtggccacagaacagtacggcgtggtggccgataacctgcaacagcaaaacgccgctcctattgtaggggccgtcaacagtcaaggagccttacctggcatggtctggcagaaccgggacgtgtacctgcagggtcctatctgggccaagattcctcacacggacggcaactttcatccttcgccgctgatgggaggctttggactgaaacacccgcctcctcagatcctgattaagaatacacctgttcccgcggatcctccaactaccttcagtcaagccaagctggcgtcgttcatcacgcagtacagcaccggacaggtcagcgtggaaattgaatgggagctgcagaaagagaacagcaagcgctggaacccagagattcagtatacttccaactactacaaatctacaaatgtggactttgctgtcaatactgagggtacttattcagagcctcgccccattggcacccgttacctcacccgtaacctgtaa

SEQ ID NO: 316 - protein, 738 aa, Artificial Sequence
  Description of Artificial Sequence: Synthetic polypeptide
MAADGYLPDWLEDNLSEGIREWWDLKPGAPKPKANQQKQDDGRGLVLPGYKYLGPFNGLDKGEPVNAADAAALEHDKAYDQQLKAGDNPYLRYNHADAEFQERLQEDTSFGGNLGRAVFQAKKRVLEPLGLVEEGAKTAPGKKRPVEPSPQRSPDSSTGIGKTGQQPAKKRLNFGQTGDSESVPDPQPIGEPPAGPSGLGSGTMAAGGGAPMADNNEGADGVGSSSGNWHCDSAWLGDRVITTSTRPWALPTYNNHLYKQISNGTSGGSTNDNTYFGYSTPWGYFDFNRFHCHFSPRDWQRLINNNWGFRPKRLNFKLFNIQVKEVTQNEGTKTIANNLTSTIQVFTDSEYQLPYVLGSAHQGCPPPFPADVFMIPQYGYLTLNNGSQAVGRSSFYCLEYFPSQMRRTGNNFEFSYQFEDVPFHSSYAHSQSLDRLMNPLIDQYLYYLSRTQSTGGTAGTQQLLFSQAGPNNMSAQAKNWLPGPCYRQQRVSTTLSQNNNSNFAWTGATKYHLNGRDSLVNPGVAMATHKDDEERFFPSSGVLMFGKQGAGKDNVDYSSVMLTSEEEIKTTNPVATEQYGVVADNLQQQNAAPIVGAVNSQGALPGMVWQNRDVYLQGPIWAKIPHTDGNFHPSPLMGGFGLKHPPPQILIKNTPVPADPPTTFSQAKLASFITQYSTGQVSVEIEWELQKENSKRWNPEIQYTSNYYKSTNVDFAVNTEGTYSEPRPIGTRYLTRNL

SEQ ID NO: 317 - protein, 735 aa, Artificial Sequence
  Description of Artificial Sequence: Synthetic polypeptide
MAADGYLPDWLEDTLSEGIRQWWKLKPGPPPPKPAERHKDDSRGLVLPGYKYLGPFNGLDKGEPVNEADAAALEHDKAYDRQLDSGDNPYLKYNHADAEFQERLKEDTSFGGNLGRAVFQAKKRVLEPLGLVEEPVKTAPGKKRPVEHSPVEPDSSSGTGKAGQQPARKRLNFGQTGDADSVPDPQPLGQPPAAPSGLGSTTMATGSGAPMADNNEGADGVGNSSGNWHCDSQWLGDRVITTSTRTWALPTYNNHLYKQISSQSGASNDNHYFGYSTPWGYFDFNRFHCHFSPRDWQRLINNNWGFRPKRLNFKLFNIQVKEVTQNDGTTTIANNLTSTVQVFTDSEYQLPYVLGSAHQGCLPPFPADVFMVPQYGYLTLNNGSQAVGRSSFYCLEYFPSQMLRTGNNFQFSYTFEDVPFHSSYAHSQSLDRLMNPLVDQYLYYLNKTQTNSGTLQQSRLLFSQAGPTNMSLQAKNWLPGPCYRQQRLSKQANDNNNSNFPWTAATKYHLNGRDSLVNPGPAMASHKDDEEKFFPMHGTLIFGKQGTNANDADLENVMITDEEEIRTTNPVATEQYGTVSNNLQNSNTGPTTGTVNHQGALPGMVWQDRDVYLQGPIWAKIPHTDGHFHPSPLMGGFGLKHPPPQIMIKNTPVPANPPTNFSSAKFASFITQYSTGQVSVEIEWELQKENSKRWNPEIQYTSNYNKSVNVDFTVDTNGVYSEPRPIGTRYLTRNL

SEQ ID NO: 318 - DNA, 3158 bp, Artificial Sequence
  Description of Artificial Sequence: Synthetic polynucleotide
gattgaatttagcggccgcgaattcgcccttgctgcgtcaactggaccaatgagaactttcctttcaatgattgcgtcgacaagatggtgatctggtgggaggagggaaagatgaccgccaaggtcgtggagtcggccaaagccattctcggaggaagcaaggtgcgcgcggaccagaaatgcaagtcctcggcccagatagacccgactcccgtgattgtcacctccaacaccaacatgtgcgccgtgattgacgggaactcaacgaccttcgaacaccagcagccgttgcaagaccggatgttcaaatttgaactcacccgccgtctggatcatgactttgggaaggtcaccaagcaggaagtcaaagactttttccggtgggcaaaggatcacgtggttgaggtggagcatgaattctacgtcaaaaagggtggagctaagaaaagacccgcccccagtgacgcagatataagtgagcccaaacgggcgcgcgagtcagttgcgcagccatcgacgtcagacgcggaagcttcgatcaactacgcgggcaggtaccaaaacaaatgttctcgtcacgtgggcatgaatctgatgctgtttccctgcagacaatgcgagagaatgaatcagaattcaaatatctgcttcactcacggacagaaagactgtttagagtgctttcccgtgtcagaatctcaacccgtttctgtcgtcaaaaaggcgtatcagaaactttgctacattcatcatatcatgggaaaggtgccagacgcttgcactgcctgcgatctggtcaatgtggatttggatgactgcatctctgaacaataaatgatttaaatcaggtatggctgccgatggttatcttccagattggctcgaggacactctctctgaaggaataagacagtggtggaagctcaaacctggcccaccaccaccaaagcccgcagagcggcataaggacgacagcaggggtcttgtgcttcctgggtacaagtacctcggacccttcaacggactcgacaagggggagccggtcaacgaggcagacgccgcggccctcgagcacgacaaggcctacgaccggcagctcgacagcggagacaacccgtacctcaagtacaaccacgccgacgcggagtttcaggagcgccttaaagaagatacgtcttttgggggcaacctcggacgagcagtcttccaggcaaaaaagagggttcttgaacctctgggcctggttgaggaacctgttaaaacggctccgggaaaaaagaggccggtagagcactctcctgtggagccagactcctcctcgggaaccggaaaagcgggccagcagcctgcaagaaaaagattgaatttcggtcagactggagacgcagactccgtacctgacccccagcctctcggacagccaccagcagccccctctggtctgggatctactacaatggctacaggcagtggcgcaccaatggcagacaataacgagggtgccgatggagtgggtaattcctcgggaaattggcattgcgattcccaatggctgggcgacagagtcatcaccaccagcacccgcacctgggccctgcccacctacaacaaccacctctacaagcaaatctccagccaatcaggagcctcaaacgacaaccactactttggctacagcaccccctgggggtattttgacttcaacagattccactgccacttttcaccacgtgactggcaaagactcatcaacaacaactggggattccgacccaagagactcaacttcaagctctttaacattcaagtcaaagaggtcacgcagaatgacggtacgacgacgattgccaataaccttaccagcacggttcaggtgtttactgactcggagtaccagctcccgtacgtcctcggctcggcgcatcaaggatgcctcccgccgtttccagcggacgtcttcatggtcccacagtatggatacctcaccctgaacaacgggagtcaggcagtaggacgctcttcattttactgcctggagtactttccttctcagatgctgcgtaccggaaacaactttcaattcagctacacttttgaagacgtgcctttccacagcagctacgctcacagccagagtctggatcggctgatgaatcctctggtcgaccagtacctgtattatctgaacaagacacaaacaaatagtggaactcttcagcagtctcggctactgtttagccaagctggacccaccaacatgtctcttcaagctaaaaactggctgcctggaccttgctacagacagcagcgtctgtcaaagcaggcaaacgacaacaacaacagcaactttccctggactgcagctacaaagtatcatctaaatggccgggactcgttggttaatccaggaccagctatggccagtcacaaggatgacgaagaaaagtttttccccatgcatggaacccttatatttggtaaacaaggaacaaatgccaacgacgcggatttggaaaatgtcatgattacagatgaagaagaaatcaggaccaccaatcccgtggctacggagcagtacggaactgtatcaaataatttgcaaaactcaaacactggtccaactactggaactgtcaatcaccaaggagcgttacctggtatggtgtggcaggatcgagacgtgtacctgcagggacccatttgggccaagattcctcacaccgatggacactttcatccttctccactgatgggaggttttggactcaaacacccacctcctcaaatcatgatcaaaaacactcccgttccagccaatcctcccacaaacttcagttctgccaagtttgcttctttcatcacacagtattccacggggcaggtcagcgtggagatcgagtgggagctgcagaaggagaacagcaaacgctggaatcccgaaattcagtacacttccaactacaacaaatctgttaatgtggactttactgtggacactaatggtgtgtattcagagcctcgccccattggcaccagatacctgactcgtaatctgtaattgcttgttaatcaataaaccgtttaattcgtttcagttgaactttggtctctgcgaagggcgaattcgtttaaacctgcaggactagtccctttagtga

SEQ ID NO: 319 - protein, 735 aa, Artificial Sequence
  Description of Artificial Sequence: Synthetic polypeptide
MAADGYLPDWLEDTLSEGIRQWWKLKPGPPPPKPAERHKDDSRGLVLPGYKYLGPFNGLDKGEPVNEADAAALEHDKAYDRQLDSGDNPYLKYNHADAEFQERLKEDTSFGGNLGRAVFQAKKRVLEPLGLVEEPVKTAPGKKRPVEHPPVEPDSSSGTGKAGQQPARKRLNFGQTGDADSVPDPQPLGQPPAAPSGLGSTTMATGSGAPMADNNEGADGVGNSSGNWHCDSQWLGDRVITTSTRTWALPTYNNHLYKQISSQSGASNDNHYFGYSTPWGYFDFNRFHCHFSPRDWQRLINNNWGFRPKRLNFKLFNIQVKEVTQNDGTTTIANNLTSTVQVFTDSEYQLPYVLGSAHQGCLPPFPADVFMVPQYGYLTLNNGSQAVGRSSFYCLEYFPSQMLRTGNNFQFSYTFEDVPFHSSYAHSQSLDRLMNPLIDQYLYYLNKTQTNSGTLQQSRLLFSQAGPTNMSLQAKNRLPGPCYRQQRLSKQANDNNNSNFPWTAATKYHLNGRDSLVNPGPAMASHKDDEEKFFPMHGTLIFGKQGTNANDADLENVMITDEEEIRTTNPVATEQYGTVSNNLQNSNTGPTTGTVNHQGALPGMVWQDRDVYLQGPIWAKIPHTDGHFHPSPLVGGFGLKHPPPQIMIKNTPVPANPPTNFSSAKFASFITQYSTGQVSVEIEWELQKENSKRWNPEIQYTSNYNKSVNVDFTVDTNGVYSEPRPIGTRYLTRNL

SEQ ID NO: 320 - DNA, 3159 bp, Artificial Sequence
  Description of Artificial Sequence: Synthetic polynucleotide
gattgaatttagcggccgcgaattcgcccttgctgcgtcaactggaccaatgagaactttcctttcaatgattgcgtcgacaagatggtgatctggtgggaggagggaaagatgaccgccaaggtcgtggagtcggccaaagccattctcggaggaagcaaggtgcgcgtggaccagaaatgcaagtcctcggcccagatagacccgactcccgtgattgtcacctccaacaccgacatgtgcgccgtgattgacgggaactcaacgaccttcgaacaccagcagccgttgcaagaccggatgttcaaatttgaactcacccgccgtctggatcatgactttgggaaggtcaccaagcaggaagtcaaagactttttccggtgggcaaaggatcacgtggttgaggtggagcatgaattctacgtcaaaaagggtggagctaagaaaagacccgcccccagtgacgcagatataagtgagcccaaacgggcgcgcgagtcagttgcgcagccatcgacgtcagacgcggaagcttcgatcaactacgcggacaggtaccaaaacaaatgttctcgtcacgtgggcatgaatctgatgctgtttccctgcagacaatgcgagagaatgaatcagaattcaaatatctgcttcactcacggacagaaagactgtttagagtgctttcccgtgtcagaatctcaacccgtttctgtcgtcaaaaaggcgtatcagaaactttgctacattcatcatatcatgggaaaggtgccagacgcttgcactgcctgcgatctggtcaatgtggatttggatgactgcatctctgaacaataaatgatttaaatcaggtatggctgccgatggttatcttccagattggctcgaggacactctctctgaaggaataagacagtggtggaagctcaaacctggcccaccaccaccaaagcccgcagagcggcataaggacgacagcaggggtcttgtgcttcctgggtacaagtacctcggacccttcaacggactcgacaagggggagccggtcaacgaggcagacgccgcggccctcgagcacgacaaggcctacgaccggcagctcgacagcggagacaacccgtacctcaagtacaaccacgccgacgcggagtttcaggagcgccttaaagaagatacgtcttttgggggcaacctcggacgagcagtcttccaggcaaaaaagagggttcttgaacctctgggcctggttgaggaacctgttaaaacggctccgggaaaaaagaggccggtagagcaccctcctgtggagccagactcctcctcgggaaccggaaaagcgggccagcagcctgcaagaaaaagattgaatttcggtcagactggagacgcagactccgtacctgacccccagcctctcggacagccaccagcagccccctctggtctgggatctactacaatggctacaggcagtggcgcaccaatggcagacaataacgagggtgccgatggagtgggtaattcctcgggaaattggcattgcgattcccaatggctgggcgacagagtcatcaccaccagcacccgcacctgggccctgcccacctacaacaaccacctctacaagcaaatctccagccaatcaggagcctcaaacgacaaccactactttggctacagcaccccctgggggtattttgacttcaacagattccactgccacttttcaccacgtgactggcaaagactcatcaacaacaactggggattccgacccaagagactcaacttcaagctctttaacattcaagtcaaagaggtcacgcagaatgacggtacgacgacgattgccaataaccttaccagcacggttcaggtgtttactgactcggagtaccagctcccgtacgtcctcggctcggcgcatcaaggatgcctcccgccgtttccagcggacgtcttcatggtcccacagtatggatacctcaccctgaacaacgggagtcaggcagtaggacgctcttcattttactgcctggagtactttccttctcagatgctgcgtaccggaaacaactttcagttcagctacacttttgaagacgtgcctttccacagcagctacgctcacagccagagtctggatcggctgatgaatcctctgatcgaccagtacctgtattatctgaacaagacacaaacaaatagtggaactcttcagcagtctcggctactgtttagccaagctggacccaccaacatgtctcttcaagctaaaaaccggctgcctggaccttgctacagacagcagcgtctgtcaaagcaggcaaacgacaacaacaacagcaactttccctggaccgcagctacaaagtatcatctaaatggccgggactcgttggttaatccaggaccagctatggccagtcacaaggatgacgaagaaaagtttttccccatgcatggaacccttatatttggtaaacaaggaacaaatgccaacgacgcggatttggaaaatgtcatgattacagatgaagaagaaatcaggaccaccaatcccgtggctacggagcagtacggaactgtatcaaataatttgcaaaactcaaacactggtccaactactggaactgtcaatcaccaaggagcgttacctggtatggtgtggcaggatcgagacgtgtacctgcagggacccatttgggccaagattcctcacaccgatggacactttcatccttctccactggtgggaggttttggactcaaacacccacctcctcaaatcatgatcaaaaacactcccgttccagccaatcctcccacaaacttcagttctgccaagtttgcttctttcatcacacagtattccacggggcaggtcagcgtggagatcgagtgggagctgcagaaggagaacagcaaacgctggaatcccgaaattcagtacacttccaactacaacaaatctgttaatgtggactttactgtggacactaatggtgtgtattcagagcctcgccccattggcaccagatacctgactcgtaatctgtaattgcttgttaatcaataaaccgtttaattcgtttcagttgaactttggtctctgcgaagggcgaattcgtttaaacctgcaggactagtccctttagtgag

SEQ ID NO: 321 - DNA, 2208 bp, Artificial Sequence
  Description of Artificial Sequence: Synthetic polynucleotide
atggctgccgatggttatcttccagattggctcgaggacactctctctgaaggaataagacagtggtggaagctcaaacctggcccaccaccaccaaagcccgcagagcggcataaggacgacagcaggggtcttgtgcttcctgggtacaagtaccttggacccttcaacggactcgacaagggagagccggtcaacgaggcagacgccgcggccctcgagcacgacaaggcctacgaccggcagctcgacagcggagacaacccgtaccccaagtacaaccacgccgacgcggagttccaggagcgtcttaaagaagatacgtcttttgggggcaacctcggacgagcagtcttccaggcgaaaaagagggttcttgaacctctgggcctggttgaggaacctgttaagacggctccgggaaaaaagaggccggtagagcactctcctgcggagccagactcctcctcgggaaccggaaaagcgggccagcagcctgcaagaaagagattgaatttcggtcagactggagacgcagactccgtacctgacccccagcctctcggacagccaccagcagccccctctggtctgggaactaatacgatggctacaggcagtggcgcaccaatggcagacaataacgagggcgccgacggagtgggtaattcctcgggaaattggcattgcgattccacatggatgggcgacagagtcatcaccaccagcacccgcacctgggctctgcccacctacaacaaccacctctacaagcagatttccagccaatcaggagcctcaaacgacaaccactactttggctacagcaccccttgggggtattttgacttcaacagattccactgccacttttcgccacgtgactggcaaagactcatcaacaacaattggggattccggcccaaaagactcaacttcaagctctttaacattcaagtcaaggaggtcacgcagaatgacggtacgacgacgattgccaataaccttaccagcacggttcaggtgtttactgactcggagtaccagctcccgtacgtcctcggctcggcgcatcaaggatgcctcccgccgttcccagcagacgtcttcatggtgccacagtatggatacctcaccctgaacaacgggagtcaggcagtaggacgctcttcattttactgcctggagtactttccttctcagatgctgcgtaccggaaacaactttaccttcagctacacctttgaggacgttcctttccacagcagctacgcccacagccagagtttggaccgtctcatgaatcctctcatcgaccagtacctgtattacttgagcagaacaaacactccaagcggaaccaccacgcagtcaaggcttcagttttctcaggccggagcaagtgacattcgggaccagtctaggaactggcttcctggaccctgttaccgccagcagcgagtatcaaagacatctgcggataacaacaacagtgaatactcgtggactggagctaccaagtaccaccttaatggaagagactctctggtgaatccgggcccggccatggccagccacaaggacgatgaagaaaagttttttcctcagagcggggttctcatctttggaaaacaagactcgggaaaaactaatgtggacattgaaaaggtcatgattacagacgaagaggaaatcaggaccaccaatcccgtggctacggagcagtatggttctgtatctaccaacctccagagcggcaacacacaagcagctacctcagatgtcaacacacaaggcgttcttccaggcatggtgtggcaggacagagacgtgtacctgcaggggcccatctgggcaaagattccacacacggacggacattttcacccctctcccctcatgggcggattcggacttaaacaccctcccccgcagattctcatcaagaacaccccggtacctgcgaatccttcgactaccttcagtgcggcaaagtttgcttccttcattacacagtactccacggggcaggtcagcgtggagatcgagtgggagctgcagaaggagaacagcaaacgctggaatcccgagattcagtacacttccaactacaacaaatctgttaatgtggactttactgtggacactaatggtgtgtattcagagcctcgccccattggcaccaggtacctgactcgtaatctgtaa

SEQ ID NO: 322 - protein, 735 aa, Artificial Sequence
  Description of Artificial Sequence: Synthetic polypeptide
MAADGYLPDWLEDTLSEGIRQWWKLKPGPPPPKPAERHKDDSRGLVLPGYKYLGPFNGLDKGEPVNEADAAALEHDKAYDRQLDSGDNPYPKYNHADAEFQERLKEDTSFGGNLGRAVFQAKKRVLEPLGLVEEPVKTAPGKKRPVEHSPAEPDSSSGTGKAGQQPARKRLNFGQTGDADSVPDPQPLGQPPAAPSGLGTNTMATGSGAPMADNNEGADGVGNSSGNWHCDSTWMGDRVITTSTRTWALPTYNNHLYKQISSQSGASNDNHYFGYSTPWGYFDFNRFHCHFSPRDWQRLINNNWGFRPKRLNFKLFNIQVKEVTQNDGTTTIANNLTSTVQVFTDSEYQLPYVLGSAHQGCLPPFPADVFMVPQYGYLTLNNGSQAVGRSSFYCLEYFPSQMLRTGNNFTFSYTFEDVPFHSSYAHSQSLDRLMNPLIDQYLYYLSRTNTPSGTTTQSRLQFSQAGASDIRDQSRNWLPGPCYRQQRVSKTSADNNNSEYSWTGATKYHLNGRDSLVNPGPAMASHKDDEEKFFPQSGVLIFGKQDSGKTNVDIEKVMITDEEEIRTTNPVATEQYGSVSTNLQSGNTQAATSDVNTQGVLPGMVWQDRDVYLQGPIWAKIPHTDGHFHPSPLMGGFGLKHPPPQILIKNTPVPANPSTTFSAAKFASFITQYSTGQVSVEIEWELQKENSKRWNPEIQYTSNYNKSVNVDFTVDTNGVYSEPRPIGTRYLTRNL

SEQ ID NO: 323 - DNA, 2208 bp, Artificial Sequence
  Description of Artificial Sequence: Synthetic polynucleotide
atggctgccgatggttatcttccagattggctcgaggacactctctctgaaggaataagacagtggtggaagctcaaacctggcccaccaccaccaaagcccgcagagcggcataaggacgacagcaggggtcttgtgcttcctgggtacaagtaccttggacccttcaacggactcgacaagggagagccggtcaacgaggcagacgccgcggccctcgagcacgacaaggcctacgaccggcagctcgacggcggagacaacccgtacctcaagtacaaccacgccgacgcggagttccaggagcgtcttaaagaagatacgtcttttgggggcaacctcggacgagcagtcttccaggcgaaaaagagggttcttgaacctctgggcctggttgaggaacctgttaagacggctccgggaaaaaagaggccggtagagcactctcttgcggagccagactcctcctcgggaaccggaaaagcgggccagcagcctgcaagaaggagattgaatttcggtcagactggagacgcagactccgtacctgacccccagcctctcggacagccaccagcagccccctctggtctgggaactaatacgatggctacaggcagtggcgcaccaatggcagacaataacgagggcgccgacggagtgggtaattcctcgggaaattggcattgcgattccacatggatgggcgacagagtcatcaccaccagcacccgcacctgggctctgcccacctacaacaaccacctctacaggcagatttccagccaatcaggagcctcaaacgacaaccactactttggctacagcaccccttgggggtattttgacttcaacagattccactgccacttttcgccacgtgactggcaaagactcatcaacaacaattggggatcccggcccaaaagactcaacttcaagctctttaacattcaagtcaaggaggtcacgcagaatgacggtacgacgacgattgccaataaccttaccagcacggttcaggtgtttactgactcggagtaccagctcccgtacgtcctcggctcggcgcatcaaggatgcctcccgccgttcccagcagacgtcttcatggtgccacagtatggatacctcaccctgaacaacgggagtcaggcagtaggacgctcttcattttactgcctggagtactttccttctcagatgctgcgtaccggaaacaactttaccttcagctacacctttgaggacgttcctttccacagcagctacgcccacagccagagtttggaccgtctcatgaatcctctcgtcgaccagtacctgtattacttgagcagaacaaacactccaagcggaaccaccacgcagtcaaggcttcagttttctcaggccggagcaagtgacattcgggaccagtctaggaactggcttcctggaccctgttaccgccagcagcgagtatcaaagacatctgcggataacaacaacagtgaatactcgtggactggagctaccaagtaccaccttaatggaagagactctctggtgaatccgggcccggccatggccagccacaaggacgatgaagaaaagttttttcctcagagcggggttctcatctttggaaaacaagactcgggaaaaactaatgtggacattgaaaaggtcatgattacagacgaagaggaaatcaggaccaccaatcccgtggctacggagcagtatggttctgtatctaccaacctccagagcggcaacacacaagcagctacctcagatgtcaacacacaaggcgttcttccaggcatggtgtggcaggacagagacgtgtacctgcaggggcccatctgggcaaagattccacacacggacggacattttcacccctctcccctcatgggcggattcggacttaaacaccctcccccgcagattctcatcaagaacaccccggtacctgcgaatccttcgactaccttcagtgcggcaaagtttgcttccttcattacacagtactccacggggcaggtcagcgtggagatcgagtgggagctgcagaaggagaacagcaaacgctggaatcccgagattcagtacacttccaactacaacaaatctgttaatgtggactttactgtggacactaatggtgtgtattcagagcctcgccccattggcaccagatacctgactcgtaatctgtaa

SEQ ID NO: 324 - protein, 735 aa, Artificial Sequence
  Description of Artificial Sequence: Synthetic polypeptide
MAADGYLPDWLEDTLSEGIRQWWKLKPGPPPPKPAERHKDDSRGLVLPGYKYLGPFNGLDKGEPVNEADAAALEHDKAYDRQLDGGDNPYLKYNHADAEFQERLKEDTSFGGNLGRAVFQAKKRVLEPLGLVEEPVKTAPGKKRPVEHSLAEPDSSSGTGKAGQQPARRRLNFGQTGDADSVPDPQPLGQPPAAPSGLGTNTMATGSGAPMADNNEGADGVGNSSGNWHCDSTWMGDRVITTSTRTWALPTYNNHLYRQISSQSGASNDNHYFGYSTPWGYFDFNRFHCHFSPRDWQRLINNNWGSRPKRLNFKLFNIQVKEVTQNDGTTTIANNLTSTVQVFTDSEYQLPYVLGSAHQGCLPPFPADVFMVPQYGYLTLNNGSQAVGRSSFYCLEYFPSQMLRTGNNFTFSYTFEDVPFHSSYAHSQSLDRLMNPLVDQYLYYLSRTNTPSGTTTQSRLQFSQAGASDIRDQSRNWLPGPCYRQQRVSKTSADNNNSEYSWTGATKYHLNGRDSLVNPGPAMASHKDDEEKFFPQSGVLIFGKQDSGKTNVDIEKVMITDEEEIRTTNPVATEQYGSVSTNLQSGNTQAATSDVNTQGVLPGMVWQDRDVYLQGPIWAKIPHTDGHFHPSPLMGGFGLKHPPPQILIKNTPVPANPSTTFSAAKFASFITQYSTGQVSVEIEWELQKENSKRWNPEIQYTSNYNKSVNVDFTVDTNGVYSEPRPIGTRYLTRNL

SEQ ID NO: 325 - protein, 738 aa, Artificial Sequence
  Description of Artificial Sequence: Synthetic polypeptide
MAADGYLPDWLEDNLSEGIREWWDLKPGAPKPKANQQKQDDGRGLVLPGYKYLGPFNGLDKGEPVNAADAAALEHDKAYDQQLKAGDNPYLRYNHADAEFQERLQEDTSFGGNLGRAVFQAKKRVLEPLGLVEEAAKTAPGKKRPVEPSPQRSPDSSAGIGKKGQQPAKKRLNFGQTGDSESVPDPQPIGEPPAGPSGLGSGTMAAGGGAPMADNNEGADGVGSSSGNWHCDSTWLGDRVITTSTRTWALPTYNNHLYKQISNGTSGGSTNDNTYFGYSTPWGYFDFNRFHCHFSPRDWQRLINNNWGFRPKRLSFKLFNIQVKEVTQNEGTETIANNLTSTIQVFTDSEYQLPYVLGSAHQGCLPPFPADVFMIPQYGYLTLNNGSQAVGRSSFYCLEYFPSQMLRTGNNFEFSYTFEDVPFHSSCAHSQSSDRLMNPLIDQYLYYLSRTRSTGGTQGTQQLLFSQAGPANMSAQAKNWLPGPCYRQQRVSTTLSQNNNSNFAWTGATKYHLNGRDSLVNPGVAMATHKDDEERFFPSSGVLMFGKQGAGRDNVDYSSVMLTSEEEIKTTNPVATEQYGVVADNLQQTNTGPIVGNVNSQGALPGMVWQNRDVYLQGPIWAKIPHTDGNFHPSPLMGGFGLKHPPPQILIKNTPVPADPPTTFSQAKLASFITQYSTGQVSVEIEWELQKENSKRWNPEIQYTSNYYKSTNVDFAVNTEGTYSEPRPIGTRYLTRNL

SEQ ID NO: 326 - DNA, 2217 bp, Artificial Sequence
  Description of Artificial Sequence: Synthetic polynucleotide
atggctgctgacggttatcttccagattggctcgaggacaacctctctgagggcattcgcgagtggtgggacctgaaacctggagcccccaagcccaaggccaaccagcagaagcaggacgacggccggggtctggtgcttcttggctacaagtacctcggacccttcaacggactcgacaagggggagcccgtcaatgcggcggacgcagcggccctcgagcacgacaaggcctacgaccagcagctcaaagcgggtgacaatccgtacctgcggtataaccacgccgacgccgagtttcaggagcgtctgcaagaagatacgtcttttgggggcaacctcgggcgagcagtcttccaggccaagaagcgggttctcgaacctctcggtctggttgaggaagctgctaagacggctcctggaaagaagagaccggtagaaccgtcacctcagcgttcccccgactcctccacgggcatcggcaagaaaggccagcagcccgctaaaaagagactgaactttggtcagactggcgactcagagtcagtccccgaccctcaaccaatcggagaaccaccagcaggcccctctggtctgggatctggtacaatggctgcaggcggtggcgctccaatggcagacaataacgaaggcgccgacggagtgggtagttcctcaggaaattggcattgcgattccacatggctgggcgacagagtcatcaccaccagcacccgaacctgggccctgcccacctacaacaaccacctctacaagcaaatatccaatgggacatcgggaggaagcaccaacgacaacacctacttcggctacagcaccccctgggggtattttgacttcaacagattccactgccacttctcaccacgtgactggcagcgactcatcaacaacaactggggattccggccaaaaagactcagcttcaagctcttcaacatccaggtcaaggaggtcacgcagaatgaaggcaccaagaccatcgccaataaccttaccagcacgattcaggtatttacggactcggaataccagctgccgtacgtcctcggctccgcgcaccagggctgcctgcctccgttcccggcggacgtcttcatgattccccagtacggctaccttacactgaacaatggaagtcaagccgtaggccgttcctccttctactgcctggaatattttccatctcaaatgctgcgaactggaaacaattttgaattcagctacaccttcgaggacgtgcctttccacagcggctacgcacacagccagagcttggaccgactgatgaatcctctcatcgaccagtacctgtactacttatccagaactcagtccacaggaggaactcaaggtacccagcaattgttattttctcaagctgggcctgcaaacatgtcggctcaggctaagaactggctacctggaccttgctaccggcagcagcgagtctctacgacactgtcgcaaaacaacaacagcaactttgcttggactggtgccaccaaatatcacctgaacggaagagactctttggtaaatcccggtgtcgccatggcaacccacaaggacgacgaggaacgcttcttcccgtcgagtggagtcctgatgtttggaaaacagggtgctggaagagacaatgtggactacagcagcgttatgctaaccagcgaagaagaaattaaaaccactaaccctgtagccacagaacaatacggtgtggtggctgacaacttgcagcaaaccaatacagggcctattgtgggaaatgtcaacagccaaggagccttacctggcatggtctggcagaaccgagacgtgtacctgcagggtcccatctgggccaagattcctcacacggacggcaacttccacccttcaccgctaatgggaggatttggactgaagcacccacctcctcagatcctgatcaagaacacgccggtacctgcggatcctccaacgacgttcagccaggcgaaattggcttccttcattacgcagtacagcaccggacaggtcagcgtggaaatcgagtgggagctgcagaaggagaacagcaaacgctggaacccagagattcagtacacttcaaactactacaaatctacaaatgtggactttgctgtcaatacagagggaacttattctgagcctcgccccattggtactcgttacctcacccgtaatctgtaa

SEQ ID NO: 327 - protein, 738 aa, Artificial Sequence
  Description of Artificial Sequence: Synthetic polypeptide
MAADGYLPDWLEDNLSEGIREWWDLKPGAPKPKANQQKQDDGRGLVLLGYKYLGPFNGLDKGEPVNAADAAALEHDKAYDQQLKAGDNPYLRYNHADAEFQERLQEDTSFGGNLGRAVFQAKKRVLEPLGLVEEAAKTAPGKKRPVEPSPQRSPDSSTGIGKKGQQPAKKRLNFGQTGDSESVPDPQPIGEPPAGPSGLGSGTMAAGGGAPMADNNEGADGVGSSSGNWHCDSTWLGDRVITTSTRTWALPTYNNHLYKQISNGTSGGSTNDNTYFGYSTPWGYFDFNRFHCHFSPRDWQRLINNNWGFRPKRLSFKLFNIQVKEVTQNEGTKTIANNLTSTIQVFTDSEYQLPYVLGSAHQGCLPPFPADVFMIPQYGYLTLNNGSQAVGRSSFYCLEYFPSQMLRTGNNFEFSYTFEDVPFHSGYAHSQSLDRLMNPLIDQYLYYLSRTQSTGGTQGTQQLLFSQAGPANMSAQAKNWLPGPCYRQQRVSTTLSQNNNSNFAWTGATKYHLNGRDSLVNPGVAMATHKDDEERFFPSSGVLMFGKQGAGRDNVDYSSVMLTSEEEIKTTNPVATEQYGVVADNLQQTNTGPIVGNVNSQGALPGMVWQNRDVYLQGPIWAKIPHTDGNFHPSPLMGGFGLKHPPPQILIKNTPVPADPPTTFSQAKLASFITQYSTGQVSVEIEWELQKENSKRWNPEIQYTSNYYKSTNVDFAVNTEGTYSEPRPIGTRYLTRNL

SEQ ID NO: 328 - protein, 735 aa, Artificial Sequence
  Description of Artificial Sequence: Synthetic polypeptide
MAADGYLPDWLEDTLSEGIRQWWKLKPGPPPPKPAERHKDDSRGLVLPGYKYLGPFNGLDKGEPVNEADAAALEHDKAYDRQLDSGDNPYLKYNHADAEFQERLKEDTSFGGNLGRAVFQAKKRVLEPLGLVEPPVKTAPGKKRPVEHSPAEPDSSSGTGKAGQQPARKRLNFGQTGDADSVPDPQPLGQPPAAPSGLGSTTMATGSGAPMADNNEGADGVGNSSGNWHCDSQWLGDRVITTSTRTWALPTYNNHLYKQISSQSGASNDNHYFGYSTPWGYFDFNRFHCHFSPRDWQRLINNNWGFRPKRLNFKLFNIQVKEVTQNDGTTTIANNLTSTVQVFTDSEYQLPYVLGSAHQGCLPPFPADVFMVPQYGYLTLNNGSQAVGRSSFYCLEYFPSQMLRTGNNFQFSYTFEDVPFHSSYAHSQSLDRLMNPLIDQYLYYLNKTQSNSGTLQQSRLLFSQAGPTSMSLQAKNWLPGPCYRQQRLSKQANDNNNSNFPWTAATKYHLNGRDSLVNPGPAMASHKDDEEKFFPMHGTLIFGKQGTNANDADLDNVMITDEEEIRTTNPVATEQYGYVSNNLQNSNTGPTTGTVNHQGALPGMVWQDRDVYLQGPIWAKIPHTDGHFHPSPLMGGFGLKHPPPQIMIKNTPVPANPPTNFSSAKFASFITQYSTGQVSVEIEWELQKENSKRWNPEIQYTSNYNKSVNVDFTVDTNGVYSEPRPIGTRYLTRNL

SEQ ID NO: 329 - protein, 735 aa, Artificial Sequence
  Description of Artificial Sequence: Synthetic polypeptide
MAADGYLPDWLEDTLSEGIRQWWKLKPGPPPPKPAERHKDDSRGLVLPGYKYLGPFNGLDKGEPVNEADAAALEHDKAYDRQLDSGDNPYLKYNHADAEFQERLKEDTSFGGNLGRAVFQAKKRVLEPLGLVEGPVKTAPGKKRPVEHSPAEPDSSSGTGKAGQQPARKRLNFGQTGDADSVPDPQPLGQPPAAPSGLGSTTMATGSGAPMADNNEGADGVGNSSGNWHCDSQWLGDRVITTSTRTWALPTYNNHLYKQISSQSGASNDNHYFGYSTPWGYFDFNRFHCHFSPRDWQRLINNNWGFRPKRLNFKLFNIQVKEVTQNDGTTTIANNLTSTVQVFTDSEYQLPYVLGSAHQGCLPPFPADVFMVPQYGYLTLNNGSQAVGRSSFYCLEYFPSQMLRTGNNFQFSYTFEDVPFHSSYAHSQSLDRLMNPLIDQYLYYLNKTQSNSGTLQQSRLLFSQAGPTSMSLQAKNWLPGPCYRQQRLSKQANDNNNSNFPWTAATKYHLNGRDSLVNPGPAMASHKDDEEKFFPMHGTLIFGKQGTNANDADLDNVMITDEEEIRTTNPVATEQYGYVSNNLQNSNTGPTTGTVNHQGALPGMVWQDRDVYLQGPIWAKIPHTDGHFHPSPLMGGFGLKHPPPQIMIKNTPVPANPPTNFSSAKFASFITQYSTGQVSVEIEWELQKENSKRWNPEIQYTSNYNKSVNVDFTVDTNGVYSEPRPIGTRYLTRNL

SEQ ID NO: 330 - DNA, 2208 bp, Artificial Sequence
  Description of Artificial Sequence: Synthetic polynucleotide
atggctgccgatggttatcttccagattggctcgaggacactctctctgaaggaataagacagtggtggaagctcaaacctggcccaccaccaccaaagcccgcagagcggcataaggacgacagcaggggtcttgtgcttcctgggtacaagtacctcggacccttcaacggactcgacaagggggagccggtcaacgaggcagacgccgcggccctcgagcacgacaaggcctacgaccggcagctcgacagcggagacaacccgtacctcaagtacaaccacgccgacgcggagtttcaggagcgtcttaaagaagatacgtcttttgggggcaacctcggacgagcagtcttccaggcgaaaaagagggttcttgaacctctgggcctggttgagggacctgttaagacggctccgggaaaaaagaggccggtagagcactctcctgcggagccagactcctcctcgggaaccggaaaagcgggccagcagcctgcaagaaaaagattgaattttggtcagactggagacgcagactccgtacctgacccccagcctctcggacagccaccagcagccccctctggtttgggatctactacaatggctacaggcagtggcgcaccaatggcagacaataacgagggtgccgatggagtgggtaattcctcaggaaattggcattgcgattcccaatggctgggcgacagagtcatcaccaccagcacccgaacctgggccctgcccacctacaacaaccacctctacaagcaaatctcaagccaatcaggagcctcaaacgacaaccactactttggctacagcaccccttgggggtattttgacttcaacagattccactgccacttttcaccacgtgactggcaaagactcatcaacaacaactggggattccgacccaagagactcaacttcaagctctttaacattcaagtcaaagaggtcacgcagaatgacggtacgacgacgattgccaataaccttaccagcacggttcaggtgtttactgactcggagtaccagctcccgtacgtcctcgggtcggcgcatcaaggatgcctcccgccgtttccagcggacgtcttcatggtcccacagtatggatacctcaccctgaacaacgggagtcaggcggtaggacgctcttccttttactgcctggagtactttccttctcagatgcttcgtactggaaacaactttcagttcagctacacctttgaagacgttcctttccacagcagctacgctcacagccagagtctggatcggctgatgaatcctctgatcgaccagtacctgtattatctgaacaaaacacaatcaaatagtggaactcttcagcagtctcggctactgtttagtcaagctggacccaccagcatgtctcttcaagctaaaaactggctacctggaccttgctacagacagcagcgtctgtcaaagcaggcaaacgacaacaacaacagcaactttccctggactgcggctacaaagtatcacctaaatggccgggactcgttggttaatccaggaccagctatggccagtcacaaagacgatgaagaaaagtttttccccatgcatggaaccctgatatttggtaaacaaggaacaaatgctaacgacgcggatttggacaatgtcatgattacagatgaagaagaaatccgcaccaccaatcccgtggctacggagcagtacggatatgtgtcaaataatttgcaaaactcaaatactggtccaactactggaactgtcaatcaccaaggagcgttacctggcatggtgtggcaggatcgagacgtgtacctgcagggacccatttgggccaagattcctcacaccgatggacactttcatccttctccactgatgggaggttttgggctcaaacacccgcctcctcagatcatgatcaaaaacactcccgttccagccaatcctcccacaaacttcagttctgccaagtttgcttctttcatcacacagtattccacggggcaggtcagcgtggagatcgagtgggagctgcagaaagagaacagcaaacgctggaatcccgaaattcagtacacttccaactacaacaaatctgttaatgtggactttactgtggacactaatggcgtgtattcagagcctcgccccattggcaccagatacctgactcgtaatctgtaa

SEQ ID NO: 331 - DNA, 2211 bp, Artificial Sequence; identical to SEQ ID NO: 12
  Description of Artificial Sequence: Synthetic polynucleotide

SEQ ID NO: 332 - DNA, 2208 bp, Artificial Sequence
  Description of Artificial Sequence: Synthetic polynucleotide
atggctgccgatggttatcttccagattggctcgaggacactctctctgaaggaacaagacagtggtggaagctcaaacctggcccaccaccaccaaagcccgcagagcggcataaggacgacagcaggggtcttgtgcttcctgggtacaagtacctcggacccttcaacggactcgacaagggggagccggtcaacgaggcagacgccgcggccctcgagcacgacaaggcctacgaccggcagctcgacagcggagacaacccgtacctcaagtacaaccacgccgacgcggagtttcaggagcgtcttaaagaagatacgtcttttgggggcaacctcggacgagcagtcttccaggcgaaaaagagggttcttgaacctctgggcctggttgaggaacctgttaagacggctccgggaaaaaagaggccggtagagcactctcctgcggagccagactcctcctcgggaaccggaaaagcgggccagcagcctgcaagaaaaagattgaattttggtcagactggagacgcagactccgtacctgacccccagcctctcggacagccaccagcagccccctctggtttgggatctactacaatggctacaggcagtggcgcaccaatggcagacaataacgagggtgccgatggagtgggtaattcctcaggaaattggcattgcgattcccaatggctgggcgacagagtcatcaccaccagcacccgaacctgggccctgcccacctacaacaaccacctctacaagcaaatctcaagccaatcaggagcctcaaacgacaaccactactttggctacagcaccccttgggggtattttgacttcaacagattccactgccacttttcaccacgtgactggcaaagactcatcaacaacaactggggattccgacccaagagactcaacttcaagctctttaacattcaagtcaaagaggtcacgcagaatgacggtacgacgacgattgccaataaccttaccagcacggttcaggtgtttactgactcggagtaccagctcccgtacgtcctcgggtcggcgcatcaaggatgcctcccgccgtttccagcggacgtcttcatggtcccacagtatggatacctcaccctgaacaacgggagtcaggcggtaggacgctcttccttttactgcctggagtactttccttctcagatgcttcgtactggaaacaactttcagttcagctacacctttgaagacgttcctttccacagcagctacgctcacagccagagtctggatcggctgatgaatcctctgatcgaccagtacctgtattatctgaacaaaacacaatcaaatagtggaactcttcagcagtctcggctactgtttagtcaagctggacccaccagcatgtctcttcaagctaaaaactggctacctggaccttgctacagacagcagcgtctgtcaaagcaggcaaacgacaacaacaacagcaactttccctggactgcggctacaaagtaccacctaaatggccgggactcgttggttaatccaggaccagctatggccagtcacaaagacgatgaagaaaagtttttccccatgcatggaaccctgatatttggtaaacaaggaacaaatgctaacgacgcggatttggacaatgtcatgattacagatgaagaagaaatccgcaccaccaatcccgtggctacggagcagtacggatatgtgtcaaataatttgcaaaactcaaatactggtccaactactggaactgtcaatcaccaaggagcgttacctggcatggtgtggcaggatcgagacgtgtacctgcagggacccatttgggccaagattcctcacaccgatggacactttcatccttctccactgatgggaggttttgggctcaaacacccgcctcctcagatcatgatcaaaaacactcccgttccagccaatcctcccacaaacttcagttctgccaagtttgcttctttcatcacacagtattccacggggcaggtcagcgtggagatcgagtgggagctgcagaaagagaacagcaaacgctggaatcccgaaattcagtacacttccaactacaacaaatctgttaatgtggactttactgtggacactaatggcgtgtattcagagcctcgccccattggcaccagatacctgactcgtaatctgtaa

SEQ ID NO: 333 - DNA, 2217 bp, Artificial Sequence
  Description of Artificial Sequence: Synthetic polynucleotide
atggctgctgacggttatcttccagattggctcgaggacaacctctctgagggcattcgcgagtggtgggacctgaaacctggagcccccaagcccaaggccaaccagcagaagcaggacgacggccggggtctggtgcttcctggctacaagtacctcggacccttcaacggactcgacaagggggagcccgtcaacgcggcggacgcagcggccctcgagcacgacaaggcctacgaccagcagctcaaagcgggtgacaatccgtacctgcggtataaccacgccgacgccgagtttcaggagcgtctgcaagaagatacgtcttttgggggcaacctcgggcgagcagtcttccaggccaagaagcgggttctcgaacctctcggtctggttgaggaagctgctaagacggctcctggaaagaagagaccggtagaaccgtcacctcagcgttcccccgactcctccacgggcatcggcaagaaaggccagcagcccgctaaaaagagactgaactttggtcagactggcgactcagagtcagtccccgaccctcaaccaatcggagaaccacctgcaggcccctctggtctgggatctggtacaatggctgcaggcggtggcgctccaatggcagacaataacgaaggcgccgacggagtgggtagttcctcaggaaattggcattgcgattccacatggctgggcgacagagtcatcaccaccagcacccgaacctgggccctgcccacctacaacaaccacctctacaagcaaatatccaatgggacatcgggagggagcaccaacgacaacacctacttcggctacagcaccccctgggggtattttgacttcaacagattccactgccacttctcaccacgtgactggcagcgactcatcaacaacaactggggattccggccaaaaagactcagcttcaagctcttcaacatccaggtcaaggaggtcacgcagaatgaaggcaccaagaccatcgccaataaccttaccagcacgattcaggtatttacggactcggaataccagctgccgtacgtcctcggctccgcgcaccagggctgcctgcctccgttcccggcggacgtcttcatgattccccagtacggctaccttacactgaacaatggaagtcaagccgtaggccgttcctccttctactgcctggaatattttccatctcaaatgctgcgaactggaaacaattttgaattcagctacaccttcgaggacgtgcctttccacagcagctacgcacacagccagagcttggaccgactgatgaatcctctcatcgaccagtacctgtactacttatccagaactcagtccacaggaggaactcaaggtacccagcaattgttattttctcaagctgggcctgcaaacatgtcggctcaggctaagaactggctacctggaccttgctaccggcagcagcgagtctctacgacactgtcgcaaaacaacaacagcaactttgcttggactggtgccaccaaatatcacctgaacggaagagactctttggtaaatcccggtgtcgccatggcaacccacaaggacgacgaggaacgcttcttcccgtcgagtggagtcctgatgtttggaaaacagggtgctggaagagacaatgtggactacagcagcgttatgctaaccagcgaagaagaaattaaaaccactaaccctgtagccacagaacaatacggtgtggtggctgacaacttgcagcaaaccaatacagggcctattgtgggaaatgtcaacagccaaggagccttacctggcatggtctggcagaaccgagacgtgtacctgcagggtcccatctgggccaagattcctcacacggacggcaactgccacccttcaccgctaatgggaggatttggactgaagcacccacctcctcagatcctgatcaagaacacgccggtacctgcggatcctccaacaacgttcagccaggcgaaattggcttccttcattacgcagtacagcaccggacaggtcagcgtggaaatcgagtgggagctgcagaaggagaacagcaaacgctggaacccagagattcagtacacttcaaactactacaaatctacaaatgtggactttgctgtcaatacagagggaacttattctgagcctcgccccattggtactcgttacctcacccgtaatctgtaa

SEQ ID NO: 334 - protein, 735 aa, Artificial Sequence
  Description of Artificial Sequence: Synthetic polypeptide
MAADGYLPDWLEDTLSEGTRQWWKLKPGPPPPKPAERHKDDSRGLVLPGYKYLGPFNGLDKGEPVNEADAAALEHDKAYDRQLDSGDNPYLKYNHADAEFQERLKEDTSFGGNLGRAVFQAKKRVLEPLGLVEEPVKTAPGKKRPVEHSPAEPDSSSGTGKAGQQPARKRLNFGQTGDADSVPDPQPLGQPPAAPSGLGSTTMATGSGAPMADNNEGADGVGNSSGNWHCDSQWLGDRVITTSTRTWALPTYNNHLYKQISSQSGASNDNHYFGYSTPWGYFDFNRFHCHFSPRDWQRLINNNWGFRPKRLNFKLFNIQVKEVTQNDGTTTIANNLTSTVQVFTDSEYQLPYVLGSAHQGCLPPFPADVFMVPQYGYLTLNNGSQAVGRSSFYCLEYFPSQMLRTGNNFQFSYTFEDVPFHSSYAHSQSLDRLMNPLIDQYLYYLNKTQSNSGTLQQSRLLFSQAGPTSMSLQAKNWLPGPCYRQQRLSKQANDNNNSNFPWTAATKYHLNGRDSLVNPGPAMASHKDDEEKFFPMHGTLIFGKQGTNANDADLDNVMITDEEEIRTTNPVATEQYGYVSNNLQNSNTGPTTGTVNHQGALPGMVWQDRDVYLQGPIWAKIPHTDGHFHPSPLMGGFGLKHPPPQIMIKNTPVPANPPTNFSSAKFASFITQYSTGQVSVEIEWELQKENSKRWNPEIQYTSNYNKSVNVDFTVDTNGVYSEPRPIGTRYLTRNL

SEQ ID NO: 335 - DNA, 2208 bp, Artificial Sequence
  Description of Artificial Sequence: Synthetic polynucleotide
atggctgccgatggttatcttccagattggctcgaggacactctctctgaaggaataagacagtggtggaagctcaaacctggcccaccaccaccaaagcccgcagagcggcatcaggacaacagcaggggtcttgtgcttcctgggtacaagtacctcggaccctccaacggactcgacaaaggagagccggtcaacgaggcagacgccgcggccctcgagcacgacaaggcctacgaccggcagctcgacagcggagacaacccgtacctcaagtacaaccacgccgacgcggagtttcaggagcgtcttaaagaagatacgtcttttgggggcaacctcggacgagcagtcttccaggcgaaaaagagggttcttgaacctctgggcctggttgaggaacctgttaagacggctccgggaaaaaagaggccggtagagcactctcctgtggagccagactcctcctcgggaaccggaaaagcgggccatcagcctgcgagaaagagattgaattttggtcagactggagacgcagactccgtacctgacccccagcctctcggacagccaccagcagcccccacaagtttgggatctactacaatggctacaggcagtggcgcaccaatggcagacaataacgagggtgccgatggagtgggtaattcctcaggaaattggcattgcgattcccaatggctgggcgacagagtcatcaccaccagcacccgaacctgggccctgcccacctacaacaaccacctctacaagcaaatctccagccaatcaggagcctcgaacgacaaccactactttggctgcagcaccccctgggggtattttgacttcaacagattccactgtcacttctccccacgtgattggcaaagactcatcaacaacaactggggattccgacccaagagactcaacttcaagctctttaacattcaagtcaaagaggtcacgcagaatgacggtacgacgacgattgccaataaccttaccagcacggttcaggtgtttactgactcggagtacccgctcccgtacgtcctcggctcggcgcatcaaggatgcctcccgccgtttccagcggacgtcttcatggtcccacagtatggatacctcaccctgaacaacgggagtcaggcggtaggacgctcttccttttactgcctggagtactttccttctcagatgctgcgtaccggaaacaactttaccttcagctacacctttgaggacgttcctttccacagcagctacgctcacagccagagtttggaccggctgatgaatcctctgatcgaccagtatctatattatctgaacaggacacaatcaaatagtggaactcttcagcagtctaggctactgtttagccaagctggacccaccagcatgtctcttcaagctaaaaactggctgcctggaccttgctacagacagcagcgtctttcaaagcaggcaaacgacaacaacaacagcaactttccctggactgcggctacaaagtatcatctaaatggccgggactcgttggttaatccaggaccagctatggccagccacaaagacgatgaagaaaagtttttccccatgcatggaaccctgatatttggtaaacaaggaacaaatgctaacgacgcggatttggagcatgttatgattacagatgaagaagaaatcaggaccaccaatcctgtggctacagagcagtacggaaacgtgtcaaataatttgcaaaactcaaatactggtccaactacagaaaatgtcaatcaccagggagcgttacctggtatggtgtggcaggatcgagacgtgtacctgcagggacccatttgggccaagattcctcacaccgacggacactttcacccttctccactgatgggaggttttggactcaaacacccgcctcctcaaatcatgatcaaaaacactcccgttccagccaatcctcccacaaacttcagttctgccaagtttgcttctttcatcacacagtattccacgggccaggtcagcgtggagattgagtgggagctgcagaaggagaacagcaaacgctggaaccccgagatccagtatacttccaactacaacaaatctgttaatgtggactttactgtggacactaatggtgtgtattcagagccttgccccattggcaccagatacctgactcgtaatctgtaa

SEQ ID NO: 336 - protein, 735 aa, Artificial Sequence
  Description of Artificial Sequence: Synthetic polypeptide
MAADGYLPDWLEDTLSEGIRQWWKLKPGPPPPKPAERHQDNSRGLVLPGYKYLGPSNGLDKGEPVNEADAAALEHDKAYDRQLDSGDNPYLKYNHADAEFQERLKEDTSFGGNLGRAVFQAKKRVLEPLGLVEEPVKTAPGKKRPVEHSPVEPDSSSGTGKAGHQPARKRLNFGQTGDADSVPDPQPLGQPPAAPTSLGSTTMATGSGAPMADNNEGADGVGNSSGNWHCDSQWLGDRVITTSTRTWALPTYNNHLYKQISSQSGASNDNHYFGCSTPWGYFDFNRFHCHFSPRDWQRLINNNWGFRPKRLNFKLFNIQVKEVTQNDGTTTIANNLTSTVQVFTDSEYPLPYVLGSAHQGCLPPFPADVFMVPQYGYLTLNNGSQAVGRSSFYCLEYFPSQMLRTGNNFTFSYTFEDVPFHSSYAHSQSLDRLMNPLIDQYLYYLNRTQSNSGTLQQSRLLFSQAGPTSMSLQAKNWLPGPCYRQQRLSKQANDNNNSNFPWTAATKYHLNGRDSLVNPGPAMASHKDDEEKFFPMHGTLIFGKQGTNANDADLEHVMITDEEEIRTTNPVATEQYGNVSNNLQNSNTGPTTENVNHQGALPGMVWQDRDVYLQGPIWAKIPHTDGHFHPSPLMGGFGLKHPPPQIMIKNTPVPANPPTNFSSAKFASFITQYSTGQVSVEIEWELQKENSKRWNPEIQYTSNYNKSVNVDFTVDTNGVYSEPCPIGTRYLTRNL

SEQ ID NO: 337 - DNA, 2214 bp, Artificial Sequence
  Description of Artificial Sequence: Synthetic polynucleotide
atggctgccgatggttatcttccagattggctcgaggacaaccttagtgaaggaattcgcgagtggtgggctttgaaacctggagcccctcaacccaaggcaaatcaacaacatcaagacaacgctcgaggtcttgtgcttccgggttacaaataccttggacccggcaacggactcgacaagggggagccggtcaacgcagcagacgcggcggccctcgagcacgacaaggcctacgaccagcagctgcaggcgggtgacaatccgtacctgcggtataaccacgccgacgccgagtttcaggagcgtctgcaagaagatacgtcttttgggggcaaccttggcagagcagtcttccaggccaaaaagaggatccttgagcctcttggtctggttgaggaagcagctaaaacggctcctggaaagaagaggcctgtagatcagtctcctcaggaaccggactcatcatctggtgttggcaaatcgggcaaacagcctgccagaaaaagactaaatttcggtcagactggcgactcagagtcagtcccagaccctcaacctctcggagaaccaccagcagcccccacaagtttgggatctaatacaatggcttcaggcggtggcgcaccaatggcagacaataacgagggtgccgatggggtgggtagttcctcgggaaattggcattgcgattcccaatggctgggggacagagtcatcaccaccagcacccgaacctgggccctgcccacctacaacaatcacctctacaagcaaatctccaacgggacatcgggaggagccaccaacgacaacacctacttcggctacagcaccccctgggggtattttgactttaacagattccactgccacttttcaccacgtgactggcagcgactcatcaacaacaactggggattccggcccaagagactcagcttcaagctcttcaacatccaggtcaaggaggtcacgcagaatgaaggcaccaagaccatcgccaataacctcaccagcaccatccaggtgtttacggactcggagtaccagctgccgtacgttctcggctctgcgcaccagggctgcctccctccgttcccggcggacgtgttcatgattccgcaatacggctacctgacgctcaacaatggcagccaagccgtgggacgttcatccttttactgcctggaatatttcccttctcagatgctgagaacgggcaacaactttaccttcagctacacctttgaggaagtgcctttccacagcagctacgcgcacagccagagcttggaccggctgatgaatcctctgattgaccagtacctgtactacttgtctcggactcaaacaacaggaggcacggcaaatacgcagactctgggcttcagccaaggtgggcctaatacaatggccaatcaggcaaagaactggctgccaggaccctgttaccgccaacaacgcgtctcaacgacaaccgggcaaaacaacaatagcaactttgcctggactgctgggaccaaataccatctgaatggaagaaattcattggctaatcctggcatcgctatggcaacacacaaagacgacgaggagcgtttttttcccagtaacgggatcctgatttttggcaaacaaaatgctgccagagacaatgcggattacagcgatgtcatgctcaccagcgaggaagaaatcaaaaccactaaccctgtggctacagaggaatacggtatcgtggcagataacttgcagcagcaaaacacggctcctcaaattggaactgtcaacagccagggggccttacccggtatggtctggcagaaccgggacgtgtacctgcagggtcccatctgggccaagattcctcacacggacggcaacttccacccgtctccgctgatgggcggctttggcctgaaacatcctccgcctcagatcctgatcaagaacacgcctgtacctgcggatcctccgaccaccttcaaccagtcaaagctgaactctttcatcacgcaatacagcaccggacaggtcagcgtggagatcgagtgggagctgcagaaggaaaacagcaagcgctggaacccggagatccagtacacttccaactattacaagtctaataatgttgaatttgctgttaatactgaaggtgtatatagtgaaccccgccccattggcaccagatacctgactcgtaatctgtaa

SEQ ID NO: 338 - protein, 737 aa, Artificial Sequence
  Description of Artificial Sequence: Synthetic polypeptide
MAADGYLPDWLEDNLSEGIREWWALKPGAPQPKANQQHQDNARGLVLPGYKYLGPGNGLDKGEPVNAADAAALEHDKAYDQQLQAGDNPYLRYNHADAEFQERLQEDTSFGGNLGRAVFQAKKRILEPLGLVEEAAKTAPGKKRPVDQSPQEPDSSSGVGKSGKQPARKRLNFGQTGDSESVPDPQPLGEPPAAPTSLGSNTMASGGGAPMADNNEGADGVGSSSGNWHCDSQWLGDRVITTSTRTWALPTYNNHLYKQISNGTSGGATNDNTYFGYSTPWGYFDFNRFHCHFSPRDWQRLINNNWGFRPKRLSFKLFNIQVKEVTQNEGTKTIANNLTSTIQVFTDSEYQLPYVLGSAHQGCLPPFPADVFMIPQYGYLTLNNGSQAVGRSSFYCLEYFPSQMLRTGNNFTFSYTFEEVPFHSSYAHSQSLDRLMNPLIDQYLYYLSRTQTTGGTANTQTLGFSQGGPNTMANQAKNWLPGPCYRQQRVSTTTGQNNNSNFAWTAGTKYHLNGRNSLANPGIAMATHKDDEERFFPSNGILIFGKQNAARDNADYSDVMLTSEEEIKTTNPVATEEYGIVADNLQQQNTAPQIGTVNSQGALPGMVWQNRDVYLQGPIWAKIPHTDGNFHPSPLMGGFGLKHPPPQILIKNTPVPADPPTTFNQSKLNSFITQYSTGQVSVEIEWELQKENSKRWNPEIQYTSNYYKSNNVEFAVNTEGVYSEPRPIGTRYLTRNL

SEQ ID NO: 339 - DNA, 2211 bp, Artificial Sequence
  Description of Artificial Sequence: Synthetic polynucleotide
atggctgccgatggttatcttccagattggctcgaggacaacctctctgagggcattcgcgagtggtgggacttgaaacctggagccccgaagcccaaagccaaccagcaaaagcaggacgacggccggggtctggtgcttcctggctacaagtacctcggacccttcaacggactcgacaagggggagcccgtcaacgcggcggacgcagcggccctcgagcacgacaaggcctacgaccagcagctcaaagcgggtgacaatccgtacctgcggtataaccacgccgacgccgagtttcaggagcgtctgcaagaagatacgtcttttgggggcaacctcgggcgagcagtcttccaggccaagaagcgggttctcgaacctctcggtctggttgaggaaggcgctaagacggctcctggaaagaaacgtccggtagagcagtcgccacaagagccagactcctcctcgggcatcggcaagacaggccagcagcccgctaaaaagagactcaattttggtcagactggcgactcagagtcagtccccgacccacaacctctcggagaacctccagcaacccccgctgctgtgggacctactacaatggcttcaggcggtggcgcaccaatggcagacaataacgaaggcgccgacggagtgggtaatgcctcaggaaattggcattgcgattccacatggctgggcgacagagtcatcaccaccagcacccgaacatgggccttgcccacctataacaaccacctctacaagcaaatctccagtgcttcaacgggggccagcaacgacaaccactacttcggctacagcaccccctgggggtattttgatttcaacagattccactgccatttctcaccacgtgactggcagcgactcatcaacaacaattggggattccggcccaagagactcaacttcaagctcttcaacatccaagtcaaggaggtcacgacgaatgatggcgtcacgaccatcgctaataaccttaccagcacggttcaagtcttctcggactcggagtaccagctgccgtacgttctcggctctgcccaccagggctgcctgcctccgttcccggcggacgtgttcatgattccccagtacggctacctaacactcaacaacggtagtcaggccgtgggacgctcctccttctactgcctggaatactttccttcgcagatgctgagaaccggcaacaacttccagtttacttacaccttcgaggacgtgcctttccacagcagctacgcccacagccagagcttggaccggctgatgaatcctctgattgaccagtacctgtactacttgtctcggactcaaacaacaggaggcacggcaaatacgcagactctgggcttcagccaaggtgggcctaatacaatggccaatcaggcaaagaactggctgccaggaccctgttaccgccaacaacgcgtctcaacgacaaccgggcaaaacaacaatagcaattttacctggactggtgcttcaaaatataacctcaatgggcgtgaatccatcatcaaccctggcactgctatggcctcacacaaagacgacgaagacaagttctttcccatgagcggtgtcatgatttttggaaaagagagcgccggagcttcaaacactgcattggacaatgtcatgattacagacgaagaggaaattaaagccactaaccctgtggccaccgaaagatttgggaccgtggcagtcaatttccagagcagcagcacagaccctgcgaccggagatgtgcatgctatgggagcattacctggcatggtgtggcaagatagagacgtgtacctgcagggtcccatttgggccaaaattcctcacacagatggacactttcacccgtctcctcttatgggcggctttggactcaagaacccgcctcctcagatcctcatcaaaaacacgcctgttcctgcgaatcctccggcggagttttcagctacaaagtttgcttcattcatcacccaatactccacaggacaagtgagtgtggaaattgaatgggagctgcagaaagaaaacagcaagcgctggaatcccgaagtgcagtacacatccaattatgcaaaatctgccaacgttgattttactgtggacaacaatggactttatactgagcctcgccccattggcacccgttacctcacccgtcccctgtaa

SEQ ID NO: 340 - protein, 736 aa, Artificial Sequence
  Description of Artificial Sequence: Synthetic polypeptide
MAADGYLPDWLEDNLSEGIREWWDLKPGAPKPKANQQKQDDGRGLVLPGYKYLGPFNGLDKGEPVNAADAAALEHDKAYDQQLKAGDNPYLRYNHADAEFQERLQEDTSFGGNLGRAVFQAKKRVLEPLGLVEEGAKTAPGKKRPVEQSPQEPDSSSGIGKTGQQPAKKRLNFGQTGDSESVPDPQPLGEPPATPAAVGPTTMASGGGAPMADNNEGADGVGNASGNWHCDSTWLGDRVITTSTRTWALPTYNNHLYKQISSASTGASNDNHYFGYSTPWGYFDFNRFHCHFSPRDWQRLINNNWGFRPKRLNFKLFNIQVKEVTTNDGVTTIANNLTSTVQVFSDSEYQLPYVLGSAHQGCLPPFPADVFMIPQYGYLTLNNGSQAVGRSSFYCLEYFPSQMLRTGNNFQFTYTFEDVPFHSSYAHSQSLDRLMNPLIDQYLYYLSRTQTTGGTANTQTLGFSQGGPNTMANQAKNWLPGPCYRQQRVSTTTGQNNNSNFTWTGASKYNLNGRESIINPGTAMASHKDDEDKFFPMSGVMIFGKESAGASNTALDNVMITDEEEIKATNPVATERFGTVAVNFQSSSTDPATGDVHAMGALPGMVWQDRDVYLQGPIWAKIPHTDGHFHPSPLMGGFGLKNPPPQILIKNTPVPANPPAEFSATKFASFITQYSTGQVSVEIEWELQKENSKRWNPEVQYTSNYAKSANVDFTVDNNGLYTEPRPIGTRYLTRPL

SEQ ID NO: 341 - DNA, 2211 bp, Artificial Sequence
  Description of Artificial Sequence: Synthetic polynucleotide
atggctgctgacggttatcttccagattggctcgaggacaacctttctgaaggcattcgagagtggtgggcgctgcaacctggagcccctaaacccaaggcaaatcaacaacatcaggacaacgctcggggtcttgtgcttccgggttacaaatacctcggacccggcaacggactcgacaagggggaacccgtcaacgcagcggacgcggcagccctcgagcacgacaaggcctacgaccagcagctcaaggccggtgacaacccctacctcaagtacaaccacgccgacgccgagttccaggagcggctcaaagaagatacgtcttttgggggcaacctcgggcgagcagtcttccaggccaaaaagaggcttcttgaacctcttggtctggttgaggaagcggctaagacggctcctggaaagaagaggcctgtagatcagtctcctcaggaaccggactcatcatctggtgttggcaaatcgggcaaacagcctgccagaaaaagactaaatttcggtcagactggcgactcagagtcagtcccagaccctcaacctctcggagaaccaccagcagcccccacaagtttgggatctaatacaatggcttcaggcggtggcgcaccaatggcagacaataacgagggtgccgatggagtgggtaattcctcaggaaattggcattgcgattcccaatggctgggcgacagagtcatcaccaccagcaccagaacctgggccctgcccacttacaacaaccatctctacaagcaaatctccagccaatcaggagcttcaaacgacaaccactactttggctacagcaccccttgggggtattttgactttaacagattccactgccacttctcaccacgtgactggcagcgactcattaacaacaactggggattccggcccaagaaactcagcttcaagctcttcaacatccaagttaaagaggtcacgcagaacgatggcacgacgactattgccaataaccttaccagcacggttcaagtgtttacggactcggagtatcagctcccgtacgtgctcgggtcggcgcaccaaggctgtctcccgccgtttccagcggacgtcttcatggtccctcagtatggatacctcaccctgaacaacggaagtcaagcggtgggacgctcatccttttactgcctggagtacttcccttcgcagatgctaaggactggaaataacttccaattcagctataccttcgaggatgtaccttttcacagcagctacgctcacagccagagtttggatcgcttgatgaatcctcttattgatcagtatctgtactacctgaacagaacgcaaggaacaacctctggaacaaccaaccaatcacggctgctttttagccaggctgggcctcagtctatgtctttgcaggccagaaattggctacctgggccctgctaccggcaacagagactttcaaagactgctaacgacaacaacaacagtaactttccttggacagcggccagcaaatatcatctcaatggccgcgactcgctggtgaatccaggaccagctatggccagtcacaaggacgatgaagaaaaatttttccctatgcacggcaatctaatatttggcaaagaagggacaacggcaagtaacgcagaattagataatgtaatgattacggatgaagaagagattcgtaccaccaatcctgtggcaacagagcagtatggaactgtggcaaataacttgcagagctcaaatacagctcccacgactagaactgtcaatgatcagggggccttacctggcatggtgtggcaagatcgtgacgtgtaccttcaaggacctatctgggcaaagattcctcacacggatggacactttcatccttctcctctgatgggaggctttggactgaaacatccgcctcctcaaatcatgatcaaaaatactccggtaccggcaaatcctccgacgactttcagcccggccaagtttgcttcatttatcactcagtactccactggacaggtcagcgtggaaattgagtgggagctacagaaagaaaacagcaaacgttggaatccagagattcagtacacttccaactacaacaagtctgttaatgtggactttactgtagacactaatggtgtttatagtgaacctcgccccattggcacccgttaccttacccgtcccctgtaa

SEQ ID NO: 342 - protein, 736 aa, Artificial Sequence
  Description of Artificial Sequence: Synthetic polypeptide
MAADGYLPDWLEDNLSEGIREWWALQPGAPKPKANQQHQDNARGLVLPGYKYLGPGNGLDKGEPVNAADAAALEHDKAYDQQLKAGDNPYLKYNHADAEFQERLKEDTSFGGNLGRAVFQAKKRLLEPLGLVEEAAKTAPGKKRPVDQSPQEPDSSSGVGKSGKQPARKRLNFGQTGDSESVPDPQPLGEPPAAPTSLGSNTMASGGGAPMADNNEGADGVGNSSGNWHCDSQWLGDRVITTSTRTWALPTYNNHLYKQISSQSGASNDNHYFGYSTPWGYFDFNRFHCHFSPRDWQRLINNNWGFRPKKLSFKLFNIQVKEVTQNDGTTTIANNLTSTVQVFTDSEYQLPYVLGSAHQGCLPPFPADVFMVPQYGYLTLNNGSQAVGRSSFYCLEYFPSQMLRTGNNFQFSYTFEDVPFHSSYAHSQSLDRLMNPLIDQYLYYLNRTQGTTSGTTNQSRLLFSQAGPQSMSLQARNWLPGPCYRQQRLSKTANDNNNSNFPWTAASKYHLNGRDSLVNPGPAMASHKDDEEKFFPMHGNLIFGKEGTTASNAELDNVMITDEEEIRTTNPVATEQYGTVANNLQSSNTAPTTRTVNDQGALPGMVWQDRDVYLQGPIWAKIPHTDGHFHPSPLMGGFGLKHPPPQIMIKNTPVPANPPTTFSPAKFASFITQYSTGQVSVEIEWELQKENSKRWNPEIQYTSNYNKSVNVDFTVDTNGVYSEPRPIGTRYLTRPL

SEQ ID NO: 343 - DNA, 2211 bp, Artificial Sequence
  Description of Artificial Sequence: Synthetic polynucleotide
atggctgccgatggttatcttccagattggctcgaggacaaccttagtgaaggaattcgcgagtggtgggctttgaaacctggagcccctcaacccaaggcaaatcaacaacatcaagacaacgctcgaggtcttgtgcttccgggttacaaataccttggacccggcaacggactcgacaagggggagccggtcaacgcagcagacgcggcggccctcgagcacgacaaggcctacgaccagcagctcaaggccggagacaacccgtacctcaagtacaaccacgccgacgccgagttccaggagcggctcaaagaagatacgtcttttgggggcaacctcgggcgagcagtcttccaggccaaaaagaggcttcttgaacctcttggtctggttgaggaagcggctaagacggctcctggaaagaagagaccggtagagccatcaccccagcgttctccagactcctctacgggcatcggcaagaaaggccaacagcccgctaaaaagagactcaattttggtcagactggcgactcagagtcagtccccgacccacaacctctcggagaacctccagcaacccccgctgctgtgggacctactacaatggcttcaggcggtggcgcaccaatggcagacaataacgagggtgccgatggagtgggtaattcctcaggaaattggcattgcgattcccaatggctgggcgacagagtcatcaccaccagcaccagaacctgggccctgcccacttacaacaaccatctctacaagcaaatctccagccaatcaggagcttcaaacgacaaccactactttggctacagcaccccttgggggtattttgactttaacagattccactgccacttttcaccacgtgactggcaaagactcatcaacaacaactggggattccgacccaagagactcaacttcaagctcttcaacatccaagtcaaggaggtcacgacgaatgatggcgtcacgaccatcgctaataaccttaccagcacggttcaagtcttctcggactcggagtaccagttgccgtacgtcctcggctctgcgcaccagggctgcctccctccgttcccggcggacgtgttcatgattccgcagtacggctacctaacgctcaacaatggcagccaagccgtgggacgttcatccttttactgcctggaatatttcccttctcagatgctgagaacgggcaacaactttaccttcagctacacttttgaggacgttcctttccacagcagctacgctcacagccagagtctggaccgtctcatgaatcctctcatcgaccagtacctgtattacttgagcagaacaaacactccaagtggaaccaccacgcagtcaaggcttcagttttctcaggccggagcgagtgacattcgggaccagtctaggaactggcttcctggaccctgttaccgccagcagcgcgtttctaaaacaaaaacagacaacaacaacagcaattttacctggactggtgcttcaaaatataaccttaatgggcgtgaatctataatcaaccctggcactgctatggcctcacacaaagacgacgaagacaagttctttcccatgagcggtgtcatgatttttggaaaagagagcgccggagcttcaaacactgcattggacaatgtcatgattacagacgaagaggaaattaaagccactaaccctgtggccaccgaaagatttgggaccgtggcagtcaatttccagagcagcagcacagaccctgcgaccggagatgtgcatgttatgggagccttacctggaatggtgtggcaagacagagacgtatacctgcagggtcctatttgggccaaaattcctcacacggatggacactttcacccgtctcctcttatgggcggctttggactcaagaacccgcctcctcagatcctcatcaaaaacacgcctgttcctgcgaatcctccggcggagttttcagctacaaagtttgcttcattcatcacccaatactccacaggacaagtgagtgtggaaattgaatgggagctgcagaaagaaaacagcaagcgctggaatcccgaagtgcagtacacatccaattatgcaaaatctgccaacgttgattttactgtggacaacaatggactttatactgagcctcgccccattggcacccgttaccttacccgtcccctgtaa

SEQ ID NO: 344 - protein, 736 aa, Artificial Sequence
  Description of Artificial Sequence: Synthetic polypeptide
MAADGYLPDWLEDNLSEGIREWWALKPGAPQPKANQQHQDNARGLVLPGYKYLGPGNGLDKGEPVNAADAAALEHDKAYDQQLKAGDNPYLKYNHADAEFQERLKEDTSFGGNLGRAVFQAKKRLLEPLGLVEEAAKTAPGKKRPVEPSPQRSPDSSTGIGKKGQQPAKKRLNFGQTGDSESVPDPQPLGEPPATPAAVGPTTMASGGGAPMADNNEGADGVGNSSGNWHCDSQWLGDRVITTSTRTWALPTYNNHLYKQISSQSGASNDNHYFGYSTPWGYFDFNRFHCHFSPRDWQRLINNNWGFRPKRLNFKLFNIQVKEVTTNDGVTTIANNLTSTVQVFSDSEYQLPYVLGSAHQGCLPPFPADVFMIPQYGYLTLNNGSQAVGRSSFYCLEYFPSQMLRTGNNFTFSYTFEDVPFHSSYAHSQSLDRLMNPLIDQYLYYLSRTNTPSGTTTQSRLQFSQAGASDIRDQSRNWLPGPCYRQQRVSKTKTDNNNSNFTWTGASKYNLNGRESIINPGTAMASHKDDEDKFFPMSGVMIFGKESAGASNTALDNVMITDEEEIKATNPVATERFGTVAVNFQSSSTDPATGDVHVMGALPGMVWQDRDVYLQGPIWAKIPHTDGHFHPSPLMGGFGLKNPPPQILIKNTPVPANPPAEFSATKFASFITQYSTGQVSVEIEWELQKENSKRWNPEVQYTSNYAKSANVDFTVDNNGLYTEPRPIGTRYLTRPL

SEQ ID NO: 345 - DNA, 2211 bp, Artificial Sequence
  Description of Artificial Sequence: Synthetic polynucleotide
atggctgccgatggttatcttccagattggctcgaggacaacctctctgagggcattcgcgagtggtgggacttgaaacctggagcccctaaacccaaggcaaatcaacaacatcaggacaacgctcgaggtcttgtgcttccgggttacaaataccttggacccggcaacggactcgacaagggggagccggtcaacgcagcagacgcggcggccctcgagcacgacaaggcctacgaccagcagctcaaggccggagacaacccgtacctcaagtacaaccacgccgacgccgagttccaggagcggctcaaagaagatacgtcttttgggggcaacctcgggcgagcagtcttccaggccaaaaagaggcttcttgaacctcttggtctggttgaggaagcggctaagacggctcctggaaagaagagaccggtagagccatcaccccagcgttctccagactcctctacgggcatcggcaagaaaggccaacagcccgctaaaaagagactcaattttggtcagactggcgactcagagtcagtccccgacccacaacctctcggagaacctccagcaacccccgctgctgtgggacctactacaatggcttcaggcggtggcgcaccaatggcagacaataacgagggtgccgatggagtgggtaattcctcaggaaattggcattgcgattcccaatggctgggcgacagagtcatcaccaccagcaccagaacctgggccctgcccacttacaacaaccatctctacaagcaaatctccagccaatcaggagcttcaaacgacaaccactactttggctacagcaccccttgggggtattttgactttaacagattccactgccacttttcaccacgtgactggcaaagactcatcaacaacaactggggattccgacccaagagactcaacttcaagctcttcaacatccaagtcaaggaggtcacgacgaatgatggcgtcacgaccatcgctaataaccttaccagcacggttcaagtcttctcggactcggagtaccagttgccgtacgtcctcggctctgcgcaccagggctgcctccctccgttcccggcggacgtgttcatgattccgcagtacggctacctaacgctcaacaatggcagccaagccgtgggacgttcatccttttactgcctggaatatttcccttctcagatgctgagaacgggcaacaactttaccttcagctacacttttgaggacgttcctttccacagcagctacgctcacagccagagtctggaccgtctcatgaatcccctcatcgaccagtacctgtattacttgagcagaacaaacactccaagtggaaccaccacgcagtcaaggcttcagttttctcaggccggagcgagtgacattcgggaccagtctaggaactggcttcctggaccctgttaccggcagcagcgcgtttctaaaacaaaaacagacaacaacaacagcaactttacctggactggtgcttcaaaatataaccttaatgggcgtgaatctataatcaaccctggcactgctatggcctcacacaaagacgacgaagacaagttctttcccatgagcggtgtcatgatttttggaaaggagagcgccggagcttcaaacactgcattggacaatgtcatgatcacagacgaagaggaaatcaaagccactaaccccgtggccaccgaaagatttgggactgtggcagtcaatctccagagcagcagcacagaccctgcgaccggagatgtgcatgttatgggagccttacctggaatggtgtggcaagacagagacgtgtacctgcagggtcctatttgggccaaaattcctcacacggatggacactttcacccgtctcctctcatgggcggctttggacttaagcacccgcctcctcagatcctcatcaaaaacacgcctgttcctgcgaatcctccggcagagttttcggctacaaagtttgcttcattcatcacccagtattccacaggacaagtgagtgtggaaattgaatgggagctgcagaaagaaaacagcaagcgctggaatcccgaagtgcagtacacatccaattatgcaaaatctgccaacgttgattttactgtggacaacaatggactttatactgagcctcgccccattggcacccgttacctcacccgtcccctgtaa

SEQ ID NO: 346 - protein, 736 aa, Artificial Sequence
  Description of Artificial Sequence: Synthetic polypeptide
MAADGYLPDWLEDNLSEGIREWWDLKPGAPKPKANQQHQDNARGLVLPGYKYLGPGNGLDKGEPVNAADAAALEHDKAYDQQLKAGDNPYLKYNHADAEFQERLKEDTSFGGNLGRAVFQAKKRLLEPLGLVEEAAKTAPGKKRPVEPSPQRSPDSSTGIGKKGQQPAKKRLNFGQTGDSESVPDPQPLGEPPATPAAVGPTTMASGGGAPMADNNEGADGVGNSSGNWHCDSQWLGDRVITTSTRTWALPTYNNHLYKQISSQSGASNDNHYFGYSTPWGYFDFNRFHCHFSPRDWQRLINNNWGFRPKRLNFKLFNIQVKEVTTNDGVTTIANNLTSTVQVFSDSEYQLPYVLGSAHQGCLPPFPADVFMIPQYGYLTLNNGSQAVGRSSFYCLEYFPSQMLRTGNNFTFSYTFEDVPFHSSYAHSQSLDRLMNPLIDQYLYYLSRTNTPSGTTTQSRLQFSQAGASDIRDQSRNWLPGPCYRQQRVSKTKTDNNNSNFTWTGASKYNLNGRESIINPGTAMASHKDDEDKFFPMSGVMIFGKESAGASNTALDNVMITDEEEIKATNPVATERFGTVAVNLQSSSTDPATGDVHVMGALPGMVWQDRDVYLQGPIWAKIPHTDGHFHPSPLMGGFGLKHPPPQILIKNTPVPANPPAEFSATKFASFITQYSTGQVSVEIEWELQKENSKRWNPEVQYTSNYAKSANVDFTVDNNGLYTEPRPIGTRYLTRPL

SEQ ID NO: 347 - DNA, 2214 bp, Artificial Sequence
  Description of Artificial Sequence: Synthetic polynucleotide
atggctgccgatggttatcttccagattggctcgaggacaaccttagtgaaggaattcgcgagtggtgggctttgaaacctggagcccctcaacccaaggcaaatcaacaacatcaagacaacgctcgaggtcttgtgcttccgggttacaaataccttggacccggcaacggactcgacaagggggagccggtcaacgcagcagacgcggcggccctcgagcacgacaaggcctacgaccagcagctgcaggcgggtgacaatccgtacctgcggtataaccacgccgacgccgagtttcaggagcgtctgcaagaagatacgtcttttgggggcaaccttggcagagcagtcttccaggccaaaaagaggatccttgagcctcttggtctggttgaggaagcagctaaaacggctcctggaaagaagaggcctgtagatcagtctcctcaggaaccggactcatcatctggtgttggcaaatcgggcaaacagcctgccagaaaaagactaaatttcggtcagactggcgactcagagtcagtcccagaccctcaacctctcggagaaccaccagcagcccccacaagtttgggatctaatacaatggcttcaggcggtggcgcaccaatggcagacaataacgagggtgccgatggggtgggtagttcctcgggaaattggcattgcgattcccaatgactgggggacagagtcatcaccaccagcacccgaacctgggccctgcccacctacaacaatcacctctacaagcaaatctccaacgggacatcgggaggagccaccaacgacaacacctacttcggctacagcaccccctgggggtattttgactttaacagattccactgccacttttcaccacgtgactggcagcgactcatcaacaacaactggggattccggcccaagagactcagcttcaagctcttcaacatccaggtcaaggaggtcacgcagaatgaaggcaccaagaccatcgccaataacctcaccagcaccatccaggtgtttacggactcggagtaccagctgccgtacgttctcggctctgcgcaccagggctgcctccctccgttcccggcggacgtgttcatgattccgcaatacggctacctgacgctcaacaatggcagccaagccgtgggacgttcatccttttactgcctggaatatttcccttctcagatgctgagaacgggcaacaactttaccttcagctacacctttgaggaagtgcctttccacagcagctacgcgcacagccagagcttggaccggctgatgaatcctctgattgaccagtacctgtactacttgtctcggactcaaacaacaggaggcacggcaaatacgcagactctgggcttcagccaaggtgggcctaatacaatggccaatcaggcaaagaactggctgccaggaccctgttaccgccaacaacgcgtctcaacgacaaccgggcaaaacaacaatagcaactttgcctggactgctgggaccaaataccatctgaatggaagaaattcattggctaatcctggcatcgctatggcaacacacaaagacgacgaggagcgtttttttcccagtaacgggatcctgatttttggcaaacaaaatgctgccagagacaatgcggattacagcgatgtcatgctcaccagcgaggaagaaatcaaaaccactaaccctgtggctacagaggaatacggtatcgtggcagataacttgcagcagcaaaacacggctcctcaaattggaactgtcaacagccagggggccttacccggtatggtctggcagaaccgggacgtgtacctgcagggtcccatctgggccaagattcctcacacggacggcaacttccacccgtctccgctgatgggcggctttggcctgaaacatcctccgcctcagatcctgatcaagaacacgcctgtacctgcggatcctccgaccaccttcaaccagtcaaagctgaactctttcatcacgcaatacagcaccggacaggtcagcgtggagatcgagtgggagctgcagaaggaaaacagcaagcgctggaacccggagatccagtacacttccaactattacaagtctaataatgttgaatttgctgttaatactgaaggtgtatatagtgaaccccgccccattggcaccagatacctgactcgtaatctgtaa

SEQ ID NO: 348 - protein, 736 aa, Artificial Sequence
  Description of Artificial Sequence: Synthetic polypeptide
MAADGYLPDWLEDNLSEGIREWWALKPGAPQPKANQQHQDNARGLVLPGYKYLGPGNGLDKGEPVNAADAAALEHDKAYDQQLQAGDNPYLRYNHADAEFQERLQEDTSFGGNLGRAVFQAKKRILEPLGLVEEAAKTAPGKKRPVDQSPQEPDSSSGVGKSGKQPARKRLNFGQTGDSESVPDPQPLGEPPAAPTSLGSNTMASGGGAPMADNNEGADGVGSSSGNWHCDSQLGDRVITTSTRTWALPTYNNHLYKQISNGTSGGATNDNTYFGYSTPWGYFDFNRFHCHFSPRDWQRLINNNWGFRPKRLSFKLFNIQVKEVTQNEGTKTIANNLTSTIQVFTDSEYQLPYVLGSAHQGCLPPFPADVFMIPQYGYLTLNNGSQAVGRSSFYCLEYFPSQMLRTGNNFTFSYTFEEVPFHSSYAHSQSLDRLMNPLIDQYLYYLSRTQTTGGTANTQTLGFSQGGPNTMANQAKNWLPGPCYRQQRVSTTTGQNNNSNFAWTAGTKYHLNGRNSLANPGIAMATHKDDEERFFPSNGILIFGKQNAARDNADYSDVMLTSEEEIKTTNPVATEEYGIVADNLQQQNTAPQIGTVNSQGALPGMVWQNRDVYLQGPIWAKIPHTDGNFHPSPLMGGFGLKHPPPQILIKNTPVPADPPTTFNQSKLNSFITQYSTGQVSVEIEWELQKENSKRWNPEIQYTSNYYKSNNVEFAVNTEGVYSEPRPIGTRYLTRNL

SEQ ID NO: 349 - DNA, 2214 bp, Artificial Sequence
  Description of Artificial Sequence: Synthetic polynucleotide
atggctgccgatggttatcttccagattggctcgaggacaaccttagtgaaggaattcgcgagtggtgggctttgaaacctggagcccctcaacccaaggcaaatcaacaacatcaagacaacgctcgaggtcttgtgcttccgggttacaaataccttggacccggcaacggactcgacaagggggagccggtcaacgcagcagacgcggcggccctcgagcacgacaaggcctacgaccagcagctgcaggcgggtgacaatccgtacctgcggtataaccacgccgacgccgagtttcaggagcgtctgcaagaagatacgtcttttgggggcaaccttggcagagcagtcttccaggccaaaaagaggatccttgagcctcttggtctggttgaggaagcagctaaaacggctcctggaaagaagaggcctgtagatcagtctcctcaggaaccggactcatcatctggtgttggcaaatcgggcaaacagcctgccagaaaaagactaaatttcggtcagactggcgactcagagtcagtcccagaccctcaacctctcggagaaccaccagcagcccccacaagtttgggatctaatacaatggcttcaggcggtggcgcaccaatggcagacaataacgagggtgccgatggggtgggtagttcctcgggaaattggcattgcgattcccaatggctgggggacagagtcatcaccaccagcacccgaacctgggccctgcccacctacaacaatcacctctacaagcaaatctccaacgggacatcgggaggagccaccaacgacaacacctacttcggctacagcaccccctgggggtattttgactttaacagattccactgccacttttcaccacgtgactggcagcgactcatcaacaacaactggggattccggcccaagagactcagcttcaagctcttcaacatccaggtcaaggaggtcacgcagaatgaaggcaccaagaccatcgccaataacctcaccagcaccatccaggtgtttacggactcggagtaccagctgccgtacgttctcggctctgcgcaccagggctgcctccctccgttcccggcggacgtgttcatgattccgcaatacggctacctgacgctcaacaatggcagccaagccgtgggacgttcatccttttactgcctggaatatttcccttctcagatgctgagaacgggcaacaactttaccttcagctacacctttgaggaagtgccttttcacagcagctacgcgcacagccagagcttggaccggctgatgaatcctctgattgaccagtacctgtactacttgtctcggactcaaacaacaggaggcacggcaaatacgcagactctgggcttcagccaaggtgggcctaatacaatggccaatcaggcaaagaactggctgccaggaccctgttaccgccaacaacgcgtctcaacgacaaccgggcaaaacaacaatagcaactttgcctggactgctgggaccaaataccatctgaatggaagaaattcattggctaatcctggcatcgctatggcaacacacaaagacgacgaggagcgtttttttcccagtaacgggatcctgatttttggcaaacaaaatgctgccagagacaatgcggattacagcgatgtcatgctcaccagcgaggaagaaatcaaaaccactaaccctgtggctacagaggaatacggtatcgtggcagataacttgcagcagcaaaacacggctcctcaaattggaactgtcaacagccagggggccttacccggtatggtctggcagaaccgggacgtgtacctgcagggtcccatctgggccaagattcctcacacggacggcaacttccacccgtctccgctgatgggcggctttggcctgaaacatcctccgcctcagatcctgatcaagaacacgcctgtacctgcggatcctccgaccaccttcaaccagtcaaagctgaactctttcatcacgcaatacagcaccggacaggtcagcgtggagatcgagtgggagctgcagaaggaaaacagcaagcgctggaacccggagatccagtacacttccaactattacaagtctaataatgttgaatttgctgttaatactgaaggtgtatatagtgaaccccgccccattggcaccagatacctgactcgtaatctgtaa

SEQ ID NO: 350 - protein, 737 aa, Artificial Sequence; identical to SEQ ID NO: 338
  Description of Artificial Sequence: Synthetic polypeptide

SEQ ID NO: 351 - DNA, 2211 bp, Artificial Sequence
  Description of Artificial Sequence: Synthetic polynucleotide
atggctgccgatggttatcttccagattggctcgaggacaacctctctgagggcattcgcgagtggtgggacttgaaacctggagcccctaaacccaaggcaaatcaacaacatcaggacaacgctcgaggtcttgtgcttccgggttacaaataccttggacccggcaacggactcgacaagggggagccggtcaacgcagcagacgcggcggccctcgagcacgacaaggcctacgaccagcagctcaaggccggagacaacccgtacctcaagtacaaccacgccgacgccgagttccaggagcggctcaaagaagatacgtcttttgggggcaacctcgggcgagcagtcttccaggccaaaaagaggcttcttgaacctcttggtctggttgaggaagcggctaagacggctcctggaaagaagagaccggtagagccatcaccccagcgttctccagactcctctacgggcatcggcaagaaaggccaacagcccgctaaaaagagactcaattttggtcagactggcgactcagagtcagtccccgacccacaacctctcggagaacctccagcaacccccgctgctgtgggacctactacaatggcttcaggcggtggcgcaccaatggcagacaataacgagggtgccgatggagtgggtaattcctcaggaaattggcattgcgattcccaatggctgggcgacagagtcatcaccaccagcaccagaacctgggccctgcccacttacaacaaccatctctacaagcaaatctccagccaatcaggagcttcaaacgacaaccactactttggctacagcaccccttgggggtattttgactttaacagattccactgccacttttcaccacgtgactggcaaagactcatcaacaacaactggggattccgacccaagagactcaacttcaagctcttcaacatccaagtcaaggaggtcacgacgaatgatggcgtcacgaccatcgctaataaccttaccagcacggttcaagtcttctcggactcggagtaccagttgccgtacgtcctcggctctgcgcaccagggctgcctccctccgttcccggcggacgtgttcatgattccgcagtacggctacctaacgctcaacaatggcagccaagccgtgggacgttcatccttttactgcctggaatatttcccttctcagatgctgagaacgggcaacaactttaccttcagctacacttttgaggacgttcctttccacagcagctacgctcacagccagagtctggaccgtctcatgaatcctctcatcgaccagtacctgtattacttgagcagaacaaacactccaagtggaaccaccacgcagtcaaggcttcagttttctcaggccggagcgagtgacattcgggaccagtctaggaactggcttcctggaccctgttaccgccagcagcgcgtttctaaaacaaaaacagacaacaacaacagcaattttacctggactggtgcttcaaaatataaccttaatgggcgtgaatctataatcaaccctggcactgctatggcctcacacaaagacgacgaagacaagttctttcccatgagcggtgtcatgatttttggaaaagagagcgccggagcttcaaacactgcattggacaatgtcatgattacagacgaagaggaaattaaagccactaaccctgtggccaccgaaagatttgggaccgtggcagtcaatttccagagcagcagcacagaccctgcgaccggagatgtgcatgctatgggagcattacctggcatggtgtggcaagatagagacgtgtacctgcagggtcccatttgggccaaaattcctcacacagatggacactttcacccgtctcctcttatgggcggctttggactcaagaacccgcctcctcagatcctcatcaaaaacacgcctgttcctgcgaatcctccggcggagttttcagctacaaagtttgcttcattcatcacccaatactccacaggacaagtgagtgtggaaattgaatgggagctgcagaaagaaaacagcaagcgctggaatcccgaagtgcagtacacatccaattatgcaaaatctgccaacgttgattttactgtggacaacaatggactttatactgagcctcgccccattggcacccgttaccttacccgtcccctgtaa

SEQ ID NO: 352 - protein, 736 aa, Artificial Sequence
  Description of Artificial Sequence: Synthetic polypeptide
MAADGYLPDWLEDNLSEGIREWWDLKPGAPKPKANQQHQDNARGLVLPGYKYLGPGNGLDKGEPVNAADAAALEHDKAYDQQLKAGDNPYLKYNHADAEFQERLKEDTSFGGNLGRAVFQAKKRLLEPLGLVEEAAKTAPGKKRPVEPSPQRSPDSSTGIGKKGQQPAKKRLNFGQTGDSESVPDPQPLGEPPATPAAVGPTTMASGGGAPMADNNEGADGVGNSSGNWHCDSQWLGDRVITTSTRTWALPTYNNHLYKQISSQSGASNDNHYFGYSTPWGYFDFNRFHCHFSPRDWQRLINNNWGFRPKRLNFKLFNIQVKEVTTNDGVTTIANNLTSTVQVFSDSEYQLPYVLGSAHQGCLPPFPADVFMIPQYGYLTLNNGSQAVGRSSFYCLEYFPSQMLRTGNNFTFSYTFEDVPFHSSYAHSQSLDRLMNPLIDQYLYYLSRTNTPSGTTTQSRLQFSQAGASDIRDQSRNWLPGPCYRQQRVSKTKTDNNNSNFTWTGASKYNLNGRESIINPGTAMASHKDDEDKFFPMSGVMIFGKESAGASNTALDNVMITDEEEIKATNPVATERFGTVAVNFQSSSTDPATGDVHAMGALPGMVWQDRDVYLQGPIWAKIPHTDGHFHPSPLMGGFGLKNPPPQILIKNTPVPANPPAEFSATKFASFITQYSTGQVSVEIEWELQKENSKRWNPEVQYTSNYAKSANVDFTVDNNGLYTEPRPIGTRYLTRPL

SEQ ID NO: 353 - DNA, 2211 bp, Artificial Sequence
  Description of Artificial Sequence: Synthetic polynucleotide
atggctgccgatggttatcttccagattggctcgaggacaaccttagtgaaggaattcgcgagtggtgggcgctgaaacctggagccccgaagcccaaagccaaccagcaaaagcaggacgacggccggggtctggtgcttccgggttacaaatacctcggacccggtaacggactcgacaaaggagagccggtcaacgaggcggacgcggcagccctcgagcacgacaaggcctacgaccagcagctcaaagcgggtgacaatccgtacctgcggtataaccacgccgacgccgagtttcaggagcgtctgcaagaagatacgtcttttgggggcaacctcgggcgagcagtcttccaggccaagaagcgggttctcgaacctctcggtctggttgaggaaggcgctaagacggctcccggaaagaaacgtccggtagagcagtcgccacaagagccagactcctctacgggcatcggcaagaaaggccaacagcccgccagaaaaagactcaatttcggtcagactggcgactcagagtcagttccagaccctcaacctctcggagaacctccagcagcgccctctggtgtgggacctactacaatggcttcaggcggtggcgcaccaatggcagacaataacgaaggcgccgacggagtgggtaatgcctcaggaaattggcattgcgattccacatggctgggcgacagagtcatcaccaccagcacccgaacatgggccttgcccacctataacaaccacctctacaagcaaatctccagtgcttcaacgggggccagcaacgacaacacctacttcggctacagcaccccctgggggtattttgatttcaacagattccactgccatttctcaccacgtgactggcagcgactcatcaacaacaattggggattccggcccaagagactcaacttcaaactcttcaacatccaagtcaaggaggtcacgacgaatgatggcgtcacgaccatcgctaataaccttaccagcacggttcaagtcttctcggactcggagtaccagttgccgtacgtcctcggctctgcgcaccagggctgcctccctccgttcccggcggacgtgttcatgattccgcagtacggctacctaacgctcaacaatggcagccaggcagtgggacggtcatccttttactgcctggaatatttcccatcgcagatgctgagaacgggcaataactttaccttcagctacaccttcgaggacgtgcctttccacagcagctacgcgcacagccagagcctggaccggctgatgaatcctctcatcgaccagtacctgtattacctgaacagaactcagaatcagtccggaagtgcccaaaacaaggacttgctgtttagccgggggtctccagctggcatgtctgttcagcccaaaaactggctacctggaccctgttatcggcagcagcgcgtttctaaaacaaaaacagacaacaacaacagcaattttacctggactggtgcttcaaaatataacctcaatgggcgtgaatccatcatcaaccctggcactgctatggcctcacacaaagacgacgaagacaagttctttcccatgagcggtgtcatgatttttggaaaagagagcgccggagcttcaaacactgcattggacaatgtcatgattacagacgaagaggaaattaaagccactaaccctgtggccaccgaaagatttgggaccgtggcagtcaatttccagagcagcagcacagaccctgcgaccggagatgtgcatgttatgggagccttacctggaatggtgtggcaagacagagacgtatacctgcagggtcctatttgggccaaaattcctcacacagatggacactttcacccgtctcctcttatgggcggctttggactcaagaacccgcctcctcagatcctcatcaaaaacacgcctgttcctgcgaatcctccggcagagttttcggctacaaagtttgcttcattcatcacccagtattccacaggacaagtgagcgtggagattgaatgggagctgcagaaagaaaacagcaaacgctggaatcccgaagtgcagtatacatctaactatgcaaaatctgccaacgttgatttcactgtggacaacaatggactttatactgagcctcgccccattggcacccgttacctcacccgtcccctgtaa

SEQ ID NO: 354 - protein, 736 aa, Artificial Sequence
  Description of Artificial Sequence: Synthetic polypeptide
MAADGYLPDWLEDNLSEGIREWWALKPGAPKPKANQQKQDDGRGLVLPGYKYLGPGNGLDKGEPVNEADAAALEHDKAYDQQLKAGDNPYLRYNHADAEFQERLQEDTSFGGNLGRAVFQAKKRVLEPLGLVEEGAKTAPGKKRPVEQSPQEPDSSTGIGKKGQQPARKRLNFGQTGDSESVPDPQPLGEPPAAPSGVGPTTMASGGGAPMADNNEGADGVGNASGNWHCDSTWLGDRVITTSTRTWALPTYNNHLYKQISSASTGASNDNTYFGYSTPWGYFDFNRFHCHFSPRDWQRLINNNWGFRPKRLNFKLFNIQVKEVTTNDGVTTIANNLTSTVQVFSDSEYQLPYVLGSAHQGCLPPFPADVFMIPQYGYLTLNNGSQAVGRSSFYCLEYFPSQMLRTGNNFTFSYTFEDVPFHSSYAHSQSLDRLMNPLIDQYLYYLNRTQNQSGSAQNKDLLFSRGSPAGMSVQPKNWLPGPCYRQQRVSKTKTDNNNSNFTWTGASKYNLNGRESIINPGTAMASHKDDEDKFFPMSGVMIFGKESAGASNTALDNVMITDEEEIKATNPVATERFGTVAVNFQSSSTDPATGDVHVMGALPGMVWQDRDVYLQGPIWAKIPHTDGHFHPSPLMGGFGLKNPPPQILIKNTPVPANPPAEFSATKFASFITQYSTGQVSVEIEWELQKENSKRWNPEVQYTSNYAKSANVDFTVDNNGLYTEPRPIGTRYLTRPL

SEQ ID NO: 355 - DNA, 2205 bp, Artificial Sequence
  Description of Artificial Sequence: Synthetic polynucleotide
atggctgctgacggttatcttccagattggctcgaggacaacctttctgaaggcattcgtgagtggtgggctctgaaacctggagtccctcaacccaaagcgaaccaacaacaccaggacaaccgtcggggtcttgtgcttccgggttacaaatacctcggacccggtaacggactcgacaaaggagagccggtcaacgaggcggacgcggcagccctcgaacacgacaaggcctacgaccagcagctcaaggccggagacaacccgtacctcaagtacaaccacgccgacgccgagttccaggagcggctcaaagaagatacgtcttttgggggcaacctcgggcgagcagtcttccaggccaaaaagaggcttcttgaacctcttggtctggttgaggaagcggctaagacggctcctggaaagaagaggcctgtagagcagtctcctcaggaaccggactcctccgcgggtattggcaaatcgggtgcacagcccgctaaaaagagactcaatttcggtcagactggcgacacagagtcagtcccagaccctcaaccaatcggagaacctcccgcagccccctcaggtgtgggatctcttacaatggcttcaggtggtggcgcaccagtggcagacaataacgaaggtgccgatggagtgggtagttcctcgggaaattggcattgcgattcccaatggctgggggacagagtcatcaccaccagcacccgaacctgggccctgcccacctacaacaaccacctctacaaacaaatttccagccaatcaggagcctcgaacgacaatcactactttggctacagcaccccttgggggtattttgacttcaacagattccactgccacttttcaccacgtgactggcagcgactcatcaacaacaactggggattccggcccaagagactcagcttcaagctcttcaacatccaggtcaaagaggttacggacaacaatggagtcaagaccatcgccaataaccttaccagcacggtccaggtcttcacggactcagactatcagctcccgtacgtgctcgggtcggctcacgagggctgcctcccgccgttcccagcggacgttttcatgattcctcagtacgggtatctgacgcttaatgatggaagccaggccgtgggtcgttcgtccttttactgcctggaatatttcccgtcgcaaatgctaagaacgggtaacaacttccagttcagctacgagtttgagaacgtacctttccatagcagctacgctcacagccaaagcctggaccgactaatgaatccactcatcgaccaatacttgtactatctctcaaagactattaacggttctggacagaatcaacaaacgctaaaattcagtgtggccggacccagcaacatggctgtccagggaagaaactacatacctggacccagctaccgacaacaacgtgtctcaaccactgtgactcaaaacaacaacagcgaatttgcttggcctggagcttcttcttgggctctcaatggacgtaatagcttgatgaatcctggacctgctatggccagccacaaagaaggagaggaccgtttctttcctttgtctggatctttaatttttggcaaacaaggaactggaagagacaacgtggatgcggacaaagtcatgataaccaacgaagaagaaattaaaactactaacccggtagcaacggagtcctatggacaagtggccacaaaccaccagagtgcccaagcacaggcgcagaccggctgggttcaaaaccaaggaatacttccgggtatggtttggcaggacagagatgtgtacctgcaaggacccatctgggccaagattcctcacacggacggcaacttccacccgtctccgctgatgggcggctttggcctgaaacatcctccgcctcagatcctgatcaagaacacgcctgtacctgcggatcctccgaccaccttcaaccagtcaaagctgaactctttcatcacgcaatacagcaccggacaggtcagcgtggaaattgaatgggagctgcagaaggaaaacagcaagcgctggaatcccgaagtgcagtatacatctaactatgcaaaatctgccaacgttgatttcactgtggacaacaatggactttatactgagcctcgccccattggcacccgttacctcacccgtcccctgtaa

SEQ ID NO: 356 - protein, 734 aa, Artificial Sequence
  Description of Artificial Sequence: Synthetic polypeptide
MAADGYLPDWLEDNLSEGIREWWALKPGVPQPKANQQHQDNRRGLVLPGYKYLGPGNGLDKGEPVNEADAAALEHDKAYDQQLKAGDNPYLKYNHADAEFQERLKEDTSFGGNLGRAVFQAKKRLLEPLGLVEEAAKTAPGKKRPVEQSPQEPDSSAGIGKSGAQPAKKRLNFGQTGDTESVPDPQPIGEPPAAPSGVGSLTMASGGGAPVADNNEGADGVGSSSGNWHCDSQWLGDRVITTSTRTWALPTYNNHLYKQISSQSGASNDNHYFGYSTPWGYFDFNRFHCHFSPRDWQRLINNNWGFRPKRLSFKLFNIQVKEVTDNNGVKTIANNLTSTVQVFTDSDYQLPYVLGSAHEGCLPPFPADVFMIPQYGYLTLNDGSQAVGRSSFYCLEYFPSQMLRTGNNFQFSYEFENVPFHSSYAHSQSLDRLMNPLIDQYLYYLSKTINGSGQNQQTLKFSVAGPSNMAVQGRNYIPGPSYRQQRVSTTVTQNNNSEFAWPGASSWALNGRNSLMNPGPAMASHKEGEDRFFPLSGSLIFGKQGTGRDNVDADKVMITNEEEIKTTNPVATESYGQVATNHQSAQAQAQTGWVQNQGILPGMVWQDRDVYLQGPIWAKIPHTDGNFHPSPLMGGFGLKHPPPQILIKNTPVPADPPTTFNQSKLNSFITQYSTGQVSVEIEWELQKENSKRWNPEVQYTSNYAKSANVDFTVDNNGLYTEPRPIGTRYLTRPL

SEQ ID NO: 357 - DNA, 2211 bp, Artificial Sequence
  Description of Artificial Sequence: Synthetic polynucleotide
atggctgccgatggttatcttccagattggctcgaggacaacctctctgagggcattcgcgagtggtgggcgctgaaacctggagccccgaagcccaaagccaaccagcaaaagcaggacgacggccggggtctggtgcttcctggctacaagtacctcggacccttcaacggactcgacaagggggagcccgtcaacgcggcggacgcagcggccctcgagcacgacaaggcctacgaccagcagctgcaggcgggtgacaatccgtacctgcggtataaccacgccgacgccgagtttcaggagcgtctgcaagaagatacgtcttttgggggcaacctcgggcgagcagtcttccaggccaagaagtgggttctcgaacctctcggtctggttgaggaaggcgctaagacggctcctggaaagaaacgtccggtagagcagtcgccacaagagccagactcctcctcgggcatcggcaagacaggccagcagcccgctaaaaagagactcaattttggtcagactggcgactcagagtcagtccccgacccacaacctctcggagaacctccagcaacccccgctgctgtgggacctactacaatggcttcaggcggtggcgcaccaatggcagacaataacgaaggcgccgacggagtgggtaatgcctcaggaaattggcattgcgattccacatggctgggcgacagagtcatcaccaccagcacccgcacctgggccttgcccacctacaataaccacctctacaagcaaatctccagtgcttcaacgggggccagcaacgacaaccactacttcggctacagcaccccctgggggtattttgatttcaacagattccactgccatttctcaccacgtgactggcagcgactcatcaacaacaattggggattccggcccaagagactcaacttcaagctcttcaacatccaagtcaaggaggtcacgacgaatgatggcgtcacaaccatcgctaataaccttaccagcacggttcaagtcttctcggactcggagtaccagcttccgtacgtcctcggctctgcgcaccagggctgcctccctccgttcccggcggacgtgttcatgattccgcaatacggctacctgacgctcaacaatggcagccaagccgtgggacgttcatccttttactgcctggaatatttcccttctcagatgctgagaacgggcaacaactttaccttcagctacacctttgaggaagtgcctttccacagcagctacgcgcacagccagagcctggaccggctgatgaatcctctcatcgaccaatacctgtattacctgaacagaactcaaaatcagtccggaagtgcccaaaacaaggacttgctgtttagccgtgggtctccagctggcatgtctgttcagcccaaaaactggctacctggaccctgttatcggcagcagcgcgtttctaaaacaaaaacagacaacaacaacagcaattttacctggactggtgcttcaaaatataacctcaatgggcgtgaatccatcatcaaccctggcactgctatggcctcacacaaagacgacgaagacaagttctttcccatgagcggtgtcatgatttttggaaaggagagcgccggagcttcaaacactgcattggacaatgtcatgatcaccgacgaagaggaaatcaaagccactaaccccgtggccaccgaaagatttgggactgtggcagtcaatctccagagcagcagcacagaccctgcgaccggagatgtgcatgttatgggagccttacctggcatggtgtggcaagatagagacgtgtacctgcagggtcccatttgggccaaaattcctcacacagatggacactttcacccgtctcctcttatgggcggctttggactcaagaacccgcctcctcagatcctcatcaaaaacacgcctgttcctgcgaatcctccggcggagttttcagctacaaagtttgcttcattcatcacccaatactccacaggacaagtgagtgtggaaattgaatgggagctgcagaaagaaaacagcaagcgctggaatcccgaagtgcagtacacatccaattatgcaaaatctgccaacgttgattttactgtggacaacaatggactttatactgagcctcgccccattggcacccgttacctcacccgtcccctgtaa

SEQ ID NO: 358 - protein, 736 aa, Artificial Sequence
  Description of Artificial Sequence: Synthetic polypeptide
MAADGYLPDWLEDNLSEGIREWWALKPGAPKPKANQQKQDDGRGLVLPGYKYLGPFNGLDKGEPVNAADAAALEHDKAYDQQLQAGDNPYLRYNHADAEFQERLQEDTSFGGNLGRAVFQAKKWVLEPLGLVEEGAKTAPGKKRPVEQSPQEPDSSSGIGKTGQQPAKKRLNFGQTGDSESVPDPQPLGEPPATPAAVGPTTMASGGGAPMADNNEGADGVGNASGNWHCDSTWLGDRVITTSTRTWALPTYNNHLYKQISSASTGASNDNHYFGYSTPWGYFDFNRFHCHFSPRDWQRLINNNWGFRPKRLNFKLFNIQVKEVTTNDGVTTIANNLTSTVQVFSDSEYQLPYVLGSAHQGCLPPFPADVFMIPQYGYLTLNNGSQAVGRSSFYCLEYFPSQMLRTGNNFTFSYTFEEVPFHSSYAHSQSLDRLMNPLIDQYLYYLNRTQNQSGSAQNKDLLFSRGSPAGMSVQPKNWLPGPCYRQQRVSKTKTDNNNSNFTWTGASKYNLNGRESIINPGTAMASHKDDEDKFFPMSGVMIFGKESAGASNTALDNVMITDEEEIKATNPVATERFGTVAVNLQSSSTDPATGDVHVMGALPGMVWQDRDVYLQGPIWAKIPHTDGHFHPSPLMGGFGLKNPPPQILIKNTPVPANPPAEFSATKFASFITQYSTGQVSVEIEWELQKENSKRWNPEVQYTSNYAKSANVDFTVDNNGLYTEPRPIGTRYLTRPL

SEQ ID NO: 359 - DNA, 2214 bp, Artificial Sequence
  Description of Artificial Sequence: Synthetic polynucleotide
atggctgccgatggttatcttccagattggctcgaggacaaccttagtgaaggaattcgcgagtggtgggctttgaaacctggagcccctcaacccaaggcaaatcaacaacatcaagacaacgctcgaggtcttgtgcttccgggttacaaataccttggacccggcaacggactcgacaagggggagccggtcaacgcagcagacgcggcggccctcgagcacgacaaggcctacgaccagcagctgcaggcgggtgacaatccgtacctgcggtataaccacgccgacgccgagtttcaggagcgtctgcaagaagatacgtcttttgggggcaaccttggcagagcagtcttccaggccaaaaagaggatccttgagcctcttggtctggttgaggaagcagctaaaacggctcctggaaagaagaggcctgtagatcagtctcctcaggaaccggactcatcatctggtgttggcaaatcgggcaaacagcctgccagaaaaagactaaatttcggtcagactggcgactcagagtcagtcccagaccctcaacctctcggagaaccaccagcagcccccacaagtttgggatctaatacaatggcttcaggcggtggcgcaccaatggcagacaataacgagggtgccgatggggtgggtagttcctcgggaaattggcattgcgattcccaatggctgggggacagagtcatcaccaccagcacccgaacctgggccctgcccacctacaacaatcacctctacaagcaaatctccaacgggacatcgggaggagccaccaacgacaacacctacttcggctacagcaccccctgggggtattttgactttaacagattccactgccacttttcaccacgtgactggcagcgactcatcaacaacaactggggattccggcccaagagactcagcttcaagctcttcaacatccaggtcaaggaggtcacgcagaatgaaggcaccaagaccatcgccaataacctcaccagcaccatccaggtgtttacggactcggagtaccagctgccgtacgttctcggctcggcgcaccagggctgcctccctccgttcccggcggacgtcttcatggtgccacagtatggatacctgacgctcaacaatggcagccaagccgtgggacgttcatccttttactgcctggaatatttcccttctcagatgctgagaacgggcaacaactttaccttcagctacacctttgaggaagtgcctttccacagcagctacgcgcacagccagagcttggaccggctgatgaatcctctgattgaccagtacctgtactacttgtctcggactcaaacaacaggaggcacggcaaatacgcagactctgggcttcagccaaggtgggcctaatacaatggccaatcaggcaaagaactggctgccaggaccctgttaccgccaacaacgcgtctcaacgacaaccgggcaaaacaacaatagcaactttgcctggactgctgggaccaaataccatctgaatggaagaaattcattggctaatcctggcatcgctatggcaacacacaaagacgacgaggagcgtttttttcccagtaacgggatcctgatttttggcaaacaaaatgctgccagagacaatgcggattacagcgatgtcatgctcaccagcgaggaagaaatcaaaaccactaaccctgtggctacagaggaatacggtatcgtggcagataacttgcagcagcaaaacacggctcctcaaattggaactgtcaacagccagggggacttacccggtatggtctggcagaaccgggacgtgtacctgcagggtcccatctgggccaagattcctcacacggacggcaacttccacccgtctccgctgatgggcggctttggcctgaaacatcctccgcctcagatcctgatcaagaacacgcctgtacctgcggatcctccgaccaccttcaaccagtcaaagctgaactctttcatcacgcaatacagcaccggacaggtcagcgtggagatcgagtgggagctgcagaaggaaaacagcaagcgctggaacccggagatccagtacacttccaactattacaagtctaataatgttgaatttgctgttaatactgaaggtgtatatagtgaaccccgccccattggcaccagatacctgactcgtaatctgtaa

SEQ ID NO: 360 - protein, 737 aa, Artificial Sequence
  Description of Artificial Sequence: Synthetic polypeptide
MAADGYLPDWLEDNLSEGIREWWALKPGAPQPKANQQHQDNARGLVLPGYKYLGPGNGLDKGEPVNAADAAALEHDKAYDQQLQAGDNPYLRYNHADAEFQERLQEDTSFGGNLGRAVFQAKKRILEPLGLVEEAAKTAPGKKRPVDQSPQEPDSSSGVGKSGKQPARKRLNFGQTGDSESVPDPQPLGEPPAAPTSLGSNTMASGGGAPMADNNEGADGVGSSSGNWHCDSQWLGDRVITTSTRTWALPTYNNHLYKQISNGTSGGATNDNTYFGYSTPWGYFDFNRFHCHFSPRDWQRLINNNWGFRPKRLSFKLFNIQVKEVTQNEGTKTIANNLTSTIQVFTDSEYQLPYVLGSAHQGCLPPFPADVFMVPQYGYLTLNNGSQAVGRSSFYCLEYFPSQMLRTGNNFTFSYTFEEVPFHSSYAHSQSLDRLMNPLIDQYLYYLSRTQTTGGTANTQTLGFSQGGPNTMANQAKNWLPGPCYRQQRVSTTTGQNNNSNFAWTAGTKYHLNGRNSLANPGIAMATHKDDEERFFPSNGILIFGKQNAARDNADYSDVMLTSEEEIKTTNPVATEEYGIVADNLQQQNTAPQIGTVNSQGDLPGMVWQNRDVYLQGPIWAKIPHTDGNFHPSPLMGGFGLKHPPPQILIKNTPVPADPPTTFNQSKLNSFITQYSTGQVSVEIEWELQKENSKRWNPEIQYTSNYYKSNNVEFAVNTEGVYSEPRPIGTRYLTRNL

SEQ ID NO: 361 - DNA, 2205 bp, Artificial Sequence
  Description of Artificial Sequence: Synthetic polynucleotide
atggctgctgacggttatcttccagattggctcgaggacaacctttctgaaggcattcgtgagtggtgggctctgaaacctggagtccctcaacccaaagcgaaccaacaacaccaggacaactgtcggggtcttgtgcttccgggttacaaatacctcggacccggtaacggactcgacaaaggagagccggtcaacgaggcggacgcggcagccctcgaacacgacaaggcctacgaccagcagctcaaggccggagacaacccgtacctcaagtacaaccacgccgacgccgagttccaggagcggctcaaagaagatacgtcttttgggggcaacctcgggcgagcagtcttccagaccaaaaagaggcttcttgaacctcttggtctggttgaggaagcggctaagacggctcctggaaagaagaggcctgtagagcagtctcctcaggaaccggactcctccgcgggtattggcaaatcgggtgcacagcccgctaaaaagagactcaatttcggtcagactggcgacacagagtcagtcccagaccctcaaccaatcggagaacctcccgcagccccctcaggtgtgggatctcttacaatggcttcaggtggtggcgcaccagtggcagacaataacgaaggtgccgatggagtgggtagttcctcgggaaattggcattgcgattcccaatggctgggggacagagtcatcaccaccagcacccgaacctgggccctgcccacctacaacaaccacctctacaaacaaatttccagccaatcaggagcctcgaacgacaatcactactttggctacagcaccccttgggggtattttgacttcaacagattccactgccacttttcaccacgtgactggcagcgactcatcaacaacaactggggattccggcccaagagactcagcttcaagctcttcaacatccaggtcaaagaggttacggacaacaatggagtcaagaccatcgccaataaccttaccagcacggtccaggtcttcacggactcagactatcagctcccgtacgtgctcgggtcggctcacgagggctgcctcccgccgttcccagcggacgttttcatgattcctcagtacgggtatctgacgcttaatgatggaagccaggccgtgggtcgttcgtccttttactgcctggaatatttcccgtcgcaaatgctaagaacgggtaacaacttccagttcagctacgagtttgagaacgtacctttccatagcagctacgctcacagccaaagcctggaccgactaatgaatccactcatcgaccaatacttgtactatctctcaaagactattaacggttctggacagaatcaacaaacgctaaaattcagtgtggccggacccagcaacatggctgtccagggaagaaactacatacctggacccagctaccgacaacaacgtgtctcaaccactgtgactcaaaacaacaacagcgaatttgcttggcctggagcttcttcttgggctctcaatggacgtaatagcttgatgaatcctggacctgctatggccagccacaaagaaggagaggaccgtttctttcctttgtctggatctttaatttttggcaaacaaggaactggaagagacaacgtggatgcggacaaagtcatgataaccaacgaagaagaaattaaaactactaacccggtagcaacggagtcctatggacaagtggccacaaaccaccagagtgcccaagcacaggcgcagaccggctgggttcaaaaccaaggaatacttccgggtatggtttggcaggacagagatgtgtacctgcaaggacccatctgggccaagattcctcacacggacggcaacttccacccgtctccgctgatgggcggctttggcctgaaacatcctccgcctcagatcctgatcaagaacacgcctgttcctgcgaatcctccggcggagttttcagctacaaagtttgcttcattcatcacccagtactccacaggacaagtgagtgtggaaattgaatgggagctgcagaaagaaaacagcaagcgctggaatcccgaagtgcagtacacatccaattatgcaaaatctgccaacgttgattttactgtggacaacaatggactttatactgagcctcgccccattggcacccgttaccttaccaaacctctgtaa

SEQ ID NO: 362 - protein, 734 aa, Artificial Sequence
  Description of Artificial Sequence: Synthetic polypeptide
MAADGYLPDWLEDNLSEGIREWWALKPGVPQPKANQQHQDNCRGLVLPGYKYLGPGNGLDKGEPVNEADAAALEHDKAYDQQLKAGDNPYLKYNHADAEFQERLKEDTSFGGNLGRAVFQTKKRLLEPLGLVEEAAKTAPGKKRPVEQSPQEPDSSAGIGKSGAQPAKKRLNFGQTGDTESVPDPQPIGEPPAAPSGVGSLTMASGGGAPVADNNEGADGVGSSSGNWHCDSQWLGDRVITTSTRTWALPTYNNHLYKQISSQSGASNDNHYFGYSTPWGYFDFNRFHCHFSPRDWQRLINNNWGFRPKRLSFKLFNIQVKEVTDNNGVKTIANNLTSTVQVFTDSDYQLPYVLGSAHEGCLPPFPADVFMIPQYGYLTLNDGSQAVGRSSFYCLEYFPSQMLRTGNNFQFSYEFENVPFHSSYAHSQSLDRLMNPLIDQYLYYLSKTINGSGQNQQTLKFSVAGPSNMAVQGRNYIPGPSYRQQRVSTTVTQNNNSEFAWPGASSWALNGRNSLMNPGPAMASHKEGEDRFFPLSGSLIFGKQGTGRDNVDADKVMITNEEEIKTTNPVATESYGQVATNHQSAQAQAQTGWVQNQGILPGMVWQDRDVYLQGPIWAKIPHTDGNFHPSPLMGGFGLKHPPPQILIKNTPVPANPPAEFSATKFASFITQYSTGQVSVEIEWELQKENSKRWNPEVQYTSNYAKSANVDFTVDNNGLYTEPRPIGTRYLTKPL

SEQ ID NO: 363 - DNA, 2211 bp, Artificial Sequence
  Description of Artificial Sequence: Synthetic polynucleotide
atggctgccgatggttatcttccagattggctcgaggacaacctctctgagggcattcgcgagtggtgggacttgaaacctggagcccctaaacccaaggcaaatcaacaacatcaggacaacgctcgaggtcttgtgcttccgggttacaaataccttggacccggcaacggactcgacaagggggagccggtcaacgcagcagacgcggcggccctcgagcacgacaaggcctacgaccagcagctcaaggccggagacaacccgtacctcaagtacaaccacgccgacgccgagttccaggagcggctcaaagaagatacgtcttttgggggcaacctcgggcgagcagtcttccaggccaaaaagaggcttcttgaacctcttggtctggttgaggaagcggctaagacggctcctggaaagaagagaccggtagagccatcaccccagcgttctccagactcctctacgggcatcggcaagaaaggccaacagcccgctaaaaagagactcaattttggtcagactggcgactcagagtcagtccccgacccacaacctctcggagaacctccagcaacccccgctgctgtgggacctactacaatggcttcaggcggtggcgcaccaatggcagacaataacgagggtgccgatggagtgggtaattcctcaggaaattggcattgcgattcccaatggctgggcgacagagtcatcaccaccagcaccagaacctgggccctgcccacttacaacaaccatctctacaagcaaatctccagccaatcaggagcttcaaacgacaaccactactttggctacagcaccccttgggggtattttgactttaacagattccactgccacttttcaccacgtgactggcaaagactcatcaacaacaactggggattccgacccaagagactcaacttcaagctcttcaacatccaagtcaaggaggtcacgacgaatgatggcgtcacgaccatcgctaataaccttaccagcacggttcaagtcttctcggactcggagtaccagttgccgtacgtcctcggctctgcgcaccagggctgcctccctccgttcccggcggacgtgttcatgattccgcagtacggctacctaacgctcaacaatggcagccaagccgtgggacgttcatccttttactgcctggaatatttcccttctcagatgctgagaacgggcaacaactttaccttcagctacacttttgaggacgttcctttccacagcagctacgctcacagccagagtctggaccgtctcatgaatcctctcatcgaccagtacctgtattacttgagcagaacaaacactccaagtggaaccaccacgcagtcaaggcttcagttttctcaggccggagcgagtgacattcgggaccagtctaggaactggcttcctggaccctgttaccgccagcagcgcgtttctaaaacaaaaacagacaacaacaacagcaattttacctggactggtgcttcaaaatataaccttaatgggcgtgaatctataatcaaccctggcactgctatggcctcacacaaagacgacgaagacaagttctttcccatgagcggtgtcatgatttttggaaaagagagcgccggagcttcaaacactgcattggacaatgtcatgatcacagacgaagaggaaatcaaagccactaaccccgtggccaccgaaagatttgggactgtggcagtcaatctccagagcagcagcacagaccctgcgaccggagatgtgcatgttatgggagcattacctggcatggtgtggcaagatagagacgtgtacctgcagggtcccatttgggccaaaattcctcacacagatggacactttcacccgtctcctcttatgggcggctttggactcaagaacccgcctcctcagatcctcatcaaaaacacgcctgttcctgcgaatcctccggcggagttttcagctacaaagtttgcttcattcatcacccaatactccacaggacaagtgagtgtggaaattgaatgggagctgcagaaagaaaacagcaagcgctggaatcccgaagtgcagtacacatccaattatgcaaaatctgccaacgttgattttactgtggacaacaatggactttatactgagcctcgccccattggcacccgttaccttacccgtcccctgtaa

SEQ ID NO: 364 - protein, 736 aa, Artificial Sequence
  Description of Artificial Sequence: Synthetic polypeptide
MAADGYLPDWLEDNLSEGIREWWDLKPGAPKPKANQQHQDNARGLVLPGYKYLGPGNGLDKGEPVNAADAAALEHDKAYDQQLKAGDNPYLKYNHADAEFQERLKEDTSFGGNLGRAVFQAKKRLLEPLGLVEEAAKTAPGKKRPVEPSPQRSPDSSTGIGKKGQQPAKKRLNFGQTGDSESVPDPQPLGEPPATPAAVGPTTMASGGGAPMADNNEGADGVGNSSGNWHCDSQWLGDRVITTSTRTWALPTYNNHLYKQISSQSGASNDNHYFGYSTPWGYFDFNRFHCHFSPRDWQRLINNNWGFRPKRLNFKLFNIQVKEVTTNDGVTTIANNLTSTVQVFSDSEYQLPYVLGSAHQGCLPPFPADVFMIPQYGYLTLNNGSQAVGRSSFYCLEYFPSQMLRTGNNFTFSYTFEDVPFHSSYAHSQSLDRLMNPLIDQYLYYLSRTNTPSGTTTQSRLQFSQAGASDIRDQSRNWLPGPCYRQQRVSKTKTDNNNSNFTWTGASKYNLNGRESIINPGTAMASHKDDEDKFFPMSGVMIFGKESAGASNTALDNVMITDEEEIKATNPVATERFGTVAVNLQSSSTDPATGDVHVMGALPGMVWQDRDVYLQGPIWAKIPHTDGHFHPSPLMGGFGLKNPPPQILIKNTPVPANPPAEFSATKFASFITQYSTGQVSVEIEWELQKENSKRWNPEVQYTSNYAKSANVDFTVDNNGLYTEPRPIGTRYLTRPL

SEQ ID NO: 365 - DNA, 2214 bp, Artificial Sequence; identical to SEQ ID NO: 337
  Description of Artificial Sequence: Synthetic polynucleotide

SEQ ID NO: 366 - protein, 737 aa, Artificial Sequence; identical to SEQ ID NO: 338
  Description of Artificial Sequence: Synthetic polypeptide

SEQ ID NO: 367 - DNA, 2205 bp, Artificial Sequence
  Description of Artificial Sequence: Synthetic polynucleotide
atggctgctgacggttatcttccagattggctcgaggacaacctttctgaaggcattcgtgagtggtgggctctgaaacctggagtccctcaacccaaagcgaaccaacaacaccaggacaaccgtcggggtcttgtgcttccgggttacaaatacctcggacccggtaacggactcgacaaaggagagccggtcaacgaggcggacgcggcagccctcgaacacgacaaggcctacgaccagcagctcaaggccggagacaacccgtacctcaagtacaaccacgccgacgccgagttccaggagcggctcaaagaagatacgtcttttgggggcaacctcgggcgagcagtcttccaggccaaaaagaggcttcttgaacctcttggtctggttgaggaagcggctaagacggctcctggaaagaagaggcctgtagagcagtctcctcaggaaccggactcctccgcgggtattggcaaatcgggtgcacagcccgctaaaaagagactcaatttcggtcagactggcgacacagagtcagtcccagaccctcaaccaatcggagaacctcccgcagccccctcaggtgtgggatctcttacaatggcttcaggtggtggcgcaccagtggcagacaataacgaaggtgccgatggagtgggtagttcctcgggaaattggcattgcgattcccaatggctgggggacagagtcatcaccaccagcacccgaacctgggccctgcccacctacaacaaccacctctacaaacaaatttccagccaatcaggagcctcgaacgacaatcactactttggctacagcaccccttgggggtattttgacttcaacagattccactgccacttttcaccacgtgactggcagcgactcatcaacaacaactggggattccggcccaagagactcagcttcaagctcttcaacatccaggtcaaagaggttacggacaacaatggagtcaagaccatcgccaataaccttaccagcacggtccaggtcttcacggactcagactatcagctcccgtacgtgctcgggtcggctcacgagggctgcctcccgccgttcccagcggacgttttcatgattcctcagtacgggtatctgacgcttaatgatggaagccaggccgtgggtcgttcgtccttttactgcctggaatatttcccgtcgcaaatgctaagaacgggtaacaacttccagttcagctacgagtttgagaacgtacctttccatagcagctacgctcacagccaaagcctggaccgactaatgaatccactcatcgaccaatacttgtactatctctcaaagactattaacggttctggacagaatcaacaaacgctaaaattcagtgtggccggacccagcaacatggctgtccagggaagaaactacatacctggacccagctaccgacaacaacgtgtctcaaccactgtgactcaaaacaacaacagcgaatttgcttggcctggagcttcttcttgggctctcaatggacgtaatagcttgatgaatcctggacctgctatggccagccacaaagaaggagaggaccgtttctttcctttgtctggatctttaatttttggcaaacaaggaactggaagagacaacgtggatgcggacaaagtcatgataaccaacgaagaagaaattaaaactactaacccggtagcaacggagtcctatggacaagtggccacaaaccaccagagtgcccaagcacaggcgcagaccggctgggttcaaaaccaaggaatacttccgggtatggtttggcaggacagagatgtgtacctgcaaggacccatttgggccaaaattcctcacacggacggcaactttcacccttctccgctgatgggagggtttggaatgaaacacccgcctcctcagatcctcatcaaaaacacacctgtacctgcggatcctccaacggccttcaacaaggacaagctgaactctttcatcacccagtattctactggccaagtcagcgtggagatcgagtgggagctgcagaaggaaaacagcaagcgctggaaccccgagatccagtacacctccaactactacaaatctacaagtgtggactttgctgttaatacagaaggcgtgtactctgaaccccgccccattggcacccgttacctcacccgtaatctgtaa

SEQ ID NO: 368 - protein, 734 aa, Artificial Sequence
  Description of Artificial Sequence: Synthetic polypeptide
MAADGYLPDWLEDNLSEGIREWWALKPGVPQPKANQQHQDNRRGLVLPGYKYLGPGNGLDKGEPVNEADAAALEHDKAYDQQLKAGDNPYLKYNHADAEFQERLKEDTSFGGNLGRAVFQAKKRLLEPLGLVEEAAKTAPGKKRPVEQSPQEPDSSAGIGKSGAQPAKKRLNFGQTGDTESVPDPQPIGEPPAAPSGVGSLTMASGGGAPVADNNEGADGVGSSSGNWHCDSQWLGDRVITTSTRTWALPTYNNHLYKQISSQSGASNDNHYFGYSTPWGYFDFNRFHCHFSPRDWQRLINNNWGFRPKRLSFKLFNIQVKEVTDNNGVKTIANNLTSTVQVFTDSDYQLPYVLGSAHEGCLPPFPADVFMIPQYGYLTLNDGSQAVGRSSFYCLEYFPSQMLRTGNNFQFSYEFENVPFHSSYAHSQSLDRLMNPLIDQYLYYLSKTINGSGQNQQTLKFSVAGPSNMAVQGRNYIPGPSYRQQRVSTTVTQNNNSEFAWPGASSWALNGRNSLMNPGPAMASHKEGEDRFFPLSGSLIFGKQGTGRDNVDADKVMITNEEEIKTTNPVATESYGQVATNHQSAQAQAQTGWVQNQGILPGMVWQDRDVYLQGPIWAKIPHTDGNFHPSPLMGGFGMKHPPPQILIKNTPVPADPPTAFNKDKLNSFITQYSTGQVSVEIEWELQKENSKRWNPEIQYTSNYYKSTSVDFAVNTEGVYSEPRPIGTRYLTRNL

SEQ ID NO: 369 - DNA, 2217 bp, Artificial Sequence
  Description of Artificial Sequence: Synthetic polynucleotide
atggctgccgatggttatcttccagattggctcgaggacaacctctctgagggcattcgcgagtggtgggcgctgaaacctggagccccgaagcccaaagccaaccagcaaaagcaggacgacggccggggtctggtgcttcctggctacaagtacctcggacccttcaacggactcgacaagggggagcccgtcaacgcggcggacgcagcggccctcgagcacgacaaggcctacgaccagcagctgcaggcgggtgacaatccgtacctgcggtataaccacgccgacgccgagtttcaggagcgtctgcaagaagatacgtcttttgggggcaacctcgggcgagcagtcttccaggccaagaagcgggttctcgaacctctcggtctggttgaggaaggcgctaagacggctcctggaaagaagagaccggtagagccatcaccccagcgttctccagactcctctacgggcatcggcaagaaaggccaacagcccgccagaaaaagactcaattttggtcagactggcgactcagagtcagttccagaccctcaacctctcggagaacctccagcagcgccctctggtgtgggacctaatacaatggctgcaggcggtggcgcaccaatggcagacaataacgaaggcgccgacggagtgggtagttcctcgggaaattggcattgcgattccacatggctgggcgacagagtcatcaccaccagcacccgaacctgggccctgcccacctacaacaaccacctctacaagcaaatctccaacgggacatcgggaggagccaccaacgacaacacctacttcggctacagcaccccctgggggtattttgactttaacagattccactgccacttttcaccacgtgactggcagcgactcatcaacaacaactggggattccggcccaagagactcagcttcaagctcttcaacatccaggtcaaggaggtcacgcagaatgaaggcaccaagaccatcgccaataacctcaccagcaccatccaggtgtttacggactcggagtaccagctgccgtacgttctcggctctgcccaccagggctgcctgcctccgttcccggcggacgtgttcatgattccccagtacggctacctaacactcaacaacggtagtcaggccgtgggacgctcctccttctactgcctggaatactttccttcgcagatgctgagaaccggcaacaacttccagtttacttacaccttcgaggacgtgcctttccacagcagctacgcccacagccagagcttggaccggctgatgaatcctctgattgaccagtacctgtactacttgtctcggactcaaacaacaggaggcacggcaaatacgcagactctgggcttcagccaaggtgggcctaatacaatggccaatcaggcaaagaactggctgccaggaccctgttaccgccaacaacgcgtctcaacgacaaccgggcaaaacaacaatagcaactttgcctggactgctgggaccaaataccatctgaatggaagaaattcattggctaatcctggcatcgctatggcaacacacaaagacgacgaggagcgtttttttcccagtaacgggatcctgatttttggcaaacaaaatgctgccagagacaatgcggattacagcgatgtcatgctcaccagcgaggaagaaatcaaaaccactaaccctgtggctacagaggaatacggtatcgtggcagataacttgcagcagcaaaacacggctcctcaaattggaactgtcaacagccagggggccttacccggtatggtctggcagaaccgggacgtgtacctgcagggtcccatctgggccaagattcctcacacggacggcaacttccacccctctcccctcatgggtggattcggacttaaacatcctccgcctcagatcctgatcaagaacacgcctgtacctgcggatcctccgaccaccttcaaccagtcaaagctgaactctttcatcacgcaatacagcaccggacaggtcagcgtggaaattgaatgggagctgcagaaggaaaacagcaagcgctggaaccccgagatccagtacacctccaactactacaaatctacaagtgtggactttgctgttaatacagaaggcgtgtactctgaaccccgccccattggcacccgttacctcacccgtaatctgtaa

SEQ ID NO: 370 - protein, 738 aa, Artificial Sequence; identical to SEQ ID NO: 116
  Description of Artificial Sequence: Synthetic polypeptide

SEQ ID NO: 371 - DNA, 2211 bp, Artificial Sequence
  Description of Artificial Sequence: Synthetic polynucleotide
atggctgctgacggttatcttccagattggctcgaggacaacctttctgaaggcattcgagagtggtgggcgctgcaacctggagcccctaaacccaaggcaaatcaacaacatcaggacaacgctcggggtcttgtgcttccgggttacaaatacctcggacccggcaacggactcgacaagggggaacccgtcaacgcagcggacgcggcagccctcgagcacgacaaggcctacgaccagcagctcaaggccggtgacaacccctacctcaagtacaaccacgccgacgccgagttccaggagcggctcaaagaagatacgtcttttgggggcaacctcgggcgagcagtcttccaggccaaaaagaggcttcttgaacctcttggtctggttgaggaagcggctaagacggctcctggaaagaagaggcctgtagatcagtctcctcaggaaccggactcatcatctggtgttggcaaatcgggcaaacagcctgccagaaaaagactaaatttcggtcagactggcgactcagagtcagtcccagaccctcaacctctcggagaaccaccagcagcccccacaagtttgggatctaatacaatggcttcaggcggtggcgcaccaatggcagacaataacgagggtgccgatggagtgggtaattcctcaggaaattggcattgcgattcccaatggctgggcgacagagtcatcaccaccagcaccagaacctgggccctgcccacttacaacaaccatctctacaagcaaatctccagccaatcaggagcttcaaacgacaaccactactttggctacagcaccccttgggggtattttgactttaacagattccactgccacttctcaccacgtgactggcagcgactcattaacaacaactggggattccggcccaagaaactcagcttcaagctcttcaacatccaagttaaagaggtcacgcagaacgatggcacgacgactattgccaataaccttaccagcacggttcaggtgtttacggactcggagtatcagctcccgtacgtgctcgggtcggcgcaccaaggctgtctcccgccgtttccagcggacgtcttcatggtccctcagtatggatacctcaccctgaacaacggaagtcaagcggtgggacgctcatccttttactgcctggagtacttcccttcgcagatgctaaggactggaaataacttccaattcagctataccttcgaggatgtaccttttcacagcagctacgctcacagccagagtttggatcgcttgatgaatcctcttattgatcagtatctgtactacctgaacagaacgcaaggaacaacctctggaacaaccaaccaatcacggctgctttttagccaggctgggcctcagtctatgtctttgcaggccagaaattggctacctgggccctgctaccggcaacagagactttcaaagactgctaacgacaacaacaacagtaactttccttggacagcggccagcaaatatcatctcaatggccgcgactcgctggtgaatccaggaccagctatggccagtcacaaggacgatgaagaaaaatttttccctatgcacggcaatctaatatttggcaaagaagggacaacggcaagtaacgcagaattagataatgtaatgattacggatgaagaagagattcgtaccaccaatcctgtggcaacagagcagtatggaactgtggcaaataacttgcagagctcaaatacagctcccacgactagaactgtcaatgatcagggggccttacctggcatggtgtggcaagatcgtgacgtgtaccttcaaggacctatctgggcaaagattcctcacacggatggacactttcatccttctcctctgatgggaggctttggactgaaacatccgcctcctcaaatcatgatcaaaaatactccggtaccggcaaatcctccgacgactttcagcccggccaagtttgcttcatttatcactcagtactccactggacaggtcagcgtggaaattgagtgggagctacagaaagaaaacagcaaacgttggaatccagagattcagtacacttccaactacaacaagtctgttaatgtggactttactgtagacactaatggtgtttatagtgaacctcgccccattggcacccgttaccttacccgtcccctgtaa

SEQ ID NO: 372 - protein, 736 aa, Artificial Sequence; identical to SEQ ID NO: 342
  Description of Artificial Sequence: Synthetic polypeptide

SEQ ID NO: 373 - DNA, 2211 bp, Artificial Sequence; identical to SEQ ID NO: 341
  Description of Artificial Sequence: Synthetic polynucleotide

SEQ ID NO: 374 - protein, 736 aa, Artificial Sequence; identical to SEQ ID NO: 342
  Description of Artificial Sequence: Synthetic polypeptide

SEQ ID NO: 375 - DNA, 2211 bp, Artificial Sequence
  Description of Artificial Sequence: Synthetic polynucleotide
atggctgctgacggttatcttccagattggctcgaggacaacctttctgaaggcattcgtgagtggtgggctctgaaacctggagtccctcaacccaaagcgaaccaacaacaccaggacaaccgtcggggtcttgtgcttccgggttacaaatacctcggacccggtaacggactcgacaaaggagagcccgtcaacgcggcggatgcagcggccctcgagcacgacaaggcctacgaccagcagctcaaagcgggtgacaatccgtacctgcggtataaccacgccgacgccgagtttcaggagcgtctgcaagaagatacgtcttttgggggcaacctcgggcgagcagtcttccaggccaagaagagggttctcgaaccttttggtctggttgaggaaggtgctaagacggctcctggaaagaaacgtccggtagagcagtcgccacaagagccagactcctcctcgggcatcggcaagacaggccagcagcccgctaaaaagagactcaattttggtcagactggcgactcagagtcagtccccgacccacaacctctcggagaacctccagcaacccccgctgctgtgggacctactacaatggcttcaggcggtggcgcaccaatggcagacaataacgaaggcgccgacggagtgggtaatgcctcaggaaattggcattgcgattccacatggctgggcgacagagtcatcaccaccagcacccgcacctgggccttgcccacctacaataaccacctctacaagcaaatctccagtgcttcaacgggggccagcaacgacaaccactacttcggctacagcaccccctgggggtattttgatttcaacagattccactgccatttctcaccacgtgactggcagcgactcatcaacaacaattggggattccggcccaagagactcaacttcaagctcttcaacatccaagtcaaggaggtcacgacgaatgatggcgtcacgaccatcgctaataaccttaccagcacggttcaagtcttctcggactcggagtaccagcttccgtacgtcctcggctctgcgcaccagggctgcctccctccgttcccggcggacgtgttcatgattccgcaatacggctacctgacgctcaacaatggcagccaagccgtgggacgttcatccttttactgcctggaatatttcccttctcagatgctgagaacgggcaacaactttaccttcagctacacctttgaggaagtgcctttccacagcagctacgcgcacagccagagcctggaccggctgatgaatcctctcatcgaccaatacctgtattacctgaacagaactcaaaatcagtccggaagtgcccaaaacaaggacttgctgtttagccgtgggtctccagctggcatgtctgttcagcccaaaaactggctacctggaccctgttatcggcagcagcgcgtttctaaaacaaaaacagacaacaacaacagcaattttacctggactggtgcttcaaaatataacctcaatgggcgtgaatccatcatcaaccctggcactgctatggcctcacacaaagacgacgaagacaagttctttcccatgagcggtgtcatgatttttggaaaagagagcgccggagcttcaaacactgcattggacaatgtcatgattacagacgaagaggaaattaaagccactaaccctgtggccaccgaaagatttgggaccgtggcagtcaatttccagagcagcagcacagaccctgcgaccggagatgtgcatgttatgggagccttacctggaatggtgtggcaagacagagacgtatacctgcagggtcctatttgggccaaaattcctcacacggatggacactttcacccgtctcctctcatgggcggctttggacttaagcacccgcctcctcagatcctcatcaaaaacacgcctgttcctgcgaatcctccggcagagttttcggctacaaagtttgcttcattcatcacccagtattccacaggacaagtgagcgtggagattgaatgggagctgcagaaagaaaacagcaaacgctggaatcccgaagtgcagtatacatctaactatgcaaaatctgccaacgttgatttcactgtggacaacaatggactttatactgagcctcgccccattggcacccgttacctcacccgtcccctgtaa

SEQ ID NO: 376 - protein, 736 aa, Artificial Sequence
  Description of Artificial Sequence: Synthetic polypeptide
MAADGYLPDWLEDNLSEGIREWWALKPGVPQPKANQQHQDNRRGLVLPGYKYLGPGNGLDKGEPVNAADAAALEHDKAYDQQLKAGDNPYLRYNHADAEFQERLQEDTSFGGNLGRAVFQAKKRVLEPFGLVEEGAKTAPGKKRPVEQSPQEPDSSSGIGKTGQQPAKKRLNFGQTGDSESVPDPQPLGEPPATPAAVGPTTMASGGGAPMADNNEGADGVGNASGNWHCDSTWLGDRVITTSTRTWALPTYNNHLYKQISSASTGASNDNHYFGYSTPWGYFDFNRFHCHFSPRDWQRLINNNWGFRPKRLNFKLFNIQVKEVTTNDGVTTIANNLTSTVQVFSDSEYQLPYVLGSAHQGCLPPFPADVFMIPQYGYLTLNNGSQAVGRSSFYCLEYFPSQMLRTGNNFTFSYTFEEVPFHSSYAHSQSLDRLMNPLIDQYLYYLNRTQNQSGSAQNKDLLFSRGSPAGMSVQPKNWLPGPCYRQQRVSKTKTDNNNSNFTWTGASKYNLNGRESIINPGTAMASHKDDEDKFFPMSGVMIFGKESAGASNTALDNVMITDEEEIKATNPVATERFGTVAVNFQSSSTDPATGDVHVMGALPGMVWQDRDVYLQGPIWAKIPHTDGHFHPSPLMGGFGLKHPPPQILIKNTPVPANPPAEFSATKFASFITQYSTGQVSVEIEWELQKENSKRWNPEVQYTSNYAKSANVDFTVDNNGLYTEPRPIGTRYLTRPL

SEQ ID NO: 377 - DNA, 2217 bp, Artificial Sequence
  Description of Artificial Sequence: Synthetic polynucleotide
atggctgccgatggttatcttccagattggctcgaggacaacctctctgagggcattcgcgagtggtgggacttgaaacctggagccccgaaacccaaagccaaccagcaaaagcaggacgacggccggggtctggtgcttcctggctacaagtacctcggacccttcaacggactcgacaagggggagcccgtcaacgcggcggatgcaacggccctcgagcacgacaaggcctacgaccagcagctgcaggcgggtgacaatccgtacctgcggtataaccacgccgacgccgagtttcaggagcgtctgcaagaagatacgtcttttgggggcaacctcgggcgagcagtcttccaggccaagaagcgggttctcgaacctctcggtctggttgaggaaggcgctaagacggctcctggaaagaagagaccggtagagccatcaccccagcgttctccagactcctctacgggcatcggcaagaaaggccaacagcccgccagaaaaagactcaattttggtcagactggcgactcagagtcagttccagaccctcaacctctcggagaaccaccagcagcccccacaagtttgggatctaatacaatggcttcaggcggtggcgcaccaatggcagacaataacgagggtgccgatggagtgggtaattcctcaggaaattggcattgcgattcccaatggctgggcgacagagtcatcaccaccagcacccgcacctgggccttgcccacctacaataaccacctctacaagcaaatctccagtgcttcaacgggggccagcaacgacaaccactacttcggctacagcaccccctgggggtattttgactttaaccgcttccactgccacttctcgccaagagactggcaaagactcatcaacaacaattggggattccggcccaagagactcaacttcaaactcttcaacatccaagtcaaggaggtcacgacgaatgatggcgtcacgaccatcgccaataacctcaccagcaccatccaggtgtttacggactcggagtaccagctgccgtacgttctcggctctgcccaccagggctgcctgcctccgttcccggcggacgtgttcatgattccccagtatggatacctcaccctgaacaacggaagtcaagcggtgggacgctcatccttttactgcctggagtacttcccttcgcagatgctaaggactggaaataacttccaattcagctataccttcgaggatgtaccttttcacagcagctacgctcacagccagagtttggatcgcttgatgaatcctcttattgatcagtatctgtactacctgaacagaacgcaaggaacaacctctggaacaaccaaccaatcacggctgctttttagccaggctgggcctcagtctatgtctttgcaggccagaaattggctacctgggccctgctaccggcaacagagactttcaaagactgctaacgacaacaacaacagtaactttccttggacagcagccagcaaatatcatctcaatggccgcgactcgctggtgaatccaggaccagctatggccagtcacaaggacgatgaagaaaaatttttccctatgcacggcaatctaatatttggcaaagaagggacaacggcaagtaacgcagaattagataatgtaatgattacggatgaagaagagattcgtaccaccaatcctgtggcaacagagcagtatggaactgtggcaaataacttgcagagctcaaatacagctcccacgactagaactgtcaatgatcagggggccttacctggcatggtgtggcaagatcgtgacgtgtaccttcaggggcccatctgggcaaagattccacacacggacggacattttcacccctctcccctcatgggtggattcggacttaaacaccctcctccgcagattctcatcaagaacaccccggtacctgcgaatccttcgaccaccttcagtgcggcaaagtttgcttccttcatcacacagtactccacgggacaggtcagcgtggagatcgagtgggagctgcagaaggaaaacagcaagcgctggaacccggagatccagtacacttccaactattacaagtctaataatgttgaatttgctgttaatactgaaggtgtatatagtgaaccccgccccattggcaccagatacctgactcgtaatctgtaa

SEQ ID NO: 378 - protein, 738 aa, Artificial Sequence
  Description of Artificial Sequence: Synthetic polypeptide
MAADGYLPDWLEDNLSEGIREWWDLKPGAPKPKANQQKQDDGRGLVLPGYKYLGPFNGLDKGEPVNAADATALEHDKAYDQQLQAGDNPYLRYNHADAEFQERLQEDTSFGGNLGRAVFQAKKRVLEPLGLVEEGAKTAPGKKRPVEPSPQRSPDSSTGIGKKGQQPARKRLNFGQTGDSESVPDPQPLGEPPAAPTSLGSNTMASGGGAPMADNNEGADGVGNSSGNWHCDSQWLGDRVITTSTRTWALPTYNNHLYKQISSASTGASNDNHYFGYSTPWGYFDFNRFHCHFSPRDWQRLINNNWGFRPKRLNFKLFNIQVKEVTTNDGVTTIANNLTSTIQVFTDSEYQLPYVLGSAHQGCLPPFPADVFMIPQYGYLTLNNGSQAVGRSSFYCLEYFPSQMLRTGNNFQFSYTFEDVPFHSSYAHSQSLDRLMNPLIDQYLYYLNRTQGTTSGTTNQSRLLFSQAGPQSMSLQARNWLPGPCYRQQRLSKTANDNNNSNFPWTAASKYHLNGRDSLVNPGPAMASHKDDEEKFFPMHGNLIFGKEGTTASNAELDNVMITDEEEIRTTNPVATEQYGTVANNLQSSNTAPTTRTVNDQGALPGMVWQDRDVYLQGPIWAKIPHTDGHFHPSPLMGGFGLKHPPPQILIKNTPVPANPSTTFSAAKFASFITQYSTGQVSVEIEWELQKENSKRWNPEIQYTSNYYKSNNVEFAVNTEGVYSEPRPIGTRYLTRNL

SEQ ID NO: 379 - DNA, 2208 bp, Artificial Sequence
  Description of Artificial Sequence: Synthetic polynucleotide
atggctgccgatggttatcttccagattggctcgaggacaaccttagtgaaggaattcgcgagtggtgggacttgaaacctggagccccgaagcccaaagccaaccagcaaaagcaggacgacggccggggtctggtgcttcctggctacaagtacctcggacccttcaacggactcgacaagggggagcccgtcaacgcggcggacgcagcggccctcgagcacgacaaggcctacgaccagcagctcaaagcgggtgacaatccgtacctgcggtataaccacgccgacgccgagtttcaggagcgtctgcaagaagatacgtcttttgggggcaacctcgggcgagcagtcttccaggccaagaagcgggttctcgaacctctcggtctggttgaggaaggtgctaagacggctcctggaaagaaacgtccggtagagcagtcgccacaagagccagactcctcctcgggcattggcaagacaggccagcagcccgctaaaaagagactcaattttggtcagactggcgactcagagtcagtccccgacccacaacctctcggagaacctccagcaacccccgctgctgtgggacctactacaatggcttcaggcggtggcgcaccaatggcagacaataacgaaggcgccgacggagtgggtaatgcctcaggaaattggcattgcgattccacatggctgggcgacagagtcatcaccaccagcacccgaacctgggccctgcccacctacaacaaccacctctacaaacaaatttccagccaatcaggagcctcgaacgacaatcactactttggctacagcaccccttgggggtattttgatttcaacagattccactgccacttttcaccacgtgactggcagcgactcatcaacaacaattggggattccggcccaagagactcagcttcaagctcttcaacatccaggtcaaggaggtcacgcagaatgaaggcaccaagaccatcgccaataaccttaccagcacggttcaagtgtttacggactcggagtatcagctcccgtacgtgctcggctcggcgcatcaaggatgcctcccgccgttcccagcagacgtcttcatggtgccacagtatggatacctcaccctgaacaacgggagtcaggcagtaggacgctcttcattttactgcctggagtactttccttctcagatgctgcgtaccggaaacaactttaccttcagctacacttttgaggacgttcctttccacagcagctacgctcacagccagagtctggaccgtctcatgaatcctctgattgaccagtacctgtattacttgagcagaacaaacactccaagtggaaccaccacgcagtcaaggcttcagttttctcaggccggagcgagtgacattcgggaccagtctaggaactggcttcctggaccctgttaccgccagcagcgagtatcaaagacatctgcggataacaacaacagtgaatactcgtggactggagctaccaagtaccacctcaatggcagagactctctggtgaatccgggcccggccatggcaagccacaaggactatgaagaaaagttttttcctcagagcggggttctcatctttgggaagcaaggctcagagaaaacaaatgtggacattgaaaaggtcatgattacagacgaagaggaaatcaggacaaccaatcccgtggctacggagcagtatggttctgtatctaccaacctccagagaggcaacagacaagcagctaccgcagatgtcaacacacaaggcgttcttccaggcatggtctggcaggacagagatgtgtaccttcaggggcccatctgggcaaagattccacacacggacggacattttcacccgtctccgctgatgggcggctttggcctgaaacatcctccgcctcagatcctgatcaagaacacgcctgtacctgcggatcctccgaccaccttcaaccagtcaaagctgaactctttcatcactcagtattctactggccaagtcagcgtggagatcgagtgggagctgcagaaggaaaacagcaagcgctggaaccccgagatccagtacacctccaactactacaaatctacaagtgtggactttgctgttaatacagaaggcgtgtactctgaaccccgccccattggcacccgttacctcacccgtaatctgtaa

SEQ ID NO: 380 - protein, 735 aa, Artificial Sequence
  Description of Artificial Sequence: Synthetic polypeptide
MAADGYLPDWLEDNLSEGIREWWDLKPGAPKPKANQQKQDDGRGLVLPGYKYLGPFNGLDKGEPVNAADAAALEHDKAYDQQLKAGDNPYLRYNHADAEFQERLQEDTSFGGNLGRAVFQAKKRVLEPLGLVEEGAKTAPGKKRPVEQSPQEPDSSSGIGKTGQQPAKKRLNFGQTGDSESVPDPQPLGEPPATPAAVGPTTMASGGGAPMADNNEGADGVGNASGNWHCDSTWLGDRVITTSTRTWALPTYNNHLYKQISSQSGASNDNHYFGYSTPWGYFDFNRFHCHFSPRDWQRLINNNWGFRPKRLSFKLFNIQVKEVTQNEGTKTIANNLTSTVQVFTDSEYQLPYVLGSAHQGCLPPFPADVFMVPQYGYLTLNNGSQAVGRSSFYCLEYFPSQMLRTGNNFTFSYTFEDVPFHSSYAHSQSLDRLMNPLIDQYLYYLSRTNTPSGTTTQSRLQFSQAGASDIRDQSRNWLPGPCYRQQRVSKTSADNNNSEYSWTGATKYHLNGRDSLVNPGPAMASHKDYEEKFFPQSGVLIFGKQGSEKTNVDIEKVMITDEEEIRTTNPVATEQYGSVSTNLQRGNRQAATADVNTQGVLPGMVWQDRDVYLQGPIWAKIPHTDGHFHPSPLMGGFGLKHPPPQILIKNTPVPADPPTTFNQSKLNSFITQYSTGQVSVEIEWELQKENSKRWNPEIQYTSNYYKSTSVDFAVNTEGVYSEPRPIGTRYLTRNL

SEQ ID NO: 381 - DNA, 2214 bp, Artificial Sequence
  Description of Artificial Sequence: Synthetic polynucleotide
atggctgccgatggttatcttccagattggctcgaggacaacctctctgagggcattcgcgagtggtgggacttgaaacctggagccccgaaacccaaagccaaccagcaaaagcaggacgacggccggggtctggtgcttcctggctacaagtacctcggacccttcaacggactcgacaagggggagcccgtcaacgcggcggatgcagcggccctcgagcacgacaaggcctacgaccagcagctcaaagcgggtgacaatccgtacctgcggtataaccacgccgacgccgagtttcaggagcgtctgcaagaagatacgtcttttgggggcaacctcgggcgagcagtcttccaggccaagaagagggttctcgaaccttttggtctggttgaggaaggtgctaagacggctcctggaaagaaacgtccggtagagcagtcgccacaagagccagactcctcctcgggcattggcaagacaggccagcagcctgcaagaaaaagattgaattttggtcagactggagacgcagactcagtacctgacccccagcctctcggacagccaccagcagccccctctggtctgggaactaatacgatggctacaggcagtggcgcaccaatggcagacaataacgagggcgccgacggagtgggtaattcctcgggaaattggcattgcgattcccaatggctgggggacagagtcatcaccaccagcacccgaacctgggccctgcccacctacaacaatcacctctacaagcaaatctccaacagcacatctggaggatcttcaaatgacaacgcctacttcggctacagcaccccctgggggtattttgatttcaacagattccactgccatttctcaccacgtgactggcagcgactcatcaacaacaattggggattccggcccaagagactcaacttcaagctcttcaacatccaggtcaaggaggtcacgcagaatgaaggcaccaagaccatcgccaataacctcaccagcaccatccaggtgtttacggactcggagtaccagctgccgtacgttctcggctctgcccaccagggctgcctgcctccgttcccggcggacgtgttcatgattccccagtacggctacctaacactcaacaacggtagtcaggccgtgggacgctcctccttctactgcctggaatactttccttcgcagatgctgagaaccggcaacaacttccagtttacttacaccttcgaggacgtgcctttccacagcagctacgcccacagccagagcttggaccggctgatgaatcctctgattgaccagtacctgtactacttgtctcggactcaaacaacaggaggcacgacaaatacgcagactctgggcttcagccaaggtgggcctaatacaatggccaatcaggcaaagaactggctgccaggaccctgttaccgccagcagcgagtatcaaagacatttgcggataacaacaacagtgaatactcgtggactggagctaccaagtaccacctcaatggcagagactctctggtgaatccgggcccggccatggcaagccacaaggacgatgaagaaaagttttttcctcagagcggggttctcatctttgggaagcaaggctcagagaaaacaaatgtggacattgaaaaggtcatgattacagacgaagaggaaatcaggacaaccaatcccgtggctacggagcagtatggttctgtatctaccaacctccagagaggcaacagacaagcagctaccgcagatgtcaacacacaaggcgttcttccaggcatggtctggcaggacagagatgtgtaccttcaggggcccatctgggcaaagattccacacacggacggacattttcacccctctcccctcatgggtggattcggacttaaacaccctccgcctcagatcctgatcaagaacacgcctgtacccgcggatcctccgaccaccttcaaccagtcaaagctgaactctttcatcacccagtattctactggccaagtcagcgtggagatcgagtgggagctgcagaaggaaaacagcaagcgctggaaccccgagatccagtacacctccaactactacaaatctacaagtgtggactttgctgttaatacagaaggcgtgtactctgaaccccgccccattggcacccgttacctcacccgtaatctgtaa

SEQ ID NO: 382 - protein, 737 aa, Artificial Sequence
  Description of Artificial Sequence: Synthetic polypeptide
MAADGYLPDWLEDNLSEGIREWWDLKPGAPKPKANQQKQDDGRGLVLPGYKYLGPFNGLDKGEPVNAADAAALEHDKAYDQQLKAGDNPYLRYNHADAEFQERLQEDTSFGGNLGRAVFQAKKRVLEPFGLVEEGAKTAPGKKRPVEQSPQEPDSSSGIGKTGQQPARKRLNFGQTGDADSVPDPQPLGQPPAAPSGLGTNTMATGSGAPMADNNEGADGVGNSSGNWHCDSQWLGDRVITTSTRTWALPTYNNHLYKQISNSTSGGSSNDNAYFGYSTPWGYFDFNRFHCHFSPRDWQRLINNNWGFRPKRLNFKLFNIQVKEVTQNEGTKTIANNLTSTIQVFTDSEYQLPYVLGSAHQGCLPPFPADVFMIPQYGYLTLNNGSQAVGRSSFYCLEYFPSQMLRTGNNFQFTYTFEDVPFHSSYAHSQSLDRLMNPLIDQYLYYLSRTQTTGGTTNTQTLGFSQGGPNTMANQAKNWLPGPCYRQQRVSKTFADNNNSEYSWTGATKYHLNGRDSLVNPGPAMASHKDDEEKFFPQSGVLIFGKQGSEKTNVDIEKVMITDEEEIRTTNPVATEQYGSVSTNLQRGNRQAATADVNTQGVLPGMVWQDRDVYLQGPIWAKIPHTDGHFHPSPLMGGFGLKHPPPQILIKNTPVPADPPTTFNQSKLNSFITQYSTGQVSVEIEWELQKENSKRWNPEIQYTSNYYKSTSVDFAVNTEGVYSEPRPIGTRYLTRNL

SEQ ID NO: 383 - DNA, 2217 bp, Artificial Sequence
  Description of Artificial Sequence: Synthetic polynucleotide
atggctgccgatggttatcttccagattggctcgaggacactctctctgaaggaataagacagtggtgggcgctgaaacctggagccccgaagcccaaagccaaccagcaaaagcaggacgacggccggggtctggtgcttcctggctacaagtacctcggacccttcaacggactcgacaagggggagcccgtcaacgcggcggatgcagcggccctcgagcacgacaaggcctacgaccagcagctcaaagcgggtgacaatccgtacctgcggtataaccacgccgacgccgagtttcaggagcgtctgcaagaagatacgtcttttgggggcaacctcgggcgagcagtcttccaggccaagaagcgggttctcgaacctctcggtctggttgaggaaggcgctaagacggctcctggaaagaagagaccggtagagccatcaccccagcgttctccagactcctctacgggcatcggcaagaaaggccaacagcccgccagaaaaagactcaattttggtcagactggcgactcagagtcagttccagaccctcaacctctcggagaaccaccagcagcccccacaagtttgggatctaatacaatggcttcaggcggtggcgcaccaatggcagacaataacgagggtgccgatggagtgggtaattcctcaggaaattggcattgcgattcccaatggctgggcgacagagtcatcaccaccagcacccgcacctgggccttgcccacctacaataaccacctctacaagcaaatctccagtgcttcaacgggggccagcaacgacaaccactacttcggctacagcaccccctgggggtattttgactttaaccgcttccactgccacttctcgccaagagactggcaaagactcatcaacaacaattggggattccggcccaagagactcaacttcaaactcttcaacatccaagtcaaggaggtcacgacgaatgatggcgtcacgaccatcgccaataacctcaccagcaccatccaggtgtttacggactcggagtaccagctgccgtacgttctcggctctgcccaccagggctgcctgcctccgttcccggcggacgtgttcatgattccccagtatggatacctcaccctgaacaacggaagtcaagcggtgggacgctcatccttttactgcctggagtacttcccttcgcagatgctaaggactggaaataacttccaattcagctataccttcgaggatgtaccttttcacagcagctacgctcacagccagagtttggatcgcttgatgaatcctcttattgatcagtatctgtactacctgaacagaacgcaaggaacaacctctggaacaaccaaccaatcacggctgctttttagccaggctgggcctcagtctatgtctttgcaggccagaaattggctacctgggccctgctaccggcaacagagactttcaaagactgctaacgacaacaacaacagtaactttccttggacagcagccagcaaatatcatctcaatggccgcgactcgctggtgaatccaggaccagctatggccagtcacaaggacgatgaagaaaaatttttccctatgcacggcaatctaatatttggcaaagaagggacaacggcaagtaacgcagaattagataatgtaatgattacggatgaagaagagattcgtaccaccaatcctgtggcaacagagcagtatggaactgtggcaaataacttgcagagctcaaatacagctcccacgactagaactgtcaatgatcagggggccttacctggcatggtgtggcaagatcgtgacgtgtaccttcaggggcccatctgggcaaagattccacacacggacggacattttcacccctctcccctcatgggtggattcggacttaaacaccctcctccgcagattctcatcaagaacaccccggtacctgcgaatccttcgaccaccttcagtgcggcaaagtttgcttccttcatcacacagtactccacgggacaggtcagcgtggagatcgagtgggagctgcagaaggaaaacagcaagcgctggaacccggagatccagtacacttccaactattacaagtctaataatgttgaatttgctgttaatactgaaggtgtatatagtgaaccccgccccattggcaccagatacctgactcgtaatctgtaa

SEQ ID NO: 384 - protein, 738 aa, Artificial Sequence
  Description of Artificial Sequence: Synthetic polypeptide
MAADGYLPDWLEDTLSEGIRQWWALKPGAPKPKANQQKQDDGRGLVLPGYKYLGPFNGLDKGEPVNAADAAALEHDKAYDQQLKAGDNPYLRYNHADAEFQERLQEDTSFGGNLGRAVFQAKKRVLEPLGLVEEGAKTAPGKKRPVEPSPQRSPDSSTGIGKKGQQPARKRLNFGQTGDSESVPDPQPLGEPPAAPTSLGSNTMASGGGAPMADNNEGADGVGNSSGNWHCDSQWLGDRVITTSTRTWALPTYNNHLYKQISSASTGASNDNHYFGYSTPWGYFDFNRFHCHFSPRDWQRLINNNWGFRPKRLNFKLFNIQVKEVTTNDGVTTIANNLTSTIQVFTDSEYQLPYVLGSAHQGCLPPFPADVFMIPQYGYLTLNNGSQAVGRSSFYCLEYFPSQMLRTGNNFQFSYTFEDVPFHSSYAHSQSLDRLMNPLIDQYLYYLNRTQGTTSGTTNQSRLLFSQAGPQSMSLQARNWLPGPCYRQQRLSKTANDNNNSNFPWTAASKYHLNGRDSLVNPGPAMASHKDDEEKFFPMHGNLIFGKEGTTASNAELDNVMITDEEEIRTTNPVATEQYGTVANNLQSSNTAPTTRTVNDQGALPGMVWQDRDVYLQGPIWAKIPHTDGHFHPSPLMGGFGLKHPPPQILIKNTPVPANPSTTFSAAKFASFITQYSTGQVSVEIEWELQKENSKRWNPEIQYTSNYYKSNNVEFAVNTEGVYSEPRPIGTRYLTRNL

SEQ ID NO: 385 - DNA, 2208 bp, Artificial Sequence; identical to SEQ ID NO: 21
  Description of Artificial Sequence: Synthetic polynucleotide

SEQ ID NO: 386 - protein, 735 aa, Artificial Sequence [sequence omitted]

SEQ ID NO: 387 - DNA, 2208 bp, Artificial Sequence
  Description of Artificial Sequence: Synthetic polynucleotide
atggctgccgatggttatcttccagattggctcgaggacaacctctctgagggcattcgcgagtggtgggcgctgaaacctggagccccgaagcccaaagccaaccagcaaaagcaggacgacggccggggtctggtgcttcctggctacaagtacctcggacccttcaacggactcgacaagggggagcccgtcaacgcggcggacgccgcggccctcgagcacgacaaggcctacgaccagcagctgcaggcgggtgacaatccgtacctgcggtataaccacgccgacgccgagtttcaggagcgtctgcaagaagatacgtcttttgggggcaacctcgggcgagcagtcttccaggccaaaaagaggcttcttgaacctcttggtctggttgaggaagcagctaaaacggctcctggaaagaagaggcctgtagagcagtctcctcaggaaccggactcctccgcgggtattggcaaatcgggtgcacagcccgccaaaaagagactcaatttcggtcagactggcgactcagagtcagtcccagaccctcaacctctcggagaaccaccagcagcccccacaagtttgggatctaatacaatggcttcaggcggtggcgcaccaatggcagacaataacgaaggcgccgacggagtgggtaatgcctcaggaaattggcattgcgattccacatggctgggcgacagagtcatcaccaccagcacccgcacctgggccttgcccacctacagcaaccatctctacaagcaaatctccagccaatcaggagcttcaaacgacaacgactactttggctacagcaccccttgggggtattttgatttcaacagattccactgccacttttcaccacgtgactggcaaagactcatcaacaacaactggggattccgacccaagagactcaacttcaagctctttaacattcaagtcaaagaggtcacgcagaatgacggtacgacgacgattgccaataaccttaccagcacggttcaggtgtttactgactcggagtaccagctcccgtacgtcctcggctcggcgcatcaaggatgcctcccgccgttcccagcagacgtcttcatggtgccacagtatggatacctcaccctgaacaacgggagtcaggcagtaggacgctcttcattttactgcctggagtactttccttctcagatgctgcgtaccggaaacaactttaccttcagctacacttttgaggacgttcctttccacagcagctacgctcacagccagagtctggaccgtctcatgaatcctctcatcgaccagtacctgtattacttgagcagaacaaacactccaagtggaaccaccacgcagtcaaggcttcagttttctcaggccggagcgagtgacattcgggaccagtctaggaactggcttcctggaccctgttaccgccagcagcgagtatcaaagacatctgaggataacaacaacagtgaatactcgtggactggagctaccaagtaccacctcaatggcagagactctctggtgaatccgggcccggccatggcaagccacaaggacgatgaagaaaagttttttcctcagagcggggttctcatctttgggaagcaaggctcagagaaaacaaatgtggacattgaaaaggtcatgattacagacgaagaggaaatcaggacaaccaatcccgtggctacggagcagtatggttctgtatctaccaacctccagagaggcaacagacaagcagctaccgcagatgtcaacacacaaggcgttcttccaggcatggtctggcaggacagagatgtgtaccttcaggggcccatctgggcaaagattccacacacggacggacattttcacccctctcccctcatgggtggattcggacttaaacaccctcctccacagattctcatcaagaacaccccggtacctgcgaatccttcgaccaccttcagtgcggcaaagtttgcttccttcatcacacagtactccacgggacaggtcagcgtggagatcgagtgggagctgcagaaggaaaacagcaaacgctggaatcccgaaattcagtacacttccaactacaacaagtctgttaatgtggactttactgtggacactaatggcgtgtattcagagcctcgccccattggcaccagatacctgactcgtaatctgtaa

SEQ ID NO: 388 - protein, 735 aa, Artificial Sequence
  Description of Artificial Sequence: Synthetic polypeptide
MAADGYLPDWLEDNLSEGIREWWALKPGAPKPKANQQKQDDGRGLVLPGYKYLGPFNGLDKGEPVNAADAAALEHDKAYDQQLQAGDNPYLRYNHADAEFQERLQEDTSFGGNLGRAVFQAKKRLLEPLGLVEEAAKTAPGKKRPVEQSPQEPDSSAGIGKSGAQPAKKRLNFGQTGDSESVPDPQPLGEPPAAPTSLGSNTMASGGGAPMADNNEGADGVGNASGNWHCDSTWLGDRVITTSTRTWALPTYSNHLYKQISSQSGASNDNDYFGYSTPWGYFDFNRFHCHFSPRDWQRLINNNWGFRPKRLNFKLFNIQVKEVTQNDGTTTIANNLTSTVQVFTDSEYQLPYVLGSAHQGCLPPFPADVFMVPQYGYLTLNNGSQAVGRSSFYCLEYFPSQMLRTGNNFTFSYTFEDVPFHSSYAHSQSLDRLMNPLIDQYLYYLSRTNTPSGTTTQSRLQFSQAGASDIRDQSRNWLPGPCYRQQRVSKTSEDNNNSEYSWTGATKYHLNGRDSLVNPGPAMASHKDDEEKFFPQSGVLIFGKQGSEKTNVDIEKVMITDEEEIRTTNPVATEQYGSVSTNLQRGNRQAATADVNTQGVLPGMVWQDRDVYLQGPIWAKIPHTDGHFHPSPLMGGFGLKHPPPQILIKNTPVPANPSTTFSAAKFASFITQYSTGQVSVEIEWELQKENSKRWNPEIQYTSNYNKSVNVDFTVDTNGVYSEPRPIGTRYLTRNL

SEQ ID NO: 389 - DNA, 2208 bp, Artificial Sequence
  Description of Artificial Sequence: Synthetic polynucleotide
atggctgccgatggttatcttccagattggctcgaggacaacctctctgagggcattcgcgagtggtgggcgctgaaacctggagccccgaagcccaaagccaaccagcaaaagcaggacgacggccggggtctggtgcttcctggctacaagtacctcggacccttcaacggactcgacaagggggagcccgtcaacgcggcggacgcagcggccctcgagcacgacaaggcctacgaccagcagctgcaggcgggtgacaatccgtacctgcggtataaccacgccgacgccgagttccaggagcgtctgcaagaagatacgtcttttgggggcaacctcgggcgagcagtcttccaggccaagaagagggttctcgaaccttttggtctggttgaggaaggtgctaagacggctcctggaaagaaacgtccggtagagcagtcgccacaagagccagactcctcctcgggcattggcaagacaggccagcagcccgctaaaaagagactcaattttggtcagactggcgactcagagtcagtcccagaccctcaacctctcggagaaccaccagcagcccccacaagtttgggatctaatacaatggcttcaggcggtggcgcaccaatggcagacaataacgagggcgccgacggagtgggtaattcctcgggaaattggcattgcgattccacatggatgggcgacagagtcatcaccaccagcacccgaacctgggccctgcccacctacaacaaccacctctacaaacaaatttccagccaatcaggagcttcaaacgacaaccactactttggctacagcaccccttgggggtattttgactttaacagattccactgccacttttcaccacgtgactggcagcgactcattaacaacaactggggattccggcccaagaaactcaacttcaagctctttaacatccaggtcaaggaggtcacgcagaatgaaggcaccaagaccatcgccaataacctcaccagcaccatccaggtgtttacggactcggagtaccagctgccgtacgttctcggctctgcccaccagggctgcctgcctccgttcccggcggacgtgttcatgattccccagtacggctacctaacactcaacaacggtagtcaggccgtgggacgctcctccttctactgcctggaatactttccttcgcagatgctgagaaccggcaacaacttccagtttacttacaccttcgaggacgtgcctttccacagcagctacgcccacagccagagcttggaccggctgatgaatcctctgattgaccagtacctgtattacttgtctcggactcaaacaacaggaggcacgacaaatacgcagactctgggcttcagccaaggtgggcctaatacaatggccaatcaggcaaagaactggctgcctggaccctgttaccgccagcagcgagtatcaaagacatctgcggataacaacaacagtgaatactcgtggactggagctaccaagtaccacctcaatggcagagactctctggtgaatccgggcccggccatggcaagccacaaggacgatgaagaaaagttttttcctcagagcggggttctcatctttgggaagcaaggctcagagaaaacaaatgtggacattgaaaaggttatgattacagacgaagaggaaatcaggacaaccaatcccgtggctacggagcagtatggttctgtatctaccaacctccagagaggcaacagacaagcagctaccgcagatgtcaacacacagggcgttcttccaggcatggtctggcaggacagagatgtgtaccttcagggtcccatttgggccaaaattcctcacacagatggacactttcacccgtcccctcttatgggcggctttggactcaagaacccgcctcctcagatcctcatcaaaaacacgcctgttcctgcgaatcctccggcagagttttcagctacaaagtttgcttcattcatcacccaatactccacaggacaagtgagtgtggaaattgaatgggagctgcagaaagaaaacagcaagcgctggaatcccgaagtgcagtacacatccaattatgcaaaatctgccaacgttgattttactgtggacactaatggcgtgtattcagagcctcgccccattggcaccagatacctcacccgtaatctgtaa

SEQ ID NO: 390 - protein, 735 aa, Artificial Sequence
  Description of Artificial Sequence: Synthetic polypeptide
MAADGYLPDWLEDNLSEGIREWWALKPGAPKPKANQQKQDDGRGLVLPGYKYLGPFNGLDKGEPVNAADAAALEHDKAYDQQLQAGDNPYLRYNHADAEFQERLQEDTSFGGNLGRAVFQAKKRVLEPFGLVEEGAKTAPGKKRPVEQSPQEPDSSSGIGKTGQQPAKKRLNFGQTGDSESVPDPQPLGEPPAAPTSLGSNTMASGGGAPMADNNEGADGVGNSSGNWHCDSTWMGDRVITTSTRTWALPTYNNHLYKQISSQSGASNDNHYFGYSTPWGYFDFNRFHCHFSPRDWQRLINNNWGFRPKKLNFKLFNIQVKEVTQNEGTKTIANNLTSTIQVFTDSEYQLPYVLGSAHQGCLPPFPADVFMIPQYGYLTLNNGSQAVGRSSFYCLEYFPSQMLRTGNNFQFTYTFEDVPFHSSYAHSQSLDRLMNPLIDQYLYYLSRTQTTGGTTNTQTLGFSQGGPNTMANQAKNWLPGPCYRQQRVSKTSADNNNSEYSWTGATKYHLNGRDSLVNPGPAMASHKDDEEKFFPQSGVLIFGKQGSEKTNVDIEKVMITDEEEIRTTNPVATEQYGSVSTNLQRGNRQAATADVNTQGVLPGMVWQDRDVYLQGPIWAKIPHTDGHFHPSPLMGGFGLKNPPPQILIKNTPVPANPPAEFSATKFASFITQYSTGQVSVEIEWELQKENSKRWNPEVQYTSNYAKSANVDFTVDTNGVYSEPRPIGTRYLTRNL

SEQ ID NO: 391 - DNA, 2214 bp, Artificial Sequence; identical to SEQ ID NO: 381
  Description of Artificial Sequence: Synthetic polynucleotide

SEQ ID NO: 392 - protein, 737 aa, Artificial Sequence; identical to SEQ ID NO: 382
  Description of Artificial Sequence: Synthetic polypeptide

SEQ ID NO: 393 - DNA, 2196 bp, Artificial Sequence
  Description of Artificial Sequence: Synthetic polynucleotide
atggctgctgacggttatcttccagattggctcgaggacaacctctctgagggcattcgcgagtggtgggcgctgaaacctggagccccgcaacccaaagccaaccagcaaaagcaggacgacggccggggtctggtgcttcctggctacaagtacctcggacccttcaacggactcgacaagggggagcccgtcaacgaggcggacgccgcggccctcgagcacgacaaggcctacgaccagcagctcaaagcgggtgacaatccgtacctgcggtataatcacgccgacgccgagtttcaagagcgtctgcaagaagatacgtcctttgggggcaacctcgggcgagcagtcttccaggccaaaaagagggtactcgagcctctgggtctggttgaggaaggcgctaagacggctcctggaaagaagcggccagtagaaccggactccagctcgggcatcggcaagtcaggccagcagcccgcgaaaaagagactgaattttgggcagactggcgactcagagtcagtgcctgacccccaacctctctcagaaccacccgcaggtccctctggtctgggatctggtacaatggctgctggcggtggcgctccaatggcagacaataacgaaggcgccgacggagtgggtaatgtctcaggaaattggcattgcgattccacatggctgggcgaccgagtcatcaccaccagcactcggacctgggccctccccacctacaacaaccacctctacaagcaaatctccaacgggacctcgggaggcagcagcaacgacaacacctactttggctacagcaccccctgggggtattttgactttaacagattccactgccacttttcaccacgtgactggcagcgactcatcaacaacaactgggggttccggcccaagaagctcaacttcaagctcttcaacatccaggtcaaggaggtcacccagaatgaaggcaccaagaccatcgccaataacctcaccagcacggtgcaggtctttacggactcggagtaccagctcccgtacgtgctcggctctgcccaccagggctgcctgcctccgttcccggcggacgtgttcatgattccgcagtacgggtacctgacgctgaacaacgggagccaggccgtggggcgatcctccttctactgcctggagtactttccctcgcagatgctgagaacgggcaacaactttaccttcagctacaccttcgaggacgtgcccttccacagcagctacgcgcacagccagagcctggaccggctgatgaacccgctgattgaccagtacctgtactacctgtctcggactcagaccaacgggaccaatgccacgcagactctgttgtttgctcaggccgggcctcagaacatgtcggctcaggccaagaactggctgcctggtccttgctatcggcagcagcgcgtctctacgacagtgtcgcaaaacaacaacagcaactttacctggaccggggcgaccaagtaccacctgaacggccgagactccctggtgagccccggtgtcgccatggcaacgcacaaggacgacgaggagcgcttcttcccgagcagcggggtcctgatgtttggcaagcagggcgctggaaaggacaatgtcgagtacaccaacgtgatgctcaccagcgaggaggagatcaagaccaccaaccctgtggccacggagcagtacggcgtggtggctgacaatctgcagcagaccaactcagctcccattgtgggggcagtcaacagccagggggccttacccggtatggtctggcagaaccgggacgtgtacctgcagggtcccatctgggccaagatcccgcatacggacggcaactttcacccgtctcctctcatgggcggctttggactgaaacacccgcctccccagatcctgatcaaaaacacgccggtacctgcggatcccccggtgaactttacggacgctaagctggcgagtttcatcacgcagtacagcaccgggcaggtcagcgtggagattgagtgggagctgcagaaggagaacagcaagcgctggaatcccgagattcagtacacttccaattattataaatcagctaatgtggactttgccgtcaatgcagatggtgtatatagtgaaccccgccccattggcactcgttacctcacccgtaatctgtaa

SEQ ID NO: 394 - protein, 731 aa, Artificial Sequence
  Description of Artificial Sequence: Synthetic polypeptide
MAADGYLPDWLEDNLSEGIREWWALKPGAPQPKANQQKQDDGRGLVLPGYKYLGPFNGLDKGEPVNEADAAALEHDKAYDQQLKAGDNPYLRYNHADAEFQERLQEDTSFGGNLGRAVFQAKKRVLEPLGLVEEGAKTAPGKKRPVEPDSSSGIGKSGQQPAKKRLNFGQTGDSESVPDPQPLSEPPAGPSGLGSGTMAAGGGAPMADNNEGADGVGNVSGNWHCDSTWLGDRVITTSTRTWALPTYNNHLYKQISNGTSGGSSNDNTYFGYSTPWGYFDFNRFHCHFSPRDWQRLINNNWGFRPKKLNFKLFNIQVKEVTQNEGTKTIANNLTSTVQVFTDSEYQLPYVLGSAHQGCLPPFPADVFMIPQYGYLTLNNGSQAVGRSSFYCLEYFPSQMLRTGNNFTFSYTFEDVPFHSSYAHSQSLDRLMNPLIDQYLYYLSRTQTNGTNATQTLLFAQAGPQNMSAQAKNWLPGPCYRQQRVSTTVSQNNNSNFTWTGATKYHLNGRDSLVSPGVAMATHKDDEERFFPSSGVLMFGKQGAGKDNVEYTNVMLTSEEEIKTTNPVATEQYGVVADNLQQTNSAPIVGAVNSQGALPGMVWQNRDVYLQGPIWAKIPHTDGNFHPSPLMGGFGLKHPPPQILIKNTPVPADPPVNFTDAKLASFITQYSTGQVSVEIEWELQKENSKRWNPEIQYTSNYYKSANVDFAVNADGVYSEPRPIGTRYLTRNL

SEQ ID NO: 395 - DNA, 2196 bp, Artificial Sequence
  Description of Artificial Sequence: Synthetic polynucleotide
atggctgctgacggttatcttccagattggctcgaggacaacctctctgagggcattcgcgagtggtgggcgctgaaacctggagccccgcaacccaaagccaaccagcaaaagcaggacgacggccggggtctggtgcttcctggctacaagtacctcggacccttcaacggactcgacaagggggagcccgtcaacgaggcggacgccgcggccctcgagcacgacaaggcctacgaccagcagctcaaagcgggtgacaatccgtacctgcggtataatcacgccgacgccgagtttcaagagcgtctgcaagaagatacgtcctttgggggcaacctcgggcgagcagtcttccaggccaaaaagagggtactcgagcctctgggtctggttgaggaaggcgctaagacggctcctggaaagaagcggccagtagaaccggactccagctcgggcatcggcaagtcaggccggcagcccgcgaaaaagagactgaattttgggcagactggcgactcagagtcagtgcctgacccccaacctctctcagaaccacccgcaggtccctctggtctgggatctggtacaatggctgcaggcggtggcgctccaatggcagacaataacgaaggcgccgacggagtgggtaatgcctcaggaaattggcattgcgattccacatggctgggcgaccgagtcatcaccaccagcactcggacctgggccctccccacctacaacaaccacctctacaagcaaatctccaacgggacctcgggaggcagcagcaacgacaacacctactttggctacagcaccccctgggggtattttgactttaacagattccactgccacttttcaccacgtgactggcagcgactcatcaacaacaactggggattccggcccaagaggctcaacttcaagctcttcaacatccaggtcaaggaggtcacccagaatgaaggcaccaagaccatcgccaataacctcaccagcacggtgcaggtctttacggactcgaagtaccagctcccgtacgtgctcggctctgcccaccagggctgcctgcctccgttcccggcggacgtgttcatgattccgcagtacgggtacctgacgctgaacaacgggagccaggccgtggggcgatcctccttctactgcctggagtactttccctcgcagatgctgagaacgggcaacaactttaccttcagctacaccttcgaggacgtgcccttccacagcagctacgcgcacagccagagcctggaccggctgatgaacccgctgattgaccagtacctgtactacctgtctcggactcagaccaacgggaccaatgccacgcagactctgttgtttgctcaggccgggcctcagaacatgtcggctcaggccaagaactggctgcctggtccttgctatcggcagcagcgcgtctctacgacagtgtcgcaaaacaacaacagcaactttacctggaccggggcgaccaagtaccacctgaacggccgagactccctggtgaaccccggtgtcgccatggcaacgcacaaggacgacgaggagcgcttcttcccgagcagcggggtcctgatgtttggcaagcagggcgctggaaaggacaatgtcgagtacaccaacgtgatgctcaccagcgaggaggagatcaagaccaccaaccctgtggccacggagcagtacggtgtggtggctgacaatctgcagcagaccaactcggctcccattgtgggggcagtcaacagccagggggccttacccggtatggtctggcagaaccgggacgtgtacctgcagggtcccatctgggccaagatcccgcatacggacggcaactttcacccgtctcctctcatgggcggctttggactgaaacacccgcctccccagatcctgatcaaaaacacgccggtacctgcggatcccccggtgaactttacggacgctaagctggcgagtttcatcacgcagtacagcaccgggcaggtcagcgtggagattgagtgggagctgcagaaggagaacagcaagcgctggaatcccgagattcagtacacttccaattattataaatcagctaatgtggactttgccgtcaatgcagatggtgtatatagtgaaccccgccccattggcactcgttacctcacccgtaatctgtaa

SEQ ID NO: 396 - protein, 731 aa, Artificial Sequence
  Description of Artificial Sequence: Synthetic polypeptide
MAADGYLPDWLEDNLSEGIREWWALKPGAPQPKANQQKQDDGRGLVLPGYKYLGPFNGLDKGEPVNEADAAALEHDKAYDQQLKAGDNPYLRYNHADAEFQERLQEDTSFGGNLGRAVFQAKKRVLEPLGLVEEGAKTAPGKKRPVEPDSSSGIGKSGRQPAKKRLNFGQTGDSESVPDPQPLSEPPAGPSGLGSGTMAAGGGAPMADNNEGADGVGNASGNWHCDSTWLGDRVITTSTRTWALPTYNNHLYKQISNGTSGGSSNDNTYFGYSTPWGYFDFNRFHCHFSPRDWQRLINNNWGFRPKRLNFKLFNIQVKEVTQNEGTKTIANNLTSTVQVFTDSKYQLPYVLGSAHQGCLPPFPADVFMIPQYGYLTLNNGSQAVGRSSFYCLEYFPSQMLRTGNNFTFSYTFEDVPFHSSYAHSQSLDRLMNPLIDQYLYYLSRTQTNGTNATQTLLFAQAGPQNMSAQAKNWLPGPCYRQQRVSTTVSQNNNSNFTWTGATKYHLNGRDSLVNPGVAMATHKDDEERFFPSSGVLMFGKQGAGKDNVEYTNVMLTSEEEIKTTNPVATEQYGVVADNLQQTNSAPIVGAVNSQGALPGMVWQNRDVYLQGPIWAKIPHTDGNFHPSPLMGGFGLKHPPPQILIKNTPVPADPPVNFTDAKLASFITQYSTGQVSVEIEWELQKENSKRWNPEIQYTSNYYKSANVDFAVNADGVYSEPRPIGTRYLTRNL

SEQ ID NO: 397 - DNA, 2196 bp, Artificial Sequence
  Description of Artificial Sequence: Synthetic polynucleotide
atggctgctgacggttatcttccagattggctcgaggacaacctctctgagggcattcgcgagtggtgggcgctgaaacctggagccccgcaacccaaagccaaccagcaaaagcaggacgacggccggggtctggtgcttcctggctacaagtacctcggacccttcaacggactcgacaagggggagcccgtcaacgaggcggacgccgcggccctcgagcacgacaaggcctacgaccagcagctcaaagcgggtgacaatccgtacctgcggtataatcacgccgacgccgagtttcaagagcgtctgcaagaagatacgtcctttgggggcaacctcgggcgagcagtcttccaggccaaaaagagggtactcgagcctctgggtctggttgaggaaggcgctaagacggctcctggaaagaagcggccagtagaaccggactccagctcgggcatcggcaagtcaggccagcagcccgcgaaaaagagactgaattttgggccgactggcgactcagagtcagtgcctgacccccaacctctctcagaaccacctgcaggtccctctggtctgggatctggtacaatggctgcaggcggtggcgctccaatggcagacaataacgaaggcgccgacggagtgggtaatgtctcaggaaattggcattgcgattccacatggctgggcgaccgagtcatcaccaccagcactcggacctgggccctccccacctacaacaaccacctctacaagcaaatctccaacgggacctcgggaggcagcagcaacgacaacacctactttggctacagcaccccctgggggtattttgactttaacagattccactgccacttttcaccacgcgactggcagcgactcatcaacaacaactggggattccggcccaagaagctcaacttcaagctcttcaacatccaggtcaaggaggtcacccagaatgaaggcaccaagaccaccgccaataacctcaccagcacggtgcaggtctttacggactcggagtaccagctcccgtacgtgctcggctctgcccaccagggctgcctgcctccgttcccggcggacgtgttcatgattccgcagtacgggtacctgacgctgaacaacgggagccaggccgtggggcgatcctccttctactgcctggagtactttccctcgcagatgctgagaacgggcaacaactttaccttcagctacaccttcgaggacgtgcccttccacagcagctacgcgcacagccagagcctggaccggctgatgaacccgctgattgaccagtacctgtactacctgtctcggactcagaccaacgggaccaatgccacgcagactctgttgtttgctcaggccgggcctcagaacatgtcggctcaggccaagaactggctgcctggtccttgctatcggcagcagcgcgtctctacggcagtgtcgcaaaacaacaacagcaactttacctggaccggggcgaccaagtaccacctgaacggccgagactccctggtgaaccccggtgtcgccatggcaacgcacaaggacgacgaggagcgcttcttcccgagcagcggggtcctgatgtttggcaagcagggcgctggaaaggacaatgtcgagtacaccaacgtgatgctcaccagcgaggaggagatcaagaccaccaaccctgtggccacggagcagtacggtgtggtggctgacaatctgcagcagaccaactcggctcccattgtgggggcagtcaacagccagggggccttacccggtatggtctggcagaaccgggacgtgtacctgcagggtcccatctgggccaagatcccgcatacggacggcaactttcacccgtctcctctcatgggcggctttggactgaaacacccgcctccccagatcctgatcaaaaacacgccggtacctgcggatcccccggtgaactttacggacgctaagctggcgagtttcatcacgcagtacagcaccgggcaggtcagcgtggagattgagtgggagctgcagaaggagaacagcaagcgctggaatcccgagattcagtacacttccaattattataaatcagctaatgtggactttgccgtcaatgcagatggtgtatatagcgaaccccgccccattggcactcgttacctcacccgtaatctgtaa

SEQ ID NO: 398 - protein, 731 aa, Artificial Sequence
  Description of Artificial Sequence: Synthetic polypeptide
MAADGYLPDWLEDNLSEGIREWWALKPGAPQPKANQQKQDDGRGLVLPGYKYLGPFNGLDKGEPVNEADAAALEHDKAYDQQLKAGDNPYLRYNHADAEFQERLQEDTSFGGNLGRAVFQAKKRVLEPLGLVEEGAKTAPGKKRPVEPDSSSGIGKSGQQPAKKRLNFGPTGDSESVPDPQPLSEPPAGPSGLGSGTMAAGGGAPMADNNEGADGVGNVSGNWHCDSTWLGDRVITTSTRTWALPTYNNHLYKQISNGTSGGSSNDNTYFGYSTPWGYFDFNRFHCHFSPRDWQRLINNNWGFRPKKLNFKLFNIQVKEVTQNEGTKTTANNLTSTVQVFTDSEYQLPYVLGSAHQGCLPPFPADVFMIPQYGYLTLNNGSQAVGRSSFYCLEYFPSQMLRTGNNFTFSYTFEDVPFHSSYAHSQSLDRLMNPLIDQYLYYLSRTQTNGTNATQTLLFAQAGPQNMSAQAKNWLPGPCYRQQRVSTAVSQNNNSNFTWTGATKYHLNGRDSLVNPGVAMATHKDDEERFFPSSGVLMFGKQGAGKDNVEYTNVMLTSEEEIKTTNPVATEQYGVVADNLQQTNSAPIVGAVNSQGALPGMVWQNRDVYLQGPIWAKIPHTDGNFHPSPLMGGFGLKHPPPQILIKNTPVPADPPVNFTDAKLASFITQYSTGQVSVEIEWELQKENSKRWNPEIQYTSNYYKSANVDFAVNADGVYSEPRPIGTRYLTRNL

SEQ ID NO: 399 - DNA, 4404 bp, Artificial Sequence
  Description of Artificial Sequence: Synthetic polynucleotide
atggctgccgatggttatcttccagattggctcgagggcaacctctctgagggcattcgcgagtggtgggacttgaaacctggagccccgaaacccaaagccaaccagcaaaagcaggacgacggccggggtctggtgcttcctggctacaggtacctcggacccttcaacggactcgacaagggagagccggtcaacgaggcagacgccgcggccctcgagcacgacaaggcctacgacaagcagctcgagcagggggacaacccgtacctcaagtacaaccacgccgacgccgagtttcaggagcgtcttcaagaagatacgtcttttgggggcaacctcgggcgagcagtcttccaggccaagaagcgggttctcgaacctctcggtctggttgaggaaggcgctaagacggctcctggaaagaagagacccatagaatcccccgactcctccacgggcatcggcaagaacggccagccgcccgctaaaaagaagctcaactttgggcagactggcgactcagagtcagtgcccgacccccaacctctcggagaacctcccgccgcgccctcaggtctgggatctggtacaatggctgcaggcggtggcgcaccaatggcagacaataacgaaggcgccgacggagtgggtaatgcctccggaaattggcattgcgattccacatggctgggcgacagagtcatcaccaccagcacccgcacctgggccctgcccacctacaacaaccacctctacaagcagatatcaagtcagagcggggctaccaacgacaaccacttcttcggctacagcaccccctggggctattttgacttcaacagattccactgccacttctcaccacgtgactggcagcgactcatcaacaacaactggggattccggcccagaaagctgcggttcaagttgttcaacatccaggtcaaggaggtcacgacgaacgacggcgttacgaccatcgctaataaccttaccagcacgattcaggtcttctcggactcggagtaccaactgccgtacgtcctcggctctgcgcaccagggctgcctccctccgttccctgcggacgtgttcatgattcctcagtacggatatctgactctaaacaacggcagtcagtctgtgggacgttcctccttctactgcctggagtactttccttctcagatgctgagaacgggcgataactttgaattcagctacacctttgaggaagtgcctttccacagcagctatgcgcacagccagagcctggaccggctgatgaatcccctcatcgaccagtacctgtactacctggcccggacccagagcactacggggtccacaagggagctgcagttccatcaggctgggcccaacaccatggccgagcaatcaaagaactggctgcccggaccctgttatcggcagcagagactgtcaaaaaacatagacagcaacaacaacagtaactttgcctggaccggggccactaaataccatctgaatggtagaaattcattaaccaacccgggcgtagccatggccaccaacaaggacgacgaggaccagttctttcccatcaacggagtgctggtttttggcaaaacgggggctgccaacaagacaacgctggaaaacgtgctaatgaccagcgaggaggagatcaaaaccaccaatcccgtggctacagaagaatacggtgtggtctccagcaacctgcaatcgtctacggccggaccccagacacagactgtcaacagccagggggctctgcccggcatggtctggcagaaccgggacgtgtacctgcagggtcccatctgggccaaaattcctcacacggacggcaactttcacccgtctcccctgatgggcggatttggactcaaacacccgcctcctcaaattctcatcaaaaacaccccggtacctgctaatcctccagaggtgtttactcctgccaagtttgcctcatttatcacgcagtacagcaccggccaggtcagcgtggagatcgagtgggaactgcagaaagaaaacagcaaacgctggaatccagagattcagtacacctcaaattatgccaagtctaataatgtggaatttgctgtcaacaacgaaggggtttatactgagcctcgccccattggcacccgttacctcacccgtaacctgtaaatggctgccgatggttatcttccagattggctcgaggacaacctctctgagggcattcgcgagtggtgggacttgaaacctggagccccgaaacccaaagccaaccagcaaaagcaggacgacggccggggtctggtgcttcctggctacaagtacctcggacccttcaacggactcgacaagggggagcccgtcaacgcggcggacgcagcggccctcgagcacgacaaggcctacgaccagcagctcaaagcgggtgacaatccgtacctgcggtataaccacgccgacgccgagtttcaggagcgtctgcaagaagatacgtcttttgggggcaacctcgggcgagcagtcttccaggccaagaagcgggttctcgaacctctcggtctggttgaggaaggcgctaagacggctcctggaaagaagagaccggtagagccatcaccccagcgttctccagactcctctacgggcatcggcaagaaaggccagcagcccgcgaaaaagagactcaactttgggcagactggcgactcagagtcagtgcccgaccctcaaccaatcggagaaccccccgcaggcccctctggtctgggatctggtacaatggctgcaggcggtggcgctccaatggcagacaataacgaaggcgccgacggagtgggtagttcctcaggaaattggcattgcgattccacatggctgggcgacagagtcatcaccaccagcacccgaacctgggccctccccacctacaacaaccacctctacaagcaaatctccaacgggacttcgggaggaagcaccaacgacaacacctacttcggctacagcaccccctgggggtattttgactttaacagattccactgccacttctcaccacgtgactggcagcgactcatcaacaacaactggggattccggcccaagagactcaacttcaagctcttcaacatccaggtcaaggaggtcacgcagaatgaaggcaccaagaccatcgccaataaccttaccagcacgattcaggtctttacggactcggaataccagctcccgtacgtcctcggctctgcgcaccagggctgcctgcctccgttcccggcggacgtcttcatgattcctcagtacgggtacctgactctgaacaatggcagtcaggccgtgggccgttcctccttctactgcctggagtactttccttctcaaatgctgagaacgggcaacaactttgagttcagctaccagtttgaggacgtgccttttcacagcagctacgcgcacagccaaagcctggaccggctgatgaaccccctcatcgaccagtacctgtactacctgtctcggactcagtccacgggaggtaccgcaggaactcagcagttgctattttctcaggccgggcctaataacatgtcggctcaggccaaaaactggctacccgggccctgctaccggcagcaacgcgtctccacgacactgtcgcaaaataacaacagcaactttgcctggaccggtgccaccaagtatcatctgaatggcagagactctctggtaaatcccggtgtcgctatggcaacccacaaggacgacgaagagcgattttttccgtccagcggagtcttaatgtttgggaaacagggagctggaaaagacaacgtggactatagcagcgttatgctaaccagtgaggaagaaattaaaaccaccaacccagtggccacagaacagtacggcgtggtggccgataacctgcaacagcaaaacgccgctcctattgtaggggccgtcaacagtcaaggagccttacctggcatggtctggcagaaccgggacgtgtacctgcagggtcctatctgggccaagattcctcacacggacggaaactttcatccctcgccgctgatgggaggctttggactgaaacacccgcctcctcagatcctgattaagaatacacctgttcccgcggatcctccaactaccttcagtcaagctaagctggcgtcgttcatcacgcagtacagcaccggacaggtcagcgtggaaattgaatgggagctgcagaaagaaaacagcaaacgctggaacccagagattcaatacacttccaactactacaaatctacaaatgtggactttgctgttaacacagatggcacttattctgagcctcgccccatcggcacccgttacctcacccgtaatctgtaa

SEQ ID NO: 400 - protein, 738 aa, Artificial Sequence; identical to SEQ ID NO: 18
  Description of Artificial Sequence: Synthetic polypeptide

SEQ ID NO: 401 - DNA, 3129 bp, Artificial Sequence
  Description of Artificial Sequence: Synthetic polynucleotide
gaattcgccctttctacggctgcgtcaactggaccaatgagaactttcccttcaacgattgcgtcgacaagatggtgatctggtgggaggagggcaagatgacggccaaggtcgtggagtccgccaaggccattctcggcggcagcaaagtgcgcgtggaccaaaagtgcaagtcgtccgcccagatcgaccccacccccgtgatcgtcacctccaacaccaacatgtgcgccgtgattgacgggaacagcaccaccttcgagcaccagcagccgttgcaggaccggatgttcaagtttgaactcacccgccgtctggagcacgactttggcaaggtgacaaagcaggaagtcagagagttcttccgctgggcgcaggatcacgtgaccgaggtggcgcacgagttctacgtcagaaagggtggagccaacaagagacccgcccccgatgacgcggataaaagcgagcccaagcgggcctgcccctcagtcgcggatccatcgacgtcagacgcggaaggagctccggtggactttgccgacaggtaccaaaacaaatgttctcgtcacgcgggcatgcttcagatgctgtttccctgcaaaacatgcgagagaatgaatcagaatttcaacatttgcttcacgcacgggaccagagactgttcagaatgtttccccggcgtgtcagaatctcaaccggtcgtcagaaaaaagacgtatcggaaactctgtgcgattcatcatctgctgggggcgggcacccgagattgcttgctcggcctgcgatctggtcaacgtggacctagatgactgtgtttctgagcaataaatgacttaaaccaggtatggctgccgatggttatcttccagattggctcgaggacaacctctctgagggcattcgcgagtggtgggacttgaaacctggagccccgaaacccaaagccaaccagcaaaagcaggacgacggccggggtctggtgcttcctggctacaagtacctcggacccttcaacggactcgacaagggggagcccgtcaacgcggcggacgcagcggccctcgagcacgacaaggcctacgaccagcagctcaaagcgggtgacaatccgtacctgcggtataaccacgccgacgccgagtttcaggagcgtctgcaagaagatacgtcttttgggggcaacctcgggcgagcagtcttccaggccaagaagcgggttctcgaacctctcggtctggttgaggaaggcgctaagacggctcctggaaagaagagaccggtagagccatcaccccagcgttctccagactcctctacgggcatcggcaagaaaggccagcagcccgcgaaaaagagactcaactttgggcagactggcgactcagagtcagtgcccgaccctcaaccaatcggagaaccccccgcaggcccctctggtctgggatctggtacaatggctgcaggcggtggcgctccaatggcagacaataacgaaggcgccgacggagtgggtagttcctcaggaaattggcattgcgattccacatggctgggcgacagagtcatcaccaccagcacccgaacctgggccctccccacctacaacaaccacctctacaagcaaatctccaacgggacttcgggaggaagcaccaacgacaacacctacttcggctacagcaccccctgggggtattttgactttaacagattccactgccacttctcaccacgtgactggcagcgactcatcaacaacaactggggattccggcccaagagactcaacttcaagctcttcaacatccaggtcaaggaggtcacgcagaatgaaggcaccaagaccatcgccaataaccttaccagcacgattcaggtctttacggactcggaataccagctcccgtacgtcctcggctctgcgcaccagggctgcctgcctccgttcccggcggacgtcttcatgattcctcagtacgggtacctgactctgaacaatggcagtcaggccgtgggccgttcctccttctactgcctggagtactttccttctcaaatgctgagaacgggcaacaactttgagttcagctaccagtttgaggacgtgccttttcacagcagctacgcgcacagccaaagcctggaccggctgatgaaccccctcatcgaccagtacctgtactacctgtctcggactcagtccacgggaggtaccgcaggaactcagcagttgctattttctcaggccgggcctaataacatgtcggctcaggccaaaaactggctacccgggccctgctaccggcagcaacgcgtctccacgacactgtcgcaaaataacaacagcaactttgcctggaccggtgccaccaagtatcatctgaatggcagagactctctggtaaatcccggtgtcgctatggcaacccacaaggacgacgaagagcgattttttccgtccagcggagtcttaatgtttgggaaacagggagctggaaaagacaacgtggactatagcagcgttatgctaaccagtgaggaagaaattaaaaccaccaacccagtggccacagaacagtacggcgtggtggccgataacctgcaacagcaaaacgccgctcctattgtaggggccgtcaacagtcaaggagccttacctggcatggtctggcagaaccgggacgtgtacctgcagggtcctatctgggccaagattcctcacacggacggaaactttcatccctcgccgctgatgggaggctttggactgaaacacccgcctcctcagatcctgattaagaatacacctgttcccgcggatcctccaactaccttcagtcaagctaagctggcgtcgttcatcacgcagtacagcaccggacaggtcagcgtggaaattgaatgggagctgcagaaagaaaacagcaaacgctggaacccagagattcaatacacttccaactactacaaatctacaaatgtggactttgctgttaacacagatggcacttattctgagcctcgccccatcggcacccgttacctcacccgtaatctgtaattgcttgttaatcaataaaccggttgattcgtttcagttgaactttggtctctgcgaagggcgaattc

SEQ ID NO: 402 - protein, 738 aa, Artificial Sequence; identical to SEQ ID NO: 18
  Description of Artificial Sequence: Synthetic polypeptide

SEQ ID NO: 403 - protein, 733 aa, Artificial Sequence
  Description of Artificial Sequence: Synthetic polypeptide
MAADGYLPDWLEDNLSEGIREWWDLRPGAPKPKANQQKQDDGRGLVLPGYKYLGPFNGLDKGEPVNEADAAALEHDKAYDKQLEQGDNPYLKYNHADAEFQERLQEDTSFGGNLGRAVFQAKKRVLEPLGLVEEGAKTAPGKKRPIESPDSSTGIGKKGQQPAKKRLNFGQTGDSESVPDPQPIGEPPAGPSGLGSGTMAAGGGAPMADNNEGADGVGSSSGNWHCDSTWLGDRVITTSTRTWALPTYNNHLYKQISNGTSGGSTNDNTYFGYSTPWGYFDFNRFHCHFSPRDWQRLINNNWGFRPKRLNFKLFNIQVKEVTQNEGTKTIANNLTSTIQVFTDSEYQLPYVLGSAHQGCLPPFPADVFMIPQYGYLTLNNGSQAVGRSSFYCLEYFPSQMLRTGNNFEFSYQFEDVPFHSSYAHSQSLDRLMNPLIDQYLYYLSRTQSTGGTAGTQQLLFSQAGPNNMSAQAKNWLPGPCYRQQRVSTTVSQNNNSNFAWTGATKYHLNGRDSLVNPGVAMATHKGDEERFFPSSGVLMFGKQGAGKDNVDYSSVMLTSEEEIKTTNPVATEQYGVVADNLQQQNAAPIVGAVNSQGALPGMVWQNRDVYLQGPIWAKIPHTDGNFHPSPLMGGFGLKHPPPQILIKNTPVPADPPTTFSQAKLASFITQYSTGQVSVEIEWELQKENSKRWNPEIQYTSNYYKSTNVDFAVNTEGTYSEPRPIGTRYLTRNL

SEQ ID NO: 404 - DNA, 2501 bp, Artificial Sequence
  Description of Artificial Sequence: Synthetic polynucleotide
gaattcgcccttggctgcgtcaactggaccaatgagaactttcccttcaacgattgcgtcgacaagatggtgatctggtgggaggagggcaagatgacggccaaggtcgtggagtccgccaaggccattcatcatctgctggggcgggctcccgagattgcttgctcggcctgcgatctggtcaacgtggacctggatgactgtgtttctgagcaataaatgacttaaaccaggtatggctgccgatggttatcttccagattggctcgaggacaacctctctgagggcattcgcgagtggtgggacttgagacctggagccccgaaacccaaagccaaccagcaaaagcaggacgacggccggggtctggtgcttcctggctacaagtacctcggacccttcaacggactcgacaagggagagccggtcaacgaggcagacgccgcggccctcgagcacgacaaggcctacgacaagcagctcgagcagggggacaacccgtacctcaagtacaaccacgccgacgccgagtttcaggagcgtcttcaagaagatacgtcttttgggggcaacctcgggcgagcagtcttccaggccaagaagcgggttctcgaacctctcggtctggttgaggaaggcgctaagacggctcctggaaagaagagacccatagaatcccccgactcctccacgggcatcggcaagaaaggccagcagcccgctaaaaagagactcaactttgggcagactggcgactcagagtcagtgcccgaccctcaaccaatcggagaaccccccgcaggcccctctggtctgggatctggcacaatggctgcaggcggtggcgctccaatggcagacaataacgaaggcgccgacggagtgggtagttcctcaggaaattggcattgcgattccacatggctgggcgacagagtcatcaccaccagcacccgaacctgggccctccccacctacaacaaccacctctacaagcaaatctccaacgggacatcgggaggaagcaccaacgacaacacctacttcggctacagcaccccctgggggtattttgactttaacagattccactgccacttctcaccacgtgactggcagcgactcatcaacaacaactggggattccggcccaagagactcaacttcaagctcttcaacatccaggtcaaggaggtcacgcagaatgaaggcaccaagaccatcgccaataaccttaccagcacgattcaggtctttacggactcggaataccagctcccgtacgtcctcggctctgcgcaccagggctgcctgcctccgttcccggcggacgtcttcatgattcctcagtacgggtacctgactctgaacaacggcagtcaggccgtgggccgttcctccttctactgcctggagtactttccttctcaaatgctgagaacgggcaacaactttgagttcagctaccagtttgaggacgtgccttttcacagcagctatgcgcacagccaaagcctggaccggctgatgaaccccctcatcgaccagtacctgtactacctgtctcggactcagtccacgggaggtaccgcaggaactcagcagttgctattttctcaggccgggcctaataacatgtcggctcaggccaaaaactggctacccgggccctgctaccggcagcaacgcgtctccacgacagtgtcgcaaaataacaacagcaactttgcttggaccggtgccaccaagtatcatctgaatggcagagactctctggtaaatcccggtgtcgctatggcaacgcacaagggcgacgaagagcgattttttccatccagcggagtcttgatgtttgggaaacagggagctggaaaagacaacgtagactatagcagcgttatgctaaccagtgaggaagaaatcaaaaccaccaacccagtggccacagaacagtacggcgtggtggccgataacctgcaacagcaaaacgccgctcctattgtaggggccgtcaacagtcaaggagccttacctggcatggtctggcagaaccgggacgtgtacctgcagggtcctatctgggccaagattcctcacacggacggcaactttcatccttcgccgctgatgggaggctttggactgaaacacccgcctcctcagatcctgattaagaatacacctgttcccgcggatcctccaactaccttcagtcaagccaagctggcgtcgttcatcacgcagtacagcaccggacaggtcagcgtggaaattgaatgggagctgcagaaagagaacagcaagcgctggaacccagagattcagtatacttccaactactacaaatctacaaatgtggactttgctgtcaatactgagggtacttattcagagcctcgccccattggcacccgttacctcacccgtaacctgtaattgcctgttaatcaataaaccggttgattcgtttcagttgaactttggtctcaagggcgaattc

SEQ ID NO: 405 - DNA, 2187 bp, Artificial Sequence
  Description of Artificial Sequence: Synthetic polynucleotide
atggctgccgatggttatcttccagattggctcgaggacaacctctctgagggcattcgcgagtggtgggacttgaaacctggagccccgaaacccaaagccaaccagcaaaagcaggacgacggccggggtctggtgcttcctggctacaagtacctcggacccttcaacggactcgacaagggagagccggtcaacgaggcagacgccgcggccctcgagcacgacaaggcctacgacaagcagctcgagcagggggacaacccgtacctcaagtacaaccacgccgacgccgagtttcaggagcgtcttcaagaagatacgtcttttgggggcaacctcgggcgagcagtcttccaggccaagaagcgggttctcgaacctctcggtctggttgaggaaggcgctaagacggctcctggaaagaagagacccatagaatcccccgactcctccacgggcatcggcaagaaaggccagcagcccgctaaaaagaagctcaactttgggcagactggcgactcagagtcagtgcccgacccccaacctctcggagaacctcccgccgcgccctcaggtctgggatctggtacaatggctgcaggcggtggcgcaccaatggcagacaataacgaaggcgccgacggagtgggtaatgcctccggaaattggcattgcgattccacatggctgggcgacagagtcatcaccaccagcacccgcacctgggccctgcccacctacaacaaccacctctacaagcagatatcaagtcagagcggggctaccaacgacaaccacttcttcggctacagcaccccctggggctattttgacttcaacagattccactgccacttctcaccacgtgactggcagcgactcatcaacaacaactggggattccggcccagaaagctgcggttcaagttgttcaacatccaggtcaaggaggtcacgacgaacgacggcgttacgaccatcgctaataaccttaccagcacgattcaggtcttctcggactcggagtaccaactgccgtacgtcctcggctctgcgcaccagggctgcctccctccgttccctgcggacgtgttcatgattcctcagtacggatatctgactctaaacaacggcagtcagtctgtgggacgttcctccttctactgcctggagtactttccttctcagatgctgagaacgggcaataactttgaattcagctacacctttgaggaagtgcctttccacagcagctatgcgcacagccagagcctggaccggctgatgaatcccctcatcgaccagtacctgtactacctggcccggacccagagcactacggggtccacaagggagctgcagttccatcaggctgggcccaacaccatggccgagcaatcaaagaactggctgcccggaccctgttatcggcagcagagactgtcaaaaaacatagacagcaacaacaacagtaactttgcctggaccggggccactaaataccatctgaatggtagaaattcattaaccaacccgggcgtagccatggccaccaacaaggacgacgaggaccagttctttcccatcaacggagtgctggtttttggcgaaacgggggctgccaacaagacaacgctggaaaacgtgctaatgaccagcgaggaggagatcaaaaccaccaatcccgtggctacagaagaatacggtgtggtctccagcaacctgcaatcgtctacggccggaccccagacacagactgtcaacagccagggggctctgcccggcatggtctggcagaaccgggacgtgtacctgcagggtcccatctgggccaaaattcctcacacggacggcaactttcacccgtctcccctgatgggcggatttggactcaaacacccgcctcctcaaattctcatcaaaaacaccccggtacctgctaatcctccagaggtgtttactcctgccaagtttgcctcatttatcacgcagtacagcaccggccaggtcagcgtggagatcgagtgggaactgcagaaagaaaacagcaaacgctggaatccagagattcagtacacctcaaattatgccaagtctaataatgtggaatttgctgtcaacaacgaaggggtttatactgagcctcgccccattggcacccgttacctcacccgtaacctgtaa

SEQ ID NO: 406 - protein, 728 aa, Artificial Sequence; identical to SEQ ID NO: 74
  Description of Artificial Sequence: Synthetic polypeptide

SEQ ID NO: 407 - protein, 728 aa, Artificial Sequence; identical to SEQ ID NO: 166
  Description of Artificial Sequence: Synthetic polypeptide

SEQ ID NO: 408 - protein, 728 aa, Artificial Sequence; identical to SEQ ID NO: 166
  Description of Artificial Sequence: Synthetic polypeptide

SEQ ID NO: 409 - protein, 733 aa, Artificial Sequence
  Description of Artificial Sequence: Synthetic polypeptide
MAADGHLPDWLEDNLSEGIREWWDLKPGAPKPKANQQKQDDGRGLVLPGYKYLGPFNGLDKGEPVNAADAAALEHDKAYDQQLKAGDNPYLRYNHADAEFQERLQEDTSFGGNLGRAVFQAKKRVLEPLGLVEEGAKTAPGKKRPIESPDSSTGIGKKGQQPAKKKLNFGQTGDSESVPDPQPIGEPPAGPSGLGSGTMAAGGGAPMADNNEGADGVGSSSGNWHCDSTWLGDRVITTSTRTWALPTYNNHLYKQISNGTSGGSTNDNTYFGYSTPWGYFDFNRFHCHFSPRDWQRLINNSWGFRPKRLNFKLFNIQVKEVTQNEGTKTIANNLTSTIQVFTDSEYQLPYVLGSAHQGCLPPFPADVFMIPQYGYLTLNNGSQAVGRSSFYCLEYFPSQMLRTGNNFEFSYQFEDVPFHSSYAHSQSLDRLMNPLIDQYLYYLSRTQSTGGTAGTQQLLFSQAGPNNMSAQAKNWLPGPCYRQQRVSTTLSQNNNSNFAWTGATKYHLNGRDSLVNPGVAMATHKDDEERFFPSSGVLMFGKQGAGKDNVDYSSVMLTSEEEIKTTNPVATEQYGVVADNLQQQNAAPIVGAVNSQGALPGMVWQNRDVYLQGPIWAKIPHTDGNFHPSPLMGGFGLKHPPPQILIKNTPVPADPPTTFSQAKLASFITQYSTGQVSVEIEWELQKENSKRWNPEIQYTSNYYKSTNVDFAVNTEGTYSEPRPIGTRYLTRNL

SEQ ID NO: 410 - DNA, 3113 bp, Artificial Sequence
  Description of Artificial Sequence: Synthetic polynucleotide
gaattcgccctttctacggctgcgtcaactggaccaatgagaactttcccttcaacgattgcgtcgacaagatggtgatctggtgggaggagggcaagatgacggccaaggtcgtggagtccgccaaggccattctcggcggcagcaaggtgcgcgtggaccaaaagtgcaagtcgtccgcccagatcgatcccacccccgtgatcgtcacttccaacaccaacatgtgcgccgtgattgacgggaacagcaccaccttcgagcaccagcagccgttacaagaccggatgttcaaatttgaactcacccgccgtctggagcatgactttggcaaggtgacaaagcaggaagtcaaagagttcttccgctgggcgcaggatcacgtgaccgaggtggcgcatgagttctacgtcagaaagggtggagccaacaagagacccgcccccgatgacgcggataaaagcgagcccaagcgggcctgcccctcagtcgcggatccatcgacgtcagacgcggaaggagctccggtggactttgccgacaggtaccaaaacaaatgttctcgtcacgcgggcatgcttcagatgctgcttccctgcaagacatgcgagagaatgaatcagaatttcagcatttgcttcacgcacgggaccagagactgttcagaatgtttccccggcgtgtcagaatctcaaccggtcgtcagaaagaggacgtatcggaaactctgtgccattcatcatctgctggggcgggctcccgagattgcttgctcggcctgcgatctggtcaacgtggacctggatgactgtgtttctgagcaataaatgacttaaaccaggtatggctgccgatggtcatcttccagattggctcgaggacaacctctctgagggcattcgcgagtggtgggacttgaaacctggagccccgaaacccaaagccaaccagcaaaagcaggacgacggccggggtctggtgcttcctggctacaagtacctcggacccttcaacggactcgacaagggggagcccgtcaacgcggcggacgcagcggccctcgagcacgacaaggcctacgaccagcagctcaaagcgggtgacaatccgtacctgcggtataaccacgccgacgccgagtttcaggagcgtcttcaagaagatacgtcttttgggggcaacctcgggcgagcagtcttccaggccaagaagcgggttctcgaacctctcggtctggttgaggaaggcgctaagacggctcctggaaagaagagacccatagaatcccccgactcctccacgggcatcggcaagaaaggccagcagcccgctaaaaagaagctcaactttgggcagactggcgactcagagtcagtgcccgaccctcaaccaatcggagaaccccccgcaggcccctctggtctgggatctggtacaatggctgcaggcggtggcgctccaatggcagacaataacgaaggcgccgacggagtgggtagttcctcaggaaattggcattgcgattccacatagctgggcgacagagtcatcaccaccagcacccgaacctgggccctccccacctacaacaaccacctctacaagcaaatctccaacgggacatcgggaggaagcaccaacgacaacacctacttcggctacagcaccccctgggggtattttgactttaacagattccactgccacttctcaccacgtgactggcagcgactcatcaacaacagctggggattccggcccaagagactcaacttcaagctcttcaacatccaggtcaaggaggtcacgcagaatgaaggcaccaagaccatcgccaataaccttaccagcacgattcaggtctttacggactcggaataccagctcccgtacgtcctcggctctgcgcaccagggctgcctgcctccgttcccggcggacgtcttcatgattcctcagtacgggtacctgactctgaacaacggcagtcaggccgtgggccgttcctccttctactgcctggagtactttccttctcaaatgctgagaacgggcaacaactttgagttcagctaccagtttgaggacgtgccttttcacagcagctacgcgcacagccaaagcctggaccggctgatgaaccccctcatcgaccagtacctgtactacctgtctcggactcagtccacgggaggtaccgcaggaactcagcagttgctattttctcaggccgggcctaataacatgtcggctcaggccaaaaactggctacccgggccctgctaccggcagcaacgcgtctccacgacactgtcgcaaaataacaacagcaactttgcttggaccggtgccaccaagtatcatctgaatggcagagactctctggtaaatcccggtgtcgctatggcaacgcacaaggacgacgaagagcgattttttccatccagcggagtcttgatgtttgggaaacagggagctggaaaagacaacgtggactatagcagcgttatgctaaccagtgaggaagaaatcaaaaccaccaacccagtggccacagaacagtacggcgtggtggccgataacctgcaacagcaaaacgccgctcctattgtaggggccgtcaacagtcaaggagccttacctggcatggtctggcagaaccgggacgtgtacctgcagggtcctatctgggccaagattcctcacacggacggcaactttcatccttcgccgctgatgggaggctttggactgaaacacccgcctcctcagatcctgattaagaatacacctgttcccgcggatcctccaactaccttcagtcaagccaagctggcgtcgttcatcacgcagtacagcaccggacaggtcagcgtggaaattgaatgggagctgcagaaagagaacagcaagcgctggaacccagagattcagtatacttccaactactacaaatctacaaatgtggactttgctgtcaatactgagggtacttattcagagcctcgccccattggcacccgttacctcacccgtaacctgtaattgcctgttaatcaataaaccggttaattcgtttcagttgaactttggtctctgcgaagggcgaattc

SEQ ID NO: 411 - protein, 731 aa, Artificial Sequence
  Description of Artificial Sequence: Synthetic polypeptide
MAADGYLPDWLEDNLSEGIREWWDLKPGAPKPKANQQKQDDGRGLVLPGYKYLGPFNGLDKGEPVNEADAAALEHDKAYDKQLEQGDNPYLKYNHADAEFQERLQEDTSFGGNLGRAVFRAKKRVLEPLGLVEEGAKTAPGKKRPIESPDSSTGIGKKGQQPAKKKLNFGQTGDSESVPDPQPLGEPPAAPSGLGSGTMAAGGGAPMADNNEGADGVGNASGNWHCDSTWLGDRVITTSTRTWALPTYNNHLYKQISSQSGATNDNHFFGYSTPWGYFDFNRFHCHFSPRDWQRLINNNRGFRPRKLRFKLFNIQVKEVTTNDGVTTIANNLTSTIQVFSDSEYQLPYVLGSAHQGCLPPFPADVFMIPQYGYLTLNNGSQSVGRSSFYCLEYFPSQMLRTGNNFEFSYQFEDVPFHSSYAHSQSLDRLMNPLIDQYLYYLSRTQSTGGTAGTQQLLFSQAGPNNMSAQAKNWLPGPCYRQQRVSTTLSQNNNSNFAWTGATKYHLNGRDSLVNPGVAMATHKDDEERFFPSSGVLMFGKQGAGKDNVDYSSVMLTSEEEIKTTNPVATEQYGVVADNLQQQNAAPIVGAVNSQGALPGMAWQNRDVYLQGPIWAKIPHTDGNFHPSPLMGGFGLKHPPPQILIKNTPVPADPPTTFSQAKLASFITQYSTGQVSVEIEWELQKENSKRWNPEIQYTSNYYKSTNVDFAVNTEGTYSEPRPIGTRYLTRNL

SEQ ID NO: 412 - DNA, 3106 bp, Artificial Sequence
  Description of Artificial Sequence: Synthetic polynucleotide
gaattcgcccttctacggctgcgtcaactggaccaatgagaactttcccttcaacgattgcgtcgacaagatggtgatctggtgggaggagggcaagatgacggccaaggtcgtggagtccgccaaggccattctcggcggcagcaaggtgcgcgtggaccaaaagtgcaagtcgtccgcccagatcgaccccacccccgtgatcgtcacctccaacaccaacatgtgcgccgtgattgacgggaacagcaccaccttcgagcaccagcagccgttgcaggaccggatgttcaaatttgaactcacccgccgtctggagcatgactttggcaaggcgacaaagcaggaagtcaaagagttcttccgctgggcgcaggatcacgtgaccgaggtggcgcatgagttctacgtcagaaagggtggagccaacaagagacccgcccccgatgacgcggataaaagcgagcccaagcgggcccgcccctcagtcgcggatccatcgacgtcagacgcggaaggagctccggtggactttgccgacaggtaccaaaacaaatgttctcgtcacgcgggcatgcttcagatgctgtttccctgcaaaacatgcgagagaatgaatcagaatttcaacatttgcttcacgcacgggaccagagactgttcagaatgtttccccggcgtgtcagaatctcaaccggtcgtcagaaagaggacgtatcggaaactctgtgccattcatcatctgctggggcgggctcccgagattgcttgctcggcctgcgatctggtcaacgtggacctggatgactgtgtttctgagcaataaatgacttaaaccaggtatggctgccgatggttatcttccagattggctcgaggacaacctctctgagggcattcgcgagtggtgggacttgaaacctggagccccgaaacccaaagccaaccagcaaaagcaggacgacggccggggtctggtgcttcctggctacaagtacctcggacccttcaacggactcgacaagggagagccggtcaacgaggcagacgccgcggccctcgagcacgacaaggcctacgacaagcagctcgagcagggggacaacccgtacctcaagtacaaccacgccgacgccgagtttcaggagcgtcttcaagaagatacgtcttttgggggcaacctcgggcgagcagtcttccgggccaagaagcgggttctcgaacctctcggtctggttgaggaaggcgctaagacggctcctggaaagaagagacccatagaatcccccgactcctccacgggcatcggcaagaaaggccagcagcccgctaaaaagaagctcaactttgggcagactggcgactcagagtcagtgcccgacccccaacctctcggagaacctcccgccgcgccctcaggtctgggatctggtacaatggctgcaggcggtggcgcaccaatggcagacaataacgaaggcgccgacggagtgggtaatgcctccggaaattggcattgcgattccacatggctgggcgacagagtcatcaccaccagcacccgcacctgggccctgcccacctacaacaaccacctctacaagcagatatcaagtcagagcggggctaccaacgacaaccacttcttcggctacagcaccccctggggctattttgacttcaacagattccactgccacttctcaccacgtgactggcagcgactcatcaacaacaaccggggattccggcccagaaagctgcggttcaagttgttcaacatccaggtcaaggaggtcacgacgaacgacggcgttacgaccatcgctaataaccttaccagcacgattcaggtcttctcggactcggagtaccaactgccgtacgtcctcggctctgcgcaccagggctgcctccctccgttccctgcggacgtgttcatgattcctcagtacggatatctgactctaaacaacggcagtcagtctgtgggacgttcctccttctactgcctggagtactttccttctcagatgctgagaacgggcaataactttgaattcagctaccagtttgaggacgtgccctttcacagcagctacgcgcacagccaaagcctggaccggctgatgaaccccctcatcgaccagtacctgtactacctgtctcggactcagtccacgggaggtaccgcaggaactcagcagttgctattttctcaggccgggcctaataacatgtcggctcaggccaaaaactggctacccgggccctgctaccggcagcaacgcgtctccacgacactgtcgcaaaataacaacagcaactttgcttggaccggtgccaccaagtatcatctgaatggcagagactctctggtaaatcccggtgtcgctatggcaacgcacaaggacgacgaagagcgattttttccatccagcggagtcttgatgtttgggaaacagggagctggaaaagacaacgtggactatagcagcgttatgctaaccagtgaggaagaaatcaaaaccaccaacccagtggccacagaacagtacggcgtggtggccgataacctgcaacagcaaaacgccgctcctattgtaggggccgtcaacagtcaaggagccttacctggcatggcctggcagaaccgggacgtgtacctgcagggtcctatctgggccaagattcctcacacggacggcaactttcatccttcgccgctgatgggaggctttggactgaaacacccgcctcctcagatcctgattaagaatacacctgttcccgcggatcctccaactaccttcagtcaagccaagctggcgtcgttcatcacgcagtacagcaccggacaggtcagcgtggaaattgaatgggagctgcagaaagagaacagcaagcgctggaacccagagattcagtatacttccaactactacaaatctacaaatgtggactttgctgtcaatactgagggtacttattcagagcctcgccccattggcacccgttacctcacccgtaacctgtaattgcctgttaatcaataaaccggttaattcgtttcagttgaactttggtctctgcgaagggcgaattc

SEQ ID NO: 413 - protein, 738 aa, Artificial Sequence
  Description of Artificial Sequence: Synthetic polypeptide
MAADGYLPDWLEDNLSEGIREWWDLKPGAPKPKANQQKQDDGRGLVLPGYKYLGPFNGLDKGEPVNEADAAALEHDKAYDKQLEQGDNPYLKYNHADAEFQERLQEDTSFGGNLGRAVFQAKKRVLEPLGLVEEGAKTAPGKKRPVEPSPQRSPDSSTGIGKTGQQPAKKRLNFGQTGDSESVPDPQPIGEPPAGPSGLGSGTMAAGGGAPMADNNEGADGVGSSSGNWHCDSTWLGDRVITTSTRTWALPTYNNHLYKQISNGTSGGSTNDNTYFGYSTPWGYFDFNRFHCHFSPRDWQRLINNNWGFRPKRLNFKLFNIQVKEVTQNEGTKTIANNLTSTIQVFTDSEYQLPYVLGSAHQGCLPPFPADVFMIPQYGYLTLNNGSQAVGRSSFYCLEYFPSQMLRTGNNFEFSYQFEDVPFHSSYAHSQSLDRLMNPLIDQYLYYLSRTQSTGGTAGTQQLLFSQAGPNNMSAQAKNWLPGPCYRQQRVSTTLSQNNNSNFAWTGATKYHLNGRDSLVNPGVAMATHKDDEERFFPSSGVLMFGKQGAGKDNVDYSSVMLTSEEEIKTTNPVATEQYGVVADNLQQQNAAPIVGAVNSQGALPGMVWQNRDVYLQGPIWAKIPHTDGNFHPSPLMGGFGLKHPPPQILIKNTPVPADPPTTFSQAKLASFITQYSTGQVSVEIEWELQKENSKRWNPEIQYTSNYYKSTNVDFAVNTEGTYSEPRPIGTRYLTRNL

SEQ ID NO: 414 - DNA, 3197 bp, Artificial Sequence
  Description of Artificial Sequence: Synthetic polynucleotide
gaattcgccctttctacggctgcgtcaactggaccaatgagaactttcccttcaacgattgcgtcgacaagatggtgatctggtgggaggagggcaagatgacggccaaggtcgtggagtccgccaaggccattctcggcggcagcaaggtgcgcgtggaccaaaagtgcaagtcgtccgcccagatcgaccccacccccgtgatcgtcacctccaacaccaacatgtgcgccgtgattgacgggaacagcaccaccttcgagcaccagcagccgttacaagaccggatgttcaaatttgaactcacccgccgtctggagcacgactttggcaaggtgacaaagcaggaagtcaaagagttcttccgctgggcgcaggatcacgtgaccgaggtggcgcatgagttctacgtcagaaagggtggagccaacaagagacccgcccccgatgacgcggataaaagcgagcccaagcgggcctgcccctcagtcgcggatccatcgacgtcagacgcggaaggagctccggtggactttgccgacaggtaccaaaacaaatgttctcgtcacgcgggcatgcttcagatgctgtttccctgcaagacatgcgagagaatgaatcagaatttcaacatttgcttcacgcacgggaccagagactgttcagaatgtttccccggcgtgtcagaatctcaaccggtcgtcagaaagaggacgtatcggaaactctgtgccattcatcatctgctggggcgggctcccgagattgcttgctcggcctgcgatctggtcaacgtggacctggatgactgtgtttctgagcaataaatgacttaaaccaggtatggctgccgatggttatcttccagattggctcgaggacaacctctctgagggcattcgcgagtggtgggacttgaaacctggagccccgaaacccaaagccaaccagcaaaagcaggacgacggccggggtctggtgcttcctggctacaagtacctcggacccttcaacggactcgacaagggagagccggtcaacgaggcagacgccgcggccctcgagcacgacaaggcctacgacaagcagctcgagcagggggacaacccgtacctcaagtacaaccacgccgacgccgagtttcaggagcgtcttcaagaagatacgtcttttgggggcaacctcgggcgagcagtcttccaggccaagaagcgggttctcgaacctctcggtctggttgaggaaggcgctaagacggctcctggaaagaagagaccggtagagccatcaccccagcgttctccagactcctctacgggcatcggcaagacaggccagcagcccgcgaaaaagagactcaactttgggcagactggcgactcagagtcagtgcccgaccctcaaccaatcggagaaccccccgcaggcccctctggtctgggatctggtacaatggctgcaggcggtggcgctccaatggcagacaataacgaaggcgccgacggagtgggtagttcctcaggaaattggcattgcgattccacatggctgggcgacagagtcatcaccaccagcacccgaacctgggccctccccacctacaacaaccacctctacaagcaaatctccaacgggacatcgggaggaagcaccaacgacaacacctacttcggctacagcaccccctgggggtattttgactttaacagattccactgccacttctcaccacgtgactggcagcgactcatcaacaacaactggggattccggcccaagagactcaacttcaagctcttcaacatccaggtcaaggaggtcacgcagaatgaaggcaccaagaccatcgccaataaccttaccagcacgattcaggtctttacggactcggaataccagctcccgtacgtcctcggctctgcgcaccagggctgcctgcctccgttcccggcggacgtcttcatgattcctcagtacgggtacctgactctgaacaacggcagtcaggccgtgggccgttcctccttctactgcctggagtactttccttctcaaatgctgagaacgggcaacaactttgagttcagctaccagtttgaggacgtgccttttcacagcagctacgcgcacagccaaagcctggaccggctgatgaaccccctcatcgaccagtacctgtactacctgtctcggactcagtccacgggaggtaccgcaggaactcagcagttgctattttctcaggccgggcctaataacatgtcggctcaggccaaaaactggctacccgggccctgctaccggcagcaacgcgtctccacgacactgtcgcaaaataacaacagcaactttgcttggaccggtgccaccaagtatcatctgaatggcagagactctctggtaaatcccggtgtcgctatggcaacgcacaaggacgacgaagagcgattttttccatccagcggagtcttgatgtttgggaaacagggagctggaaaagacaacgtggactatagcagcgttatgctaaccagtgaggaagaaatcaaaaccaccaacccagtggccacagaacagtacggcgtggtggccgataacctgcaacagcaaaacgccgctcctattgtaggggccgtcaacagtcaaggagccttacctggcatggtctggcagaaccgggacgtgtacctgcagggtcctatctgggccaagattcctcacacggacggcaactttcatccttcgccgctgatgggaggctttggactgaaacacccgcctcctcagatcctgattaagaatacacctgttcccgcggatcctccaactaccttcagtcaagccaagctggcgtcgttcatcacgcagtacagcaccggacaggtcagcgtggaaattgaatgggagctgcagaaagagaacagcaagcgctggaacccagagattcagtatacttccaactactacaaatctacaaatgtggactttgctgtcaatactgagggtacttattcagagcctcgccccattggcacccgttacctcacccgtaacctgtaattgcctgttaatcaataaaccggttaattcgtttcagttgaactttggtctctgcgaagggcgaattcgtttaaacctgcaggactagtccctttagtgagggttaattctgagcttggcgtaatcatgggtcatag

SEQ ID NO: 415 - protein, 735 aa, Artificial Sequence
  Description of Artificial Sequence: Synthetic polypeptide
MAADGYLPDWLEDNLSEGIREWWDLKPGAPKPKANQQKQDDGRGLVLPGYKYLGPFNGLDKGEPVNEADAAALEHDKAYDKQLEQGDNPYLKYNHADAEFQERLQEDTSFGGNLGRAVFQAKKRVLEPLGLVEEGAKTAPGKKRPVEPSPQRSPDSSTGIGKTGQQPAKKRLNFGQTGDSESVPDPQPIGEPPAGPSGLGSGTMAAGGGAPMADNNEGADGVGSSSGNWHCDSTWLGDRVITTSTRTWALPTYNNHLYKQISNGTSGGSTNDNTYFGYSTPWGYFDFNRFHCHFSPRDWQRLINNNWGFRPRKLRFKLFNIQVKEVTTDDGVTTIANNLTSTIQVFSDSEYQLPYVLGSAHQGCLPPFPADVFMIPQYGYLTLNNGSQSVGRSSFYCLEYFPSQMLRTGNNFEFSYTFEEVPFHSSYAHSQSLDRLMNPLIDQYLYYLARTQSTTGSTRELQFHQAGPNTMAEQSKNWLPGPCYRQQRLSKNIDSNNNSNFAWTGATKYHLNGRNSLTNPGVAMATNKDDEDQFFPINGVLVFGKTGAANKTTLENVLMTSEEEIKTTNPVATEEYGVVSSNLQSSTAGPQTQTVNSQGALPGMVWQNRDVYLQGPIWAKIPHTDGNFHPSPLMDGFGLKHPPPQILIKNTPVPANPPEVFTPAKFASFITQYSTGQVSVEIEWELQKENSKRWNPEIQYTSNYAKSNNVEFAVNNEGVYTEPRPIGTRYLTRNL

SEQ ID NO: 416 - DNA, 3276 bp, Artificial Sequence
  Description of Artificial Sequence: Synthetic polynucleotide
gaattcgcccttcgcagagaccaaagttcaactgaaacgaattaaccggtttattgattaacaggcaattacaggttacgggtgaggtaacgggtgccaatggggcgaggctcagtataaaccccttcgttgttgacagcaaattccacattattagacttggcataatttgaggtgtactgaatctctggattccagcgtttgctgttttctttctgcagttcccactcgatctccacgctgacctggccggtgctgtactgcgtgataaatgaggcaaacttggcaggagtaaacacctctggaggattagcaggtaccggggtgtttttgatgagaatttgaggaggcgggtgtttgagtccaaatccgtccatcaggggagacgggtgaaagttgccgtccgtgtgaggaattttggcccagatgggaccctgcaggtacacgtcccggttctgccagaccatgccgggcagagccccctggctgttgacagtctgtgtctggggtccggccgtagacgattgcaggttgctggagaccacaccgtattcttctgtagccacgggattggtggttttgatctcctcctcgctggtcattagcacgttttccagcgttgtcttgttggcagcccccgttttgccaaaaaccagcactccgttgatgggaaagaactggtcctcgtcgtccttgttggtggccatggctacgcccgggttggttaatgaatttctaccattcagatggtatttagtggccccggtccaggcaaagttactgttgttgttgctgtctatgttttttgacagtctctgctgccgataacagggtccgggcagccagttctttgattgctcggccatggtgttgggcccagcctgatggaactgcagctcccttgtggaccccgtagtgctctgggtccgggccaggtagtacaggtactggtcgatgaggggattcatcagccggtccaggctctggctatgcgcatagctgctgtggaaaggcacttcctcaaaggtgtagctgaattcaaagttattgcccgttctcagcatctgagaaggaaagtactccaggcagtagaaggaggaacgtcccacagactgactgccgttgtttagagtcagatatccgtactgaggaatcatgaacacgtccgcagggaacggagggaggcagccctggtgcgcagagccgaggacgtacggcagttggtactccgagtccgagaagacctgaatcgtgctggtaaggttattagcgatggtcgtaacgccgtcgtccgtcgtgacctccttgacctggatgttgaacaacttgaaccgcagctttctgggccggaatccccagttgttgttgatgagtcgctgccagtcacgtggtgagaagtggcagtggaatctgttaaagtcaaaatacccccagggggtgctgtagccgaagtaggtgttgtcgttggtgcttcctcccgatgtcccgttggagatttgcttgtagaggtggttgttgtaggtggggagggcccaggttcgggtgctggtggtgatgactctgtcgcccagccatgtggaatcgcaatgccaatttcctgaggaactacccactccgtcggcgccttcgttattgtctgccattggagcgccaccgcctgcagccattgtaccagatcccagaccagaggggcctgcggggggttctccgattggttgagggtcgggcactgactctgagtcgccagtctgcccaaagttgagtctctttttcgcgggctgctggcctgtcttgccgatgcccgtagaggagtctggagaacgctggggtgatggctctaccggtctcttctttccaggagccgtcttagcgccttcctcaaccagaccgagaggttcgagaacccgcttcttggcctggaagactgctcgcccgaggttgcccccaaaagacgtatcttcttgaagacgctcctgaaactcggcgtcggcgtggttgtacttgaggtacgggttgtccccctgctcgagctgcttgtcgtaggccttgtcgtgctcgagggccgcggcgtctgcctcgttgaccggctctcccttgtcgagtccgttgaagggtccgaggtacttgtagccaggaagcaccagaccccggccgtcgtcctgcttttgctggttggctttgggtttcggggctccaggtttcaagtcccaccactcgcgaatgccctcagagaggttgtcctcgagccaatctggaagataaccatcggcagccatacctggtttaagtcatttattgctcagaaacacagtcatccaggtccacgttgaccagatcgcaggccgagcaagcaatctcgggagcccgccccagcagatgatgaatggcacagagtttccgatacgtcctctttctgacgaccggttgagattctgacacgccggggaaacattctgaacagtctctggtcccgtgcgtgaagcaaatgttgaaattctgattcattctctcgcatgtcttgcagggaaacagcatctgaagcatgcccgcgtgacgagaacacttgttttggtacctgtcggcaaagtccaccggagctccttccgcgtctgacgtcgatggatgcaaaatgtcgcaaaagcactcacgtgacagctaatacaggaccactcccctatgacgtgatttacgtcagcgctatgcccgcgtgacgagaacatttgttttggtacctgtcggcaaagtccaccggagctccttccgcgtctgacgtcgatggatccgcgactgaggggcaggcccgcttgggctcgcttttatccgcgtcatcgggggcgggtctcttgttggctccaccctttctgacgtagaactcatgcgccacctcggtcacgtgatcctgcgcccagcggaagaactctttgacttcctgctttgtcaccttgccaaagtcatgctccagacggcgggtgagttcaaatttgaacatccggtcctgcaacggctgctggtgctcgaaggtggtgctgttcccgtcaatcacggcgcacatgttggtgttggaagtgacgatcacgggggtgggatcgatctgggcggaagacttgcacttttggtccacgcgcaccttgctgccgccgagaatggccttggcggactccacgaccttggccgtcatcttgccctcctcccaccagatcaccatcttgtcgacgcaatcgttgaagggaaagttctcattggtccagttgacgcagccgtagaaagggcgaattc

SEQ ID NO: 417 - protein, 738 aa, Artificial Sequence; identical to SEQ ID NO: 82
  Description of Artificial Sequence: Synthetic polypeptide

SEQ ID NO: 418 - protein, 738 aa, Artificial Sequence
  Description of Artificial Sequence: Synthetic polypeptide
MAADGYLPDWLEDNLSEGIREWWDLKPGAPKPKANQQKQDDGRGLVLPGYKYLGPFNGLDKGEPVNAADAAALEHDKAYDQQLKAGDNPYLRYNHADAEFQERLQEDTSFGGNLGRAVFQAKKRVLEPLGLVEEGAKTAPGKKRPVEPSPQRSPDSSTGIGKKGHQPARKRLNFGQTGDSESVPDPQPIGEPPAGPSGLGSGTMAAGGGAPMADNNEGADGVGSSSGNWHCDSTWLGDRVITTSTRTWALPTYNNHLYKQISNGTSGGSTNDNTYFGYSTPWGYFDFNRFHCHFSPRDWQRLINNNWGFRPKRLNFKLFNIQVKEVTQNEGTKTIANNLTSTIQVFTDSEYQLPYVPGSAHQGCLPPFPADVFMIPQYGYLTLNNGSQAVGRSSFYCLEYFPSQMLRTGNNFEFSYTFEDVPFHSSYAHSQSLDRLMNPLIDQYLYYLSRTQSTGGTQGTQQLLFSQAGPANMSAQAKNWLPGPCYRQQRVSTTLSQNNNSNFAWTGATKYHLNGRDSLVNPGVAMATHKDDEERFFPSSGVLMFGKQGAGKDNVDYSSVMLTSEEEIKTTNPVATEQYGVVADNLQQTNGAPIVGTVNSQGALPGMVWQNRDVYLQGPIWAKIPHTDGNFHPSPLMGGFGLKHPPPQILIKNTPVPADPPTTFSQAKLASFITQYSTGQVSVEIEWELQKENSKRWNPEIQYTSNYYKSTNVDFAVNTEGTYSEPRPIGTRYLTRNL

SEQ ID NO: 419 - protein, 738 aa, Artificial Sequence; identical to SEQ ID NO: 80
  Description of Artificial Sequence: Synthetic polypeptide

SEQ ID NO: 420 - protein, 728 aa, Artificial Sequence
  Description of Artificial Sequence: Synthetic polypeptide
MAADGYLPDWLEDNLSEGIREWWDLKPGAPKPKANQQKQDDGRGLVLPGYKYLGPFNGLDKGEPVNEADAAALEHDKAYDKQLEQGDNPYLKYNHADAEFQERLQEDTSFGGNLGRAVFQAKKRVLEPLGLVEEGAKTAPGKKRPIESPDSSTGIGRKGQQPAKKKLNFGQTGDSESVPDPQPIGEPPAGPSGLGSGTMAAGGGAPMADNNEGADGVGNASGNWHCDSTWLGDRVITTSTRTWALPTYNNHLYKQISSQSGATNDNHFFGYSTPWGYFDFNRFHCHFSPRDWQRLINNNWGFRPRKLRFKLFNIQVKEVTTNDGVTTIANNLTSTIQVFSDSEYQLPYVLGSAHQGCLPPFPADVFMIPQYGYLTLNNGSQSVGRSSFYCLEYFPSQMLRTGNNFEFSYTFEEVPFHSSYAHSQSLDRLMNPLIDQYLYYLARTQSTTGSTRELQFHQAGPNTMAEQSKNWLPGPCYRQQRLSKNIDSNNNSNFAWTGATKYHLNGRNSLTNPGVAMATNKDDEDQFFPINGVLVFGKTGAANKTTLENVLMTSEEEIKTTNPVATEEYGVVSSNLQSSTAGPQTQTVNSQGALPGMVWQNRDVYLQGPIWAKIPHTDGNFHPSPLMGGFGLKHPPPQILIKNTPVPANPPEVFTPAKFASFITQYSTGQVSVEIEWELQKENSKRWNPEIQYTSNYAKSNNVEFAVNNEGVYTEPRPIGTRYLTRNL

SEQ ID NO: 421 - DNA, 2489 bp, Artificial Sequence
  Description of Artificial Sequence: Synthetic polynucleotide
gaattcgccctttctacggctgcgtcaactggaccaatgagaactttcccttcaacgattgcgtcgacaagatggtgatctggtgggaggagggcaagatgacggccaaggtcgtgaagtccgccaaggccattcatcatctgctggggcgggctcccgagattgcttgctcggcctgcgatctggtcaacgtggacctggatgactgtgtttctgagcaataaatgacttaaaccaggtatggctgccgatggttatcttccagattggctcgaggacaacctctctgagggcattcgcgagtggtgggacttgaaacctggagccccgaaacccaaagccaaccagcaaaagcaggacgacggccggggtctggtgcttcctggctacaagtacctcggacccttcaacggactcgacaagggagagccggtcaacgaggcagacgccgcggccctcgagcacgacaaggcctacgacaagcagctcgagcagggggacaacccgtacctcaagtacaaccacgccgacgccgagtttcaggagcgtcttcaagaagatacgtcttttgggggcaacctcgggcgagcagtcttccaggccaagaagcgggttctcgaacctctcggtctggttgaggaaggcgctaagacggctcctggaaagaagagacccatagaatcccccgactcctccacgggcatcggcaggaaaggccagcagcccgctaaaaagaagctcaactttgggcagactggcgactcagagtcagtgcccgaccctcaaccaatcggagaaccccccgcaggcccctctggtctgggatctggtacaatggctgcaggcggtggcgctccaatggcagacaataacgaaggcgccgacggagtgggtaatgcctccggaaattggcattgcgattccacatggctgggcgacagagtcatcaccaccagcacccgcacctgggccctgcccacctacaacaaccacctctacaagcagatatcaagtcagagcggggctaccaacgacaaccacttcttcggctacagcaccccctggggctattttgacttcaacagattccactgccacttctcaccacgtgactggcagcgactcatcaacaacaactggggattccggcccagaaagctgcggttcaagttgttcaacatccaggtcaaggaggtcacgacgaacgacggcgttacgaccatcgccaataaccttaccagcacgattcaggtcttctcggactcggagtaccaactgccgtacgtcctcggctctgcgcaccagggctgcctccctccgttccctgcggacgtgttcatgattcctcagtacggatatctgactctaaacaacggcagtcagtctgtgggacgttcctccttctactgcctggagtactttccttctcagatgctgagaacgggcaataactttgaattcagctacacctttgaggaagtgcctttccacagcagctatgcgcacagccagagcctggaccggctgatgaatcccctcatcgaccagtacctgtactacctggcccggacccagagcactacggggtccacaagggagctgcagttccatcaggctgggcccaacaccatggccgagcaatcaaagaactggctgcccggaccctgttatcggcagcagagactgtcaaaaaacatagacagcaacaacaacagtaactttgcctggaccggggccactaaataccatctgaatggtagaaattcattaaccaacccgggcgtagccatggccaccaacaaggacgacgaggaccagttctttcccatcaacggagtgctggtttttggcaaaacgggggctgccaacaagacaacgctggaaaacgtgctaatgaccagcgaggaggagatcaaaaccaccaatcccgtggctacagaagaatacggtgtggtctccagcaacctgcaatcgtctacggccggaccccagacacagactgtcaacagccagggggctctgcccggcatggtctggcagaaccgggacgtgtacctgcagggtcccatctgggccaaaattcctcacacggacggcaactttcacccgtctcccctgatgggcggatttggactcaaacacccgcctcctcaaattctcatcaaaaacaccccggtacctgctaatcctccagaggtgtttactcctgccaagtttgcctcatttatcacgcagtacagcaccggccaggtcagcgtggagatcgagtgggaactgcagaaagaaaacagcaaacgctggaatccagagattcagtacacctcaaattatgccaagtctaataatgtggaatttgctgtcaacaacgaaggggtttatactgagcctcgccccattggcacccgttacctcacccgtaacctgtaattgcctgttaatcaataaaccggttaattcgtttcagttgaactttggtcaagggcgaattc

SEQ ID NO: 422 - protein, 728 aa, Artificial Sequence
  Description of Artificial Sequence: Synthetic polypeptide
MAADGYLPDWLEDNLSEGIREWWDLKPGAPKPKANQQKQDDGRGLVLPGYKYLGPFNGLDKGEPVNAADAAALEHDKAYDQQLKAGDNPYLRYNHADAEFQERLQEDTSFGGNLGRAVFQAKKRVLEPLGLVEEGAKTAPGKKRPIESPDSSTGIGKKGQQPAKKKLNFGQTGDSESVPDPQPIGEPPAGPSGLGSGTMAAGGGAPMADNNEGADGVGNASGNWHCDSTWLGDRVITTSTRTWALPTYNNHLYKQISSQSGATNDNHFFGYSTPWGYFDFNRFHCHFSPRDWQRLINNNWGFRPRKLRFKLFNIQVKEVTTNDGVTTIANNLTSTIQVFSDSEYQLPYVLGSAHQGCLPPFPADVFMIPQYGYLTLNNGSQSVGRSSFYCLEYFPSQMLRTGNNFEFSYTFEEVPFHSSYAHSQSLDRLMNPLIDQYLYYLARTQSTTGSTRELQFHQAGPNTMAEQSKNWLPGPCYRRQRLSKDIDSNNNSNFAWTGATKYHLNGRNSLTNPGVAMATNKDDEDQFFPINGVLVFGKTGAANKTTLENVLMTSEEEIKTTNPVATEEYGVVSSNLQSSTAGPQTQTVNSQGALPGMVWQNRDVYLQGPIWAKIPHTDGNFHPSPLMGGFGLKHPPPQILIKNTPVPANPPEVFTPAKFASFITQYSTGQVSVEIEWELQKENSKRWNPEIQYTSNYAKSNNVEFAVNNEGVYTEPRPIGTRYLTRNL

SEQ ID NO: 423 - DNA, 3098 bp, Artificial Sequence
  Description of Artificial Sequence: Synthetic polynucleotide
gaattcgccctttctacggctgcgtcaactggaccaatgagaactttcccttcaacgattgcgtcgacaagatggtgatctggtgggaggagggcaagatgacggccaaggtcgtggagtccgccaaggccattctcggcggcagcaaggtgcgcgtggaccaaaagtgcaagtcttccgcccagatcgatcccacccccgtgatcgtcacttccaacaccaacatgtgcgccgtgattgacgggaacagcaccaccttcgagcaccagcagccgttacaagaccggatgttcaaatttgaactcacccgccgtctggagcacgactttggcaaggtgacaaagcaggaagtcaaagagttcttccgctgggcgcaggatcacgtgaccgaggtggcgcatgagttctacgtcagaaagggtggagccaacaagagacccgcccccgatgacgcggataaaagcgagcccaagcgggcctgcccctcagtcgcggatccatcgacgtcagacgcggaaggagctccggtggactttgccgacaggtaccaaaacaaatgttctcgtcacgcgggcatgcttcagatgctgtttccctgcaagacatgcgagagaatgaatcagaatttcaacatttgcttcacgcacgggaccggagactgttcagaatgtttccccggcgtgtcagaatctcaaccggtcgtcagaaagaggacgtatcggaaactctgtgccattcatcatctgctggggcgggctcccgagattgcttgctcggcctgcgatctggtcaacgtggacctggatgactgtgtttctgagcaataaatgacttaaaccaggtatggctgccgatggttatcttccagattggctcgaggacaacctctctgagggcattcgcgagtggtgggacttgaaacctggagccccgaaacccaaagccaaccagcaaaagcaggacgacggccggggtctggtgcttcctggctacaagtacctcggacccttcaacggactcgacaagggagagccggtcaacgcggcggacgcagcggccctcgagcacgacaaggcctacgaccagcagctcaaagcgggtgacaatccgtacctgcggtataaccacgccgacgccgagtttcaggagcgtcttcaagaagatacgtcttttgggggcaacctcgggcgagcagtcttccaggccaagaagcgggttctcgaacctctcggtctggttgaggaaggcgctaagacggctcctggaaagaagagacccatagaatcccccgactcctccacgggcatcggcaagaaaggccagcagcccgctaaaaagaagctcaactttgggcagactggcgactcagagtcagtgcccgaccctcaaccaatcggagaaccccccgcaggcccctctggtctgggatctggtacaatggctgcaggcggtggcgctccaatggcagacaataacgaaggcgccgacggagtgggtaatgcctccggaaattggcattgcgattccacatggctgggcgacagagtcatcaccaccagcacccgcacctgggccctgcccacctacaacaaccacctctacaagcagatatcaagtcagagcggggctaccaacgacaaccacttcttcggctacagcaccccctggggctattttgacttcaacagattccactgccacttctcaccacgtgactggcagcgactcatcaacaacaactggggattccggcccagaaagctgcggttcaagttgttcaacatccaggtcaaggaggtcacgacgaacgacggcgttacgaccatcgctaataaccttaccagcacgattcaggtcttctcggactcggagtaccaactgccgtacgtcctcggctctgcgcaccagggctgcctccctccgttccctgcggacgtgttcatgattcctcagtacggatatctgactctaaacaacggcagtcagtctgtgggacgttcctccttctactgcctggagtactttccttctcagatgctgagaacgggcaataactttgaattcagctacacctttgaggaagtgcctttccacagcagctatgcgcacagccagagcctggaccggctgatgaatcccctcatcgaccagtacctgtactacctggcccggacccagagcactacggggtccacaagggagctgcagttccatcaggctgggcccaacaccatggccgagcaatcaaagaactggctgcccggaccctgttatcggcggcagagactgtcaaaagacatagacagcaacaacaacagtaactttgcctggaccggggccactaaataccatctgaatggtagaaattcattaaccaacccgggcgtagccatggccaccaacaaggacgacgaggaccagttctttcccatcaacggagtgctggtttttggcaaaacgggggctgccaacaagacaacgctggaaaacgtgctaatgaccagcgaggaggagatcaaaaccaccaatcccgtggctacagaagaatacggtgtggtctccagcaacctgcaatcgtctacggccggaccccagacacagactgtcaacagccagggggctctgcccggcatggtctggcagaaccgggacgtgtacctgcagggtcccatctgggccaaaattcctcacacggacggcaactttcacccgtctcccctgatgggcggatttggactcaaacacccgcctcctcaaattctcatcaaaaacaccccggtacctgctaatcctccagaggtgtttactcctgccaagtttgcctcatttatcacgcagtacagcaccggccaggtcagcgtggagatcgagtgggaactgcagaaagagaacagcaaacgctggaatccagagattcagtacacctcaaattatgccaagtctaataatgtggaatttgctgtcaacaacgaaggggtttatactgagcctcgccccattggcacccgttacctcacccgtaacctgtaattacttgttaatcaataaaccggttgattcgtttcagttgaactttggtctctgcgaagggcgaattc

SEQ ID NO: 424 - protein, 685 aa, Artificial Sequence
  Description of Artificial Sequence: Synthetic polypeptide
MAADGYLPDWLEDNLSEGIREWWDLKPGAPKPKANQQKQDDGRGLVLPGYKYLGPFNGLDKGEPVNEADAAALEHDKAYDKQLEQGDNPYLKYNHADAEFQERLQEDTSFGGNLGRAVFQAKKRVLEPLGLVEEGAKTAPGKKRPVEPSPQRSPDSSTGIGKTGQQPAKKRLNFGQTGDSESVPDPQPIGEPPAGPSGLGSGTMAAGGGAPMADNNEGADGVGSSSGNWHCDSTWLGDRVITTSTRTWALPTYNNHLYKQISNGTSGGSTNDNTYFGYSTPWGYFDFNRFHCHFSPRDWQRLINNNWGFRPKRLNFKLFNIQVKEVTQNEGTKTIANNLTSTIQVFTDSEYQLPYVLGSAHQGCLPPFPADVFMIPQYGYLTLNNGSQAVGRSSFYCLEYFPSQMLRTGNNFEFSYQFEDVPFHSSYAHSQSLDRLTNPLIDQYLYYLARTQSTTGSTRGLQFHQAGPNTMAEQSKNWLPGPCYRQQRLSKNIDSNNNSNFAWTGATKYHLNGRNSLTNPGVAMATNKDDEDQFFPINGVLVFGKTGAANKTTLENVLMTSEEEIKTTNPVATEEYGVVSSNLQSSTAGPQTQTVNSQGALPGMVWQNRDVYLQGPIWAKIPHTDGNFHPSPLMGGFGLKHPPPQILIKYTSNYYKSTNVDFAVNTEGTYSEPRPIGTRYLTRNL

SEQ ID NO: 425 - DNA, 2969 bp, Artificial Sequence
  Description of Artificial Sequence: Synthetic polynucleotide
gaattcgccctttctacggctgcgtcaactggaccaatgagaactttcccttcaacgattgcgtcgacaagatggtgatctggtgggaggagggcaagatgacggccaaggtcgtggagtccgccaaggccattctcggcggcagcaaggtgcgcgtggaccaaaagtgcaagtcgtccgcccagatcgaccccacccccgtgatcgtcacctccaacaccaacatgtgcgccgtgattgacgggaacagcaccaccttcgagcaccagcagccgttacaagaccggatgttcaaatttgaactcacccgccgtctggagcacgactttggcaaggtgacaaagcaggaagtcaaagagttcttccgctgggcgcaggatcacgtgaccgaggtggcgcatgagttctacgtcagaaagggtggagccaacaagagacccgcccccgatgacgcggataaaagcgagcccaagcgggcctgcccctcagtcgcggatccatcgacgtcagacgcggaaggagctccggtggactttgccgacaggtaccaaaacaaatgttctcgtcacgcgggcatgcttcagatgctgtttccctgcaagacatgcgagagaatgaatcagaatttcaacatttgcttcacgcacgggaccagagactgttcagaatgtttccccggcgtgtcagaatctcaaccggtcgtcagaaagaggacgtatcggaaactctgtgccattcatcatctgctggggcgggctcccgagattgcttgctcggcctgcgatctggtcaacgtggacctggatgactgtgtttctgagcaataaatgacttaaaccaggtatggctgccgatggttatcttccagattggctcgaggacaacctctctgagggcatccgcgagtggtgggacttgaaacctggagccccgaaacccaaagccaaccagcaaaagcaggacgacggccggggtctggtgcttcctggctacaagtacctcggacccttcaacggactcgacaagggagagccggtcaacgaggcagacgccgcggccctcgagcacgacaaggcctacgacaagcagctcgagcagggggacaacccgtacctcaagtacaaccacgccgacgccgagtttcaggagcgtcttcaagaagatacgtcttttgggggcaacctcgggcgagcagtcttccaggccaagaagcgggttctcgaacctctcggtctggttgaggaaggcgctaagacggctcctggaaagaagagaccggtagagccatcaccccagcgttctccagactcctctacgggcatcggcaagacaggccagcagcccgcgaaaaagagactcaactttgggcagactggcgactcagagtcagtgcccgaccctcaaccaatcggagaaccccccgcaggcccctctggtctgggatctggtacaatggctgcaggcggtggcgctccaatggcagacaataacgaaggcgccgacggagtgggtagttcctcaggaaattggcattgcgattccacatggctgggcgacagagtcatcaccaccagcacccgaacctgggccctccccacctacaacaaccacctctacaagcaaatctccaacgggacatcgggaggaagcaccaacgacaacacctacttcggctacagcaccccctgggggtattttgactttaacagattccactgccacttctcaccacgtgactggcagcgactcatcaacaacaactggggattccggcccaagagactcaacttcaagctcttcaacatccaggtcaaggaggtcacgcagaatgaaggcaccaagaccatcgccaataaccttaccagcacgattcaggtctttacggactcggaataccagctcccgtacgtcctcggctctgcgcaccagggctgcctgcctccgttcccggcggacgtcttcatgattcctcagtacgggtacctgactctgaacaacggcagtcaggccgtgggccgttcctccttctactgcctggagtactttccttctcaaatgctgagaacgggcaacaactttgagttcagctaccagtttgaggacgtgccttttcacagcagctacgcgcacagccaaagcctggaccggctgacgaaccccctcatcgaccagtacctgtactacctggcccggacccagagcactacggggtccacaagggggctgcagttccatcaggctgggcccaacaccatggccgagcaatcaaagaactggctgcccggaccctgttatcggcagcagagactgtcaaaaaacatagacagcaacaacaacagtaactttgcctggaccggggccactaaataccatctgaatggtagaaattcattaaccaacccgggcgtagccatggccaccaacaaggacgacgaggaccagttctttcccatcaacggagtgctggtttttggcaaaacgggggctgccaacaagacaacgctggaaaacgtgctaatgaccagcgaggaggagatcaaaaccaccaatcccgtggctacagaagaatacggtgtggtctccagcaacctgcaatcgtctacggccggaccccagacacagactgtcaacagccagggggctctgcccggcatggtctggcagaaccgggacgtgtacctgcagggtcccatctgggccaaaattcctcacacggacggcaactttcacccgtctcccctgatgggcggatttggactcaaacacccgcctcctcaaattctcatcaagtatacttccaactactacaaatctacaaatgtggactttgctgtcaatactgagggtacttattcagagcctcgccccattggcacccgttacctcacccgtaacctgtaattgcctgttaatcaataaaccggttaattcgtttcagttgaactttggtctctgcgaagggcgaattc

SEQ ID NO: 426 - protein, 733 aa, Artificial Sequence
  Description of Artificial Sequence: Synthetic polypeptide
MAADGYLPDWLEDNLSEGIREWWDLKPGAPKPKANQQKQDDGRGLVLPGYKYLGPFNGLDKGEPVNAADAAALEHDKAYDQQLKAGDNPYLRYNHADAEFQERLQEDTSFGGNLGRAVFQAKKRVLEPLGLVEEGAKTAPGKKRPIESPDSSTGIGKKGQQPAKKKLNFGQTGDSESVPDPQPIGEPPAGPSGLGSGTMAAGGGAPMADNNEGADGVGSSSGNWHCDSTWLGDRVITTSTRTWALPTYNNHLYKQISNGTSGGSTNDNTYFGYSTPWGYFDFNRFHCHFSPRDWQRLINNNWGFRPKRLNFKLFNIQVKEVTQNEGTKTIANNLTSTIQVFTDSEYQLPYVLGSAHQGCLPPFPADVFMIPQYGYLTLNNGSQAVGRSSFYCLEYFPSQMLRTGNNFEFSYQFEDVPFHSSYAHSQSLDRLMNPLIDQYLYYLSRTQSTGGTAGTQQLLFSQAGPNNMSAQAKNWLPGPCYRQQRVSTTVSQNNNSNFAWTGATKYHLNGRDSLVNPGVAMATHKGDEERFFPSSGVLMFGKQGAGKDNVDYSSVMLTSEEEIKTTNPVATEQYGVVADNLQQQNAAPIVGAVNSQGALPGMVWQNRDVYLQGPIWAKIPHTDGNFHPSPLMGGFGLKHPPPQILIKNTPVPADPPTTFSQAKLASFITQYSTGQVSVEIEWELQKENSKRWNPEIQYTSNYYKSTNVDFAVNTEGTYSEPRPIGTRYLTRSL

SEQ ID NO: 427 - DNA, 3113 bp, Artificial Sequence
  Description of Artificial Sequence: Synthetic polynucleotide
gaattcgccctttctacggctgcgtcaactggaccaatgagaactttcccttcaacgattgcgtcgacaagatggtgatctggtgggaggagggcaagatgacggccaaggtcgtggagtccgccaaggccattctcggcggcagcaaggtgcgcgtggaccaaaagtgcaagtcgtccgcccagatcgatcccacccccgtgatcgtcacttccaacaccaacatgtgcgccgtgattgacgggaacagcaccaccttcgagcaccagcagccgttacaagaccggatgttcaaatttgaactcacccgccgtctggagcatgactttggcaaggtgacaaagcaggaagtcaaagagttcttccgctgggcgcaggatcacgtgaccgaggtggcgcatgagttctacgtcagaaagggtggagccaacaagagacccgcccccgatgacgcggataaaagcgagcccaagcgggcctgcccctcagtcgcggatccatcgacgtcagacgcggaaggagctccggtggactttgccgacaggtaccaaaacaaatgttctcgtcacgcgggcatgcttcagatgctgtttccctgcaagacatgcgagagaatgaatcagaatttcaacatttgcttcacgcacgggaccagagactgttcagaatgtttccccggcgtgtcagaatctcaaccggtcgtcagaaagaggacgtatcggaaactctgtgccattcatcatctgctggggcgggctcccgagattgcttgctcggcctgcgatctggtcaacgtggacctggatgactgtgtttctgagcaataaatgacttaaaccaggtatggctgccgatggttatcttccagattggctcgaggacaacctctctgagggcattcgcgagtggtgggacttgaaacctggagccccgaaacccaaagccaaccagcaaaagcaggacgacggccggggtctggtgcttcctggctacaagtacctcggacccttcaacggactcgacaagggggagcccgtcaacgcggcggacgcagcggccctcgagcacgacaaggcctacgaccagcagctcaaagcgggtgacaatccgtacctgcggtataaccacgccgacgccgagtttcaggagcgtcttcaagaagatacgtcttttgggggcaacctcgggcgagcagtcttccaggccaagaagcgggttctcgaacctctcggtctggttgaggaaggcgctaagacggctcctggaaagaagagacccatagaatcccccgactcctccacgggcatcggcaagaaaggccagcagcccgctaaaaagaagctcaactttgggcagactggcgactcagagtcagtgcccgaccctcaaccaatcggagaaccccccgcaggcccctctggtctgggatctggtacaatggctgcaggcggtggcgctccaatggcagacaataacgaaggcgccgacggagtgggtagttcctcaggaaattggcattgcgattccacatggctgggcgacagagtcatcaccaccagcacccgaacctgggccctccccacctacaacaaccacctctacaagcaaatctccaacgggacatcgggaggaagcaccaacgacaacacctacttcggctacagcaccccctgggggtattttgactttaacagattccactgccacttctcaccacgtgactggcagcgactcatcaacaacaactggggattccggcccaagagactcaacttcaagctcttcaacatccaggtcaaggaggtcacgcagaatgaaggcaccaagaccatcgccaataaccttaccagcacgattcaggtctttacggactcggaataccagctcccgtacgtcctcggctctgcgcaccagggctgcctgcctccgttcccggcggacgtcttcatgattcctcagtacgggtacctgactctgaacaacggcagtcaggccgtgggccgttcctccttctactgcctggagtactttccttctcaaatgctgagaacgggcaacaactttgagttcagctaccagtttgaggacgtgccttttcacagcagctatgcgcacagccaaagcctggaccggctgatgaaccccctcatcgaccagtacctgtactacctgtctcggactcagtccacgggaggtaccgcaggaactcagcagttgctattttctcaggccgggcctaataacatgtcggctcaggccaaaaactggctacccgggccctgctaccggcagcaacgcgtctccacgacagtgtcgcaaaataacaacagcaactttgcttggaccggtgccaccaagtatcatctgaatggcagagactctctggtaaatcccggtgtcgctatggcaacgcacaagggcgacgaagagcgattttttccatccagcggagtcttgatgtttgggaaacagggagctggaaaagacaacgtggactatagcagcgttatgctaaccagtgaggaagaaatcaaaaccaccaacccagtggccacagaacagtacggcgtggtggccgataacctgcaacagcaaaacgccgctcctattgtaggggccgtcaacagtcaaggagccttacctggcatggtctggcagaaccgggacgtgtacctgcagggtcctatctgggccaagattcctcacacggacggcaactttcatccttcgccgctgatgggaggctttggactgaaacacccgcctcctcagatcctgattaagaatacacctgttcccgcggatcctccaactaccttcagtcaagccaagctggcgtcgttcatcacgcagtacagcaccggacaggtcagcgtggaaattgaatgggagctgcagaaagagaacagcaagcgctggaacccagagattcagtatacttccaactactacaaatctacaaatgtggactttgctgtcaatactgagggtacttattcagagcctcgccccattggcacccgttacctcacccgtagcctgtaattgcctgttaatcaataaaccggttgattcgtttcagttgaactttggtctctgcgaagggcgaattc

SEQ ID NO: 428 - protein, 738 aa, Artificial Sequence
  Description of Artificial Sequence: Synthetic polypeptide
MAADGYLPDWLEDNLSEGIREWWDLKPGAPKPKANQQKQDDGRGLVLPGYKYLGPFNGLDKGEPVNAADAAALEHDKAYDQQLKAGDNPYLRYNHADAEFQERLQEDTSFGGNLGRAVFQAKKRVLEPLGLVEEGAKTAPGKKRPVEPSPQRSPDSSTGIGKTGQQPAKKRLNFGQTGDSESVPDPQPIGEPPAGPSGLGSGTMAAGGGAPMADNNEGADGVGSSSGNWHCDSTWLGDRVITTSTRTWALPTYNNHLYKQISNGTSGGSTNDNTYFGYSTPWGYFDFNRFHCHFSPRDWQRLINNNWGFRPKRLNFKLFNIQVKEVTQNEGTKTIANNLTSTIQVFTDSEYQLPYVLGSAHQGCPPPFPADVFMIPQYGYLTLNNGSQAVGRSSFYCLEYFPSQMRRTGNNFEFSYQFEDVPFHSSYAHSQSLDRLMNPLIDQYLYYLSRTQSTGGTAGTQQLLFSQAGPNNMSAQAKNWLPGPCYRQQRVSTTLSQNNNSNFAWTGATKYHLNGRDSLVNPGVAMATHKDDEERFFPSSGVLMFGKQGAGKDNVDYSSVMLTSEEEIKTTNPVATEQYGVVADNLQQQNAAPIVGAVNSQGALPGMVWQNRDVYLQGPIWAKIPHTDGNFHPSPLMGGFGLKHPPPQILIKNTPVPADPPTTFSQAKLASFITQYSTGQVSVEIEWELQKENSKRWNPEIQYTSNYYKSTNVDFAVNTEGTYSEPRPIGTRYLTRNL

SEQ ID NO: 429 - DNA, 3128 bp, Artificial Sequence
  Description of Artificial Sequence: Synthetic polynucleotide
gaattcgccctttctacggctgcgtcaactggaccaatgagaactttcccttcaacgattgcgtcgacaagatggtgatctggtgggaggagggcaagatgacggccaaggtcgtggagtccgccaaggccattctcggcggcagcaaggtgcgcgtggaccaaaagtgcaagtcgtccgcccagatcgaccccacccccgtgatcgtcacctccaacaccaacatgtgcgccgtgattgacgggaacagcaccaccttcgagcaccagcagccgttgcaggaccggatgttcaaatttgaactcacccgccgtctggagcatgactttggcaaggtgacaaagcaggaagtcaaagagttcttccgctgggcgcaggatcacgtgaccgaggtggcgcatgagttctacgtcagaaagggtggagccaacaagagacccgcccccgatgacgcggataaaagcgagcccaagcgggcctgcccctcagtcgcggatccatcgacgtcagacgcggaaggagctccggtggactttgccgacaggtaccaaaacaaatgttctcgtcacgcgggcatgcttcagatgctgtttccctgcaagacatgcgagagaatgaatcagaatttcaacatttgcttcacgcgcgggaccagagactgttcagaatgtttcccgggcgtgtcagaatctcaaccggtcgtcagaaagaggacgtatcggaaactctgtgccattcatcatctgctggggcgggctcccgagattgcttgctcggcctgcgatctggtcaacgtggacctggatgactgtgtttctgagcaataaatgacttaaaccaggtatggctgccgatggttatcttccagattggctcgaggacaacctctctgagggcattcgcgagtggtgggacttgaaacctggagccccgaaacccaaagccaaccagcaaaagcaggacgacggccggggtctggtgcttcctggctacaagtacctcggacccttcaacggactcgacaagggggagcccgtcaacgcggcggacgcagcggccctcgagcacgacaaggcctacgaccagcagctcaaagcgggtgacaatccgtacctgcggtataaccacgccgacgccgagtttcaggagcgtctgcaagaagatacgtcttttgggggcaacctcgggcgagcagtcttccaggccaagaagcgggttctcgaacctctcggtctggttgaggaaggcgctaagacggctcctggaaagaagagaccggtagagccatcaccccagcgttctccagactcctctacgggcatcggcaagacaggccagcagcccgcgaaaaagagactcaactttgggcagactggcgactcagagtcagtgcccgaccctcaaccaatcggagaaccccccgcaggcccctctggtctgggatctggtacaatggctgcaggcggtggcgctccaatggcagacaataacgaaggcgccgacggagtgggtagttcctcaggaaattggcattgcgattccacatggctgggcgacagagtcatcaccaccagcacccgaacctgggccctccccacctacaacaaccacctctacaagcaaatctccaacgggacatcgggaggaagcaccaacgacaacacctacttcggctacagcaccccctgggggtattttgactttaacagattccactgccacttctcaccacgtgactggcagcgactcatcaacaacaactggggattccggcccaagagactcaacttcaagctcttcaacatccaggtcaaggaggtcacgcagaatgaaggcaccaagaccatcgccaataaccttaccagcacgattcaggtctttacggactcggaataccagctcccgtacgtcctcggctctgcgcaccagggctgcccgcctccgttcccggcggacgtcttcatgattcctcagtacgggtacctgactctgaacaacggcagtcaggccgtgggccgttcctccttctactgcctggagtactttccttctcaaatgcggagaacgggcaacaactttgagttcagctaccagtttgaggacgtgccttttcacagcagctacgcgcatagccaaagcctggaccggctgatgaaccccctcatcgaccagtacctgtactacctgtctcggactcagtccacgggaggtaccgcaggaactcagcagttgctattttctcaggccgggcctaataacatgtcggctcaggccaaaaactggctacccgggccctgctaccggcagcaacgcgtctccacgacactgtcgcaaaataacaacagcaactttgcttggaccggtgccaccaagtatcatctgaatggcagagactctctggtaaatcccggtgtcgctatggcaacgcacaaggacgacgaagagcgattttttccatccagcggagtcttgatgtttgggaaacagggagctggaaaagacaacgtggactatagcagcgttatgctaaccagtgaggaagaaatcaaaaccaccaacccagtggccacagaacagtacggcgtggtggccgataacctgcaacagcaaaacgccgctcctattgtaggggccgtcaacagtcaaggagccttacctggcatggtctggcagaaccgggacgtgtacctgcagggtcctatctgggccaagattcctcacacggacggcaactttcatccttcgccgctgatgggaggctttggactgaaacacccgcctcctcagatcctgattaagaatacacctgttcccgcggatcctccaactaccttcagtcaagccaagctggcgtcgttcatcacgcagtacagcaccggacaggtcagcgtggaaattgaatgggagctgcagaaagagaacagcaagcgctggaacccagagattcagtatacttccaactactacaaatctacaaatgtggactttgctgtcaatactgagggtacttattcagagcctcgccccattggcacccgttacctcacccgtaacctgtaattgcctgttaatcaataaaccggttaattcgtttcagttgaactttggtctctgcgaagggcgaattc

SEQ ID NO: 430 - protein, 738 aa, Artificial Sequence; identical to SEQ ID NO: 418
  Description of Artificial Sequence: Synthetic polypeptide

SEQ ID NO: 431 - DNA, 1933 bp, Artificial Sequence
  Description of Artificial Sequence: Synthetic polynucleotide
  modified_base (1302)..(1302): a, c, t, or g
caaggcctacgaccagcagctcaaagcgggtgacaatccgtacctgcggtataaccacgccgacgccgagtttcaggagcgtcttcaagaagatacgtcttttgggggcaacctcgggcgagcagtcttccaggccaaaaagcgggttctcgaacctcttggtctggttgagacgccagctaagacggcacctggaaagaagcgaccggtagactcgccagactccacctcgggcatcggcaagaaaggccagcagcccgcgaaaaagagactcaactttgggcagactggcgactcagagtcagtccccgaccctcaaccaatcggagaaccaccagcaggcccctctggtctgggatctggtacaatggctgcaggcggtggcgcaccaatggctgacaataacgagggcgccgacggagtgggtaatgcctcaggaaattggcattgcgattccacatggctgggcgacagagtcatcaccaccagcacccgaacctgggccctgcccacctacaacaaccacctctacaagcaaatctccagtcagtcagcagggagcaccaacgataacgtctatttcggctacagcaccccctgggggtattttgacttcaacagattccattgccacttctcaccacgtgactggcagcgacttatcaacaacaactggggattccggcccaagaagctcaacttcaagctcttcaacatccaggtcaaggaggtcacgacgaatgacggtgtcacaaccatcgctaataaccttaccagcacggttcaggtcttttcggactcggaatatcaactgccgtacgtcctcggctccgcgcaccagggctgcctgcctccgttcccggcagacgtgttcatgattccgcagtacggatacctgactctgaacaatggcagccaatcggtaggccgttcctccttctactgcctggagtactttccttctcagatgctgagaacgggcaacaacttcacctttagctacaccttcgaggacgtgcctttccacagcagctacgcgcacagccagagtctggaccggctgatgaatcccctcatcgaccagtacctgtactacttggccagaacacagagcaacgcaggaggtactgctggcaatcgggaactgcagttttatcagggcggacctaccaccatggccgaacaagcaaagaactggctgcccggaccttgcttccggcaacagagagtatccaagacgctggatcaaaataacaacagcaactttgcctggactggtgccacaaaataccatttaaatgnaagaaattcattggttaatcccggtgtcgccatggcaacccacaaggacgacgaggaacgcttcttcccttcgagcggagttctaatttttggcaaaactggagcagctaataaaactacattagaaaacgtgctcatgacaaatgaagaagaaattcgtcctaccaacccggtagctaccgaggaatacgggattgtaagcagcaacttgcaggcggctagcaccgcagcccagacacaagttgttaacaaccagggagccttacctggcatggtctggcagaaccgggacgtgtacctgcaaggtcccatttgggccaagattcctcacacggacggcaactttcacccgtctcctctaatgggtggctttggactgaaacacccgcctccccagatcctgatcaaaaacacaccggtacctgctaatcctccagaagtgtttactcctgccaagtttgcttccttcatcacgcagtacagcaccgggcaagtcagcgttgagatcgagtgggagctgcagaaagagaacagcaagcgctggaacccagagattcagtacacctccaactttgacaaacagactggagtggactttgctgttgacagccagggtgtttactctgagcct

SEQ ID NO: 432 - protein, 733 aa, Artificial Sequence
  Description of Artificial Sequence: Synthetic polypeptide
MAADGYLPDWLEDNLSEGIREWWDLKPGAPKPKANQQKQDDGRGLVLPGYKYLGPFNGLDKGEPVNAADAAALEHDKAYDQQLKAGDNPYLRYNHADAEFQERLQEDTSFGGNLGRAVFQAKKRVLEPLGLVEEGAKTAPGKKRPLESPQEPDSSSGIGKKGKQPAKKRLNFEEDTGAGDGPPEGSDTSAMSSDIEMRAAPGGNAVDAGQGSDGVGNASGDWHCDSTWSEGKVTTTSTRTWVLPTYNNHLYLRLGTTSNSNTYNGFSTPWGYFDFNRFHCHFSPRDWQRLINNNWGLRPKAMRVKIFNIQVKEVTTSNGETTVANNLTSTVQIFADSSYELPYVMDAGQEGSLSPFPNDVFMVPQYGYCGIVTGENQNQTDRNAFYCLEYFPSQMLRTGNNFEMAYNFGKVPFHSMYAYSQSPDRLMNPLLDQYLWHLQSTTSGETLNQGNAATTFGKIRSGDFAFYRKNWLPGPCVKQQRLSKTASQNYKIPASGGNALLKYDTHYTLNNRWSNIAPGPPMATAGPSDGDFSNAQLIFPGPSVTGNTTTSANNLLFTSEEEIAATNPRDTDMFGQIADNNQNATTAPITGNVTAMGVLPGMVWQNRDIYYQGPIWAKIPHADGHFHPSPLIGGFGLKHPPPQIFIKNTPVPANPATTFTAARVDSFITQYSTGQVAVQIEWEIEKERSKRWNPEVQFTSNYGNQSSMLWAPDTTGKYTEPRVIGSRYLTNHL

SEQ ID NO: 433 - DNA, 3105 bp, Artificial Sequence
  Description of Artificial Sequence: Synthetic polynucleotide
gaattcgcccttgctgcgtcaactggaccaatgagaactttcccttcaacgattgcgtcgacaagatggtgatctggtgggaggagggcaagatgaccgccaaggtcgtggagtccgccaaggccattctgggcggaagcaaggtgcgcgtggaccaaaagtgcaagtcatcggcccagatcgaccccacgcccgtgatcgtcacctccaacaccaacatgtgcgccgtgatcgacgggaacagcaccaccttcgagcaccagcagccgctgcaggaccgcatgttcaagttcgagctcacccgccgtctggagcacgactttggcaaggtgaccaagcaggaagtcaaagagttcttccgctgggctcaggatcacgtgactgaggtggcgcatgagttctacgtcagaaagggcggagccaccaaaagacccgcccccagtgacgcggatataagcgagcccaagcgggcctgcccctcagttgcggagccatcgacgtcagacgcggaagcaccggtggactttgcggacaggtaccaaaacaaatgttctcgtcacgcgggcatgcttcagatgctgtttccctgcaagacatgcgagagaatgaatcagaatttcaacgtctgcttcacgcacggggtcagagactgctcagagtgcttccccggcgcgtcagaatctcaacccgtcgtcagaaaaaagacgtatcagaaactgtgcgcgattcatcatctgctggggcgggcacccgagattgcgtgttcggcccgcgatctcgtcaacgtggacttggatgactgtgtttctgagcaataaatgacttaaaccaggtatggctgctgacggttatcttccagattggctcgaggacaacctctctgagggcattcgcgagtggtgggacctgaaacctggagcccccaagcccaaggccaaccagcagaagcaggacgacggccggggtctggtgcttcctggctacaagtacctcggacccttcaacggactcgacaagggggagcccgtcaacgcggcggacgcagcggccctcgagcacgacaaggcctacgaccagcagctcaaagcgggtgacaatccgtacctgcggtataaccacgccgacgccgagtttcaggagcgtctgcaagaagatacgtcttttgggggcaacctcgggcgagcagtcttccaggccaagaagagggtactcgaacctctgggcctggttgaagaaggtgctaagacggctcctggaaagaagagaccgttagagtcaccacaagagcccgactcctcctcaggaatcggcaaaaaaggcaaacaaccagccaaaaagagactcaactttgaagaggacactggagccggagacggaccccctgaaggatcagataccagcgccatgtcttcagacattgaaatgcgtgcagcaccgggcggaaatgctgtcgatgcgggacaaggttccgatggagtgggtaatgcctcgggtgattggcattgcgattccacctggtctgagggcaaggtcacaacaacctcgaccagaacctgggtcttgcccacctacaacaaccacttgtacctgcggctcggaacaacatcaaacagcaacacctacaacggattctccaccccctggggatactttgactttaacagattccactgtcacttctcaccacgtgactggcaaagactcatcaacaacaactggggactacgaccaaaagccatgcgcgttaaaatcttcaatatccaagttaaggaggtcacaacgtcgaacggcgagactacggtcgctaataaccttaccagcacggttcagatatttgcggactcgtcgtatgagctcccgtacgtgatggacgctggacaagagggaagtctgtctcctttccccaatgacgtcttcatggtgcctcaatatggctactgtggcattgtgactggcgaaaatcagaaccagacggacagaaatgctttctactgcctggagtattttccttcacaaatgctgagaactggcaataactttgaaatggcttacaactttgggaaggtgccgttccactcaatgtatgcttacagccagagcccggacagactgatgaatcccctcctggaccagtacctgtggcacttacagtcgaccacctctggagagactctgaatcaaggcaatgcagcaaccacatttggaaaaatcaggagtggagactttgccttttacagaaagaactggctgcctgggccttgtgttaaacagcagagactctcaaaaactgccagtcaaaattacaagattcctgccagcgggggcaacgctctgttaaagtatgacacccactataccttaaacaaccgctggagcaacatagcgcctggacctccaatggcaacagctggaccttcagatggggacttcagcaacgcccagctcatcttccctggaccatcagtcaccggaaacacaacaacctcagcaaacaatctgttgtttacatcagaagaagaaattgctgccaccaacccaagagacacggacatgtttggtcagattgctgacaataatcagaatgctacaactgctcccataaccggcaacgtgactgctatgggagtgcttcctggcatggtgtggcaaaacagagacatttactaccaagggccaatttgggccaagatcccacacgcggacggacattttcatccttcaccgctaattggcggttttggactgaaacatccgcctccccagatatttatcaaaaacacccccgtacctgccaatcctgcgacaaccttcactgcagccagagtggactctttcatcacacaatacagcaccggccaggtcgctgttcagattgaatgggaaatcgaaaaggaacgctccaaacgctggaatcctgaagtgcagtttacttcaaactatgggaaccagtcttctatgttgtgggctcccgatacaactgggaagtatacagagccgcgggttattggctctcgttatttgactaatcatttgtaactgcctagttaatcaataaaccgtgtgattcgtttcagttgaactttggtctctgcgaagggcgaattc

SEQ ID NO: 434 - protein, 733 aa, Artificial Sequence
  Description of Artificial Sequence: Synthetic polypeptide
MAADGYLPDWLEDNLSEGIREWWDLKPGAPKPKANQQKQDDGRGLVLPGYKYLGPFNGLDKGEPVNAADAAALEHDKAYDQQLKAGDNPYLRYNHADAEFQERLQEDTSFGGNLGRAVFQAKKRVLEPLGLVEEGAKTAPGKKRPLESPQEPDSSSGIGKKGKQPAKKRLNFEEDTGAGDGPPEGSDTSAMSSDIEMRAAPGGNAVDAGQGSDGVGNASGDWHCDSTWSEGKVTTTSTRTWVLPTYNNHLYLRLGTTSNSNTYNGFSTPWGYFDFNRFHCHFSPRDWQRLINNNWGLRPKAMRVKIFNIQVKEVTTSNGETTVANNLTSTVQIFADSSYELPYVMDAGQEGSLPPFPNDVFMVPQYGYCGIVTGENQNQTDRNAFYCLEYFPSQMLRTGNNFEMAYNFEKVPFHSMYAHSQSLDRLMNPLLDQYLWHLQSTTSGETLNQGNAATTFGKIRSGDFAFYRKNWLPGPCVKQQRFSKTASQNYKIPASGGNALLKYDTHYTLNNRWSNIAPGPPMATAGPSDGDFSNAQLIFPGPSVTGNTTTSANNLLFTSEEEIAATNPRDTDMFGQIADNNQNATTAPITGNVTAMGVLPGMVWQNRDIYYQGPIWAKIPHADGHFHPSPLIGGFGLKHPPPQIFIKNTPVPANPATTFTAARVDSFITQYSTGQVAVQIEWEIEKERSKRWNPEVQFTSNYGNQSSMLWAPDTTGKYTEPRVIGSRYLTNHL

SEQ ID NO: 435 - DNA, 3105 bp, Artificial Sequence
  Description of Artificial Sequence: Synthetic polynucleotide
gaattcgcccttgctgcgtcaactggaccaatgagaactttcccttcaacgattgcgtcgacaagatggtgatctggtgggaggagggcaagatgaccgccaaggtcgtggagtccgccaaggccattctgggcggaagcaaggtgcgcgtggaccaaaagtgcaagtcatcggcccagatcgaccccacgcccgtgatcgtcacctccaacaccaacatgtgcgccgtgatcgacgggaacagcaccaccttcgagcaccagcagccgctgcaggaccgcatgttcaagttcgagctcacccgccgtctggagcacgactttggcaaggtgaccaagcaggaagtcaaagagttcttccgctgggctcaggatcacgtgactgaggtggcgcatgagttctacgtcagaaagggcggagccaccaaaagacccgcccccagtgacgcggatataagcgagcccaagcgggcctgcccctcagttgcggagccatcgacgtcagacgcggaagcaccggtggactttgcggacaggtaccaaaacaaatgttctcgtcacgcgggcatgcttcagatgctgtttccctgcaagacatgcgagagaatgaatcagaatttcaacgtctgcttcacgcacggggtcagagactgctcagagtgcttccccggcgcgtcagaatctcaacccgtcgtcagaaaaaagacgtatcagaaactgtgcgcgattcatcatctgctggggcgggcacccgagattgcgtgttcggcctgcgatctcgtcaacgtggacttggatgactgtgtttctgagcaataaatgacttaaaccaggtatggctgctgacggttatcttccagattggctcgaggacaacctctctgagggcattcgcgagtggtgggacctgaaacctggagcccccaagctcaaggccaaccagcagaagcaggacgacggccggggtctggtgcttcctggctacaagtacctcggacccttccacggactcgacaagggggagcccgtcaacgcggcggacgcagcggccctcgagcacgacaaggcctacgaccagcagctcaaagcgggtgacaatccgtacctgcggtataaccacgccgacgccgagtttcaggagcgtctgcaagaagatacgtcttttgggggcaacctcgggcgagcagtcttccaggccaagaagagggtactcgaaccactgggcctggttgaagaaggtgctaagacggctcctggaaagaagagaccgttagagtcaccacaagagcccgactcctcctcaggaatcggcaaaaaaggcaaacaaccagccaaaaagagactcaactttgaagaggacactggagccggagacggaccccctgaaggatcagataccagcgccatgtcttcagacattgaaatgcgtgcagcaccgggcggaaatgctgtcgatgcgggacaaggttccgatggagtgggtaatgcctcgggtgattggcattgcgattccacctggtctgagggcaaggtcacaacaacctcgaccagaacctgggtcttgcccacctacaacaaccacttgtacctgcggctcggaacaacatcaaacagcaacacctacaacggattctccaccccctggggatactttgactttaacagattccactgtcacttctcaccacgtgactggcaaagactcatcaacaacaactggggactacgaccaaaagccatgcgcgttaaaatcttcaatatccaagttaaggaggtcacaacgtcgaacggcgagactacggtcgctaataaccttaccagcacggttcagatatttgcggactcgtcgtatgagctcccgtacgtgatggacgctggacaagagggaagtctgcctcctttccccaatgacgtcttcatggtgcctcaatatggctactgtggcattgtgactggcgaaaatcagaaccagacggacagaaatgctttctactgcctggagtattttccttcacaaatgctgagaactggcaataactttgaaatggcttacaactttgagaaggtgccgttccactcaatgtatgctcacagccagagcctggacagactgatgaatcccctcctggaccagtacctgtggcacttacagtcgaccacctctggagagactctgaatcaaggcaatgcagcaaccacatttggaaaaatcaggagtggagactttgccttttacagaaagaactggctgcctgggccttgtgttaaacagcagagattctcaaaaactgccagtcaaaattacaagattcctgccagcgggggcaacgctctgttaaagtatgacacccactataccttaaacaaccgctggagcaacatagcgcctggacctccaatggcaacagctggaccttcagatggggacttcagcaacgcccagctcatcttccctggaccatcagtcaccggaaacacaacaacctcagcaaacaatctgttgtttacatcagaaggagaaattgctgccaccaacccaagagacacggacatgtttggtcagattgctgacaataatcagaatgctacaactgctcccataaccggcaacgtgactgctatgggagtgcttcctggcatggtgtggcaaaacagagacatttactaccaagggccaatttgggccaagatcccacacgcggacggacattttcatccttcaccgctaattggcggttttggactgaaacatccgcctccccagatatttatcaaaaacacccccgtacctgccaatcctgcgacaaccttcactgcagccagagtggactctttcatcacacaatacagcaccggccaggtcgctgttcagattgaatgggaaatcgaaaaggaacgctccaaacgccggaatcctgaagtgcagtttacttcaaactatgggaaccagtcttctatgttgtgggctcccgatacaactgggaagtatacagagccgcgggttattggctctcgttatttgactaatcatttgtaactgcctagttaatcaataaaccgtgtgattcgtttcagttgaactttggtctctgcgaagggcgaattc

SEQ ID NO: 436 - protein, 733 aa, Artificial Sequence
  Description of Artificial Sequence: Synthetic polypeptide
MAADGYLPDWLEDNLSEGIREWWDLKPGAPKPKANQQKQDDGRGLVLPGYEYLGPFNGLDKGEPVNAADAAALEHDKAYDQQLKAGDNPYLRYNHADAEFQERLQEDTSFGGNLGRAVFQAKKRVLEPLGLVEEGAKTAPGKKRPLESPQEPDSSSGIGKKGKQPAKKRLNFEEDTGAGDGPPEGSDTSAMSSDIEMRAAPGGNAVDAGQGSDGVGNASGDWHCDSTWSEGKVTTTSTRTWVLPTYNNHLYLRLGTTSNSNTYNGFSTPWGYFDFNRFHCHFSPRDWQRLINNNWGLRPKAMRVKIFNIQVKEVTTSNGETTVANNLTSTVQIFADSSYELPYVMDAGQEGSLPPFPNDVFMVPQYGYCGIVTGENQNQTDRNAFYCLEYFPSQMLRTGNNFETAYNFEKVPFHSMYAHSQSLDGLMNPLLDQYLWHLQSTTSGETLNQGNAATTFGKIRSGDFAFYRKNWLPGPCVKQQRFSKTASQNYKIPASGGNALLKYDTHYTLNNRWSNIAPGPPMATAGPSDGDFSNAQLIFPGPSVTGNTTTSANNLLFTSEEEIAATNPRDTDMFGQIADNNQNATTAPITGNVTAMGVLPGMVWQNRDIYYQGPIWAKIPHADGHFHPSPLIGGFGLKHPPPQIFIKNTPVPAYPATTFTAARVDSFITQYSTGQVAVQIEWEIEKERSKRWNPEVQFTSNCGNQSSMLWAPDTTGKYTEPRVIGSRYLTNHL

SEQ ID NO: 437 - DNA, 3105 bp, Artificial Sequence
  Description of Artificial Sequence: Synthetic polynucleotide
gaattcgcccttcgcagagaccaaagttcaactgaaacgaatcacacggtttattgattaactaggcagttacaaatgattagtcaaataacgagagccaataacccgcggctctgtatacttcccagttgtatcgggagcccacaacatagaagactggttcccacagtttgaagtaaactgcacttcaggattccagcgtttggagcgttccttttcgatttcccattcaatctgaacagcgacctggccggtgctgtattgtgtgatgaaagagtccactctggctgcagtgaaggttgtcgcaggataggcaggtacgggggtgtttttgataaatatctggggaggcggatgtttcagtccaaaaccgccaattagcggtgaaggatgaaaatgtccgtccgcgtgtgggatcttggcccaaattggcccttggtagtaaatgtctctgttttgccacaccatgccaggaagcactcccatagcagtcacgttgccggttatgggagcagttgtagcattctgattattgtcagcaatctgaccaaacatgtccgtgtctcttgggttggtggcagcaatttcttcttctgatgtaaacaacagattgtttgctgaggttgttgtgtttccggtgactgatggtccagggaagatgagctgggcgttgctgaagtccccatctgaaggtccagctgttgccattggaggtccaggcgctatgttgctccagcggttgtttaaggtatagtgggtgtcatactttaacagagcgttgcccccgctggcaggaatcttgtaattttgactggcagtttttgagaatctctgctgtttaacacaaggcccaggcagccagttctttctgtaaaaggcaaagtctccactcctgatttttccaaatgtggttgctgcattgccttgattcagagtctctccagaggtggtcgactgtaagtgccacaggtactggtccaggaggggattcatcagtccgtccaggctctggctgtgagcatacattgagtggaacggcaccttctcaaagttgtaagccgtttcaaagttattgccagttctcagcatttgtgaaggaaaatactccaggcagtagaaagcatttctgtccgtctggttctgattttcgccagtcacaatgccacagtagccatattgaggcaccatgaagacgtcattggggaaaggaggcagacttccctcttgtccagcgtccatcacgtacgggagctcatacgacgagtccgcaaatatctgaaccgtgctggtaaggttattagcgaccgtagtctcgccgttcgacgttgtgacctccttaacttggatattgaagattttaacgcgcatggcttttggtcgtagtccccagttgttgttgatgagtctttgccagtcacgtggtgagaagtgacagtggaatctgttaaagtcaaagtatccccagggggtggagaatccgttgtaggtgttgctgtttgatgttgttccgagccgcaggtacaagtggttgttgtaggtgggcaagacccaggttctggtcgaggttgttgtgaccttgccctcagaccaggtggaatcgcaatgccaatcacccgaggcattacccactccatcggaaccttgtcccgcatcgacagcatttccgcccggtgctgcacgcatttcaatgtctgaagacatggcgctggtatctgatccttcagggggtccgtctccggctccagtgtcctcttcaaagttgagtctctttttggctggttgtttgccttttttgccgattcctgaggaggagtcgggctcttgtggtgactctaacggtctcttctttccaggagccgtcttagcaccttcttcaaccaggcccagaggttcgagtaccctcttcttggcctggaagactgctcgcccgaggttgcccccaaaagacgtatcttcttgcagacgctcctgaaactcggcgtcggcgtggttataccgcaggtacggattgtcacccgctttgagctgctggtcgtaggccttgtcgtgctcgagggccgctgcgtccgccgcgttgacgggctcccccttgtcgagtccgttgaagggtccgaggtactcgtagccaggaagcaccagaccccggccgtcgtcctgcttctgctggttggccttgggcttgggggctccaggtttcaggtcccaccactcgcgaatgccctcagagaggttgtcctcgagccaatctggaagataaccgtcagcagccatacctggtttaagtcatttattgctcagaaacacagtcatccaagtccacgttgacgagatcgcaggccgaacacgcaatctcgggtgcccgccccagcagatgatgaatcgcgcacagtttctgatacgtcttttttctgacgacgggttgagattctgacgcgccggggaagcactctgagcagtctctgaccccgtgcgtgaagcagacgttgaaattctgattcattctctcgcatgtcttgcagggaaacagcatctgaagcatgcccgcgtgacgagaacatttgttttggtacctgtccgcaaggtccaccggtgcttccgcgtctgacgtcgatggctccgcaactgaggggcaggcccgcttgggctcgcttatatccgcgtcactgggggcgggtcttttggtggctccgccctttctgacgtagaactcatgcgccacctcagtcacgtgatcctgagcccagcggaagaactctttgacttcctgcttggtcaccttgccaaagtcgtgctccagacggcgggtgagctcgaacttgaacatgcggtcctgcagcggctgctggtgctcgaaggtggtgctgttcccgtcgatcacggcgcacatgttggtgttggaggtgacgatcacgggcgtggggtcgatctgggccgatgacttgcacttttggtccacgcgcaccttgcttccgcccagaatggccttggcggactccacgaccttggcggtcatcttgccctcctcccaccagatcaccatcttgtcgacgcaatcgttgaagggaaagttctcattggtccagttgacgcagcaagggcgaattc

SEQ ID NO: 438 - protein, 729 aa, Artificial Sequence
  Description of Artificial Sequence: Synthetic polypeptide
MAADGYLPDWLEDNLSEGIREWWDLKPGAPKPKANQQKQDDGRGLVLPGYKYLGPFNGLDKGEPVNAADAAALEHDKAYDQQLKAGDNPYLRYNHADAEFQERLQEDTSFGGNLGRAVFQAKKRVLEPLGLVEEGAKTAPGKKRPIDSPDSSTGIGKKGQQPAKKKLNFGQTGDSESVPDPQPLGEPPAAPSSVGSGTMAAGGGAPMADNNEGADGVGNASGNWHCDSTWLGDRVITTSTRTWALPTYNNHLYKQISSSSSGATNDNHYFGYSTPWGYFDFNRFHCHFSPRDWQRLINNNWGFRPKKLRFKLFNIQVKEVTTNDGVTTIANNLTSTVQVFSDSEYQLPYVLGSAHQGCLPPFPADVFMIPQYGYLTLNNGSQSVGRSSFYCLEYFPSQMLRTGNNFEFSYSFEDVPFHSSYAHSQSLDRLMNPLIDQYLYYLARTQSTTGSTRELQFHQAGPNTMAEQSKNWLPGPCYRQQGLSKNLDFNNNSNFAWTAATKYHLNGRNSLTNPGIPMATNKDDEDQFFPINGVLVFGKTGAANKTTLENVLMTSEEEIKTTNPVATEEYGVVSSNLQPSTAGPQSQTINSQGALPGMVWQNRDVYLQGPIWAKIPHTDGNFHPSPLMGGFGLKHPPPQILIKNTPVPANPPEVFTPAKFASFITQYSTGQVSVEIEWELQKENSKRWNPEIQYTSNYAKSNNVEFAVNPDGVYTEPRPIGTRYLPRNL

SEQ ID NO: 439 - DNA, 3094 bp, Artificial Sequence
  Description of Artificial Sequence: Synthetic polynucleotide
gaattcgcccttgctgcgtcaactggaccaagagaactttcccttcaacgattgcgtcgacaagatggtgatctggtgggaggagggcaagatgacggccaaggtcgtggagtccgccaaagccattctgggcggaagcaaggtgcgcgtcgaccaaaagtgcaagtcctcggcccagatcgatcccacccccgtgatcgtcacctccaacaccaacatgtgcgccgtgatcgacgggaacagcaccaccttcgagcaccagcagccgttgcaggaccggatgttcaaatttgaactcacccgccgtctggaacacgactttggcaaggtgaccaagcaggaagtcaaagagttcttccgctgggctagtgatcacgtgactgaggtgacgcatgagttctacgtcagaaagggcggagccagcaaaagacccgcccccgatgacgcggatataagcgagcccaagcgggcctgtccctcagtcacggacccatcgacgtcagacgcggaaggagctccggtggactttgccgacaggtaccaaaacaaatgttctcgtcacgcgggcatgcttcagatgctgtttccctgcaaaacgtgcgagagaatgaatcagaatttcaacatttgcttcacgcacggggtcagagactgtttagaatgtttccccggcgtgtcagaatctcaaccggtcgtcagaaaaaagacgtatcggaagctgtgtgcgattcatcatctgctggggcgggcacccgagattgcttgctcggcctgcgacctggtcaacgtggacctggacgactgtgtttctgagcaataaatgacttaaaccgggtatggctgccgatggttatcttccagattggctcgaggacaacctctctgagggcattcgcgagtggtgggacctgaaacctggagccccgaaacccaaagccaaccagcaaaagcaggacgacggccggggtctggtgcttcctggctacaagtacctcggacccttcaacggactcgacaagggggagcccgtcaacgcggcggacgcagcggccctcgagcacgacaaggcctacgaccagcagctcaaagcgggtgacaatccgtacctgcggtataaccacgccgacgccgagtttcaggagcgtctgcaagaagatacgtcatttgggggcaacctcgggcgagcagtcttccaggccaagaagcgggttctcgaacctctcggtctggttgaggaaggcgctaagacggctcctggaaagaagagacccatagactctccagactcctccacgggcatcggcaaaaaaggccagcagcccgctaaaaagaagctcaattttggtcagactggcgactcagagtcagtccccgaccctcaacctcttggagaacctccagcagcgccctctagtgtgggatctggtacaatggctgcaggcggtggcgcaccaatggcagacaataacgaaggtgccgacggagtgggtaatgcctcaggaaattggcattgcgattccacatggctgggcgacagagtcatcaccaccagcaccagaacctgggccctccccacctacaacaaccacctctacaagcaaatctccagcagcagctcaggagccaccaatgacaaccactacttcggctacagcaccccctgggggtattttgactttaacagattccactgccacttctcaccacgtgactggcagcgactcatcaacaacaactggggattccggcccaagaagctgcggttcaagctcttcaacatccaggtcaaggaggtcacaacgaatgacggcgtcacgaccatcgctaataaccttaccagcacggttcaggtcttctcggactcggaataccagctgccgtacgtcctcggctctgcgcaccagggctgcctgcctccgttcccggcggacgtcttcatgattcctcagtacggctacctgactctgaacaacggcagccaatcggtgggccgttcctccttctactgcctggaatatttcccctctcaaatgctgagaacgggcaacaactttgagttcagttacagcttcgaggacgtgcctttccacagcagctacgcgcacagccagagcctagaccggctgatgaaccctctcatcgaccagtacctgtactacctggcccggacccagagcaccacgggttccaccagggaactgcaatttcatcaagctgggcccaatactatggccgagcagtcaaagaactggctgcctggaccctgctataggcaacagggactgtcaaagaacttggactttaacaacaacagcaattttgcctggactgctgccactaaatatcatctgaatggcagaaactctttgaccaatcctggcattcccatggcaaccaacaaggatgatgaggaccagttctttcccatcaacggggtactggtttttggcaagacgggagctgccaacaaaactacgctggaaaacgttctgatgaccagcgaggaggagatcaagaccactaaccctgtggctacagaagaatacggtgtggtctccagcaacctgcagccgtctacagccgggcctcaatcacagactatcaacagccagggagcactgcctggcatggtctggcagaaccgggacgtgtatctgcagggtcccatctgggccaaaattcctcacacggatggcaactttcacccgtctcctctgatgggcggttttggactcaaacacccgcctccacagatcctgatcaaaaacacacctgtacctgctaatcctccggaggtgtttactcctgccaagtttgcctccttcatcacgcagtacagcaccggacaagtcagcgtggaaatcgagtgggagctgcagaaagaaaacagcaagcgctggaacccagaaattcagtatacttccaattatgccaagtctaataatgttgaatttgctgtgaaccctgatggtgtttatactgagcctcgccccattggcactcgttacctcccccgtaatctgtaattgcttgttaatcaataaaccggttgattcgtttcagttgaactttggtctctgcgaagggcgaattc

SEQ ID NO: 440 - protein, 1458 aa, Artificial Sequence
  Description of Artificial Sequence: Synthetic polypeptide
MAADGYLPDWLEDNLSEGIREWWDLKPGAPKPKANQQKQDDGRGLVLPGYKYLGPFNGLDKGEPVNAADAAALEHDKAYDQQLKAGDNPYLRYNHADAEFQERLQEDTSFGGNLGRAVFQAKKRVLEPLGLVEEGAKTAPGKKRPIDSPDSSTGIGKKGQQPAKKKLNFGQTGDSESVPDPQPLGEPPAAPSSVGSGTMAAGGGAPTADNNEGADGVGNASGNWHCDSTWLGDRVITTSTRTWALPTYNNHLYKQISSSSSGATNDNHYFGYSTPWGYFDFNRFHCHFSPRDWQRLINNNWGFRPKKLRFKLFNIQVKEVTTNDGVTTIANNLTSTVQVFSDSEYQLPYVLGSAHQGCLPPFPADVFMIPQYGYLTLNNGSQSVGRSSFYCLEYFPSQMLRTGNNFEFSYSFEDVPFHSSYAHSQSLDRLMNPLIDQYLYYLARTQSTTGSTRELQFHQAGPNTMAEQSKNWLPGPCYRQQRLSKNLDFNNNSNFAWTAATKYHLNGRNSLTNPGIPMATNKDDEDQFFPINGVLVFGKTGAANKTTLENVLMTSEEEIKTTNPVATEEYGVVSSNLQSSTAGPQSQTINSQGALPGMVWQNRDVYLQGPIWAKIPHTDGNFHPSPLMGGFGLEHPPPQILIKNTPVPANPPEVFTPAKFASFITQYSTGQVSVEIEWELQKENSKRWNPEIQYTSNYAKSNNVEFAVNPDGVYTEPRPIGTRYLTRNLMAADGYLPDWLEDNLSEGIREWWDLKPGAPKPKANQQKQDDGRGLVLPGYKYLGPFNGLDKGEPVNAADAAALEHDKAYDQQLKAGDNPYLRYNHADAEFQERLQEDTSFGGNLGRAVFQAKKRVLEPLGLVEEGAKTAPGKKRPIGSPDSSTGIGKKGQQPAKKKLNFGQTGDSESVPDPQPLGEPPAAPSSVGSGTMAAGGGAPMADNNEGADGVGNASGNWHCDSTWLGDRVITTSTRTWALPTYNNHLYKQISSSSSGATNDNHYFGYSTPWGYFDFNRFHCHFSPRDWQRLINNNWGFRPKKLRFKLLNIQVKEVTTNDGVTTIANNLTSTVQVFSDSEYQLPYVLGSAHQGCLPPFPADVFMIPQYGYLTLDNGSQSVGRSSFYCLEYFPSQMLRTGNNFEFSYSFEDVPFHSSYAHSQSLDRLMNPLIDQYLYYLARTQSTTGSTRELQFHQAGPNTMAEQSKNWLPGPCYRQQRLSKNLDFNNNSNFAWTAATKYHLNGRNSLTNPGIPMATNKDDEDQFFPINGVLVFGKTGAANKTTLENVLMTSEEEIKTTNPVATEEYGVVSSNLQSSTAGPQSQTINSQGALPGMVWQNRDVYLQGPIWAKIPHTDGNFHPSPLMGGFGLKHPPPQILIKNTPVPANPPEVFTPAKFASFITQYSTGQVSVEIEWELQKENSKRWNPEIQYTSNYAKSNNVEFAVNPDGVYTEPRPIGTRYLTRNL

SEQ ID NO: 441 - DNA, 3095 bp, Artificial Sequence
  Description of Artificial Sequence: Synthetic polynucleotide
gaattcgcccttcgcagagaccaaagttcaactgaaacgaatcaaccggtttattgattaacaagcaattacagattacgggtgaggtaacgagtgccaatggggcgaggctcagtataaacaccatcagggttcacagcaaattcaacattattagacttggcataattggaagtatactgaatttctgggttccagcgcttgctgttttctttctgcagctcccactcgatttccacgctgacttgtccggtgctgtactgcgtgatgaaggaggcaaacttggcaggagtaaacacctccggaggattagcaggtacaggtgtgtttttgatcaggatctgtggaggcgggtgtttgagtccaaaaccgcccatcagaggagacgggtgaaagttgccatccgtgtgaggaattttggcccagatgggaccctgcagatacacgtcccggttctgccagaccatgccaggcagtgctccctggctgttgatagtctgtgattgaggcccggctgtagacgactgcaggttgctggagaccacaccgtattcttctgtagccacagggttagtggtcttgatctcctcctcgctggtcatcagaacgttttccagcgtagttttgttggcagctcccgtcttgccaaaaaccagtaccccgttgatgggaaagaactggtcctcatcatccttgttggttgccatgggaatgccaggattggtcaaagagtttctgccattcagatgatatttagtggcagcagtccaggcaaaattgctgttgttgttaaagtccaagttctttgacagtctctgttgcctatagcagggtccaggcagccagttctttgactgctcggccatagtattgggcccagcttgatgaaattgcagttccctggtggaacccgtggtgctctgggtccgggccaggtagtacaggtactggtcgatgagagggttcatcagccggtctaggctctggctgtgcgcgtagctgctgtggaaaggcacgtcctcgaagctgtaactgaactcaaagttgttgcccgttctcagcatttgagaggggaaatattccaggcagtagaaggaggaacggcccaccgattggctgccgttgtccagagtcaggtagccgtactgaggaatcatgaagacgtccgccgggaacggaggcaggcagccctggtgcgcagagccgaggacgtacggcagctggtattccgagtccgagaagacctgaaccgtgctggtaaggttattagcgatggtcgtgacgccgtcattcgttgtgacctccttgacctggatgttgaggagcttgaaccgcagcttcttgggccggaatccccagttgttgttgatgagtcgctgccagtcacgtggtgagaagtggcagtggaatctgttaaagtcaaaatacccccagggggtgctgtagccgaagtagtggttgtcattggtggctcctgagctgctgctggagatttgcttgtagaggtggttgttgtaggtggggagggcccaggttctggtgctggtggtgatgactctgtcgcccagccatgtggaatcgcaatgccaatttcctgaggcattacccactccgtcggcaccttcgttattgtctgccattggtgcgccaccgcctgcagccattgtaccagatcccacactagagggcgctgctggaggttctccaagaggttgagggtcggggactgactctgagtcgccagtctgaccaaaattgagcttctttttagcgggctgctggccttttttgccgatgcccgtggaggagtctggagagcctatgggtctcttctttccaggagccgtcttagcgccttcctcaaccagaccgagaggttcgagaacccgcttcttggcctggaagactgctcgcccgaggttgcccccaaatgacgtatcttcttgcagacgctcctgaaactcggcgtcggcgtggttataccgcaggtacggattgtcacccgctttgagctgctggtcgtaggccttgtcgtgctcgagggccgctgcgtccgccgcgttgacgggctcccccttgtcgagtccgttgaagggtccgaggtacttgtagccaggaagcaccagaccccggccgtcgtcctgcttttgctggttggctttgggtttcggggctccaggtttcaggtcccaccactcgcgaatgccctcagagaggttgtcctcgagccaatctggaagataaccatcggcagccatacctggtttaagtcatttattgctcagaaacacagtcgtccaggtccacgttgaccaggtcgcaggccgagcaagcaatctcgggtgcccgccccagcagatgatgaatcgcacacagcttccgatacgtcttttttctgacgaccggttgagattctgacacgccggggaaacattctaaacagtctctgaccccgtgcgtgaagcaaatgttgaaattctgattcattctctcgcacgttttgcagggaaacagcacctgaagcatgcccgcgtgacgagaacatttgttttggtacctgtcggcaaagtccaccggagctccttccgcgtctgacgtcgatgggtccgtgactgagggacgggcccgcttgggctcgcttatatccgcgtcatcgggggcgggtcttttgctggctccgccctttctgacgtagaactcatgcgtcacctcagtcacgtgatcactagcccagcggaagaactctttgacttcctgctttgtcaccttgccaaagtcgtgttccagacggcgggtgagttcaaatttgaacatccggtcctgcaacggttgctggtgctcgaaggtggtgctgttcccgtcgatcacggcgcacatgttggtgttggaggtgacgatcacgggggtgggatcgatctgggcggacgacttgcacttttggtccacgcgcaccttgctgccgccgagaatggccttggcggactccacgaccttggccgtcatcttgccctcctcccaccagatcaccatcttgtcgacgcaatcgttgaagggaaagttctcattggtccagttgacgcagcaagggcgaattc

SEQ ID NO: 442 - DNA, 3095 bp, Artificial Sequence
  Description of Artificial Sequence: Synthetic polynucleotide
gaattcgcccttcgcagagaccaaagttcaactgaaacgaatcaaccggtttattgattaacaagcaattacagattacgggtgaggtaacgagtgccaatggggcgaggctcagtataaacaccatcagggttcacagcaaattcaacattattagacttggcataattggaagtatactgaatttctgggttccagcgcttgctgttttctttctgcagctcccactcgatttccacgctgacttgtccggtgctgtactgcgtgatgaaggaggcaaacttggcaggagtaaacacctccggaggattagcaggtacaggtgtgtttttgatcaggatctgtggaggcgggtgttcgagtccaaaaccgcccatcagaggagacgggtgaaagttgccatccgtgtgaggaattttggcccagatgggaccctgcagatacacgtcccggttctgccagaccatgccaggcagtgctccctggctgttgatagtctgtgattgaggcccggctgtagacgactgcaggttgctggagaccacaccgtattcttctgtagccacagggttagtggtcttgatctcctcctcgctggtcatcagaacgttttccagcgtagttttgttggcagctcccgtcttgccaaaaaccagtaccccgttgatgggaaagaactggtcctcatcatccttgttggttgccatgggaatgccaggattggtcaaagagtttctgccattcagatgatatttagtggcagcagtccaggcaaaattgctgttgttgttaaagtccaagttctttgacagtctctgttgcctatagcagggtccaggcagccagttctttgactgctcggccatagtattgggcccagcttgatgaaattgcagttccctggtggaacccgtggtgctctgggtccgggccaggtagtacaggtactggtcgatgagagggttcatcagccggtctaggctctggctgtgcgcgtagctgctgtggaaaggcacgtcctcgaagctgtaactgaactcaaagttgttgcccgttctcagcatttgagaggggaaatattccaggcagtagaaggaggaacggcccaccgattggctgccgttgttcagagtcaggtagccgtactgaggaatcatgaagacgtccgccgggaacggaggcaggcagccctggtgcgcagagccgaggacgtacggcagctggtattccgagtccgagaagacctgaaccgtgctggtaaggttattagcgatggtcgtgacgccgtcattcgttgtgacctccttgacctggatgttgaagagcttgaaccgcagcttcttgggccggaatccccagttgttgttgatgagtcgctgccagtcacgtggtgagaagtggcagtggaatctgttaaagtcaaaatacccccagggggtgctgtagccgaagtagtggttgtcattggtggctcctgagctgctgctggagatttgcttgtagaggtggttgttgtaggtggggagggcccaggttctggtgctggtggtgatgactctgtcgcccagccatgtggaatcgcaatgccaatttcctgaggcattacccactccgtcggcaccttcgttattgtctgccgttggtgcgccaccgcctgcagccattgtaccagatcccacactagagggcgctgctggaggttctccaagaggttgagggtcggggactgactctgagtcgccagtctgaccaaaattgagcttctttttagcgggctgctggccttttttgccgatgcccgtggaggagtctggagagtctatgggtctcttctttccaggagccgtcttagcgccttcctcaaccagaccgagaggttcgagaacccgcttcttggcctggaagactgctcgcccgaggttgcccccaaatgacgtatcttcttgcaggcgctcctgaaactcggcgtcggcgtggttataccgcaggtacggattgtcacccgctttgagctgctggtcgtaggccttgtcgtgctcgagggccgctgcgtccgccgcgttgacgggctcccccttgtcgagtccgttgaagggtccgaggtacttgtagccaggaagcaccagaccccggccgtcgtcctgcttttgctggttggctttgggtttcggggctccaggtttcaggtcccaccactcgcgaatgccctcagagaggttgtcctcgagccaatctggaagataaccatcggcagccatacctggtttaagccatttattgctcagaaacacagtcgtccaggtccacgttgaccaggtcgcaggccgagcaggcaatctcgggtgcccgccccagcagatgatgaatcgcacacagcttccgatacgtcttttttctgacgaccggttgagattctgacacgccggggaaacattctaaacagtctctgaccccgtgcgtgaagcaaatgttgaaattctgattcattctctcgcacgttttgcagggaaacagcatctgaagcatgcccgcgtggcgagaacatttgttttggtacctgtcggcaaagtccaccggagctccttccgcgtctgacgtcgatgggtccgtgactgagggacaggcccgcttgggctcgcttatatccgcgtcatcgggggcgggtcttttgctggctccgccctttctgacgtagaactcatgcgtcacctcagtcacgtgatcactagcccagcggaagaactctttgacttcctgctttgtcaccttgccaaagtcgtgttccagacggcgggtgagttcaaatttgaacatccggtcctgcaacggctgctggtgctcgaaggtggtgctgttcccgtcgatcacggcgcgcatgttggtgttggaggtgacgatcacgggggtgggatcgatctgggcggacgacttgcacttttggtccacgcgcaccttgctgccgccgagaatggccttggcggactccacgaccttggccgtcatcttgccctcctcccaccagatcaccatcttgtcgacgcaatcgttgaagggaaagttctcattggtccagttgacgcagcaagggcgaattc

SEQ ID NO: 443 - protein, 729 aa, Artificial Sequence; identical to SEQ ID NO: 171
  Description of Artificial Sequence: Synthetic polypeptide

SEQ ID NO: 444 - protein, 729 aa, Artificial Sequence
  Description of Artificial Sequence: Synthetic polypeptide
MAADGYLPDWLEDNLSEGIREWWDLKPGAPKPKANQQKQDDGRGLVLPGYKYLGPFNGLDKGEPVNAADAAALEHDKAYDQQLKAGDNPYLRYNHADAEFQERLQEDTSFGGNLGRAVFQAKKRVLEPLGLVEEGAKTAPGKKRPIDSPDSSTGIGKKGQQPAKKKLNFGQTGDSESVPDPQPLGEPPAAPSSVGSGTMAAGGGAPTADNNEGADGVGNASGNWHCDSTWLGDRVITTSTRTWALPTYNNHLYKQISSSSSGATNDNHYFGYSTPWGYFDFNRFHCHFSPRDWQRLINNNWGFRPKKLRFKLFNIQVKEVTTNDGVTTIANNLTSTVQVFSDSEYQLPYVLGSAHQGCLPPFPADVFMIPQYGYLTLNNGSQSVGRSSFYCLEYFPSQMLRTGNNFEFSYSFEDVPFHSSYAHSQSLDRLMNPLIDQYLYYLARTQSTTGSTRELQFHQAGPNTMAEQSKNWLPGPCYRQQRLSKNLDFNNNSNFAWTAATKYHLNGRNSLTNPGIPMATNKDDEDQFFPINGVLVFGKTGAANKTTLENVLMTSEEEIKTTNPVATEEYGVVSSNLQSSTAGPQSQTINSQGALPGMVWQNRDVYLQGPIWAKIPHTDGNFHPSPLMGGFGLKHPPPQILIKNTPVPANPPEVFTPAKFASFITQYSTGQVSVEIEWELQKENSKRWNPEIQYTSNYAKSNNVEFAVNPDGVYTEPRPIGTRYLTRNL

SEQ ID NO: 445 - protein, 729 aa, Artificial Sequence
  Description of Artificial Sequence: Synthetic polypeptide
MAADGYLPDWLEDNLSEGIREWWDLKPGAPKPKANQQKQDDGRGLVLPGYKYLGPFNGLDKGEPVNAADAAALEHDKAYDQQLKAGDNPYLRYNHADAEFQERLQEDTSFGGNLGRAVFQAKKRVLEPLGLVEEGAKTAPGKKRPIDSPDSSTGIGKKGQQPAKKKLNFGQTGDSESVPDPQPLGEPPAAPSSVGSGTMAAGGGAPMADNNEGADGVGNASGNWHCDSTWLGDRVITTSTRTWALPTYNNHLYKQISSSSSGATNDNHYFGYSTPWGYFDFNRFHCHFSPRDWQRLINNNWGFRPKKLRFKLFNIQVKEVTTNDGVTTIANNLTSTVQVFSDSEYQLPYVLGSAHQGCLPPFPADVFMIPQYGYLTLNNGSQSVGRSSFYCLEYFPSQMLRTGNNFEFSYSFEDVPFHSSYAHSQSLDRLMNPLIDQYLYYLARTQSTTGSTRELQFHQAGPNTMAEQSKNWLPGPCYRQQRLSKNLDFNNNSNFAWTAATKYHLNGRNSLTNPGIPMATNKDDEDQFFPINGVLVFGKTGAANKTTLENVLMTSEEEIKTTNPVATEEYGVVSSNLQSSTAGPQSQTINSQGALPGMVWQNRDVYLQGPIWAKIPHTDGNFHPSPLMGGFGLKHPPPQILIKNTPVPANPPEVFTPAKFASFITQYSTGQVSVEIEWELQKENSKRWNPEIQYTSNYAKSNNVEFAVNPDGVYTEPRPIGTRYLTRNL

SEQ ID NO: 446 - DNA, 2217 bp, Artificial Sequence
  Description of Artificial Sequence: Synthetic polynucleotide
atggctgctgacggttatcttccagattggctcgaggacaacctctctgagggcattcgcgagtggtgggacctgaaacctggagcccccaagcccaaggccaaccagcagaagcaggacgacggccggggtctggtgcttcctggctacaagtacctcggacccttcaacggactcgacaagggggagcccgtcaacgcggcggacgcagcggccctcgagcacgacaaggcctacgaccagcagctcaaagcgggtgacaatccgtacctgcggtataaccacgccgacgccgagtttcaggagcgtctacaagaagatacgtcttttgggggcaacctcgggcgagcagtcttccaggccaagaagcgggttctcgaacctctcggtctggttgaggaagctgctaagacggctcctggaaagaagagaccggtagaaccgtcacctcagcgttcccccgactcctccacgggcatcggcaagaaaggccagcggcccgctaaaaagagactgaactttggtcagactggcgactcagagtcagtccccgaccctcaaccaatcggagaaccaccagcaggcccctctggtctgggatctggtacaatggctgcaggcggtggcgctccaatggcagacaataacgaaggcgccgacggagtgggtagttcctcaggaaattggcattgcgattccacatggctgggcgacagagtcatcaccaccagcacccgaacctgggccctgcccacctacaacaaccacctctacaagcaaatatccaatgggacatcgggaggaagcaccaacgacaacacctacttcggctacagcaccccctgggggtattttgacttcaacagattccactgccacttctcaccacgtgactggcagcgactcatcaacaacaactggggattccggccaaaaagactcagcttcaagcccttcaacatccaggtcaaggaggtcacgcagaatgaaggcaccaagaccatcgccaataaccttaccagcacgattcaggtatttacggactcggaataccagctgccgtacgtcctcggctccgcgcaccagggctgcctgcctccgttcccggcggacgtcttcatgattccccagtacggctaccttacactgaacaatggaagtcaagccgtaggccgttcctccttctactgcctggaatattttccatctcaaatgctgcgaactggaaacaattttgaattcagctacaccttcgaggacgtgcctttccacagcagctacgcacacagccagagcttggaccgactgatgaatcctctcatcgaccagtacctgcactacttatccagaactcagtccacaggaggaactcaaggtacccagcaattgttattttctcaagctgggcctgcaaacatgtcggctcaggctaagaactggctacctggaccttgctaccggcagcagcgagtctctacgacactgtcgcaaaacaacaacagcaactttgcttggactggtgccaccaaatatcacctgaacggaagagactctttggtaaatcccggtgtcgccatggcaacccacaaggacgacgaggaacgcttcttcccgtcgagtggagtcctgatgtttggaaaacagggtgctggaagagacaatgtggactacagcagcgttatgctaaccagcgaagaagaaattaaaaccactaaccctgtagccacagaacaatacggtgtggtggctgacaacttgcagcaaaccaatacagggcctattgtgggaaatgtcaacagccaaggagccttacctggcatggtctggcagaaccgagacgtgtacctgcagggtcccatctgggccaagattcctcacacggacggcaacttccacccttcaccgctaatgggaggatttggactgaagcacccacctcctcagatcctgatcaagaacacgccggtacctgcggatcctccaacaacgttcagccaggcgaaattggcttccttcattacgcagtacagcaccggacaggtcagcgtggaaatcgagtgggagctgcagaaggagaacagcaaacgctggaacccagagattcagtacacttcaaactactacaaatctacaaatgtggactttgctgtcaatacagagggaacttattctgagcctcgccccattggtactcgctacctcacccgtaatctgtaa

SEQ ID NO: 447 - protein, 738 aa, Artificial Sequence
  Description of Artificial Sequence: Synthetic polypeptide
MAADGYLPDWLEDNLSEGIREWWDLKPGAPKPKANQQKQDDGRGLVLPGYKYLGPFNGLDKGEPVNAADAAALEHDKAYDQQLKAGDNPYLRYNHADAEFQERLQEDTSFGGNLGRAVFQAKKRVLEPLGLVEEAAKTAPGKKRPVEPSPQRSPDSSTGIGKKGQRPAKKRLNFGQTGDSESVPDPQPIGEPPAGPSGLGSGTMAAGGGAPMADNNEGADGVGSSSGNWHCDSTWLGDRVITTSTRTWALPTYNNHLYKQISNGTSGGSTNDNTYFGYSTPWGYFDFNRFHCHFSPRDWQRLINNNWGFRPKRLSFKPFNIQVKEVTQNEGTKTIANNLTSTIQVFTDSEYQLPYVLGSAHQGCLPPFPADVFMIPQYGYLTLNNGSQAVGRSSFYCLEYFPSQMLRTGNNFEFSYTFEDVPFHSSYAHSQSLDRLMNPLIDQYLHYLSRTQSTGGTQGTQQLLFSQAGPANMSAQAKNWLPGPCYRQQRVSTTLSQNNNSNFAWTGATKYHLNGRDSLVNPGVAMATHKDDEERFFPSSGVLMFGKQGAGRDNVDYSSVMLTSEEEIKTTNPVATEQYGVVADNLQQTNTGPIVGNVNSQGALPGMVWQNRDVYLQGPIWAKIPHTDGNFHPSPLMGGFGLKHPPPQILIKNTPVPADPPTTFSQAKLASFITQYSTGQVSVEIEWELQKENSKRWNPEIQYTSNYYKSTNVDFAVNTEGTYSEPRPIGTRYLTRNL

SEQ ID NO: 448 - DNA, 2217 bp, Artificial Sequence
  Description of Artificial Sequence: Synthetic polynucleotide
atggctgctgacggttatcttccagattggctcgaggacaacctctctgagggcattcgcgagtggtgggacctgaaacctggagcccccaagcccaaggccaaccagcagaagcaggacgacggccggggtctggtgcttcctggctacaagtacctcggacccttcaacggactcgacaagggggagcccgtcaacgcggcggacgcagcggccctcgagcacgacaaggcctacgaccagcagctcaaagcgggtgacaatccgtacctgcggtataaccacgccgacgccgagtttcaggagcgtctgcaagaagatacgtcttttgggggcaacctcgggcgagcagtcttccaggccaagaagcgggttctcgaacctctcggtctggttgaggaagctgctaagacggctcctggaaagaagagaccggtagaaccgtcacctcagcgttcccccgactcctccacgggcatcggcaagaaaggccagcagcccgctaaaaagagactgaactttggtcagactggcgactcagagtcagtccccgaccctcaaccaatcggagaaccaccagcaggcccctctggtctgggatctggtacaatggctgcaggcggtggcgctccaatggcagacaataacgaaggcgccgacggagtgggtagttcctcaggaaattggcattgcgattccacatggctgggcgacagagtcatcaccaccagcacccgaacctgggccctgcccacctacaacaaccacctctacaagcaaatatccaatgggacatcgggaggaagcaccaacgacaacacctacttcggctacagcaccccctgggggtattttgacttcaacagattccactgccacttctcaccacgtgactggcagcgactcatcaacaacaactggggattccggccaaaaagactcagcttcaagctcttcaacatccaggtcaaggaggtcacgcagaatgaaggcaccaagaccatcgccaataaccttaccagcacgattcaggtatttacggactcggaataccagctgccgtacgtcctcggctccgcgcaccagggctgcctgcctccgttcccggcggacgtcttcatgattccccagtacggctaccttacactgaacaatggaagtcaagccgtaggccgttcctccttctactgcctggaatattttccatctcaaatgctgcgaactggaaacaattttgaattcagctacaccttcgaggacgtgcctttccacagcagctacgcacacagccagagcttggaccgactgatgaatcctctcatcgaccagtacctgtactacttatccagaactcagtccacaggaggaactcaaggtacccagcaattgttattttctcaagctgggcctgcaaacatgtcggctcaggctaagaactggctacctggaccttgctaccggcagcagcgagtctctacgacactgtcgcaaaacaacaacagcaactttgcttggactggtgccaccaaatatcacctgaacggaagagactctttggtaaatcccggtgtcgccatggcaacccacaaggacgacgaggaacgcttcttcccgtcgagtggagtcctgatgtttggaaaacagggtgctggaagagacaatgtggactacagcagcgttatgctaaccagcgaagaagaaattaaaaccactaaccctgtagccacagaacaatacggtgtggtggctgataacttgcagcaaaccaatacggggcctattgtgggaaatgtcaacagccaaggagccttacctggcatggtctggcagaaccgagacgtgtacctgcagggtcccatctgggccaagattcctcacacggacggcaacttccacccttcaccgctaatgggaggatttggactgaagcacccacctcctcagatcctgatcaagaacacgccggtacctgcggatcctccaacaacgttcagccaggcgaaattggcttccttcattacgcagtacagcaccggacaggtcagcgtggaaatcgagtgggagctgcagaaggagaacagcaaacgctggaacccagagattcagtacacttcaaactactacaaatctacaaatgtggactttgctgtcaatacagagggaacttattctgagcctcgccccattggtactcgttacctcacccgtaatctgtaa

SEQ ID NO: 449 - protein, 738 aa, Artificial Sequence; identical to SEQ ID NO: 101
  Description of Artificial Sequence: Synthetic polypeptide

SEQ ID NO: 450 - protein, 738 aa, Artificial Sequence
  Description of Artificial Sequence: Synthetic polypeptide
MAADGYLPDWLEDNLSEGIREWWDLKPGAPKPKANQQKQDDGRGLVLPGYKYLGPFNGLDKGEPVNAADAAALEHDKAYDQQLKAGDNPYLRYNHADAEFQERLQEDTSFGGNLGRAVFQAKKRVLEPLGLVEEAAKTAPGKKRPVEPSPQRSPDSSTGIGKKGQQPAKKRLNFGQTGDSESVPDPQPIGEPPAGPSGLGSGTMAAGGGAPMADNNEGADGVGSSSGNWHCDSTWLGDRVITTSTRTWALPTYNNHLYKQISNGTSGGSTNDNTYFGYSTPWGYFDFNRFHCHFSPRDWQRLINNNWGFRPKRLSFKLFNIQVKEVTQDEGTKTIANNLTSTIQVFTDSEYQLPYVLGSAHQGCLPPFPADVFMIPQYGYLTLNNGSQAVGRSSFYCLEYFPSQMLRTGNNFEFSYTFEDVPFHSSYAHSQSLDRLMNPLIDQYLYYLSRTQSTGGTQGTQQLLFSQAGPANMSARAKNWLPGPCYRQQRVSTTLSQNNNSNFAWTGATKYHLNGRDSLVNPGVAMATHKDDEERFFPSSGVLMFGKQGAGRDNVDYSSVMLTSEEEIKTTNPVATEQYGVVADNLQQANTGPIVGNVNSQGALPGMVWQNRDVYLQGPIWAKIPHTDGNFHPSPLMGGFGLKHPPPQILIKNTPVPADPPTTFSQAKLASFITQYSTGQVSVEIEWELQKENSKRWNPEIQYTSNYYKSTNVDFAVNSEGTYSEPRPIGTRYLTRNL

SEQ ID NO: 451 - DNA, 2217 bp, Artificial Sequence
  Description of Artificial Sequence: Synthetic polynucleotide
atggctgctgacggttatcttccagattggctcgaggacaacctctctgagggcattcgcgagtggtgggacctgaaacctggagcccccaagcccaaggccaaccagcagaagcaggacgacggccggggtctggtgcttcctggctacaagtacctcggacccttcaacggactcgacaagggggagcccgtcaacgcggcggacgcagcggccctcgagcacgacaaggcctacgaccagcagctcaaagcgggtgacaatccgtacctgcggtataaccacgccgacgccgagtttcaggagcgtctgcaagaagatacgtcttttgggggcaacctcgggcgagcagtcttccaggccaagaagcgggttctcgaacctctcggtctggttgaggaagctgctaagacggctcctggaaagaagagaccggtagaaccgtcacctcagcgttcccccgactcctccacgggcatcggcaagaaaggccagcagcccgctaaaaagagactgaactttggtcagactggcgactcagagtcagtccccgaccctcaaccaatcggagaaccaccagcaggcccctctggtctgggatctggtacaatggctgcaggcggtggcgctccaatggcagacaataacgaaggcgccgacggagtgggtagttcctcaggaaattggcattgcgattccacatggctgggcgacagagtcatcaccaccagcacccgaacctgggccctgcccacctacaacaaccacctctacaagcaaatatccaatgggacatcgggaggaagcaccaacgacaacacctacttcggctacagcaccccctgggggtattttgacttcaacagattccactgccacttctcaccacgtgactggcagcgactcatcaacaacaactggggattccggccaaaaagactcagcttcaagctcttcaacatccaggtcaaggaggtcacgcaggatgaaggcaccaagaccatcgccaataaccttaccagcacgattcaggtatttacggactcggaataccagctgccgtacgtcctcggctccgcgcaccagggctgcctgcctccgttcccggcggacgtcttcatgattccccagtacggctaccttacactgaacaatggaagtcaagccgtaggccgttcctccttctactgcctggaatattttccatctcaaatgctgcgaactggaaacaattttgaattcagctacaccttcgaggacgtgcctttccacagcagctacgcacacagccagagcttggaccgactgatgaatcctctcatcgaccagtacctgtactacttatccagaactcagtccacaggaggaactcaaggtacccagcaattgttattttctcaagctgggcctgcaaacatgtcggctcgggctaagaactggctacctggaccttgctaccggcagcagcgagtctctacgacactgtcgcaaaacaacaacagcaactttgcttggactggtgccaccaaatatcacctgaacggaagagactctttggtaaatcccggtgttgctatggcaacgcataaggacgacgaggaacgtttctttccatcgagcggagtcctgatgtttggaaaacagggtgctggaagagacaatgtggactatagcagcgttatgctaaccagcgaggaagaaattaaaaccactaaccctgtagccacagaacaatacggtgtggtggctgacaacttgcagcaagccaatacagggcctattgtgggaaatgtcaacagccaaggagccttacctggcatggtctggcagaaccgagacgtgtacctgcagggtcccatctgggccaaaattcctcacacggacggcaattttcacccgtctcctctgatgggcggctttggactgaagcacccacctccccagatcctgatcaagaatacgccggtacctgcggatcctccaacgacgttcagccaggcaaaattggcttccttcatcacgcagtacagcaccggccaggtcagcgtggagatcgagtgggagctgcagaaggagaacagcaagcgatggaacccagaaattcagtacacttccaactactacaaatctacaaatgtggactttgctgtcaattctgagggtacatattcagagcctcgccccattggtactcgttatctgacacgtaatctgtaa

SEQ ID NO: 452 - DNA, 2211 bp, Artificial Sequence
  Description of Artificial Sequence: Synthetic polynucleotide
atggctgccgatggttatcttccagattggctcgaggacaacctctctgagggcattcgcgagtggtgggacttgaaacctggagccccgaaacccaaagccaaccagcaaaagcaggacgacggccggggcctggtgcttcctggctacaagtacctcggacccttcaacggactcgacaagggggagcccgtcaacgcggcggacgcagcggccctcgagcacgacaaggcctacgaccagcagctcgaagcgggtgacaatccgtacctgcggtataaccacgccgacgccgagtttcaggagcgtctgcaagaagatacgtcttttgggggcaacctcgggcgagcagtcttccaggccaagaagcgggttctcgaacctctcggtctggttgaggaaggcgctaagacggctcctggaaagaagagaccagtagagcagtcaccccaagaaccagactcctcctcgggcatcggcaagaaaggccaacagcccgccagaaaaagactcaattttggccagactggcgactcagagtcagttccagaccctcaacctctcggagaacctccagcagcgccctctggtgtgggacctaatacaatggctgcaggcggtggcgcaccaatggcagacaataacgaaggcgccgacggagtgggtagttcctcgggaaattggcattgcgattccacatggctgggcgacagagtcatcaccaccagcacccgaacctgggccctgcccacctacaacaaccacctctacaagcaaatctccaacgggacatcgggaggagccaccaacgacaacacctacttcggctacagcaccccctgggggtattttgactttaacagattccactgccacttttcaccacgtgactggcagcgactcatcaacaacaactggggattccggcccaagagactcagcttcaagctcttcaacatccaggtcaaggaggtcacgcagaatgaaggcaccaagaccatcgccaataacctcaccagcaccatccaggtgtttacggactcggagtaccagctgccgtacgttctcggctctgcccaccagggctgcctgcctccgttcccggcggacgtgttcatgattccccagtacggctacctaacactcaacaacggtagtcaggccgtgggacgctcctccttctactgcctggaatactttccttcgcagatgctgagaaccggcaacaacttccagtttacttacaccttcgaggacgtgcctttccacagcagctacgcccacagccagagcttggaccggctgatgaatcctctgattgaccagtacctgtactacttgtctcggactcaaacaacaggaggcacggcaaatacgcagactctgggcttcagccaaggtgggcctaatacaatggccaatcaggcaaagaactggctgccaggaccctgttaccgccaacaacgcgtctcaacgacaaccgggcaaaacaacaatagcaactttgcctggactgctgggaccaaataccatctgaatggaagaaattcattggctaatcctggcatcgctatggcaacacacaaagacgacgaggagcgttttttcccagtaacgggatcctgtttttggcaacaaaatgctgccagagacaatgcggattacagcgatgtcatgctcaccagcgaggaagaaatcaaaaccactaaccctgtggctacagaggaatacggtatcgtggcagataacttgcagcagcaaaacacggctcctcaaattggaactgtcaacagccagggggccttacccggtatggtctggcagaaccgggacgtgtacctgcagggtcccatctgggccaagattcctcacacggacggcaacttccacccgtctccgctgatgggcggctttggcctgaaacatcctccgcctcagatcctgatcaagaacacgcctgtacctgcggatcctccgaccaccttcaaccagtcaaagctgaactctttcatcacgcaatacagcaccggacaggtcagcgtggaaattgaatgggagctacagaaggaaaacagcaagcgctggaaccccgagatccagtacacctccaactactacaaatctacaagtgtggactttgctgttaatacagaaggcgtgtactctgaaccccgccccattggcacccgttacctcacccgtaatctgtaa

SEQ ID NO: 453 - protein, 736 aa, Artificial Sequence
  Description of Artificial Sequence: Synthetic polypeptide
MAADGYLPDWLEDNLSEGIREWWDLKPGAPKPKANQQKQDDGRGLVLPGYKYLGPFNGLDKGEPVNAADAAALEHDKAYDQQLEAGDNPYLRYNHADAEFQERLQEDTSFGGNLGRAVFQAKKRVLEPLGLVEEGAKTAPGKKRPVEQSPQEPDSSSGIGKKGQQPARKRLNFGQTGDSESVPDPQPLGEPPAAPSGVGPNTMAAGGGAPMADNNEGADGVGSSSGNWHCDSTWLGDRVITTSTRTWALPTYNNHLYKQISNGTSGGATNDNTYFGYSTPWGYFDFNRFHCHFSPRDWQRLINNNWGFRPKRLSFKLFNIQVKEVTQNEGTKTIANNLTSTIQVFTDSEYQLPYVLGSAHQGCLPPFPADVFMIPQYGYLTLNNGSQAVGRSSFYCLEYFPSQMLRTGNNFQFTYTFEDVPFHSSYAHSQSLDRLMNPLIDQYLYYLSRTQTTGGTANTQTLGFSQGGPNTMANQAKNWLPGPCYRQQRVSTTTGQNNNSNFAWTAGTKYHLNGRNSLANPGIAMATHKDDEERFFPVTGSCFWQQNAARDNADYSDVMLTSEEEIKTTNPVATEEYGIVADNLQQQNTAPQIGTVNSQGALPGMVWQNRDVYLQGPIWAKIPHTDGNFHPSPLMGGFGLKHPPPQILIKNTPVPADPPTTFNQSKLNSFITQYSTGQVSVEIEWELQKENSKRWNPEIQYTSNYYKSTSVDFAVNTEGVYSEPRPIGTRYLTRNL

SEQ ID NO: 454 - DNA, 2214 bp, Artificial Sequence
  Description of Artificial Sequence: Synthetic polynucleotide
atggctgctgacggttatcttccagattggctcgaggacaacctctctgagggcattcgcgagtggtgggacctgaaacctggagcccccaagcccaaggccaaccagcagaagcaggacgacggccggggtctggtgcttcctggctacaagtacctcggacccttcaacggactcgacaagggggagcccgtcagcgcggcggacgcagcggccctcgagcacgacaaggcctgcgaccagcggctcaaagcgggtgacaatccgtacctgcggtataaccacgccgacgccgagtttcaggagcgtctgcaagaagatacgtcttttgggggcaacctcgggcgagcagtcttccaggccaagaagcgggttctcgaacctctcggtctggttgaggaagctgctaagacggctcctggaaagaagggaccggtagaaccgtcacctcagcgttcccccgactcctccacgggcatcggcaagaaaggccagcagcccgctagaaagagactgaactttgggcagactggcgactcagagtcagtccccgaccctcaaccaatcggagaaccaccagcaggcccctctggtctgggatctggtacaatggctgcaggcggtggcgcaccaatggctgacaataacgagggcgccgacggagtgggtaatgcctcaggaaattggcattgcgattccacatggctgggcgacagagtcatcaccaccagcacccgaacctgggctttgcccacctacaacaatcacctctacaagcaaatctccagtcagtcagcaggtagcaccaacgacaacgtctacttcggctacagcaccccctgggggtattttgacttcaacagattccactgtcacttctcaccacgtgactggcagcggctcatcaacaacaactggggattccggcccaagaagctcaacttcaagctgttcaacatccaggtcaaggaggtcacaacgaatgacggcgtcacgaccatcgccaataaccttaccagcacggttcaggtcttttcggactcggaataccagctgccctacgtcctcggctccgcacaccagggctgcctgcctccgttcccggcggacgtcttcatgattccccagtacggctacctgactctgaacaatggcagccaatcggtgggtcgttcctctttctactgcctggaatatttcccttctcaaatgctgagaacgggcaacaacttcaccttcagctacaccttcgaggacgttcccttccacagcagctacgcacacagccagagcctggaccggctgatgaatcctcttatcgaccagtacctgtattacctggccagaacacagagcaacgcaggaggcacagctggcaatcgggaactgcagttttatcagggcgggcctaccaccatggccgaacaagccaaaaactggctgcctggaccttgcttccggcaacaaagagtctccaagacgctggatcaaaacaacaacagcaactttgcttggactggtgccaccaaataccatctaaatggaagaaattcattggttaatcccggtgtcgccatggcaacccacaaggacgacgaggaacgcttcttcccttcgagcggagtcctgatttttggaaaaactggagcagctaataagactacactggaaaatgtgttaatgacaaatgaagaggaaattcgtcctaccaacccggtagccaccgaggaatacgggactgttagcagcaacctgcaggcggctaacactgcagcccagacacaagttgtcaacaaccagggagccttacctggtatggtctggcagaaccgggacgtgtacctgcagggtcccatctgggccaagattcctcacacggacggcaactttcacccgtctccgctgatgggcggctttggactgaagcatccgcctcctcagatcctgatcaaaaacactcctgttcctgctaatcccccggaggtgtttacgcctgccaagtttgcttctttcatcacacagtacagcaccggccaggtcagcgtggagatcgagtgggagctgcagaaggagaacagcaagcgctggaacccagagattcagtatacctccaattttgacgaacagactggtgtggactttgccgttgacagccagggtgtttattctgagcctcgccccattggtactcgttacctcacccgtaatctgtaa

SEQ ID NO: 455 - protein, 737 aa, Artificial Sequence
  Description of Artificial Sequence: Synthetic polypeptide
MAADGYLPDWLEDNLSEGIREWWDLKPGAPKPKANQQKQDDGRGLVLPGYKYLGPFNGLDKGEPVSAADAAALEHDKACDQRLKAGDNPYLRYNHADAEFQERLQEDTSFGGNLGRAVFQAKKRVLEPLGLVEEAAKTAPGKKGPVEPSPQRSPDSSTGIGKKGQQPARKRLNFGQTGDSESVPDPQPIGEPPAGPSGLGSGTMAAGGGAPMADNNEGADGVGNASGNWHCDSTWLGDRVITTSTRTWALPTYNNHLYKQISSQSAGSTNDNVYFGYSTPWGYFDFNRFHCHFSPRDWQRLINNNWGFRPKKLNFKLFNIQVKEVTTNDGVTTIANNLTSTVQVFSDSEYQLPYVLGSAHQGCLPPFPADVFMIPQYGYLTLNNGSQSVGRSSFYCLEYFPSQMLRTGNNFTFSYTFEDVPFHSSYAHSQSLDRLMNPLIDQYLYYLARTQSNAGGTAGNRELQFYQGGPTTMAEQAKNWLPGPCFRQQRVSKTLDQNNNSNFAWTGATKYHLNGRNSLVNPGVAMATHKDDEERFFPSSGVLIFGKTGAANKTTLENVLMTNEEEIRPTNPVATEEYGTVSSNLQAANTAAQTQVVNNQGALPGMVWQNRDVYLQGPIWAKIPHTDGNFHPSPLMGGFGLKHPPPQILIKNTPVPANPPEVFTPAKFASFITQYSTGQVSVEIEWELQKENSKRWNPEIQYTSNFDEQTGVDFAVDSQGVYSEPRPIGTRYLTRNL

SEQ ID NO: 456 - DNA, 2214 bp, Artificial Sequence
  Description of Artificial Sequence: Synthetic polynucleotide
atggctgccgatggttatcttccagattggctcgaggacaacctctctgagggcattcgcgagtggtgggacctgaaacctggagccccgaaacccaaagccaaccagcaaaagcaggacgacggccggggtctggtgcttcctggctacaagtacctcggacccttcaacggactcgacaagggggagcccgtcaacgcggcggacgcagcggccctcgagcacgacaaggcctacgaccagcagctcaaagcgggtgacaatccgtacctgcggtataaccacgccgacgccgagtttcaggagcgtctgcaagaagatacgtcttttgggggcaacctcgggcgagcagtcttccaggccaagaagcgggttctcgaacctctcggtctggttgaggaagctgctaagacggctcctggaaagaagagaccggtagaaccgtcacctcagcgttcccccgactcctccacgggcatcggcaagaaaggccagcagcccgctagaaagagactgaactttgggcagactggcgactcagagtcagtccccgaccctcaaccaatcggagaaccaccagcaggcccctctggtctgggatctggtacaatggctgcaggcggtggcgctccaatggcagacaataacgaaggcgccgacggagtgggtaatgcctcaggaaattggcattgcgattccacatggctgggcgacagagtcatcaccaccagcacccgaacctgggctttgcccacctacaacaaccacctctacaagcaaatctccagtcagtcagcaggtagcaccaacgacaacgtctacttcggctacagcaccccctgggggtattttgacttcaacagattccactgtcacttctcaccacgtgactggcagcggctcatcaacaacaactggggattccggcccaagaagctcaacttcaagctgttcaacatccaggtcaaggaggtcacaacgaatgacggcgtcacgaccatcgccaataaccttaccagcacggttcaggtcttttcggactcggaataccagctgccctacgtcctcggctccgcacaccagggctgcctgcctccgttcccggcggacgtcttcatgattcctcagtacggctacctgactctcaacaacggtagtcaggccgtgggacgttcctccttctactgcctggagtacttcccctctcagatgctgagaacgggcaacaacttttccttcagctacactttcgaggacgtgcctttccacagcagctacgcgcacagccagagtttggacaggctgatgaatcctctcatcgaccagtacctgtactacctgtcaagaacccagtctacgggaggcacagcgggaacccagcagttgctgttttctcaggccgggcctagcaacatgtcgactcaggccagaaactggctgcctggaccctgctacagacagcagcgcgtctccacgacactgtcgcaaaacaacaacagcaactttgcctggactggtgccaccaagtatcatctgaacggcagagactctctggtgaatccgggcgtcgccatggcaaccaacaaggacgacgaggaccgcttcttcccatccagcggcatcctcatgtttggcaagcagggagctggaaaagacaacgtggactatagcaacgtgatgctaaccagcgaggaagaaatcaagaccaccaaccccgtggccacagaacagtatggcgtggtggctgataacctacagcagcaaaacaccgctcctattgtgggggccgtcaacagccagggagccttacctggcatggtctggcagaaccgggacgtgtacctgcagggtcctatttgggccaagattcctcacacagatggcaactttcacccgtctcctttaatgggcggctttggacttaaacatccgcctcctcagatccttatcaaaaacactcctgttcctgcggatcctccaacagcgttcaaccaggccaagctgaattctttcatcacgcagtacagcaccggacaagtcagcgtggagatcgagtgggagctgcagaaggagaacagcaagcgctggaacccagagattcagtatacttccaactactacaaatctacaaatgtggactttgctgttaatactgagggtgcttactctgagcctcgccccattggcactcgttacctcacccgtaatctgtaa

SEQ ID NO: 457 - protein, 737 aa, Artificial Sequence
  Description of Artificial Sequence: Synthetic polypeptide
MAADGYLPDWLEDNLSEGIREWWDLKPGAPKPKANQQKQDDGRGLVLPGYKYLGPFNGLDKGEPVNAADAAALEHDKAYDQQLKAGDNPYLRYNHADAEFQERLQEDTSFGGNLGRAVFQAKKRVLEPLGLVEEAAKTAPGKKRPVEPSPQRSPDSSTGIGKKGQQPARKRLNFGQTGDSESVPDPQPIGEPPAGPSGLGSGTMAAGGGAPMADNNEGADGVGNASGNWHCDSTWLGDRVITTSTRTWALPTYNNHLYKQISSQSAGSTNDNVYFGYSTPWGYFDFNRFHCHFSPRDWQRLINNNWGFRPKKLNFKLFNIQVKEVTTNDGVTTIANNLTSTVQVFSDSEYQLPYVLGSAHQGCLPPFPADVFMIPQYGYLTLNNGSQAVGRSSFYCLEYFPSQMLRTGNNFSFSYTFEDVPFHSSYAHSQSLDRLMNPLIDQYLYYLSRTQSTGGTAGTQQLLFSQAGPSNMSTQARNWLPGPCYRQQRVSTTLSQNNNSNFAWTGATKYHLNGRDSLVNPGVAMATNKDDEDRFFPSSGILMFGKQGAGKDNVDYSNVMLTSEEEIKTTNPVATEQYGVVADNLQQQNTAPIVGAVNSQGALPGMVWQNRDVYLQGPIWAKIPHTDGNFHPSPLMGGFGLKHPPPQILIKNTPVPADPPTAFNQAKLNSFITQYSTGQVSVEIEWELQKENSKRWNPEIQYTSNYYKSTNVDFAVNTEGAYSEPRPIGTRYLTRNL

SEQ ID NO: 458 - DNA, 2217 bp, Artificial Sequence
  Description of Artificial Sequence: Synthetic polynucleotide
atggctgccgatggttatcttccagattggctcgaggacaacctctctgagggcattcgcgagtggtgggacctgaaacctggagccccgaaacccaaagccaaccagcaaaagcaggacgacggccggggtctggtgcttcctggctacaagtacctcggacccttcaacggactcgacaagggggagcccgtcaacgcggcggacgcagcggccctcgagcacgacaaggcctacgaccagcagctcaaagcgggtgacaatccgtacctgcggtataatcacgccgacgccgagtttcaggagcgtctgcaagaagatacgtcttttgggggcaacctcgggcgagcagtcttccaggccaagaagcgggttctcgaacctctcggtctggttgaggaaggcgctaagacggctcctggaaagaagagaccggtagagccgtcaccacagcgttcccccgactcctccacgggcatcggcaagaaaggccagcagcccgccagaaagagactcaatttcggtcagactggcgactcagagtcagtccccgaccctcaacctatcggagaacctccagcagcgccctctagtgtgggatctggtacaatggctgcaggcggtggcgcaccaatggcagacaataacgaaggtgccgacggagtgggtagttcctcgggaaattggcattgcgattccacatggctgggcgacagagtcatcaccaccagcacccgaacctgggccctgcccacctacaacaaccacctctacaagcaaatctccaacgggacctcgggaggcagcaccaacgacaacacctactttggctacagcaccccctgggggtattttgactttaacagattccactgccacttctcaccacgtgactggcagcgactcatcaacaacaactggggattccggcccaagagactcagcttcaagctcttcaacatccaggtcaaagaggtcacgcagaatgaaggcaccaagaccatcgccaataacctcaccagcaccatccaggtgtttacggactcggaataccagctgccgtacgtcctcggctctgcccaccagggctgcctgcctccgttcccggcggacgtcttcatgattcctcagtacggctacctgactctcaacaacggtagtcaggccgtgggacgttcctccttctactgcctggagtacttcccctctcagatgctgagaacgggcaacaacttttccttcagctacactttcgaggacgtgcctttccacagcagctacgcgcacagccagagtttggacaggctgatgaatcctctcatcgaccagtacctgtactacctgtcaagaacccagtctacgggaggcacagcgggaacccagcagttgctgttttctcaggccgggcctagcaacatgtcggctcaggccagaaactggctgcctggaccctgctacagacagcagcgcgtctccacgacactgtcgcaaaacaacaacagcaactttgcctggactggtgccaccaagtatcatctgaacggcagagactctctggtgaatccgggcgtcgccatggcaaccaacaaggacgacgaggaccgcttcttcccatccagcggcatcctcatgtttggcaagcagggagctggaaaagacaacgtggactatagcaacgtgatgctaaccagcgaggaagaaatcaaggccaccaaccccgtggccacagaacagtatggcgtggtggctgataacctacagcagcaaaacaccgctcctattgtgggggccgtcaacagccagggagccttacctggcatggtctggcagaaccgggacgtgtacctgcagggtcctatttgggccaagattcctcacacagatggcaactttcacccgtctcctttaatgggcggctttggacttaaacatccgcctcctcagatcctcatcaaaaacactcctgttcctgcggatcctccaacagcgttcaaccaggccaagctgaattctttcatcacgcagtacagcaccggacaagtcagcgtggagatcgagtgggagctgcagaaggagaacagcaagcgctggaacccagagattcagtatacttccaactactacaaatctacaaatgtggactttgctgttaatactgagggtgtttactctgagcctcgccccattggcactcgttacctcacccgtaatctgtaa

SEQ ID NO: 459 - protein, 738 aa, Artificial Sequence
  Description of Artificial Sequence: Synthetic polypeptide
MAADGYLPDWLEDNLSEGIREWWDLKPGAPKPKANQQKQDDGRGLVLPGYKYLGPFNGLDKGEPVNAADAAALEHDKAYDQQLKAGDNPYLRYNHADAEFQERLQEDTSFGGNLGRAVFQAKKRVLEPLGLVEEGAKTAPGKKRPVEPSPQRSPDSSTGIGKKGQQPARKRLNFGQTGDSESVPDPQPIGEPPAAPSSVGSGTMAAGGGAPMADNNEGADGVGSSSGNWHCDSTWLGDRVITTSTRTWALPTYNNHLYKQISNGTSGGSTNDNTYFGYSTPWGYFDFNRFHCHFSPRDWQRLINNNWGFRPKRLSFKLFNIQVKEVTQNEGTKTIANNLTSTIQVFTDSEYQLPYVLGSAHQGCLPPFPADVFMIPQYGYLTLNNGSQAVGRSSFYCLEYFPSQMLRTGNNFSFSYTFEDVPFHSSYAHSQSLDRLMNPLIDQYLYYLSRTQSTGGTAGTQQLLFSQAGPSNMSAQARNWLPGPCYRQQRVSTTLSQNNNSNFAWTGATKYHLNGRDSLVNPGVAMATNKDDEDRFFPSSGILMFGKQGAGKDNVDYSNVMLTSEEEIKATNPVATEQYGVVADNLQQQNTAPIVGAVNSQGALPGMVWQNRDVYLQGPIWAKIPHTDGNFHPSPLMGGFGLKHPPPQILIKNTPVPADPPTAFNQAKLNSFITQYSTGQVSVEIEWELQKENSKRWNPEIQYTSNYYKSTNVDFAVNTEGVYSEPRPIGTRYLTRNL

SEQ ID NO: 460 - DNA, 2217 bp, Artificial Sequence
  Description of Artificial Sequence: Synthetic polynucleotide
atggctgccgatggttatcttccagattggctcgaggacaacctctctgagggcattcgcgagtggtgggacctgaaacctggagccccgaaacccaaagccaaccagcaaaagcaggacgacggccggggtctggtgcttcctggctacaagcacctcggacccttcaacggactcgacaagggggagcccgtcaacgcggcggacgcagcggccctcgagcacgacaaggcctacgaccagcagctcaaagcgggtgacaatccgtacctgcggtataatcacgctgacgccgagtttcaggagcgtctgcaagaagatacgtcttttgggggcaacctcgggcgagcagtcttccaggccaagaagcgggttctcgaacctctcggtctggttgaggaaggcgctaagacggctcctggaaagaagagaccggtagagccgtcaccacagcgttcccccgactcctccacgggcatcggcaagaaaggccagcagcccgccagaaagagactcaatttcggtcagactggcgactcagagtcagtccccgaccctcaacctatcggagaacctccagcagcgccctctagtgtgggatctggtacaatggctgcaggcggtggcgcaccaatggcagacaataacgaaggtgccgacggagtgggtagttcctcgggaaattggcattgcgattccacatggctgggcgacagagtcatcaccaccagcacccgaacctgggccctgcccacctacaacaaccacctctacaagcaaatctccaacgggacctcgggaggcagcaccaacgacaacacctactttggctacagcaccccctgggggtattttgactttaacagattccactgccacttctcaccacgtgactggcagcgactcatcaacaacaactggggattccggcccaagagactcagcttcaagctcttcaacatccaggtcaaagaggtcacgcagaatgaaggcaccaagaccatcgccaataaccttaccagcacggttcaggtcttttcggactcggaataccagctgccctacgtcctcggctccgcacaccagggctgcctgcctccgttcccggcggacgtcttcatgattccccagtacggctacctgactctgaacaatggcagccaatcggtgggtcgttcctctttctactgcctggaatatttcccttctcaaatgctgagaacgggcaacaacttcaccttcagctacaccttcgaggacgttcccttccacagcagctacgcacacagccagagcctggaccggctgatgaatcctcttatcgaccagtacctgtattacctggccagaacacagagcaacgcaggaggcacagctggcaatcgggaactgcagttttatcagggcgggcctaccaccatggccgaacaagccaaaaactggctgcctggaccttgcttccggcaacaaagagtctccaagacgctggatcaaaacaacaacagcaactttgcttggactggtgccaccaaataccatctaaatggaagaaattcattggttaatcccggtgtcgccatggcaacccacaaggacgacgaggaacgcttcttcccttcgagcggagtcctgatttttggaaaaactggagcagctaataagactacactggaaaatgtgttaatgacaaatgaagaggaaattcgtcctaccaacccggtagccaccgaggaatacgggactgttagcagcaacctgcaggcggctaacactgcagcccagacacaagttgtcaacaaccagggagccttacctggtatggtctggcagaaccgggacgtgtacctgcagggtcccatctgggccaagattcctcacacggacggcaactttcacccgtctccgctgatgggcggctttggactgaagcatccgcctcctcagatcctgatcaaaaacactcctgttcctgctaatcccccggaggtgtttacgcctgccaagtttgcttctttcatcacacagtacagcaccggccaggtcagcgtggagatcgagtgggagctgcagaaggagaacagcaagcgctggaacccagagattcagtatacctccaattttgacaaacagactggtgtggactttgccgttgacagccagggtgtttattctgagcctcgccccattggtactcgttacctcacccgtaatctgtaa

SEQ ID NO: 461 - protein, 738 aa, Artificial Sequence
  Description of Artificial Sequence: Synthetic polypeptide
MAADGYLPDWLEDNLSEGIREWWDLKPGAPKPKANQQKQDDGRGLVLPGYKHLGPFNGLDKGEPVNAADAAALEHDKAYDQQLKAGDNPYLRYNHADAEFQERLQEDTSFGGNLGRAVFQAKKRVLEPLGLVEEGAKTAPGKKRPVEPSPQRSPDSSTGIGKKGQQPARKRLNFGQTGDSESVPDPQPIGEPPAAPSSVGSGTMAAGGGAPMADNNEGADGVGSSSGNWHCDSTWLGDRVITTSTRTWALPTYNNHLYKQISNGTSGGSTNDNTYFGYSTPWGYFDFNRFHCHFSPRDWQRLINNNWGFRPKRLSFKLFNIQVKEVTQNEGTKTIANNLTSTVQVFSDSEYQLPYVLGSAHQGCLPPFPADVFMIPQYGYLTLNNGSQSVGRSSFYCLEYFPSQMLRTGNNFTFSYTFEDVPFHSSYAHSQSLDRLMNPLIDQYLYYLARTQSNAGGTAGNRELQFYQGGPTTMAEQAKNWLPGPCFRQQRVSKTLDQNNNSNFAWTGATKYHLNGRNSLVNPGVAMATHKDDEERFFPSSGVLIFGKTGAANKTTLENVLMTNEEEIRPTNPVATEEYGTVSSNLQAANTAAQTQVVNNQGALPGMVWQNRDVYLQGPIWAKIPHTDGNFHPSPLMGGFGLKHPPPQILIKNTPVPANPPEVFTPAKFASFITQYSTGQVSVEIEWELQKENSKRWNPEIQYTSNFDKQTGVDFAVDSQGVYSEPRPIGTRYLTRNL

SEQ ID NO: 462 - protein, 737 aa, Artificial Sequence
  Description of Artificial Sequence: Synthetic polypeptide
MAADGYLPDWLEDNLSEGIREWWDLKPGAPKPKANQQKQDDGRGLVLPGYKYLGPFNGLDKGEPVNAADAAALEHDKAYDQQLKAGDNPYLRYNHADAEFQERLQEDTSFGGNLGRAVFQAKKRVLEPLGLVEEAAKTAPGKKRPVEPSPQRSPDSSTGIGKKGQQPARKRLNFGQTGDSESVPDPQPIGEPPAGPSGLGSGTMAAGGGAPMADNNKGADGVGNASGNWHCDSTWLGDRVITTSTRTWALPTYNNHLYKQISSQSAGSTNDNVYFGYSTPWGYFDFNRFHCHFSPRDWQRLINSNWGFRPKKLNFKLFNIQVKEVTTNDGVTTIANNLTSTVQVFSDSEYQLPYVLGSAHQGCLPPFPADVFMIPQYGYLTLNNGSQSVGRSSFYCLEYFPSQMLRTGNNFTFSYTFEDVPFHSSYAHSQSLDRLMNPLIDQYLYYLARTQSNAGGTAGNRELQFYQGGPTTMAEQAKNWLPGPCFRQQRVSKTLDQNNNSNFAWTGATKYHLNGRNSLVNPGVAMATHKDDEERFFPSSGVLIFGKTGAANKTTLENVLMTNEEEIRPTNPVATEEYGTVSSNLQAANTAAQTQVVNNQGALPGMVWQNRDVYLQGPIWAKIPHTDGNFHPSPLMGGFGLKHPPPQILIKNTPVPANPPEVFTPAKFASFITQYSTGQVSVEIEWELQKENSKRWNPEIQYTSNFDKQTGVDFAVDSQGVYSEPRPIGTRYLTRNL

SEQ ID NO: 463 - protein, 737 aa, Artificial Sequence
  Description of Artificial Sequence: Synthetic polypeptide
MAADGYLPDWLEDNLSEGIREWWDLKPGAPKPKANQQKQDDGRGLVLPGYKYLGPFNGLDKGEPVNAADAAALEHDKAYDQQLKAGDNPYLRYNHADAEFQERLQEDTSFGGNLGRAVFQAKKRVLEPLGLVEEAAKTAPGKKRPVEPSPQRSPDSSTGIGKKGQQPARKRLNFGQTGDSESVPDPQPIGEPPAGPSGLGSGTMAAGGGAPMADNNEGADGVGNASGNWHCDSTWLGDRVITTSTRTWALPTYNNHLYKQISSQSAGSTNDNVYFGYSTPWGYFDFNRFHCHFSPRDWQRLINSNWGFRPKKLNFKLFNIQVKEVTTNDGVTTIANNLTSTVQVFSDSEYQLPYVLGSAHQGCLPPFPADVFMIPQYGYLTLNNGSQSVGRSSFYCLEYFPSQMLRTGNNFTFSYTFEDVPFHSSYAHSQSLDRLMNPLIDQYLYYLARTQSNAGGTAGNRELQFYQGGPTTMAEQAKNWLPGPCFRQQRVSKTLDQNNNSNFAWTGATKYHLNGRNSLVNPGVAMATHKDDEERFFPSSGVLIFGKTGAANKTTLENVLMTNEEEIRPTNPVATEEYGTVSSNLQAANTAAQTQVVNNQGALPGMVWQNRDVYLQGPIWAKIPHTDGNFHPSPLMGGFGLKHPPPQILIKNTPVPANPPEVFTPAKFASFITQYSTGQVSVEIEWELQKENSKRWNPEIQYTSNFDKQTGVDFAVDSQGVYSEPRPIGTRYLTRNL

SEQ ID NO: 464 - protein, 737 aa, Artificial Sequence
  Description of Artificial Sequence: Synthetic polypeptide
MAADGYLPDWLEDNLSEGIREWWDLKPGAPKPKANQQKQDDGRGLVLPGYKYLGPFNGLDKGEPVNAADAAALEHDKAYDQQLKAGDNPYLRYNHADAEFQERLQEDTSFGGNLGRAVFQAKKRVLEPLGLVEEAAKTAPGKKRPVEPSPQRSPDSSTGIGKKGQQPARKRLNFGQTGDSESVPDPQPIGEPPAGPSGLGSGTMAAGGGAPMADNNEGADGVGNASGNWHCDSTWLGDRVITTSTRTWALPTYNNHLYKQISSQSAGSTNDNVYFGYSTPWGYFDFNRFHCHFSPRDWQRLINNNWGFRPKKLNFKLFNIQVKEVTTNDGVTTIANNLTSTVQVFSDSEYQLPYVLGSAHQGCLPPFPADVFMIPQYGYLTLNNGSQSVGRSSFYCLEYFPSQMLRTGNNFTFSYTFEDVPFHSSYAHSQSLDRLMNPLIDQYLYYLARTQSNAGGTAGNRELQFYQGGPTTMAEQAKNWLPGPCFRQQRVSKTLDQNNNSNFAWTGATKYHLNGRNSLVNPGVAMATHKDDEERFFPSSGVLIFGKTGAANKTTLENVLMTNEEEIRPTNPVATEEYGTVSSNLQAANTAAQTQVVNNQGALPGMVWQNRDVYLQGPIWAKIPHTDGNFHPSPLMGGFGLKHPPPQILIKNTPVPANPPEVFTPAKFASFITQYSTGQVSVEIEWELQKENSKRWNPEIQYTSNFDKQTGVDFAVDSQGVYSEPRPIGTRYLTRNL

SEQ ID NO: 465 - protein, 737 aa, Artificial Sequence
  Description of Artificial Sequence: Synthetic polypeptide
MAADGYLPDWLEDNLSEGIREWWDLKPGAPKPKANQQKQDDGRGLVLPGYKYLGPFNGLDKGEPVNAADAAALEHDKAYDQQLKAGDNPYLRYNHADAEFQERLQEDTSFGGNLGRAVFQAKKRVLEPLGLVEEAAKTAPGKKRPVEPSPQRSPDSSTGIGKKGQQPARKRLNFGQTGDSESVPDPQPIGEPPAGPSGLGSGTMAAGGGAPMADNNKGADGVGNASGNWHCDSTWLGDRVITTSTRTWALPTYNNHLYKQISSQSAGSTNDNVYFGYSTPWGYFDFNRFHCHFSPRDWQRLINNNWGFRPKKLNFKLFNIQVKEVTTNDGVTTIANNLTSTVQVFSDSEYQLPYVLGSAHQGCLPPFPADVFMIPQYGYLTLNNGSQSVGRSSFYCLEYFPSQMLRTGNNFTFSYTFEDVPFHSSYAHSQSLDRLMNPLIDQYLYYLARTQSNAGGTAGNRELQFYQGGPTTMAEQAKNWLPGPCFRQQRVSKTLDQNNNSNFAWTGATKYHLNGRNSLVNPGVAMATHKDDEERFFPSSGVLIFGKTGAANKTTLENVLMTNEEEIRPTNPVATEEYGTVSSNLQAANTAAQTQVVNNQGALPGMVWQNRDVYLQGPIWAKIPHTDGNFHPSPLMGGFGLKHPPPQILIKNTPVPANPPEVFTPAKFASFITQYSTGQVSVEIEWELQKENSKRWNPEIQYTSNFDKQTGVDFAVDSQGVYSEPRPIGTRYLTRNL

SEQ ID NO: 466 - DNA, 2214 bp, Artificial Sequence
  Description of Artificial Sequence: Synthetic polynucleotide
atggctgctgacggttatcttccagattggctcgaggacaacctctctgagggcattcgcgagtggtgggacctgaaacctggagcccccaagcccaaggccaaccagcagaagcaggacgacggccggggtctggtgcttcctggctacaagtacctcggacccttcaacggactcgacaagggggagcccgtcaacgcggcggacgcagcggccctcgagcacgacaaggcctacgaccagcagctcaaagcgggtgacaatccgtacctgcggtataaccacgccgacgccgagtttcaggagcgtctgcaagaagatacgtcttttgggggcaacctcgggcgagcagtcttccaggccaagaagcgggttctcgaacctctcggtctggttgaggaagctgctaagacggctcctggaaagaagagaccggtagaaccgtcacctcagcgttcccccgactcctccacgggcatcggcaagaaaggccagcagcccgctagaaagagactgaactttgggcagactggcgactcagagtcagtccccgaccctcaaccaatcggagaaccaccagcaggcccctctggtctgggatctggtacaatggctgcaggcggtggcgcaccaatggctgacaataacaagggcgccgacggagtgggtaatgcctcaggaaattggcattgcgattccacatggctgggcgacagagtcatcaccaccagcacccgaacctgggctttgcccacctacaacaaccacctctacaagcaaatctccagtcagtcagcaggtagcaccaacgacaacgtctacttcggctacagcaccccctgggggtattttgacttcaacagattccactgtcacttctcaccacgtgactggcagcggctcatcaacagcaactggggattccggcccaagaagctcaacttcaagctgttcaacatccaggtcaaggaggtcacaacgaatgacggcgtcacgaccatcgccaataaccttaccagcacggttcaggtcttttcggactcggaataccagctgccctacgtcctcggctccgcacaccagggctgcctgcctccgttcccggcggacgtcttcatgattccccagtacggctacctgactctgaacaatggcagccaatcggtgggtcgttcctctttctactgcctggaatatttcccttctcaaatgctgagaacgggcaacaacttcaccttcagctacaccttcgaggacgttcccttccacagcagctacgcacacagccagagcctggaccggctgatgaatcctcttatcgaccagtacctgtattacctggccagaacacagagcaacgcaggaggcacagctggcaatcgggaactgcagttttatcagggcgggcctaccaccatggccgaacaagccaaaaactggctgcctggaccttgcttccggcaacaaagagtctccaagacgctggatcaaaacaacaacagcaactttgcttggactggtgccaccaaataccatctaaatggaagaaattcattggttaatcccggtgtcgccatggcaacccacaaggacgacgaggaacgcttcttcccttcgagcggagtcctgatttttggaaaaactggagcagctaataagactacactggaaaatgtgttaatgacaaatgaagaggaaattcgtcctaccaacccggtagccaccgaggaatacgggactgttagcagcaacctgcaggcggctaacactgcagcccagacacaagttgtcaacaaccagggagccttacctggtatggtctggcagaaccgggacgtgtacctgcagggtcccatctgggccaagattcctcacacggacggcaactttcacccgtctccgctgatgggcggctttggactgaagcatccgcctcctcagatcctgatcaaaaacactcctgttcctgctaatcccccggaggtgtttacgcctgccaagtttgcttctttcatcacacagtacagcaccggccaggtcagcgtggagatcgagtgggagctgcagaaggagaacagcaagcgctggaacccagagattcagtatacctccaattttgacaaacagactggtgtggactttgccgttgacagccagggtgtttattctgagcctcgccccattggtactcgttacctcacccgtaatctgtaa

SEQ ID NO: 467 - DNA, 2217 bp, Artificial Sequence
  Description of Artificial Sequence: Synthetic polynucleotide
atggctgccgatggttatcttccagattggctcgaggacaacctctctgagggcattcgcgagtggtgggacctgaaacctggagccccgaaacccaaagccaaccagcaaaagcaggacgacggccggggtctggtgcttcctggctacaagtacctcggacccttcaacggactcgacaagggggagcccgtcaacgcggcggacgcagcggccctcgagcacgacaaggcctacgaccagcagctcaaagcgggtgacaatccgcacctgcggtataatcacgccgacgccgagtttcaggagcgtctgcaagaagatacgtcttttgggggcaacctcgggcgagcagtcttccaggccaagaagcgggttctcgaacctctcggtctggttgaggaaggcgctaagacggctcctggaaagaagagaccggtagagccgtcaccacagcgttcccccgactcctccacgggcatcggcaagaaaggccagcagcccgccagaaagagactcaatttcggtcagactggcgactcagagtcagtccccgaccctcaacttatcggagaacctccagcagcgccctctagtgtgggatctggtacaatggctgcaggcggtggcgcaccaatggcagacaataacgaaggtgccgacggagtgggtagttcctcgggaaattggcattgcgattccacatggctgggcgacagagtcatcaccaccagcacccgaacctgggccctgcccacctacaacaaccacctctacaagcaaatctccaacgggacctcgggaggcagcaccaacgacaacacctactttggctacagcaccccctgggggtattttgactttaacagattccactgccacttctcaccacgtgactggcagcgactcatcaacaacaactggggattccggcccaagagactcagcttcaagctcttcaacatccaggtcaaagaggtcacgcagaatgaaggcaccaagaccatcgccaataacctcaccagcaccatccaggtgtttacggactcggagtaccagctgccgtacgtcctcggctctgcccaccagggctgcctgcctccgttcccggcggacgtcttcatgattcctcagtacggcaacctgactctcaacaacggtagtcaggccgtgggacgttcctccttctactgcctggagtacttcccctctcagatgctgagaacgggcaacaacttttccttcagctacactttcgaggacgtgcctttccacagcagctacgcgcacagccagagtttggacaggctgatgaatcctctcatcgaccagtacctgtactacctgtcaagaacccagtctacgggaggcacagcgggaacccagcagttgctgttttctcaggccgggcctagcaacatgtcggctcaggccagaaactggctgcctggaccctgctacagacagcagcgcgtctccacgacactgtcgcaaaacaacaacagcaactttgcctggactggtgccaccaagtatcatctgaacggcagagactctctggtgaatccgggcgtcgccatggcaaccaacaaggacgacgaggaccgcttcttcccatccagcggcatcctcatgtttggcaagcagggagctggaaaagacaacatgggctatagcaacgtgatgctaaccagcgaggaagaaatcaagaccaccaaccccgtggccacagaacagtatggcgtggtggctgataacctacagcagcaaaacaccgctcctattgtgggggccgtcaacagccagggagccttacctggcatggtctggcagaaccgggacgtgtacctgcagggtcctatttgggccaagattcctcacacagatggcaactttcacccgtctcctttaatgggcggctttggacttaaacatccgcctcctcagatcctcatcaaaaacactcctgttcctgcggatcctccaacagcgttcaaccaggccaagctgaattctttcatcacgcagtacggcaccggacaagtcagcgtggagatcgagtgggagctgcagaaggagaacagcaagcgctggaacccagagattcagtatacttccaactactacaaatctacaaatgtggactttgctgttaatactgagggtgtttactctgagcctcgccccattggcactcgttacctcacccgtaatctgtaa

SEQ ID NO: 468 - protein, 738 aa, Artificial Sequence
  Description of Artificial Sequence: Synthetic polypeptide
MAADGYLPDWLEDNLSEGIREWWDLKPGAPKPKANQQKQDDGRGLVLPGYKYLGPFNGLDKGEPVNAADAAALEHDKAYDQQLKAGDNPHLRYNHADAEFQERLQEDTSFGGNLGRAVFQAKKRVLEPLGLVEEGAKTAPGKKRPVEPSPQRSPDSSTGIGKKGQQPARKRLNFGQTGDSESVPDPQLIGEPPAAPSSVGSGTMAAGGGAPMADNNEGADGVGSSSGNWHCDSTWLGDRVITTSTRTWALPTYNNHLYKQISNGTSGGSTNDNTYFGYSTPWGYFDFNRFHCHFSPRDWQRLINNNWGFRPKRLSFKLFNIQVKEVTQNEGTKTIANNLTSTIQVFTDSEYQLPYVLGSAHQGCLPPFPADVFMIPQYGNLTLNNGSQAVGRSSFYCLEYFPSQMLRTGNNFSFSYTFEDVPFHSSYAHSQSLDRLMNPLIDQYLYYLSRTQSTGGTAGTQQLLFSQAGPSNMSAQARNWLPGPCYRQQRVSTTLSQNNNSNFAWTGATKYHLNGRDSLVNPGVAMATNKDDEDRFFPSSGILMFGKQGAGKDNMGYSNVMLTSEEEIKTTNPVATEQYGVVADNLQQQNTAPIVGAVNSQGALPGMVWQNRDVYLQGPIWAKIPHTDGNFHPSPLMGGFGLKHPPPQILIKNTPVPADPPTAFNQAKLNSFITQYGTGQVSVEIEWELQKENSKRWNPEIQYTSNYYKSTNVDFAVNTEGVYSEPRPIGTRYLTRNL

SEQ ID NO: 469 - DNA, 2217 bp, Artificial Sequence
  Description of Artificial Sequence: Synthetic polynucleotide
atggctgccgatggttatcttccagattggctcgaggacaacctctctgagggcattcgcgagtggtgggacctgaaacctggagccccgaaacccaaagccaaccagcaaaagcaggacgacggccggggtctggtgcttcctggctacaagtacctcggacccttcaacggactcgacaagggggagcccgtcaacgcggcggacgcagcggccctcgagcacgacaaggcctacgaccagcagctcaaagcgggtgacaatccgtacctgcggtataatcacgccgacgccgagtttcaggagcgtctgcaagaagatacgtcttttgggggcaacctcgggcgagcagtcttccaggccaagaagcgggttctcgaacctctcggtctggttgaggaaggcgctaagacggctcctggaaagaagagaccggtagagccgtcaccacagcgttcccccgactcctccacgggcatcggcaagaaaggccagcagcccgccggaaagagactcaatttcggtcagactggcgactcagagtcagtccccgaccctcaacctatcggagaacctccagcagcgccctctagtgtgggatctggtacaatggctgcaggcggtggcgcaccaatggcagacaataacgaaggtgccgacggagtgggtagttcctcgggaaattggcattgcgattccacatggctgggcgacagagtcatcaccaccagcacccgaacctgggccctgcccacctacaacaaccacctctacaagcaaatctccaacgggacctcgggaggcagcaccaacgacaacacctactttggctacagcaccccctgggggtattttgactttaacagattccactgccacttctcaccacgtgactggcagcgactcatcaacaacaactggggattccggcccaagagactcagcttcaagctcttcaacatccaggtcaaagaggtcacgcagaatgaaggcaccaagaccatcgccaataacctcaccagcaccatccaggtgtttacggactcggaataccagctgccgtacgtcctcggctctgcccaccagggctgcctgcctccgttcccggcggacgtcttcatgattcctcagtacggctacctgactctcaacaacggtagtcaggccgtgggacgttcctccttctactgcctggagtacttcccctctcagatgctgagaacgggcaacaacttttccttcagctacactttcgaggacgtgcctttccacagcagctacgcgcacagccagagtttggacaggctgatgaatcctctcgtcgaccagtacctgtactacctgtcaagaacccagtctacgggaggcacagcgggaacccagcagttgctgttttctcaggccgggcctagcaacatgtcggctcaggccagaaactggctgcctggaccctgctacagacagcagcgcgtctccacgacactgtcgcaaaacaacaacagcaactttgcctggactggtgccaccaagtatcatctgaacggcagagactctctggtgaatccgggcgtcgccatggcaaccaacaaggacgacgaggaccgcttcttcccatccagcggcatcctcatgtttggcaagcagggagctggaaaagacaacgtggactatagcaacgtgatgctaaccagcgaggaagaaatcaagaccaccaaccccgtggccacagaacagtatggcgtggtggctgataacctacagcagcaaaacaccgctcctattgtgggggccgtcaacagccagggagccttacctggcatggtctggcagaaccgggacgtgtacctgcagggtcctatttgggccaagattcctcacacagatggcaactttcacccgtctcctttaatgggcggctttggacttaaacatccgcctcctcagatcctcatcaaaaacactcctgttcctgcggatcctccaacagcgttcaaccaggccaagctgaattctttcatcacgcagtacagcaccggacaagtcagcgtggagatcgagtgggagctgcagaaggagaacagcaagcgctggagcccagagattcagtatacttccaactactacaaatctacaaatgtggactttgctgttaatactgagggtgtttactctgagcctcgccccattggcactcgttacctcacccgtaatctgtaa

SEQ ID NO: 470 - protein, 738 aa, Artificial Sequence
  Description of Artificial Sequence: Synthetic polypeptide
MAADGYLPDWLEDNLSEGIREWWDLKPGAPKPKANQQKQDDGRGLVLPGYKYLGPFNGLDKGEPVNAADAAALEHDKAYDQQLKAGDNPYLRYNHADAEFQERLQEDTSFGGNLGRAVFQAKKRVLEPLGLVEEGAKTAPGKKRPVEPSPQRSPDSSTGIGKKGQQPAGKRLNFGQTGDSESVPDPQPIGEPPAAPSSVGSGTMAAGGGAPMADNNEGADGVGSSSGNWHCDSTWLGDRVITTSTRTWALPTYNNHLYKQISNGTSGGSTNDNTYFGYSTPWGYFDFNRFHCHFSPRDWQRLINNNWGFRPKRLSFKLFNIQVKEVTQNEGTKTIANNLTSTIQVFTDSEYQLPYVLGSAHQGCLPPFPADVFMIPQYGYLTLNNGSQAVGRSSFYCLEYFPSQMLRTGNNFSFSYTFEDVPFHSSYAHSQSLDRLMNPLVDQYLYYLSRTQSTGGTAGTQQLLFSQAGPSNMSAQARNWLPGPCYRQQRVSTTLSQNNNSNFAWTGATKYHLNGRDSLVNPGVAMATNKDDEDRFFPSSGILMFGKQGAGKDNVDYSNVMLTSEEEIKTTNPVATEQYGVVADNLQQQNTAPIVGAVNSQGALPGMVWQNRDVYLQGPIWAKIPHTDGNFHPSPLMGGFGLKHPPPQILIKNTPVPADPPTAFNQAKLNSFITQYSTGQVSVEIEWELQKENSKRWSPEIQYTSNYYKSTNVDFAVNTEGVYSEPRPIGTRYLTRNL

SEQ ID NO: 471 - DNA, 2217 bp, Artificial Sequence
  Description of Artificial Sequence: Synthetic polynucleotide
atggttgccgatggttatcttccagattggctcgaggacaacctctctgagggcattcgcgagtggtgggacctgaaacctggagccccgaaacccaaagccaaccagcaaaagcagggcgacggccggggtctggtgcttcctggctacaagtacctcggacccttcaacggactcgacaagggggagcccgtcaacgcggcggacgcagcggccctcgagcacgacaaggcctacgaccagcagcttaaagcgggtgacaatccgtacctgcggtataatcacgccgacgccgagcttcaggagcgtctgcaagaagatacgtcttttgggggcaacctcgggcgagcagtcttccaggccaagaagcgggttctcgaacctctcggtctggttgaggaaggcgctaagacggctcctggaaagaagagaccggtagagccgtcaccacagcgttcccccgactcctccacgggcatcggcaagaaaggccagcagcccgccagaaagagactcaatttcggtcagactggcgactcagagtcagtccccgaccctcaacctatcggagaacctccagcagcgccctctagtgtgggatctggtacaatggctgcaggcggtggcgcgccaatggcagacaataacgaaggtgccgacggagtgggtagttcctcgggaaattggcattgcgattccacatggctgggcgacagagtcatcaccaccagcacccgaacctgggccctgcccacctacaacaaccacctctacaagcaaatctccaacgggacctcgggaggcagcaccaacgacaacacctactttggctacagcaccccctgggggtattttgactttaacagattccactgccacttctcaccacgtgactggcagcgactcatcaacaacaactggggattccggcccaagagactcagcttcaagctcttcaacatccaggtcaaagaggtcacgcagaatgaaggcaccaagaccatcgccaataacctcaccagcaccatccaggtgtttacggactcggaataccagctgccgtacgtcctcggctctgcccaccagggctgccagcctccgttcccggcggacgtcttcatgattcctcagtacggctacctgactctcaacaacggtagtcaggccgtgggacgttcctccttctactgcctggagtacttcccctctcagatgctgagaacgggcaacaacttttccttcagctacactttcgaggacgtgcctttccacagcagctacgcgcacagccagagtttggacaggctgatgaatcctctcatcgaccagtacctgtactacctgtcaagaacccagtctacgggaggcacagcgggaacccagcagttgctgttttctcaggccgggcctagcaacatgtcggctcaggccagaaactggctgcctggaccctgctacagacagcagcgcgtctccacgacactgtcgcaaaacaacaacagcaactttgcctggactggtgccaccaagtatcatctgaacggcagagactctctggtgaatccgggcgtcgccatggcaaccaacaaggacgacgaggaccgcttcttcccatccagcggcatcctcatgtttggcaagcagggagctggaaaagacaacgtggactatagcaacgtgatgctaaccagcgaggaagaaatcaagaccaccaaccccgtggccacagaacagtatggcgtggtggctgataacctacagcagcaaaacaccgctcctattgtgggggccgtcaacagccagggagccttacctggcatggtctggcagaaccgggacgtgtacctgcagggtcctatttgggccaagattcctcacacagatggcaactttcacccgtctcctttaatgggcggctttggacttaaacatccgcctcctcagatcctcatcaaaaacactcctgttcctgcggatcctccaacagcgttcaaccaggccaagctgaattctttcatcacgcagtacagcaccggacaagtcagcgtggagatcgagtgggagccgcagaaggagaacagcaagcgctggaacccagagattcagtatacttccaactactacaaatctacaaatgtggactttgctgttaatactgagggtgtttactctgagcctcgccccattggcactcgttacctcacccgtaatctgtaa

SEQ ID NO: 472 - protein, 738 aa, Artificial Sequence
  Description of Artificial Sequence: Synthetic polypeptide
MVADGYLPDWLEDNLSEGIREWWDLKPGAPKPKANQQKQGDGRGLVLPGYKYLGPFNGLDKGEPVNAADAAALEHDKAYDQQLKAGDNPYLRYNHADAELQERLQEDTSFGGNLGRAVFQAKKRVLEPLGLVEEGAKTAPGKKRPVEPSPQRSPDSSTGIGKKGQQPARKRLNFGQTGDSESVPDPQPIGEPPAAPSSVGSGTMAAGGGAPMADNNEGADGVGSSSGNWHCDSTWLGDRVITTSTRTWALPTYNNHLYKQISNGTSGGSTNDNTYFGYSTPWGYFDFNRFHCHFSPRDWQRLINNNWGFRPKRLSFKLFNIQVKEVTQNEGTKTIANNLTSTIQVFTDSEYQLPYVLGSAHQGCQPPFPADVFMIPQYGYLTLNNGSQAVGRSSFYCLEYFPSQMLRTGNNFSFSYTFEDVPFHSSYAHSQSLDRLMNPLIDQYLYYLSRTQSTGGTAGTQQLLFSQAGPSNMSAQARNWLPGPCYRQQRVSTTLSQNNNSNFAWTGATKYHLNGRDSLVNPGVAMATNKDDEDRFFPSSGILMFGKQGAGKDNVDYSNVMLTSEEEIKTTNPVATEQYGVVADNLQQQNTAPIVGAVNSQGALPGMVWQNRDVYLQGPIWAKIPHTDGNFHPSPLMGGFGLKHPPPQILIKNTPVPADPPTAFNQAKLNSFITQYSTGQVSVEIEWEPQKENSKRWNPEIQYTSNYYKSTNVDFAVNTEGVYSEPRPIGTRYLTRNL

SEQ ID NO: 473 - DNA, 2217 bp, Artificial Sequence
  Description of Artificial Sequence: Synthetic polynucleotide
atggctgccgatggttatcttccagattggctcgaggacaacctctctgagggcattcgcgagtggtgggacctgaaacctggagccccgaaacccaaagccaaccagcaaaagcaggacgacggccggggtctggtgcttcctggctacaagtacctcggacccttcaacggactcgacaagggggagcccgtcaacgcggcggacgcagcggccctcgagcacgacaaggcctacgaccagcagctcaaagcgggtgacaatccgtacctgcggtataatcacgccgacgccgagtttcaggagcgtctgcaagaagatacgtcttttgggggcaacctcgggcgagcagtcttccaggccaagaagcgggttctcgaacctctcggtctggttgaggaaggcgctaagacggctcctggaaagaagagaccggtagagccgtcaccacagcgttcccccgactcctccacgggcatcggcaagaaaggccagcagcccgccagaaagagactcaatttcggtcagactggcgactcagagtcagtccccgaccctcaacctatcggagaacctccagcagcgccctctagtgtgggatctggtacaatggctgcaggcggtggcgcaccaatggcagacaataacgaaggtgccgacggagtgggtagttcctcgggaaattggcattgcgattccacatggctgggcgacagagtcatcaccaccagcacccgaacctgggccctgcccacctacaacaaccacctctacaagcaaatctccaacgggacctcgggaggcagcaccaacgacaacacctactttggctacagcaccccctgggggtattttgactttaacagattccactgccacttctcaccacgtgactggcagcgactcatcaacaacaactggggattccggcccaagagactcagcttcaagctcttcaacatccaggtcaaagaggtcacgcagaatgaaggcaccaagaccatcgccaatagcctcaccagcaccatccaggtgtttacggactcggaataccagctgccgtacgtcctcggctctgcccaccagggctgcctgcctccgttcccggcggacgtcttcatgattcctcagtacggctacctgactcccaacaacggtagtcaggccgtgggacgttcctccttctactgcctggagtacttcccctctcagatgctgagaacgggcaacaacttttccttcagctacactttcgaggacgtgcctttccacagcagctacgcgcacagccagagtttggacaggctgatgaatcctctcatcgaccagtacctgtactacctgtcaagaacccagtctacgggaggcacagcgggaacccagcagttgctgtcttctcaggccgggcctagcaacatgtcggctcaggccagaaactggctgcctggaccctgctacagacagcagcgcgtctccacgacactgtcgcaaaacaacaacagcaactttgcctggactggtgccaccaagtatcatctgaacggcagagactctctggtgaatccgggcgtcgccatggcaaccaacaaggacgacgaggaccgcttcttcccatccagcggcatcctcatgtttggcaagcagggagctggaaaagacaacgtggactatagcaacgtgatgctaaccagcgaggaagaaatcaagaccaccaaccccgtggccacagaacagtatggcgtggtggctgataacctacagcagcaaaacaccgctcctattgtgggggccgtcaacagccagggagccttacctggcatggtctggcagaaccgggacgtgtacttgcagggtcctatttgggccaagattcctcacacagatggcaactttcacccgtctcctttaatgggcggctttggacttaaacatccgcctcctcagatcctcatcaaaaacactcctgttcctgcggatcctccaacagcgttcaaccaggccaagctgaattctttcatcacgcagtacagcaccggacaagtcagcgtggagatcgagtgggagctgcagaaggagaacagcaagcgctggaacccagagattcagtatacttccaactactacaaatctacaaatgtggactttgctgttaatactgagggtgtttactctgagcctcgccccattggcactcgttacctcacccgtaatctgtaa

SEQ ID NO: 474 - protein, 738 aa, Artificial Sequence
  Description of Artificial Sequence: Synthetic polypeptide
MAADGYLPDWLEDNLSEGIREWWDLKPGAPKPKANQQKQDDGRGLVLPGYKYLGPFNGLDKGEPVNAADAAALEHDKAYDQQLKAGDNPYLRYNHADAEFQERLQEDTSFGGNLGRAVFQAKKRVLEPLGLVEEGAKTAPGKKRPVEPSPQRSPDSSTGIGKKGQQPARKRLNFGQTGDSESVPDPQPIGEPPAAPSSVGSGTMAAGGGAPMADNNEGADGVGSSSGNWHCDSTWLGDRVITTSTRTWALPTYNNHLYKQISNGTSGGSTNDNTYFGYSTPWGYFDFNRFHCHFSPRDWQRLINNNWGFRPKRLSFKLFNIQVKEVTQNEGTKTIANSLTSTIQVFTDSEYQLPYVLGSAHQGCLPPFPADVFMIPQYGYLTPNNGSQAVGRSSFYCLEYFPSQMLRTGNNFSFSYTFEDVPFHSSYAHSQSLDRLMNPLIDQYLYYLSRTQSTGGTAGTQQLLSSQAGPSNMSAQARNWLPGPCYRQQRVSTTLSQNNNSNFAWTGATKYHLNGRDSLVNPGVAMATNKDDEDRFFPSSGILMFGKQGAGKDNVDYSNVMLTSEEEIKTTNPVATEQYGVVADNLQQQNTAPIVGAVNSQGALPGMVWQNRDVYLQGPIWAKIPHTDGNFHPSPLMGGFGLKHPPPQILIKNTPVPADPPTAFNQAKLNSFITQYSTGQVSVEIEWELQKENSKRWNPEIQYTSNYYKSTNVDFAVNTEGVYSEPRPIGTRYLTRNL

SEQ ID NO: 475 - protein, 738 aa, Artificial Sequence
  Description of Artificial Sequence: Synthetic polypeptide
MAADGYLPDWLEDNLSEGIREWWDLKPGAPKPKANQQKQDDGRGLVLPGYKYLGPFNGLDKGEPVNAADAAALEHDKAYDQQLKAGDNPYLRYNHADAEFQERLQEDTSFGGNLGRAVFQAKKRVLEPLGLVEEGAKTAPGKKRPVEPSPQRSPDSSTGIGKKGQQPARKRLNFGQTGDSESVPDPQPIGEPPAAPSSVGSGTMAAGGGAPMADNNEGADGVGSSSGNWHCDSTWLGDRVITTSTRTWALPTYNNHLYKQISNGTSGGSTNDNTYFGYSTPWGYFDFNRFHCHFSPRDWQRLINNNWGFRPKRLSFKLFNIQVKEVTQNEGTKTIANNLTSTIQVFTDSEYQLPYVLGSAHQGCLPPFPADVFMIPQYGYLTLNNGSQAVGRSSFYCLEYFPSQMLRTGNNFSFSYTFEDVPFHSSYVHSQSLDRLMNPLIDQYLYYLSRTQSTGGTAGTQQLLFSQAGPSNMSAQARNWLPGPCYRQQRVSTTLSQNNNSNFAWTGATKYHLNGRDSLVNSGVAMATNKDDEDRFFPSSGILMFGKQGAGKDNVDYSNVMLTSEEEIKTTNPVATEQYGVVADNLQQQNTAPIVGAVNSQGALPGMVWQNRDVYLQGPIWAKIPHTDGNFHPSPLMGGFGLKHPPPQILIKNTPVPADPPTAFNQAKLNSFITQYSTGQVSVEIEWELQKENSKRWNPEIQYTSNYYKSTNVDFAVNTEGVYSEPRPIGTRYPTRNL

SEQ ID NO: 476 - DNA, 2217 bp, Artificial Sequence
  Description of Artificial Sequence: Synthetic polynucleotide
atggctgccgatggttatcttccagattggctcgaggacaacctctctgagggcattcgcgagtggtgggacctgaaacctggagccccgaaacccaaagccaaccagcaaaagcaggacgacggccggggtctggtgcttcctggctacaagtacctcggacccttcaacggactcgacaagggggagcccgtcaacgcggcggacgcagcggccctcgagcacgacaaggcctacgaccagcagctcaaagcgggtgacaatccgtacctgcggtataatcacgccgacgccgagtttcaggagcgtctgcaagaagatacgtcttttgggggcaacctcgggcgagcagtcttccaggccaagaagcgggttctcgaacctctcggtctggttgaggaaggcgctaagacggctcctggaaagaagagaccggtagagccgtcaccacagcgttcccccgactcctccacgggcatcggcaagaaaggccagcagcccgccagaaagagactcaatttcggtcagactggcgactcagagtcagtccccgaccctcaacctatcggagaacctccagcagcgccctctagtgtgggatctggtacaatggctgcaggcggtggcgcaccaatggcagacaataacgaaggtgccgacggagtgggtagttcctcgggaaattggcattgcgattccacatggctgggcgacagagtcatcaccaccagcacccgaacctgggccctgcccacctacaacaaccacctctacaagcaaatctccaacgggacctcgggaggcagcaccaacgacaacacctactttggctacagcaccccctgggggtattttgactttaacagattccactgccacttctcaccacgtgactggcagcgactcatcaacaacaactggggattccggcccaagagactcagcttcaagctcttcaacatccaggtcaaagaggtcacgcagaatgaaggcaccaagaccatcgccaataacctcaccagcaccatccaggtgtttacggactcggaataccagctgccgtacgtcctcggctctgcccaccagggctgcctgcctccgttcccggcggacgtcttcatgattcctcagtacggctacctgactctcaacaacggtagtcaggccgtgggacgttcctccttctactgcctggagtacttcccctctcagatgctgagaacgggcaacaacttttccttcagctacactttcgaggacgtgcctttccacagcagctacgtgcacagccagagtttggacaggctgatgaatcctctcatcgaccagtacctgtactacctgtcaagaacccagtctacgggaggcacagcgggaacccagcagttgctgttttctcaggccgggcctagcaacatgtcggctcaggccagaaactggctgcctggaccctgctacagacagcagcgcgtctccacgacactgtcgcaaaacaacaacagcaactttgcctggactggtgccaccaagtatcatctgaacggcagagactctctggtgaattcgggcgtcgccatggcaaccaacaaggacgacgaggaccgcttcttcccatccagcggcatcctcatgtttggcaagcagggagctggaaaagacaacgtggactatagcaacgtgatgctaaccagcgaggaagaaatcaagaccaccaaccccgtggccacagaacagtatggcgtggtggctgataacctacagcagcaaaacaccgctcctattgtgggggccgtcaacagccagggagccttacctggcatggtctggcagaaccgggacgtgtacctgcagggtcctatttgggccaagattcctcacacagatggcaactttcacccgtctcctttaatgggcggctttggacttaaacatccgcctcctcagatcctcatcaaaaacactcctgttcctgcggatcctccaacagcgttcaaccaggccaagctgaattctttcatcacgcagtacagcaccggacaagtcagcgtggagatcgagtgggagctgcagaaggagaacagcaagcgctggaacccagagattcagtatacttccaactactacaaatctacaaatgtggactttgctgttaatactgagggtgtttactctgagcctcgccccattggcactcgttaccccacccgtaatctgtaa

SEQ ID NO: 477 - protein, 734 aa, Artificial Sequence; identical to SEQ ID NO: 302
  Description of Artificial Sequence: Synthetic polypeptide

SEQ ID NO: 478 - DNA, 2214 bp, Artificial Sequence
  Description of Artificial Sequence: Synthetic polynucleotide
atggctgctgacggttatcttccagattggctcgaggacaacctctctgagggcattcgcgagtggtgggacctgaaacctggagccccgaaacccaaagccaaccagcagaagcaggacgacggccggggtctggtgcttcctggctacaagtacctcggacccttcaacggactcgacaagggggagcccgtcaacgcggcggacgcagcggccctcgagcacgacaaggcctacgaccagcagctcaaagcgggtgacaatccgtacctgcggtataaccacgccgacgccgagtttcaggagcgtctgcaagaagatacgtcttttgggggcaacctcgggcgagcagtcttccaggccaagaagcgggttctcgaacctctcggtctggttgaggaagctgctaagacggctcctggaaagaagagaccggtagaaccgtcacctcagcgttcccccgactcctccacgggcatcggcaagaaaggccagcagcccgctagaaagagactgaactttgggcagactggcgactcagagtcagtccccgaccctcaacctctcggagaaccaccagcaggcccctctggtctgggatctggtacaatggctgcaggcggtggcgctccaatggcagacaataacgaaggcgccgacggagtgggtaatgcctcaggaaattggcattgcgattccacatggctgggcgacagagtcatcaccaccagcacccgaacctgggctttgcccacctacaacaaccacctctacaagcaaatctccagtcagtcagcaggtagcaccaacgacaacgtctacttcggctacagcaccccctgggggtattttgacttcaacagattccactgtcacttctcaccacgtgactggcagcgactcatcaacaacaactggggattccggcccaagaagctcaacttcaagctcttcaacatccaagtcaaggaggtcacgacgaatgacggcgtcacgaccatcgctaataaccttaccagcacggttcaggtcttttcggactcggagtaccagctgccgtacgtcctcggctctgcccaccagggctgcctgcctccgttcccggcggacgtcttcatgattcctcagtacggctacctgactctgaacaatggcagccaatcggtgggacgttcatccttctactgcctggaatacttcccttctcaggtgctgagaacgggtaacaacttcaccttcagttacaccttcgaggacgtgcctttccacagcagctacgcgcacagccagagcctagaccggctgatgaatcccctcatcgaccagtacctgtattacctggctagaacacagagtaacccaggaggcacatctggcaatcgggaactgcagttttaccagggcgggccttccaccatggccgaacaagccaagaactggttacctggaccttgcttccggcaacaaagagtttccaaaacactggatcaaaacaacaacagcaactttgcttggactggtgccaccaaatatcacctgaacggcagaaactcattggtgaatcctggtgtcgccatggcaactcacaaggacgacgaggaccgctttttcccatccagcggagtcctgatttttggaaaaactggagcaaccaacaagactacattggaaaacgtgttaatgacaaatgaagaagaaattcgtcctactaatcctgtggccacagaagaatacgggatagtcagcagcaatttacaagcggccaatactgcagcccagacacaagttgtcaacaaccagggagccttacctggcatggtctggcagaaccgggacgtgtacctgcagggtcccatctgggccaaaattcctcacacagacggcaactttcacccgtctccgctgatgggcggctttggactgaagcatccgcctcctcagatcctgatcaaaaacactcctgttcctgctaatcccccggaggtgtttacgcctgccaagtttgcttctttcatcacacagtacagcaccggccaggtcagcgtggagatcgagtgggagctgcagaaggagaacagcaagcgctggaacccagagattcagtatacctccaattttgacaaacagactggtgtggactttgccgttgacagccagggtgtttattctgagcctcgccccattggtactcgttacctcacccgtaatctgtaa

SEQ ID NO: 479 - protein, 737 aa, Artificial Sequence
  Description of Artificial Sequence: Synthetic polypeptide
MAADGYLPDWLEDNLSEGIREWWDLKPGAPKPKANQQKQDDGRGLVLPGYKYLGPFNGLDKGEPVNAADAAALEHDKAYDQQLKAGDNPYLRYNHADAEFQERLQEDTSFGGNLGRAVFQAKKRVLEPLGLVEEAAKTAPGKKRPVEPSPQRSPDSSTGIGKKGQQPARKRLNFGQTGDSESVPDPQPLGEPPAGPSGLGSGTMAAGGGAPMADNNEGADGVGNASGNWHCDSTWLGDRVITTSTRTWALPTYNNHLYKQISSQSAGSTNDNVYFGYSTPWGYFDFNRFHCHFSPRDWQRLINNNWGFRPKKLNFKLFNIQVKEVTTNDGVTTIANNLTSTVQVFSDSEYQLPYVLGSAHQGCLPPFPADVFMIPQYGYLTLNNGSQSVGRSSFYCLEYFPSQVLRTGNNFTFSYTFEDVPFHSSYAHSQSLDRLMNPLIDQYLYYLARTQSNPGGTSGNRELQFYQGGPSTMAEQAKNWLPGPCFRQQRVSKTLDQNNNSNFAWTGATKYHLNGRNSLVNPGVAMATHKDDEDRFFPSSGVLIFGKTGATNKTTLENVLMTNEEEIRPTNPVATEEYGIVSSNLQAANTAAQTQVVNNQGALPGMVWQNRDVYLQGPIWAKIPHTDGNFHPSPLMGGFGLKHPPPQILIKNTPVPANPPEVFTPAKFASFITQYSTGQVSVEIEWELQKENSKRWNPEIQYTSNFDKQTGVDFAVDSQGVYSEPRPIGTRYLTRNL

SEQ ID NO: 480 - DNA, 2214 bp, Artificial Sequence
  Description of Artificial Sequence: Synthetic polynucleotide
atggctgccgatggttatcttccagattggctcgaggacaacctctctgagggcattcgcgagtggtgggacctgaaacctggagccccgaaacccaaagccaaccagcaaaagcaggacgacggccggggtctggtgcttcctggctacaagtacctcggacccttcaacggactcgacaagggggagcccgtcaacgcggcggacgcagcggccctcgagcacgacaaggcctacgaccagcagctcaaagcgggtgacaatccgtacctgcggtataatcacgccgacgccgagtttcaggagcgtctgcaagaagatacgtcttttgggggcaacctcgggcgagcagtcttccaggccaagaagcgggttctcgaacctctcggtctggttgaggaaggcgctaagacggctcctggaaagaagagaccggtagagccgtcaccacagcgttcccccgactcctccacgggcatcggcaagaaaggccagcagcccgccagaaagagactcaatttcggtcagactggcgactcagagtcagtccccgaccctcaacctatcggagaacctccagcagcgccctctagtgtgggatctggtacaatggctgcaggcggtggcgcaccaatggcagacaataacgaaggtgccgacggagtgggtagttcctcgggaaattggcattgcgattccacacggctgggcgacagagtcatcaccaccagcacccggacctgggctttgcccacctacaacaaccacctctacaagcaaatctccagtcagtcagcaggtagcaccaacgacaacgtctacttcggctacagcaccccctgggggtattttgacttcaacagattccactgtcacttctcaccacgtgactggcagcggctcatcaacaacaactggggattccggcccaagaagctcaacttcaagctgttcaacatccaggtcaaggaggtcacaacgaatgacggcgtcacgaccatcgccaataaccttaccagcacggttcaggtcttttcggactcggaataccagctgccctacgtcctcggctccgcacaccagggctgcctgcctccgttcccggcggacgtcttcatgattccccagtacggctacctgactctgaacaatggcagccaatcggtgggtcgttcctctttctactgcctggaatatttcccttctcaaatgctgagaacgggcaacaacttcaccttcagctacaccttcgaggacgttcccttccacagcagctacgcacacagccagagcctggaccggctgatgaatcctcttatcgaccagtacctgtattacctggccagaacacagagcaacgcaggaggcacagctggcaatcgggaactgcagttttatcagggcgggcctaccaccatggccgaacaagccaaaaactggctgcctggaccttgcttccggcaacgaagagtctccaagacgctggatcaaaacaacaacagcaactttgcttggactggtgccaccaaataccatctaaatggaagaaattcattggttaatcccggtgtcgccatggcaacccacaaggacgacgaggaacgcttcttcccttcgagcggagtcctgatttttggaaaaactggagcagctaataagactacactggaaaatgtgttaatgacaaatgaagaggaaattcgtcctaccaacccggtagccaccgaggaatacgggactgttagcagcaacctgcaggcggctaacactgcagcccagacacaagttgtcaacaaccagggagccttacctggtatggtctggcagaaccgggacgtgtacctgcagggtcccatctgggccaagattcctcacacggacggcaactttcacccgtctccgctgatgggcggctttggactgaagcatccgcctcctcagatcctgatcaaaaacactcctgttcctgctaatcccccggaggtgtttacgcctgccaagtttgcttctttcatcacacagtacagcaccggccaggtcagcgtggagatcgagtgggagctgcagaaggagaacagcaagcgctggaacccagagattcagtatacctccaattttgacaaacagactggtgtggactttgccgttgacagccagggtgtttattctgagcctcgccccattggtactcgttacctcacccgtaatctgtaa

SEQ ID NO: 481 - protein, 737 aa, Artificial Sequence
  Description of Artificial Sequence: Synthetic polypeptide
MAADGYLPDWLEDNLSEGIREWWDLKPGAPKPKANQQKQDDGRGLVLPGYKYLGPFNGLDKGEPVNAADAAALEHDKAYDQQLKAGDNPYLRYNHADAEFQERLQEDTSFGGNLGRAVFQAKKRVLEPLGLVEEGAKTAPGKKRPVEPSPQRSPDSSTGIGKKGQQPARKRLNFGQTGDSESVPDPQPIGEPPAAPSSVGSGTMAAGGGAPMADNNEGADGVGSSSGNWHCDSTRLGDRVITTSTRTWALPTYNNHLYKQISSQSAGSTNDNVYFGYSTPWGYFDFNRFHCHFSPRDWQRLINNNWGFRPKKLNFKLFNIQVKEVTTNDGVTTIANNLTSTVQVFSDSEYQLPYVLGSAHQGCLPPFPADVFMIPQYGYLTLNNGSQSVGRSSFYCLEYFPSQMLRTGNNFTFSYTFEDVPFHSSYAHSQSLDRLMNPLIDQYLYYLARTQSNAGGTAGNRELQFYQGGPTTMAEQAKNWLPGPCFRQRRVSKTLDQNNNSNFAWTGATKYHLNGRNSLVNPGVAMATHKDDEERFFPSSGVLIFGKTGAANKTTLENVLMTNEEEIRPTNPVATEEYGTVSSNLQAANTAAQTQVVNNQGALPGMVWQNRDVYLQGPIWAKIPHTDGNFHPSPLMGGFGLKHPPPQILIKNTPVPANPPEVFTPAKFASFITQYSTGQVSVEIEWELQKENSKRWNPEIQYTSNFDKQTGVDFAVDSQGVYSEPRPIGTRYLTRNL

SEQ ID NO: 482 - DNA, 2208 bp, Artificial Sequence
  Description of Artificial Sequence: Synthetic polynucleotide
atggctgccgatggttatcttccagattggctcgaggacactctctctgaaggaataagacagtggtggaagctcaaacctggcccaccaccaccaaagcccgcagagcggcataaggacgacagcaggggtcttgtgcttcctgggtacaagtacctcggacccttcaacggactcgacaagggggagccggtcaacgaggcagacgccgcggccctcgagcacgacaaggcctacgaccggcagctcgacagcggagacaacccgtacctcaagtacaaccacgccgacgcggagtttcaggagcgtcttaaagaagatacgtcttttgggggcaacctcggacgagcagtcttccaggcgaaaaagagggttcttgaacctctgggcctggttgaggaacctgttaagacggctccgggaaaaaagaggccggtagagcactctcctgcggagccagactcctcctcgggaaccggaaaagcgggccagcagcctgcaagaaaaagattgaattttggtcagactggagacgcagactccgtacctgacccccagcctctcggacagccaccagcagccccctctggtttgggatctactacaatggctacaggcagtggcgcaccaatggcagacaataacgagggtgccgatggagtgggtaattcttcaggaaattggcattgcgattcccaatggctgggcgacagagtcatcaccaccagcacccgaacctgggcccagcccacctacaacaaccacctctacaagcaaatctcaagccaatcaggagcctcaaacgacaaccactactttggctacagcaccccttgggggtattttgacttcaacagattccactgccacttttcaccacgtgactggcaaagactcatcaacaacaactggggattccgacccaagagactcaacttcaagctctttaacattcaagtcaaagaggtcacgcagaatgacggtacgacgacgattgccaataaccttaccagcacggttcaggtgtttactgactcggagtaccagctcccgtacgtcctcgggtcggcgcatcaaggatgcctcccgccgtttccagcggacgtcttcatggtcccacagtatggatacctcaccctgaacaacgggagtcaggcggtaggacgctcttccttttactgcctggagtactttccttctcagatgcttcgtactggaaacaactttcagttcagctacacctttgaagacgttcctttccacagcagctacgctcacagccagagtctggatcggctgatgaatcctctgatcgaccagtacctgtattatctgaacaaaacacaatcaaatagtggagctcttcagcagtctcggctactgtttagtcaagctggacccaccagcatgtctcttcaagctaaaaactggctacctggaccttgctacagacagcagcgtctgtcaaagcaggcaaacgacaacaacaacagcaactttccctggactgcggctacaaagtaccacctaaatggccgggactcgttggttaatccaggaccagctatggccagtcacaaagacgatgaagaaaagtttttccccatgcatggaaccctgatatttggtaaacaaggaacaaatgctaacgacgcggatttggacaatgtcatgattacagatgaagaagaaatccgcaccaccaatcccgtggctacggagcagtacggatatgtgtcaaataatttgcaaaactcaaatactggtccaactactggaactgtcaatcaccgaggagcgttacctggcatggtgtggcaggatcgagacgtgtacctgcagggacccatttgggccaagattcctcacaccgatggacactttcatccttctccactgatgggaggttttgggctcaaacacccgcctcctcagatcatgatcaaaaacactcccgttccagccaatcctcccacaaacttcagttctgccaagtttgcttctttcatcacacagtattccacggggcaggtcagcgtggagatcgagtgggagctgcagaaagagaacagcaaacgctggaatcccgaaattcagtacacttccaactacaacaaatctgttaatgtggactttactgtggacactaatggcgtgtattcagagcctcgccccattggcaccagatacctgactcgtaatctgtaa

SEQ ID NO: 483 - protein, 735 aa, Artificial Sequence
  Description of Artificial Sequence: Synthetic polypeptide
MAADGYLPDWLEDTLSEGIRQWWKLKPGPPPPKPAERHKDDSRGLVLPGYKYLGPFNGLDKGEPVNEADAAALEHDKAYDRQLDSGDNPYLKYNHADAEFQERLKEDTSFGGNLGRAVFQAKKRVLEPLGLVEEPVKTAPGKKRPVEHSPAEPDSSSGTGKAGQQPARKRLNFGQTGDADSVPDPQPLGQPPAAPSGLGSTTMATGSGAPMADNNEGADGVGNSSGNWHCDSQWLGDRVITTSTRTWAQPTYNNHLYKQISSQSGASNDNHYFGYSTPWGYFDFNRFHCHFSPRDWQRLINNNWGFRPKRLNFKLFNIQVKEVTQNDGTTTIANNLTSTVQVFTDSEYQLPYVLGSAHQGCLPPFPADVFMVPQYGYLTLNNGSQAVGRSSFYCLEYFPSQMLRTGNNFQFSYTFEDVPFHSSYAHSQSLDRLMNPLIDQYLYYLNKTQSNSGALQQSRLLFSQAGPTSMSLQAKNWLPGPCYRQQRLSKQANDNNNSNFPWTAATKYHLNGRDSLVNPGPAMASHKDDEEKFFPMHGTLIFGKQGTNANDADLDNVMITDEEEIRTTNPVATEQYGYVSNNLQNSNTGPTTGTVNHRGALPGMVWQDRDVYLQGPIWAKIPHTDGHFHPSPLMGGFGLKHPPPQIMIKNTPVPANPPTNFSSAKFASFITQYSTGQVSVEIEWELQKENSKRWNPEIQYTSNYNKSVNVDFTVDTNGVYSEPRPIGTRYLTRNL

SEQ ID NO: 484 - DNA, 2217 bp, Artificial Sequence
  Description of Artificial Sequence: Synthetic polynucleotide
atggctgccgatggttatcttccagattggctcgaggacaacctctctgagggcattcgcgagtggtgggcgctgaaacctggagccccgaagcccaaagccaaccagcaaaagcaggacgacggccggggtctggtgcttcctggctacaagtacctcggacccttcaacggactcgacaagggggagcccgtcaacgcggcggacgcagcggccctcgagcacgacaaggcctacgaccagcagctgcaggcgggtgacaatccgtacctgcggtataatcacgccgacgccgagtttcaggagcgtctgcaagaagatacgtcttttgggggcaacctcgggcgagcagtcttccaggccaagaagcgggttctcgaacctctcggtctggttgaggaaggcgctaagacggctcctggaaagaagagaccggtagagccgtcaccacagcgttcccccgactcctccacgggcatcggcaagaaaggccagcagcccgccagaaagagactcaatttcggtcagactggcgactcagagtcagtccccgaccctcaacctatcggagaacctccagcagcgccctctagtgtgggatctggtacaatggctgcaggcggtggcgcgccaatggcagacaataacgaaggtgccgacggagtgggtagttcctcgggaaattggcattgcgattccacatggctgggcgacagagtcatcaccaccagcacccgaacctgggccctgcccacctacaacaaccacctctacaagcaaacctccaacgggacctcgggaggcagcaccaacgacaacacctactttggctacagcaccccctgggggtattttgactttaacagattccactgccacttctcaccacgtgactggcagcgactcatcaacaacaactggggattccggcccaagagactcagcttcaagctcttcaacatccaggtcaaagaggtcacgcagaatgaaggcaccaagaccatcgccaataacctcaccagcaccatccaggtgtttacggactcggaataccagctgccgtacgtcctcggctctgcccaccagggctgcctgcctccgttcccggcggacgtcttcatgattcctcagtacggctacctgactctcaacaacggtagtcaggccgtgggacgttcctccttctactgcctggagtacttcccctctcagatgctgagaacgggcaacaacttttccttcagctacactttcgaggacgtgcctttccacagcagctacgcgcacagccagagtttggacaggctgatgaatcctctcatcgaccagtacctgtactacctgtcaagaacccagtctacgggaggcacagcgggaacccagcagttgctgttttctcaggccgggcctagcaacatgtcggctcaggccagaaactggctgcctggaccctgctacagacagcagcgcgtctccacgacactgtcgcaaaacaacaacagcaactttgcctggactggtgccaccaagtatcatctgaacggcagagactctctggtgaatccgggcgtcgccatggcaaccaacaaggacgacgaggaccgcttcttcccatccagcggcatcctcatgtttggcaagcagggagctggaaaagacaacgtggactatagcaacgtgatgctaaccagcgaggaagaaatcaagaccaccaaccccgtggccacagaacagtatggcgtggtggctgataacctacagcagcaaaacaccgctcctattgtgggggccgtcaacagccagggagccttacctggcatggtctggcagaaccgggacgtgtacctgcagggtcctatttgggccaagattcctcacacagatggcaactttcacccgtctcctttaatgggcggctttggacttaaacatccgcctcctcagatcctcatcaaaaacactcctgttcctgcggatcctccaacagcgttcaaccaggccaagctgaattctttcatcacgcagtacagcaccggacaagtcagcgcggagatcgagtgggagctgcagaaggagaacagcaagcgctggaacccagagattcagtatacttccaactactacaaatctacaaatgtggactttgctgttaatactgagggtgtttactctgagcctcgccccattggcactcgttacctcacccgtaatctgtaa

SEQ ID NO: 485 - protein, 738 aa, Artificial Sequence
  Description of Artificial Sequence: Synthetic polypeptide
MAADGYLPDWLEDNLSEGIREWWALKPGAPKPKANQQKQDDGRGLVLPGYKYLGPFNGLDKGEPVNAADAAALEHDKAYDQQLQAGDNPYLRYNHADAEFQERLQEDTSFGGNLGRAVFQAKKRVLEPLGLVEEGAKTAPGKKRPVEPSPQRSPDSSTGIGKKGQQPARKRLNFGQTGDSESVPDPQPIGEPPAAPSSVGSGTMAAGGGAPMADNNEGADGVGSSSGNWHCDSTWLGDRVITTSTRTWALPTYNNHLYKQTSNGTSGGSTNDNTYFGYSTPWGYFDFNRFHCHFSPRDWQRLINNNWGFRPKRLSFKLFNIQVKEVTQNEGTKTIANNLTSTIQVFTDSEYQLPYVLGSAHQGCLPPFPADVFMIPQYGYLTLNNGSQAVGRSSFYCLEYFPSQMLRTGNNFSFSYTFEDVPFHSSYAHSQSLDRLMNPLIDQYLYYLSRTQSTGGTAGTQQLLFSQAGPSNMSAQARNWLPGPCYRQQRVSTTLSQNNNSNFAWTGATKYHLNGRDSLVNPGVAMATNKDDEDRFFPSSGILMFGKQGAGKDNVDYSNVMLTSEEEIKTTNPVATEQYGVVADNLQQQNTAPIVGAVNSQGALPGMVWQNRDVYLQGPIWAKIPHTDGNFHPSPLMGGFGLKHPPPQILIKNTPVPADPPTAFNQAKLNSFITQYSTGQVSAEIEWELQKENSKRWNPEIQYTSNYYKSTNVDFAVNTEGVYSEPRPIGTRYLTRNL

SEQ ID NO: 486 - DNA, 2217 bp, Artificial Sequence
  Description of Artificial Sequence: Synthetic polynucleotide
atggctgctgacggttatcttccagattggctcgaggacaacctctctgagggcattcgcgagtggtgggacctgaaacctggagcccccaagcccaaggccaaccagcagaagcaggacgacggccggggtctggtgcttcctggctacaagtacctcggacccttcaacggactcgacaagggggagcccgtcaacgcggcggacgcagcggccctcgagcacgacaaggcctacgaccagcagctcaaagcgggtgacaatccgtacctgcggtataatcacgccgacgccgagtttcaggagcgtctgcaagaagatacgtcttttgggggcaacctcgggcgagcagtcttccaggccaagaagcgggttctcgaacctctcggtctggttgaggaagctgctaagacggctcctggaaagaagagaccggtagaaccgtcacctcagcgttcccccgactcctccacgggcatcggcaagaaaggccagcagcccgctagaaagagactgaactttgggcagactggcgactcagagtcagtccccgaccctcaaccaatcggagaacctccagcagcgccctctagtgtgggatctggtacaatggccgcaggcggtggcgcaccaatggcagacaataacgaaggtgccgacggagtgggtagttcctcgggaaattggcattgcgattccacatggctgggcgacagagtcatcaccaccagcacccgaacctgggccctgcccacctacaacaaccacctctacaagcaaatctccaacgggacctcgggaggcagcaccaacgacaacacctactttggctacagcaccccctgggggtattttgactttaacagattccactgccacttctcaccacgtgactggcagcgactcatcaacaacaactggggattccggcccaagagactcagcttcaagctcttcaacatccaggtcaaagaggtcacgcagaatgaaggcaccaagaccatcgccaataacctcaccagcaccatccaggtgtttacggactcggaataccagctgccgtacgtcctcggctctgcccaccagggctgcctgcctccgttcccggcggacgtcttcatgattcctcagtacggctacctgactctcaacaacggtagtcaggccgtgggacgttcctccttctactgcctggagtacttcccctctcagatgctgagaacgggcaacaacttttccttcagctacactttcgaggacgtgcctttccacagcagctacgcgcacagccagagtttggacaggctgatgaatcctctcatcgaccagtacctgtactacctgtcaagaacccagtctacgggaggcacagcgggaacccagcagctgctgttttctcaggccgggcctagcaacatgtcggctcaggccagaaactggctgcctggaccctgctacagacagcagcgcgtctccacgacactgtcgcaaaacaacaacagcaactttgcctggactggtgccaccaagtatcatctgaacggcagagactctctggtgaatccgggcgtcgccatggcaaccaacaaggacgacgaggaccgcttcttcccatccagcggcatcctcatgtttggcaagcagggagctggaaaagacaacgtggactatagcaacgtgatgctaaccagcgaggaagaaatcaagaccaccaaccccgtggccacagaacagtatggcgtggtggctgataacctacagcagcaaaacaccgctcctattgtgggggccgtcaacagccagggagccttacctggcatggtctggcagaaccgggacgtgtacctgcagggtcctatttgggccaagattcctcacacagatggcaactttcacccgtctcctttaatgggcggctttggacttaaacatccgcctcctcagatcctcatcaaaagcactcctgttcctgcggatcctccaacagcgttcaaccaggccaagctgaattctttcatcacgcagtacagcaccggacaagtcagcgtggagatcgagtgggagctgcagaaggagaacagcaagtgctggaacccagagattcagtatacttccaactactacaaatctacaaatgtggactttgctgttaatactgagggtgtttactctgagcctcgccccattggcactcgttacctcacccgtaatctgtaa

SEQ ID NO: 487 - protein, 738 aa, Artificial Sequence
  Description of Artificial Sequence: Synthetic polypeptide
MAADGYLPDWLEDNLSEGIREWWDLKPGAPKPKANQQKQDDGRGLVLPGYKYLGPFNGLDKGEPVNAADAAALEHDKAYDQQLKAGDNPYLRYNHADAEFQERLQEDTSFGGNLGRAVFQAKKRVLEPLGLVEEAAKTAPGKKRPVEPSPQRSPDSSTGIGKKGQQPARKRLNFGQTGDSESVPDPQPIGEPPAAPSSVGSGTMAAGGGAPMADNNEGADGVGSSSGNWHCDSTWLGDRVITTSTRTWALPTYNNHLYKQISNGTSGGSTNDNTYFGYSTPWGYFDFNRFHCHFSPRDWQRLINNNWGFRPKRLSFKLFNIQVKEVTQNEGTKTIANNLTSTIQVFTDSEYQLPYVLGSAHQGCLPPFPADVFMIPQYGYLTLNNGSQAVGRSSFYCLEYFPSQMLRTGNNFSFSYTFEDVPFHSSYAHSQSLDRLMNPLIDQYLYYLSRTQSTGGTAGTQQLLFSQAGPSNMSAQARNWLPGPCYRQQRVSTTLSQNNNSNFAWTGATKYHLNGRDSLVNPGVAMATNKDDEDRFFPSSGILMFGKQGAGKDNVDYSNVMLTSEEEIKTTNPVATEQYGVVADNLQQQNTAPIVGAVNSQGALPGMVWQNRDVYLQGPIWAKIPHTDGNFHPSPLMGGFGLKHPPPQILIKSTPVPADPPTAFNQAKLNSFITQYSTGQVSVEIEWELQKENSKCWNPEIQYTSNYYKSTNVDFAVNTEGVYSEPRPIGTRYLTRNL

SEQ ID NO: 488 - protein, 738 aa, Artificial Sequence
  Description of Artificial Sequence: Synthetic polypeptide
MAADGYLPDWLEDNLSEGIREWWDLKPGAPKPKANQQKQDDGRGLVLPGYKYLGPFNGLDKGEPVNAADAAALEHDKAYDQQLKAGDNPYLRYNHADAEFQERLQEDTSFGGNLGRAVFQAKKRVLEPLGLVEEAAKTAPGKKRPVEPSPQRSPDSSTGIGKKGQQPARKRLNFGQTGDSESVPDPQPIGEPPAAPSSVGSGTMAAGGGAPMADNNEGADGVGSSSGNWHCDSTWLGDRVITTSTRTWALPTYNNHLYKQISNGTSGGSTNDNTYFGYSTPWGYFDFNRFHCHFSPRDWQRLINNNWGFRPKRLSFKLFNIQVKEVTQNEGTKTIANNLTSTIQVFTDSEYQLPYVLGSAHQGCLPPFPADVFMIPQYGYLTLNNGSQAVGRSSFYCLEYFPSQMLRTGNNFSFSYTFEDVPFHSSYAHSQSLDRLMNPLIDQYLYYLSRTQSTGGTAGTQQLLFSQAGPSNMSAQARNWLPGPCYRQQRVSTTLSQNNNSNFAWTGATKYHLNGRDSLVNPGVAMATNKDDEDRFFPSSGILMFGKQGAGKDNVDYSNVMLTSEEEIKTTNPVATEQYGVVADNLQQQNTAPIVGAVNSQGALPGMVWQNRDVYLQGPIWAKIPHTDGNFHPSPLMGGFGLKHPPPQILIKSTPVPADPPTAFNQAKLNSFITQYSTGQVSVEIEWELQKENSKRWNPEIQYTSNYYKSTNVDFAVNTEGVYSEPRPIGTRYLTRNL

SEQ ID NO: 489 - DNA, 2217 bp, Artificial Sequence
  Description of Artificial Sequence: Synthetic polynucleotide
atggctgctgacggttatcttccagattggctcgaggacaacctctctgagggcattcgcgagtggtgggacctgaaacctggagcccccaagcccaaggccaaccagcagaagcaggacgacggccggggtctggtgcttcctggctacaagtacctcggacccttcaacggactcgacaagggggagcccgtcaacgcggcggacgcagcggccctcgagcacgacaaggcctacgaccagcagctcaaagcgggtgacaatccgtacctgcggtataaccacgccgacgccgagtttcaggagcgtctgcaagaagatacgtcttttgggggcaacctcgggcgagcagtcttccaggccaagaagcgggttctcgaacctctcggtctggttgaggaagctgctaagacggctcctggaaagaagagaccggtagaaccgtcacctcagcgttcccccgactcctccacgggcatcggcaagaaaggccagcagcccgctagaaagagactgaactttgggcagactggcgactcagagtcagtccccgaccctcaaccaatcggagaaccaccagcaggcccctctggtctgggatctggtacaatggctgcaggcggtggcgcaccaatggctgacaataacgagggcgccgacggagtgggtaatgcctcaggaaattggcattgcgattccacatggctgggcgacagagtcatcaccaccagcacccgaacctgggctttgcccacctacaacaaccacctctacaagcaaatctccagtcagtcagcaggtagcaccaacgacaacgtctacttcggctacagcaccccctgggggtattttgacttcaacagattccactgtcacttctcaccacgtgactggcagcggctcatcaacaacaactggggattccggcccaagaagctcaacttcaagctgttcaacatccaggtcaaggaggtcacaacgaatgacggcgtcacgaccatcgccaataaccctaccagcacggttcaggtcttttcggactcggaataccagctgccctacgtcctcggctccgcacaccagggctgcctgcctccgttcccggcggacgtcttcatgattccccagtacggctacctgactctgaacaatggcagccaatcggtgggtcgttcctctttctactgcctggaatatttcccttctcaaatgctgagaacgggcaacaacttcaccttcagctacaccttcgaggacgttcccttccacagcagctacgcacacagccagagcctggaccggctgatgaatcctcttatcgaccagtacctgtattacctggccagaacacagagcaacgcaggaggcacagctggcaatcgggaactgcagttttatcagggcgggcctaccaccatggccgaacaagccaaaaactggctgcctggaccctgctacagacagcagcgcgtctccacgacactgtcgcaaaacaacaacagcaactttgcctggactggtgccaccaagtatcatctgaacggcagagactctctggtgaatccgggcgtcgccatggcaaccaacaaggacgacgaggaccgcttcttcccatccagcggcatcctcatgtttggcaagcagggagctggaaaagacaacgtggactatagcaacgtgatgctaaccagcgaggaagaaatcaagaccaccaaccccgtggccacagaacagtatggcgtggtggctgataacctacagcagcaaaacaccgctcctattgtgggggccgtcaacagccagggagccttacctggcatggtctggcagaaccgggacgtgtacctgcagggtcctatttgggccaagattcctcacacagatggcaactttcacccgtctcctttaatgggcggctttggacttaaacatccgcctcctcagatcctcatcaaaaacactcctgttcctgcggatcctccaacagcgttcaaccaggccaagctgaattctttcatcacgcagtacagcaccggacaagtcagcgtggagatcgagtgggagctgcagaaggagaacagcaagcgctggaacccagagattcagtatacttccaactactacaaatctacaaatgtggactttgctgttaatactgagggtgtttactctgagcctcgccccattggcactcgttacctcacccgtaatctgtaa

SEQ ID NO: 490 - protein, 738 aa, Artificial Sequence
  Description of Artificial Sequence: Synthetic polypeptide
MAADGYLPDWLEDNLSEGIREWWDLKPGAPKPKANQQKQDDGRGLVLPGYKYLGPFNGLDKGEPVNAADAAALEHDKAYDQQLKAGDNPYLRYNHADAEFQERLQEDTSFGGNLGRAVFQAKKRVLEPLGLVEEAAKTAPGKKRPVEPSPQRSPDSSTGIGKKGQQPARKRLNFGQTGDSESVPDPQPIGEPPAGPSGLGSGTMAAGGGAPMADNNEGADGVGNASGNWHCDSTWLGDRVITTSTRTWALPTYNNHLYKQISSQSAGSTNDNVYFGYSTPWGYFDFNRFHCHFSPRDWQRLINNNWGFRPKKLNFKLFNIQVKEVTTNDGVTTIANNPTSTVQVFSDSEYQLPYVLGSAHQGCLPPFPADVFMIPQYGYLTLNNGSQSVGRSSFYCLEYFPSQMLRTGNNFTFSYTFEDVPFHSSYAHSQSLDRLMNPLIDQYLYYLARTQSNAGGTAGNRELQFYQGGPTTMAEQAKNWLPGPCYRQQRVSTTLSQNNNSNFAWTGATKYHLNGRDSLVNPGVAMATNKDDEDRFFPSSGILMFGKQGAGKDNVDYSNVMLTSEEEIKTTNPVATEQYGVVADNLQQQNTAPIVGAVNSQGALPGMVWQNRDVYLQGPIWAKIPHTDGNFHPSPLMGGFGLKHPPPQILIKNTPVPADPPTAFNQAKLNSFITQYSTGQVSVEIEWELQKENSKRWNPEIQYTSNYYKSTNVDFAVNTEGVYSEPRPIGTRYLTRNL

SEQ ID NO: 491 - DNA, 2208 bp, Artificial Sequence
  Description of Artificial Sequence: Synthetic polynucleotide
atggctgccgatggttatcttccagattggctcgaggacaacctctctgagggcattcacgagtggtgggacccgaaacctggagccccgaaacccaaagccaaccagcaaaagcaggacgacggccggggtctggtgcttcctggctacaagtacctcggacccttcaacggactcgacaagggggagcccgtcaacgcggcggacgcagcggccctcgagcacgacaaggcctacgaccagcagctcaaagcgggtgacaatccgtacctgcggtataatcacgccgacgccgagtttcaggagcgtctgcaagaagatacgtcttttgggggcaacctcgggcgagcagtcttccaggccaagaagcgggttctcgaacctctcggtctggttgaggaaggcgctaagacggctcctggaaagaagagaccggtagagccgtcaccacagcgttcccccgactcctccacgggcatcggcaagaaaggccagcagcccgccagaaagagactcaatttcggtcagactggcgactcagagtcagtccccgaccctcaacctatcggagaacctccagcagcgccctctagtgtgggatctggtacaatggctgcaggcggtggcgcaccaatggcagacaataacgaaggtgccgacggagtgggtagttcctcgggaaattggcattgcgattccacatggctgggcgacagagtcatcaccaccagcacccgaacctgggccctgcccacccacaacaaccacctctacaagcaaatctccaacgggacctcgggaggcagcaccaacgacaacgtctacttcggctacagcaccccctgggggtattttgacttcaacagattccactgtcacttctcaccacgtgaccggcagcgactcatcaacaacaactggggattccggcccaagagactcagcttcaagctcttcaacatccaggtcaaagaggtcacgcagaatgaaggcaccaagaccatcgccaataacctcaccagcaccatccaggtgtttacggactcggaataccagctgccgtacgtcctcggctctgcccaccagggctgcctgcctccgttcccggcggacgtcttcatgattcctcagtacggctacctgactctcaacaacggtagtcaggccgtgggacgttcctccttctactgcctggagtacttcccctctcagatgctgagaacgggcaacaacttttccttcagctacactttcgaggacgtgcctttccacagcagctacgcgcacagccagagtttggacaggctgatgaatcctctcatcgaccagtacctgtactacctgtcaagaacccagtctacggaaggcacagcgggaacccagcagttgctgttttctcaggccgggcctagcaacatgtcggctcaggccagaaactggctgcctggaccctgctacagacagcagcgcgtctccacgacactgtcgcaaaacaacaacagcaactttgcctggactggtgccaccaagtatcatctgaacggcagagactctctggtgaatccgggcgtcgccatggcaacccacaaggacgacgaggaacgcttcttcccttcgagcggagtcctgatttttggaaaaactggagcagctaataagactacactggaaaatgtgttaatgacaaatgaagaggaaattcgtcctaccaacccggtagccaccgaggaatacgggactgttagcagcaacctgcaggcggctaacactgcagcccagacacaagttgtcaacaaccagggagccttacctggtatggtctggcagaaccgggacgtgtacctgcagggtcccatctgggccaagattcctcacacggacggcaactttcacccgtctccgctgatgggcggctttggactgaagcatcctcagatcctgatcaaaaacactcctgttcctgctaatcccccggaggtgtttacgcctgccaagtttgcttctttcatcacacagtacagcaccggccaggtcagcgtggagatcgagtgggagctgcagaaggagaacagcaagcgctggaacccagagattcagtatacctccaattttgacaaacagactggtgtggactttgccgttgacagccagggtgtttattctgagcctcgccccattggtactcgttacctcacccgtaatctgtaa

SEQ ID NO: 492 - protein, 735 aa, Artificial Sequence
  Description of Artificial Sequence: Synthetic polypeptide
MAADGYLPDWLEDNLSEGIHEWWDPKPGAPKPKANQQKQDDGRGLVLPGYKYLGPFNGLDKGEPVNAADAAALEHDKAYDQQLKAGDNPYLRYNHADAEFQERLQEDTSFGGNLGRAVFQAKKRVLEPLGLVEEGAKTAPGKKRPVEPSPQRSPDSSTGIGKKGQQPARKRLNFGQTGDSESVPDPQPIGEPPAAPSSVGSGTMAAGGGAPMADNNEGADGVGSSSGNWHCDSTWLGDRVITTSTRTWALPTHNNHLYKQISNGTSGGSTNDNVYFGYSTPWGYFDFNRFHCHFSPRDRQRLINNNWGFRPKRLSFKLFNIQVKEVTQNEGTKTIANNLTSTIQVFTDSEYQLPYVLGSAHQGCLPPFPADVFMIPQYGYLTLNNGSQAVGRSSFYCLEYFPSQMLRTGNNFSFSYTFEDVPFHSSYAHSQSLDRLMNPLIDQYLYYLSRTQSTEGTAGTQQLLFSQAGPSNMSAQARNWLPGPCYRQQRVSTTLSQNNNSNFAWTGATKYHLNGRDSLVNPGVAMATHKDDEERFFPSSGVLIFGKTGAANKTTLENVLMTNEEEIRPTNPVATEEYGTVSSNLQAANTAAQTQVVNNQGALPGMVWQNRDVYLQGPIWAKIPHTDGNFHPSPLMGGFGLKHPQILIKNTPVPANPPEVFTPAKFASFITQYSTGQVSVEIEWELQKENSKRWNPEIQYTSNFDKQTGVDFAVDSQGVYSEPRPIGTRYLTRNL

SEQ ID NO: 493 - protein, 738 aa, Artificial Sequence
  Description of Artificial Sequence: Synthetic polypeptide
MAADGYLPDWLEDNLSEGIREWWDLKPGAPKPKANQQKQDDGRGLVLPGYKYLGPFNGLDKGEPVNAADAAALEHDKAYDQQLKAGDNPYLRYNHADAEFQERLQEDTSFGGNLGRAVFQAKKRVLEPLGLVEEGAKTAPGKKRPVEPSPQRSPDSSTGIGKKGQQPARKRLNFGQTGDSESVPDPQPIGEPPAAPSSVGSGTMAAGGGAPMADNNEGADGVGSSSGNWHCDSTWLGDRVITTSTRTWALPTYNNHLYKQISNGTSGGSTNDNTYFGYSTPWGYFDFNRFHCHFSPRDWQRPINNNWGFRPKRLSFKLFNIQVKEVTQNEGTKTIANNLTSTIQVFTDSEYQLPYVLGSAHQGCLPPFPADVFMIPQYGYLTLNNGSQAVGRSSFYCLEYFPSQMLRTGNNFSFSYPFEDVPFHSSYAHSQSLDRLMNPLIDQYLYYLSRTQSTGGTAGTQQLLFSQAGPSNMSAQARNWLPGPCYRQQRVSTTLSQNNNSNFAWTGATKYHLNGRDSLVNPGVAMATNKDDEDRFFPSSGILMFGKQGAGKDNVDYSNVMLTSEEEIKTTNPVATEQYGVVADNLQQQDTAPIVGAVNSQGALPGMVWQNRDVYLQGPIWAKIPHTDGNFHPSPLMGGFGLKHPPPQVLIKNTPVPADPPTAFNQAKLNSFITQYSTGQVSVEIEWELQKENSKRWNPEIQYTSNYYKSTNVDFAVNTEGVYSEPRPIGTRYLTRNL

SEQ ID NO: 494 - DNA, 2217 bp, Artificial Sequence
  Description of Artificial Sequence: Synthetic polynucleotide
atggctgccgatggttatcttccagattggctcgaggacaacctctctgagggcattcgcgagtggtgggacctgaaacctggagccccgaaacccaaggccaaccagcaaaagcaggacgacggccggggtctggtgcttcctggctacaagtacctcggacccttcaacggactcgacaagggggagcccgtcaacgcggcggacgcagcggccctcgagcacgacaaggcctacgaccagcagctcaaagcgggtgacaatccgtacctgcggtataatcacgccgacgccgagtttcaggagcgtctgcaagaagatacgtcttttgggggcaacctcgggcgagcagtcttccaggccaagaagcgggttctcgaacctctcggtctggttgaggaaggcgctaagacggctcctggaaagaagagaccggtagagccgtcaccacagcgttcccccgactcctccacgggcatcggcaagaaaggccagcagcccgccagaaagagactcaatttcggtcagactggcgactcagagtcagtccccgaccctcaacctatcggagaacctccagcagcgccctctagtgtgggatctggtacaatggctgcaggcggtggcgcaccaatggcagacaataacgaaggtgccgacggagtgggtagttcctcgggaaattggcattgcgattccacatggctgggcgacagagtcatcaccaccagcacccgaacctgggccctgcccacctacaacaaccacctctacaagcaaatctccaacgggacctcgggaggcagcaccaacgacaacacctactttggctacagcaccccctgggggtattttgactttaacagattccactgccacttctcaccacgtgactggcagcgacccatcaacaacaactggggattccggcccaagagactcagcttcaagctcttcaacatccaggtcaaagaggtcacgcagaatgaaggcaccaagaccatcgccaataacctcaccagcaccatccaggtgtttacggactcggaataccagctgccgtacgtcctcggctctgcccaccagggctgcctgcctccgttcccggcggacgtcttcatgattcctcagtacggctacctgactctcaacaacggtagtcaggccgtgggacgttcctccttctactgcctggagtacttcccctctcagatgctgagaacgggcaacaacttttccttcagctaccctttcgaggacgtgcctttccacagcagctacgcgcacagccagagtttggacaggctgatgaatcctctcatcgaccagtacctgtactacctgtcaagaacccagtctacgggaggcacagcgggaacccagcagttgctgttttctcaggccgggcctagcaacatgtcggctcaggccagaaactggctgcctggaccctgctacagacagcagcgcgtctccacgacactgtcgcaaaacaacaacagcaactttgcctggactggtgccaccaagtatcatctgaacggcagagactctctggtgaatccgggcgtcgccatggcaaccaacaaggacgacgaggaccgcttcttcccatccagcggcatcctcatgtttggcaagcagggagctggaaaagacaacgtggactatagcaacgtgatgctaaccagcgaggaagaaatcaagaccaccaaccccgtggccacagaacagtatggcgtggtggctgataacctacagcagcaagacaccgctcctattgtgggggccgtcaacagccagggagccttacctggcatggtctggcagaaccgggacgtgtacctgcagggtcctatttgggccaagattcctcacacagatggcaactttcacccgtctcctttaatgggcggctttggacttaaacatccgcctcctcaggtcctcatcaaaaacactcctgttcctgcggatcctccaacagcgttcaaccaggccaagctgaattctttcatcacgcagtacagcaccggacaagtcagcgtggagatcgagtgggagctgcagaaggagaacagcaagcgctggaacccagagattcagtatacttccaactactacaaatctacaaatgtggactttgctgttaatactgagggtgtttactctgagcctcgccccattggcactcgttacctcacccgtaatctgtaa

SEQ ID NO: 495 - DNA, 2214 bp, Artificial Sequence
  Description of Artificial Sequence: Synthetic polynucleotide
atggctgctgacggttatcttccagattggctcgaggacaacctctctgagggcattcgcgagtggtgggacctgaaacctggagcccccaagcccaaggccaaccagcagaagcaggacgacggccggggtctggtgcttcctggctacaagtacctcggacccttcaacggactcgacaagggggagcccgtcaacgcggcggacgcagcggccctcgagcacgacaaggcctacgaccagcagctcaaagcgggtgacaatccgtacctgcggtataaccacgccgacgccgagttccaggagcgtctgcaagaagatacgtcttttgggggcaacctcgggcgagcagtcttccaggccaagaagcgggttctcgaacctctcggtctggctgaggaagctgctaagacggctcctggaaagaagagaccggtagaaccgtcacctcagcgttcccccgactcctccacgggcatcggcaagaaaggccagcagcccgctagaaagagactgaactttgggcagactggcgactcagagtcagtccccgaccctcaaccaatcggagagccaccagcaggcccctctggtctgggatctggtacaatggctgcaggcggtggcgcaccaatggctgacaataacaagggcgccgacggagtgggtaatgcctcaggaaattggcattgcgattccacatggctgggcgacagagtcatcaccaccagcacccgaacctgggctttgcccacctacaacaaccacctctacaagcaaatctccagtcagtcagcaggtagcaccaacgacaacgtctacttcggctacagcaccccctgggggtattttgacttcaacagattccactgtcacttctcaccacgtgactggcagcggctcatcaacaacaactggggattccggcccaagaagctcaacttcaagctgttcaacatccaggtcaaggaggtcacaacgggtgacggcgtcacgaccatcgccaataaccttaccagcacggttcaggtcttttcggactcggaataccagctgccctacgtcctcggctccgcacaccagggctgcctgcctccgttcccggcggacgtcttcatgattccccagtacggctacctgactctgaacaatgacagccaatcggtgggtcgttcctctttctactgcctggaatatttcccttctcaaatgctgagaacgggcaacaacttcaccttcagctacaccttcgaggacgttcccttccacagcagctacgcacacagccagagcctggaccggctgatgaatcctcttatcgaccagtacctgtattacctggccagaacacagagcaacgcaggaggcacagctggcaatcgggaactgcagttttatcagggcgggcctaccaccatggccgaacaagccaaaaactggctgcctggaccttgcttccggcaacaaagagtctccaagacgctggatcaaaacaacaacagcaactttgcttggactggtgccaccaaataccatctaaatggaagaaattcattggttaatcccggtgtcgccatggcaacccacaaggacgacgaggaacgcttcttcccttcgagcggagtcctgatttttggaaaaactggagcagctaataagactacactggaaaatgtgttaatgacaaatgaagaggaaattcgtcctaccaacccggtagccaccgaggaatacgggactgttagcagcaacctgcaggcggctaacactgcagcccagacacaagttgtcaacaaccagggagccttacctggtatggtctggcagaaccgggacgtgtacctgcagggtcccatctgggccaagattcctcacacggacggcaactttcacccgtctccgctgatgggcggctttggactgaagcatccgcctcctcagatcctgatcaaaaacactcctgttcctgctaatcccccggaggtgtttacgcctgccaagtttgcttctttcatcacacagtacagcaccggccaggtcagcgtggagatcgagtgggagctgcagaaggagaacagcaagcgctggaacccagagattcagtatacctccaattttgacaaacagactggtgtggactttgccgttgacagccagggtgtttattctgagcctcgccccattggtactcgttacctcacccgtaatctgtaa

SEQ ID NO: 496 - protein, 737 aa, Artificial Sequence
  Description of Artificial Sequence: Synthetic polypeptide
MAADGYLPDWLEDNLSEGIREWWDLKPGAPKPKANQQKQDDGRGLVLPGYKYLGPFNGLDKGEPVNAADAAALEHDKAYDQQLKAGDNPYLRYNHADAEFQERLQEDTSFGGNLGRAVFQAKKRVLEPLGLAEEAAKTAPGKKRPVEPSPQRSPDSSTGIGKKGQQPARKRLNFGQTGDSESVPDPQPIGEPPAGPSGLGSGTMAAGGGAPMADNNKGADGVGNASGNWHCDSTWLGDRVITTSTRTWALPTYNNHLYKQISSQSAGSTNDNVYFGYSTPWGYFDFNRFHCHFSPRDWQRLINNNWGFRPKKLNFKLFNIQVKEVTTGDGVTTIANNLTSTVQVFSDSEYQLPYVLGSAHQGCLPPFPADVFMIPQYGYLTLNNDSQSVGRSSFYCLEYFPSQMLRTGNNFTFSYTFEDVPFHSSYAHSQSLDRLMNPLIDQYLYYLARTQSNAGGTAGNRELQFYQGGPTTMAEQAKNWLPGPCFRQQRVSKTLDQNNNSNFAWTGATKYHLNGRNSLVNPGVAMATHKDDEERFFPSSGVLIFGKTGAANKTTLENVLMTNEEEIRPTNPVATEEYGTVSSNLQAANTAAQTQVVNNQGALPGMVWQNRDVYLQGPIWAKIPHTDGNFHPSPLMGGFGLKHPPPQILIKNTPVPANPPEVFTPAKFASFITQYSTGQVSVEIEWELQKENSKRWNPEIQYTSNFDKQTGVDFAVDSQGVYSEPRPIGTRYLTRNL

SEQ ID NO: 497 - DNA, 2217 bp, Artificial Sequence
  Description of Artificial Sequence: Synthetic polynucleotide
atggctgccgatggttatcttccagattggctcgaggacaacctctctgagggcattcgcgagtggtgggacctgaaacctggagccccgaaacccaaagccaaccagcaaaagcaggacgacggccggggtctggtgcttcctggctacaagtacctcggacccttcaacggactcgacaagggggagcccgtcaacgcggcggacgcagcggccctcgagcacgacaaggcctacgaccagcagctcaaagcgggtgacaatccgtacctgcggtataatcacgccgacgccgagtttcaggagcgtctgcaagaagatacgtcttttgggggcaacctcgggcgagcagtcttccaggccaagaagcgggttctcgaacctctcggtctggttgaggaaggcgctaagacggctcctggaaagaagagaccggtagagccgtcaccacagcgttcccccgactcctccacgggcatcggcaagaaaggccagcagcccgccagaaagagactcaatttcggtcagactggcgactcagagtcagtccccgaccctcaacctatcggagaacctccagcagcgccctctagtgtgggatctggtacaatggctgcaggcggtggcgcaccaatggcagacaataacgaaggtgccgacggagtgggtagttcctcgggaaattggcattgcgattccacatggctgggcgacagagtcatcaccaccagcacccgaacctgggccctgcccacctacaacaaccacctctacaagcaaatctccaacgggacctcgggaggcagcaccaacgacaacacctactttggctacagcaccccctgggggtattttgactttaacagattccactgccacttctcaccacgtgactggcagcgactcatcaacaacaactggggattccggcccaagagactcagcttcaagctcttcaacatccaggtcaaagaggtcacgcagaatgaaggcaccaagaccatcgccaataacctcaccagcaccatccaggtgtttacggactcggaataccagctgccgtacgtcctcggctctgcccaccagggctgcctgcctccgttcccggcggacgtcttcatgattcctcagtacggctacctgactctcaacaacggtagtcaggccgtgggacgttcctccttctactgcctggagtacttcccctctcagatgctgagaacgggcaacaacttttccttcagctacactttcgaggacgtgcctttccacagcagctacgcgcacagccagagtttggacaggctgatgaatcctctcatcgaccagtacctgtactacctgtcaagaacccagtctacgggaggcacagcgggaacccagcagttgctgttttctcaggccgggcctagcaacatgtcggctcaggccagaaactggctgcctggaccctgctacagacagcagcgcgtctccacgacactgtcgcaaaacaacaacagcaactttgcctggactggtgccaccaagtatcatctgaacggcagagactctctggtgaatccgggcgtcgccatggcaaccaacaaggacgacgaggaccgcttcttcccatccagcggcatcctcatgtttggcaagcagggagctggaaaagacaacgtggactatagcaacgtgatgctaaccagcgaggaagaaatcaagaccaccaaccccgtggccacagaacagtatggcgtggtggctgataacctacagcagcaaaacaccgctcctattgtgggggccgtcaacagccagggagccttacctggcatggtctggcagaaccgggacgtgtacctgcagggtcctatttgggccaagattcctcacacagatggcaactttcacccgtctcctttaatgggcggctttggacttaaacatccgcctcctcagatcctcatcaaaaacactcctgttcctgcggatcctccaacagcgttcaaccaggccaagctgaattctttcatcacgcagtacagcaccggacaagtcagcgtggagatcgtgtgggagctgcagaaggagaacagcaagcgcaggaacccagagattcagtatacttccaactactacaaatctacaaatgtggactttgctgttaatactgagggtgtttactctgagcctcgccccattggcactcgttacctcacccgtaatctgtaa

SEQ ID NO: 498 - protein, 738 aa, Artificial Sequence
  Description of Artificial Sequence: Synthetic polypeptide
MAADGYLPDWLEDNLSEGIREWWDLKPGAPKPKANQQKQDDGRGLVLPGYKYLGPFNGLDKGEPVNAADAAALEHDKAYDQQLKAGDNPYLRYNHADAEFQERLQEDTSFGGNLGRAVFQAKKRVLEPLGLVEEGAKTAPGKKRPVEPSPQRSPDSSTGIGKKGQQPARKRLNFGQTGDSESVPDPQPIGEPPAAPSSVGSGTMAAGGGAPMADNNEGADGVGSSSGNWHCDSTWLGDRVITTSTRTWALPTYNNHLYKQISNGTSGGSTNDNTYFGYSTPWGYFDFNRFHCHFSPRDWQRLINNNWGFRPKRLSFKLFNIQVKEVTQNEGTKTIANNLTSTIQVFTDSEYQLPYVLGSAHQGCLPPFPADVFMIPQYGYLTLNNGSQAVGRSSFYCLEYFPSQMLRTGNNFSFSYTFEDVPFHSSYAHSQSLDRLMNPLIDQYLYYLSRTQSTGGTAGTQQLLFSQAGPSNMSAQARNWLPGPCYRQQRVSTTLSQNNNSNFAWTGATKYHLNGRDSLVNPGVAMATNKDDEDRFFPSSGILMFGKQGAGKDNVDYSNVMLTSEEEIKTTNPVATEQYGVVADNLQQQNTAPIVGAVNSQGALPGMVWQNRDVYLQGPIWAKIPHTDGNFHPSPLMGGFGLKHPPPQILIKNTPVPADPPTAFNQAKLNSFITQYSTGQVSVEIVWELQKENSKRRNPEIQYTSNYYKSTNVDFAVNTEGVYSEPRPIGTRYLTRNL

SEQ ID NO: 499 - protein, 738 aa, Artificial Sequence
  Description of Artificial Sequence: Synthetic polypeptide
MAADGYLPDWLEDNLSEGIREWWDLKPGAPKPKANQQKQDDGRGLVLPGYKYLGPFNGLDKGEPVNAADAAALEHDKAYDQQLKAGDNPYLRYNHADAEFQERLQEDTSFGGNLGRAVFQAKKRVLEPLGLVEEGAKTAPGKKRPVEPSPQRSPDSSTGIGKKGQQPARKRLNFGQTGDSESVPDPQPIGEPPAAPSSVGSGTMAAGGGAPMADNNEGADGVGSSSGNWHCDSTWLGDRVITTSTRTWALPTYNNHLYKQISNGTSGGSTNDNTYFGYSTPWGYFDFNRFHCHFSPRDWQRLINNNWGFRPKRLSFKLFNIQVKEVTQNEGTKTIANNLTSTIQVFTDSEYQLPYVLGSAHQGCLPPFPADVFMIPQYGYLTLNNGSQAVGRSSFYCLEYFPSQMLRTGNNFSFSYTFEDVPFHSSYAHSQSLDRLMNPLIDQYLYYLSRTQSTGGTAGTQQLLFSQAGPSNMSAQARNWLPGPCYRQQRVSTTLSQNNNSNFAWTGATKYHLNGRDSLVNPGVAMATNKDDEDRFFPSSGILMFGKQGAGKDNVDYSNVMLTSEEEIKTTNPVATEQYGVVADNLQQQNTAPIVGAVNSQGALPGMVWQNRDVYLQGPIWAKIPHTDGNFHPSPLMGGFGLKHPPPQILIKNTPVPADPPTAFNQAKLNSFITQYSTGQVSVEIEWELQKENSKRWNPEIQYTSNYYKSTNVDFAVNTEGVYSEPRPIGTRYLTRNL

SEQ ID NO: 500 - protein, 738 aa, Artificial Sequence
  Description of Artificial Sequence: Synthetic polypeptide
MAADGYLPDWLEDNLSEGIREWWDLKPGAPKPKANQQKQDDGRGLVLPGYKYLGPFNGLDKGEPVNAADAAALEHDKAYDQQLKAGDNPYLRYNHADAEFQERLQEDTSFGGNLGRAVFQAKKRVLEPLGLVEEGAKTAPGKKRPVEPSPQRSPDSSTGIGKKGQQPARKRLNFGQTGDSESVPDPQPIGEPPAAPSSVGSGTMAAGGGAPMADNNEGADGVGSSSGNWHCDSTWLGDRVITTSTRTWALPTYNNHLYKQISNGTSGGSTNDNTYFGYSTPWGYFDFNRFHCHFSPRDWQRLINNNWGFRPKRLSFKLFNIQVKEVTQNEGTKTIANNLTSTIQVFTDSEYQLPYVLGSAHQGCLPPFPADVFMIPQYGYLTLNNGSQAVGRSSFYCLEYFPSQMLRTGNNFSFSYTFEDVPFHSSYAHSQSLDRLMNPLIDQYLYYLSRTQSTGGTAGTQQLLFSQAGPSNMSAQARNWLPGPCYRQQRVSTTLSQNNNSNFAWTGATKYHLNGRDSLVNPGVAMATNKDDEDRFFPSSGILMFGKQGAGKDNVDYSNVMLTSEEEIKTTNPVATEQYGVVADNLQQQNTAPIVGAVNSQGALPGMVWQNRDVYLQGPIWAKIPHTDGNFHPSPLMGGFGLKHPPPQILIKNTPVPADPPTAFNQAKLNSFITQYSTGQVSVEIVWELQKENSKRWNPEIQYTSNYYKSTNVDFAVNTEGVYSEPRPIGTRYLTRNL

SEQ ID NO: 501 - protein, 738 aa, Artificial Sequence; identical to SEQ ID NO: 499
  Description of Artificial Sequence: Synthetic polypeptide

SEQ ID NO: 502 - DNA, 2214 bp, Artificial Sequence
  Description of Artificial Sequence: Synthetic polynucleotide
atggctgctgacggttatcttccagattggctcgaggacaacctctctgagggcattcgcgagtggtgggacctgaaacctggagcccccaagcccaaggccaaccagcagaagcaggacgacggccggggtctggtgcttcctggctacaagtacctcggacccttcaacggactcgacaagggggagcccgtcaacgcggcggacgcagcggccctcgagcacgacaaggcctacgaccagcagctcaaagcgggtgacaatccgtacctgcggtataaccacgccgacgccgagtttcaggagcgtctgcaagaagatacgtcttttgggggcaacctcgggcgagcagtcttccaggccaagaagcgggttctcgaacctctcggtctggttgaggaagctgctaagacggctcctggaaagaagagaccggtagaaccgtcacctcagcgttcccccgactcctccacgggcatcggcaagaaaggccagcagcccgctagaaagagactgaactttgggcagactggcgactcagagtcagtccccgaccctcaaccaatcggagaaccaccagcaggcccctctggtctgggatctggtacaatggctgcaggcggtggcgctccaatggcagacaataacgaaggcgccgacggagtgggtaatgcctcaggaaattggcattgcgattccacatggctgggcgacagagtcatcaccaccagcacccgaacctgggctttgcccacctacaacaaccacctctacaagcaaatctccagtcagtcagcaggtagcaccaacgacaacgtctacttcggctacagcaccccctgggggtattttgacttcaacagattccactgtcacttctcaccacgtgactggcagcggctcatcaacaacaactggggattccggcccaagaagctcaacttcaagctgttcaacatccaggtcaaggaggtcacaacgaatgacggcgtcacgaccatcgccaataaccttaccagcacggttcaggtcttttcggactcggaataccagctgccctacgtcctcggctccgcacaccagggctgcctgcctccgttcccggcggacgtcttcatgattccccagtacggctacctgactctgaacaatggcagccaatcggtgggtcgttcctctttctactgcctggaatatttcccttctcaaatgctgagaacgggcaacaacttcaccttcagctacaccttcgaggacgttcccttccacagcagctacgcacacagccagagcctggaccggctgatgaatcctcttatcgaccagtacctgtattacctggccagaacacagagcaacgcaggaggcacagctggcaatcgggaactgcagttttatcagggcgggcctaccaccatggccgaacaagccaaaaactggctgcctagaccttgcttccggcaacaaagagtctccaagacgctggatcaaaacaacaacagcaactttgcttggactggtgccaccaaataccatctaaatggaagaaattcattggttaatcccggtgtcgccatggcaacccacaaggacgacgaggaacgcttcttcccttcgagcggagtcctgatttttggaaaaactggagcagctaataagactacactggaaaatgtgttaatgacaaatgaagaggaaattcgtcctaccaacccggtagccaccgaggaatacgggactgttagcagcaacctgcaggcggctaacactgcagcccagacacaagttgtcaacaaccagggagccttacctggtatggtctggcagaaccgggacgtgtacctgcagggtcccatctgggccaagattcctcacacggacggcaactttcacccgtctccgctgatgggcggctttggactgaagcatccgcctcctcagatcctgatcaaaaacactcctgttcctgctaatcccccggaggtgtttacgcctgccaagtttgcttctttcatcacacagtacagcaccggccaggtcagcgtggagatcgagtgggagctgcagaaggagaacagcaagcgctggaacccagagattcagtatacctccaattttgacaaacagactggtgtggactttgccgttgacagccagggtgtttattctgagcctcgccccattggtactcgttacctcacccgtaatctgtaa

SEQ ID NO: 503 - protein, 737 aa, Artificial Sequence
  Description of Artificial Sequence: Synthetic polypeptide
MAADGYLPDWLEDNLSEGIREWWDLKPGAPKPKANQQKQDDGRGLVLPGYKYLGPFNGLDKGEPVNAADAAALEHDKAYDQQLKAGDNPYLRYNHADAEFQERLQEDTSFGGNLGRAVFQAKKRVLEPLGLVEEAAKTAPGKKRPVEPSPQRSPDSSTGIGKKGQQPARKRLNFGQTGDSESVPDPQPIGEPPAGPSGLGSGTMAAGGGAPMADNNEGADGVGNASGNWHCDSTWLGDRVITTSTRTWALPTYNNHLYKQISSQSAGSTNDNVYFGYSTPWGYFDFNRFHCHFSPRDWQRLINNNWGFRPKKLNFKLFNIQVKEVTTNDGVTTIANNLTSTVQVFSDSEYQLPYVLGSAHQGCLPPFPADVFMIPQYGYLTLNNGSQSVGRSSFYCLEYFPSQMLRTGNNFTFSYTFEDVPFHSSYAHSQSLDRLMNPLIDQYLYYLARTQSNAGGTAGNRELQFYQGGPTTMAEQAKNWLPRPCFRQQRVSKTLDQNNNSNFAWTGATKYHLNGRNSLVNPGVAMATHKDDEERFFPSSGVLIFGKTGAANKTTLENVLMTNEEEIRPTNPVATEEYGTVSSNLQAANTAAQTQVVNNQGALPGMVWQNRDVYLQGPIWAKIPHTDGNFHPSPLMGGFGLKHPPPQILIKNTPVPANPPEVFTPAKFASFITQYSTGQVSVEIEWELQKENSKRWNPEIQYTSNFDKQTGVDFAVDSQGVYSEPRPIGTRYLTRNL

SEQ ID NO: 504 - DNA, 2214 bp, Artificial Sequence
  Description of Artificial Sequence: Synthetic polynucleotide
atggctgctgacggttatcttccagattggctcgaggacaacctctctgagggcattcgcgagtggtgggacctgaaacctggagcccccaagcccaaggccaaccagcagaagcaggacgacggccggggtctggtgcttcctggctacaagtacctcggacccttcaacggactcgacaagggggagcccgtcaacgcggcggacgcagcggccctcgagcacgacaaggcctacgaccagcagctcaaagcgggtgacaatccgtacctgcggtataaccatgccgacgccgagtttcaggagcgtctgcaagaagatacgtcttttgggggcaacctcgggcgagcagtcctccaggccaagaagcgggttctcgaacctctcggtctggttgaggaagctgctaagacggctcctggaaagaagagaccggtagaaccgtcacctcagcgttcccccgactcctccacgggcatcggcaagaaaggccagcagcccgctagaaagagactgaactttgggcagactggcgactcagagtcagtccccgaccctcaaccaatcggagaaccaccagcaggcccctctggtctgggatctggtacaatggctgcaggcggtggcgctccaatggcagacaataacgaaggcgccgacggagtgggtaatgcctcaggaaattggcattgcgattccacatggctgggcgacagagtcatcaccaccagcacccgaacctgggctttgcccacctacaacaaccacctctacaagcaaatctccagtcagtcagcaggtagcaccaacgacaacgtctacttcggctacagcaccccctgggggtattttgacttcaacagattccactgtcacttctcaccacgtgactggcagcggctcatcaacaacaactggggattccggcccaagaagctcaacttcaagctgttcaacatccaggtcaaggaggtcacaacgaatgacggcgtcacgaccatcgccaataaccttaccagcacggttcaggtcttttcggactcggaataccagctgccctacgtcctcggctccgcacaccagggctgcctgcctccgttcccggcggacgtcttcatgattccccagtacggctacctgactctgaacaatggcagccaatcggtgggtcgttcctctttctactgcctggaatatttcccttctcaaatgctgagaacgggcaacaacttcaccttcagctacaccttcgaggacgttcccttccacagcagctacgcacacagccagagcctggaccggctgatgaatcctcttatcgaccagtacctgtattacctggccagaacacagagcaacgcaggaggcacagctggcaatcgggaactgcagttttatcagggcgggcctaccaccatggccgaacaagccaaaaactggctgcctggaccttgcttccggcaacaaagagtctccaagacgctggatcaaaacaacaacagcaactttgcttggactggtgccaccaaataccatctaaatggaagaaattcattggttaatcccggtgtcgccatggcaacccacaaggacgacgaggaacgcttcttcccttcgagcggagtcctgatttttggaaaaactggagcagctaataagactacactggaaaatgtgttaatgacaaatgaagaggaaattcgtcctaccaacccggtagccaccgaggaatacgggactgttagcagcaacctgcaggcggctaacactgcagcccagacacaagttgtcaacaaccagggagccttacctggtatggtctggcagaaccgggacgtgtacctgcagggtcccatctgggccaagattcctcacacggacggcaactttcacccgtctccgctgatgggcggctttggactgaagcatccgcctcctcagatcctgatcaaaaacactcctgttcctgctaatcccccggaggtgtttacgcctgccaagtttgcttctttcatcacacagtacagcaccggccaggtcagcgtggagatcgagtgggagctgcagaaggagaacagcaagcgctggaacccagagattcagtatacctccaattttgacaaacagactggtgtggactttgccgttgacagccagggtgtttattctgagcctcgccccattggtactcgttacctcacccgtaatctgtaa

SEQ ID NO: 505 - protein, 737 aa, Artificial Sequence; identical to SEQ ID NO: 464
  Description of Artificial Sequence: Synthetic polypeptide

SEQ ID NO: 506 - protein, 737 aa, Artificial Sequence
  Description of Artificial Sequence: Synthetic polypeptide
MAADGYLPDWLEDNLSEGIREWWDLKPGAPKPKANQQKQDDGRGLVLPGYKYLGPFNGLDKGEPVNAADAAALEHDKAYDQQLKAGDNPYLRYNHADAEFQERLQEDTSFGGNLGRAVLQAKKRVLEPLGLVEEAAKTAPGKKRPVEPSPQRSPDSSTGIGKKGQQPARKRLNFGQTGDSESVPDPQPIGEPPAGPSGLGSGTMAAGGGAPMADNNEGADGVGNASGNWHCDSTWLGDRVITTSTRTWALPTYNNHLYKQISSQSAGSTNDNVYFGYSTPWGYFDFNRFHCHFSPRDWQRLINNNWGFRPKKLNFKLFNIQVKEVTTNDGVTTIANNLTSTVQVFSDSEYQLPYVLGSAHQGCLPPFPADVFMIPQYGYLTLNNGSQSVGRSSFYCLEYFPSQMLRTGNNFTFSYTFEDVPFHSSYAHSQSLDRLMNPLIDQYLYYLARTQSNAGGTAGNRELQFYQGGPTTMAEQAKNWLPGPCFRQQRVSKTLDQNNNSNFAWTGATKYHLNGRNSLVNPGVAMATHKDDEERFFPSSGVLIFGKTGAANKTTLENVLMTNEEEIRPTNPVATEEYGTVSSNLQAANTAAQTQVVNNQGALPGMVWQNRDVYLQGPIWAKIPHTDGNFHPSPLMGGFGLKHPPPQILIKNTPVPANPPEVFTPAKFASFITQYSTGQVSVEIEWELQKENSKRWNPEIQYTSNFDKQTGVDFAVDSQGVYSEPRPIGTRYLTRNL

SEQ ID NO: 507 - DNA, 2217 bp, Artificial Sequence
  Description of Artificial Sequence: Synthetic polynucleotide
atggctgccgatggttatcttccagattggctcgaggacaacctctctgagggcattcgcgagtggtgggacctgaaacctggagccccgaaacccaaagccaaccagcaaaagcaggacgacggccggggtctggtgcttcctggctacaagtacctcggacccttcaacggactcgacaagggggagcccgtcaacgcggcggacgcagcggccctcgagcacgacaaggcctacgaccagcagctcaaagcgggtgacaatccgtacctgcggtataatcacgccgacgccgagtttcaggagcgtctgcaagaagatacgtcttttgggggcaacctcgggcgagcagtcttccaggccaagaagcgggttctcgaacctctcggtctggttgaggaaggcgctaagacggctcctggaaagaagagaccggtagagccgtcaccacagcgttcccccgactcctccacgggcatcggcaagaaaggccagcagcccgccagaaagagactcaatttcggtcagactggcgactcagagtcagtccccgaccctcaacctatcggagaacctccagcagcgccctctagtgtgggatctggtacaatggctgcaggcggtggcgcaccaatggcagacaataacgaaggtgccgacggagtgggtagttcctcgggaaattggcattgcgattccacatggctgggcgacagagtcatcaccaccagcacccgaacctgggccctgcccacctacaacaaccacctctacaagcaaatctccaacgggacctcgggaggcagcaccaacgacaacacctactttggctacagcaccccctgggggtattttgactttaacagattccactgccacttctcaccacgtgactggcagcgactcatcaacaacaactggggattccggcccaagagactcagcttcaagctcttcaacatccaggtcaaagaggtcacgcagaatgaaggcaccaagaccatcgccaataacctcaccagcaccatccaggtgtttacggactcggaataccagctgccgtacgtcctcggctctgcccaccagggctgcctgcctccgttcccggcggacgtcttcatgattcctcagtacggctacctgactctcaacaacggtagtcaggccgtgggacgttcctccttctactgcctggagtacttcccctctcagatgctgagaacgggcaacaacttttccttcagctacactttcgaggacgtgcctttccacagcagctacgcgcacagccagagtttggacaggctgatgaatcctctcatcgaccagtacctgtactacctgtcaagaacccagtctacgggaggcacagcgggaacccagcagttgctgttttctcaggccgggcctagcaacatgtcggctcaggccagaaactggctgcctggaccctgctacagacagcagcgcgtctccacgacactgtcgcaaaacaacaacagcaactttgcctggactggtgccaccaagtatcatctgaacggcagagactctctggtgaatccgggcgtcgccatggcaaccaacaaggacgacgaggaccgcttcttcccacccagcggcatcctcatgtttggcaagcagggagctggaaaagacaacgtggactatagcaacgtgatgctaaccagcgaggaagaaatcaagaccaccaaccccgtggccacagaacagtatggcgtggtggctgataacctacagcagcaaaacaccgctcctattgtgggggccgtcaacagccagggagccttacctggcatggtctggcagaaccgggacgtgtacctgcagggtcctatttgggccaagattcctcacacagatggcaactttcacccgtctcctttaatgggcggctttggacttaaacatccgcctcctcagatcctcatcaaaaacactcctgttcctgcggatcctccaacagcgttcaaccaggccaagctgaattctttcatcacgcagtacagcaccggacaagtcagcgtggtgatcgagtgggagctgcagaaggagaacagcaagcgctggaacccagagattcagtatacttccaactactacaaatctacaaatgtggactttgctgttaatactgagggtgtttactctgagcttcgccccattggcactcgttacctcacccgtaatctgtaa

SEQ ID NO: 508 - protein, 738 aa, Artificial Sequence
  Description of Artificial Sequence: Synthetic polypeptide
MAADGYLPDWLEDNLSEGIREWWDLKPGAPKPKANQQKQDDGRGLVLPGYKYLGPFNGLDKGEPVNAADAAALEHDKAYDQQLKAGDNPYLRYNHADAEFQERLQEDTSFGGNLGRAVFQAKKRVLEPLGLVEEGAKTAPGKKRPVEPSPQRSPDSSTGIGKKGQQPARKRLNFGQTGDSESVPDPQPIGEPPAAPSSVGSGTMAAGGGAPMADNNEGADGVGSSSGNWHCDSTWLGDRVITTSTRTWALPTYNNHLYKQISNGTSGGSTNDNTYFGYSTPWGYFDFNRFHCHFSPRDWQRLINNNWGFRPKRLSFKLFNIQVKEVTQNEGTKTIANNLTSTIQVFTDSEYQLPYVLGSAHQGCLPPFPADVFMIPQYGYLTLNNGSQAVGRSSFYCLEYFPSQMLRTGNNFSFSYTFEDVPFHSSYAHSQSLDRLMNPLIDQYLYYLSRTQSTGGTAGTQQLLFSQAGPSNMSAQARNWLPGPCYRQQRVSTTLSQNNNSNFAWTGATKYHLNGRDSLVNPGVAMATNKDDEDRFFPPSGILMFGKQGAGKDNVDYSNVMLTSEEEIKTTNPVATEQYGVVADNLQQQNTAPIVGAVNSQGALPGMVWQNRDVYLQGPIWAKIPHTDGNFHPSPLMGGFGLKHPPPQILIKNTPVPADPPTAFNQAKLNSFITQYSTGQVSVVIEWELQKENSKRWNPEIQYTSNYYKSTNVDFAVNTEGVYSELRPIGTRYLTRNL

SEQ ID NO: 509 - DNA, 2214 bp, Artificial Sequence
  Description of Artificial Sequence: Synthetic polynucleotide
atggctgctgacggttatcttccagattggctcgaggacaacctctctgagggcattcgcgagtggtgggacctgaaacctggagcccccaagcccaaggccaaccagcagaagcaggacgacggccggggtctggtgcttcctggctacaagtacctcggacccttcaacggactcgacaagggggagcccgtcaacgcggcggacgcagcggccctcgagcacgacaaggcctacgaccagcagctcaaagcgggtgacaatccgtacctgcggtataaccacgccgacgccgagtttcaggagcgtctgcaagaagatacgtcttttgggggcaacctcgggcgagcagtcttccaggccaagaagcgggttctcgaacctctcggtctggttgaggaagctgctaagacggctcctggaaagaagagaccggtagaaccgtcacctcagcgttcccccgactcctccacgggcatcggcaagaaaggccagcagcccgctagaaagagactgaactttgggcagactggcgactcagagtcagtccccgaccctcaaccaatcggagaaccaccagcaggcccctctggtctgggatctggtacaatggctgcaggcggtggcgccccaatggcagacaataacgaaggcgccgacggagtgggtaatgcctcaggaaattggcattgcgattccacatggctgggcgacagagtcatcaccaccagcacccgaacctgggctttgcccacctacaacaaccacctctacaagcaaatctccagtcagtcagcaggtagcaccaacgacaacgtctacttcggctacagcaccccctgggggtattttgacttcaacagattccactgtcacttctcaccacgtgactggcagcggctcatcaacaacaactggggattccggcccaagaagctcaacttcaagctgttcaacatccaggtcaaggaggtcacaacgaatgacggcgtcacgaccatcgccaataaccttaccagcacggttcaggtcttttcggactcggaataccagctgccctacgtcctcggctccgcacaccagggctgcctgcctccgttcccggcggacgtcttcatgattccccagtacggctacctgactctgaacaatggcagccaatcggtgggtcgttcctctttctactgcctggaatatttcccttctcaaatgctgagaacgggcaacaacttcaccatcagctacaccttcgaggacgttcccttccacagcagctacgcacacagccagagcctggaccggctgatgaatcctcttatcgaccagtacctgtattacctggccagaacacagagcaacgcaggaggcacagctggcaatcaggaactgcagttttatcagggcgggcctaccaccatggccgaacaagccaaaaactggctgcctggaccttgcttccggcaacaaagagtctccaagacgctggatcaaaacaacaacagcaactttgcttggactggtgccaccaaataccatctaaatggaagaaattcattggttaatcccggtgtcgccatggcaacccacaaggacgacgaggaacgcttcttcccttcgagcggagtcctgatttttggaaaaactggagcagctaataagactacactggaaaatgtgttaatgacaaatgaagaggaaattcgtcctaccaacccggtagccaccgaggaatacgggactgttagcagcaacctgcaggcggctaacactgcagcccagacacaagttgtcaacaaccagggagccttacctggtatggtctggcagaaccgggacgtgtacctgcagggtcccatctgggccaagattcctcacacagatggcaactttcacccgtctcctttaatgggcggctttggacttaaacatccgcctcctcagatcctcatcaaaaacactcctgttcctgcggatcctccaacagcgttcaaccaggccaagctgaattctttcatcacgcagtacagcaccggacaagtcagcgtggagatcgagtgggagctgcagaaggagaacagcaagcgctggaacccagagattcagtatacttccaactactacaaatctacaaatgtggactttgctgttaatactgagggtgtttactctgagcctcgccccattggcactcgttacctcacccgtaatctgtaa

SEQ ID NO: 510 - protein, 737 aa, Artificial Sequence
  Description of Artificial Sequence: Synthetic polypeptide
MAADGYLPDWLEDNLSEGIREWWDLKPGAPKPKANQQKQDDGRGLVLPGYKYLGPFNGLDKGEPVNAADAAALEHDKAYDQQLKAGDNPYLRYNHADAEFQERLQEDTSFGGNLGRAVFQAKKRVLEPLGLVEEAAKTAPGKKRPVEPSPQRSPDSSTGIGKKGQQPARKRLNFGQTGDSESVPDPQPIGEPPAGPSGLGSGTMAAGGGAPMADNNEGADGVGNASGNWHCDSTWLGDRVITTSTRTWALPTYNNHLYKQISSQSAGSTNDNVYFGYSTPWGYFDFNRFHCHFSPRDWQRLINNNWGFRPKKLNFKLFNIQVKEVTTNDGVTTIANNLTSTVQVFSDSEYQLPYVLGSAHQGCLPPFPADVFMIPQYGYLTLNNGSQSVGRSSFYCLEYFPSQMLRTGNNFTISYTFEDVPFHSSYAHSQSLDRLMNPLIDQYLYYLARTQSNAGGTAGNQELQFYQGGPTTMAEQAKNWLPGPCFRQQRVSKTLDQNNNSNFAWTGATKYHLNGRNSLVNPGVAMATHKDDEERFFPSSGVLIFGKTGAANKTTLENVLMTNEEEIRPTNPVATEEYGTVSSNLQAANTAAQTQVVNNQGALPGMVWQNRDVYLQGPIWAKIPHTDGNFHPSPLMGGFGLKHPPPQILIKNTPVPADPPTAFNQAKLNSFITQYSTGQVSVEIEWELQKENSKRWNPEIQYTSNYYKSTNVDFAVNTEGVYSEPRPIGTRYLTRNL

SEQ ID NO: 511 - DNA, 2217 bp, Artificial Sequence
  Description of Artificial Sequence: Synthetic polynucleotide
atggctgccgatggttatcttccagattggctcgaggacaacctctctgagggcattcgcgagtggtgggacctgaaacctggagccccgaaacccaaagccaaccagcaaaagcaggacgacggccggggtctggtgcttcctggctacaagtacctcggacccttcaacggactcgacaagggggagcccgtcaacgcggcggacgcagcggccctcgagcacgacaaggcctacgaccagcagctcaaagcgggtgacaatccgtacctgcggtataatcacgccgacgccgagtttcaggagcgtctgcaagaagatacgtcttttgggggcaacctcgggcgagcagtcttccaggccaagaagcgggttctcgaacctctcggtctggttgaggaaggcgctaagacggctcctggaaagaagagaccggtagagccgtcaccacagcgttcccccgactcctccacgggcatcggcaagaaaggccagcagcccgccagaaagagactcaatttcggtcagactggcgactcagagtcagtccccgaccctcaacctatcggagaacctccagcagcgccctctagtgtgggatctggtacaatggctgcaggcggtggcgcaccaatggcagacaataacgaaggtgccgacggagtgggtagttcctcgggaaattggcattgcgattccacatggctgggcgacagagtcatcaccaccagcacccgaacctgggccctgcccgcctacaacaaccacctctacaagcaaatctccaacgggacctcgggaggcagcaccaacgacaacacctactttggctacagcaccccctgggggtattttgactttaacagattccactgccacttctcaccacgtgactggcagcgactcatcaacaacaactggggattccggcccaagagactcagcttcaagctcttcaacatccaggtcaaagaggtcacgcagaatgaaggcaccaagaccatcgccaataacctcaccagcaccatccaggtgtttacggactcggaataccagctgccgtacgtcctcggctctgcccaccagggctgcctgcctccgttcccggcggatgtcttcatgattcctcagtacggctacctgactctcaacaacggtagtcaggccgtgggacgttcctccttctactgcctggagtacttcccctctcagatgctgagaacgggcaacaacttttccttcagctacactttcgaggacgtgcctttccacagcagctacgcgcacagccagagtttggacaggctgatgaatcctctcatcgaccagtacctgtactacctgtcaagaacccagtctacgggaggcacagcgggaacccagcagttgctgttttctcaggccgggcctagcaacatgtcggctcaggccagaaactggctgcctggaccctgctacagacagcagcgcgtctccacgacactgtcgcaaaacaacaacagcaactttgcctggactggtgccaccaagtatcatctgagcggcagagactctctggtgaatccgggcgtcgccatggcaaccaacaaggacgacgaggaccgcttcttcccatccagcggcatcctcatgtttggcaagcagggagctggaaaagacaacgtggactatagcaacgtgatgctaaccagcgaggaagaaatcaagaccaccaaccccgtggccacagaacagtatggcgtggtggctgataacctacagcagcaaaacaccgctcctattgtgggggccgtcaacagccagggagccttacctggcatggtctggcagaaccgggacgtgtacctgcagggtcctatttgggccaagattcctcacacagatggcaactttcacccgtctcctttaatgggcggctttggacttaaacatccgcctcctcagatcctcatcaaaaacactcctgttcctgcggatcctccaacagcgttcaaccaggccaagctgaattcttccatcacgcagtacagcaccggacaagtcagcgtggagatcgagtgggagctgcagaaggagaacagcaagcgctggaacccagagattcagtatacttccaactactacaaatctacaaatgtggactttgctgttaatactgagggtgtttactctgagcctcgccccattggcactcgttacctcacccgtaatttgtaa

SEQ ID NO: 512 - protein, 738 aa, Artificial Sequence
  Description of Artificial Sequence: Synthetic polypeptide
MAADGYLPDWLEDNLSEGIREWWDLKPGAPKPKANQQKQDDGRGLVLPGYKYLGPFNGLDKGEPVNAADAAALEHDKAYDQQLKAGDNPYLRYNHADAEFQERLQEDTSFGGNLGRAVFQAKKRVLEPLGLVEEGAKTAPGKKRPVEPSPQRSPDSSTGIGKKGQQPARKRLNFGQTGDSESVPDPQPIGEPPAAPSSVGSGTMAAGGGAPMADNNEGADGVGSSSGNWHCDSTWLGDRVITTSTRTWALPAYNNHLYKQISNGTSGGSTNDNTYFGYSTPWGYFDFNRFHCHFSPRDWQRLINNNWGFRPKRLSFKLFNIQVKEVTQNEGTKTIANNLTSTIQVFTDSEYQLPYVLGSAHQGCLPPFPADVFMIPQYGYLTLNNGSQAVGRSSFYCLEYFPSQMLRTGNNFSFSYTFEDVPFHSSYAHSQSLDRLMNPLIDQYLYYLSRTQSTGGTAGTQQLLFSQAGPSNMSAQARNWLPGPCYRQQRVSTTLSQNNNSNFAWTGATKYHLSGRDSLVNPGVAMATNKDDEDRFFPSSGILMFGKQGAGKDNVDYSNVMLTSEEEIKTTNPVATEQYGVVADNLQQQNTAPIVGAVNSQGALPGMVWQNRDVYLQGPIWAKIPHTDGNFHPSPLMGGFGLKHPPPQILIKNTPVPADPPTAFNQAKLNSSITQYSTGQVSVEIEWELQKENSKRWNPEIQYTSNYYKSTNVDFAVNTEGVYSEPRPIGTRYLTRNL

SEQ ID NO: 513 - protein, 736 aa, Artificial Sequence; identical to SEQ ID NO: 13
  Description of Artificial Sequence: Synthetic polypeptide

SEQ ID NO: 514 - DNA, 2217 bp, Artificial Sequence
  Description of Artificial Sequence: Synthetic polynucleotide
atggctgctgacggttatcttccagattggctcgaggacaacctctctgagggcattcgcgagtggtgggacctgaaacctggagcccccaagcccaaggccaaccagcagaagcaggacgacggccggggtctggtgcttcctggctacaagtacctcggacccttcaacggactcgacaagggggagcccgtcaacgcggcggacgcagcggccctcgagcacgacaaggcctacgaccagcagctcaaagcgggtgacaatccgtacctgcggtataaccacgccgacgccgagtttcaggagcgtctgcaagaagatacgtcttttgggggcaacctcgggcgagcagtcttccaggccaagaagcgggttctcgaacctctcggtctggttgaggaagctgctaagacggctcctggaaagaagagaccggtagaaccgtcacctcagcgttcccccgactcctccacgggcatcggcaagaaaggccagcagcccgctaaaaagagactgaactttggtcagactggcgactcagagtcagtccccgaccctcaaccaatcggagaaccaccagcaggcccctctggtctgggatctggtacaatggctgcaggcggtggcgctccaatggcagacaataacgaaggcgccgacggagtgggtagttcctcaggaaattggcattgcgattccacatggctgggcgacagagtcatcaccaccagcacccgaacctgggccctgcccacctacaacaaccacctctacaagcaaatatccaatgggacatcgggaggaagcaccaacgacaacacctacttcggctacagcaccccctgggggtattttgacttcaacagattccactgccacttctcaccacgtgactggcagcgactcatcaacaacaactggggattccggccaaaaagactcagcttcaagctcttcaacatccaggtcaaggaggtcacgcagaatgaaggcaccaagaccatcgccaataaccttaccagcacgattcaggtatttacggactcggaataccagctgccgtacgtcctcggctccgcgcaccagggctgcctgcctccgttcccggcggacgtcttcatgattccccagtacggctaccttacactgaacaatggaagtcaagccgtaggccgttcctccttctactgcctggaatattttccatctcaaatgctgcgaactggaaacaattttgaattcagctacaccttcgaggacgtgcctttccacagcagctacgcacacagccagagcttggaccgactgatgaatcctctcatcgaccagtacctgtactacttatccagaactcagtccacaggaggaactcaaggtacccagcaattgttattttctcaagctgggcctgcaaacatgtcggctcaggctaagaactggctacctggaccttgctaccggcagcagcgagtctctacgacactgtcgcaaaacaacaacagcaactttgcttggactggtgccaccaaatatcacctgaacggaagagactctttggtaaatcccggtgtcgccatggcaacccacaaggacgacgaggaacgcttcttcccgtcgagtggagtcctgatgtttggaaaacagggtgctggaagagacaatgtggactacagcagcgttatgctaaccagcgaagaagaaattaaaaccactaaccctgtagccacagaacaatacggtgtggtggctgacaacttgcagcaaaccaatacagggcctattgtgggaaatgtcaacagccaaggagccttacctggcatggtctggcagaaccgagacgtgtacctgcagggtcccatctgggccaagattcctcacacggacggcaacttccacccttcaccgctaatgggaggatttggactgaagcacccacctcctcagatcctgatcaagaacacgccggtacctgcggatcctccaacaacgttcagccaggcgaaattggcttccttcattacgcagtacagcaccggacaggtcagcgtggaaatcgagtgggagctgcagaaggagaacagcaaacgctggaacccagagattcagtacacttcaaactactacaaatctacaaatgtggactttgctgtcaatacagagggaacttattctgagcctcgccccattggtactcgttacctcacccgtaatctgtaa

SEQ ID NO: 515 - protein, 738 aa, Artificial Sequence
  Description of Artificial Sequence: Synthetic polypeptide
MAADGYLPDWLEDNLSEGIREWWDLKPGAPKPKANQQKQDDGRGLVLPGYKYLGPFNGLDKGEPVNAADAAALEHDKAYDQQLKAGDNPYLRYNHADAEFQERLQEDTSFGGNLGRAVFQAKKRVLEPLGLVEEGAKTAPGKKRPVEPSPQRSPDSSTGIGKKGQQPARKRLNFGQTGDSESVPDPQPLGEPPAAPSSVGSGTMAAGGGAPMADNNEGADGVGSSSGNWHCDSTWLGDRVITTSTRTWALPTYNNHLYKQISNGTSGGSTNDNTYFGYSTPWGYFDFNRFHCHFSPRDWQRLINNNWGFRPKRLSFKLFNIQVKEVTQNEGTKTIANNLTSTIQVFTDSEYQLPYVLGSAHQGCLPPFPADVFMIPQYGYLTLNNGSQAVGRSSFYCLEYFPSQMLRTGNNFSFSYTFEDVPFHSSYAHSQSLDRLMNPLIDQYLYYLSRTQSTGGTAGTQQLLFSQAGPSNMSAQARNWLPGPCYRQQRVSTTLSQNNNSNFAWTGATKYHLNGRDSLVNPGVAMATNKDDEDRFFPSSGILMFGKQGAGKDNVDYSNVMLTSEEEIKTTNPVATEQYGVVADNLQRQNTAPIVGAVNSQGALPGMVWQNRDVYLQGPIWAKIPHTDGNFHPSPLMGGFGLKHPPPQILIKNTPVPADPPTAFNQAKLNSFITQYSTGQVSVEIEWELQKENSKRWNPEIQYTSNYYKSTNVDFAVNTEGVYSEPRPIGTRYLTRNL

SEQ ID NO: 516 - protein, 736 aa, Artificial Sequence
  Description of Artificial Sequence: Synthetic polypeptide
MAADGYLPDWLEDNLSEGIREWLNLKPGAPQPKANQQKQDNARGLVLPGYKYLGPFNGLDKGDPVNEADAAALEHDKAYGQQLKAGDNPYLKYNHADAEFQERLQKDTSFGGNLGKAVFQAKKRILEPLGLVETPAKTAPGKKRPVDPSPQRSPDSSSGIGKKSPHPARKRLNFGQTGEAESVPDPQPIGEPPSDPSSVGSGTMAAGGGAPMADNNEGADGVGNSSGNWHCDSTWLGDRVITTSTRTWALPTYNNHLYKQISSQSGATNDNHYFGYSTPWGYFDFNRFHCHFSPRDWQRLINNNWGFRPKRLSFKLFNIQVKEVTQNDGTTTIANNLTSTVQVFTDSEYQLPYVLGSAHQGCLPPFPADVFMIPQYGYLTLNNGSQAVGRSSFYCLEYFPSQMLRTGNNFQFSYTFEDVPFHSSYAHSQSLDRLMNPLIDQYLYYLSKTQGTNATVQGAKLQFSQAGPSNMRDQARNWLPGPCYRQQRVSKTANDNNNSEYAWTGATKYHLNGRDSLVNPGPAMASHKDDEEKFFPMNGTLVFGKNGAGNSNVDIENVMITDEEEIRTTNPVATEQYGVVSDNLQSSNTRPITGDVDSQGVLPGMVWQDRDVYLQGPIWAKIPHTDGHFHPSPLMGGFGLKHPPPQILIKNTPVPANPATTFTPGKFASFITQYSTGQVSVQIEWELQKENSKRWNPEIQYTSNYNKSVNVDFTVDTNGVYSEPRPIGTRYLTRNL

SEQ ID NO: 517 - protein, 736 aa, Artificial Sequence; identical to SEQ ID NO: 92
  Description of Artificial Sequence: Synthetic polypeptide

SEQ ID NO: 518 - protein, 736 aa, Artificial Sequence
  Description of Artificial Sequence: Synthetic polypeptide
MAADGYLPDWLEDNLSEGIREWWDLKPGAPKPKANQQKQDDGRGLVLPGYKYLGPFNGLDKGEPVNAADAAALEHDKAYDQQLKAGDNPYLRYNHADAEFQERLQEDTSFGGNLGRAVFQAKKRVLEPLGLVEEGAKTAPGKKRPVEQSPQEPDSSSGIGKTGQQPAKKRLNFGQTGDSESVPDPQPLGEPPAAPSGLGPNTMASGGGAPMADNNEGADGVGNSSGNWHCDSTWLGDRVITTSTRTWALPTYNNHLYKQISNGTSGGSTNDNTYFGYSTPWGYFDFNRFHCHFSPRDWQRLINNNWGFRPKRLNFKLFNIQVKEVTTNEGTKTIANNLTSTVQVFTDSEYQLPYVLGSAHQGCLPPFPADVFMVPQYGYLTLNNGSQALGRSSFYCLEYFPSQMLRTGNNFQFSYTFEDVPFHSSYAHSQSLDRLMNPLIDQYLYYLVRTQTTGTGGTQTLAFSQAGPSSMANQARNWVPGPCYRQQRVSTTTNQNNNSNFAWTGAAKFKLNGRDSLMNPGVAMASHKDDEDRFFPSSGVLIFGKQGAGNDGVDYSQVLITDEEEIKATNPVATEEYGAVAINNQAANTQAQTGLVHNQGVIPGMVWQNRDVYLQGPIWAKIPHTDGNFHPSPLMGGFGLKHPPPQILIKNTPVPADPPLTFNQAKLNSFITQYSTGQVSVEIEWELQKENSKRWNPEIQYTSNYYKSTNVDFAVNTEGVYSEPRPIGTRYLTRNL

SEQ ID NO: 519 - protein, 736 aa, Artificial Sequence; identical to SEQ ID NO: 518
  Description of Artificial Sequence: Synthetic polypeptide

SEQ ID NO: 520 - protein, 736 aa, Artificial Sequence
  Description of Artificial Sequence: Synthetic polypeptide
MAADGYLPDWLEDNLSEGIREWWDLKPGAPKPKANQQKQDDGRGLVLPGYKYLGPFNGLDKGEPVNAADAAALEHDKAYDQQLKAGDNPYLRYNHADAEFQERLQEDTSFGGNLGRAVFQAKKRVLEPLGLVEEGAKTAPGKKRPVEQSPQEPDSSSGIGKTGQQPAKKRLNFGQTGDSESVPDPQPLGEPPAAPSGLGPNTMASGGGAPMADNNEGADGVGNSSGNWHCDSTWLGDRVITTSTRTWALPTYNNHLYKQISNGTSGGSTNDNTYFGYSTPWGYFDFNRFHCHFSPRDWQRLINNNWGFRPKRLNFKLFNIQVKEVTTNEGTKTIANNLTSTVQVFTDSEYQLPYVLGSAHQGCLPPFPADVFMVPQYGYLTLNNGSQALGRSSFYCLEYFPSQMLRTGNNFQFSYTFEDVPFHSSYAHSQSLDRLMNPLIDQYLYYLVRTQTTGTGGTQTLAFSQAGPSSMANQARNWVPGPCYRQQRVSTTTNQNNNSNFAWTGAAKFKLNGRDSLMNPGVAMASHKDDEDRFFPSSGVLIFGKQGAGNDGVDYSQVLITDEEEIKATNPVATEEYGAVAINNQRANTQAQTGLVHNQGVIPGMVWQNRDVYLQGPIWAKIPHTDGNFHPSPLMGGFGLKHPPPQILIKNTPVPADPPLTFNQAKLNSFITQYSTGQVSVEIEWELQKENSKRWNPEIQYTSNYYKSTNVDFAVNTEGVYSEPRPIGTRYLTRNL

SEQ ID NO: 521 - protein, 736 aa, Artificial Sequence
  Description of Artificial Sequence: Synthetic polypeptide
MAADGYLPDWLEDNLSEGIREWWDLKPGAPKPKANQQKQDDGRGLVLPGYKYLGPFNGLDKGEPVNAADAAALEHDKAYDQQLKAGDNPYLRYNHADAEFQERLQEDTSFGGNLGRAVFQAKKRVLEPLGLVEEGAKTAPGKKRPVEQSPQEPDSSSGIGKTGQQPAKKRLNFGQTGDSESVPDPQPLGEPPAAPSGLGPNTMASGGGAPMADNNEGADGVGNSSGNWHCDSTWLGDRVITTSTRTWALPTYNNHLYKQISNGTSGGSTNDNTYFGYSTPWGYFDFNRFHCHFSPRDWQRLINNNWGFRPKRLNFKLFNIQVKEVTTNEGTKTIANNLTSTVQVFTDSEYQLPYVLGSAHQGCLPPFPADVFMVPQYGYLTLNNGSQALGRSSFYCLEYFPSQMLRTGNNFQFSYTFEDVPFHSSYAHSQSLDRLMNPLIDQYLYYLVRTQTTGTGGTQTLAFSQAGPSSMANQARNWVPGPCYRQQRVSTTTNQNNNSNFAWTGAAKFKLNGRDSLMNPGVAMASHKDDEDAFFPSSGVLIFGKQGAGNDGVDYSQVLITDEEEIKATNPVATEEYGAVAINNQAANTQAQTGLVHNQGVIPGMVWQNRDVYLQGPIWAKIPHTDGNFHPSPLMGGFGLKHPPPQILIKNTPVPADPPLTFNQAKLNSFITQYSTGQVSVEIEWELQKENSKRWNPEIQYTSNYYKSTNVDFAVNTEGVYSEPRPIGTRYLTRNL

SEQ ID NO: 522 - DNA, 1803 bp, Bovine adeno-associated virus
acggcgcctgcggcaaaaaagaggcctctagagcagagtcctcaagagccagactcctcgagcggagttggcaagaaaggcaaacagcctgccagaaagagactcaactttgacgacgaacctggagccggagacgggcctcccccagaaggaccatcttccggagctatgtctactgagactgaaatgcgtgcagcagctggcggaaatggtggcgatgcgggacaaggtgccgagggagtgggtaatgcctccggtgattggcattgcgattccacttggtcagagagccacgtcaccaccacctcaacccgcacctgggtcctgccgacctacaacaaccacctgtacctgcggctcggctcgagcaacgccagcgacaccttcaacggattctccaccccctggggatactttgactttaaccgcttccactgccacttctcgccaagagactggcaaaggctcatcaacaaccactggggactgcgccccaaaagcatgcaagtccgcatcttcaacatccaagttaaggaggtcacgacgtctaacggggagacgaccgtatccaacaacctcaccagcacggtccagatctttgcggacagcacgtacgagctcccgtacgtgatggatgcaggtcaggagggcagcttgcctcctttccccaacgacgtgttcatggtgcctcagtacgggtactgcggactggtaaccggaggcagctctcaaaaccagacagacagaaatgccttctactgtctggagtactttcccagccagatgctgagaaccggaaacaactttgagatggtgtacaagtttgaaaacgtgcccttccactccatgtacgctcacagccagagcctggataggctgatgaacccgctgctggaccagtacctgtgggagctccagtctaccacctctggaggaactctcaaccagggcaattcagccaccaactttgccaagctgaccaaaacaaacttttctggctaccgcaaaaactggctcccggggcccatgatgaagcagcagagattctccaagactgccagtcaaaactacaagattccccagggaagaaacaacagtctgctccattatgagaccagaactaccctcgacggaagatggagcaattttgccccgggaacggccatggcaaccgcagccaacgacgccaccgacttctctcaggcccagctcatctttgcggggcccaacatcaccggcaacaccaccacagatgccaataacctgatgttcacttcagaagatgaacttagggccaccaacccccgggacactgacctgtttggccacctggcaaccaaccagcaaaacgccaccaccgttcctaccgtagacgacgtggacggagtcggcgtgtacccgggaatggtgtggcaggacagagacatttactaccaagggcccatttgggccaaaattccacacacggatggacactttcacccgtctcctctcattggcggatttggactgaaaagcccgcctccacaaatattcatcaaaaacactcctgtacccgccaatcccgcaacgaccttctctccggccagaatcaacagcttcatcacccagtacagcaccggacaggtggctgtcaaaatagaatgggaaatccagaaggagcggtccaagagatggaacccagaggtccagttcacgtccaactacggagcacaggactcgcttctctgggctcccgacaacgccggagcctacaaagagcccagggccattggatcccgatacctcaccaaccacctctag

SEQ ID NO: 523 - DNA, 1617 bp, Bovine adeno-associated virus
atgcgtgcagcagctggcggaaatggtggcgatgcgggacaaggtgccgagggagtgggtaatgcctccggtgattggcattgcgattccacttggtcagagagccacgtcaccaccacctcaacccgcacctgggtcctgccgacctacaacaaccacctgtacctgcggctcggctcgagcaacgccagcgacaccttcaacggattctccaccccctggggatactttgactttaaccgcttccactgccacttctcgccaagagactggcaaaggctcatcaacaaccactggggactgcgccccaaaagcatgcaagtccgcatcttcaacatccaagttaaggaggtcacgacgtctaacggggagacgaccgtatccaacaacctcaccagcacggtccagatctttgcggacagcacgtacgagctcccgtacgtgatggatgcaggtcaggagggcagcttgcctcctttccccaacgacgtgttcatggtgcctcagtacgggtactgcggactggtaaccggaggcagctctcaaaaccagacagacagaaatgccttctactgtctggagtactttcccagccagatgctgagaaccggaaacaactttgagatggtgtacaagtttgaaaacgtgcccttccactccatgtacgctcacagccagagcctggataggctgatgaacccgctgctggaccagtacctgtgggagctccagtctaccacctctggaggaactctcaaccagggcaattcagccaccaactttgccaagctgaccaaaacaaacttttctggctaccgcaaaaactggctcccggggcccatgatgaagcagcagagattctccaagactgccagtcaaaactacaagattccccagggaagaaacaacagtctgctccattatgagaccagaactaccctcgacggaagatggagcaattttgccccgggaacggccatggcaaccgcagccaacgacgccaccgacttctctcaggcccagctcatctttgcggggcccaacatcaccggcaacaccaccacagatgccaataacctgatgttcacttcagaagatgaacttagggccaccaacccccgggacactgacctgtttggccacctggcaaccaaccagcaaaacgccaccaccgttcctaccgtagacgacgtggacggagtcggcgtgtacccgggaatggtgtggcaggacagagacatttactaccaagggcccatttgggccaaaattccacacacggatggacactttcacccgtctcctctcattggcggatttggactgaaaagcccgcctccacaaatattcatcaaaaacactcctgtacccgccaatcccgcaacgaccttctctccggccagaatcaacagcttcatcacccagtacagcaccggacaggtggctgtcaaaatagaatgggaaatccagaaggagcggtccaagagatggaacccagaggtccagttcacgtccaactacggagcacaggactcgcttctctgggctcccgacaacgccggagcctacaaagagcccagggccattggatcccgatacctcaccaaccacctctag

SEQ ID NO: 524 - DNA, 1173 bp, Bovine adeno-associated virus
atggcgctggtaagctggctggtggaacatggcatcacttccgagaagcagtggattcaggagaatcaggagagctacctgtccttcaactccacgggaaactctcggagccagattaaagccgcgcttgacaacgcgtcaaaaattatgagtctgaccaaatctgcctcagactatctcgtgggacagactgttccagaggacatttctgaaaacagaatctggcagatttttgatctcaacggctacgacccggcatacgcgggctctgttctctacggctggtgcactcgcgcctttggaaagaggaacaccgtctggctgtatggacccgcgaccaccggaaagaccaacatcgcggaagccatctctcacaccgtgcccttttatggctgtgtgaactggactaatgagaactttccctttaatgactgtgtggaaaaaatgttgatctggtgggaggagggaaagatgaccagcaaggtggtggaacccgccaaggccatcttgggggggtctagagtacgagtggatcaaaaatgtaaatcctctgtacaagtagactctaccccggtgattatcacctccaatactaacatgtgtgtggtggtggatgggaactccacgacctttgaacaccagcagccgctggaagaccgcatgttcagatttgaactcatgcggcggctcccgccagattttggcaagattaccaagcaggaagtcaaagacttttttgcttgggcaaaggtcaaccaggtgccggtgactcacgagtttatggttcccaagaaagtggcgggaactgagagggcggagacttctagaaaacgcccactggatgacgtcaccaataccaactataaaagtccggagaagcgggcccggctctcagttgttcctgagacgcctcgcagttcagacgtgcctgtagagcccgctcctctgcgacctctcaactggtcttccaggtatgaatgcagatgtgactatcatgctaaatttgactctgtaacgggggaatgtgacgagtgtgaatatttgaatcggggcaaaaatggctgtatctttcataatgctacacattgtcaaatttgtcacgctgttcctccatgggaaaaggaaaatgtgtcagattttaatgattttgatgactgtaataaagagcagtaa

SEQ ID NO: 525 - DNA, 1833 bp, Bovine adeno-associated virus
atggctaccttctatgaagtcattgttcgcgttccatttgatgtggaagagcacctgcctggaatttctgacaactttgtagactgggtaactggtcaaatttgggagctgcctcccgagtcagatttgaatttgactctgattgagcagcctcagctgacggtggctgacagaattcgccgcgtgttcctgtacgagtggaacaaattttccaagcaggagagcaaattctttgtgcagtttgaaaagggatctgaatattttcatctgcacacgctcgtggagacctccggcatctcttctatggtccttggccgctacgtgagtcagattcgcgcccagctggtgaaggtggtgttccagaacattgagccgcggattaacgactgggtcgccatcaccaaggtaaagaagggcggagccaataaggtggtggattctgggtatattcccgcctacctgctgccgaaggtccaaccagagcttcagtgggcgtggactaacctcgaagagtataaattggccgccctcaatctggaggagcgcaaacggctcgtcgctcagtttcagcttgagtcctcgcagcgctcgcaagaggcatcttcccagagggacgtttcggctgacccggtcatcaagagcaagacttcccagaaatacatggcgctggtaagctggctggtggaacatggcatcacttccgagaagcagtggattcaggagaatcaggagagctacctgtccttcaactccacgggaaactctcggagccagattaaagccgcgcttgacaacgcgtcaaaaattatgagtctgaccaaatctgcctcagactatctcgtgggacagactgttccagaggacatttctgaaaacagaatctggcagatttttgatctcaacggctacgacccggcatacgcgggctctgttctctacggctggtgcactcgcgcctttggaaagaggaacaccgtctggctgtatggacccgcgaccaccggaaagaccaacatcgcggaagccatctctcacaccgtgcccttttatggctgtgtgaactggactaatgagaactttccctttaatgactgtgtggaaaaaatgttgatctggtgggaggagggaaagatgaccagcaaggtggtggaacccgccaaggccatcttgggggggtctagagtacgagtggatcaaaaatgtaaatcctctgtacaagtagactctaccccggtgattatcacctccaatactaacatgtgtgtggtggtggatgggaactccacgacctttgaacaccagcagccgctggaagaccgcatgttcagatttgaactcatgcggcggctcccgccagattttggcaagattaccaagcaggaagtcaaagacttttttgcttgggcaaaggtcaaccaggtgccggtgactcacgagtttatggttcccaagaaagtggcgggaactgagagggcggagacttctagaaaacgcccactggatgacgtcaccaataccaactataaaagtccggagaagcgggcccggctctcagttgttcctgagacgcctcgcagttcagacgtgcctgtagagcccgctcctctgcgacctctcaactggtcttccaggtatgaatgcagatgtgactatcatgctaaatttgactctgtaacgggggaatgtgacgagtgtgaatatttgaatcggggcaaaaatggctgtatctttcataatgctacacattgtcaaatttgtcacgctgttcctccatgggaaaaggaaaatgtgtcagattttaatgattttgatgactgtaataaagagcagtaa

SEQ ID NO: 526 - DNA, 2211 bp, Bovine adeno-associated virus
atgtcttttgttgaccaccctccagattggttggaatcgatcggcgacggctttcgtgaatttctcggccttgaggcgggtcccccgaaacccaaggccaatcaacagaagcaagataacgctcgaggtcttgtgcttcctgggtacaagtatcttggtcctgggaacggccttgataagggcgatcctgtcaattttgctgacgaggttgcccgagagcacgacctctcctaccagaaacagcttgaggcgggcgataacccttacctcaagtacaaccacgcggacgcagagtttcaggagaaactcgcttctgacacttcttttgggggaaaccttgggaaggctgttttccaggctaaaaagaggattctcgaacctcttggcctggttgagacgccggataaaacggcgcctgcggcaaaaaagaggcctctagagcagagtcctcaagagccagactcctcgagcggagttggcaagaaaggcaaacagcctgccagaaagagactcaactttgacgacgaacctggagccggagacgggcctcccccagaaggaccatcttccggagctatgtctactgagactgaaatgcgtgcagcagctggcggaaatggtggcgatgcgggacaaggtgccgagggagtgggtaatgcctccggtgattggcattgcgattccacttggtcagagagccacgtcaccaccacctcaacccgcacctgggtcctgccgacctacaacaaccacctgtacctgcggctcggctcgagcaacgccagcgacaccttcaacggattctccaccccctggggatactttgactttaaccgcttccactgccacttctcgccaagagactggcaaaggctcatcaacaaccactggggactgcgccccaaaagcatgcaagtccgcatcttcaacatccaagttaaggaggtcacgacgtctaacggggagacgaccgtatccaacaacctcaccagcacggtccagatctttgcggacagcacgtacgagctcccgtacgtgatggatgcaggtcaggagggcagcttgcctcctttccccaacgacgtgttcatggtgcctcagtacgggtactgcggactggtaaccggaggcagctctcaaaaccagacagacagaaatgccttctactgtctggagtactttcccagccagatgctgagaaccggaaacaactttgagatggtgtacaagtttgaaaacgtgcccttccactccatgtacgctcacagccagagcctggataggctgatgaacccgctgctggaccagtacctgtgggagctccagtctaccacctctggaggaactctcaaccagggcaattcagccaccaactttgccaagctgaccaaaacaaacttttctggctaccgcaaaaactggctcccggggcccatgatgaagcagcagagattctccaagactgccagtcaaaactacaagattccccagggaagaaacaacagtctgctccattatgagaccagaactaccctcgacggaagatggagcaattttgccccgggaacggccatggcaaccgcagccaacgacgccaccgacttctctcaggcccagctcatctttgcggggcccaacatcaccggcaacaccaccacagatgccaataacctgatgttcacttcagaagatgaacttagggccaccaacccccgggacactgacctgtttggccacctggcaaccaaccagcaaaacgccaccaccgttcctaccgtagacgacgtggacggagtcggcgtgtacccgggaatggtgtggcaggacagagacatttactaccaagggcccatttgggccaaaattccacacacggatggacactttcacccgtctcctctcattggcggatttggactgaaaagcccgcctccacaaatattcatcaaaaacactcctgtacccgccaatcccgcaacgaccttctctccggccagaatcaacagcttcatcacccagtacagcaccggacaggtggctgtcaaaatagaatgggaaatccagaaggagcggtccaagagatggaacccagaggtccagttcacgtccaactacggagcacaggactcgcttctctgggctcccgacaacgccggagcctacaaagagcccagggccattggatcccgatacctcaccaaccacctctag

SEQ ID NO: 527 - DNA, 4694 bp, Bovine adeno-associated virus
gtggcactcccccccctgtcgcgttcgctcgttcgctggctcgattgggggggtggcagctcaaagagctgccagacgacggccctctgggccgtcgcccccccaatcgagccagcgaacgagcgaacgcgacaggggggggagtgccacactctctagcaagggggttttgtaggtggtgatgtcattgttgatgtcattatagttgtcacgcgatagttaatgattaacagtcatgtgatgtgtgttatccaataggatgaaagcgcgcgaatgagatctcgcgagacttccggggtataaaaggggtgagtgaacgagcccgccgccattctctgctctggactgctagaggaccctcgctgccatggctaccttctatgaagtcattgttcgcgttccatttgatgtggaagagcacctgcctggaatttctgacaactttgtagactgggtaactggtcaaatttgggagctgcctcccgagtcagatttgaatttgactctgattgagcagcctcagctgacggtggctgacagaattcgccgcgtgttcctgtacgagtggaacaaattttccaagcaggagagcaaattctttgtgcagtttgaaaagggatctgaatattttcatctgcacacgctcgtggagacctccggcatctcttctatggtccttggccgctacgtgagtcagattcgcgcccagctggtgaaggtggtgttccagaacattgagccgcggattaacgactgggtcgccatcaccaaggtaaagaagggcggagccaataaggtggtggattctgggtatattcccgcctacctgctgccgaaggtccaaccagagcttcagtgggcgtggactaacctcgaagagtataaattggccgccctcaatctggaggagcgcaaacggctcgtcgctcagtttcagcttgagtcctcgcagcgctcgcaagaggcatcttcccagagggacgtttcggctgacccggtcatcaagagcaagacttcccagaaatacatggcgctggtaagctggctggtggaacatggcatcacttccgagaagcagtggattcaggagaatcaggagagctacctgtccttcaactccacgggaaactctcggagccagattaaagccgcgcttgacaacgcgtcaaaaattatgagtctgaccaaatctgcctcagactatctcgtgggacagactgttccagaggacatttctgaaaacagaatctggcagatttttgatctcaacggctacgacccggcatacgcgggctctgttctctacggctggtgcactcgcgcctttggaaagaggaacaccgtctggctgtatggacccgcgaccaccggaaagaccaacatcgcggaagccatctctcacaccgtgcccttttatggctgtgtgaactggactaatgagaactttccctttaatgactgtgtggaaaaaatgttgatctggtgggaggagggaaagatgaccagcaaggtggtggaacccgccaaggccatcttgggggggtctagagtacgagtggatcaaaaatgtaaatcctctgtacaagtagactctaccccggtgattatcacctccaatactaacatgtgtgtggtggtggatgggaactccacgacctttgaacaccagcagccgctggaagaccgcatgttcagatttgaactcatgcggcggctcccgccagattttggcaagattaccaagcaggaagtcaaagacttttttgcttgggcaaaggtcaaccaggtgccggtgactcacgagtttatggttcccaagaaagtggcgggaactgagagggcggagacttctagaaaacgcccactggatgacgtcaccaataccaactataaaagtccggagaagcgggcccggctctcagttgttcctgagacgcctcgcagttcagacgtgcctgtagagcccgctcctctgcgacctctcaactggtcttccaggtatgaatgcagatgtgactatcatgctaaatttgactctgtaacgggggaatgtgacgagtgtgaatatttgaatcggggcaaaaatggctgtatctttcataatgctacacattgtcaaatttgtcacgctgttcctccatgggaaaaggaaaatgtgtcagattttaatgattttgatgactgtaataaagagcagtaaataaagtgagtagtcatgtcttttgttgaccaccctccagattggttggaatcgatcggcgacggctttcgtgaatttctcggccttgaggcgggtcccccgaaacccaaggccaatcaacagaagcaagataacgctcgaggtcttgtgcttcctgggtacaagtatcttggtcctgggaacggccttgataagggcgatcctgtcaattttgctgacgaggttgcccgagagcacgacctctcctaccagaaacagcttgaggcgggcgataacccttacctcaagtacaaccacgcggacgcagagtttcaggagaaactcgcttctgacacttcttttgggggaaaccttgggaaggctgttttccaggctaaaaagaggattctcgaacctcttggcctggttgagacgccggataaaacggcgcctgcggcaaaaaagaggcctctagagcagagtcctcaagagccagactcctcgagcggagttggcaagaaaggcaaacagcctgccagaaagagactcaactttgacgacgaacctggagccggagacgggcctcccccagaaggaccatcttccggagctatgtctactgagactgaaatgcgtgcagcagctggcggaaatggtggcgatgcgggacaaggtgccgagggagtgggtaatgcctccggtgattggcattgcgattccacttggtcagagagccacgtcaccaccacctcaacccgcacctgggtcctgccgacctacaacaaccacctgtacctgcggctcggctcgagcaacgccagcgacaccttcaacggattctccaccccctggggatactttgactttaaccgcttccactgccacttctcgccaagagactggcaaaggctcatcaacaaccactggggactgcgccccaaaagcatgcaagtccgcatcttcaacatccaagttaaggaggtcacgacgtctaacggggagacgaccgtatccaacaacctcaccagcacggtccagatctttgcggacagcacgtacgagctcccgtacgtgatggatgcaggtcaggagggcagcttgcctcctttccccaacgacgtgttcatggtgcctcagtacgggtactgcggactggtaaccggaggcagctctcaaaaccagacagacagaaatgccttctactgtctggagtactttcccagccagatgctgagaaccggaaacaactttgagatggtgtacaagtttgaaaacgtgcccttccactccatgtacgctcacagccagagcctggataggctgatgaacccgctgctggaccagtacctgtgggagctccagtctaccacctctggaggaactctcaaccagggcaattcagccaccaactttgccaagctgaccaaaacaaacttttctggctaccgcaaaaactggctcccggggcccatgatgaagcagcagagattctccaagactgccagtcaaaactacaagattccccagggaagaaacaacagtctgctccattatgagaccagaactaccctcgacggaagatggagcaattttgccccgggaacggccatggcaaccgcagccaacgacgccaccgacttctctcaggcccagctcatctttgcggggcccaacatcaccggcaacaccaccacagatgccaataacctgatgttcacttcagaagatgaacttagggccaccaacccccgggacactgacctgtttggccacctggcaaccaaccagcaaaacgccaccaccgttcctaccgtagacgacgtggacggagtcggcgtgtacccgggaatggtgtggcaggacagagacatttactaccaagggcccatttgggccaaaattccacacacggatggacactttcacccgtctcctctcattggcggatttggactgaaaagcccgcctccacaaatattcatcaaaaacactcctgtacccgccaatcccgcaacgaccttctctccggccagaatcaacagcttcatcacccagtacagcaccggacaggtggctgtcaaaatagaatgggaaatccagaaggagcggtccaagagatggaacccagaggtccagttcacgtccaactacggagcacaggactcgcttctctgggctcccgacaacgccggagcctacaaagagcccagggccattggatcccgatacctcaccaaccacctctagcccaattctgttgcataccctcaataaaccgtgtattcgtttcagtaaaatactgcctcttgtggtcattcggcgtacaacagcttacaacaacaacaaaacccccttgctagagagtgtggcactcccccccctgtcgcgttcgctcgttcgctggctcgattgggggggtggcagctcaaagagctgccagacgacggccctctgggccgtcgcccccccaatcgagccagcgaacgagcgaacgcgacaggggggggagtgccac

SEQ ID NO: 528 - protein, 390 aa, Bovine adeno-associated virus
MALVSWLVEHGITSEKQWIQENQESYLSFNSTGNSRSQIKAALDNASKIMSLTKSASDYLVGQTVPEDISENRIWQIFDLNGYDPAYAGSVLYGWCTRAFGKRNTVWLYGPATTGKTNIAEAISHTVPFYGCVNWTNENFPFNDCVEKMLIWWEEGKMTSKVVEPAKAILGGSRVRVDQKCKSSVQVDSTPVIITSNTNMCVVVDGNSTTFEHQQPLEDRMFRFELMRRLPPDFGKITKQEVKDFFAWAKVNQVPVTHEFMVPKKVAGTERAETSRKRPLDDVTNTNYKSPEKRARLSVVPETPRSSDVPVEPAPLRPLNWSSRYECRCDYHAKFDSVTGECDECEYLNRGKNGCIFHNATHCQICHAVPPWEKENVSDFNDFDDCNKEQ

SEQ ID NO: 529 - protein, 610 aa, Bovine adeno-associated virus
MATFYEVIVRVPFDVEEHLPGISDNFVDWVTGQIWELPPESDLNLTLIEQPQLTVADRIRRVFLYEWNKFSKQESKFFVQFEKGSEYFHLHTLVETSGISSMVLGRYVSQIRAQLVKVVFQNIEPRINDWVAITKVKKGGANKVVDSGYIPAYLLPKVQPELQWAWTNLEEYKLAALNLEERKRLVAQFQLESSQRSQEASSQRDVSADPVIKSKTSQKYMALVSWLVEHGITSEKQWIQENQESYLSFNSTGNSRSQIKAALDNASKIMSLTKSASDYLVGQTVPEDISENRIWQIFDLNGYDPAYAGSVLYGWCTRAFGKRNTVWLYGPATTGKTNIAEAISHTVPFYGCVNWTNENFPFNDCVEKMLIWWEEGKMTSKVVEPAKAILGGSRVRVDQKCKSSVQVDSTPVIITSNTNMCVVVDGNSTTFEHQQPLEDRMFRFELMRRLPPDFGKITKQEVKDFFAWAKVNQVPVTHEFMVPKKVAGTERAETSRKRPLDDVTNTNYKSPEKRARLSVVPETPRSSDVPVEPAPLRPLNWSSRYECRCDYHAKFDSVTGECDECEYLNRGKNGCIFHNATHCQICHAVPPWEKENVSDFNDFDDCNKEQ

SEQ ID NO: 530 - protein, 538 aa, Bovine adeno-associated virus
MRAAAGGNGGDAGQGAEGVGNASGDWHCDSTWSESHVTTTSTRTWVLPTYNNHLYLRLGSSNASDTFNGFSTPWGYFDFNRFHCHFSPRDWQRLINNHWGLRPKSMQVRIFNIQVKEVTTSNGETTVSNNLTSTVQIFADSTYELPYVMDAGQEGSLPPFPNDVFMVPQYGYCGLVTGGSSQNQTDRNAFYCLEYFPSQMLRTGNNFEMVYKFENVPFHSMYAHSQSLDRLMNPLLDQYLWELQSTTSGGTLNQGNSATNFAKLTKTNFSGYRKNWLPGPMMKQQRFSKTASQNYKIPQGRNNSLLHYETRTTLDGRWSNFAPGTAMATAANDATDFSQAQLIFAGPNITGNTTTDANNLMFTSEDELRATNPRDTDLFGHLATNQQNATTVPTVDDVDGVGVYPGMVWQDRDIYYQGPIWAKIPHTDGHFHPSPLIGGFGLKSPPPQIFIKNTPVPANPATTFSPARINSFITQYSTGQVAVKIEWEIQKERSKRWNPEVQFTSNYGAQDSLLWAPDNAGAYKEPRAIGSRYLTNHL

SEQ ID NO: 531 - protein, 736 aa, Artificial Sequence
  Description of Artificial Sequence: Synthetic polypeptide
MSFVDHPPDWLESIGDGFREFLGLEAGPPKPKANQQKQDNARGLVLPGYKYLGPGNGLDKGDPVNFADEVAREHDLSYQKQLEAGDNPYLKYNHADAEFQEKLASDTSFGGNLGKAVFQAKKRILEPLGLVETPDKTAPAAKKRPLEQSPQEPDSSSGVGKKGKQPARKRLNFDDEPGAGDGPPPEGPSSGAMSTETEMRAAAGGNGGDAGQGAEGVGNASGDWHCDSTWSESHVTTTSTRTWVLPTYNNHLYLRLGSSNASDTFNGFSTPWGYFDFNRFHCHFSPRDWQRLINNHWGLRPKSMQVRIFNIQVKEVTTSNGETTVSNNLTSTVHIFADSTYELPYVMDAGQEGSLPPFPNDVFMVPQYGYCGLVTGGSSQNQTDRNAFYCLEYFPSQMLRTGNNFEMVYKFENVPFHSMYAHSQSLDRLMNPLLDQYLWELQSTTSGGTLNQGNSATNFAKLTNKNFSGYRKNWLPGPMMKQQRFSKTASQNYKIPQGGNNSLLHYETRTTLDRRWSNFAPGTAMATAANDATDFSQAQLIFAGPNITGNTTTDANNLMFTSEDELRATNPRDTDLFGHLATNQQNATTVPTVDDVDGVGVYPGMVWQDRDIYYQGPIWAKIPHTDGHFHPSPLIGGFGLKSPPPQIFIKNTPVPANPATTFSPARINSFITQYSTGQVAVKIEWEIQKERSKRWNPEVQFTSNYGAQDSLLWAPDNAGAYKEPRAIGSRYLTNHL

SEQ ID NO: 532 - protein, 736 aa, Artificial Sequence
  Description of Artificial Sequence: Synthetic polypeptide
MSFVDHPPDWLESIGDGFREFLGLEAGPPKPKANQQKQDNARGLVLPGYKYLGPGNGLDKGDPVNFADEVAREHDLSYQKQLEAGDNPYLKYNHADAEFQEKLASDTSFGGNLGKAVFQAKKRILEPLGLVETPDKTAPAAKKRPLEQSPQEPDSSSGVGKKGKQPARKRLNFDDEPGAGDGPPPEGPSSGAMSTETEMRAAAGGNGGDAGQGAEGVGNASGDWHCDSTWSESHVTTTSTRTWVLPTYNNHLYLRLGSSNASDTFNGFSTPWGYFDFNRFHCHFSPRDWQRLINNHWGLRPKSMQVRIFNIQVKEVTTSNGETTVSNNLTSTVQIFADSTYELPYVMDAGQEGSLPPFPNDVFMVPQYGYCGLVTGGSSQNQTDRNAFYCLEYFPSQMLRTGNNFEMVYKFENVPFHSMYAHSQSLDRLMNPLLDQYLWELQSTTSGGTLNQGNSATNFAKLTKTNFSGYRKNWLPGPMMKQQRFSKTASQNYKIPQGRNNSLLHYETRTTLDGRWSNFAPGTAMATAANDATDFSQAQLIFAGPNITGNTTTDANNLMFTSEDELRATNPRDTDLFGHLATNQQNATTVPTVDDVDGVGVYPGMVWQDRDIYYQGPIWAKIPHTDGHFHPSPLIGGFGLKSPPPQIFIKNTPVPANPATTFSPARINSFITQYSTGQVAVKIEWEIQKERSKRWNPEVQFTSNYGAQDSLLWAPDNAGAYKEPRAIGSRYLTNHL

SEQ ID NO: 533 - protein, 736 aa, Bovine adeno-associated virus; identical to SEQ ID NO: 532

SEQ ID NO: 534 - protein, 600 aa, Bovine adeno-associated virus
TAPAAKKRPLEQSPQEPDSSSGVGKKGKQPARKRLNFDDEPGAGDGPPPEGPSSGAMSTETEMRAAAGGNGGDAGQGAEGVGNASGDWHCDSTWSESHVTTTSTRTWVLPTYNNHLYLRLGSSNASDTFNGFSTPWGYFDFNRFHCHFSPRDWQRLINNHWGLRPKSMQVRIFNIQVKEVTTSNGETTVSNNLTSTVQIFADSTYELPYVMDAGQEGSLPPFPNDVFMVPQYGYCGLVTGGSSQNQTDRNAFYCLEYFPSQMLRTGNNFEMVYKFENVPFHSMYAHSQSLDRLMNPLLDQYLWELQSTTSGGTLNQGNSATNFAKLTKTNFSGYRKNWLPGPMMKQQRFSKTASQNYKIPQGRNNSLLHYETRTTLDGRWSNFAPGTAMATAANDATDFSQAQLIFAGPNITGNTTTDANNLMFTSEDELRATNPRDTDLFGHLATNQQNATTVPTVDDVDGVGVYPGMVWQDRDIYYQGPIWAKIPHTDGHFHPSPLIGGFGLKSPPPQIFIKNTPVPANPATTFSPARINSFITQYSTGQVAVKIEWEIQKERSKRWNPEVQFTSNYGAQDSLLWAPDNAGAYKEPRAIGSRYLTNHL

SEQ ID NO: 535 - DNA, 2214 bp, Artificial Sequence
  Description of Artificial Sequence: Synthetic polynucleotide
atggctgccgatggttatcttccagattggctcgaggacactctctctgaaggaataagacagtggtggaagctcaaacctggcccaccaccaccaaagcccgcagagcggcataaggacgacagcaggggtcttgtgcttcctgggtacaagtacctcggacccttcaacggactcgacaagggagagccggtcaacgaggcagacgccgcggccctcgagcacgacaaagcctacgaccggcagctcgacagcggagacaacccgtacctcaagtacaaccacgccgacgcggagtttcaggagcgccttaaagaagatacgtcttttgggggcaacctcgggcgagcagtcttccaggccaaaaagaggcttcttgaacctcttggtctggttgaggaagcggctaagacggctcctggaaagaagaggcctgtagagcagtctcctcaggaaccggactcctcctcgggcatcggcaagacaggccagcagcccgctaaaaagagactcaatttcggtcagactggcgacacagagtcagtcccagaccctcaaccaatcggagaacctcccgcagccccctcaggtgtgggatctcttacaatggcttcaggtggtggcgcaccagtggcagacaataacgaaggtgccgatggagtgggtagttcctcgggaaattggcattgcgattcccaatggctgggggacagagtcatcaccaccagcacccgaacctgggccctgcccacctacaacaatcacctctacaagcaaatctccaacgggacatcgggaggagccaccaacgacaacacctacttcggctacagcaccccctgggggtattttgactttaacagattccactgccacttttcaccacgtgactggcagcgactcatcaacaacaactggggattccggcccaagagactcagcttcaagctcttcaacatccaggtcaaggaggtcacgcagaatgaaggcaccaagaccatcgccaataaccttaccagcacggtccaggtcttcacggactcggagtaccagctgccgtacgttctcggctctgcccaccagggctgcctgcctccgttcccggcggacgtgttcatgattccccagtacggctacctaacactcaacaacggtagtcaggccgtgggacgctcctccttctactgcctggaatactttccttcgcagatgctgagaaccggcaacaacttccagtttacttacaccttcgaggacgtgcctttccacagcagctacgcccacagccagagcttggaccggctgatgaatcctctgattgaccagtacctgtactacttgtctcggactcaaacaacaggaggcacggcaaatacgcagactctgggcttcagccaaggtgggcctaatacaatggccaatcaggcaaagaactggctgccaggaccctgttaccgccaacaacgcgtctcaacgacaaccgggcaaaacaacaatagcaactttgcctggactgctgggaccaaataccatctgaatggaagaaattcattggctaatcctggcatcgctatggcaacacacaaagacgacaaggagcgtttttttcccagtaacgggatcctgatttttggcaaacaaaatgctgccagagacaatgcggattacagcgatgtcatgctcaccagcgaggaagaaatcaaaaccactaaccctgtggctacagaggaatacggtatcgtggcagataacttgcagcagcaaaacacggctcctcaaattggaactgtcaacagccagggggccttacccggtatggtttggcagaaccgggacgtgtacctgcagggtcccatctgggccaagattcctcacacggacggcaacttccacccgtctccgctgatgggcggctttggcctgaaacatcctccgcctcagatcctgatcaagaacacgcctgtacctgcggatcctccgaccaccttcaaccagtcaaagctgaactctttcatcacgcaatacagcaccggacaggtcagcgtggaaattgaatgggagctgcagaaggaaaacagcaagcgctggaaccccgagatccagtacacctccaactactacaaatctacaagtgtggactttgctgttaatacagaaggcgtgtactctgaaccccaccccattggcacccgttacctcacccgtcccctgtaa

SEQ ID NO: 536 - protein, 737 aa, Artificial Sequence
  Description of Artificial Sequence: Synthetic polypeptide
MAADGYLPDWLEDTLSEGIRQWWKLKPGPPPPKPAERHKDDSRGLVLPGYKYLGPFNGLDKGEPVNEADAAALEHDKAYDRQLDSGDNPYLKYNHADAEFQERLKEDTSFGGNLGRAVFQAKKRLLEPLGLVEEAAKTAPGKKRPVEQSPQEPDSSSGIGKTGQQPAKKRLNFGQTGDTESVPDPQPIGEPPAAPSGVGSLTMASGGGAPVADNNEGADGVGSSSGNWHCDSQWLGDRVITTSTRTWALPTYNNHLYKQISNGTSGGATNDNTYFGYSTPWGYFDFNRFHCHFSPRDWQRLINNNWGFRPKRLSFKLFNIQVKEVTQNEGTKTIANNLTSTVQVFTDSEYQLPYVLGSAHQGCLPPFPADVFMIPQYGYLTLNNGSQAVGRSSFYCLEYFPSQMLRTGNNFQFTYTFEDVPFHSSYAHSQSLDRLMNPLIDQYLYYLSRTQTTGGTANTQTLGFSQGGPNTMANQAKNWLPGPCYRQQRVSTTTGQNNNSNFAWTAGTKYHLNGRNSLANPGIAMATHKDDKERFFPSNGILIFGKQNAARDNADYSDVMLTSEEEIKTTNPVATEEYGIVADNLQQQNTAPQIGTVNSQGALPGMVWQNRDVYLQGPIWAKIPHTDGNFHPSPLMGGFGLKHPPPQILIKNTPVPADPPTTFNQSKLNSFITQYSTGQVSVEIEWELQKENSKRWNPEIQYTSNYYKSTSVDFAVNTEGVYSEPHPIGTRYLTRPL

SEQ ID NO: 537 - protein, 736 aa, Artificial Sequence
  Description of Artificial Sequence: Synthetic polypeptide
MAADGYLPDWLEDNLSEGIREWWDLKPGAPKPKANQQKQDDGRGLVLPGYKYLGPFNGLDKGEPVNAADAAALEHDKAYDQQLKAGDNPYLRYNHADAEFQERLQEDTSFGGNLGRAVFQAKKRVLEPLGLVEEGAKTAPGKKRPVEQSPQEPDSSSGIGKTGQQPAKKRLNFGQTGDTESVPDPQPIGEPPAAPSGVGSLTMASGGGAPVADNNEGADGVGSSSGNWHCDSQWLGDRVITTSTRTWALPTYNNHLYKQISSASTGASNDNHYFGYSTPWGYFDFNRFHCHFSPRDWQRLINNNWGFRPKRLNFKLFNIQVKEVTDNNGVKTIANNLTSTVQVFTDSDYQLPYVLGSAHQGCLPPFPADVFMIPQYGYLTLNNGSQAVGRSSFYCLEYFPSQMLRTGNNFQFTYTFEDVPFHSSYAHSQSLDRLMNPLIDQYLYYLSRTQTTGGTANTQTLGFSQGGPNTMANQAKNWLPGPCYRQQRVSTTTGQNNNSNFAWTAGTKYHLNGRNSLANPGIAMATHKDDKERFFPSNGILIFGKQNAARDNADYSDVMLTSEEEIKTTNPVATEEYGIVADNLQQQNTAPQIGTVNSQGALPGMVWQNRDVYLQGPIWAKIPHTDGNFHPSPLMGGFGLKHPPPQILIKNTPVPADPPTTFNQSKLNSFITQYSTGQVSVEIEWELQKENSKRWNPEIQYTSNYYKSTSVDFAVNTEGVYSEPHPIGTRYLTRPL

SEQ ID NO: 538 - protein, 736 aa, Artificial Sequence
  Description of Artificial Sequence: Synthetic polypeptide
MAADGYLPDWLEDTLSEGIRQWWKLKPGPPPPKPAERHKDDSRGLVLPGYKYLGPFNGLDKGEPVNEADAAALEHDKAYDRQLDSGDNPYLKYNHADAEFQERLQGDTSFGGNLGRAVFQAKKRVLEPLGLVEEGAKTAPGKKRPVEQSPQEPDSSSGIGETGQQPAKKRLNFGQTGDSESVPDPQPLGEPPATPAAVGPTTMASGGGAPMADNNEGADGVGSSSGNWHCDSQWLGDRVITTSTRTWALPTYNNHLYKQISSASTGASNDNHYFGYSTPWGYFDFNRFHCHFSPRDWQRLINNNWGFRPKRLSFKLFNIQVKEVTDNNGVKTIANNLTSTVQVFTDSEYQLPYVLGSAHQGCLPPFPADVFMIPQYGYLTLNNGSQAVGRSSFYCLEYFPSQMLRTGNNFTFSYTFEDVPFHSSYAHSQSLDRLMNPLIDQYLYYLSRTQTTGGTANTQTLGFSQGGPNTMANQAKNWLPGPCYRQQRVSTTTGQNNNSNFAWTAGTKYHLNGRNSLANPGIAMATHKDDKERFFPSNGILIFGKQNAARDNADYSDVMLTSEEEIKTTNPVATEEYGIVADNLQQQNTAPQIGTVNSQGALPGMVWQNRDVYLQGPIWAKIPHTDGNFHPSPLMGGFGLKHPPPQILIKNTPVPADPPTTFNQSKLNSFITQYSTGQVSVEIEWELQKENSKRWNPEIQYTSNYYKSTSVDFAVNTEGVYSEPHPIGTRYLTRPL

SEQ ID NO: 539 - DNA, 2181 bp, Artificial Sequence
  Description of Artificial Sequence: Synthetic polynucleotide
atgtcttttgttgatcaccctccagattggttggaagaagttggtgaaggtcttcgcgagtttttgggccttgaagcgggcccaccgaaaccaaaacccaatcagcagcatcaagatcaagcccgtggtcttgtgctgcctggttataactatctcggacccggaaacggtctcgatcgaggagagcctgtcaacagggcagacgaggtcgcgcgagagcacgacatctcgtacaacgagcagcttgaggcgggagacaacccctacctcaagtacaaccacgcggacgccgagtttcaggagaagctcgccgacgacacatccttcgggggaaacctcggaaaggcagtctttcaggccaagaaaagggttctcgaaccttttggcctggttgaagagggtgctaagacggcccctaccggaaagcggatagacgaccactttccaaaaagaaagaaggctcggaccgaagaggactccaagccttccacctcgtcagacgccgaagctggacccagcggatcccagcagctgcaaatcccagcacaaccagcctcaagtttgggagctgatacaatgtctgcgggaggtggcggcccattgggcgacaataaccaaggtgccgatggagtgggcaatgcctcgggagattggcattgcgattccacgtggatgggggacagagtcgtcaccaagtccacccgcacctgggtgctgcccagctacaacaaccaccagtaccgagagatcaaaagcggctccgtcgacggaagcaacgccaacgcctactttggatacagcaccccctgggggtactttgactttaaccgcttccacagccactggagcccccgagactggcaaagactcatcaacaactattggggcttcagaccccggtctctcagagtcaaaatcttcaacatccaagtcaaagaggtcacggtgcaggactccaccaccaccatcgccaacaacctcacctccaccgtccaagtgtttacggacgacgactaccaactcccgtacgtcgtcggcaacgggaccgagggatgcctgccggccttccccccgcaggtctttacgctgccgcagtacggctacgcgacgctgaaccgagacaacggagacaacccgacagagcggagcagcttcttttgcctagagtactttcccagcaagatgctgaggacgggcaacaactttgagtttacctacagctttgaagaggtgcccttccactgcagcttcgccccgagccagaacctctttaagctggccaacccgctggtggaccagtacctgtaccgcttcgtgagcacctcggccacgggcgccatccagttccaaaagaacctggcgggcagatacgccaacacctacaaaaactggttcccggggcccatgggccgaacccagggctggaacacgagctctggggtcagcagcaccaacagagtcagcgtcaacaacttttccgtctcaaaccggatgaacctggagggggccagctaccaagtgaacccccagcccaacgggatgacaaacacgctccaaggcagcaaccgctacgcgctggaaaacaccatgatcttcaacgctcaaaacgccacgccgggaactacctcggtgtacccagaggacaatctactgctgaccagcgagagcgagactcagcccgtcaaccgggtggcttacaacacgggcggtcagatggccaccaacgcccagaacgccaccacggctcccacggtcgggacctacaacctccaggaagtgcttcctggcagcgtatggatggagagggacgtgtacctccaaggacccatctgggccaagatcccagagacgggggcgcactttcacccctctccggccatgggcggattcggactcaaacacccgccgcccatgatgctcatcaaaaacacgccggtgcccggcaacatcaccagcttctcggacgtgcccgtcagcagcttcatcacccagtacagcaccgggcaggtcaccgtggagatggaatgggagctcaaaaaggaaaactccaagaggtggaacccagagatccagtacaccaacaactacaacgacccccagtttgtggactttgctccagacggctccggcgaatacagaaccaccagagccatcggaacccgatacctcacccgacccctt

SEQ ID NO: 540 - protein, 726 aa, Artificial Sequence
  Description of Artificial Sequence: Synthetic polypeptide
MSFVDHPPDWLEEVGEGLREFLGLEAGPPKPKPNQQHQDQARGLVLPGYNYLGPGNGLDRGEPVNRADEVAREHDISYNEQLEAGDNPYLKYNHADAEFQEKLADDTSFGGNLGKAVFQAKKRVLEPFGLVEEGAKTAPTGKRIDDHFPKRKKARTEEDSKPSTSSDAEAGPSGSQQLQIPAQPASSLGADTMSAGGGGPLGDNNQGADGVGNASGDWHCDSTWMGDRVVTKSTRTWVLPSYNNHQYREIKSGSVDGSNANAYFGYSTPWGYFDFNRFHSHWSPRDWQRLINNYWGFRPRSLRVKIFNIQVKEVTVQDSTTTIANNLTSTVQVFTDDDYQLPYVVGNGTEGCLPAFPPQVFTLPQYGYATLNRDNGDNPTERSSFFCLEYFPSKMLRTGNNFEFTYSFEEVPFHCSFAPSQNLFKLANPLVDQYLYRFVSTSATGAIQFQKNLAGRYANTYKNWFPGPMGRTQGWNTSSGSSTNRVSVNNFSVSNRMNLEGASYQVNPQPNGMTNTLQGSNRYALENTMIFNAQNATPGTTSVYPEDNLLLTSESETQPVNRVAYNTGGQMATNAQNATTAPTVGTYNLQEVLPGSVWMERDVYLQGPIWAKIPETGAHFHPSPAMGGFGLKHPPPMMLIKNTPVPGNITSFSDVPVSSFITQYSTGQVTVEMEWELKKENSKRWNPEIQYTNNYNDPQFVDFAPDGSGEYRTTRAIGTRYLTRPL

SEQ ID NO: 541 - protein, 735 aa, Artificial Sequence
  Description of Artificial Sequence: Synthetic polypeptide
MAADGYLPDWLEDTLSEGIRQWWKLKPGPPPPKPAERHKDDSRGLVLPGYKYLGPFNGLDKGEPVNEADAAALEHDKAYDRQLDSGDNPYLKYNHADAEFQERLKEDTSFGGNLGRAVFQAKKRILEPLGLVEEPVKTAPGKKRPVEHSPAEPDSSSGTGKSGQQPARKRLNFGQTGDADSVPDPQPLGQPPAAPSGLGTNTMASGSGAPMADNNEGADGVGNSSGNWHCDSTWMGDRVITTSTRTWALPTYNNHLYKQISSQSGASNDNHYFGYSTPWGYFDFNRFHCHFSPRDWQRLINNNWGFRPKRLSFKLFNIQVKEVTQNDGTTTIANNLTSTVQVFTDSEYQLPYVLGSAHQGCLPPFPADVFMVPQYGYLTLNNGSQAVGRSSFYCLEYFPSQMLRTGNNFTFSYTFEDVPFHSSYAHSQSLDRLMNPLIDQYLYYLSRTNTPSGTTTMSRLQFSQAGASDIRDQSRNWLPGPCYRQQRVSKTAADNNNSDYSWTGATKYHLNGRDSLVNPGPAMASHKDDEEKYFPQSGVLIFGKQDSGKTNVDIEKVMITDEEEIRTTNPVATEQYGSVSTNLQSGNTQAATSDVNTQGVLPGMVWQDRDVYLQGPIWAKIPHTDGHFHPSPLMGGFGLKHPPPQILIKNTPVPANPSTTFSAAKFASFITQYSTGQVSVEIEWELQKENSKRWNPEIQYTSNYNKSVNVDFTVDTNGVYSEPRPIGTRYLTRNL

SEQ ID NO: 542 - DNA, 1797 bp, Artificial Sequence
  Description of Artificial Sequence: Synthetic polynucleotide
acggctccgaccggagacaagcggaaaggcgaagacgaacctcgtttgcccgacacttcttcacagactcccaagaaaaacaagaagcctcgcaaggaaagaccttccggcggggcagaagatccgggcgaaggcacctcttccaacgctggagcagcagcacccgcctctagtgtgggatcatctatcatggctgaaggaggtggcggcccagtgggcgatgcaggccagggtgccgatggagtgggcaattcctccggaaattggcattgcgattcccaatggctggaaaacggagtcgtcactcgaaccacccgaacctgggtcttgcccagctacaacaaccacctgtacaaacgaatccaaggacccagcggaggcgacaacaacaacaaattctttggattcagcaccccctggggatactttgactacaatcgattccactgccacttttccccgcgagactggcaacgactcatcaacaacaactggggcatccgtcccaaagcgatgcgctttagactctttaacatccaggttaaagaggtcacggtccaagacttcaacaccaccatcggcaacaacctcaccagtacggtccaggtctttgcggacaaggactaccaactgccgtacgtcctcggatcggctaccgaaggcaccttcccgccgttcccagcggatatctacacgatcccgcagtacgggtactgcacgctaaactacaacaacgaggcggtggatcgttcggccttctactgtctggactactttccctcagacatgctgcggacaggaaataactttgagtttacttacaccttcgaggacgttcctttccatagcatgtttgcccacaaccagacgctagaccggctgatgaatcccctcgtggatcagtacctctgggctttcagctccgtcagccaagcaggctcatctggacgagctcttcattactcgcgggcgactaaaaccaacatggcggctcaatataggaactggttacctgggcctttcttccgtgatcagcaaatctttacgggcgctagcaacatcactaaaaataacgtctttagcgtttgggaaaaaggcaagcaatgggaactcgacaatcggaccaacctaatgcagcccggtcctgcggcagcgaccacctttagcggagaacctgaccgtcaagccatgcaaaacacgctggcttttagcaggaccgtctacgatcaaacgaccgccacgaccgatcgtaaccagatactcatcaccaacgaagacgaaatcagacccaccaactcggtcggtatcgacgcgtggggagcagttcccaccaacaaccagtcgatcgtgacccccggcactcgcgcggccgtcaacaatcaaggggcgcttcccgggatggtgtggcaaaacagagacatttaccctacagggacccatttggccaaaattcccgacactgacaatcacttccatccgtccccgcttattgggcggtttggctgcaagcatccccctccccagattttcattaaaaacacacccgtccctgccaacccttcggaaacgttccagacggccaaagtggcctccttcatcaaccagtactcgaccggacagtgcaccgtcgaaatcttttgggaactcaagaaggaaacctccaagcgctggaaccccgaaatccagttcacctccaactttggcaacgcggccgacatccagtttgccgtctccgacacgggatcctattccgaacctcgtcccatcggtacccgttaccttaccaaacctctgtaa

SEQ ID NO: 543 - DNA, 1989 bp, Artificial Sequence
  Description of Artificial Sequence: Synthetic polynucleotide
atgaggtcgtactacgaggtcatcgttcagctgcccaacgacgtcgagagtcaggtacctggaatctccgattcgttcgtcaactggattacgtcgcgagaatggacgttgcctgaggacgccgattgggatttggaccaggtcgatcaagttcaactgacgctcggcgacaaaatccaacgggagattcgaactcattgggggacgatggccaaagaaccggactttcactattttatccaactggaacaaggtgaggtgttctttcatttacacgtcctgctggaaacgtgttccgtaaagccgatggtactcggaagatatatccgacatattcaacaaaaaattgtgagtaaagtctactgcgccacgagcctacgatggaaggatggatgcgtggtgaccaagaccaaaaatttcgggggcgcgaacaaggtccgggccgagtcgtatattcccgcctacctgatcccgaaacagcaaccggaagtgcagtgggcgtggactaacgtgcccgagtatataaaagcgtgcttgcaccgagaactgcgtgccagtctcgcgcgacttcacttcgaggaggcgggcgtctcgcaatccaaggaaaatctcgcgagaactgcagacggcgctcccgtgatgccgacccgcgtcagcaaacgctacatggagctcgtggattggctcgtggagaaggggatcaccaccgagaaggaatggctgctggaaaacagagaaagctttcggagctttcaggcctcgagcaactcggcgcgtcagatcaagacggccctgcaaggcgccattcaggagatgcttctgaccaagacggcggaggactacctcgtcggaaaggatcccgtctcggacgacgacatccgtcagaaccgcatctacaagattctggaactgaaccactacgacccagcgtacgtggggagtattttggtcgggtggtgccagaagaaatggggcaagcgaaacacgctgtggctgttcggacatgcgaccaccggcaagaccaacatcgcggaggctattgcccatgctgtgccgttctatggatgcgttaactggaccaacgagaactttccgttcaacgactgcgtcgaaaaaatgattatctggtgggaggagggcaaaatgaccgccaaagtggtggaaacagccaaggcgattctgggaggatctcgggtgagagtggaccaaaaatgcaaagcttcggttccgatcgaaccgacgccggtcattattaccagtaacaccaacatgtgttatgtcatcgacgggaacacgaccacgttcgagcataagcagccgttggaggacaggatgtttaagctcgaattgctgactcggttgcctgatgactttggtaaggtgaccaaacaggaggtgcgtcaattcttcaggtggtctcaggatcacctgacccctgtgatcccagaattcctagtgcggaaggcggagtctcgcaaaagacccgccccttccggggaaggctatataagcccgacaaagcggcccgcgctcgcagagcagcagcaggcgtcggagagcgcggacccggttcccaccaggtatcgtatcaaatgctcgaaacattgcggtatggataaaatgttgtttccttgccaaatttgtgaatcgatgaacagagatattaatatttgtgctattcataaaacgaccgactgtaaagagtgtttccccgactacggggataaagatgatgtagaactacccccctgtacagaacacaacgtgtctcgttgttatcaatgtcattcgggcgaattgtatcgcgtgacttcggactctgacgagaaacctgcccccgagagtgatgaaggcaccgagccatcctatgctccctgcacgattcaccacctgatgggcaagagtcacgggttagtcacttgcgcggcgtgtcggttgaaaaatagtacgttgcatgatgacttggatgacggtgatctcgaacaataa

SEQ ID NO: 544 - DNA, 1626 bp, Artificial Sequence
  Description of Artificial Sequence: Synthetic polynucleotide
atgaggtcgtactacgaggtcatcgttcagctgcccaacgacgtcgagagtcaggtacctggaatctccgattcgttcgtcaactggattacgtcgcgagaatggacgttgcctgaggacgccgattgggatttggaccaggtcgatcaagttcaactgacgctcggcgacaaaatccaacgggagattcgaactcattgggggacgatggccaaagaaccggactttcactattttatccaactggaacaaggtgaggtgttctttcatttacacgtcctgctggaaacgtgttccgtaaagccgatggtactcggaagatatatccgacatattcaacaaaaaattgtgagtaaagtctactgcgccacgagcctacgatggaaggatggatgcgtggtgaccaagaccaaaaatttcgggggcgcgaacaaggtccgggccgagtcgtatattcccgcctacctgatcccgaaacagcaaccggaagtgcagtgggcgtggactaacgtgcccgagtatataaaagcgtgcttgcaccgagaactgcgtgccagtctcgcgcgacttcacttcgaggaggcgggcgtctcgcaatccaaggaaaatctcgcgagaactgcagacggcgctcccgtgatgccgacccgcgtcagcaaacgctacatggagctcgtggattggctcgtggagaaggggatcaccaccgagaaggaatggctgctggaaaacagagaaagctttcggagctttcaggcctcgagcaactcggcgcgtcagatcaagacggccctgcaaggcgccattcaggagatgcttctgaccaagacggcggaggactacctcgtcggaaaggatcccgtctcggacgacgacatccgtcagaaccgcatctacaagattctggaactgaaccactacgacccagcgtacgtggggagtattttggtcgggtggtgccagaagaaatggggcaagcgaaacacgctgtggctgttcggacatgcgaccaccggcaagaccaacatcgcggaggctattgcccatgctgtgccgttctatggatgcgttaactggaccaacgagaactttccgttcaacgactgcgtcgaaaaaatgattatctggtgggaggagggcaaaatgaccgccaaagtggtggaaacagccaaggcgattctgggaggatctcgggtgagagtggaccaaaaatgcaaagcttcggttccgatcgaaccgacgccggtcattattaccagtaacaccaacatgtgttatgtcatcgacgggaacacgaccacgttcgagcataagcagccgttggaggacaggatgtttaagctcgaattgctgactcggttgcctgatgactttggtaaggtgaccaaacaggaggtgcgtcaattcttcaggtggtctcaggatcacctgacccctgtgatcccagaattcctagtgcggaaggcggagtctcgcaaaagacccgccccttccggggaaggctatataagcccgacaaagcggcccgcgctcgcagagcagcagcaggcgtcggagagcgcggacccggttcccaccagattggttggagcggttggtcaaaaagggagtgaatgctgcagctga

SEQ ID NO: 545 - DNA, 1323 bp, Artificial Sequence
  Description of Artificial Sequence: Synthetic polynucleotide
atggagctcgtggattggctcgtggagaaggggatcaccaccgagaaggaatggctgctggaaaacagagaaagctttcggagctttcaggcctcgagcaactcggcgcgtcagatcaagacggccctgcaaggcgccattcaggagatgcttctgaccaagacggcggaggactacctcgtcggaaaggatcccgtctcggacgacgacatccgtcagaaccgcatctacaagattctggaactgaaccactacgacccagcgtacgtggggagtattttggtcgggtggtgccagaagaaatggggcaagcgaaacacgctgtggctgttcggacatgcgaccaccggcaagaccaacatcgcggaggctattgcccatgctgtgccgttctatggatgcgttaactggaccaacgagaactttccgttcaacgactgcgtcgaaaaaatgattatctggtgggaggagggcaaaatgaccgccaaagtggtggaaacagccaaggcgattctgggaggatctcgggtgagagtggaccaaaaatgcaaagcttcggttccgatcgaaccgacgccggtcattattaccagtaacaccaacatgtgttatgtcatcgacgggaacacgaccacgttcgagcataagcagccgttggaggacaggatgtttaagctcgaattgctgactcggttgcctgatgactttggtaaggtgaccaaacaggaggtgcgtcaattcttcaggtggtctcaggatcacctgacccctgtgatcccagaattcctagtgcggaaggcggagtctcgcaaaagacccgccccttccggggaaggctatataagcccgacaaagcggcccgcgctcgcagagcagcagcaggcgtcggagagcgcggacccggttcccaccaggtatcgtatcaaatgctcgaaacattgcggtatggataaaatgttgtttccttgccaaatttgtgaatcgatgaacagagatattaatatttgtgctattcataaaacgaccgactgtaaagagtgtttccccgactacggggataaagatgatgtagaactacccccctgtacagaacacaacgtgtctcgttgttatcaatgtcattcgggcgaattgtatcgcgtgacttcggactctgacgagaaacctgcccccgagagtgatgaaggcaccgagccatcctatgctccctgcacgattcaccacctgatgggcaagagtcacgggttagtcacttgcgcggcgtgtcggttgaaaaatagtacgttgcatgatgacttggatgacggtgatctcgaacaataa

SEQ ID NO: 546 - DNA, 960 bp, Artificial Sequence
  Description of Artificial Sequence: Synthetic polynucleotide
atggagctcgtggattggctcgtggagaaggggatcaccaccgagaaggaatggctgctggaaaacagagaaagctttcggagctttcaggcctcgagcaactcggcgcgtcagatcaagacggccctgcaaggcgccattcaggagatgcttctgaccaagacggcggaggactacctcgtcggaaaggatcccgtctcggacgacgacatccgtcagaaccgcatctacaagattctggaactgaaccactacgacccagcgtacgtggggagtattttggtcgggtggtgccagaagaaatggggcaagcgaaacacgctgtggctgttcggacatgcgaccaccggcaagaccaacatcgcggaggctattgcccatgctgtgccgttctatggatgcgttaactggaccaacgagaactttccgttcaacgactgcgtcgaaaaaatgattatctggtgggaggagggcaaaatgaccgccaaagtggtggaaacagccaaggcgattctgggaggatctcgggtgagagtggaccaaaaatgcaaagcttcggttccgatcgaaccgacgccggtcattattaccagtaacaccaacatgtgttatgtcatcgacgggaacacgaccacgttcgagcataagcagccgttggaggacaggatgtttaagctcgaattgctgactcggttgcctgatgactttggtaaggtgaccaaacaggaggtgcgtcaattcttcaggtggtctcaggatcacctgacccctgtgatcccagaattcctagtgcggaaggcggagtctcgcaaaagacccgccccttccggggaaggctatataagcccgacaaagcggcccgcgctcgcagagcagcagcaggcgtcggagagcgcggacccggttcccaccagattggttggagcggttggtcaaaaagggagtgaatgctgcagctga

SEQ ID NO: 547 - DNA, 1608 bp, Artificial Sequence
  Description of Artificial Sequence: Synthetic polynucleotide
atggctgaaggaggtggcggcccagtgggcgatgcaggccagggtgccgatggagtgggcaattcctccggaaattggcattgcgattcccaatggctggaaaacggagtcgtcactcgaaccacccgaacctgggtcttgcccagctacaacaaccacctgtacaaacgaatccaaggacccagcggaggcgacaacaacaacaaattctttggattcagcaccccctggggatactttgactacaatcgattccactgccacttttccccgcgagactggcaacgactcatcaacaacaactggggcatccgtcccaaagcgatgcgctttagactctttaacatccaggttaaagaggtcacggtccaagacttcaacaccaccatcggcaacaacctcaccagtacggtccaggtctttgcggacaaggactaccaactgccgtacgtcctcggatcggctaccgaaggcaccttcccgccgttcccagcggatatctacacgatcccgcagtacgggtactgcacgctaaactacaacaacgaggcggtggatcgttcggccttctactgtctggactactttccctcagacatgctgcggacaggaaataactttgagtttacttacaccttcgaggacgttcctttccatagcatgtttgcccacaaccagacgctagaccggctgatgaatcccctcgtggatcagtacctctgggctttcagctccgtcagccaagcaggctcatctggacgagctcttcattactcgcgggcgactaaaaccaacatggcggctcaatataggaactggttacctgggcctttcttccgtgatcagcaaatctttacgggcgctagcaacatcactaaaaataacgtctttagcgtttgggaaaaaggcaagcaatgggaactcgacaatcggaccaacctaatgcagcccggtcctgcggcagcgaccacctttagcggagaacctgaccgtcaagccatgcaaaacacgctggcttttagcaggaccgtctacgatcaaacgaccgccacgaccgatcgtaaccagatactcatcaccaacgaagacgaaatcagacccaccaactcggtcggtatcgacgcgtggggagcagttcccaccaacaaccagtcgatcgtgacccccggcactcgcgcggccgtcaacaatcaaggggcgcttcccgggatggtgtggcaaaacagagacatttaccctacagggacccatttggccaaaattcccgacactgacaatcacttccatccgtccccgcttattgggcggtttggctgcaagcatccccctccccagattttcattaaaaacacacccgtccctgccaacccttcggaaacgttccagacggccaaagtggcctccttcatcaaccagtactcgaccggacagtgcaccgtcgaaatcttttgggaactcaagaaggaaacctccaagcgctggaaccccgaaatccagttcacctccaactttggcaacgcggccgacatccagtttgccgtctccgacacgggatcctattccgaacctcgtcccatcggtacccgttaccttaccaaacctctgtaa

SEQ ID NO: 548 - DNA, 2232 bp, Artificial Sequence
  Description of Artificial Sequence: Synthetic polynucleotide
atgtctctcatttctgatgcgattccagattggttggagcggttggtcaaaaagggagtgaatgctgcagctgatttctaccatttggaaagcggtcctcctcgtcctaaggcaaatcagcaaactcaagaatctcttgaaaaggacgattcgagaggtctcgtgttcccaggctacaattatctaggccctttcaacggtctagataaaggagaacccgtcaacgaggcagacgctgccgccttagaacacgacaaggcttacgacctcgaaatcaaggacgggcacaacccgtactttgagtacaacgaggccgacagacgtttccaggaacgtctcaaagacgatacctcctttggaggcaatttaggtaaagccatcttccaggccaaaaagagggttctcgaaccctttggtctggtggaagactcaaagacggctccgaccggagacaagcggaaaggcgaagacgaacctcgtttgcccgacacttcttcacagactcccaagaaaaacaagaagcctcgcaaggaaagaccttccggcggggcagaagatccgggcgaaggcacctcttccaacgctggagcagcagcacccgcctctagtgtgggatcatctatcatggctgaaggaggtggcggcccagtgggcgatgcaggccagggtgccgatggagtgggcaattcctccggaaattggcattgcgattcccaatggctggaaaacggagtcgtcactcgaaccacccgaacctgggtcttgcccagctacaacaaccacctgtacaaacgaatccaaggacccagcggaggcgacaacaacaacaaattctttggattcagcaccccctggggatactttgactacaatcgattccactgccacttttccccgcgagactggcaacgactcatcaacaacaactggggcatccgtcccaaagcgatgcgctttagactctttaacatccaggttaaagaggtcacggtccaagacttcaacaccaccatcggcaacaacctcaccagtacggtccaggtctttgcggacaaggactaccaactgccgtacgtcctcggatcggctaccgaaggcaccttcccgccgttcccagcggatatctacacgatcccgcagtacgggtactgcacgctaaactacaacaacgaggcggtggatcgttcggccttctactgtctggactactttccctcagacatgctgcggacaggaaataactttgagtttacttacaccttcgaggacgttcctttccatagcatgtttgcccacaaccagacgctagaccggctgatgaatcccctcgtggatcagtacctctgggctttcagctccgtcagccaagcaggctcatctggacgagctcttcattactcgcgggcgactaaaaccaacatggcggctcaatataggaactggttacctgggcctttcttccgtgatcagcaaatctttacgggcgctagcaacatcactaaaaataacgtctttagcgtttgggaaaaaggcaagcaatgggaactcgacaatcggaccaacctaatgcagcccggtcctgcggcagcgaccacctttagcggagaacctgaccgtcaagccatgcaaaacacgctggcttttagcaggaccgtctacgatcaaacgaccgccacgaccgatcgtaaccagatactcatcaccaacgaagacgaaatcagacccaccaactcggtcggtatcgacgcgtggggagcagttcccaccaacaaccagtcgatcgtgacccccggcactcgcgcggccgtcaacaatcaaggggcgcttcccgggatggtgtggcaaaacagagacatttaccctacagggacccatttggccaaaattcccgacactgacaatcacttccatccgtccccgcttattgggcggtttggctgcaagcatccccctccccagattttcattaaaaacacacccgtccctgccaacccttcggaaacgttccagacggccaaagtggcctccttcatcaaccagtactcgaccggacagtgcaccgtcgaaatcttttgggaactcaagaaggaaacctccaagcgctggaaccccgaaatccagttcacctccaactttggcaacgcggccgacatccagtttgccgtctccgacacgggatcctattccgaacctcgtcccatcggtacccgttaccttaccaaacctctgtaa

SEQ ID NO: 549 - protein, 535 aa, Artificial Sequence
  Description of Artificial Sequence: Synthetic polypeptide
MAEGGGGPVGDAGQGADGVGNSSGNWHCDSQWLENGVVTRTTRTWVLPSYNNHLYKRIQGPSGGDNNNKFFGFSTPWGYFDYNRFHCHFSPRDWQRLINNNWGIRPKAMRFRLFNIQVKEVTVQDFNTTIGNNLTSTVQVFADKDYQLPYVLGSATEGTFPPFPADIYTIPQYGYCTLNYNNEAVDRSAFYCLDYFPSDMLRTGNNFEFTYTFEDVPFHSMFAHNQTLDRLMNPLVDQYLWAFSSVSQAGSSGRALHYSRATKTNMAAQYRNWLPGPFFRDQQIFTGASNITKNNVFSVWEKGKQWELDNRTNLMQPGPAAATTFSGEPDRQAMQNTLAFSRTVYDQTTATTDRNQILITNEDEIRPTNSVGIDAWGAVPTNNQSIVTPGTRAAVNNQGALPGMVWQNRDIYPTGTHLAKIPDTDNHFHPSPLIGRFGCKHPPPQIFIKNTPVPANPSETFQTAKVASFINQYSTGQCTVEIFWELKKETSKRWNPEIQFTSNFGNAADIQFAVSDTGSYSEPRPIGTRYLTKPL

SEQ ID NO: 550 - protein, 440 aa, Artificial Sequence
  Description of Artificial Sequence: Synthetic polypeptide
MELVDWLVEKGITTEKEWLLENRESFRSFQASSNSARQIKTALQGAIQEMLLTKTAEDYLVGKDPVSDDDIRQNRIYKILELNHYDPAYVGSILVGWCQKKWGKRNTLWLFGHATTGKTNIAEAIAHAVPFYGCVNWTNENFPFNDCVEKMIIWWEEGKMTAKVVETAKAILGGSRVRVDQKCKASVPIEPTPVIITSNTNMCYVIDGNTTTFEHKQPLEDRMFKLELLTRLPDDFGKVTKQEVRQFFRWSQDHLTPVIPEFLVRKAESRKRPAPSGEGYISPTKRPALAEQQQASESADPVPTRYRIKCSKHCGMDKMLFPCQICESMNRDINICAIHKTTDCKECFPDYGDKDDVELPPCTEHNVSRCYQCHSGELYRVTSDSDEKPAPESDEGTEPSYAPCTIHHLMGKSHGLVTCAACRLKNSTLHDDLDDGDLEQ

SEQ ID NO: 551 - protein, 319 aa, Artificial Sequence
  Description of Artificial Sequence: Synthetic polypeptide
MELVDWLVEKGITTEKEWLLENRESFRSFQASSNSARQIKTALQGAIQEMLLTKTAEDYLVGKDPVSDDDIRQNRIYKILELNHYDPAYVGSILVGWCQKKWGKRNTLWLFGHATTGKTNIAEAIAHAVPFYGCVNWTNENFPFNDCVEKMIIWWEEGKMTAKVVETAKAILGGSRVRVDQKCKASVPIEPTPVIITSNTNMCYVIDGNTTTFEHKQPLEDRMFKLELLTRLPDDFGKVTKQEVRQFFRWSQDHLTPVIPEFLVRKAESRKRPAPSGEGYISPTKRPALAEQQQASESADPVPTRLVGAVGQKGSECCS

SEQ ID NO: 552 - protein, 662 aa, Artificial Sequence
  Description of Artificial Sequence: Synthetic polypeptide
MRSYYEVIVQLPNDVESQVPGISDSFVNWITSREWTLPEDADWDLDQVDQVQLTLGDKIQREIRTHWGTMAKEPDFHYFIQLEQGEVFFHLHVLLETCSVKPMVLGRYIRHIQQKIVSKVYCATSLRWKDGCVVTKTKNFGGANKVRAESYIPAYLIPKQQPEVQWAWTNVPEYIKACLHRELRASLARLHFEEAGVSQSKENLARTADGAPVMPTRVSKRYMELVDWLVEKGITTEKEWLLENRESFRSFQASSNSARQIKTALQGAIQEMLLTKTAEDYLVGKDPVSDDDIRQNRIYKILELNHYDPAYVGSILVGWCQKKWGKRNTLWLFGHATTGKTNIAEAIAHAVPFYGCVNWTNENFPFNDCVEKMIIWWEEGKMTAKVVETAKAILGGSRVRVDQKCKASVPIEPTPVIITSNTNMCYVIDGNTTTFEHKQPLEDRMFKLELLTRLPDDFGKVTKQEVRQFFRWSQDHLTPVIPEFLVRKAESRKRPAPSGEGYISPTKRPALAEQQQASESADPVPTRYRIKCSKHCGMDKMLFPCQICESMNRDINICAIHKTTDCKECFPDYGDKDDVELPPCTEHNVSRCYQCHSGELYRVTSDSDEKPAPESDEGTEPSYAPCTIHHLMGKSHGLVTCAACRLKNSTLHDDLDDGDLEQ

SEQ ID NO: 553 - protein, 541 aa, Artificial Sequence
  Description of Artificial Sequence: Synthetic polypeptide
MRSYYEVIVQLPNDVESQVPGISDSFVNWITSREWTLPEDADWDLDQVDQVQLTLGDKIQREIRTHWGTMAKEPDFHYFIQLEQGEVFFHLHVLLETCSVKPMVLGRYIRHIQQKIVSKVYCATSLRWKDGCVVTKTKNFGGANKVRAESYIPAYLIPKQQPEVQWAWTNVPEYIKACLHRELRASLARLHFEEAGVSQSKENLARTADGAPVMPTRVSKRYMELVDWLVEKGITTEKEWLLENRESFRSFQASSNSARQIKTALQGAIQEMLLTKTAEDYLVGKDPVSDDDIRQNRIYKILELNHYDPAYVGSILVGWCQKKWGKRNTLWLFGHATTGKTNIAEAIAHAVPFYGCVNWTNENFPFNDCVEKMIIWWEEGKMTAKVVETAKAILGGSRVRVDQKCKASVPIEPTPVIITSNTNMCYVIDGNTTTFEHKQPLEDRMFKLELLTRLPDDFGKVTKQEVRQFFRWSQDHLTPVIPEFLVRKAESRKRPAPSGEGYISPTKRPALAEQQQASESADPVPTRLVGAVGQKGSECCS

SEQ ID NO: 554 - protein, 743 aa, Artificial Sequence
  Description of Artificial Sequence: Synthetic polypeptide
MSLISDAIPDWLERLVKKGVNAAADFYHLESGPPRPKANQQTQESLEKDDSRGLVFPGYNYLGPFNGLDKGEPVNEADAAALEHDKAYDLEIKDGHNPYFEYNEADRRFQERLKDDTSFGGNLGKAIFQAKKRVLEPFGLVEDSKTAPTGDKRKGEDEPRLPDTSSQTPKKNKKPRKERPSGGAEDPGEGTSSNAGAAAPASSVGSSIMAEGGGGPVGDAGQGADGVGNSSGNWHCDSQWLENGVVTRTTRTWVLPSYNNHLYKRIQGPSGGDNNNKFFGFSTPWGYFDYNRFHCHFSPRDWQRLINNNWGIRPKAMRFRLFNIQVKEVTVQDFNTTIGNNLTSTVQVFADKDYQLPYVLGSATEGTFPPFPADIYTIPQYGYCTLNYNNEAVDRSAFYCLDYFPSDMLRTGNNFEFTYTFEDVPFHSMFAHNQTLDRLMNPLVDQYLWAFSSVSQAGSSGRALHYSRATKTNMAAQYRNWLPGPFFRDQQIFTGASNITKNNVFSVWEKGKQWELDNRTNLMQPGPAAATTFSGEPDRQAMQNTLAFSRTVYDQTTATTDRNQILITNEDEIRPTNSVGIDAWGAVPTNNQSIVTPGTRAAVNNQGALPGMVWQNRDIYPTGTHLAKIPDTDNHFHPSPLIGRFGCKHPPPQIFIKNTPVPANPSETFQTAKVASFINQYSTGQCTVEIFWELKKETSKRWNPEIQFTSNFGNAADIQFAVSDTGSYSEPRPIGTRYLTKPL

SEQ ID NO: 555 - protein, 598 aa, Artificial Sequence
  Description of Artificial Sequence: Synthetic polypeptide
TAPTGDKRKGEDEPRLPDTSSQTPKKNKKPRKERPSGGAEDPGEGTSSNAGAAAPASSVGSSIMAEGGGGPVGDAGQGADGVGNSSGNWHCDSQWLENGVVTRTTRTWVLPSYNNHLYKRIQGPSGGDNNNKFFGFSTPWGYFDYNRFHCHFSPRDWQRLINNNWGIRPKAMRFRLFNIQVKEVTVQDFNTTIGNNLTSTVQVFADKDYQLPYVLGSATEGTFPPFPADIYTIPQYGYCTLNYNNEAVDRSAFYCLDYFPSDMLRTGNNFEFTYTFEDVPFHSMFAHNQTLDRLMNPLVDQYLWAFSSVSQAGSSGRALHYSRATKTNMAAQYRNWLPGPFFRDQQIFTGASNITKNNVFSVWEKGKQWELDNRTNLMQPGPAAATTFSGEPDRQAMQNTLAFSRTVYDQTTATTDRNQILITNEDEIRPTNSVGIDAWGAVPTNNQSIVTPGTRAAVNNQGALPGMVWQNRDIYPTGTHLAKIPDTDNHFHPSPLIGRFGCKHPPPQIFIKNTPVPANPSETFQTAKVASFINQYSTGQCTVEIFWELKKETSKRWNPEIQFTSNFGNAADIQFAVSDTGSYSEPRPIGTRYLTKPL

SEQ ID NO: 556 - DNA, 4694 bp, Artificial Sequence
  Description of Artificial Sequence: Synthetic polynucleotide
tggccagtttccaagacaggctcgctcgctcactcgggccggggccccaaaggggcccctagcgaccgcttcgcggtcgcggcccgagtgagcgagcgagcctgtcttggaaactggccagcactccggtgaggtaatgccgtcacgtggtcgggaatgggaacgggaaatctcgcgagaacgtaaacaaatataagacggcgccacacggcgctgcgtcatacgcgcgcgcgcaccggcgagatgaggtcgtactacgaggtcatcgttcagctgcccaacgacgtcgagagtcaggtacctggaatctccgattcgttcgtcaactggattacgtcgcgagaatggacgttgcctgaggacgccgattgggatttggaccaggtcgatcaagttcaactgacgctcggcgacaaaatccaacgggagattcgaactcattgggggacgatggccaaagaaccggactttcactattttatccaactggaacaaggtgaggtgttctttcatttacacgtcctgctggaaacgtgttccgtaaagccgatggtactcggaagatatatccgacatattcaacaaaaaattgtgagtaaagtctactgcgccacgagcctacgatggaaggatggatgcgtggtgaccaagaccaaaaatttcgggggcgcgaacaaggtccgggccgagtcgtatattcccgcctacctgatcccgaaacagcaaccggaagtgcagtgggcgtggactaacgtgcccgagtatataaaagcgtgcttgcaccgagaactgcgtgccagtctcgcgcgacttcacttcgaggaggcgggcgtctcgcaatccaaggaaaatctcgcgagaactgcagacggcgctcccgtgatgccgacccgcgtcagcaaacgctacatggagctcgtggattggctcgtggagaaggggatcaccaccgagaaggaatggctgctggaaaacagagaaagctttcggagctttcaggcctcgagcaactcggcgcgtcagatcaagacggccctgcaaggcgccattcaggagatgcttctgaccaagacggcggaggactacctcgtcggaaaggatcccgtctcggacgacgacatccgtcagaaccgcatctacaagattctggaactgaaccactacgacccagcgtacgtggggagtattttggtcgggtggtgccagaagaaatggggcaagcgaaacacgctgtggctgttcggacatgcgaccaccggcaagaccaacatcgcggaggctattgcccatgctgtgccgttctatggatgcgttaactggaccaacgagaactttccgttcaacgactgcgtcgaaaaaatgattatctggtgggaggagggcaaaatgaccgccaaagtggtggaaacagccaaggcgattctgggaggatctcgggtgagagtggaccaaaaatgcaaagcttcggttccgatcgaaccgacgccggtcattattaccagtaacaccaacatgtgttatgtcatcgacgggaacacgaccacgttcgagcataagcagccgttggaggacaggatgtttaagctcgaattgctgactcggttgcctgatgactttggtaaggtgaccaaacaggaggtgcgtcaattcttcaggtggtctcaggatcacctgacccctgtgatcccagaattcctagtgcggaaggcggagtctcgcaaaagacccgccccttccggggaaggctatataagcccgacaaagcggcccgcgctcgcagagcagcagcaggcgtcggagagcgcggacccggttcccaccaggtatcgtatcaaatgctcgaaacattgcggtatggataaaatgttgtttccttgccaaatttgtgaatcgatgaacagagatattaatatttgtgctattcataaaacgaccgactgtaaagagtgtttccccgactacggggataaagatgatgtagaactacccccctgtacagaacacaacgtgtctcgttgttatcaatgtcattcgggcgaattgtatcgcgtgacttcggactctgacgagaaacctgcccccgagagtgatgaaggcaccgagccatcctatgctccctgcacgattcaccacctgatgggcaagagtcacgggttagtcacttgcgcggcgtgtcggttgaaaaatagtacgttgcatgatgacttggatgacggtgatctcgaacaataaatgattgaaatgtagccatgtctctcatttctgatgcgattccagattggttggagcggttggtcaaaaagggagtgaatgctgcagctgatttctaccatttggaaagcggtcctcctcgtcctaaggcaaatcagcaaactcaagaatctcttgaaaaggacgattcgagaggtctcgtgttcccaggctacaattatctaggccctttcaacggtctagataaaggagaacccgtcaacgaggcagacgctgccgccttagaacacgacaaggcttacgacctcgaaatcaaggacgggcacaacccgtactttgagtacaacgaggccgacagacgtttccaggaacgtctcaaagacgatacctcctttggaggcaatttaggtaaagccatcttccaggccaaaaagagggttctcgaaccctttggtctggtggaagactcaaagacggctccgaccggagacaagcggaaaggcgaagacgaacctcgtttgcccgacacttcttcacagactcccaagaaaaacaagaagcctcgcaaggaaagaccttccggcggggcagaagatccgggcgaaggcacctcttccaacgctggagcagcagcacccgcctctagtgtgggatcatctatcatggctgaaggaggtggcggcccagtgggcgatgcaggccagggtgccgatggagtgggcaattcctccggaaattggcattgcgattcccaatggctggaaaacggagtcgtcactcgaaccacccgaacctgggtcttgcccagctacaacaaccacctgtacaaacgaatccaaggacccagcggaggcgacaacaacaacaaattctttggattcagcaccccctggggatactttgactacaatcgattccactgccacttttccccgcgagactggcaacgactcatcaacaacaactggggcatccgtcccaaagcgatgcgctttagactctttaacatccaggttaaagaggtcacggtccaagacttcaacaccaccatcggcaacaacctcaccagtacggtccaggtctttgcggacaaggactaccaactgccgtacgtcctcggatcggctaccgaaggcaccttcccgccgttcccagcggatatctacacgatcccgcagtacgggtactgcacgctaaactacaacaacgaggcggtggatcgttcggccttctactgtctggactactttccctcagacatgctgcggacaggaaataactttgagtttacttacaccttcgaggacgttcctttccatagcatgtttgcccacaaccagacgctagaccggctgatgaatcccctcgtggatcagtacctctgggctttcagctccgtcagccaagcaggctcatctggacgagctcttcattactcgcgggcgactaaaaccaacatggcggctcaatataggaactggttacctgggcctttcttccgtgatcagcaaatctttacgggcgctagcaacatcactaaaaataacgtctttagcgtttgggaaaaaggcaagcaatgggaactcgacaatcggaccaacctaatgcagcccggtcctgcggcagcgaccacctttagcggagaacctgaccgtcaagccatgcaaaacacgctggcttttagcaggaccgtctacgatcaaacgaccgccacgaccgatcgtaaccagatactcatcaccaacgaagacgaaatcagacccaccaactcggtcggtatcgacgcgtggggagcagttcccaccaacaaccagtcgatcgtgacccccggcactcgcgcggccgtcaacaatcaaggggcgcttcccgggatggtgtggcaaaacagagacatttaccctacagggacccatttggccaaaattcccgacactgacaatcacttccatccgtccccgcttattgggcggtttggctgcaagcatccccctccccagattttcattaaaaacacacccgtccctgccaacccttcggaaacgttccagacggccaaagtggcctccttcatcaaccagtactcgaccggacagtgcaccgtcgaaatcttttgggaactcaagaaggaaacctccaagcgctggaaccccgaaatccagttcacctccaactttggcaacgcggccgacatccagtttgccgtctccgacacgggatcctattccgaacctcgtcccatcggtacccgttaccttaccaaacctctgtaaattaaacccttcaataaaccgtttatgcgtaactgtatttccgtctcctgtcgttattcagtcacatgatgcggcattacctcaccggagtgctggccagtttccaagacaggctcgctcgctcactcgggccggggccccaaaggggcccctagcgaccgcttcgcggtcgcggcccgagtgagcgagcgagcctgtcttggaaactggcca

SEQ ID NO: 557 - DNA, 2211 bp, Artificial Sequence
  Description of Artificial Sequence: Synthetic polynucleotide
atggctgctgatggttatcttccagattggctcgaggacactctctctgaaggaataagacagtggtggaagctcaaacctggcccaccaccaccaaagcccgcagagcggcataaggacgacagcaggggtcttgtgcttcctgggtacaagtacctcggacccttcaacggactcgacaagggagagccggtcaacgaggcagacgcagcggccctcgagcacgacaaggcctacgaccagcagctcaaggccggtgacaacccctacctcaagtacaaccacgccgacgcggagttccagcagcggcttcagggcgacacatcgtttgggggcaacctcggcagagcagtcttccaggccaaaaagagggttcttgaacctcttggtctggttgagcaagcgggtgagacggctcctggaaagaagagaccgttgattgaatccccccagcagcccgactcctccacgggtatcggcaaaaaaggcaagcagccggctaaaaagagactcaattttggtcagactggcgactcagagtcagtccccgacccacaacctctcggagaacctccagcaacccccgctgctgtgggacctactacaatggcttcaggtggtggcgcaccaatggcagacaataacgaaggcgccgacggagtgggtaatgcctcaggaaattggcattgcgattccacatggctgggcgacagagtcatcaccaccagcacccgcacctgggccttgcccacctacaataaccacctctacaagcaaatctccagtgcttcaacgggggccagcaacgacaaccactacttcggctacagcaccccctgggggtattttgacttcaacagattccactgccacttttcaccacgtgactggcagcgactcatcaacaacaattggggattccggcccaagagactcaacttcaaactcttcaacatccaagtcaaggaggtcacgacgaatgatggcgtcacaaccatcgctaataaccttaccagcacggttcaagtcttctcggactcagactatcagctcccgtacgtgctcgggtcggctcacgagggctgcctcccgccgttcccagcagacgtcttcatggtgccacagtatggatacctcaccctgaacaacgggagtcaggcagtaggacgctcttcattttactgcctggagtactttccttctcagatgctgcgtaccggaaacaactttaccttcagctacacttttgaggacgttcctttccacagcagctacgctcacagccagagtctggaccgtctcatgaatcctctcatcgaccagtacctgtattacctgaacagaactcagaatcagtccggaagtgcccaaaacaaggacttgctgtttagccgggggtctccagctggcatgtctgttcagcccaaaaactggctacctggaccctgttatcggcagcagcgcgtttctaaaacaaaaacagacaacaacaacagcaactttacctggactggtgcttcaaaatataaccttaatgggcgtgaatctataatcaaccctggcactgctatggcctcacacaaagacgacaaagacaagttctttcccatgagcggtgtcatgatttttggaaaggagagcgccggagcttcaaacactgcattggacaatgtcatgatcacagacgaagaggaaatcaaagccactaaccccgtggccaccgaaagatttgggactgtggcagtcaatctccagagcagcagcacagaccctgcgaccggagatgtgcatgttatgggagccttacctggaatggtgtggcaagacagagacgtatacctgcagggtcccatttgggccaaaattcctcacacagatggacactttcacccgtctcctcttatgggcggctttggactcaagaacccgcctcctcagatcctcatcaaaaacacgcctgttcctgcgaatcctccggcggagttttcagctacaaagtttgcttcattcatcacccaatactccacaggacaagtgagtgtggaaattgaatgggagctgcagaaagaaaacagcaagcgctggaatcccgaagtgcagtacacatccaattatgcaaaatctgccaacgttgattttactgtggacaacaatggactttatactgagcctcgccccattggcacccgttacctcacccgtcccctgtaa

SEQ ID NO: 558 - protein, 736 aa, Artificial Sequence
  Description of Artificial Sequence: Synthetic polypeptide
MAADGYLPDWLEDTLSEGIRQWWKLKPGPPPPKPAERHKDDSRGLVLPGYKYLGPFNGLDKGEPVNEADAAALEHDKAYDQQLKAGDNPYLKYNHADAEFQQRLQGDTSFGGNLGRAVFQAKKRVLEPLGLVEQAGETAPGKKRPLIESPQQPDSSTGIGKKGKQPAKKRLNFGQTGDSESVPDPQPLGEPPATPAAVGPTTMASGGGAPMADNNEGADGVGNASGNWHCDSTWLGDRVITTSTRTWALPTYNNHLYKQISSASTGASNDNHYFGYSTPWGYFDFNRFHCHFSPRDWQRLINNNWGFRPKRLNFKLFNIQVKEVTTNDGVTTIANNLTSTVQVFSDSDYQLPYVLGSAHEGCLPPFPADVFMVPQYGYLTLNNGSQAVGRSSFYCLEYFPSQMLRTGNNFTFSYTFEDVPFHSSYAHSQSLDRLMNPLIDQYLYYLNRTQNQSGSAQNKDLLFSRGSPAGMSVQPKNWLPGPCYRQQRVSKTKTDNNNSNFTWTGASKYNLNGRESIINPGTAMASHKDDKDKFFPMSGVMIFGKESAGASNTALDNVMITDEEEIKATNPVATERFGTVAVNLQSSSTDPATGDVHVMGALPGMVWQDRDVYLQGPIWAKIPHTDGHFHPSPLMGGFGLKNPPPQILIKNTPVPANPPAEFSATKFASFITQYSTGQVSVEIEWELQKENSKRWNPEVQYTSNYAKSANVDFTVDNNGLYTEPRPIGTRYLTRPL

SEQ ID NO: 559 - DNA, 2211 bp, Artificial Sequence
  Description of Artificial Sequence: Synthetic polynucleotide
atggcttccgatggttatcttccagattggctcgaggacaacctctctgagggcatccgcgagtggtgggacttgaaacctggagccccgaaacccaaagccaaccagcaaaagcaggacgacggccggggtctggtgcttcctggctacaagtacctcggacccttcaacggactcgacaagggggagcccgtcaacgcggcggatgcagcggccctcgagcacgacaaggcctacgaccagcagctcagagcgggtgacaatccgtacctgcggtataaccacgccgacgccgagtttcaggagcgtctgcaagaagatacgtcttttgggggcaacctcgggcgagcagtcttccaggccaagaagagggttctcgaaccttttggtctggttgaggaaggtgctaagacggctcctggaaagaaacgtccggtagagcagtcgccacaagagccagactcctcctcgggcattggcaagacaggccagcagcccgctaaaaagagactcaattttggtcagactggcgactcagagtcagtccccgacccacaacctctcggagaacctccagcaacccccgctgctgtgggacctactacaatggcttcaggcggtggcgcaccaatggcagacaataacgaaggcgccgacggagtgggtaatgcctcaggaaattggcattgcgattccacatggctgggcgacagagtcatcaccaccagcacccgaacatgggccttgcccacctataacaaccacctctacaagcaaatctccagtgcttcaacgggggccagcaacgacaaccactacttcggctacagcaccccctgggggtattttgatttcaacagattccactgccatttctcaccacgtgactggcagcgactcatcaacaacaattggggattccggcccaagagactcaacttcaaactcttcaacatccaagtcaaggaggtcacgacgaatgatggcgtcacaaccatcgctaataaccttaccagcacggttcaagtcttctcggactcggagtaccagcttccgtacgtcctcggctctgcgcaccagggctgcctccctccgttcccggcggacgtgttcatgattccgcagtacggctacctaacgctcaacaatggcagccaggcagtgggacggtcatccttttactgcctggaatatttcccatcgcagatgctgagaacgggcaataactttaccttcagctacaccttcgaggacgtgcctttccacagcagctacgcgcacagccagagcctggaccggctgatgaatcctctcatcgaccagtacctgtattacctgaacagaactcagaatcagtccggaagtgcccaaaacaaggacttgctgtttagccgggggtctccagctggcatgtctgttcagcccaaaaactggctacctggaccctgttaccggcagcagcgcgtttctaaaacaaaaacagacaacaacaacagcaactttacctggactggtgcttcaaaatataaccttaatgggcgtgaatctataatcaaccctggcactgctatggcctcacacaaagacgacaaagacaagttctttcccatgagcggtgtcatgatttttggaaaggagagcgccggagcttcaaacactgcattggacaatgtcatgatcacagacgaagaggaaatcaaagccactaaccccgtggccaccgaaagatttgggactgtggcagtcaatctccagagcagcagcacagaccctgcgaccggagatgtgcatgttatgggagccttacctggaatggtgtggcaagacagagacgtatacctgcagggtcccatttgggccaaaattcctcacacagatggacactttcacccgtctcctcttatgggcggctttggacttaagcacccgcctcctcagatcctcatcaaaaacacgcctgttcctgcgaatcctccggcagagttttcggctacaaagtttgcttcattcatcacccagtattctactggccaagtcagcgtggagattgaatgggagctgcagaaagaaaacagcaaacgctggaatcccgaagtgcagtatacatctaactatgcaaaatctgccaacgttgatttcactgtggacaacaatggactttatactgagcctcgtcccattggcacccgttacctcacccgtcccctgtaa

SEQ ID NO: 560 - protein, 736 aa, Artificial Sequence
  Description of Artificial Sequence: Synthetic polypeptide
MASDGYLPDWLEDNLSEGIREWWDLKPGAPKPKANQQKQDDGRGLVLPGYKYLGPFNGLDKGEPVNAADAAALEHDKAYDQQLRAGDNPYLRYNHADAEFQERLQEDTSFGGNLGRAVFQAKKRVLEPFGLVEEGAKTAPGKKRPVEQSPQEPDSSSGIGKTGQQPAKKRLNFGQTGDSESVPDPQPLGEPPATPAAVGPTTMASGGGAPMADNNEGADGVGNASGNWHCDSTWLGDRVITTSTRTWALPTYNNHLYKQISSASTGASNDNHYFGYSTPWGYFDFNRFHCHFSPRDWQRLINNNWGFRPKRLNFKLFNIQVKEVTTNDGVTTIANNLTSTVQVFSDSEYQLPYVLGSAHQGCLPPFPADVFMIPQYGYLTLNNGSQAVGRSSFYCLEYFPSQMLRTGNNFTFSYTFEDVPFHSSYAHSQSLDRLMNPLIDQYLYYLNRTQNQSGSAQNKDLLFSRGSPAGMSVQPKNWLPGPCYRQQRVSKTKTDNNNSNFTWTGASKYNLNGRESIINPGTAMASHKDDKDKFFPMSGVMIFGKESAGASNTALDNVMITDEEEIKATNPVATERFGTVAVNLQSSSTDPATGDVHVMGALPGMVWQDRDVYLQGPIWAKIPHTDGHFHPSPLMGGFGLKHPPPQILIKNTPVPANPPAEFSATKFASFITQYSTGQVSVEIEWELQKENSKRWNPEVQYTSNYAKSANVDFTVDNNGLYTEPRPIGTRYLTRPL

SEQ ID NO: 561 - DNA, 2211 bp, Artificial Sequence
  Description of Artificial Sequence: Synthetic polynucleotide
atggctgctgatggttatcttccagattggctcgaggacactctctctgaaggaataagacagtggtggaagctcaaacctggcccaccaccaccaaagcccgcagagcggcataaggacgacagcaggggtcttgtgcttcctgggtacaagtacctcggacccttcaacggactcgacaagggagagccggtcaacgaggcagacgcagcggccctcgagcacgacaaggcctacgaccagcagctcaaggccggtgacaacccctacctcaagtacaaccacgccgacgcggagttccagcagcggcttcagggcgacacatcgtttgggggcaacctcggcagagcagtcttccaggccaaaaagagggttcttgaacctcttggtctggttgagcaagcgggtgagacggctcctggaaagaagagaccgttgattgaatccccccagcagcccgactcctccacgggtatcggcaaaaaaggcaagcagccggctaaaaagagactcaattttggtcagactggcgactcagagtcagtccccgacccacaacctctcggagaacctccagcaacccccgctgctgtgggacctactacaatggcttcaggtggtggcgcaccaatggcagacaataacgaaggcgccgacggagtgggtaatgcctcaggaaattggcattgcgattccacatggctgggcgacagagtcatcaccaccagcacccgcacctgggccttgcccacctacaataaccacctctacaagcaaatctccagtgcttcaacgggggccagcaacgacaaccactacttcggctacagcaccccctgggggtattttgacttcaacagattccactgccacttttcaccacgtgactggcagcgactcatcaacaacaattggggattccggcccaagagactcaacttcaaactcttcaacatccaagtcaaggaggtcacgacgaatgatggcgtcacaaccatcgctaataaccttaccagcacggttcaagtcttctcggactcagactatcagctcccgtacgtgctcgggtcggctcacgagggctgcctcccgccgttcccagcagacgtcttcatggtgccacagtatggatacctcaccctgaacaacgggagtcaggcagtaggacgctcttcattttactgcctggagtactttccttctcagatgctgcgtaccggaaacaactttaccttcagctacacttttgaggacgttcctttccacagcagctacgctcacagccagagtctggaccgtctcatgaatcctctcatcgaccagtacctgtattacctgaacagaactcagaatcagtccggaagtgcccaaaacaaggacttgctgtttagccgggggtctccaactggcatgtctgttcagcccaaaaactggctacctggaccctgttatcggcagcagcgcgtttctaaaacaaaaacagacaacaacaacagcaactttacctggactggtgcttcaaaatataaccttaatgggcgtgaatctataatcaaccctggcactgctatggcctcacacaaagacgacaaagacaagttctttcccatgagcggtgtcatgatttttggaaaggagagcgccggagcttcaaacactgcattggacaatgtcatgatcacagacgaagaggaaatcaaagccactaaccccgtggccactgaaagatttgggactgtggcagtcaatctccagagcagcagcacagaccctgcgaccggagatgtgcatgccatgggagccttacctggaatggtgtggcaagacagagacgtatacctgcagggtcctatttgggccaaaattcctcacacggatggacactttcacccgtctcctctcatgggcggctttggactcaagaacccgcctcctcagatcctcatcaaaaacacgcctgttcctgcgaatcctccggcggagttttcagctacaaagtttgcttcattcatcacccagtattccacaggacaagtgagcgtggagattgaatgggagctgcagaaagaaaacagcaaacgctggaatcccgaagtgcagtatacatctaactatgcaaaatctgccaacgttgatttcactgtggacaacaatggactttatactgagcctcgccccattggcacccgttacctcacccgtcccctgtaa

SEQ ID NO: 562 - protein, 736 aa, Artificial Sequence
  Description of Artificial Sequence: Synthetic polypeptide
MAADGYLPDWLEDTLSEGIRQWWKLKPGPPPPKPAERHKDDSRGLVLPGYKYLGPFNGLDKGEPVNEADAAALEHDKAYDQQLKAGDNPYLKYNHADAEFQQRLQGDTSFGGNLGRAVFQAKKRVLEPLGLVEQAGETAPGKKRPLIESPQQPDSSTGIGKKGKQPAKKRLNFGQTGDSESVPDPQPLGEPPATPAAVGPTTMASGGGAPMADNNEGADGVGNASGNWHCDSTWLGDRVITTSTRTWALPTYNNHLYKQISSASTGASNDNHYFGYSTPWGYFDFNRFHCHFSPRDWQRLINNNWGFRPKRLNFKLFNIQVKEVTTNDGVTTIANNLTSTVQVFSDSDYQLPYVLGSAHEGCLPPFPADVFMVPQYGYLTLNNGSQAVGRSSFYCLEYFPSQMLRTGNNFTFSYTFEDVPFHSSYAHSQSLDRLMNPLIDQYLYYLNRTQNQSGSAQNKDLLFSRGSPTGMSVQPKNWLPGPCYRQQRVSKTKTDNNNSNFTWTGASKYNLNGRESIINPGTAMASHKDDKDKFFPMSGVMIFGKESAGASNTALDNVMITDEEEIKATNPVATERFGTVAVNLQSSSTDPATGDVHAMGALPGMVWQDRDVYLQGPIWAKIPHTDGHFHPSPLMGGFGLKNPPPQILIKNTPVPANPPAEFSATKFASFITQYSTGQVSVEIEWELQKENSKRWNPEVQYTSNYAKSANVDFTVDNNGLYTEPRPIGTRYLTRPL

SEQ ID NO: 563 - DNA, 2211 bp, Artificial Sequence
  Description of Artificial Sequence: Synthetic polynucleotide
atggctgccgatggttatcttccagattggctcgaggacaacctctctgagggcattcgcgagtggtgggcgctgaaacctggagccccgaagcccaaagccaaccagcaaaagcaggacgacggccggggtctggtgcttcctggctacaagtacctcggacccttcaacggactcgacaagggggagcccgtcaacgcggcggatgcagcggccctcgagcacgacaaggcctacgaccagcagctcaaagcgggtgacaatccgtacctgcggtataaccacgccgacgccgagtttcaggagcgtctgcaagaagatacgtcttttgggggcaacctcgggcgagcagtcttccaggccaagaagcgggttctcgaacctctcggtctggttgaggaaggcgctaagacggctcctggaaagaaacgtccggtagagcaatcgccacaagagccagactcctcctcgggcatcggcaagacaggccagcagcccgctaaaaagagactcaattttggtcagactggcgactcagagtcagtccccgacccacaacctctcggagaacctccagcaacccccgctgctgtgggacctactacaatggcttcaggcggtggcgcaccaatggcagacaataacgaaggcgccgacggagtgggtaatgcctcaggaaattggcattgcgattccacatggctgggcgacagagtcatcaccaccagcacccgaacatgggccttgcccacctataacaaccacctctacaagcaaatctccagtgcttcgacgggggccagcaacgacaaccactacttcggctacagcaccccctgggggtattttgactttaacagattccactgccacttttcaccacgtgactggcagcgactcatcaacaacaactggggattccggcccaagagactcagcttcaagctcttcaacatccaggtcaaggaggtcacgacgaatgatggcgtcacaaccatcgctaataaccttaccagcacggttcaagtcttctcggactcggagtaccagcttccgtacgtcctcggctctgcgcaccagggctgcctccctccgttcccggcggacgtgttcatgattccgcaatacggctacctgacgctcaacaatggcagccaagccgtgggacgttcatccttttactgcctggaatatttcccttctcagatgctgagaacgggcaacaactttaccttcagctacacctttgaggaagtgcctttccacagcagctacgcgcacagccagagcctggaccggctgatgaatcctctcatcgatcaatacctgtattacctgaacagaactcaaaatcagtccggaagtgcccaaaacaaggacttgctgtttagccgtgggtctccagctggcatgtctgttcagcccaaaaactggctacctggaccctgttatcggcagcagcgcgtttctaaaacaaaaacagacaacaacaacagcaattttacctggactggtgcttcaaaatataacctcaatgggcgtgaatccatcatcaaccctggcactgctatggcctcacataaagacgacgaagacaagttctttcccatgagcggtgtcatgatttttggaaaagagagcgccggagcttcaaacactgcattggacaatgtcatgattacagacgaagaggaaattaaagccactaaccctgtggccaccgaaagatttgggaccgtggcagtcaatttccagagcagcagcacagaccctgcgaccggagatgtgcatgctatgggagcattacctggcatggtgtggcaagatagagacgtgtacctgcagggtcccatttgggccaaaattcctcacacagatggacactttcacccgtctcctcttatgggcggctttggactcaagaacccgcctcctcagatcctcatcaaaaacacgcctgttcctgcgaatcctccggcggagttttcagctacaaagtttgcttcattcatcacccaatactccacaggacaagtgagcgtggagattgaatgggagctgcagaaagaaaacagcaaacgctggaatcccgaagtgcagtatacatctaactatgcaaaatctgccaacattgatttcactgtggacaacaatggactttatactgagcctcgccccattggcacccgttacctcacccgtccccagtaa

SEQ ID NO: 564 - protein, 736 aa, Artificial Sequence
  Description of Artificial Sequence: Synthetic polypeptide
MAADGYLPDWLEDNLSEGIREWWALKPGAPKPKANQQKQDDGRGLVLPGYKYLGPFNGLDKGEPVNAADAAALEHDKAYDQQLKAGDNPYLRYNHADAEFQERLQEDTSFGGNLGRAVFQAKKRVLEPLGLVEEGAKTAPGKKRPVEQSPQEPDSSSGIGKTGQQPAKKRLNFGQTGDSESVPDPQPLGEPPATPAAVGPTTMASGGGAPMADNNEGADGVGNASGNWHCDSTWLGDRVITTSTRTWALPTYNNHLYKQISSASTGASNDNHYFGYSTPWGYFDFNRFHCHFSPRDWQRLINNNWGFRPKRLSFKLFNIQVKEVTTNDGVTTIANNLTSTVQVFSDSEYQLPYVLGSAHQGCLPPFPADVFMIPQYGYLTLNNGSQAVGRSSFYCLEYFPSQMLRTGNNFTFSYTFEEVPFHSSYAHSQSLDRLMNPLIDQYLYYLNRTQNQSGSAQNKDLLFSRGSPAGMSVQPKNWLPGPCYRQQRVSKTKTDNNNSNFTWTGASKYNLNGRESIINPGTAMASHKDDEDKFFPMSGVMIFGKESAGASNTALDNVMITDEEEIKATNPVATERFGTVAVNFQSSSTDPATGDVHAMGALPGMVWQDRDVYLQGPIWAKIPHTDGHFHPSPLMGGFGLKNPPPQILIKNTPVPANPPAEFSATKFASFITQYSTGQVSVEIEWELQKENSKRWNPEVQYTSNYAKSANIDFTVDNNGLYTEPRPIGTRYLTRPQ

SEQ ID NO: 565 - DNA, 2211 bp, Artificial Sequence
  Description of Artificial Sequence: Synthetic polynucleotide
atggctgccgatggttatcttccagattggctcgaggacaacctctctgagggcattcgcgagtggtgggacttgaaacctggagccccgaaacccaaagccaaccagcaaaagcaggacgacggccggggtctggtgcttcctggctacaagtacctcggacccttcaacggactcgacaagggggagcccgtcaacgcggcggatgcagcggccctcgagcacgacaaggcctacgaccagcagctcaaagcgggtgacaatccgtaccttcggtataaccacgccgacgccgagtttcaggagcgtctgcaagaagatacgtcttttgggggcaacctcgggcgagcagtcttccaggccaaaaagagggttctcgaacctctcggtctggttgaggaagcggctaagacggctcctggaaagaaacgtccggtagagcagtcgccacaagagccagactcctcctcgggcattggcaagacaggccagcagcccgctaaaaagagactcaattttggtcagactggcgactcagagtcagtccccgacccacaacctctcggagaacctcccgcagccccctcaggtgtgggatctcttacaatggcttcaggtggtggcgcaccaatggcagacaataacgaaggcgccgacggagtgggtaatgcctcaggaaattggcattgcgattccacatggctgggcgacagagtcatcaccaccagcacccgcacctgggccttgcccacctacaataaccacctctacaagcaaatctccagtgcttcaacgggggccagcaacgacaaccactacttcggctacagcaccccctgggggtattttgacttcaacagattccactgccacttttcaccacgtgactggcaaagactcatcaacaacaattggggattccggcccaagagactcaacttcaagctcttcaacatccaagtcaaggaggtcacgacgaatgatggcgtcacgaccatcgctaataaccttaccagcacggttcaagtcttctcggactcggagtaccagttgccgtacgtcctcggctctgcgcaccagggctgcctccctccgttcccggcggacgtgttcatgattccgcagtacggctacctaacgctcaacaatggcagccaggcagtgggacggtcatccttttactgcctggaatatttcccatcgcagatgctgagaacgggcaacaactttaccttcagctacacctttgaggaagtgcctttccacagcagctacgcgcacagccagagcctggaccggctgatgaatcctctcatcgaccagtacctgtattacctgaacagaactcaaaatcagtccggaagtgcccaaaacaaggacttgctgtttagccgtgggtctccagctggcatgtctgttcagcccaaaaactggctacctggaccctgttaccggcagcagtgcgtttctaaaacaaaaacagacaacaacaacagcaactttacctggactggtgcttcaaaatataaccttaatgggcgtgaatctataatcaaccctggcactgctatggcctcacacaaagacgacaaagacaagttctttcccatgagcggtgtcatgatttttggaaaggagagcgccggagcttcaaacactgcattggacaatgtcatgatcacagacgaagaggaaatcaaagccactaaccccgtggccaccgaaagatttgggactgtggcagtcaatctccagagcagcagcacagaccctgcgaccggagatgtgcatgttatgggagccttacctggaatggtgtggcaagacagagacgtatacctgcagggtcctatttgggccaaaattcctcacacagatggacactttcacccgtctcctcttatgggcggctttggactcaagaacccgcctcctcagatcctcatcaaaaacacgcctgttcctgcgaatcctccggcggagttttcagctacaaagtttgcttcattcatcacccaatactccacaggacaagtgagcgtggagattgaatgggagctgcagaaagaaaacagcaagcgctggaatcccgaagtgcagtacacatccaattatgcaaaatctgccaacgttgatttcactgtggacaacaatggactttatactgagcctcgccccattggcacccgttacctcacccgtcccctgtaa

SEQ ID NO: 566 - protein, 736 aa, Artificial Sequence
  Description of Artificial Sequence: Synthetic polypeptide
MAADGYLPDWLEDNLSEGIREWWDLKPGAPKPKANQQKQDDGRGLVLPGYKYLGPFNGLDKGEPVNAADAAALEHDKAYDQQLKAGDNPYLRYNHADAEFQERLQEDTSFGGNLGRAVFQAKKRVLEPLGLVEEAAKTAPGKKRPVEQSPQEPDSSSGIGKTGQQPAKKRLNFGQTGDSESVPDPQPLGEPPAAPSGVGSLTMASGGGAPMADNNEGADGVGNASGNWHCDSTWLGDRVITTSTRTWALPTYNNHLYKQISSASTGASNDNHYFGYSTPWGYFDFNRFHCHFSPRDWQRLINNNWGFRPKRLNFKLFNIQVKEVTTNDGVTTIANNLTSTVQVFSDSEYQLPYVLGSAHQGCLPPFPADVFMIPQYGYLTLNNGSQAVGRSSFYCLEYFPSQMLRTGNNFTFSYTFEEVPFHSSYAHSQSLDRLMNPLIDQYLYYLNRTQNQSGSAQNKDLLFSRGSPAGMSVQPKNWLPGPCYRQQCVSKTKTDNNNSNFTWTGASKYNLNGRESIINPGTAMASHKDDKDKFFPMSGVMIFGKESAGASNTALDNVMITDEEEIKATNPVATERFGTVAVNLQSSSTDPATGDVHVMGALPGMVWQDRDVYLQGPIWAKIPHTDGHFHPSPLMGGFGLKNPPPQILIKNTPVPANPPAEFSATKFASFITQYSTGQVSVEIEWELQKENSKRWNPEVQYTSNYAKSANVDFTVDNNGLYTEPRPIGTRYLTRPL

SEQ ID NO: 567 - DNA, 2211 bp, Artificial Sequence
  Description of Artificial Sequence: Synthetic polynucleotide
atggctgccgatggttatcttccagattggctcgaggacaacctctctgagggcattcgcgaatggtgggacttgaaacctggagccccgaaacccaaagtcaaccagcaaaagcaggacaacgctcggggtcttgtgcttccgggttacaaatacctcggacccttcaacggactcgacaagggggagcccgtcaacgcggcggacgcagcggccctcgagcacgacaaggcctacgaccagcagctcaaagcgggtgacaatccgtaccttcggtataaccacgccgacgccgagtttcaggagcgtctgcaagaagatacgtcttttgggggcaaccttggacgagcagtcttccaggccaagaagagggttctcgaaccttttggtctggttgaggaaggtgctaagacggctcctggaaagaaacgtccggtagagcagtcgccacaagagccagactcctcctcgggcattggcaagacaggccagcagcccgctaaaaagagactcaattttggtcagactggcgactcagagtcagtccccgacccacaacctctcggagaacctccagcaacccccgctgctgtgggacctactacaatggcttcaggcggtggcgcaccaatggcagacaataacgaaggcgccgacggagtgggtaatgcctcaggaaattggcattgcgattccacatggctgggcgacagagtcatcaccaccagcacccgcacctgggccttgcccacctacaataaccacctctacaagcaaatctccagtgcttcaacgggggccagcaacgacaaccactacttcggctacagcaccccctgggggtattttgacttcaacagattccactgccacttttcaccacgtgactggcaaagactcatcaacaacaattggggattccggcccaagagactcaacttcaagctcttcaacatccaagtcaaggaggtcacgacgaatgatggcgtcacgaccatcgctaataaccttaccagcacggttcaagtcttctcggactcggagtaccagttgccgtacgtcctcggctctgcgcaccagggctgcctccctccgttcccggcggacgtgttcatgattccgcaatacggctacctgacgctcaacaatggcagccaggcagtgggacggtcatccttttactgcctggaatatttcccatcgcagatgctgagaacgggcaataactttaccttcagctacacttttgaggacgttcctttccacagcagctacgctcacagccagagcctggaccggctgatgaatcctctcatcgaccagtacctgtattacctgaacagaactcagaatcagtccggaagtgcccaaaacaaggacttgctgtttagccgtgggtctccaactggcatgtctgttcagcccaaaaactggctacctggaccctgttatcggcagcagcgcgtttctaaaacaaaaacagacaacaacaacagcaactttacctggactggtgcttcaaaatataaccttaatgggcgtgaatctataatcaaccctggcactgctatggcctcacacaaagacgacgaagacaagttctttcccatgagcggtgtcatgatttttggaaaggagagcgccggagcttcaaacactgcattggacaatgtcatgatcacagacgaagaggaaatcaaagccactaaccccgtggccactgaaagatttgggactgtggcagtcaatctccagagcagcagcacagaccctgcgaccggagatgtgcatgccatgggagccttacctggaatggtgtggcaagacagagacgtatacctgcagggtcctatttgggccaaaattcctcacacggatggacactttcacccgtctcctctcatgggcggctttggacttaagcacccgcctcctcagatcctcatcaaaaacacgcctgttcctgcgaatcctccggcagagttttcggctacaaagtttgcttcattcatcacccagtattccacaggacaagtgagcgtggagattgaatgggagctgcagaaagaaaacagcaaacgctggaatcccgaagtgcagtatacatctaactatgcaaaatctgccaacgttgatttcactgtggacaacaatggactttatactgagcctcgccccattggcacccgttacctcacccgtcccctgtaa

SEQ ID NO: 568 - protein, 736 aa, Artificial Sequence
  Description of Artificial Sequence: Synthetic polypeptide
MAADGYLPDWLEDNLSEGIREWWDLKPGAPKPKVNQQKQDNARGLVLPGYKYLGPFNGLDKGEPVNAADAAALEHDKAYDQQLKAGDNPYLRYNHADAEFQERLQEDTSFGGNLGRAVFQAKKRVLEPFGLVEEGAKTAPGKKRPVEQSPQEPDSSSGIGKTGQQPAKKRLNFGQTGDSESVPDPQPLGEPPATPAAVGPTTMASGGGAPMADNNEGADGVGNASGNWHCDSTWLGDRVITTSTRTWALPTYNNHLYKQISSASTGASNDNHYFGYSTPWGYFDFNRFHCHFSPRDWQRLINNNWGFRPKRLNFKLFNIQVKEVTTNDGVTTIANNLTSTVQVFSDSEYQLPYVLGSAHQGCLPPFPADVFMIPQYGYLTLNNGSQAVGRSSFYCLEYFPSQMLRTGNNFTFSYTFEDVPFHSSYAHSQSLDRLMNPLIDQYLYYLNRTQNQSGSAQNKDLLFSRGSPTGMSVQPKNWLPGPCYRQQRVSKTKTDNNNSNFTWTGASKYNLNGRESIINPGTAMASHKDDEDKFFPMSGVMIFGKESAGASNTALDNVMITDEEEIKATNPVATERFGTVAVNLQSSSTDPATGDVHAMGALPGMVWQDRDVYLQGPIWAKIPHTDGHFHPSPLMGGFGLKHPPPQILIKNTPVPANPPAEFSATKFASFITQYSTGQVSVEIEWELQKENSKRWNPEVQYTSNYAKSANVDFTVDNNGLYTEPRPIGTRYLTRPL

SEQ ID NO: 569 - DNA, 2208 bp, Artificial Sequence
  Description of Artificial Sequence: Synthetic polynucleotide
  modified_base (955)..(955): a, c, t, or g
  modified_base (971)..(972): a, c, t, or g
  modified_base (981)..(981): a, c, t, or g
  modified_base (986)..(986): a, c, t, or g
  modified_base (1235)..(1235): a, c, t, or g
  modified_base (1694)..(1696): a, c, t, or g
  modified_base (1698)..(1698): a, c, t, or g
  modified_base (1763)..(1765): a, c, t, or g
  modified_base (1778)..(1778): a, c, t, or g
  modified_base (2204)..(2204): a, c, t, or g
atggctgccgatggttatcttccagattggctcgaggacaacctctctgagggcattcgcgaatggtgggacttgaaacctggagccccgaaacccaaagtcaaccagcaaaagcaggacaacgctcggggtcttgtgcttccgggttacaaatacctcggacccttcaacggactcgacaagggggagcccgtcaacgcggcggacgcagcggccctcgagcacgacaaggcctacgaccagcagctcaaagcgggtgacaatccgtaccttcggtataaccacgccgacgccgagtttcaggagcgtctgcaagaagatacgtcttttgggggcaaccttggacgagcagtcttccaggccaagaagagggttctcgaaccttttggtctggttgaggaaggtgctaagacggctcctggaaagaaacgtccggtagagcagtcgccacaagagccagactcctcctcgggcattggcaagacaggccagcagcccgctaaaaagagactcaattttggtcagactggcgactcagagtcagtccccgacccacaacctctcggagaacctccagcaacccccgctgctgtgggacctactacaatggcttcaggcggtggcgcaccaatggcagacaataacgaaggcgccgacggagtgggtaatgcctcaggaaattggcattgcgattccacatggctgggcgacagagtcatcaccaccagcacccgaacatgggccttgcccacctataacaaccacctctacaagcaaatctccagtgcttcaacgggggccagcaacgacaaccactacttcggctacagcaccccctgggggtattttgatttcaacagattccactgccacttttcaccacgtgactggcagcgactcatcaataacaattggggattccggcccaagagactcaacttcaaactcttcaacntccaagtcaaggaggnnacgacgaangatgncgtcacaaccatcgctaataaccttaccagcacggttcaagtcttctcggactcggagtaccagcttccgtacgtcctcggctctgcgcaccagggctgcctccctccgttcccggcggacgtgttcatgattccgcaatacggctacctgacgctcaacaatggcagccaggcagtgggacggtcatccttttactgcctggaatatttcccatcgcagatgctgagaacgggcaataactttacctncagctacacttttgaggacgttcctttccacagcagctacgctcacagccagagcctggaccggctgatgaatcctctcatcgaccagtacctgtattacctgaacagaactcagaatcagtccggaagtgcccaaaacaaggacttgctgtttagccgtgggtctccaactggcatgtctgttcagcccaaaaactggctacctggaccctgttatcggcagcagcgcgtttctaaaacaaaaacagacaacaacaacagcaactttacctggactggtgcttcaaaatataaccttaatgggcgtgaatctataatcaaccctggcactgctatggcctcacacaaagacgacgaagacaagttctttcccatgagcggtgtcatgatttttggaaaggagagcgccggagcttcaaacactgcattggacaatgtcatgatcacagacgaagagannncnaagccactaaccccgtggccactgaaagatttgggactgtggcagtcaatctccaagcagcacannnaccctgcgaccgnagatgtgcatgccatgggagccttacctggaatggtgtggcaagacagagacgtatacctgcagggtcctatttgggccaaaattcctcacacggatggacactttcacccgtctcctctcatgggcggctttggacttaagcacccgcctcctcagatcctcatcaaaaacacgcctgttcctgcgaatcctccggcagagttttcggctacaaagtttgcttcattcatcacccagtattccacaggacaagtgagcgtggagattgaatgggagctgcagaaagaaaacagcaaacgctggaatcccgaagtgcagtatacatctaactatgcaaaatctgccaacgttgatttcactgtggacaacaatggactttatactgagcctcgccccattggcacccgttacctcacccgtccccngtaa

SEQ ID NO: 570 - protein, 723 aa, Artificial Sequence
  Description of Artificial Sequence: Synthetic polypeptide
MAADGYLPDWLEDNLSEGIREWWDLKPGAPKPKVNQQKQDNARGLVLPGYKYLGPFNGLDKGEPVNAADAAALEHDKAYDQQLKAGDNPYLRYNHADAEFQERLQEDTSFGGNLGRAVFQAKKRVLEPFGLVEEGAKTAPGKKRPVEQSPQEPDSSSGIGKTGQQPAKKRLNFGQTGDSESVPDPQPLGEPPATPAAVGPTTMASGGGAPMADNNEGADGVGNASGNWHCDSTWLGDRVITTSTRTWALPTYNNHLYKQISSASTGASNDNHYFGYSTPWGYFDFNRFHCHFSPRDWQRLINNNWGFRPKRLNFKLFNQVKETTDVTTIANNLTSTVQVFSDSEYQLPYVLGSAHQGCLPPFPADVFMIPQYGYLTLNNGSQAVGRSSFYCLEYFPSQMLRTGNNFTSYTFEDVPFHSSYAHSQSLDRLMNPLIDQYLYYLNRTQNQSGSAQNKDLLFSRGSPTGMSVQPKNWLPGPCYRQQRVSKTKTDNNNSNFTWTGASKYNLNGRESIINPGTAMASHKDDEDKFFPMSGVMIFGKESAGASNTALDNVMITDEEATNPVATERFGTVAVNLQSSPATDVHAMGALPGMVWQDRDVYLQGPIWAKIPHTDGHFHPSPLMGGFGLKHPPPQILIKNTPVPANPPAEFSATKFASFITQYSTGQVSVEIEWELQKENSKRWNPEVQYTSNYAKSANVDFTVDNNGLYTEPRPIGTRYLTRP

SEQ ID NO: 571 - DNA, 2208 bp, Artificial Sequence
  Description of Artificial Sequence: Synthetic polynucleotide
atggctgccgatggttatcttccagattggctcgaggacactctctctgaaggaataagacagtggtggaagctcaaacctggcccaccaccaccaaagcccgcagagcggcataaggacgacagcaggggtcttgtgcttcctgggtacaagtacctcggacccttcaacggactcgacaagggagagccggtcaacgaggcagacgccgcggccctcgagcacgacaaagcctatgaccggcagctcgacagcggagacaacccgtacctcaagtacaaccacgccgacgcggagtttcaggagcgccttaaagaagatacgtcttttgggggcaacctcggacgagcagtcttccaggcgaaaaagagggttcttgaacctctgggcctggttgaggaacctgttaagacggctccgggaaaaaagaggccggtagagcactctcctgtggagccagactcctcctcgggaaccggaaaggcgggtcagcagcctgcaagaaaaagattgaattttggtcagactggagacgcagactcagtacctgacccccagcctctcggacagccaccagcagccccctctggtctgggaactaatacgatggctacaggcagtggcgcaccaatggcagacaataacgagggcgccgacggagtgggtaattcctcgggaaattggcattgcgattccacatggatgggcgacagagtcatcaccaccagcacccgaacctgggccctgcccacctacaacaaccacctctacaaacaaatttccagccaatcaggagcctcgaacgacaatcactactttggctacagcaccccttgggggtattttgacttcaacagattccactgccacttttcaccacgtgactggcaaagactcatcaacaacaactggggattccgacccaagagactcaagttcaagctctttaacattcaagtcaaagaggtcacgcagaatgacggtacgacgacgattgccaataaccttaccagcacggttcaggtgtttactgactcggagtaccagctcccgtacgtcctcggctcggcgcatcaaggatgcctcccgccgttcccagcagacgtcttcatggtgccacagtatggatacctcaccctgaacaacgggagtcaggcagtaggacgctcttcattttactgcctggagtactttccttctcagatgctgcgtaccggtaacaactttaccttcagctacacttttgaggacgttcctttccacagcagctacgctcacagccagagtctggaccgtctcatgaatcctctcatcgaccagtacctgtattacttgagcagaacagacgctccaagtggaaccaccacgcagtcaaggcttcagttttctcaggccggagcgagtgacattcgggaccagtctaggaactggcttcctggaccctgttaccgccagcagcgagtatcaaagacatctgcggataacaacaacagtgaatactcgtggactggagctaccaagtaccacctcaatggcagagactctctggtgaatccgggcccggccatggcaagccacaaggacgatgaagaaaagttttttcctcagagcggggttctcatctttgggaagcaaggctcagagaaaacaagtgtggacattgaaaaggtcatgattacagacgaagaggaaatcaggacaaccaatcccgtggctacggagcagtatggttctgtatctaccaacctccagagaggcaacagacaagcagctaccgcagatgtcaacacacaaggcgttcttccaggcatggtctggcaggacagagatgtgtaccttcaggggcccatctgggcaaagattccacacacggacggacattttcacccctctcccctcatgggtggattcggacttaaacaccctcctccacagattctcatcaagaacaccccggtacctgcgaatccttcgaccaccttcagtgcggcaaagtttgcttccttcatcacacagtactccacgggacaggtcagcgtggagatcgagtgggagctgcagaaggaaaacagcaaacgctggaatcccgaagttcagtacacttccaactacaacaagtctgttaatgtggactttactgtggacactaatggcgtgtattcagagcctcgccccattggcaccagatacctgactcgtaatctgtaa

SEQ ID NO: 572 - protein, 735 aa, Artificial Sequence
  Description of Artificial Sequence: Synthetic polypeptide
MAADGYLPDWLEDTLSEGIRQWWKLKPGPPPPKPAERHKDDSRGLVLPGYKYLGPFNGLDKGEPVNEADAAALEHDKAYDRQLDSGDNPYLKYNHADAEFQERLKEDTSFGGNLGRAVFQAKKRVLEPLGLVEEPVKTAPGKKRPVEHSPVEPDSSSGTGKAGQQPARKRLNFGQTGDADSVPDPQPLGQPPAAPSGLGTNTMATGSGAPMADNNEGADGVGNSSGNWHCDSTWMGDRVITTSTRTWALPTYNNHLYKQISSQSGASNDNHYFGYSTPWGYFDFNRFHCHFSPRDWQRLINNNWGFRPKRLKFKLFNIQVKEVTQNDGTTTIANNLTSTVQVFTDSEYQLPYVLGSAHQGCLPPFPADVFMVPQYGYLTLNNGSQAVGRSSFYCLEYFPSQMLRTGNNFTFSYTFEDVPFHSSYAHSQSLDRLMNPLIDQYLYYLSRTDAPSGTTTQSRLQFSQAGASDIRDQSRNWLPGPCYRQQRVSKTSADNNNSEYSWTGATKYHLNGRDSLVNPGPAMASHKDDEEKFFPQSGVLIFGKQGSEKTSVDIEKVMITDEEEIRTTNPVATEQYGSVSTNLQRGNRQAATADVNTQGVLPGMVWQDRDVYLQGPIWAKIPHTDGHFHPSPLMGGFGLKHPPPQILIKNTPVPANPSTTFSAAKFASFITQYSTGQVSVEIEWELQKENSKRWNPEVQYTSNYNKSVNVDFTVDTNGVYSEPRPIGTRYLTRNL

SEQ ID NO: 573 - DNA, 2208 bp, Artificial Sequence
  Description of Artificial Sequence: Synthetic polynucleotide
atggctgccgatggttatcttccagattggctcgaggacactctctctgaaggaataagacagtggtggaagctcaaacctggcccaccaccaccaaagcccgcagagcggcataaggacgacagcaggggtcttgtgcttcctgggtacaagtacctcggacccttcaacggactcgacaagggagagccggtcaacgaggcagacgccgcggccctcgagcacgacaaagcctatgaccggcagctcgacagcggagacaacccgtacctcaagtacaaccacgccgacgcggagtttcaggagcgccttaaagaagatacgtcttttgggggcaacctcggacgagcagtcttccaggcgaaaaagagggttcttgaacctctgggcctggttgaggaacctgttaagacggctccgggaaaaaagaggccggtagagcactctcctgtggagccagactcctcctcgggaaccggaaaggcgggccagcagcctgcaagaaaaagattgaattttggtcagactggagacgcaaactcagtacctgacccccagcctctcggacagccaccagcagccccctctggtctgggaactaatacgatggctacaggcagtggcgcaccaatggcagacaataacgagggcgccgacggagtgggtaattcctcgggaaattggcattgcgattccacatggatgggcgacagagtcatcaccaccagcacccgaacctgggccctgcccacctacaacaaccacctctacaaacaaatttccagccaatcaggagcctcgaacgacaatcactactttggctacagcaccccttgggggtattttgacttcaacagattccactgccacttttcaccacgtgactggcaaagactcatcaacaacaactggggattccgacccaagagactcaagttcaagctctttaacattcaagtcaaagaggtcacgcagaatgacggtacgacgacgattgccaataaccttaccagcacggttcaggtgtttactgactcggagtaccagctcccgtacgtcctcggctcggcgcatcaaggatgcctcccgccgttcccagcagacgtcttcatggtgccacagtatggatacctcaccctgaacaacgggagtcgggcagtaggacgctcttcattttactgcctggagtactttccttctcagatgctgcgtaccggtaacaactttaccttcagctacacttttgaggacgttcctttccacagcagctacgctcacagccagagtctggaccgtctcatgaatcctctcatcgaccagtacctgtattacttgagcagaacagacactccaagtggaaccaccacgcagtcaaggcttcagttttctcaggccggagcgagtgacattcgggaccagtctaggaactggcttcctggaccctgttaccgccagcagcgagtatcaaagacatctgcggataacaacaacagtgaatactcgtggactggagctaccaagtaccacctcaatggcagagactctctggtgaatccgggcccggccatggcaagccacaaggacgatgaagaaaagttttttcctcagagcggggttctcatctttgggaagcaaggctcagagaaaacaagtgtggacattgaaaaggtcatgattacagacgaagaggaaatcaggacgaccaatcccgtggctacggagcagtatggttctgtatctaccaacctccagagaggcaacagacaagcagctaccgcagatgtcaacacacaaggcgttcttccaggcatggtctggcaggacagagatgtgtaccttcaggggcccatctgggcaaagattccacacacggacggacattttcacccctctcccctcatgggtggattcggacttaaacaccctcctccacagattctcatcaagaacaccccggtacctgcgaatccttcgaccaccttcagtgcggcaaagtttgcttccttcatcacacagtactccacgggacaggtcagcgtggagatcgagtgggagctgcagaaggaaaacagcaaacgctggaatcccgaagttcagtacacttccaactacaacaagtctgttaatgtggactttactgtggacactaatggcgtgtatacagagcctcgccccattggcaccagatacctgactcgtaatctgtaa

SEQ ID NO: 574 - protein, 735 aa, Artificial Sequence
  Description of Artificial Sequence: Synthetic polypeptide
MAADGYLPDWLEDTLSEGIRQWWKLKPGPPPPKPAERHKDDSRGLVLPGYKYLGPFNGLDKGEPVNEADAAALEHDKAYDRQLDSGDNPYLKYNHADAEFQERLKEDTSFGGNLGRAVFQAKKRVLEPLGLVEEPVKTAPGKKRPVEHSPVEPDSSSGTGKAGQQPARKRLNFGQTGDANSVPDPQPLGQPPAAPSGLGTNTMATGSGAPMADNNEGADGVGNSSGNWHCDSTWMGDRVITTSTRTWALPTYNNHLYKQISSQSGASNDNHYFGYSTPWGYFDFNRFHCHFSPRDWQRLINNNWGFRPKRLKFKLFNIQVKEVTQNDGTTTIANNLTSTVQVFTDSEYQLPYVLGSAHQGCLPPFPADVFMVPQYGYLTLNNGSRAVGRSSFYCLEYFPSQMLRTGNNFTFSYTFEDVPFHSSYAHSQSLDRLMNPLIDQYLYYLSRTDTPSGTTTQSRLQFSQAGASDIRDQSRNWLPGPCYRQQRVSKTSADNNNSEYSWTGATKYHLNGRDSLVNPGPAMASHKDDEEKFFPQSGVLIFGKQGSEKTSVDIEKVMITDEEEIRTTNPVATEQYGSVSTNLQRGNRQAATADVNTQGVLPGMVWQDRDVYLQGPIWAKIPHTDGHFHPSPLMGGFGLKHPPPQILIKNTPVPANPSTTFSAAKFASFITQYSTGQVSVEIEWELQKENSKRWNPEVQYTSNYNKSVNVDFTVDTNGVYTEPRPIGTRYLTRNL

SEQ ID NO: 575 - DNA, 2211 bp, Artificial Sequence
  Description of Artificial Sequence: Synthetic polynucleotide
atggctgccgatggttatcttccagattggctcgaggacactctctctgaaggaataagacagtggtggaagctcaaacctggcccaccaccaccaaagcccgcagagcggcataaggacgacagcaggggtcttgtgcttcctgggtacaagtacctcggacccttcaacggactcgacaagggagagccggtcaacgaggcagacgccgcggccctcgagcacgacaaggcctacgaccagcagctcaaagcgggtgacaatccgtacctgcggtataaccacgccgacgccgagtttcaggagcgtctgcaagaagatacgtcttttgggggcaacctcgggcgagcagtcttccaggccaagaagcgggttctcgaacctctcggtctggttgaggaaggcgctaagacggctcctggaaagaaacgtccggtagagcagtcgccacaagagccagactcctcctcgggcatcggcaagacaggccagcagcccgctaaaaagagactcaattttggtcagactggcgactcagagtcagtccccgacccacaacctctcggagaacctccagcaacccccgctgctgtgggacctactacaatggcttcaggcggtggcgcaccaatggcagacaataacgaaggcgccgacggagtgggtaatgcctcaggaaattggcattgcgattccacatggctgggcgacagagtcatcaccaccagcacccgaacatgggccttgcccacctataacaaccacctctacaagcaaatctccagtgcttcgacgggggccagcaacgacaaccactacttcggctacagcaccccctgggggtattttgactttaacagattccactgccacttttcaccacgtgactggcagcgactcatcaacaataactggggattccggcccaagagactcagcttcaagctcttcaacatccaggtcaaggaggtcacgacgaatgatggcgtcacaaccatcgctaataaccttaccagcacggttcaagtcttctcggactcggagtaccagcttccgtacgtcctcggctctgcgcaccagggctgcctccctccgttcccggcggacgtgttcatgattccgcaatacggctacctgacgctcaacaatggcagccaagccgtgggacgttcatccttttactgcctggaatatttcccttctcagatgctgagaacgggcaacaactttaccttcagctacacctttgaggaagtgcctttccacagcagctacgcgcacagccagagcctggaccggctgatgaatcctctcatcgatcaatacctgtattacctgaacagaactcaaaatcagtccggaagtgcccaaaacaaggacttgctgtttagccgtgggtctccagctggcatgtctgttcagcccaaaaactggctacctggaccctgttatcggcagcagcgcgtttctaaaacaaaaacagacaacaacaacagcaattttacctggactggtgcttcaaaatataacctcaatgggcgtgaatccatcatcaaccctggcactgctatggcctcacacaaagacgacgaagacaagttctttcccatgagcggtgtcatgatttttggaaaagagagcgccggagcttcaaacactgcattggacaatgtcatgattacggacgaagaggaaattaaagccactaaccctgtggccaccgaaagatttgggaccgtggcagtcaatttccagagcagcagcacagaccctgcgaccggagatgtgcatgctatgggagcattacctggcatggtgtggcaagatagagacgtgtacctgcagggtcccatttgggccaaaattcctcacacagatggacactttcacccgtctcctcttatgggcggctttggactcaagaacccgcctcctcagatcctcatcaaaaacacgcctgttcctgcgaatcctccggcggagttttcagctacaaagtttgcttcattcatcactcaatactccacaggacaagtgagcgtggaaattgaatgggagctgcagaaagaaaacagcaaacgctggaatcccgaagtgcagtatacatctaactatgcaaaatctgccaacgttgatttcactgtggacaacaatggactttatactgagcctcgccccattggcacccgttacctcacccgtcccctgtaa

SEQ ID NO: 576 - protein, 736 aa, Artificial Sequence
  Description of Artificial Sequence: Synthetic polypeptide
MAADGYLPDWLEDTLSEGIRQWWKLKPGPPPPKPAERHKDDSRGLVLPGYKYLGPFNGLDKGEPVNEADAAALEHDKAYDQQLKAGDNPYLRYNHADAEFQERLQEDTSFGGNLGRAVFQAKKRVLEPLGLVEEGAKTAPGKKRPVEQSPQEPDSSSGIGKTGQQPAKKRLNFGQTGDSESVPDPQPLGEPPATPAAVGPTTMASGGGAPMADNNEGADGVGNASGNWHCDSTWLGDRVITTSTRTWALPTYNNHLYKQISSASTGASNDNHYFGYSTPWGYFDFNRFHCHFSPRDWQRLINNNWGFRPKRLSFKLFNIQVKEVTTNDGVTTIANNLTSTVQVFSDSEYQLPYVLGSAHQGCLPPFPADVFMIPQYGYLTLNNGSQAVGRSSFYCLEYFPSQMLRTGNNFTFSYTFEEVPFHSSYAHSQSLDRLMNPLIDQYLYYLNRTQNQSGSAQNKDLLFSRGSPAGMSVQPKNWLPGPCYRQQRVSKTKTDNNNSNFTWTGASKYNLNGRESIINPGTAMASHKDDEDKFFPMSGVMIFGKESAGASNTALDNVMITDEEEIKATNPVATERFGTVAVNFQSSSTDPATGDVHAMGALPGMVWQDRDVYLQGPIWAKIPHTDGHFHPSPLMGGFGLKNPPPQILIKNTPVPANPPAEFSATKFASFITQYSTGQVSVEIEWELQKENSKRWNPEVQYTSNYAKSANVDFTVDNNGLYTEPRPIGTRYLTRPL

SEQ ID NO: 577 - protein, 735 aa, Artificial Sequence
  Description of Artificial Sequence: Synthetic polypeptide
MAADGYLPDWLEDTLSEGIRQWWKLKPGPPPPKPAERHKDDSRGLVLPGYKYLGPFNGLDKGEPVNEADAAALEHDKAYDRQLDSGDNPYLKYNHADAEFQERLKEDTSFGGNLGRAVFQAKKRVLEPLGLVEEPVKTAPGKKRPVEHSPVEPDSSSGTGKAGQQPARKRLNFGQTGDADSVPDPQPLGQPPAAPSGLGTNTMATGSGAPMADNNEGADGVGNSSGNWHCDSTWMGDRVITTSTRTWALPTYNNHLYKQISSQSGASNDNHYFGYSTPWGYFDFNRFHCHFSPRDWQRLINNNWGFRPKRLKFKLFNIQVKEVTQNDGTTTIANNLTSTVQVFTDSEYQLPYVLGSAHQGCLPPFPADVFMVPQYGYLTLNNGSQAVGRSSFYCLEYFPSQMLRTGNNFTFSYTFEDVPFHSSYAHSQSLDRLMNPLIDQYLYYLSRTDTPSGTTTQSRLQFSQAGASDIRNQSRNWLPGPCYRQQRVSKTSADNNNSEYSWTGATKYHLNGRDSLVNPGPAMASHKDDEEKFFPQSGVLIFGKQGSEKTSVDIEKVMITDEEEIRTTNPVATEQYGSVSTNLQRGNRQAATADVNTQGVLPGMVWQDRDVYLQGPIWAKIPHTDGHFHPSPLMGGFGLKHPPPQILIKNTPVPANPSTTFSAAKFASFITQYSTGQVSVEIEWELQKENSKRWNPEVQYTSNYNKSVNVDFTVDTNGVYSEPRPIGTRYLTRNQ

SEQ ID NO: 578 - DNA, 2208 bp, Artificial Sequence
  Description of Artificial Sequence: Synthetic polynucleotide
atggctgccgatggttatcttccagattggctcgaggacactctctctgaaggaataagacagtggtggaagctcaaacctggcccaccaccaccaaagcccgcagagcggcataaggacgacagcaggggtcttgtgcttcctgggtacaagtacctcggacccttcaacggactcgacaagggagagccggtcaacgaggcagacgccgcggccctcgagcacgacaaagcctatgaccggcagctcgacagcggagacaacccgtacctcaagtacaaccacgccgacgcggagtttcaggaacgccttaaagaagatacgtcttttgggggcaacctcggacgagcagtcttccaggcgaaaaagagggttcttgaacctctgggcctggttgaggaacctgttaagacggctccgggaaaaaagaggccggtagagcactctcctgtggagccagactcctcctcgggaaccggaaaggcgggccagcagcctgcaagaaaaagattgaattttggtcagactggagacgcagactcagtacctgacccccagcctctcggacagccaccagcagccccctctggtctgggaactaatacgatggctacaggcagtggcgcaccaatggcagacaataacgagggcgccgacggagtgggtaattcctcgggaaattggcattgcgattccacatggatgggcgacagagtcatcaccaccagcacccgaacctgggccctgcccacctacaacaaccacctctacaaacaaatttccagccaatcaggagcctcgaacgacaatcactactttggctacagcaccccttgggggtattttgacttcaacagattccactgccacttttcaccacgtgactggcaaagactcatcaacaacaactggggattccgacccaagagactcaagttcaagctctttaacattcaagtcaaagaggtcacgcagaatgacggtacgacgacgattgccaataaccttaccagcacggttcaggtgtttactgactcggagtaccagctcccgtacgtcctcggctcggcgcatcaaggatgcctcccgccgttcccagcagacgtcttcatggtgccacagtatggatacctcaccctgaacaacgggagtcaggcagtaggacgctcttcattttactgcctggagtactttccttctcagatgctgcgtaccggtaacaactttaccttcagctacacttttgaggacgttcctttccacagcagctacgctcacagccagagtctggaccgtctcatgaatcctctcatcgaccagtacctgtattacttgagcagaacagacactccaagtggaaccaccacgcagtcaaggcttcagttttctcaggccggagcgagtgacattcggaaccagtctaggaactggcttcctggaccctgttaccgccagcagcgagtatcaaagacatctgcggataacaacaacagtgaatactcgtggactggagctaccaagtaccacctcaatggcagagactctctggtgaatccgggcccggccatggcaagccacaaggacgatgaagaaaagttttttcctcagagcggggttctcatctttgggaagcaaggctcagagaaaacaagtgtggacattgaaaaggtcatgattacagacgaagaggaaatcaggacaaccaatcccgtggctacggagcagtatggttctgtatctaccaacctccagagaggcaacagacaagcagctaccgcagatgtcaacacacaaggcgttcttccaggcatggtctggcaggacagagatgtgtaccttcaggggcccatctgggcaaagattccacacacggacggacattttcacccctctcccctcatgggtggattcggacttaaacaccctcctccacagattctcatcaagaacaccccggtacctgcgaatccttcgaccaccttcagtgcggcaaagtttgcttccttcatcacacagtactccacgggacaggtcagcgtggagatcgagtgggagctgcagaaggaaaacagcaaacgctggaatcccgaagttcagtacacttccaactacaacaagtctgttaatgtggactttactgtggacactaatggcgtgtattcagagcctcgccccattggcaccagatacctgactcgtaatcagtaa

SEQ ID NO: 579 - DNA, 2208 bp, Artificial Sequence
  Description of Artificial Sequence: Synthetic polynucleotide
atggctgccgatggttatcttccagattggctcgaggacactctctctgaaggaataagacagtggtggaagctcaaacctggcccaccaccaccaaagcccgcagagcggcataaggacgacagcaggggtcttgtgcttcctgggtacaagtacctcggacccttcaacggactcgacaagggagagccggtcaacgaggcagacgccgcggccctcgagcacgacaaagcctatgaccggcagctcgacagcggagacaacccgtacctcaagtacaaccacgccgacgcggagtttcaggagcgccttaaagaagatacgtcttttgggggcaacctcggacgagcagtcttccaggcgaaaaagagggttcttgaacctctgggcctggttgaggaacctgttaagacggctccgggaaaaaagaggccggtagagcactctcctgtggagccagactcctcctcgggaaccggaaaggcgggccagcagcctgcaagaaaaagattgaattttggtcagactggagacgcagactcagtacctgatccccagcctctcggacagccaccagcagccccctctggtctgggaactaatacgatggctacaggcagtggcgcaccaatggcagacaataacgagggcgccgacggagtgggtaattcctcgggaaattggcattgcgattccacatggatgggcgacagagtcatcaccaccagcacccgaacctgggccctgcccacctacaacaaccacctctacaaacaaatttccagccaatcaggagcctcgaacgacaatcactactttggctacagcaccccttgggggtattttgacttcaacagattccactgccacttttcaccacgtgactggcaaagactcatcaacaacaactggggattccgacccaagagactcaagttcaagctctttaacattcaagtcaaagaggtcacgcagaatgacggtacgacgacgattgccaataaccttaccagcacggttcaggtgtttactgactcggagtaccagctcccgtatgtcctcggctcggcgcatcaaggatgcctcccgccgttcccagcagacgtcttcatggtgccacagtatggatacctcaccctgaacaacgggagtcaggcagtaggacgctcttcattttactgcctggagtactttccttctcagatgctgcgtaccggtaacaactttaccttcagctacacttttgaggacgttcctttccacagcagctacgctcacagccagagtctggaccgtctcatgaatcctctcatcgaccagtacctgtattacttgagcagaacagacactccaagtggaaccaccacgcagtcaaggcttcagttttctcaggccggagcgagtgacattcgggaccagtctaggaactggcttcctggaccctgttaccgccagcagcgagtatcaaagacatctgcggataacaacaacagtgaatactcgtggactggagctaccaagtaccacctcaatggcagagactctctggtgaatccgggcccggccatggcaagccacaaggacgatgaagaaaagttttttcctcagagcggggttctcatctttgggaagcaaggctcagagaaaacaagtgtggacattgaaaaggtcatgattacagacgaagaggaaatcaggacaaccaatcccgtggctacggagcagtatggttctgtatctaccaacctccagagaggcaacagacaagcagctaccgcagatgtcaacacacaaggcgttcttccaggcatggtctggcaggacagagatgtgtaccttcaggggcccatctgggcaaagattccacacacggacggacattttcacccctctcccctcatgggtggattcggacttaaacaccctcctccacagattctcatcaagaacaccccggtacctgcgaatccttcgaccaccttcagtgcggcaaagtttgcttccttcatcacacagtactccacgggacaggtcagcgtggagatcgagtgggagctgcagaaggaaaacagcaaacgctggaatcccgaagttcagtacacttccaactacaacaagtctgttaatgtggactttactgtggacactaatggcgtgtattcagagcctcgccccattggcaccagatacctgactcgtaatctgtaa

SEQ ID NO: 580 - protein, 735 aa, Artificial Sequence
  Description of Artificial Sequence: Synthetic polypeptide
MAADGYLPDWLEDTLSEGIRQWWKLKPGPPPPKPAERHKDDSRGLVLPGYKYLGPFNGLDKGEPVNEADAAALEHDKAYDRQLDSGDNPYLKYNHADAEFQERLKEDTSFGGNLGRAVFQAKKRVLEPLGLVEEPVKTAPGKKRPVEHSPVEPDSSSGTGKAGQQPARKRLNFGQTGDADSVPDPQPLGQPPAAPSGLGTNTMATGSGAPMADNNEGADGVGNSSGNWHCDSTWMGDRVITTSTRTWALPTYNNHLYKQISSQSGASNDNHYFGYSTPWGYFDFNRFHCHFSPRDWQRLINNNWGFRPKRLKFKLFNIQVKEVTQNDGTTTIANNLTSTVQVFTDSEYQLPYVLGSAHQGCLPPFPADVFMVPQYGYLTLNNGSQAVGRSSFYCLEYFPSQMLRTGNNFTFSYTFEDVPFHSSYAHSQSLDRLMNPLIDQYLYYLSRTDTPSGTTTQSRLQFSQAGASDIRDQSRNWLPGPCYRQQRVSKTSADNNNSEYSWTGATKYHLNGRDSLVNPGPAMASHKDDEEKFFPQSGVLIFGKQGSEKTSVDIEKVMITDEEEIRTTNPVATEQYGSVSTNLQRGNRQAATADVNTQGVLPGMVWQDRDVYLQGPIWAKIPHTDGHFHPSPLMGGFGLKHPPPQILIKNTPVPANPSTTFSAAKFASFITQYSTGQVSVEIEWELQKENSKRWNPEVQYTSNYNKSVNVDFTVDTNGVYSEPRPIGTRYLTRNL

SEQ ID NO: 581 - DNA, 2601 bp, Artificial Sequence
  Description of Artificial Sequence: Synthetic polynucleotide
ccatcgacgtcagacgcggaagcttcgatcaactacgcggacaggtaccaaaacaaatgttctcgtcacgtgggcatgaatctgatgctgtttccctgcagacaatgcgagagactgaatcagaattcaaatatctgcttcactcacggtgtcaaagactgtttagagtgctttcccgtgtcagaatctcaacccgtttctgtcgtcaaaaaggcgtatcagaaactgtgctacattcatcacatcatgggaaaggtgccagacgcttgcactgcttgcgacctggtcaatgtggacttggatgactgtgtttctgaacaataaatgacttaaaccaggtatgactgccgatggttatcttccagattggctcgaggacaaccttagtgaaggaattcgcgagtggtgggctttgaaacctggagcccctcaacccaaggcaaatcaacaacatcaagacaacgctcgaggtcttgtgcttccgggttacaaataccttggacccggcaacggactcgacaagggggagccggtcaacgcagcagacgcggcggccctcgagcacgacaaggcctacgaccagcagctcaaggccggagacaacccgtacctcaagtacaaccacgccgacgccgagttccaggagcggctcaaagaagatacgtcttttgggggcaacctcgggcgagcagtcttccaggccaaaaagaggcttcttgaacctcttggtctggttgaggaagcggctaagacggctcctggaaagaagaggcctgtagagcagtctcctcaggaaccggactcctccgcgggtattggcaaatcgggtgcacagcccgctaaaaagagactcaatttcggtcagactggcgacacagagtcagtcccagaccctcaaccaatcggagaacctcccgcagccccctcaggtgtgggatctcttacaatggcttcaggtggtggcgcaccagtggcagacaataacgaaggtgccgatggagtgggtagttcctcgggaaattggcattgcgattcccaatggctgggggacagagtcatcaccaccagcacccgaacctgggccctgcccacctacaacaatcacctctacaagcaaatctccaacagcacatctggaggatcttcaaatgacaacgcctacttcggctacagcaccccctgggggtattttgacttcaacagattccactgccacttctcaccacgtgactggcagcgactcatcaacaacaactggggattccggcctaagcaactcaacttcaagctcttcaacattcaggtcaaagaggttacggacaacaatggagtcaagaccatcgccaataaccttaccagcacggtccaggtcttcacggactcagactatcagctcccgtacgtgctcgggtcggctcacgagggctgcctcccgccgttcccagcggacgttttcatgattcctcagtacgggtatctgacgcttaatgatggaagccaggccgtgggtcgttcgtccttttactgcctggaatatttcccgtcgcaaatgctaagaacgggtaacaacttccagttcagctacgagtttgagaacgtacctttccatagcagctacgctcacagccaaagcctggaccgactaatgaatccactcatcgaccaatacttgtactatctctcaaagactattaacggttctggacagaatcaacaaacgctaaaattcagtgtggccggacccagcaacatggctgtccagggaagaaactacatacctggacccagctaccgacaacaacgtgtctcaaccactgtgactcaaaacaacaacagcgaatttgcttggcctggagcttcttcttgggctctcaatggacgtaatagcttgatgaatcctggacctgctatggccagccacaaagaaggagaggaccgtttctttcctttgtctggatctttaatttttggcaaacaaggaactggaagagacaacgtggatgcggacaaagtcatgataaccaacgaagaagaaattaaaactactaacccggtagcaacggagtcctatggacaagtggccacaaaccaccagagtgcccaagcacaggcgcagaccggctgggttcaaaaccaaggaatacttccgggtatggtttggcaggacagagatgtgtacctgcaaggacccatttgggccaaaattcctcacacggacggcaactttcacccttctccgctgatgggagggtttggaatgaagcacccgcctcctcagatcctcatcaaaaacacacctgtacctgcggatcctccaacggccttcaacaaggacaagctgaactctttcatcacccagtattctactggccaagtcagcgtggagatcgagtgggagctgcagaaggaaaacagcaagcgctggaacccggagatccagtacacttccaactattacaagtctaataatgttgaatttgctgttaatactgaaggtgtatatagtgaaccccgccccattggcaccagatacctgactcgtaatctgtaattgcttgttaatcaataaaccgtttaattcgtttcagttgaactgcggcc

SEQ ID NO: 582 - DNA, 2601 bp, Artificial Sequence
  Description of Artificial Sequence: Synthetic polynucleotide
ccatcgacgtcagacgcggaagcttcgatcaactacgcggacaggtaccaaaacaaatgttctcgtcacgtgggcatgaatctgatgctgtttccctgcagacaatgcgagagactgaatcagaattcaaatatctgcttcactcacggtgtcaaagactgtttagagtgctttcccgtgtcagaatctcaacccgtttctgtcgtcaaaaaggcgtatcagaaactgtgctacattcatcacatcatgggaaaggtgccagacgcttgcactgcttgcgacctggtcaatgtggacttggatgactgtgtttctgaacaataaatgacttaaaccaggtatggctgccgatggttatcttccagattggctcgaggacaaccttagtgaaggaattcgcgagtggtgggctttgaaacctggagcccctcaacccaaggcaaatcaacaacatcaagacaacgctcgaggtcttgtgcttccgggttacaaataccttggacccggcaacggactcgacaagggggagccggtcaacgcagcagacgcggcggccctcgagcacgacaaggcctacgaccagcagctcaaggccggagacaacccgtacctcaagtacaaccacgccgacgccgagttccaggagcggctcaaagaagatacgtcttttgggggcaacctcgggcgagcagtcttccaggccaaaaagaggcttcttgaacctcttggtctggttgaggaagcggctaagacggctcctggaaagaagaggcctgtagagcagtctcctcaggaaccggactcctccgcgggtattggcaaatcgggtgcacagcccgctaaaaagagactcaatttcggtcagactggcgacacagagtcagtcccagaccctcaaccaatcggagaacctcccgcagccccctcaggtgtgggatctcttacaatggcttcaggtggtggcgcaccagtggcagacaataacgaaggtgccgatggagtgggtagttcctcgggaaattggcattgcgattcccaatggctgggggacagagtcatcaccaccagcacccgaacctgggccctgcccacctacaacaatcacctctacaagcaaatctccaacagcacatctggaggatcttcaaatgacaacgcctacttcggctacagcaccccctgggggtattttgacttcaacagattccactgccacttctcaccacgtgactggcagcgactcatcaacaacaactggggattccggcctaagcgactcaacttcaagctcttcaacattcaggtcaaagaggttacggacaacaatggagtcaagaccatcgccaataaccttaccagcacggtccaggtcttcacggactcagactatcagctcccgtacgtgctcgggtcggctcacgagggctgcctcccgccgttcccagcggacgttttcatgattcctcagtacgggtatctgacgcttaatgatggaagccaggccgtgggtcgttcgtccttttactgcctggaatatttcccgtcgcaaatgctaagaacgggtaacaacttccagttcagctacgagtttgagaacgtacctttccatagcagctacgctcacagccaaagcctggaccgactaatgaatccactcatcgaccaatacttgtactatctctcaaagactattaacggttctggacagaatcaacaaacgctaaaattcagtgtggccggacccagcaacatggctgtccagggaagaaactacatacctggacccagctaccgacaacaacgtgtctcaaccactgtgactcaaaacaacaacagcgaatttgcttggcctggggcttcttcttgggctctcaatggacgtaatagcttgatgaatcctggacctgctatggccagccacaaagaaggagaggaccgtttctttcctttgtctggatctttaatttttggcaaacaaggaactggaagagacaacgtggatgcggacaaagtcatgataaccaacgaagaagaaattaaaactactaacccggtagcaacggagtcctatggacaagtggccacaaaccaccagagtgcccaagcacaggcgcagaccggctgggttcaaaaccaaggaatacttccgggtatggtttggcaggacagagatgtgtacctgcaaggacccatttgggccaaaattcctcacacgggcggcaactttcacccttctccgctgatgggagggtttggaatgaagcacccgcctcctcagatcctcatcaaaaacacacctgtacctgcggatcctccaacggccttcaacaaggacaagctgaactctttcatcacccagtattctactggccaagtcagcgtggagatcgagtgggagctgcagaaggaaaacagcaagcgctggaacccggagatccagtacacttccaactattacaagtctaataatgttgaatttgctgttaatactggaggtgtatatagtgaaccccgccccattggcaccagatacctgactcgtaatctgtaattgcttgttaatcaataaaccgtttaattcgtttcagttgaactgcggcc

SEQ ID NO: 583 - DNA, 2601 bp, Artificial Sequence
  Description of Artificial Sequence: Synthetic polynucleotide
ccatcgacgtcagacgcggaagcttcgatcaactacgcggacaggtaccaaaacaaatgttctcgtcacgtgggcatgaatctgatgctgtttccctgcagacaatgcgagagactgaatcagaattcaaatatctgcttcactcacggtgtcaaagactgtttagagtgctttcccgtgtcagaatctcaacccgtttctgtcgtcaaaaaggcgtatcagaaactgtgctacattcatcacatcatgggaaaggtgccagacgcttgcactgcttgcgacctggtcaatgtggactcggatgactgtgtttctgaacaataaatgacttaaaccaggtatggctgccgatggttatcttccagattggctcgaggacaaccttagtgaaggaattcgcgagtggtgggctttgaaacctggagcccctcaacccaaggcaaatcaacaacatcaagacaacgctcgaggtcttgtgcttccgggttacaaataccttggacccggcaacggactcgacaagggggagccggtcaacgcagcagacgcggcggccctcgagcacgacaaggcctacgaccagcagctcaaggccggagacaacccgtacctcaagtacaaccacgccgacgccgagttccaggagcggctcaaagaagatacgtcttttgggggcaacctcgggcgagcagtcttccaggccaaaaagaggcttcttgaacctcttggtctggttgaggaagcggctaagacggctcctggaaagaagaggcctgtagagcagtctcctcaggaaccggactcctccgcgggtattgacaaatcgggtgcacagcccgctaaaaagagactcaatttcggtcagactggcgacacagagtcagtcccagaccctcaaccaatcggagaacctcccgcagccccctcaggtgtgggatctcttacaatggcttcaggtggtggcgcaccagtggcagacaataacgaaggtgccgatggagtgggtagttcctcgggaaattggcattgcgattcccaatggctgggggacagagtcatcaccaccagcacccgaacctgggccctgcccacctacaacaatcacctctacaagcaaatctccaacagcacatctggaggatcttcaaatgacaacgcctacttcggctacagcaccccctgggggtattttgacttcaacagattccactgccacttctcaccacgtgactggcagcgactcatcaacaacaactggggattccggcctaagcgactcaacttcaagctcttcaacattcaggtcaaagaggttacggacaacaatggagtcaagaccatcgccaataaccttaccagcacggtccaggtcttcacggactcggactatcagctcccgtacgtgctcgggtcggctcacgagggctgcctcccgccgttcccagcggacgttttcatgattcctcagtacgggtatctgacgcttaatgatggaagccaggccgtgggtcgttcgtccttttactgcctggaatatttcccgtcgcaaatgctaagaacgggtaacaacttccagttcagctacgagtttgagaacgtacctttccatagcagctacgctcacagccaaagcctggaccgactaatgaatccactcatcgaccaatacttgtactatctctcaaagactattaacggttctggacagaatcaacaaacgctaaaattcagtgtggccggacccagcaacatggctgtccagggaagaaactacatacctggacccagctaccgacaacaacgtgtctcaaccactgtgactcaaaacaacaacagcgaatttgcttggcctggagcttcttcttgggctctcaatggacgtaatagcttgatgaatcctggacctgctatggccagccacaaagaaggagaggaccgtttctttcctttgtctggatctttaatttttggcaaacaaggaactggaagagacaacgtggatgcggacaaagtcatgataaccaacgaagaagaaattaaaactactaacccggtagcaacggagtcctatggacaagtggccacaaaccaccagagtgcccaagcacaggcgcagaccggctgggttcaaaaccaaggaatacttccgggtatggtttggcaggacagagatgtgtacctgcaaggacccatttgggccaaaattcctcacacggacggcaactttcacccttctccgctgatgggagggtttggaatgaagcacccgcctcctcagatcctcatcaaaaacacacctgtacctgcggatcctccaacggccttcaacaaggacaagctgaactctttcatcacccagtattctactggccaagtcagcgtggagatcgagtgggagctgcagaaggaaaacagcaagcgctggaacccggagatccagtacacttccaactattacaagtctaataatgttgaatttgctgttaatactgaaggtgtatatagtgaaccccgccccattggcaccagatacctgactcgtaatctgtaattgcttgttaatcaataaaccgtttaattcgtttcagttgaactgcggcc

SEQ ID NO: 584 - DNA, 2601 bp, Artificial Sequence
  Description of Artificial Sequence: Synthetic polynucleotide
ccatcgacgtcagacgcggaagcttcgatcaactacgcggacaggtaccaaaacaaatgttctcgtcacgtgggcatgaatctgatgctgtttccctgcagacaatgcgagagactgaatcagaattcaaatatctgcttcactcacggtgtcaaagactgtttagagtgctttcccgtgtcagaatctcaacccgtttctgtcgtcaaaaaggcgtatcagaaactgtgctacattcatcacatcatgggaaaggtgccagacgcttgcactgcttgcgacctggtcaatgtggacttggatgactgtgtttctgaacaataaatgacttaaaccaggtatggctgccgatggttatcttccagattggctcgaggacaaccttagtgaaggaattcgcgagtggtgggctttgaaacctggagcccctcaacccaaggcaaatcaacaacatcaagacaacgctcgaggtcttgtgcttccgggttacaaataccttggacccggcaacggactcgacaagggggagccggtcaacgcagcagacgcggcggccctcgagcacgacaaggcctacgaccagcagctcaaggccggagacaacccgtacctcaagtacaaccacgccgacgccgagttccaggagcggctcaaagaagatacgtcttttgggggcaacctcgggcgagcagtcctccaggccaaaaagaggcttcttgaacctcttggtctggttgaggaagcggctaagacggctcctggaaagaagaggcctgtagagcagtctcctcaggaaccggactcctccgcgggtattggcaaatcgggtgcacagcccgctaaaaagagactcaatttcggtcagactggcgacacagagtcagtcccagaccctcaaccaatcggagaacctcccgcagccccctcaggtgtgggatctcttacaatggcttcaggtggtggcgcaccagtggcagacaataacgaaggtgccgatggagtgggtagttcctcgggaaattggcattgcgattcccaatggctgggggacagagtcatcaccaccagcacccgaacctgggccctgcccacctacaacaatcacctctacaagcaaatctccaacagcacatctggaggatcttcaaatgacaacgcctacttcggctacagcaccccctgggggtattttgacttcaacagattccactgccacttctcaccacgtgactggcagcgactcatcaacaacaactggggattccggcctaagcgactcaacttcaagctcttcaacattcaggtcaaagaggttacggacaacaatggagtcaagaccatcgccaataaccttaccagcacggtccaggtcttcacggactcagactatcagctcccgtacgtgctcgggtcggctcacgagggctgcctcccgccgttcccagcggacgttttcatgattcctcagtacgggtatctgacgcttaatgatggaagccaggccgtgggtcgttcgtccttttactgcctggaatatttcccgtcgcaaatgctaagaacgggtaacaacttccagttcagctacgagtttgagaacgtacctttccatagcagctacgctcacagccaaagcctggaccgactaatgaatccactcatcgaccaatacttgtactatctctcaaagactattaacggttctggacagaatcaacaaacgctaaaattcagtgtggccggatccagcaacatggctgtccagggaagaaactacatacctggacccagctaccgacaacaacgtgtctcaaccactgtgactcaaaacaacaacagcgaatttgcttggcctggagcttcttcttgggctctcaatggacgtaatagcttgatgaatcctggacctgctatggccagccacaaagaaggagaggaccgtttctttcctttgtctggatctttaatttttggcaaacaaggaactggaagagacaacgtggatgcggacaaagtcatgataaccaacgaagaagaaattaaaactactaacccggtagcaacggagtcctatggacaagtggccacaaaccaccagagtgcccaagcacaggcgcagaccggctgggttcaaaaccaaggaatacttccaggtatggtttggcaggacagagatgtgtacctgcaaggacccatttgggccaaaattcctcacacggacggcaactttcacccttctccgctgatgggagggtttggaatgaagcacccgcctcctcagatcctcatcaaaaacacacctgtacctgcggatcctccaacggccttcaacaaggacaagctgaactctttcatcacccagtattctactggccaagtcagcgtggagatcgagtgggagctgcagaaggaaaacagcaagcgctggaacccggagatccagtacacttccaactattacaagtctaataatgttgaatttgctgttaatactgaaggtgtatatagtgaaccccgccccattggcaccagatacctgactcgtaatctgtaattgcttgttaatcaataaaccgtttaattcgtttcagttgaactgcggcc

SEQ ID NO: 585 - DNA, 2601 bp, Artificial Sequence
  Description of Artificial Sequence: Synthetic polynucleotide
ccatcgacgtcagacgcggaagcttcgatcaactacgcggacaggtaccaaaacaaatgttctcgtcacgtgggcatgaatctgatgctgtttccctgcagacaatgcgagagactgaatcagaattcaaatatctgcttcactcacggtgtcaaagactgtttagagtgctttcccgtgtcagaatctcaacccgtttctgtcgtcaaaaaggcgtatcagaaactgtgctacattcatcacatcatgggaaaggtgccagacgcttgcactgcttgcgacctggtcaatgtggacttggatgactgtgtttctgaacaataaatgacttaaaccaggtatggctgccgatggttatcttccagattggctcgaggacaaccttagtgaaggaattcgcgagtggtgggctttgaaacctggagcccctcaacccaaggcaaatcaacaacatcaagacaacgctcgaggtcttgtgcttccgggttacaaataccttggacccggcaacggactcgacaagggggagccggtcaacgcagcagacgcggcggccctcgagcacgacagggcctacgaccagcagctcaaggccggagacaacccgtacctcaagtacaaccacgccgacgccgagttccaggagcggctcaaagaagatacgtcttttgggggcaacctcgggcgagcagtcttccaggccaaaaagaggcttcttgaacctcttggtctggttgaggaagcggctaagacggctcctggaaagaagaggcctgtagagcagtctcctcaggaaccggactcctccgcgggtattggcaaatcgggtgcacagcccgctaaaaagagactcaatttcggtcagactggcgacacagagtcagtcccagaccctcaaccaatcggagaacctcccgcagccccctcaggtgtgggatctcttacaatggcttcaggtggtggcgcaccagtggcagacaataacgaaggtgccgatggagtgggtagttcctcgggaaattggcattgcgattcccaatggctgggggacagagtcatcaccaccagcacccgaacctgggccctgcccacctacaacaatcacctctacaagcaaatctccaacagcacatctggaggatcttcaaatgacaacgcctacttcggctacagcaccccctgggggtattttgacttcaacagattccactgccacttctcaccacgtgactggcagcgactcatcaacaacaactggggattccggcctaagcgactcaacttcaagctcttcaacattcaggtcaaagaggttacggacaacaatggagtcaagaccatcgccaataaccttaccagcacggtccaggtcttcacggactcagactatcagctcccgtacgtgctcgggtcggctcacgagggctgcctcccgccgttcccagcggacgttttcatgattcctcagtacgggtatctgacgcttaatgatggaagccaggccgtgggtcgttcgtccttttactgcctggaatatttcccgtcgcaaatgctaagaacgggtaacaacttccagttcagctacgagtttgagaacgtacctttccatagcagctacgctcacagccaaagcctggaccgactaatgaatccactcatcgaccaatacttgtactatctctcaaagactattaacggttctggacagaatcaacaaacgctaaaattcagtgtggccggacctagcaacatggctgtccagggaagaaactacatacctggacccagctaccgacaacaacgtgtctcaaccactgtgactcaaaacaacaacagcgaatttgcttggcctggagcttcttcttgggctctcaatggacgtaatagcttgatgaatcctggacctgctatggccagccacaaagaaggagaggaccgtttctttcctttgtctggatctttaatttttggcaaacaaggaactggaagagacaacgtggatgcggacaaagtcatgataaccaacgaagaagaaattaaaactactaacccggtagcaacggagtcctatggacaagtggccacaaaccaccagagtgcccaagcacaggcgcagaccggctgggttcaaaaccaaggaatacttccgggtatggtttggcaggacagagatgtgtacctgcaaggacccatttgggccaaaattcctcacacggacggcaactttcacccttctccgctgatgggagggtttggaatgaagcacccgcctcctcagatcctcatcaaaaacacacctgtacctgcggatcctccaacggccttcaacaaggacaagctgaactctttcatcacccagtattctactggccaagtcagcgtggagatcgagtgggagctgcagaagaaaaacagcaagcgctggaacccggagatccagtacacttccaactattacaagtctaataatgttgaatttgctgttaacactgaaggtgtatatagtgaaccccgccccattggcaccagatacctgactcgtaatctgtaattgcttgttaatcaataaaccgtttaattcgtttcagttgaactgcggcc

SEQ ID NO: 586 - DNA, 2601 bp, Artificial Sequence
  Description of Artificial Sequence: Synthetic polynucleotide
ccatcgacgtcagacgcggaagcttcgatcaactacgcggacaggtaccaaaacaaatgttctcgtcacgtgggcatgaatctgatgctgtttccctgcagacaatgcgagagactgaatcagaattcaaatatctgcttcactcacggtgtcaaagactgtttagagtgctttcccgtgtcagaatctcaacccgtttctgtcgtcaaaaaggcgtatcagaaactgtgctacattcatcacatcatgggaaaggtgccagacgcttgcactgcttgcgacctggtcaatgtggacttggatgactgtgtttctgaacaataaatgacttaaaccaggtatggctgccgatggttatcttccagattggctcgaggacaaccttagtgaaggaattcgcgagtggtgggctttgaaacctggagcccctcaacccaaggcaaatcaacaacatcaagacaacgctcgaggtcttgtgcttccgggttacaaataccttggacccggcaacggactcgacaagggggagccggtcaacgcagcagacgcggcggccctcgagcacgacaaggcctacgaccagcagctcaaggccggagacaacccgtacctcaagtacaaccacgccgacgccgagttccaggagcggctcaaagaagatacgtcttttgggggcaacctcgggcgagcagtcttccaggccaaaaagaggcttcttgaacctcttggtctggttgaggaagcggctaagacggctcctggaaagaagaggcctgtagagcagtctcctcaggaaccggactcctccgcgggtattggcaaatcgggtgcacagcccgctaaaaagagactcaatttcggtcagactggcgacacagagtcagtcccagaccctcaaccaatcggagaacctcccgcagccccctcaggtgtgggatctcttacaatggcttcaggtggtggcgcaccagtggcagacaataacgaaggtgccgatggagtgggtagttcctcgggaaattggcattgcgattcccaatggctgggggacagagtcatcaccaccagcacccgaacctgggccctgcccacctacaacaatcacctctacaagcaaatctccaacagcacatctggaggatcttcaaatgacaacgcctacttcggctacagcaccccctgggggtattttgacttcaacagattccactgccacttctcaccacgtgactggcagcgactcatcaacaacaactggggattccggcctaagcgactcaacttcaagctcttcaacattcaggtcaaagaggttacggacaacaatggagtcaagaccatcgccaataaccttaccagcacggtccaggtcttcacggactcagactatcagctcccgtacgtgctcgggtcggctcacgagggctgcctcccgccgttcccagcggacgttttcatgattcctcagtacgggtatctgacgcttaatgatggaagccaggccgtgggtcgttcgtccttttactgcctggaatatttcccgtcgcaaatgctaagaacgggtaacaacttccagttcagctacgagtttgagaacgtacctttccatagcagctacgctcacagccaaagcctggaccgactaatgaatccactcatcgaccaatacttgtactatctctcaaagactattaacggttctggacagaatcaacaaacgctaaaattcagtgtggccggacccagcaacatggctgtccagggaagaaactacatacctggacccagctaccgacaacaacgtgtctcaaccactgtgactcaaaacaacaacagcgaatttgcttggcctggagcttcttcttgggctctcaatggacgtaatagcttgatgaatcctggacctgctatggccagccacaaagaaggagaggaccgtttctttcctttgtctggatctttaatttttggcaaacaaggaactggaagagacaacgtggatgcggacaaagtcatgataaccaacgaagaagaaattaaaactactaacccggtagcaacggagtcctatggacaagtggccacaaaccaccagagtgcccaagcacgggcgcagaccggctgggttcaaaaccaaggaatacttccgggtatggtttggcaggacagagatgtgtacctgcaaggacccatttgggccaaaattcctcacacggacggcaactttcacccttctccgctgatgggagggtttggaatgaagcacccgcctcctcagatcctcatcaaaaacacacctgtacctgcggatcctccaacggccttcaacaaggacaagctgaactctttcatcacccagtattctactggccaagtcagcgtggagatcgagtgggagctgcagaaggaaaacagcaagcgctggaacccggagatccagtacacttccaactattacaagtctaataatgttgaatttgctgttaatactgaaggtgtatatagtgaaccccgccccattggcaccagatacctgactcgtaatctgtaattgcttgttaatcaataaaccgtttaattcgtttcagttgaactgcggcc

SEQ ID NO: 587 - DNA, 2601 bp, Artificial Sequence
  Description of Artificial Sequence: Synthetic polynucleotide
ccatcgacgtcagacgcggaagcttcgatcaactacgcggacaggtaccaaaacaaatgttctcgtcacgtgggcatgaatctgatgctgtttccctgcagacaatgcgagagactgaatcagaattcaaatatctgcttcactcacggtgtcaaagactgtttagagtgctttcccgtgtcagaatctcaacccgtttctgtcgtcaaaaaggcgtatcagaaactgtgctacattcatcacatcatgggaaaggtgccagacgcttgcactgcttgcgacctggtcaatgtggacttggatgactgtgtttctgaacaataaatgacttaaaccaggtatggctgccgatggttatcttccagattggctcgaggacaaccttagtgaaggaattcgcgagtggtgggctttgaaacctggagcccctcaacccaaggcaaatcaacaacatcaagacaacgctcgaggtcttgtgcttccgggttacaaataccttggacccggcaacggactcgacaagggggagccggtcaacgcagtagacgcggcggccctcgagcacgacaaggcctacgaccagcagctcaaggccggagacaacccgtacctcaagtacaaccacgccgacgccgagttccaggagcggctcaaagaagatacgtcttttgggggcaacctcgggcgagcagtcttccaggccaaaaagaggcttcttgaacctcttggtctggttgaggaagcggctaagacggctcctggaaagaagaggcctgtagagcagtctcctcaggaaccggactcctccgcgggtattggcaaatcgggtgcacagcccgctaaaaagagactcaatttcggtcagactggcgacacagagtcagtcccagaccctcaaccaatcggagaacctcccgcagccccctcaggtgtgggatctcttacaatggcttcaggtggtggcgcaccagtggcagacaataacgaaggtgccgatggagtgggtagttcctcgggaaattggcattgcgattcccaatggctgggggacagagtcatcaccaccagcacccgaacctgggccctgcccacctacaacaatcacctctacaagcaaatctccaacagcacatctggaggatcttcaaatgacaacgcctacttcggctacagcaccccctgggggtattttgacttcaacagattccactgccacttctcaccacgtgactggcagcgactcatcaacaacaactggggatttcggcctaagcgactcaacttcaagctcttcaacattcaggtcaaagaggttacggacaacaatggagtcaagaccatcgccaataaccttaccagcacggtccaggtcttcacggactcagactatcagctcccgtacgtgctcgggtcggctcacgagggctgcctcccgccgttcccagcggacgttttcatgattcctcagtacgggtatctgacgcttaatgatggaagccaggccgtgggtcgttcgtccttttactgcctggaatatttcccgtcgcaaatgctaagaacgggtaacaacttccagttcagctacgagtttgagaacgtacctttccatagcagctacgctcacagccaaagcctggaccgactaatgaatccactcatcgaccaatacttgtactatctctcaaagactattaacggttctggacagaatcaacaaacgctaaaattcagtgtggccggacccagcaacatggctgtccagggaagaaactacatacctggacccagctaccgacaacaacgtgtctcaaccactgtgactcaaaacaacaacagcgaatttgcttggcctggagcttcttcttgggctctcaatggacgtaatagcttgatgaatcctggacctgctatggccagccacaaagaaggagaggaccgtttctttcctttgtctggatctttaatttttggcaaacaaggaactggaagagacaacgtggatgcggacaaagtcatgataaccaacgaagaagaaattaaaactactaacccggtagcaacggagtcctatggacaagtggccacaaaccaccagagtgcccaagcacaggcgcagaccggctgggttcaaaaccaaggaatacttccgggtatggtttggcaggacagagatgtgtacctgcaaggacccatttgggccaaaattcctcacacggacggcaactttcacccttctccgctgatgggagggtttggaatgaagcacccgcctcctcagatcctcatcaaaaacacacctgtacctgcggatcctccaacggccttcaacaaggacaagctgaactctttcatcacccagtattctactggccaagtcagcgtggagatcgagtgggagctgcagaaggaaaacagcaagcgctggaacccggagatccagtacacttccaactattacaagtctaataatgttgaatttgctgttaatactgaaggtgtatatagtgaaccccgccccattggcaccagatacctgactcgtaatctgtaattgcttgttaatcaataaaccgtttaattcgtttcagttgaactgcggcc

SEQ ID NO: 588 - DNA, 2580 bp, Artificial Sequence
  Description of Artificial Sequence: Synthetic polynucleotide
ccatcgacgtcagacgcggaagcttcgatcaactacgcggacaggtaccaaaacaaatgttctcgtcacgtgggcatgaatctgatgctgtttccctgcagacaatgcgagagactgaatcagaattcaaatatctgcttcactcacggtgtcaaagactgtttagagtgctttcccgtgtcagaatctcaacccgtttctgtcgtcaaaaaggcgtatcagaaactgtgctacattcatcacatcatgggaaaggtgccagacgcttgcactgcttgcgacctggtcaatgtggacttggatgactgtgtttctgaacaataaatgacttaaaccaggtatggctgccgatggttatcttccagattggctcgaggacaaccttagtgaaggaattcgcgagtggtgggctttgaaacctggagcccctcaacccaaggcaaatcaacaacatcaagacaacgctcgaggtcttgtgcttccgggttacaaataccttggacccggcaacggactcgacaagggggagccggtcaacgcagcagacgcggcggccctcgagcacgacaaggcctacgaccagcagctcaaggccggagacaacccgtacctcaagtacaaccacgccgacgccgagttccaggagcggctcaaagaagatacgtcttttgggggcaacctcgggcgagcagtcttccaggccaaaaagaggcttcttgaacctcttggtctggttgaggaagcggctaagacggctcctggaaagaagaggcctgtagagcagtctcctcgggaaccggactcctccgcgggtattggcaaatcgggtgcacagcccgctaaaaagagactcaatttcggtcagactggcgacacagagtcagtcccagaccctcaaccaatcggagaacctcccgcagccccctcaggtgtgggatctcttacaatggcttcaggtggtggcgcaccagtggcagacaataacgaaggtgccgatggagtgggtagttcctcgggaaattggcattgcgattcccaatggctgggggacagagtcatcaccaccagcacccgaacctgggccctgcccacctacaacaatcacctctacaagcaaatctccaacagcacatctggaggatcttcaaatgacaacgcctacttcggctacagcaccccctgggggtattttgacttcaacagattccactgccacttctcaccacgtgactggcagcgactcatcaacaacaactggggattccggcctaagcgactcaacttcaagctcttcaacattcaggtcaaagaggttacggacaacaatggagtcaagaccatcgccaataaccttaccagcacggtccaggtcttcacggactcagactatcagctcccgtacgtgctcgggtcggctcacgagggctgcctcccgccgttcccagcggacgttttcatgattcctcagtacgggtatctgacgcttaatgatggaagccaggccgtgggtcgttcgtccttttactgcctggaatatttcccgtcgcaaatgctaagaacgggtaacaacttccagttcagctacgagtttgagaacgtacctttccatagcagctacgctcacagccaaagcctggaccgactaatgaatccactcatcgaccaatacttgtactatctctcaaagactattaacggttctggacagaatcaacaaacgctaaaattcagtgtggccggacccagcaacatggctgtccagggaagaaactacatacctggacccagctaccgacaacaacgtgtctcaaccactgtgactcaaaacaacaacagcgaatttgcttggcctggagcttcttcttgggctctcaatggacgtaatagcttgatgaatcctggacctgctatggccagccacaaagaaggagaggaccgtttctttcctttgtctggatctttaatttttggcaaacaaggaactggaagagacaacgtggatgcggacaaagtcatgataaccaacgaagaagaaattaaaactactaacccggtagcaacggagtcctatggacaagtggccacaaaccaccagagtgcccaagcacaggcgcagaccggctgggttcaaaaccaaggaatacttccgggtatggtttggcaggacagagatgtgtacctgcaaggacccatttgggccaaaattcctcacacggacggcaactttcacccttctccgctgatgggagggtttggaatgaagcacccgcctcctcagatcctcatcaaaaacacacctgtacctgcggatcctccaacggccttcaacaaggacaagctgaactctttcatcacccagtattctactggccaagtcagcgtggagatcgagtgggaactgcagaaggaaaacagcaagcgctggaacccggagatccagtacacttccaactattacaagtctaataatgttgaatttgctgttaatactgaaggtgtatatagtgaaccccgccccattggcaccagatacctgactcgtaatctgtaattgcttgttaatcaataaaccgtttaatt

SEQ ID NO: 589 - DNA, 2601 bp, Artificial Sequence
  Description of Artificial Sequence: Synthetic polynucleotide
ccatcgacgtcagacgcggaagcttcgatcaactacgcggacaggtaccaaaacaaatgttctcgtcacgtgggcatgaatctgatgctgtttccctgcagacaatgcgagagactgaatcagaattcaaatatctgcttcactcacggtgtcaaagactgtttagagtgctttcccgtgtcagaatctcaacccgtttctgtcgtcaaaaaggcgtatcagaaactgtgctacattcatcacatcatgggaaaggtgccagacgcttgcactgcttgcgacctggtcaatgtggacttggatgactgtgtttctgaacaataaatgacttaaaccaggtatggctgccgatggttatcttccagattggctcgaggacaaccttagtgaaggaattcgcgagtggtgggctttgaaacctggagcccctcaacccaaggcaaatcaacaacatcaagacaacgctcgaggtcttgtgcttccgggttacaaataccttggacccggcaacggactcgacaagggggagccggtcaacgcagcagacgcggcggccctcgagcacgacaaggcctacgaccagcagctcaaggccggagacaacccgtacctcaagtacaaccacgccgacgccgagttccaggagcggctcaaagaagatacgtcttttgggggcaacctcgggcgagcagtctttcaggccaaaaagaggcttcttgaacctcttggtctggttgaggaagcggctaagacggctcctggaaagaagaggcctgtagagcagtctcctcaggaaccggactcctccgcgggtattggcaaatcgggtgcacagcccgctaaaaagagactcaatttcggtcagactggcgacacagagtcagtcccagaccctcaaccaatcggagaacctcccgcagccccctcaggtgtgggatctcttacaatggcttcatgtggtggcgcaccagtggcagacaataacgaaggtgccgatggagtgggtagttcctcgggaaattggcattgcgattcccaatggctgggggacagagtcatcaccaccagcacccgaacctgggccctgcccacctacaacaatcacctctacaagcaaatctccaacagcacatctggaggatcttcaaatgacaacgcctacttcggctacagcaccccctgggggtattttgacttcaacagattccactgccacttctcaccacgtgactggcagcgactcatcaacaacaactggggattccggcctaagcgactcaacttcaagctcttcaacattcaggtcaaagaggttacggacaacaatggagtcaagaccatcgccaataaccttaccagcacggtccaggtcttcacggactcagactatcagctcccgtacgtgctcgggtcggctcacgagggctgcctcccgccgttcccagcggacgttttcatgattcctcagtacgggtatctgacgcttaatgatggaagccaggccgtgggtcgttcgtccttttactgcctggaatatttcccgtcgcaaatgctaagaacgggtaacaacttccagttcagctacgagtttgagaacgtacctttccatagcagctacgctcacagccaaagcctggaccgactaatgaatccactcatcgaccaatacttgtactatctctcaaagactattaacggttctggacagaatcaacaaacgctaaaattcagtgtggccggacccagcaacatggctgtccagggaagaaactacatacctggacccagctaccgacaacaacgtgtctcaaccactgtgactcaaaacaacaacagcgaatttgcttggcctggagcttcttcttgggctctcaatggacgtaatagcttgatgaatcctggacctgctatggccagccacaaagaaggagaggaccgtttctttcctttgtctggatctttaatttttggcaaacaaggaactggaagagacaacgtggatgcggacaaagtcatgataaccaacgaagaagaaattaaaactactaacccggtagcaacggagtcctatggacaagtggccacaaaccaccagagtgcccaagcacaggcgcagaccggctgggttcaaaaccaaggaatacttccgggtatggtttggcaggacagagatgtgtacctgcaaggacccatttgggccaaaattcctcacacggacggcaactttcacccttctccgctgatgggagggtttggaatgaagcacccgcctcctcagatcctcatcaaaaacacacctgtacctgcggatcctccaacggccttcaacaaggacaagctgaactctttcatcacccagtattctactggccaagtcagcgtggagatcgagtgggagctgcagaaggaaaacagcaagcgctggaacccggagatccagtacacttccaactattacaagtctaataatgttgaatttgctgttaatactgaaggtgtatatagtgaaccccgccccattggcaccagatacctgactcgtaatctgtaattgcttgttaatcaataaaccgtttaattcgtttcagttgaactgcggcc

SEQ ID NO: 590 - DNA, 2601 bp, Artificial Sequence
  Description of Artificial Sequence: Synthetic polynucleotide
ccatcgacgtcagacgcggaagcttcgatcaactacgcggacaggtaccaaaacaaatgttctcgtcacgtgggcatgaatctgatgctgtttccctgcagacaatgcgagagactgaatcagaattcaaatatctgcttcactcacggtgtcaaagactgtttagagtgctttcccgtgtcagaatctcaacccgtttctgtcgtcaaaaaggcgtatcagaaactgtgctacattcatcacatcatgggaaaggtgccagacgcttgcactgcttgcgacctggtcaatgtggacttggatgactgtgtttctgaacaataaatgacttaaaccaggtatggctgccgatggttatcttccagattggctcgaggacaaccttagtgaaggaattcgcgagtggtgggctttgaaacctggagcccctcaacccaaggcaaatcaacaacatcaagacaacgctcgaggtcttgtgcttccgggttacaaataccttggacccggcaacggactcgacaagggggagccgatcaacgcagcagacgcggcggccctcgagcacgacaaggcctacgaccagcagctcaaggccggagacaacccgtacctcaagtacaaccacgccgacgccgagttccaggagcggctcaaagaagatacgtcttttgggggcaacctcgggcgagcagtcttccaggccaaaaagaggcttcttgaacctcttggtctggttgaggaagcggctaagacggctcctggaaagaagaggcctgtagagcagtctcctcaggaaccggactcctccgcgggtattggcaaatcgggtgcacagcccgctaaaaagagactcaatttcggtcagactggcgacacagagtcagtcccagaccctcaaccaatcggagaacctcccgcagccccctcaggtgtgggatctcttacaatggcttcaggtggtggcgcaccagtggcagacaataacgaaggtgccgatggagtgggtagttcctcgggaaattggcattgcgattcccaatggctgggggacagagtcatcaccaccagcacccgaacctgggccctgcccacctacaacaatcacctctacaagcaaatctccaacagcacatctggaggatcttcaaatgacaacgcctacttcggctacagcaccccctgggggtattttgacttcaacagattccactgccacttctcaccacgtgactggcagcgactcatcaacaacaactggggattccggcctaagcgactcaacttcaagctcttcaacattcaggtcaaagaggttacggacaacaatggagtcaagaccatcgccaataaccttaccagcacggtccaggtcttcacggactcagactatcagctcccgtacgtgctcgggtcggctcacgagggctgcctcccgccgttcccagcggacgttttcatgattcctcagtacgggtatctgacgcttaatgatggaagccaggccgtgggtcgttcgtccttttactgcctggaatatttcccgtcgcaaatgctaagaacgggtaacaacttccagttcagctacgagtttgagaacgtacctttccatagcagctacgctcacagccaaagcctggaccgactaatgaatccactcatcgaccaatacttgtactatctctcaaagactattaacggttctggacagaatcaacaaacgctaaaattcagtgtggccggacccagcaacatggctgtccagggaagaaactacatacctggacccagctaccgacaacaacgtgtctcaaccactgtgactcaaaacaacaacagcgaatttgcttggcctggagcttcttcttgggctctcaatggacgtaatagcttgatgaatcctggacctgctatggccagccacaaagaaggagaggaccgtttctttcctttgtctggatctttaatttttggcaaacaaggaactggaagagacaacgtggatgcggacaaagtcatgataaccaacgaagaagaaattaaaactactaacccggtagcaacggagtcctatggacaagtggccacaaaccaccagagtgcccaagcacaggcgcagaccggctgggttcaaaaccaaggaatacttccgggtatggtttggcaggacagagatgtgtacctgcaaggacccatttgggccaaaattcctcacacgtacggcaactttcacccttctccgctgatgggagggtttggaatgaagcacccgcctcctcagatcctcatcaaaaacacacctgtacctgcggatcctccaacggccttcaacaaggacaagctgaactctttcatcacccagtattctactggccaagtcagcgtggagatcgagtgggagctgcagaaggaaaacagcaagcgctggaacccggagatccagtacacttccaactattacaagtctaataatgttgaatttgctgttaatactgaaggtgtatatagtgaaccccgccccattggcaccagatacctgactcgtaatctgtaattgcttgttaatcaataaaccgtttaattcgtttcagttgaactgcggcc

SEQ ID NO: 591 - DNA, 2601 bp, Artificial Sequence
  Description of Artificial Sequence: Synthetic polynucleotide
ccatcgacgtcagacgcggaagcttcgatcaactacgcggacaggtaccaaaacaaatgttctcgccacgtgggcatgaatctgatgctgtttccctgcagacaatgcgagagactgaatcagaattcaaatatctgcttcactcacggtgtcaaagactgtttagagtgctttcccgtgtcagaatctcaacccgtttctgtcgtcaaaaaggcgtatcagaaactgtgctacattcatcacatcatgggaaaggtgccagacgcttgcactgcttgcgacctggtcaatgtggacttggatgactgtgtttctgaacaataaatgacttaaaccaggtatggctgccgatggttatcttccagattggctcgaggacaaccttagtgaaggaattcgcgagtggtgggctttgaaacctggagcccctcaacccaaggcaaatcaacaacatcaagacaacgctcgaggtcttgtgcttccgggttacaaataccttggacccggcaacggactcgacaagggggagccggtcaacgcagcagacgcggcggccctcgagcacgacaaggcctacgaccagcagctcaaggccggagacaacccgtacctcaagtacaaccacgccgacgccgagttccaggagcggctcaaagaagatacgtcttttgggggcaacctcgggcgagcagtcttccaggccaaaaagaggcttcttgaacctcttggtctggttgaggaagcggctaagacggctcctggaaagaagaggcctgtagagcagtctcctcaggaaccggactcctccgcgggtattggcaaatcgggtgcacagcccgctaaaaagagactcaatttcggtcagactggcgacacagagtcagtcccagaccctcaaccaatcggagaacctcccgctgccccctcaggtgtgggatctcttacaatggcttcaggtggtggcgcaccagtggcagacaataacgaaggtgccgatggagtgggtagttcctcgggaaattggcattgcgattcccaatggctgggggacagagtcatcaccaccagcacccgaacctgggccctgcccacctacaacaatcacctctacaagcaaatctccaacagcacatctggaggatcttcaaatgacaacgcctacttcggctacagcaccccctgggggtattttgacttcaacagattccactgccacttctcaccacatgactggcagcgactcatcaacaacaactggggattccggcctaagcgactcaacttcaagctcttcaacattcaggtcaaagaggttacggacaacaatggagtcaagaccatcgccaataaccttaccagcacggtccaggtcttcacggactcagactatcagctcccgtacgtgctcgggtcggctcacgagggctgcctcccgccgttcccagcggacgttttcatgattcctcagtacgggtatctgacgcttaatgatggaagccaggccgtgggtcgttcgtccttttactgcctggaatatttcccgtcgcaaatgctaagaacgggtaacaacttccagttcagctacgagtttgagaacgtacctttccatagcagctacgctcacagccaaagcctggaccgactaatgaatccactcatcgaccaatacttgtactatctctcaaagactattaacggttctggacagaatcaacaaacgctaaaattcaatgtggccggacccagcaacatggctgtccagggaagaaactacatacctggacccagctaccgacaacaacgtgtctcaaccactgtgactcaaaacaacaacagcgaatttgcctggcctagagcttcttcttgggctctcaatggacgtaatagcttgatgaatcctggacctgctatggccagccacaaagaaggagaggaccgtttctttcctttgtctggatctttaatttttggcaaacaaggaactggaagagacaacgtggatgcggacaaagtcatgataaccaacgaagaagaaattaaaactactaacccggtagcaacggagtcctatggacaagtggccacaaaccaccagagtgcccaagcacaggcgcagaccggctgggttcaaaaccaaggaatacttccgggtatggtttggcaggacagagatgtgtacctgcaaggacccatttgggccaaaattcctcacacggacggcaactttcacccttctccgctgatgggagggtttggaatgaagcacccgcctcctcagatcctcatcaaaaacacacctgtacctgcggatcctccaacggccttcaacaaggacaagctgaactctttcatcacccagtattctactggccaagtcagcatggagatcgagtgggagctgcagaaggaaaacagcaagcgctggaacccggagatccagtacacttccaactattacaagtctaataatgttgaatttgctgttaatactgaaggtgtatatagtgaaccccgccccattggcaccagatacctgactcgtaatctgtaattgcttgttaatcaataaaccgtttaattcgtttcagttgaactgcggcc

SEQ ID NO: 592 - DNA, 2601 bp, Artificial Sequence
  Description of Artificial Sequence: Synthetic polynucleotide
ccatcgacgtcagacgcggaagcttcgatcaactacgcggacaggtaccaaaacaaatgttctcgtcacgtgggcatgaatctgatgctgtttccctgcagacaatgcgagagactgaatcagaattcaaatatctgcttcactcacggtgtcaaagactgtttagagtgctttcccgtgtcagaatctcaacccgtttctgtcgtcaaaaaggcgtatcagaaactgtgctacattcatcacatcatgggaaaggtgccagacgcttgcactgcttgcgacctggtcaatgtggacttggatgactgtgtttctgaacaataaatgacttaaaccaggtatggctgccgatggttatcttccagattggctcgaggacaaccttagtgaaggaattcgcgagtggtgggctttgaaacctggagcccctcaacccaaggcaaatcaacaacatcaagacaacgctcgaggtcttgtgcttccgggttacaaataccttggacccggcaacggactcgacaagggggagccggtcaacgcagcagacgcggcggccctcgagcacgacaaggcctacgaccagcagctcaaggccggagacaacccgtacctcaagtacaaccacgccgacgccgagttccaggagcggctcaaagaagatacgtcttttgggggcaacctcgggcgagcagtcttccaggccaaaaagaggcttcttgaacctcttggtctggttgaggaagcggctaagacggctcctggaaagaagaggcctgtagagcagtctcctcaggaaccggactcctccgcgggtattggcaaatcgggtgcacagcccgctaaaaagagactcaatttcggtcagactggcgacacagagtcagtcccagaccctcaaccaatcggagaacctcccgcagccccctcaggtgtgggatctcttacaatggcttcaggtggtggcgcaccagtggcagacaataacgaaggtgccgatggagtgggtagttcctcgggaaattggcattgcgattcccaatggctgggggacagagtcatcaccaccagcacccgaacctgggccctgcccacctacaacaatcacctctacaagcaaatctccaacagcacatctggaggatcttcaaatgacaacgcctacttcggctacagcaccccctgggggtattttgacttcaacagattccactgccacttctcaccacgtgactggcagcgactcatcaacaacaactggggattccggcctaagcgactcaacttcaagctcttcaacattcaggtcaaagaggttacggacaacaatggagtcaagaccatcgccaataaccttaccagcacggtccaggtcttcacggactcagactatcagctcccgtacgtgctcgggtcggctcacgagggctgcctcccgccgttcccagcggacgttttcatgattcctcagtacgggtatctgacgcttaatgatggaagccaggccgtgggtcgttcgtccttttactgcctggaatatttcccgtcgcaaatgctaagaacgggtaacaacttccagttcagctacgagtttgagaacgtacctttccatagcagctacgctcacagccaaagcctggaccgactaatgaatccactcatcgaccaatacttgtactatctctcaaagactattaacggttctggacagaatcaacaaacgctaaaattcagtgtggccggacccagcaacatggctgtccagggaagaaactacatacctggacccagctaccgacaacaacgtgtctcaaccactgtgactcaaaacaacaacagcgaatttgcttggcctagagcttcttcttgggctctcaatggacgtaatagcttgatgaatcctggacctgctatggccagccacaaagaaggagaggaccgtttctttcctttgtctggatctttaatttttggcaaacaaggaactggaagagacaacgtggatgcggacaaagtcatgataaccaacgaagaagaaattaaaactactaacccggtagcaacggagtcctatggacaagtggccacaaaccaccagagtgcccaagcacaggcgcagaccggctgggttcaaaaccaaggaatacttccgggtatggtttggcaggacagagatgtgtacctgcaaggacccatttgggccaaaattcctcacacggacggcaactttcacccttctccgctgatgggagggtttggaatgaagcacccgcctcctcagatcctcatcaaaaacacacctgtacctgcggatcctccaacggccttcaacaaggacaagctgaactctttcatcacccagtattctactggccaagtcagcgtggagatcgagtgggagctgcagaaggaaaacagcaagcgctggaacccggagatccagtacacttccaactattacaagtctaataatgttgaatttgctgttaatactgaaggtgtatatagtgaaccccgccccattggcaccagatacctgactcgtaatctgtaattgcttgttaatcaataaaccgtttaattcgtttcagttgaactgcggcc

SEQ ID NO: 593 - DNA, 2601 bp, Artificial Sequence
  Description of Artificial Sequence: Synthetic polynucleotide
ccatcgacgtcagacgcggaagcttcgatcaactacgcggacaggtaccaaaacaaatgttctcgtcacgtgggcatgaatctgatgctgtttccctgcagacaatgcgagagactgaatcagaattcaaatatctgcttcactcacggtgtcaaagactgtttagagtgctttcccgtgtcagaatctcaacccgtttctgtcgtcaaaaaggcgtatcagaaactgtgctacattcatcacatcatgggaaaggtgccagacgcttgcactgcttgcgacctggtcaatgtggacttggatgactgtgtttctgaacaataaatgacttaaaccaggtatggctgccgatggttatcttccagattggctcgaggacaaccttagtgaaggaattcgcgagtggtgggctttgaaacctggagcccctcaacccaaggcaaatcaacaacatcaagacaacgctcgaggtcttgtgcttccgggttacaaataccttggacccggcaacggactcgacaagggggagccggtcaacgcagcagacgcggcggccctcgagcacgacaaggcctacgaccagcagctcaaggccggagacaacccgtacctcaagtacaaccacgccgacgccgagttccaggagcggctcaaagaagatacgtcttttgggggcaacctcgggcgagcagtcttccaggccaaaaagaggcttcttgaacctcttggtctggttgaggaagcggctaagacggctcctggaaagaagaggcctgtagagcagtctcctcaggaaccggactcctccgcgggtattggcaaatcgggtgcacagcccgctaaaaagagactcaatttcggtcagactggcgacacagagtcagtcccagaccctcaaccaatcggagaacctcccgcagccccctcaggtgtgggatctcttacaatggcttcaggtggtggcgcaccagtggcagacaataacgaaggtgccgatggagtgggtagttcctcgggaaattggcattgcgattcccaatggctgggggacagagtcatcaccaccagcacccgaacctgggccctgcccacctacaacaatcacctctacaagcaaatctccaacagcacatctggaggatcttcaaatgacaacgcctacttcggctacagcaccccctgggggtattttgacttcaacagattccactgccacttctcaccacgtgactggcagcgactcatcaacaacaactggggattccggcctaagcgactcaacttcaagctcttcaacattcaggtcaaagaggttacggacaacaatggagtcaagaccatcgccaataaccttaccagcacggtccaggtcttcacggactcagactatcagctcccgtacgtgctcgggtcggctcacgagggctgcctcccgccgttcccagcggacgttttcatgattcctcagtacgggtatctgacgcttaatgatggaagccaggccgtgggtcgttcgtccttttactgcctggaatatttcccgtcgcaaatgctaagaacgggtaacaacttccagttcagctacgagtttgagaacgtacctttccatagcagctacgctcacagccaaagcctggaccgactaatgaatccactcatcgaccaatacttgtactatctctcaaagactattaacggttctggacagaatcaacaaacgctaaaattcagtgtggccggacccagcaacatggctgtccagggaagaaactacatacctggacccagctaccgacaacaacgtgtctcaaccactgtgactcaaaacaacaacagcgaatttgcttggcctagagcttcttcttgggctctcaatggacgtaatagcttgatgaatcctggacctgctatggccagccacaaagaaggagaggaccgtttctttcctttgtctggatctttaatttttggcaaacaaggaactggaagagacaacgtggatgcggacaaagtcatgataaccaacgaagaagaaattaaaactactaacccggtagcaacggagtcctatggacaagtggccacaaaccaccagagtgcccaagcacaggcgcagaccggctgggttcaaaaccaaggaatacttccgggtatggtttggcaggacagagatgtgtacctgcaaggacccatttgggccaaaattcctcacacggacggcaactttcacccttctccgctgatgggagggtttggaatgaagcacccgcctcctcagatcctcatcaaaaacacacctgtacctgcggatcctccaacggccttcaacaaggacaagctgaactctttcatcacccagtattctactggccaagtcagcgtggagatcgagtgggagcggcagaaggaaaacagcaagcgctggaacccggagatccagtacacttccaactattacaagtctaataatgttgaatttgctgttaatactgaaggtgtatatagtgaaccccgccccattggcaccagatacctgactcgtaatctgtaattgcttgttaatcaataaaccgtttaattcgtttcagttgaactgcggcc

SEQ ID NO: 594 - DNA, 2601 bp, Artificial Sequence
  Description of Artificial Sequence: Synthetic polynucleotide
ccatcgacgtcagacgcggaagcttcgatcaactacgcggacaggtaccaaaacaaatgttctcgtcacgtgggcatgaatctgatgctgtttccctgcagacaatgcgagagactgaatcagaattcaaatatctgcttcactcacggtgtcaaagactgtttagagtgctttcccgtgtcagaatctcaacccgtttctgtcgtcaaaaaggcgtatcagaaactgtgctacattcatcacatcatgggaaaggtgccagacgcttgcactgcttgcgacctggtcaatgtggacttggatgactgtgtttctgaacaataaatgacttaaaccaggtatggctgccgatggttatcttccagattggctcgaggacaaccttagtgaaggaattcgcgagtggtgggctttgaaacctggagcccctcaacccaaggcaaatcaacaacatcaagacaacgctcgaggtcttgtgcttccgggttacaaataccttggacccggcaacggactcgacaagggggagccggtcaacgcagcagacgcggcggccctcgagcacgacaaggcctacgaccagcagctcaaggccggagacaacccgtacctcaagtacaaccacgccgacgccgagttccaggagcggctcaaagaagatacgtcttttgggggcaacctcgggcgagcagtcttccaggccaaaaagaggcttcttgaacctcttggtctggttgaggaagcggctaagacggctcctggaaagaagaggcctgtagagcagtctcctcaggaaccggactcctccgcgggtattggcaaatcgggtgcacagcccgctaaaaagagactcaatttcggtcagactggcgacacagagtcagtcccagaccctcaaccaatcggagaacctcccgcagccccctcaggtgtgggatctcttacaatggcttcaggtggtggcgcaccagtggcagacaataacgaaggtgccgatggagtgggtagttcctcgggaaattggcattgcgattcccaatggctgggggacagagtcatcaccaccagcacccgaacctgggccctgcccacctacaacaatcacctctacaagcaaatctccaacagcacatctggaggatcttcaaatgacaacgcctacttcggctacagcaccccctgggggtattttgacttcaacagattccactgccacttctcaccacgtgactggcagcgactcatcaacaacaactggggattccggcctaagcgactcaacttcaagctcttcaacattcaggtcaaagaggttacggacaacaatggagtcaagaccatcgccaataaccttaccagcacggtccaggtcttcgcggactcagactatcagctcccgtacgtgctcgggtcggctcacgagggctgcctcccgccgttcccagcggacgttttcatgattcctcagtacgggtatctgacgcttaatgatggaagccaggccgtgggtcgttcgtccttttactgcctggaatatttcccgtcgcaaatgctaagaacgggtaacaacttccagttcagctacgagtttgagaacgtacctttccatagcagctacgctcacagccaaagcctggaccgactaatgaatccactcatcgaccaatacttgtactatctctcaaagactattaacggttctggacagaatcaacaaacgctaaaattcagtgtggccggacccagcaacatggctgtccagggaagaaactacatacctggacccagctaccgacaacaacgtgtctcaaccactgtgactcaaaacaacaacagcgaatttgcttggcctagagcttcttcttgggctctcaatggacgtaatagcttgatgaatcctggacctgctatggccagccacaaagaaggagaggaccgtttctttcctttgtctggatctttaatttttggcaaacaaggaactggaagagacaacgtggatgcggacaaagtcatgataaccaacgaagaagaaattaaaactactaacccggtagcaacggagtcctatggacaagtggccacaaaccaccagagtgcccaagcacaggcgcagaccggctgggttcaaaaccaaggaatacttccgggtatggtttggcaggacagagatgtgtacctgcaaggacccatttgggccaaaattcctcacacggacggcaactttcacccttctccgctgatgggagggtttggaatgaagcacccgcctcctcagatcctcatcaaaaacacacctgtacctgcggatcctccaacggccttcaacaaggacaagctgaactctttcatcacccagtattctactggccaagtcagcgtggagatcgagtgggagctgcagaaggaaaacagcaagcgctggaacccggagatccagtacacttccaactattacaagtctaataatgttgaatttgctgttaatactgaaggtgtatatagtgaaccccgccccattggcaccagatacctgactcgtaatctgtaattgcttgttaatcaataaaccgtttaattcgtttcagttgaactgcggcc

SEQ ID NO: 595 - DNA, 2601 bp, Artificial Sequence
  Description of Artificial Sequence: Synthetic polynucleotide
ccatcgacgtcagacgcggaagcttcgatcaactacgcggacaggtaccaaaacaaatgttctcgtcacgtgggcatgaatctgatgctgtttccctgcagacaatgcgagagactgaatcagaattcaaatatctgcttcactcacggtgtcaaagactgtttagagtgctttcccgtgtcagaatctcaacccgtttctgtcgtcaaaaaggcgtatcagaaactgtgctacattcatcacatcatgggaaaggtgccagacgcttgcactgcttgcgacctggtcaatgtggacttggatgactgtgtttctgaacaataaatgacttaaaccaggtatggctgccgatggttatcttccagattggctcgaggacaaccttagtgaaggaattcgcgagtggtgggctttgaaacctggagcccctcaacccaaggcaaatcaacaacatcaagacaacgctcgaggtcttgtgcttccgggttacaaataccttggacccggcaacggactcgacaagggggagccggtcaacgcagcagacgcggcggccctcgagcacgacaaggcctacgaccagcagctcaaggccggagacaacccgtacctcaagtacaaccacgccgacgccgagttccaggagcggctcaaagaagatacgtcttttgggggcaacctcgggcgagcagtcttccaggccaaaaagaggcttcttgaacctcttggtctggttgaggaagcggctaagacggctcctggaaagaagaggcctgtagagcagtctcctcaggaaccggactcctccgcgggtattggcaaatcgggtgcacagcccgctaaaaagagactcaatttcggtcagactggcgacacagagtcagtcccagaccctcaaccaatcggagaacctcccgcagccccctcaggtgtgggatctcttacaatggcttcaggtggtggcgcaccagtggcagacaataacgaaggtgccgatggagtgggtagttcctcgggaaattggcattgcgattcccaatggctgggggacagagtcatcaccaccagcacccgaacctgggccctgcccacctacaacaatcacctctacaagcaaatctccaacagcacatctggaggatcttcaaatgacaacgcctacttcggctacagcaccccctgggggtattttgacttcaacagattccactgccacttctcaccacgtgactggcagcgactcatcaacaacaactggggattccggcctaagcgactcaacttcaagctcttcaacattcaggtcaaagaggttacggacaacaatggagtcaagaccatcgccaataaccttaccagcacggtccaggtcttcacggactcagactatcagctcccgtacgtgctcgggtcggctcacgagggctgcctcccgccgttcccagcggacgttttcatgattcctcagtacgggtatctgacgcttaatgatggaagccaggccgtgggtcgttcgtccttttactgcctggaatatttcccgtcgcaaatgctaagaacgggtaacaacttccagttcagctacgagtttgagaacgtacctttccatagcagctacgctcacagccaaagcctggaccgactaatgaatccactcatcgaccaatacttgtactatctctcaaagactattaacggttctggacagaatcaacaaacgctaaaattcagtgtggccggacccagcaacatggctgtccagggaagaaactacatacctggacccagctaccgacaacaacgtgtctcaaccactgtgactcaaaacaacaacagcgaaattgcttggcctagagcttcttcttgggctctcaatggacgtaatagcttgatgaatcctggacctgctatggccagccacaaagaaggagaggaccgtttctttcctttgtctggatctttaatttttggcaaacaaggaactggaagagacaacgtggatgcggacaaagtcatgataaccaacgaagaagaaattaaaactactaacccagtagcaacggagtcctatggacaagtggccacaaaccaccagagtgcccaagcacaggcgcagaccggctgggttcaaaaccaaggaatacttccgggtatggtttggcaggacagagatgtgtacctgcaaggacccatttgggccaaaattcctcacacggacggcaactttcacccttctccgctgatgggagggtttggaatgaagcacccgcctcctcagatcctcatcaaaaacacacctgtacctgcggatcctccaacggccttcaacaaggacaagctgaactctttcatcacccagtattctactggccaagtcagcgtggagatcgagtgggagctgcagaaggaaaacagcaagcgctggaacccggagatccagtacacttccaactattgcaagtctaataatgttgaatttgctgttaatactgaaggtgtatatagtgaaccccgccccattggcaccagatacctgactcgtaatctgtaattgcttgttaatcaataaaccgtttaattcgtttcagttgaactgcggcc

SEQ ID NO: 596 - DNA, 2601 bp, Artificial Sequence
  Description of Artificial Sequence: Synthetic polynucleotide
ccatcgacgtcagacgcggaagcttcgatcaactacgcggacaggtaccaaaacaaatgttctcgtcacgtgggcatgaatctgatgctgtttccctgcagacaatgcgagagactgaatcagaattcaaatatctgcttcactcacggtgtcaaagactgtttagagtgctttcccgtgtcagaatctcaacccgtttctgtcgtcaaaaaggcgtatcagaaactgtgctacattcatcacatcatgggaaaggtgccagacgcttgcactgcttgcgacctggtcaatgtggacttggatgtctgtgtttctgaacaataaatgacttaaaccaggtatggctgccgatggttatcttccagattggctcgaggacaaccttagtgaaggaattcgcgagtggtgggctttgaaacctggagcccctcaacccaaggcaaatcaacaacatcaagacaacgctcgaggtcttgtgcttccgggttacaaataccttggacccggcaacggactcgataagggggagccggtcaacgcagcagacgcggcggccctcgagcacgacaaggcctacgaccagcagctcaaggccggagacaacccgtacctcaagtacaaccacgccgacgccgagttccaggagcggctcaaagaagatacgtcttttgggggcaacctcgggcgagcagtcttccaggccaaaaagaggcttcttgaacctcttggtctggttgaggaagcggctaagacggctcctggaaagaagaggcctgtagagcagtctcctcaggaaccggactcctccgcgggtattggcaaatcgggtgcacagcccgctaaaaagagactcaatttcggtcagactggcgacacagagtcagtcccagaccctcaaccaatcggagaacctcccgcagccccctcaggtgtgggatctcttacaatggcttcaggtggtggcgcaccagtggcagacaataacgaaggtgccgatggagtgggtagttcctcgggaaattggcattgcgattcccaatggctgggggacagagtcatcaccaccagcacccgaacctgggccctgcccacctacaacaatcacctctacaagcaaatctccaacagcacatctggaggatcttcaaatgacaacgcctacttcggctacagcaccccctgggggtattttgacttcaacagattccactgccacttctcaccacgtgactggcagcgactcatcaacaacaactggggattccggcctaagcgactcaacttcaagctcttcaacattcaggtcaaagaggttacggacaacaatggagtcaagaccatcgccaataaccttaccagcacggtccaggtcttcacggactcagactatcagctcccgtacgtgctcgggtcggctcacgagggctgcctcccgccgttcccagcggacgttttcatgattcctcagtacgggtatctgacgcttaatgatggaagccaggccgtgggtcgttcgtccttttactgcctggaatatttcccgtcgcaaatgctaagaacgggtaacaacttccagttcagctacgagtttgagaacgtacctttccatagcagctacgctcacagccaaagcctggaccgactaatgaatccactcatcgaccaatacttgtactatctctcaaagactattaacggttctggacagaatcaacaaacgctaaaattcagtgtggccggacccagcaacatggctgtccagggaagaaactacatacctggacccagctaccgacaacaacgtgtctcaaccactgtgactcaaaacaacaacagcgaatttgcttggcctagagcttcttcttgggctctcaatggacgtaatagcttgatgaatcctggacctgctatggccagccacaaagaaggagaggaccgtttctttcctttgtctggatctttaatttttggcaaacaaggaactggaagagacaacgtggatgcggacaaagtcatgataaccaacgaagaagaaattaaaactactaacccggtagcaacggagtcctatggacaagtggccacaaaccaccagagtgcccaagcacaggcgcagaccggctgggttcaaaaccaaggaatacttccgggtatggtttggcaggacagagatgtgtacctgcaaggacccatttgggccaaaattcctcacacggacggcaactttcacccttctccgctgatgggagggtttggaatgaagcacccgcctcctcagatcctcatcaaaaacacacctgtacctgcggatcctccaacggccttcaacaaggacaagctgaactctttcatcacccagtattctactggccaagtcagcgtggagatcgagtgggagctgcagaaggaaaacagcaagcgctggaacccggagatccagtacacttccaactattacaagtctaataatgttgaatttgctgttaatactgaaggtgtatatagtgaaccccgccccattggcaccagatacctgactcgtaatctgtaattgcttgttaatcaataaaccgtttaattcgtttcagttgaactgcggcc

SEQ ID NO: 597 - protein, 736 aa, Artificial Sequence
  Description of Artificial Sequence: Synthetic polypeptide
MTADGYLPDWLEDNLSEGIREWWALKPGAPQPKANQQHQDNARGLVLPGYKYLGPGNGLDKGEPVNAADAAALEHDKAYDQQLKAGDNPYLKYNHADAEFQERLKEDTSFGGNLGRAVFQAKKRLLEPLGLVEEAAKTAPGKKRPVEQSPQEPDSSAGIGKSGAQPAKKRLNFGQTGDTESVPDPQPIGEPPAAPSGVGSLTMASGGGAPVADNNEGADGVGSSSGNWHCDSQWLGDRVITTSTRTWALPTYNNHLYKQISNSTSGGSSNDNAYFGYSTPWGYFDFNRFHCHFSPRDWQRLINNNWGFRPKQLNFKLFNIQVKEVTDNNGVKTIANNLTSTVQVFTDSDYQLPYVLGSAHEGCLPPFPADVFMIPQYGYLTLNDGSQAVGRSSFYCLEYFPSQMLRTGNNFQFSYEFENVPFHSSYAHSQSLDRLMNPLIDQYLYYLSKTINGSGQNQQTLKFSVAGPSNMAVQGRNYIPGPSYRQQRVSTTVTQNNNSEFAWPGASSWALNGRNSLMNPGPAMASHKEGEDRFFPLSGSLIFGKQGTGRDNVDADKVMITNEEEIKTTNPVATESYGQVATNHQSAQAQAQTGWVQNQGILPGMVWQDRDVYLQGPIWAKIPHTDGNFHPSPLMGGFGMKHPPPQILIKNTPVPADPPTAFNKDKLNSFITQYSTGQVSVEIEWELQKENSKRWNPEIQYTSNYYKSNNVEFAVNTEGVYSEPRPIGTRYLTRNL

SEQ ID NO: 598 - protein, 736 aa, Artificial Sequence
  Description of Artificial Sequence: Synthetic polypeptide
MAADGYLPDWLEDNLSEGIREWWALKPGAPQPKANQQHQDNARGLVLPGYKYLGPGNGLDKGEPVNAADAAALEHDKAYDQQLKAGDNPYLKYNHADAEFQERLKEDTSFGGNLGRAVFQAKKRLLEPLGLVEEAAKTAPGKKRPVEQSPQEPDSSAGIGKSGAQPAKKRLNFGQTGDTESVPDPQPIGEPPAAPSGVGSLTMASGGGAPVADNNEGADGVGSSSGNWHCDSQWLGDRVITTSTRTWALPTYNNHLYKQISNSTSGGSSNDNAYFGYSTPWGYFDFNRFHCHFSPRDWQRLINNNWGFRPKRLNFKLFNIQVKEVTDNNGVKTIANNLTSTVQVFTDSDYQLPYVLGSAHEGCLPPFPADVFMIPQYGYLTLNDGSQAVGRSSFYCLEYFPSQMLRTGNNFQFSYEFENVPFHSSYAHSQSLDRLMNPLIDQYLYYLSKTINGSGQNQQTLKFSVAGPSNMAVQGRNYIPGPSYRQQRVSTTVTQNNNSEFAWPGASSWALNGRNSLMNPGPAMASHKEGEDRFFPLSGSLIFGKQGTGRDNVDADKVMITNEEEIKTTNPVATESYGQVATNHQSAQAQAQTGWVQNQGILPGMVWQDRDVYLQGPIWAKIPHTGGNFHPSPLMGGFGMKHPPPQILIKNTPVPADPPTAFNKDKLNSFITQYSTGQVSVEIEWELQKENSKRWNPEIQYTSNYYKSNNVEFAVNTGGVYSEPRPIGTRYLTRNL

SEQ ID NO: 599 - protein, 736 aa, Artificial Sequence
  Description of Artificial Sequence: Synthetic polypeptide
MAADGYLPDWLEDNLSEGIREWWALKPGAPQPKANQQHQDNARGLVLPGYKYLGPGNGLDKGEPVNAADAAALEHDKAYDQQLKAGDNPYLKYNHADAEFQERLKEDTSFGGNLGRAVFQAKKRLLEPLGLVEEAAKTAPGKKRPVEQSPQEPDSSAGIDKSGAQPAKKRLNFGQTGDTESVPDPQPIGEPPAAPSGVGSLTMASGGGAPVADNNEGADGVGSSSGNWHCDSQWLGDRVITTSTRTWALPTYNNHLYKQISNSTSGGSSNDNAYFGYSTPWGYFDFNRFHCHFSPRDWQRLINNNWGFRPKRLNFKLFNIQVKEVTDNNGVKTIANNLTSTVQVFTDSDYQLPYVLGSAHEGCLPPFPADVFMIPQYGYLTLNDGSQAVGRSSFYCLEYFPSQMLRTGNNFQFSYEFENVPFHSSYAHSQSLDRLMNPLIDQYLYYLSKTINGSGQNQQTLKFSVAGPSNMAVQGRNYIPGPSYRQQRVSTTVTQNNNSEFAWPGASSWALNGRNSLMNPGPAMASHKEGEDRFFPLSGSLIFGKQGTGRDNVDADKVMITNEEEIKTTNPVATESYGQVATNHQSAQAQAQTGWVQNQGILPGMVWQDRDVYLQGPIWAKIPHTDGNFHPSPLMGGFGMKHPPPQILIKNTPVPADPPTAFNKDKLNSFITQYSTGQVSVEIEWELQKENSKRWNPEIQYTSNYYKSNNVEFAVNTEGVYSEPRPIGTRYLTRNL

SEQ ID NO: 600 - protein, 736 aa, Artificial Sequence
  Description of Artificial Sequence: Synthetic polypeptide
MAADGYLPDWLEDNLSEGIREWWALKPGAPQPKANQQHQDNARGLVLPGYKYLGPGNGLDKGEPVNAADAAALEHDKAYDQQLKAGDNPYLKYNHADAEFQERLKEDTSFGGNLGRAVLQAKKRLLEPLGLVEEAAKTAPGKKRPVEQSPQEPDSSAGIGKSGAQPAKKRLNFGQTGDTESVPDPQPIGEPPAAPSGVGSLTMASGGGAPVADNNEGADGVGSSSGNWHCDSQWLGDRVITTSTRTWALPTYNNHLYKQISNSTSGGSSNDNAYFGYSTPWGYFDFNRFHCHFSPRDWQRLINNNWGFRPKRLNFKLFNIQVKEVTDNNGVKTIANNLTSTVQVFTDSDYQLPYVLGSAHEGCLPPFPADVFMIPQYGYLTLNDGSQAVGRSSFYCLEYFPSQMLRTGNNFQFSYEFENVPFHSSYAHSQSLDRLMNPLIDQYLYYLSKTINGSGQNQQTLKFSVAGSSNMAVQGRNYIPGPSYRQQRVSTTVTQNNNSEFAWPGASSWALNGRNSLMNPGPAMASHKEGEDRFFPLSGSLIFGKQGTGRDNVDADKVMITNEEEIKTTNPVATESYGQVATNHQSAQAQAQTGWVQNQGILPGMVWQDRDVYLQGPIWAKIPHTDGNFHPSPLMGGFGMKHPPPQILIKNTPVPADPPTAFNKDKLNSFITQYSTGQVSVEIEWELQKENSKRWNPEIQYTSNYYKSNNVEFAVNTEGVYSEPRPIGTRYLTRNL

SEQ ID NO: 601 - protein, 736 aa, Artificial Sequence
  Description of Artificial Sequence: Synthetic polypeptide
MAADGYLPDWLEDNLSEGIREWWALKPGAPQPKANQQHQDNARGLVLPGYKYLGPGNGLDKGEPVNAADAAALEHDRAYDQQLKAGDNPYLKYNHADAEFQERLKEDTSFGGNLGRAVFQAKKRLLEPLGLVEEAAKTAPGKKRPVEQSPQEPDSSAGIGKSGAQPAKKRLNFGQTGDTESVPDPQPIGEPPAAPSGVGSLTMASGGGAPVADNNEGADGVGSSSGNWHCDSQWLGDRVITTSTRTWALPTYNNHLYKQISNSTSGGSSNDNAYFGYSTPWGYFDFNRFHCHFSPRDWQRLINNNWGFRPKRLNFKLFNIQVKEVTDNNGVKTIANNLTSTVQVFTDSDYQLPYVLGSAHEGCLPPFPADVFMIPQYGYLTLNDGSQAVGRSSFYCLEYFPSQMLRTGNNFQFSYEFENVPFHSSYAHSQSLDRLMNPLIDQYLYYLSKTINGSGQNQQTLKFSVAGPSNMAVQGRNYIPGPSYRQQRVSTTVTQNNNSEFAWPGASSWALNGRNSLMNPGPAMASHKEGEDRFFPLSGSLIFGKQGTGRDNVDADKVMITNEEEIKTTNPVATESYGQVATNHQSAQAQAQTGWVQNQGILPGMVWQDRDVYLQGPIWAKIPHTDGNFHPSPLMGGFGMKHPPPQILIKNTPVPADPPTAFNKDKLNSFITQYSTGQVSVEIEWELQKKNSKRWNPEIQYTSNYYKSNNVEFAVNTEGVYSEPRPIGTRYLTRNL

SEQ ID NO: 602 - protein, 736 aa, Artificial Sequence
  Description of Artificial Sequence: Synthetic polypeptide
MAADGYLPDWLEDNLSEGIREWWALKPGAPQPKANQQHQDNARGLVLPGYKYLGPGNGLDKGEPVNAADAAALEHDKAYDQQLKAGDNPYLKYNHADAEFQERLKEDTSFGGNLGRAVFQAKKRLLEPLGLVEEAAKTAPGKKRPVEQSPQEPDSSAGIGKSGAQPAKKRLNFGQTGDTESVPDPQPIGEPPAAPSGVGSLTMASGGGAPVADNNEGADGVGSSSGNWHCDSQWLGDRVITTSTRTWALPTYNNHLYKQISNSTSGGSSNDNAYFGYSTPWGYFDFNRFHCHFSPRDWQRLINNNWGFRPKRLNFKLFNIQVKEVTDNNGVKTIANNLTSTVQVFTDSDYQLPYVLGSAHEGCLPPFPADVFMIPQYGYLTLNDGSQAVGRSSFYCLEYFPSQMLRTGNNFQFSYEFENVPFHSSYAHSQSLDRLMNPLIDQYLYYLSKTINGSGQNQQTLKFSVAGPSNMAVQGRNYIPGPSYRQQRVSTTVTQNNNSEFAWPGASSWALNGRNSLMNPGPAMASHKEGEDRFFPLSGSLIFGKQGTGRDNVDADKVMITNEEEIKTTNPVATESYGQVATNHQSAQARAQTGWVQNQGILPGMVWQDRDVYLQGPIWAKIPHTDGNFHPSPLMGGFGMKHPPPQILIKNTPVPADPPTAFNKDKLNSFITQYSTGQVSVEIEWELQKENSKRWNPEIQYTSNYYKSNNVEFAVNTEGVYSEPRPIGTRYLTRNL

SEQ ID NO: 603 - protein, 736 aa, Artificial Sequence
  Description of Artificial Sequence: Synthetic polypeptide
MAADGYLPDWLEDNLSEGIREWWALKPGAPQPKANQQHQDNARGLVLPGYKYLGPGNGLDKGEPVNAVDAAALEHDKAYDQQLKAGDNPYLKYNHADAEFQERLKEDTSFGGNLGRAVFQAKKRLLEPLGLVEEAAKTAPGKKRPVEQSPQEPDSSAGIGKSGAQPAKKRLNFGQTGDTESVPDPQPIGEPPAAPSGVGSLTMASGGGAPVADNNEGADGVGSSSGNWHCDSQWLGDRVITTSTRTWALPTYNNHLYKQISNSTSGGSSNDNAYFGYSTPWGYFDFNRFHCHFSPRDWQRLINNNWGFRPKRLNFKLFNIQVKEVTDNNGVKTIANNLTSTVQVFTDSDYQLPYVLGSAHEGCLPPFPADVFMIPQYGYLTLNDGSQAVGRSSFYCLEYFPSQMLRTGNNFQFSYEFENVPFHSSYAHSQSLDRLMNPLIDQYLYYLSKTINGSGQNQQTLKFSVAGPSNMAVQGRNYIPGPSYRQQRVSTTVTQNNNSEFAWPGASSWALNGRNSLMNPGPAMASHKEGEDRFFPLSGSLIFGKQGTGRDNVDADKVMITNEEEIKTTNPVATESYGQVATNHQSAQAQAQTGWVQNQGILPGMVWQDRDVYLQGPIWAKIPHTDGNFHPSPLMGGFGMKHPPPQILIKNTPVPADPPTAFNKDKLNSFITQYSTGQVSVEIEWELQKENSKRWNPEIQYTSNYYKSNNVEFAVNTEGVYSEPRPIGTRYLTRNL

SEQ ID NO: 604 - protein, 736 aa, Artificial Sequence
  Description of Artificial Sequence: Synthetic polypeptide
MAADGYLPDWLEDNLSEGIREWWALKPGAPQPKANQQHQDNARGLVLPGYKYLGPGNGLDKGEPVNAADAAALEHDKAYDQQLKAGDNPYLKYNHADAEFQERLKEDTSFGGNLGRAVFQAKKRLLEPLGLVEEAAKTAPGKKRPVEQSPREPDSSAGIGKSGAQPAKKRLNFGQTGDTESVPDPQPIGEPPAAPSGVGSLTMASGGGAPVADNNEGADGVGSSSGNWHCDSQWLGDRVITTSTRTWALPTYNNHLYKQISNSTSGGSSNDNAYFGYSTPWGYFDFNRFHCHFSPRDWQRLINNNWGFRPKRLNFKLFNIQVKEVTDNNGVKTIANNLTSTVQVFTDSDYQLPYVLGSAHEGCLPPFPADVFMIPQYGYLTLNDGSQAVGRSSFYCLEYFPSQMLRTGNNFQFSYEFENVPFHSSYAHSQSLDRLMNPLIDQYLYYLSKTINGSGQNQQTLKFSVAGPSNMAVQGRNYIPGPSYRQQRVSTTVTQNNNSEFAWPGASSWALNGRNSLMNPGPAMASHKEGEDRFFPLSGSLIFGKQGTGRDNVDADKVMITNEEEIKTTNPVATESYGQVATNHQSAQAQAQTGWVQNQGILPGMVWQDRDVYLQGPIWAKIPHTDGNFHPSPLMGGFGMKHPPPQILIKNTPVPADPPTAFNKDKLNSFITQYSTGQVSVEIEWELQKENSKRWNPEIQYTSNYYKSNNVEFAVNTEGVYSEPRPIGTRYLTRNL

SEQ ID NO: 605 - protein, 736 aa, Artificial Sequence
  Description of Artificial Sequence: Synthetic polypeptide
MAADGYLPDWLEDNLSEGIREWWALKPGAPQPKANQQHQDNARGLVLPGYKYLGPGNGLDKGEPVNAADAAALEHDKAYDQQLKAGDNPYLKYNHADAEFQERLKEDTSFGGNLGRAVFQAKKRLLEPLGLVEEAAKTAPGKKRPVEQSPQEPDSSAGIGKSGAQPAKKRLNFGQTGDTESVPDPQPIGEPPAAPSGVGSLTMASCGGAPVADNNEGADGVGSSSGNWHCDSQWLGDRVITTSTRTWALPTYNNHLYKQISNSTSGGSSNDNAYFGYSTPWGYFDFNRFHCHFSPRDWQRLINNNWGFRPKRLNFKLFNIQVKEVTDNNGVKTIANNLTSTVQVFTDSDYQLPYVLGSAHEGCLPPFPADVFMIPQYGYLTLNDGSQAVGRSSFYCLEYFPSQMLRTGNNFQFSYEFENVPFHSSYAHSQSLDRLMNPLIDQYLYYLSKTINGSGQNQQTLKFSVAGPSNMAVQGRNYIPGPSYRQQRVSTTVTQNNNSEFAWPGASSWALNGRNSLMNPGPAMASHKEGEDRFFPLSGSLIFGKQGTGRDNVDADKVMITNEEEIKTTNPVATESYGQVATNHQSAQAQAQTGWVQNQGILPGMVWQDRDVYLQGPIWAKIPHTDGNFHPSPLMGGFGMKHPPPQILIKNTPVPADPPTAFNKDKLNSFITQYSTGQVSVEIEWELQKENSKRWNPEIQYTSNYYKSNNVEFAVNTEGVYSEPRPIGTRYLTRNL

SEQ ID NO: 606 - protein, 736 aa, Artificial Sequence
  Description of Artificial Sequence: Synthetic polypeptide
MAADGYLPDWLEDNLSEGIREWWALKPGAPQPKANQQHQDNARGLVLPGYKYLGPGNGLDKGEPINAADAAALEHDKAYDQQLKAGDNPYLKYNHADAEFQERLKEDTSFGGNLGRAVFQAKKRLLEPLGLVEEAAKTAPGKKRPVEQSPQEPDSSAGIGKSGAQPAKKRLNFGQTGDTESVPDPQPIGEPPAAPSGVGSLTMASGGGAPVADNNEGADGVGSSSGNWHCDSQWLGDRVITTSTRTWALPTYNNHLYKQISNSTSGGSSNDNAYFGYSTPWGYFDFNRFHCHFSPRDWQRLINNNWGFRPKRLNFKLFNIQVKEVTDNNGVKTIANNLTSTVQVFTDSDYQLPYVLGSAHEGCLPPFPADVFMIPQYGYLTLNDGSQAVGRSSFYCLEYFPSQMLRTGNNFQFSYEFENVPFHSSYAHSQSLDRLMNPLIDQYLYYLSKTINGSGQNQQTLKFSVAGPSNMAVQGRNYIPGPSYRQQRVSTTVTQNNNSEFAWPGASSWALNGRNSLMNPGPAMASHKEGEDRFFPLSGSLIFGKQGTGRDNVDADKVMITNEEEIKTTNPVATESYGQVATNHQSAQAQAQTGWVQNQGILPGMVWQDRDVYLQGPIWAKIPHTYGNFHPSPLMGGFGMKHPPPQILIKNTPVPADPPTAFNKDKLNSFITQYSTGQVSVEIEWELQKENSKRWNPEIQYTSNYYKSNNVEFAVNTEGVYSEPRPIGTRYLTRNL

SEQ ID NO: 607 - protein, 736 aa, Artificial Sequence
  Description of Artificial Sequence: Synthetic polypeptide
MAADGYLPDWLEDNLSEGIREWWALKPGAPQPKANQQHQDNARGLVLPGYKYLGPGNGLDKGEPVNAADAAALEHDKAYDQQLKAGDNPYLKYNHADAEFQERLKEDTSFGGNLGRAVFQAKKRLLEPLGLVEEAAKTAPGKKRPVEQSPQEPDSSAGIGKSGAQPAKKRLNFGQTGDTESVPDPQPIGEPPAAPSGVGSLTMASGGGAPVADNNEGADGVGSSSGNWHCDSQWLGDRVITTSTRTWALPTYNNHLYKQISNSTSGGSSNDNAYFGYSTPWGYFDFNRFHCHFSPHDWQRLINNNWGFRPKRLNFKLFNIQVKEVTDNNGVKTIANNLTSTVQVFTDSDYQLPYVLGSAHEGCLPPFPADVFMIPQYGYLTLNDGSQAVGRSSFYCLEYFPSQMLRTGNNFQFSYEFENVPFHSSYAHSQSLDRLMNPLIDQYLYYLSKTINGSGQNQQTLKFNVAGPSNMAVQGRNYIPGPSYRQQRVSTTVTQNNNSEFAWPRASSWALNGRNSLMNPGPAMASHKEGEDRFFPLSGSLIFGKQGTGRDNVDADKVMITNEEEIKTTNPVATESYGQVATNHQSAQAQAQTGWVQNQGILPGMVWQDRDVYLQGPIWAKIPHTDGNFHPSPLMGGFGMKHPPPQILIKNTPVPADPPTAFNKDKLNSFITQYSTGQVSMEIEWELQKENSKRWNPEIQYTSNYYKSNNVEFAVNTEGVYSEPRPIGTRYLTRNL

SEQ ID NO: 608 - protein, 736 aa, Artificial Sequence
  Description of Artificial Sequence: Synthetic polypeptide
MAADGYLPDWLEDNLSEGIREWWALKPGAPQPKANQQHQDNARGLVLPGYKYLGPGNGLDKGEPVNAADAAALEHDKAYDQQLKAGDNPYLKYNHADAEFQERLKEDTSFGGNLGRAVFQAKKRLLEPLGLVEEAAKTAPGKKRPVEQSPQEPDSSAGIGKSGAQPAKKRLNFGQTGDTESVPDPQPIGEPPAAPSGVGSLTMASGGGAPVADNNEGADGVGSSSGNWHCDSQWLGDRVITTSTRTWALPTYNNHLYKQISNSTSGGSSNDNAYFGYSTPWGYFDFNRFHCHFSPRDWQRLINNNWGFRPKRLNFKLFNIQVKEVTDNNGVKTIANNLTSTVQVFTDSDYQLPYVLGSAHEGCLPPFPADVFMIPQYGYLTLNDGSQAVGRSSFYCLEYFPSQMLRTGNNFQFSYEFENVPFHSSYAHSQSLDRLMNPLIDQYLYYLSKTINGSGQNQQTLKFSVAGPSNMAVQGRNYIPGPSYRQQRVSTTVTQNNNSEFAWPRASSWALNGRNSLMNPGPAMASHKEGEDRFFPLSGSLIFGKQGTGRDNVDADKVMITNEEEIKTTNPVATESYGQVATNHQSAQAQAQTGWVQNQGILPGMVWQDRDVYLQGPIWAKIPHTDGNFHPSPLMGGFGMKHPPPQILIKNTPVPADPPTAFNKDKLNSFITQYSTGQVSVEIEWELQKENSKRWNPEIQYTSNYYKSNNVEFAVNTEGVYSEPRPIGTRYLTRNL

SEQ ID NO: 609 - protein, 736 aa, Artificial Sequence
  Description of Artificial Sequence: Synthetic polypeptide
MAADGYLPDWLEDNLSEGIREWWALKPGAPQPKANQQHQDNARGLVLPGYKYLGPGNGLDKGEPVNAADAAALEHDKAYDQQLKAGDNPYLKYNHADAEFQERLKEDTSFGGNLGRAVFQAKKRLLEPLGLVEEAAKTAPGKKRPVEQSPQEPDSSAGIGKSGAQPAKKRLNFGQTGDTESVPDPQPIGEPPAAPSGVGSLTMASGGGAPVADNNEGADGVGSSSGNWHCDSQWLGDRVITTSTRTWALPTYNNHLYKQISNSTSGGSSNDNAYFGYSTPWGYFDFNRFHCHFSPRDWQRLINNNWGFRPKRLNFKLFNIQVKEVTDNNGVKTIANNLTSTVQVFTDSDYQLPYVLGSAHEGCLPPFPADVFMIPQYGYLTLNDGSQAVGRSSFYCLEYFPSQMLRTGNNFQFSYEFENVPFHSSYAHSQSLDRLMNPLIDQYLYYLSKTINGSGQNQQTLKFSVAGPSNMAVQGRNYIPGPSYRQQRVSTTVTQNNNSEFAWPRASSWALNGRNSLMNPGPAMASHKEGEDRFFPLSGSLIFGKQGTGRDNVDADKVMITNEEEIKTTNPVATESYGQVATNHQSAQAQAQTGWVQNQGILPGMVWQDRDVYLQGPIWAKIPHTDGNFHPSPLMGGFGMKHPPPQILIKNTPVPADPPTAFNKDKLNSFITQYSTGQVSVEIEWERQKENSKRWNPEIQYTSNYYKSNNVEFAVNTEGVYSEPRPIGTRYLTRNL

SEQ ID NO: 610 - protein, 736 aa, Artificial Sequence
  Description of Artificial Sequence: Synthetic polypeptide
MAADGYLPDWLEDNLSEGIREWWALKPGAPQPKANQQHQDNARGLVLPGYKYLGPGNGLDKGEPVNAADAAALEHDKAYDQQLKAGDNPYLKYNHADAEFQERLKEDTSFGGNLGRAVFQAKKRLLEPLGLVEEAAKTAPGKKRPVEQSPQEPDSSAGIGKSGAQPAKKRLNFGQTGDTESVPDPQPIGEPPAAPSGVGSLTMASGGGAPVADNNEGADGVGSSSGNWHCDSQWLGDRVITTSTRTWALPTYNNHLYKQISNSTSGGSSNDNAYFGYSTPWGYFDFNRFHCHFSPRDWQRLINNNWGFRPKRLNFKLFNIQVKEVTDNNGVKTIANNLTSTVQVFADSDYQLPYVLGSAHEGCLPPFPADVFMIPQYGYLTLNDGSQAVGRSSFYCLEYFPSQMLRTGNNFQFSYEFENVPFHSSYAHSQSLDRLMNPLIDQYLYYLSKTINGSGQNQQTLKFSVAGPSNMAVQGRNYIPGPSYRQQRVSTTVTQNNNSEFAWPRASSWALNGRNSLMNPGPAMASHKEGEDRFFPLSGSLIFGKQGTGRDNVDADKVMITNEEEIKTTNPVATESYGQVATNHQSAQAQAQTGWVQNQGILPGMVWQDRDVYLQGPIWAKIPHTDGNFHPSPLMGGFGMKHPPPQILIKNTPVPADPPTAFNKDKLNSFITQYSTGQVSVEIEWELQKENSKRWNPEIQYTSNYYKSNNVEFAVNTEGVYSEPRPIGTRYLTRNL

SEQ ID NO: 611 - protein, 736 aa, Artificial Sequence
  Description of Artificial Sequence: Synthetic polypeptide
MAADGYLPDWLEDNLSEGIREWWALKPGAPQPKANQQHQDNARGLVLPGYKYLGPGNGLDKGEPVNAADAAALEHDKAYDQQLKAGDNPYLKYNHADAEFQERLKEDTSFGGNLGRAVFQAKKRLLEPLGLVEEAAKTAPGKKRPVEQSPQEPDSSAGIGKSGAQPAKKRLNFGQTGDTESVPDPQPIGEPPAAPSGVGSLTMASGGGAPVADNNEGADGVGSSSGNWHCDSQWLGDRVITTSTRTWALPTYNNHLYKQISNSTSGGSSNDNAYFGYSTPWGYFDFNRFHCHFSPRDWQRLINNNWGFRPKRLNFKLFNIQVKEVTDNNGVKTIANNLTSTVQVFTDSDYQLPYVLGSAHEGCLPPFPADVFMIPQYGYLTLNDGSQAVGRSSFYCLEYFPSQMLRTGNNFQFSYEFENVPFHSSYAHSQSLDRLMNPLIDQYLYYLSKTINGSGQNQQTLKFSVAGPSNMAVQGRNYIPGPSYRQQRVSTTVTQNNNSEIAWPRASSWALNGRNSLMNPGPAMASHKEGEDRFFPLSGSLIFGKQGTGRDNVDADKVMITNEEEIKTTNPVATESYGQVATNHQSAQAQAQTGWVQNQGILPGMVWQDRDVYLQGPIWAKIPHTDGNFHPSPLMGGFGMKHPPPQILIKNTPVPADPPTAFNKDKLNSFITQYSTGQVSVEIEWELQKENSKRWNPEIQYTSNYCKSNNVEFAVNTEGVYSEPRPIGTRYLTRNL

SEQ ID NO: 612 - protein, 736 aa, Artificial Sequence; identical to SEQ ID NO: 608
  Description of Artificial Sequence: Synthetic polypeptide

SEQ ID NO: 613 - DNA, 2208 bp, Artificial Sequence
  Description of Artificial Sequence: Synthetic polynucleotide
atggctgccgatggttatcttccagattggctcgaggacaaccttagtgaaggaattcgcgagtggtgggctttgaaacctggagcccctcaacccaaggcaaatcaacaacatcaagacaacgctcgaggtcttgtgcttccgggttacaaataccttggacccggcaacggactcgacaagggggagccggtcaacgcagcagacgcggcggccctcgagcacgacaaggcctacgaccagcagctcaaggccggagacaacccgtacctcaagtacaaccacgccgacgccgagttccaggagcggctcaaagaagatacgtcttttgggggcaacctcgggcgagcagtcttccaggccaaaaagaggcttcttgaacctcttggtctggttgaggaagcggctaagacggctcctggaaagaagaggcctgtagagcagtctcctcaggaaccggactcctccgcgggtattggcaaatcgggtgcacagcccgctaaaaagagactcaatttcggtcagactggcgacacagagtcagtcccagaccctcaaccaatcggagaacctcccgcagccccctcaggtgtgggatctcttacaatggcttcaggtggtggcgcaccagtggcagacaataacgaaggtgccgatggagtgggtagttcctcgggaaattggcattgcgattcccaatggctgggggacagagtcatcaccaccagcacccgaacctgggccctgcccacctacaacaatcacctctacaagcaaatctccaacagcacatctggaggatcttcaaatgacaacgcctacttcggctacagcaccccctgggggtattttgacttcaacagattccactgccacttctcaccacgtgactggcagcgactcatcaacaacaactggggattccggcctaagcgactcaacttcaagctcttcaacattcaggtcaaagaggttacggacaacaatggagtcaagaccatcgccaataaccttaccagcacggtccaggtcttcacggactcagactatcagctcccgtacgtgctcgggtcggctcacgagggctgcctcccgccgttcccagcggacgttttcatgattcctcagtacgggtatctgacgcttaatgatggaagccaggccgtgggtcgttcgtccttttactgcctggaatatttcccgtcgcaaatgctaagaacgggtaacaacttccagttcggctacgagtttgagaacgtacctttccatagcagctacgctcacagccaaagcctggaccgactaatgaatccactcatcgaccaatacttgtactatctctcaaagactattaacggttctggacagaatcaacaaacgctaaaattcagtgtggccggacccagcaacatggctgtccagggaagaaactacatacctggacccagctaccgacaacaacgtgtctcaaccactgtgactcaaaacaacaacagcgaatttgcttggcctggagcttcttcttgggctctcaatggacgtaatagcttgatgaatcctggacctgctatggccagccacaaagaaggagaggaccgtttctttcctttgtctggatctttaatttttggcaaacaaggaactggaagagacaacgtggatgcggacaaagtcatgataaccaacgaagaagaaattaaaactactaacccggtagcaacggagtcctatggacaagtggccacaaaccaccagagtgcccaagcacaggcgcagaccggctgggttcaaaaccaaggaatacttccgggtatggtttggcaggacagagatgtgtacctgcaaggacccatttgggccaaaattcctcacacggacggcaactttcacccttctccgctgatgggagggtttggaatgaagcacccgcctcctcagatcctcatcaaaaacacacctgtacctgcggatcctccaacggccttcaacaaggacaagctgaactctttcatcacccagtattctactggccaagtcagcgtggagatcgagtgggagctgcagaaggaaaacagcaagcgctgggacccggagatccagtacacttccaactattacaagtctaataatgttgaatttgctgttaatactgaaggtgtatatagtgaaccccgccccattggcaccagatacctgactcgtaatctg

SEQ ID NO: 614 - DNA, 2208 bp, Artificial Sequence
  Description of Artificial Sequence: Synthetic polynucleotide
atggctgccgatggttatcttccagattggctcgaggacaaccttagtgaaggaattcgcgagtggtgggctttgaaacctggagcccctcaacccaaggcaaatcaacaacatcaagacaacgctcgaggtcttgtgcttccgggttacaaataccttggacccggcaacggactcgacaagggggagccggtcaacgcagcagacgcggcggccctcgagcacgacaaggcctacgaccagcagctcaaggccggagacaacccgtacctcaagtacaaccacgccgacgccgagttccaggagcggctcaaagaagatacgtcttttgggggcaacctcgggcgagcagtcttccaggccaaaaagaggcttcttgaacctcttggtctggttgaggaagcggctaagacggctcctggaaagaagaggcctgtagagcagtctcctcaggaaccggactcctccgcgggtattggcaaatcgggtgcacagcccgctaaaaagagactcaatttcggtcagactggcgacacagagtcagtcccagaccctcaaccaatcggagaacctcccgcagccccctcaggtgtgggatctcttacaatggcttcaggtggtggcgcaccagtggcagacaataacgaaggtgccgatggagtgggtagttcctcgggaaattggcattgcgattcccaatggctgggggacagagtcatcaccaccagcacccgaacctgggccctgcccacctacaacaatcacctctacaagcaaatctccaacagcacatctggaggatcttcaaatgacaacgcctacttcggctacagcaccccctgggggtattttgacttcaacagattccactgccgcttctcaccacgtgactggcagcgactcatcaacaacaactggggattccggcctaagcgactcaacttcaagctcttcaacattcaggtcaaagaggttacggacaacaatggagtcaagaccatcgccaataaccttaccagcacggtccaggtcttcacggactcagactatcagctcccgtacgtgctcgggtcggctcacgagggctgcctcccgccgttcccagcggacgttttcatgattcctcagtacgggtatctgacgcttaatgatggaagccaggccgtgggtcgttcgtccttttactgcctggaatatttcccgtcgcaaatgctaagaacgggtaacaacttccagttcagctacgagtttgagaacgtacctttccatagcagctacgctcacagccaaagcctggaccgactaatgaatccactcatcgaccaatacttgtactatctctcaaagactattaacggttctggacagaatcaacaaacgctaaaattcagtgtggccggacccagcaacatggctgtccagggaagaaactacatacctggacccagctaccgacaacaacgtgtctcaaccactgtgactcaaaacaacaacagcgaatttgcttggcctggagcttcttcttgggctctcaatggacgtaatagcttgatgaatcctggacctgctatggccagccacaaagaaggagaggaccgtttctttcctttgtctggatctttaatttttggcaaacaaggaactggaagagacaacgtggatgcggacaaagtcatgataaccaacgaagaagaaattaaaactactaacccggtagcaacggagtcctatggacaagtggccacaaaccaccagagtgcccaagcacaggcgcagaccggctgggttcaaaaccaaggaatacttccgggtatggtttggcaggacagagatgtgtacctgcaaggacccatttgggccaaaattcctcacacggacggcaactttcacccttctccgctgatgggagggtttggaatgaagcacccgcctcctcagatcctcatcaaaaacgcccctgtacctgcggatcctccaacggccttcaacaaggacaagctgaactctttcatcacccagtattctactggccaagtcagcgtggagatcgagtgggagctgcagaaggaaaacagcaagcgctggaacccggagatccagtacacttccaactattacaagtctaataatgttgaatttgctgttaatactgaaggtgtatatagtgaaccccgccccattggcaccagatacctgactcgtaatctg

SEQ ID NO: 615 - DNA, 2208 bp, Artificial Sequence
  Description of Artificial Sequence: Synthetic polynucleotide
atggctgccgatggttatcttccagattggctcgaggacaaccttagtgaaggaattcgcgagtggtgggctttgaaacctggagcccctcaacccaaggcaaatcaacaacatcaagacaacgctcgaggtcttgtgcttccgggttacaaataccttggacccggcaacggactcgacaagggggagccggtcagcgcagcagacgcggcggccctcgagcacgacaaggcctacgaccagcagctcaaggccggagacaacccgtacctcaagtacaaccacgccgacgccgagttccaggagcggctcaaagaagatacgtcttttgggggcaacctcgggcgagcagtcttccaggccaaaaagaggcttcttgaacctcttggtctggttgaggaagcggctaagacggctcctggaaagaagaggcctgtagagcagtctcctcaggaaccggactcctccgcgggtattggcaaatcgggtgcacagcccgctaaaaagagactcaatttcggtcagactggcgacacagagtcagtcccagaccctcaaccaatcggagaacctcccgcagccccctcaggtgtgggatctcttacaatggcttcaggtggtggcgcaccagtggcagacaataacgaaggtgccgatggagtgggtagttcctcgggaaattggcattgcgattcccaatggctgggggacagagtcatcaccaccagcacccgaacctgggccctgcccacctacaacaatcacctctacaagcaaatctccaacagcacatctggaggatcttcaaatgacaacgcctacttcggctacagcaccccctgggggtattttgacttcaacagattccactgccacttctcaccgcgtgactggcagcgactcatcaacaacaactggggattccggcctaagcgactcaacttcaagctcttcaacattcaggtcaaagaggttacggacaacaatggagtcaagaccatcgccaataaccttaccagcacggtccaggtcttcacggactcagactatcagctcccgtacgtgctcgggtcggctcacgagggctgcctcccgccgttcccagcggacgttttcatgattcctcagtacgggtatctgacgcttaatgatggaagccaggccgtgggtcgttcgtccttttactgcctggaatatttcccgtcgcaaatgctaagaacgggtaacaacttccagttcagctacgagtttgagaacgtacctttccatagcagctacgctcacagccaaagcctggaccgactaatgaatccactcatcgaccaatacttgtactatctctcaaagactattaacggttctggacagaatcaacaaacgctaaaattcagtgtggccggacccagcaacatggctgtccagggaagaaactacatacctggacccagctaccgacaacaacgtgtctcaaccactgtgactcaaaacaacaacagcgaatttgcttggcctggagcttcttcttgggctctcaatggacgtaatagcttgatgaatcctggacctgctatggccagccacaaagaaggagaggaccgtttctttcctttgtctggatctttaatttttggcaaacaaggaactggaagagacaacgtggatgcggacaaagtcatgataaccaacgaagaagaaattaaaactactaacccggtagcaacggagtcctatggacaagtggccacaaaccaccagagtgcccaagcacaggcgcagaccggctgggttcaaaaccaaggaatacttccgggtatggtttggcaggacagagatgtgtacctgcaaggacccatttgggccaaaattcctcacacggacggcaactttcacccttctccgctgatgggagggtttggaatgaagcacccgcctcctcagatcctcatcaaaaacacacctgtacctgcggatcctccaacggccttcaacaaggacaagctgaactctttcatcacccagtattctactggccaagtcagcgtggagatcgagtgggagctgcagaaggaaaacagcaagcgctggaacccggagatccagtacacttccaactattacaagtctaataatgttgaatttgctgttaatactgaaggtgtatatagtgaaccccgccccattggcaccagatacctgactcgtaatctg

SEQ ID NO: 616 - DNA, 2208 bp, Artificial Sequence
  Description of Artificial Sequence: Synthetic polynucleotide
atggctgccgatggttatcttccagattggctcgaggacaaccttagtgaaggaattcgcgagtggtgggctttgaaacctggagcccctcaacccaaggcaaatcaacaacatcaagacaacgctcgaggtcttgtgcttccgggttacaaataccttggacccggcaacggactcgacaagggggagccggtcaacgcagcagacgcggcggccctcgagcacgacaaggcctacgaccagcagctcaaggccggagacaacccgtacctcaagtacaaccacgccgacgccgagttccaggagcggctcaaagaagatacgtcttttgggggcaacctcgggcgagcagtcttccaggccaaaaagaggcttcttgaacctcttggtctggttgaggaagcggctaagacggctcctggaaagaagaggcctgtagagcagtctcctcaggaaccggactcctccgcgggtattggcaaatcgggtgcacagcccgctaaaaagagactcaatttcggtcagactggcgacacagagtcagtcccagaccctcaaccaatcggagaacctcccgcagccccctcaggtgtgggatctcttacaatggcttcaggtggtggcgcaccagtggcagacaataacgaaggtgccgatggagtgggtagttcctcgggaaattggcattgcgattcccaatggctgggggacagagtcatcaccaccagcacccgaacctgggccctgcccacctacaacaatcacctctacaagcaaatctccaacagcacatctggaggatcttcaaatgacaacgcctacttcggctacagcaccccctgggggtattttgacttcaacagattccactgccacttctcaccacgtgactggcagcgactcatcaacaacaactggggattccggcctaagcgactcaacttcaagctcttcaacattcaggtcaaagaggttacggacaacaatggagtcaagaccatcgccaataaccttaccagcacggtccaggtcttcacggactcagactatcagctcccgtacgtgctcgggtcggctcacgagggctgcctcccgccgttcccagcggacgttttcatgattcctcagtacgggtatctgacgcttaatgatggaagccaggccgtgggtcgttcgtccttttactgcctggaatatttcccgtcgcaaatgctaagaacgggtaacaacttccagttcagctacgagtttgagaacgtacctttccatagcagctacgctcacagccaaagcctggaccgactaatgaatccactcatcgaccaatacttgtactatctctcaaagactattaacggttctggacagaatcaacaaacgctaaaattcagtgtggccggacccagcaacacggctgtccagggaagaaactacatacctggacccagctaccgacaacaacgtgtctcaaccactgtgactcaaaacaacaacagcgaatttgcttggcctggagcttcttcttgggctctcaatggacgtaatagcttgatgaatcctggacctgctatggccagccacaaagaaggagaggaccgtttctttcctttgtctggatctttaatttttggcaaacaaggaactggaagagacaacgtggatgcggacaaagtcatgataaccaacgaagaagaaattaaaactactaacccggtagcaacggagtcctatggacaagtggccacaaaccaccagagtgcccaagcacaggcgcagaccggctgggttcaaaaccaaggaatacttccgggtatggtttggcaggacagagatgtgtacctgcaaggacccatttgggccaaaattcctcacacggacggcaactttcacccttctccgctgatgggagggtttggaatgaagcacccgcctcctcagatcctcatcaaaaacacacctgtacctgcggatcctccaacggccttcaacaaggacaagctgaactctttcatcacccagtattctactggccaagtcagcgtggagatcgagtgggagctgcagaaggaaaacagcaagcgctggaacccggagatccagtacacttccaactattacaagtctaataatgttgaatttgctgttaatactgaaggtgtatatagtgaaccccgccccattggcaccagatacctgactcgtaatctg

SEQ ID NO: 617 - DNA, 2208 bp, Artificial Sequence
  Description of Artificial Sequence: Synthetic polynucleotide
atggctgccgatggttatcttccagattggctcgaggacaaccttagtgaaggaattcgcgagtggtgggctttgaaacctggagcccctcaacccaaggcaaatcaacaacatcaagacaacgctcgaggtcttgtgcttccgggttacaaataccttggacccggcaacggactcgacaagggggagccggtcaacgcagcagacgcggcggccctcgagcacgacaaggcctacgaccagcagctcaaggccggagacaacccgtacctcaagtacaaccacgccgacgccgagttccaggagcggctcaaagaagatacgtcttttgggggcaacctcgggcgagcagtcttccaggccaaaaagaggcttcttgaacctcttggtctggttgaggaagcggctaagacggctcctggaaagaagaggcctgtagagcagtctcctcaggaaccggactcctccgcgggtattggcaaatcgggtgcacagcccgctaaaaagagactcaatttcggtcagactggcgacacagagtcagtcccagaccctcaaccaatcggagaacctcccgcagccccctcaggtgtgggatctcttacaatggcttcaggtggtggcgcaccagtggcagacaataacgaaggtgccgatggagtgggtagttcctcgggaaattggcattgcgattcccaatggctgggggacagagtcatcaccaccagcacccgaacctgggccctgcccacctacaacaatcacctctacaagcaaatctccaacagcacatctggaggatcttcaaatgacaacgcctacttcggctacagcaccccctgggggtattttgacttcaacagattccactgccacttctcaccacgtgactggcagcgactcatcaacaacaactggggattccggcctaagcggctcaacttcaagctcttcaacattcaggtcaaagaggttacggacaacaatggagtcaagaccatcgccaataaccttaccagcacggtccaggtcttcacggactcagactatcagctcccgtacgtgctcgggtcggctcacgagggctgcctcccgccgttcccagcggacgttttcatgattcctcagtacgggtatctgacgcttaatgatggaagccaggccgtgggtcgttcgtccttttactgcctggaatatttcccgtcgcaaatgctaagaacgggtagcaacttccagttcagctacgagtttgagaacgtacctttccatagcagctacgctcacagccaaagcctggaccgactaatgaatccactcatcgaccaatacttgtactatctctcaaagactattaacggttctggacagaatcaacaaacgctaaaattcagtgtggccggacccagcaacatggctgtccagggaagaaactacatacctggacccagctaccgacaacaacgtgtctcaaccactgtgactcaaaacaacaacagcgaatttgcttggcctggagcttcttcttgggctctcaatggacgtaatagcttgatgaatcctggacctgctatggccagccacaaagaaggagaggaccgtttctttcctttgtctggatctttaatttttggcaaacaaggaactggaagagacaacgtggatgcggacaaagtcatgataaccaacgaagaagaaattaaaactactaacccggcagcaacggagtcctatggacaagtggccacaaaccaccagagtgcccaagcacaggcgcagaccggctgggttcaaaaccaaggaatacttccgggtatggtttggcaggacagagatgtgtacctgcaaggacccatttgggccaaaattcctcacacggacggcaactttcacccttctccgctgatgggagggtttggaatgaagcacccgcctcctcagatcctcatcaaaaacacacctgtacctgcggatcctccaacggccttcaacaaggacaagctgaactctttcatcacccagtattctactggccaagtcagcgtggagatcgagtgggagctgcagaaggaaaacagcaagcgctggaacccggagatccagcacacttccaactattacaagtctaataatgttgaatttgctgttaatactgaaggtgtatatagtgaaccccgccccattggcaccagatacctgactcgtaatctg

SEQ ID NO: 618 - DNA, 2208 bp, Artificial Sequence
  Description of Artificial Sequence: Synthetic polynucleotide
atggctgccgatggttatcttccagattggctcgaggacaaccttagtgaaggaattcgcgagtggtgggctttgaaacctggagcccctcaacccaaggcaaatcaacaacatcaagacaacgctcgaggtcttgtgcttccgggttacaaataccttggacccggcaacggactcgacaagggggagccggtcaacgcagcagacgcggcggccctcgagcacgacaaggcctacgaccagcagctcaaggccggagacaacccgtacctcaagtacaaccacgccgacgccgagttccaggagcggctcaaagaagatacgtcttttgggggcaacctcgggcgagcagtcttccaggccaaaaagaggcttcttgaacctcttggtctggttgaggaagcggctaagacggctcctggaaagaagaggcctgtagagcagtctcctcaggaaccggactcctccgcgggtattggcaaatcgggtgcacagcccgctaaaaagagactcaatttcggtcagactggcgacacagagtcagtcccagaccctcaaccaatcggagaacctcccgcagccccctcaggtgtgggatctcttacaatggcttcaggtggtggcgcaccagtggcagacaataacgaaggtgccgatggagtgggtagttcctcgggaaattggcattgcgattcccaatggctgggggacagagtcatcaccaccagcacccgaacctgggccctgcccacctacaacaatcacctctacaagcaaatctccaacagcacatctggaggatcttcaaatgacaacgcctacttcggctacagcaccccctgggggtattttgacttcaacagattccactgccacttctcaccacgtgactggcagcgactcatcaacaacaactggggattccggcctaagcgactcaacttcaggctcttcaacattcaggtcaaagaggttacggacaacaatggagtcaagaccatcgccaataaccttaccagcacggtccaggtcttcacggactcagactatcagctcccgtacgtgctcgggtcggctcacgagggctgcctcccgccgttcccagcggacgttttcatgattcctcagtacgggtatctgacgcttaatgatggaagccaggccgtgggtcgttcgtccttttactgcctggaatatttcccgtcgcaaatgctaagaacgggtaacaacttccagttcagctacgagtttgagaacgtacctttccatagcagctacgctcacagccaaagcctggaccgactaatgaatccactcatcgaccaatacttgtactatctctcaaagactattaacggttctggacagaatcaacaaacgctaaaattcagtgtggccggacccagcaacatggctgtccagggaagaaactacatacctggacccagctaccgacaacaacgtgtctcaaccactgtgactcaaaacaacaacagcgaatttgcttggcctggagcttcttcttgggctctcaatggacgtaatagcttgatgaatcctggacctgctatggccagccacaaagaaggagaggaccgtttctttcctttgtctggatctttaatttttggcaaacaaggaactggaagagacaacgtggatgcggacaaagtcatgataaccaacgaagaagaaattaaaactactaacccggtagcaacggagtcctatggacaagtggccacaaaccaccagagtgcccaagcacaggcgcagaccggctgggttcaaagccaaggaatacttccgggtatggtttggcaggacagagatgtgtacctgcaaggacccatttgggccaaaattcctcacacggacggcaactttcacccttctccgctgatgggagggtttggaatgaagcacccgcctccccagatcctcatcaaaaacacacctgtacctgcggatcctccaacggccttcaacaaggacaagctgaactctttcatcacccagtattctactggccaagtcagcgtggagatcgagtgggagctgcagaaggaaaacagcaagcgctggaacccggagatccagtacacttccaactattacaagtctaataatgttgaatttgctgttaatactgaaggtgtatatagtgaaccccgccccattggcaccagatacctgactcgtaatctg

SEQ ID NO: 619 - DNA, 2205 bp, Artificial Sequence
  Description of Artificial Sequence: Synthetic polynucleotide
atggctgccgatggttatcttccagattggctcgaggacaaccttagtgaaggaattcgcgagtggtgggctttgaaacctggagcccctcaacccaaggcaaatcaacaacatcaagacaacgcccgaggtcttgtgcttccgggttacaaataccttggacccggcaacggactcgacaagggggagccggtcaacgcagcagacgcggcggccctcgagcacgacaaggcctacgaccagcagctcaaggccggagacaacccgtacctcaagtacaaccacgccgacgccgagttccaggagcggctcaaagaagatacgtcttttgggggcaacctcgggcgagcagtcttccaggccaaaaagaggcttcttgaacctcttggtctggttgaggaagcggctaagacggctcctggaaagaagaggcctgtagagcagtctcctcaggaaccggactcctccgcgggtattggcaaatcgggtgcacagcccgctaaaaagagactcaatttcggtcagactggcgacacagagtcagtcccagaccctcaaccaatcggagaacctcccgcagccccctcaggtgtgggatctcttacaatggcttcaggtggtggcgcaccagtggcagacaataacgaaggtgccgatggagtgggtagttcctcgggaaattggcattgcgattcccaatggctgggggacagagtcatcaccaccagcacccgaacctgggccctgcccacctacaacaatcacctctacaagcaaatctccaacagcacatctggaggatcttcaaatgacaacgcctacttcggctacagcaccccctggaggtattttgacttcaacagattccactgccacttctcaccacgtgactggcagcgactcatcaacaactggggattccggcctaagcgactcaacttcaagctcttcaacattcaggtcaaagaggttacggacaacaatggagtcaagaccatcgccaataaccttaccagcacggtccaggccttcacggactcagactatcagctcccgtacgtgctcgggtcggctcacgagggctgcctcccgccgttcccagcggacgttttcatgattcctcagtacgggtatctgacgcttaatgatggaagccaggccgtgggtcgttcgtccttttactgcctggaatatttcccgtcgcaaatgctaagaacgggtaacaacttccagttcagctacgagtttgagaacgtacctttccatagcagctacgctcacagccaaagcctggaccgactaatgaatccactcatcgaccaatacttgtactatctctcaaagactattaacggttctggacagaatcaacaaacgctaaaattcagtgtggccggacccagcaacatggctgtccagggaagaaactacatacctggacccagctaccgacaacaacgtgtctcaaccactgtgactcaaaacaacaacagcgaatttgcttggcctggagcttcttcttgggctctcaatggacgtaatagcttgatgaatcctggacctgctatggccagccacaaagaaggagaggaccgtttctttcctttgtctggatctttaatttttggcaaacaaggaactggaagagacaacgtggatgcggacaaagtcatgataaccaacgaagaagaaattaaaactactaacccggtagcaacggagtcctatggacaagtggccacaaaccaccagagtgcccaagcacaggcgcagaccggctgggttcaaaaccaaggaatacttccgggtatggtttggcaggacagagatgtgtacctgcaaggacccatttgggccaaaattcctcacacggacggcaactttcacccttctccgctgatgggagggtttggaatgaagcacccgcctcctcagatcctcatcaaaaacacacctgtacctgcggatcctccaacggccttcaacaaggacgagctgaactctttcatcacccagtattctactggccaagtcagcgtggagatcgagtgggagctgcagaaggaaaacagcaagcgctggaacccggagatccagtacacttccaactattacaagtctaataatgttgaatttgctgttaatactgaaggtgtatatagtgaaccccgccccattggcaccagatacctgactcgtaatctg

SEQ ID NO: 620 - DNA, 2205 bp, Artificial Sequence
  Description of Artificial Sequence: Synthetic polynucleotide
atggctgccgatggttatcttccagattggctcgaggacaaccttagtgaaggaattcgcgagtggtgggctttgaaacctggagcccctcaacccaaggcaaatcaacaacatcaagacaacgctcgaggtcttgtgcttccgggttacaaataccttggacccggcaacggactcgacaagggggagccggtcaacgcagcagacgcggcggccctcgagcacgacaaggcctacgaccagcagctcaaggccggagacaacccgtacctcaagtacaaccacgccgacgccgagttccaggagcggctcaaagaagatacgtcttttgggggcaacctcgggcgagcagtcttccaggacaaaaagaggcttcttgaacctcttggtctggttgaggaagcggctaagacggctcctggaaagaagaggcctgtagagcagtctcctcaggaaccggactcctccgcgggtattggcaaatcgggtgcacagcccgctaaaaagagactcaatttcggtcagactggcgacacagagtcagtcccagaccctcaaccaatcggagaacctcccgcagccccctcaggtgtgggatctcttacaatggcttcaggtggtggcgcaccagtggcagacaataacgaaggtgccgatggagtgggtagttcctcgggaaattggcattgcgattcccaatggctgggggacagagtcatcaccaccagcacccgaacctgggccctgcccacctacaacaatcacctctacaagcaaatctccaacagcacatctggaggatcttcaaatgacaacgcctacttcggctacagcaccccctgggggtattttgacttcaacagattccactgccacttctcaccacgtgactggcagcgactcatcaacaactggggattccggcctaagcgactcaacttcaagctcttcaacattcaggtcaaagaggttacggacaacaatggagtcaagaccatcgccaataaccttaccagcacggtccaggtcttcacggactcagactatcagctcccgtacgtgctcgggtcggctcacgagggctgcctcccgccgttcccagcggacgttttcatgattcctcagtacgggtatctgacgcttaatgatggaagccaggccgtgggtcgttcgtccttttactgcctggaatatttcccgtcgcaaatgctaagaacgggtaacaacttccaattcagctacgagtttgagaacgtacctttccatagcagctacgctcacagccaaagcctggaccgactaatgaatccactcatcgaccaatacttgtactatctctcaaagactattaacggttctggacagaatcaacaaacgctaaaattcagtgtggccggacccagcaacatggctgtccagggaagaaactacatacctggacccagctaccgacaacaacgtgtctcaaccactgtgactcaaaacaacaacagcgaatttgcttggcctggagcttcttcttgggctctcaatggacgtaatagcttgatgaatcctggacctgctatggccagccacaaagaaggagaggaccgtttctttcctttgtctggatctttaatttttggcaaacaaggaactggaagagacaacgtggatgcggacaaagtcatgataaccaacgaagaagaaattaaaactactaacccggtagcaacggagtcctatggacaagtggccacaaaccaccagagtgcccaagcacaggcgcagaccggctgggttcaaaaccaaggaatacttccgggtatggtttggcaggacagagatgtgtacctgcaaggacccatttgggccaaaattcctcacacggacggcaactttcacccttctccgctgatgggagggtttggaatgaagcacccgcctcctcagatcctcatcaaaaacacacctgtacctgcggatcctccaacggccttcaacaaggacaagctgaactctttcatcacccagtattctactggccaagtcagcgtggagatcgagtgggagctgcagaaggaaaacagcaagcgctggaacccggagatccagtacacttccaactattacaagtctaataatgttgaatttgctgttaatactgaaggtgtatatagtgaaccccgccccattggcaccagatacctgactcgtaatctg

SEQ ID NO: 621 - DNA, 2208 bp, Artificial Sequence
  Description of Artificial Sequence: Synthetic polynucleotide
atggctgccgatggttatcttccagattggctcgaggacaaccttagtgaaggaattcgcgagtggtgggctttgaaacctggagcccctcaacccaaggcaaatcaacaacatcaagacaacgctcgaggtcttgtgcttccgggttacaaataccttggacccggcaacggactcgacaagggggagccggtcaacgcagcagacgcggcggccctcgagcacgacaaggcctacgaccagcagctcaaggccggagacaacccgtacctcaagtacaaccacgccgacgccgagttccaggagcggctcaaagaagatacgtcttttgggggcaacctcgggcgagcagtcttccaggccaaaaagaggcttcttgaacctcttggtctggttgaggaagcggctaagacggctcctggaaagaagaggcctgtagagcagtctcctcaggaaccggactcctccgcgggtattggcaaatcgggtgcacagcccgctaaaaagagactcaatttcggtcagactggcgacacagagtcagtcccagaccctcaaccaatcggagaacctcccgcagccccctcaggtgtgggatctcttacaatggcttcaggtggtggcgcaccagtggcagacaataacgaaggtgccgatggagtgggtagttcctcgggaaattggcattgcgattcccaatggctgggggacagagccatcaccaccagcacccgaacctgggccctgcccacctacaacaatcacctctacaagcaaatctccaacagcacatctggaggatcttcaaatgacaacgcctacttcggctacagcaccccctgggggtattttgacttcaacagattccactgccacttctcaccacgtgactggcagcggctcatcaacaacaactggggattccggcctaagcgactcaacttcaagctcttcaacattcaggtcaaagaggttacggacaacaatggagtcaagaccatcgccaataaccttaccagcacggtccaggtcttcacggactcagactatcagctcccgtacgtgctcgggtcggctcacgagggctgcctcccgccgttcccagcggacgttttcatgattcctcagtacgggtatctgacgcttaatgatggaagccaggccgtgggtcgttcgtccttttactgcctggaatatttcccgtcgcaaatgctaagaacgggtaacaacttccagttcagctacgagtttgagaacgtacctttccatagcagctacgctcacagccaaagcctggaccgactaatgaatccactcatcgaccaatacttgtactatctctcaaagactattaacggttctggacagaatcaacaaacgctaaaattcagtgtggccggacccagcaacatggctgtccagggaagaaactacatacctggacccagctaccgacaacaacgtgtctcaaccactgtgactcaaaacaacaacagcgaatttgcttggcctggagcttcttcttgggctctcaatggacgtaatagcttgatgaatcctggacctgctatggccagccacaaagaaggagaggaccgtttctttcctttgtctggatctttaatttttggcaaacaaggaactggaagagacaacgtggatgcggacaaagtcatgacaaccaacgaagaagaaattaaaactactaacccggtagcaacggagtcctatggacaagtggccacaaaccaccagagtgcccaagcacaggcgcagaccggctgggttcaaaaccaaggaatacttccgggtatggtttggcaggacagagatgtgtacctgcaaggacccatttgggccaaaattcctcacacggacggcaactttcacccttctccgctgatgggagggtttggaatgaagcacccgcctcctcagatcctcatcaaaaacacacctgtacctgcggatcctccaacggccttcaacaaggacaagctgaactctttcatcacccagtattctactggccaagtcagcgtggagatcgagtgggagctgcagaaggaaaacagcaagcgctggaacccggagatccagtacacttccaactattacaagtctaataatgttgaatttgctgttaatactgaaggtgtatatagtgaaccccgccccattggcaccagatacctgactcgtaatctg

SEQ ID NO: 622 - DNA, 2208 bp, Artificial Sequence
  Description of Artificial Sequence: Synthetic polynucleotide
atggctgccgatggttatcttccagattggctcgaggacaaccttagtgaaggaattcgcgagtggtgggctttgaaacctggagcccctcaacccaaggcaaatcaacaacatcaagacaacgctcgaggtcttgtgcttccgggttacaaataccttggacccggcaacggactcgacaagggggagccggtcaatgcagcagacgcggcggccctcgagcacgacaaggcctacgaccagcagctcaaggccggagacaacccgtacctcaagtacaaccacgccgacgccgagttccaggagcggctcaaagaagatacgtcttttgggggcaacctcgggcgagcagtcttccagaccaaaaagaggcttcttgaacctcttggtctggttgaggaagcggctaagacggctcctggaaagaagaggcctgtagagcagtctcctcaggaaccgggctcctccgcgggtattggcaaatcgggtgcacagcccgctaaaaagagactcaatttcggtcagactggcgacacagagtcagtcccagaccctcaaccaatcggagaacctcccgcagccccctcaggtgtgggatctcttacaatggcttcaggtggtggcgcaccagtggcagacaataacgaaggtgccgatggagtgggtagttcctcgggaaattggcattgcgattcccaatggctgggggacagagtcatcaccaccagcacccgaacctgggccctgcccacctacaacaatcacctctacaagcaaatctccaacagcacatctggaggatcttcaaatgacaacgcctacttcggctacagcaccccctgggggtattttgacttcaacagattccactgccacttctcaccacgtgactggcagcgactcatcaacaacaactggggattccggcctaagcgactcaacttcaagctcttcaacattcaggtcaaagaggttacggacaacaatggagtcaagaccatcgccaataaccttaccagcacggtccaggtcttcacggactcagactatcagctcccgtacgtgctcgggtcggctcacgagggctgcctcccgccgttcccagcggacgttttcatgattcctcagtacgggtatctgacgcttaatgatggaagccaggccgtgggtcgttcgtccttttactgcctggaatatttcccgtcgcaaatgctaagaacgggtaacaacttccagttcagctacgagtttgagaacgtacctttccatagcagctacgctcacagccaaagcctggaccgactaatgaatccactcatcgaccaatacttgcactatctctcaaagactattaacggttctggacagaatcaacaaacgctaaaattcagtgtggccggacccagcaacatggctgtccagggaagaaactacatacctggacccagctaccgacaacaacgtgtctcaaccactgtgactcaaaacaacaacagcgaatttgcttggcctggagcttcttcttgggctctcaatggacgtaatagcttgatgaatcctggacctgctatggccagccacaaagaaggagaggaccgtttctttcctttgtctggatctttaatttttggcaaacaaggaactggaagagacaacgtggatgcggacaaagtcatgataaccaacgaagaagaaattaaaactactaacccggtagcaacggagtcctatggacaagtggccacaaaccaccagagtgcccaagcacaggcgcagaccggctgggttcaaaaccaaggaatacttccgggtatggtttggcaggacagagatgtgtacctgcaaggacccatttgggccaaaattcctcacacggacggcaactttcacccttctccgctgatgggagggtttggaatgaagcacccgcctcctcagatcctcatcaaaaacacacctgtacctgcggatcctccaacggccttcaacaaggacaagctgaactctttcatcacccagtattctactggccaagtcagcgtggagatcgagtgggagctgcagaaggaaaacagcaagcgctggaacccggagatccagtacacttccaactattacaagtctaataatgttgaatttgctgttaatactgaaggtgtatatagtgaaccccgccccattggcaccagatacctgactcgtaatctg

SEQ ID NO: 623 - DNA, 2208 bp, Artificial Sequence
  Description of Artificial Sequence: Synthetic polynucleotide
atggctgccgatggttattttccagattggctcgaggacaaccttagtgaaggaattcgcgagtggtgggctttgaaacctggagcccctcaacccaaggcaaatcaacaacatcaagacaacgctcgaggtcttgtgcttccgggttacaaataccttggacccggcaacggactcgacaagggggagccggtcaacgcagcagacgcggcggccctcgagcacgacaaggcctacgaccagcagctcaaggccggagacaacccgtacctcaagtacaaccacgccgacgccgagttccaggagcggctcaaagaagatacgtcttttgggggcaacctcgggcgagcagtcttccaggccaaaaagaggcttcttgaacctcttggtctggttgaggaagcggctaagacggctcctggaaagaagaggcctgtagagcagtctcctcaggaaccggactcctccgcgggtattggcaaatcgggtgcacagcccgctaaaaagagactcaatttcggtcagactggcgacacagagtcagtcccagaccctcaaccaatcggagaatctcccgcagccccctcaggtgtgggatctcttacaatggcttcaggtggtggcgcaccagtggcagacaataacgaaggtgccgatggagtgggtagttcctcgggaaattggcattgcgattcccaatggctgggggacagagtcatcaccaccagcacccgaacctgggccctgcccacctacaacaatcacctctacaagcaaatctccaacagcacatctggaggatcttcaaatgacaacgcctacttcggctacagcaccccctgggggtattttgacttcaacagattccactgccacttctcaccacgtgactggcagcgactcatcaacaacaactggggattccggcctaagcgactcaacttcaagctcttcaacattcaggtcaaagaggttacggacaacaatggagtcaagaccatcgccaataaccttaccagcacggtccaggtcttcacggactcagactatcagctcccgtacgtgctcgggtcggctcacgagggctgcctcccgccgttcccagcggacgttttcatgattcctcagtacgggtatctgacgcttaatgatggaagccaggccgtgggtcgttcgtccttttactgcctggaatatctcccgtcgcaaatgctaagaacgggtaacaacttccagttcagctacgagtttgagaacgtacctttccatagcagctacgctcacagccaaagcctggaccgactaatgaatccactcatcgaccaatacttgcactatctctcaaagactattaacggttctggacagaatcaacaaacgctaaaattcagtgtggccggacccagcaacatggctgtccagggaagaaactacatacctggacccagctaccgacaacaacgtgtctcaaccactgtgactcaaaacaacaacagcgaatttgcttggcctggagcttcttcttgggctctcaatggacgtaatagcttgatgaatcctggacctgctgtggccagccacaaagaaggagaggaccgtttctttcctttgtctggatctttaatttttggcaaacaaggaactggaagagacaacgtggatgcggacaaagtcatgataaccaacgaagaagaaattaaaactactaacccggtagcaacggagtcctatggacaagtggccacaaaccaccagagtgcccaagcacaggcgcagaccggctgggttcaaaaccaaggaatacttccgggtatggtttggcaggacagagatgtgtacctgcaaggacccatttgggccaaaattcctcacacggacggcaactttcacccttctccgctgatgggagggtttggaatgaagcacccgcctcctcagatcctcatcaaaaacacacctgtacctgcggatcctccaacggccttcaacaaggacaagctgaactctttcatcacccagtattctactggccaagtcagcgtggagatcgagtgggagctgcagaaggaaaacagcaagcgctggaacccggagatccagtacacttccaactattacaagtctaataatgttgaatttgctgttaatactgaaggtgtatatagtgaaccccgccccattggcaccagatacctgactcgtaatctg

SEQ ID NO: 624 - DNA, 2208 bp, Artificial Sequence
  Description of Artificial Sequence: Synthetic polynucleotide
atggctgccgatggttatcttccagattggctcgaggacaaccttagtgaaggaattcgcgagtggtgggctttgaaacctggagcccctcaacccaaggcaaatcaacaacatcaagacaacgctcgaggtcttgtgcttccgggttacaaataccttggacccggcaacggactcgacaagggggagccggtcaacgcagcagacgcggcggccctcgagcacgacaaggcctacgaccagcagctcaaggccggagacaacccgtacctcaagtacaaccacgccgacgccgagttccaggagcggctcaaagaagatacgtcttttgggggcaacctcgggcgagcagtcttccaggccaaaaagaggcttcttgaacctcttggtccggttgaggaagcggctaagacggctcctggaaagaagaggcctgtagagcagtctcctcaggaaccggactcctccgcgggtattggcaaatcgggtgcacagcccgctaaaaagagactcaatttcggtcagactggcgacacagagtcagtcccagaccctcaaccaatcggagaacctcccgcagccccctcaggtgtgggatctcttacaatggcttcaggtggtggcgcaccagtggcagacaataacgaaggtgccgatggagtgggtagttcctcgggaaattggcattgcgattcccaatggctgggggacagagtcatcaccaccagcacccgaacctgggccctgcccacctacaacaatcacctctacaagcaaatctccaacagcacatctggaggatcttcaaatgacaacgcctacttcggctacagcaccccctgggggtattttgacttcaacagattccactgccacttctcaccacgtgactggcagcgactcatcaacaacaactggggattccggcctaagcgactcaacttcaagctcttcaacattcaggtcaaagaggttacggacaacaatggagtcaagaccatcgccaataaccttaccagcacggtccaggtcttcacggactcagactatcagctcccgtacgtgctcgggtcggctcacgagggctgcctcccgccgttcccagcggacgttttcatgattcctcagtacgggtatctgacgcttaatgatggaagccaggccgtgggtcgttcgtccttttactgcctggaatatttcccgtcgcaaatgctaagaacgggtaacaacttccagttcagctacgagtttgagaacgtacctttccatagcagctacgctcacagccaaagcctggaccgactaatgaatccactcatcgaccaatacttgtactatctctcaaagactattaacggttctggacagaatcaacaaacgctaaaattcagtgtggccggacccagcaacatggctgtccagggaagaaactacatacctggacccagctaccgacaacaacgtgtctcaaccactgtgactcaaaacaacaacagcgaatttgcttggcctggagcttcttcttgggctctcaatggacgtaatagcttgatgaatcctggacctgctatggccagccacaaagaaggagaggaccgtttctttcctttgtctggatctttaatttttggcaaacaaggaactggaagagacaacgtggatgcggacaaagtcatgataaccaacgaagaagaaattaaaactactaacccggtagcaacggagtcctatggacaagcggccacaaaccaccagagtgcccaagcacaggcgcagaccggctgggttcaaaaccaaggaatacttccgggtatggtttggcaggacagagatgtgtacctgcaaggacccatttgggccaaaattcctcacacggacggcaactttcacccttctccgctgatgggagggtttggaatgaagcacccgcctcctcagatcctcatcaaaaacacacctgtacctgcggatcctccaacggccttcaacaaggacaagctgaactctttcatcacccagtattctactggccaagtcagcgtggagatcgagtgggagctgcagaaggaaaacagcaagcgctggaacccggagatccagtacacttccaactattacaagtctaataatgttgaatttgctgttaatactgaaggtgtatatagtgaaccccgccccattggcaccagatacctgactcgtaatctg

SEQ ID NO: 625 - DNA, 2208 bp, Artificial Sequence
  Description of Artificial Sequence: Synthetic polynucleotide
atggctgccgatggttatcttccagattggctcgaggacaaccttagtgaaggaattcgcgagtggtgggctttgaaacctggagcccctcaacccaaggcaaatcaacaacatcaagacaacgctcggggtcttgtgcttccgggttacaaataccttggacccggcaacggactcgacaagggggagccggtcaacgcagcagacgcggcggccctcgagcacgacaaggcctacgaccagcagctcaaggccggagacaacccgtacctcaagtacaaccacgccgacgccgagttccaggagcggctcaaagaagatacgtcttttgggggcaacctcgggcgagcagtcttccaggccaaaaagaggcttcttgaacctcttggtccggttgaggaagcggctaagacggctcctggaaagaagaggcctgtagagcagtctcctcaggaaccggactcctccgcgggtattggcaaatcgggtgcacagcccgctaaaaagagactcaatttcggtcagactggcgacacagagtcagtcccagaccctcaaccaatcggagaacctcccgcagccccctcaggtgtgggatctcttacaatggcttcaggtggtggcgcaccagtggcagacaataacgaaggtgccgatggagtgggtagttcctcgggaaattggcattgcgattcccaatggctgggggacagagtcatcaccaccagcacccgaacctgggccctgcccacctacaacaatcacctctacaagcaaatctccaacagcacatctggaggatcttcaaatgacaacgcctacttcggctacagcaccccctgggggtattttgacttcaacagattccactgccacttctcaccacgtgactggcggcgactcatcaacaacaactggggattccggcctaagcgactcaacttcaagctcttcaacattcaggtcaaagaggttacggacaacaatggagtcaagaccatcgccaataaccttaccagcacggtccaggtcttcacggactcagactatcagctcccgtacgtgctcgggtcggctcacgagggctgcctcccgccgttcccagcggacgttttcatgattcctcagtacgggtatctgacgcttaatgatggaagccaggccgtgggtcgttcgtccttttactgcctggaatatttcccgtcgcaaatgctaagaacgggtaacaacttccagttcagctacgagtttgagaacgtacctttccatagcagctacgctcacagccaaagcctggaccgactaatgaatccactcatcgaccaatacttgtactatctctcaaagactattaacggttctggacagaatcaacaaacgctaaaattcagtgtggccggacccagcaacatggctgtccagggaagaaactacatacctggacccagctaccgacaacaacgtgtctcaaccactgtgactcaaaacaacaacagcgaatttgcttggcctggagcttcttcttgggctctcaatggacgtaatagcttgatgaatcctggacctgctatggccagccacaaagaaggagaggaccgtttctttcctttgtctggatctttaatttttggcaaacaaggaactggaagagacaacgtggatgcggacaaagtcatgataaccaacgaagaagaaattaaaactactaacccggtagcaacggagtcctatggacaagtggccacaaaccaccagagtgcccaagcacaggcgcagaccggctgggttcaaaaccaaggaatacttccgggtatggtttggcaggacagagatgtgtacctgcaaggacccatttgggccaaaattcctcacacggacggcaactttcacccttctccgctgatgggagggtttggaatgaagcacccgcctcctcagatcctcatcaaaaacacacctgtacctgcggatcctccaacggccttcaacaaggacaagctgaactctttcatcacccagtattctactggccaagtcagcgtggagatcgagtgggagctgcagaaggaaaacagcaagcgctggaacccggagatccagtacacttccaactattacaagtctaataatgttgaatttgctgttaatactgaaggtgtatatagtgaaccccgccccattggcaccagatacctgactcgtaatctg

SEQ ID NO: 626 - DNA, 2208 bp, Artificial Sequence
  Description of Artificial Sequence: Synthetic polynucleotide
atggctgccgatggttatcttccagattggctcgaggacaaccttagtgaaggaattcgcgagtggtgggctttgaaacctggagcccctcaacccaaggcaaatcaacaacatcaagacaacgctcgaggtcttgtgcttccgggttacaaataccttggacccggcaacggactcgacaagggggagccggtcaacgcagcagacgcggcggccctcgagcacgacaaggcctacgaccagcagctcaaggccggagacaacctgtacctcaagtacaaccacgccgacgccgagttccaggagcggctcaaagaagatacgtcttttgggggcaacctcgggcgagcagtcttccaggccaaaaagaggcttcttgaacctcttggtctggttgaggaagcggctaagacggctcctggaaagaagaggcctgtagagcagtctcctcaggaaccggactcctccgcgggtattggcaaatcgggtgcacagcccgctaaaaagagactcaatttcggtcagactggcgacacagagtcagtcccagaccctcaaccaatcggagaacctcccgcagccccctcaggtgtgggatctcttacaatggcttcaggtggtggcgcaccagtggcagacaataacgaaggtgccgatggagtgggtagttcctcgggaaattggcattgcgattcccaatggctgggggacagagtcatcaccaccagcacccgaacctgggccctgcccacctacaacaatcacctctacaagcaaatctccaacagcacatctggaggatcttcaaatgacaacgcctacttcggctacagcaccccctgggggtattttgacttcaacagattccactgccacttctcaccacgtgactggcagcgactcatcaacaacaactggggattccggcctaagcgactcaacttcaagctcttcaacattcaggtcaaagaggttacggacaacaatggagtcaagaccatcgccaataaccttaccagcacggtccaggtcttcacggactcagactatcagctcccgtacgtgctcgggtcggctcacgagggctgcctcccgccgttcccagcggacgttttcatgattcctcagtacgggtatctgacgcttaatgatggaagccaggccgtgggtcgttcgtccttttactgcctggaatatttcccgtcgcaaatgctaagaacgggtaacaacttccagttcagctacgagtttgagaacgtacctttccatagcagctacgctcacagccaaagcctggaccgactaatgaatccactcatcgaccaatacttgcactatctctcaaagactattaacggttctggacagaatcaacaaacgctaaaattcagtgtggccggacccagcaacatggctgtccagggaagaaactacatacctggacccagctaccgacaacaacgtgtctcaaccactgtgactcaaaacaacaacagcgaatttgcttggcctggagcttcttcttgggctctcaatggacgtaatagcttgatgaatcctggacctgctatggccagccacaaagaaggagaggaccgtttctttcctttgtctggatctttaatttttggcaaacaaggaactggaagagacaacgtggatgcggacaaagtcatgataaccaacgaagaagaaattaaaactactaacccggtagcaacggagtcctatggacaagtggccacaaaccaccagagtgcccaagcacaggcgcagaccggctgggttcaaaaccaaggaatacttccgggtatggtttggcaggacagagatgtgtacctgcaaggacccatttgggccaaaattcctcacacggacggcaactttcacccttctccgctgatgggagggtttggaatgaagcacccgcctcctcagatcctcatcaaaaacacacctgtacctgcggatcctccaacggccttcaacaaggacaagctgaactctttcatcacccagtattctactggccaagtcagcgtggagatcgagtgggagctgcagaaggaaaacagcaagcgctggaacccggagatccagtacacttccaactattacaagtctaataatgttgaatttgctgttaatactgaaggtgtatatagtgaaccccgccccattggcaccagatacctgactcgtaatctg

SEQ ID NO: 627 - DNA, 2208 bp, Artificial Sequence
  Description of Artificial Sequence: Synthetic polynucleotide
atggctgccgatggttatcttccagattggctcgaggacaaccttagtgaaggaattcgcgagtggtgggctttgaaacctggagcccctcaacccaaggcaaatcaacaacatcaagacaacgctcgaggtcttgtgcttccgggttacaaataccttggacccggcaacggactcgacaagggggagccggtcaacgcagcagacgcggcggccctcgagcacgacaaggcctacgaccagcagctcaaggccggagacaacccgtacctcaagtacaaccacgccgacgccgagttccaggagcggctcaaagaagatacgtcttttgggggcaacctcgggcgagcagtcttccaggccaaaaagaggcttcttgaacctcttggtctggttgaggaagcggctaagacggctcctggaaagaagaggcctgtagagcagtctcctcaagaaccggactcctccgcgggtattggcaaatcgggtgcacagcccgctaaaaagagactcaatttcggtcagactggcgacacagagtcagtcccagaccctcaaccaatcggagaacctcccgcagccccctcaggtgtgggatctcttacaatggcttcaggtggtggcgcaccagtggcagacaataacgaaggtgccgatggagtgggtagttcctcgggaaattggcattgcgattcccaatggctgggggacagagtcatcaccaccagcacccgaacctgggccctgcccacctacaacaatcacctctacaagcaaatctccaacagcacatctggaggatcttcaaatgacaacgcctacttcggctacagcaccccctgggggtattttgacttcaacagattccactgccacttctcaccacgtgactggcagcgactcatcaacaacaactggggattccggcctaagcgactcaacttcaagctcttcaacattcaggtcaaagaggttacggacaacaatggagtcaagaccatcgccaataaccttaccagcacggtccaggtcttcacggactcagactatcagctcccgtacgtgctcgggtcggctcacgagggctgcctcccgccgttcccagcggacgttttcatgattcctcagtacgggtatctgacgcttaatgatggaagccaggccgtgggtcgttcgtccttttactgcctggaatatttcccgtcgcaaatgctaagaacgggtaacaacttccagttcagctacgagtttgagaacgtacctttccatagcagctacgctcacagccaaagcctggaccgactaatgaatccactcatcgaccaatacttgcactatctctcaaagactattaacggttctggacagaatcaacaaacgctaaaattcagtgtggccggacccagcaacatggctgtccagggaagaaactacatacctggacccagctaccgacaacaacgtgtctcaaccactgtgactcaaaacaacaacagcgaatttgcttggcctggagcttcttcttgggctctcaatggacgtaatagcttgatgaatcctggacctgctatggccagccacaaagaaggagaggaccgtttctttcctttgtctggatctttaatttttggcaaacaaggaactggaagagacaacgtggatgcggacaaagtcatgataaccaacgaagaagaaattaaaactactaacccggtagcaacggagtcctatggacaagtggccacaaaccaccagagtgcccaagcacaggcgcagaccggctgggttcaaaaccaaggaatacttccgggtatggtttggcaggacagagatgtgtacctgcaaggacccatttgggccaaaattcctcacacggacggcaactttcacccttctccgctgatgggagggtttggaatgaagcacccgcctcctcagatcctcatcaaaaacacacctgtacctgcggatcctccaacggccttcaacaaggacaagctgaactctttcatcacccagtattctactggccaagtcagcgtggagatcgagtgggagctgcagaaggaaaacagcaagcgctggaacccggagatccagtacacttccaactattacaagtctaataatgttgaatttgctgttaatactgaaggtgtatatagtgaaccccgccccattggcaccagatacctgactcgtaatctg

SEQ ID NO: 628 - DNA, 2208 bp, Artificial Sequence
  Description of Artificial Sequence: Synthetic polynucleotide
  modified_base (1325)..(1325): a, c, t, or g
atggctgccgatggttatcttccagattggctcgaggacaaccttagtgaaggaattcgcgagtggtgggctttgaaacctggagcccctcaacccaaggcaaatcaacaacatcaagacaacgctcgaggtcttgtgcttccgggttacaaataccttggacccggcaacggactcgacaagggggagccggtcaacgcagcagacgcggcggccctcgagcacgacaaggcctacgaccagcagctcaaggccggagacaacccgtacctcaagtacaaccacgccgacgccgagttccaggagcggctcaaagaagatacgtcttttgggggcaacctcgggcgagcagtcttccaggccaaaaagaggcttcttgaacctcttggtctggttgaggaagcggctaagacggctcctggaaagaagaggcctgtagagcagtctcctcaggaaccggactcctccgcgggtattggcaaatcgggtgcacagcccgctaaaaagagactcaatttcggtcagactggcgacacagagtcagtcccagaccctcaaccaatcggagaacctcccgcagccccctcaggtgtgggatctcttacaatggcttcaggtggtggcgcaccagtggcagacaataacgaaggtgccgatggagtgggtagttcctcgggaaattggcattgcgattcccaatggctgggggacagagtcatcaccaccagcacccgaacctgggccctgcccacctacaacaatcacctctacaagcaaatctccaccagcacatctggaggatcttcaaatgacaacgcctacttcggctacagcaccccctgggggtattttgacttcaacagattccactgccacttctcaccacgtgactggcagcgactcatcaacaacaactggggattccggcctaagcgactcaacttcaagctcttcaacattcaggtcaaagaggttacggacaacaatggagtcaagaccatcgccaataaccttaccagcacggtccaggtcttcacggactcagactatcagctcccgtacgtgctcgggtcggctcacgagggctgcctcccgccgttcccagcggacgttttcatgattcctcagtacgggtatctgacgcttaatgatggaagccaggccgtgggtcgttcgtccttttactgcctggaatatttcccgtcgcaaatgctaagaacgggtaacaacttccagttcagctacgagtttgagaacgtacctttccatagcagctacgctcacagccaaagcctggaccgactaatgaatccactcatcgaccnatacttgcactatctctcaaagactattaacggttctggacagaatcaacaaacgctaaaattcagtgtggccggacccagcaacatggctgtccagggaagaaactacatacctggacccagctaccgacaacaacgtgtctcaaccactgtgactcaaaacaacaacagcgaatttgcttggcctggagcttcttcttgggctctcaatggacgtaatagcttgatgaatcctggacctgctatggccagccacaaagaaggagaggaccgtttctttcctttgtctggatctttaatttttggcaaacaaggaactggaagagacaacgtggatgcggacaaagtcatgataaccaacgaagaagaaattaaaactactaacccggtagcaacggagtcctatggacaagtggccacaaaccaccagagtgcccaagcacaggcgcagaccggctgggttcaaaaccaaggaatacttccggatatggtttggcaggacagagatgtgtacctgcaaggacccatttgggccaaaattcctcacacggacggcaactttcacccttctccgctgatgggagggtttggaatgaagcacccgcctcctcagatcctcatcaaaaacacacctgtacctgcggatcctccaacggccttcaacaaggacaagctgaactctttcatcacccagtattctactggccaagtcagcgtggagatcgagtgggagctgcagaaggaaaacagcaagcgctggaacccggagatccagtacacttccaactattacaagtctaataatgttgaatttgctgttaatactgaaggtgtatatagtgaaccccgccccattggcaccagatacctgactcgtaatctg

SEQ ID NO: 629 - DNA, 2208 bp, Artificial Sequence
  Description of Artificial Sequence: Synthetic polynucleotide
atggctgccgatggttatcttccagattggctcgaggacaaccttagtgaaggaattcgcgagtggtgggctttgaaacctggagcccctcaacccaaggcaaatcaacaacatcaagacaacgctcgaggtcttgtgcttccgggttacaaataccttggacccggcaacggactcgacaagggggagccggtcaacgcagcagacgcggcggccctcgagcacgacaaggcctacgaccagcagctcaaggccggagacaacccgtacctcaagtacaaccacgccgacgccgagttccaggagcggctcaaagaagatacgtcttttgggggcaacctcgggcgagcagtcttccaggccaaaaagaggcttcttgaacctcttggtctggttgaggaagcggctaagacggctcctggaaagaagaggcctgtagagcagtctcctcaggaaccggactcctccgcgggtattggcaaatcgggtgcacagcccgctaaaaagagactcaatttcggtcagactggcgacacagagtcagtcccagaccctcaaccaatcggagaacctcccgcagccccctcaggtgtgggatctcttacaatggcttcaggtggtggcgcaccagtggcagacaataacgaaggtgccgatggagtgggtagttcctcgggaaattggcattgcgattcccaatggctgggggacagagtcatcaccaccagcacccgaacctgggccctgcccacctacaacaatcacctctacaagcaaatctccaacagcacatctggaggatcttcaaatgacaacgcctacttcggctacagcaccccctgggggtattttgacttcaacagattccactgccacttctcaccacgtgactggcagcgactcatcaacaacaactggggattccggcctaagcgactcaacttcaagctcttcaacattcaggtcaaagaggttacggacaacaatggagtcaagaccatcgccaataaccttaccagcacggtccaggtcttcacggactcagactatcagctcccgtacgtgctcgggtcggctcacgagggctgcctcccgccgttcccagcggacgttttcatgattcctcagtacgggtatctgacgcttaatgatggaagccaggccgtgggtcgttcgtccttttactgcctggaatatttcccgtcgcaaatgctaagaacgggtaacaacttccagttcagctacgagtttgagaacgtacctttccatagcagctacgctcacagccaaagcctggaccgactaatgaatccactcatcgaccaatacttgcactatctctcaaagactattaacggttctggacagaatcaacaaacgctaaaattcagtgtggccggacccagcaacatggctgtccagggaagaaactacatacctggacccagctaccgacaacaacgtgtctcaaccactgtgactcaaaacaacaacagcgaatttgcttggcctggagcttcttcttgggctctcaatggacgtaatagcttgatgaatcctggacctgctatggccagctacaaagaaggagaggacagtttctttcctttgtctggatctttaatttttggcaaacaaggaactggaagagacaacgtggatgcggacaaagtcatgataaccaacgaagaagaaattaaaactactaacccggtagcaacggagtcctatggacaagtggccacaaaccaccagagtgcccaagcacaggcgcagaccggctgggttcaaaaccaaggaatacttccgggtatggtttggcaggacagagatgtgtacctgcaaggacccatttgggccaaaattcctcacacggacggcaactttcacccttctccgctgatgggagggtttggaatgaagcacccgcctcctcagaccctcatcaaaaacacacctgtacctgcggatcctccaacggccttcaacaaggacaagctgaactctttcatcacccagtattctactggccaagtcagcgtggagatcgagtgggagctgcagaaggaaaacagcaagcgctggaacccggagatccagtacacttccaactattacaagtctaataatgttgaatttgctgttaatactgaaggtgtatatagtgaaccccgccccattggcaccagatacctgactcgtaatctg

SEQ ID NO: 630 - DNA, 2208 bp, Artificial Sequence; identical to SEQ ID NO: 613
  Description of Artificial Sequence: Synthetic polynucleotide

SEQ ID NO: 631 - DNA, 2208 bp, Artificial Sequence
  Description of Artificial Sequence: Synthetic polynucleotide
atggctgccgatggttatcttccagattggctcgaggacaaccttagtgaaggaattcgcgagtggtgggctttgaaacctggagcccctcaacccagggcaaatcaacaacatcaagacaacgctcgaggtcttgtgcttccgggttacaaataccttggacccggcaacggactcgacaagggggagccggtcaacgcagccgacgcggcggccctcgagcacgacaaggcctacgaccagcagctcaaggccggagacaacccgtacctcaagtacaaccacgccgacgccgagttccaggagcggctcaaagaagatacgtcttttgggggcaacctcgggcgagcagtcttccaggccaaaaagaggcttcttgaacctcttggtctggttgaggaagcggctaagacggctcctggaaagaagaggcctgtagagcagtctcctcaggaaccggactcctccgcgggtattggcaaatcgggtgcacagcccgctaaaaagagactcaatttcggtcagactggcgacacagagtcagtcccagaccctcaaccaatcggagaacctcccgcagccccctcaggtgtgggatctcttacaatggcttcaggtggtggcgcaccagtggcagacaataacgaaggtgccgatggagtgggtagttcctcgggaaattggcattgcgattcccaatggctgggggacagagtcatcaccaccagcacccgaacctgggccctgcccacctacaacaatcacctctacaagcaaatctccaacagcacatctggaggatcttcaaatgacaacgcctacttcggctacagcaccccctgggggtattttgacttcaacagattccactgccacttctcaccacgtgactggcagcgactcatcaacaacaactggggattccggcctaagcgactcaacttcaagctcttcaacattcaggtcaaagaggttacggacaacaatggagtcaagaccatcgccaataaccttaccagcacggtccaggtcttcacggactcagactgtcagctcccgtacgtgctcgggtcggctcacgagggctgcctcccgccgttcccagcggacgttttcatgattcctcagtacgggtatctgacgcttaatgatggaagccaggccgtgggtcgttcgtccttttactgcctggaatatttcccgtcgcaaatgctaagaacgggtaacaacttccagttcagctacgagtttgagaacgtacctttccatagcagctacgctcacagccaaagcctggaccgactaacgaatccactcatcgaccaatacttgtactatctctcaaagactattaacggttctggacagaatcaacaaacgctaaaattcagtgtggccggacccagcaacatggctgtccagggaagaaactacatacctggacccagctaccgacaacaacgtgtctcaaccactgtgactcaaaacaacaacagcgaatttgcttggcctggagcttcttcttgggctctcaatggacgtaatagcttgatgaatcctggacctgctatggccagccacaaagaaggagaggaccgtttctttcctttgtctggatctttaatttttggcaaacaaggaactggaagagacaacgtggatgcggacaaagtcatgataaccaacgaagaagaaattaaaactactaacccggtagcaacggagtcccatggacaagtggccacaaaccaccagagtgcccaagcacaggcgcagaccggctgggttcaaaaccaaggaatacttccgggtatggtttggcaggacagagatgtgtacctgcaaggacccatttgggccaaaattcctcacacggacggcaactttcacccttctccgctgatgggagggtttggaatgaagcacccgcctcctcagatcctcatcaaaaacacacctgtacctgcggatcctccaacggccttcaacaaggacaagctgaactctttcatcacccagtattctactggccaagtcagcgtggagatcgagtgggagctgcagaaggaaaacagcaagcgctggaacccggagatccagtacacttccaactattacaagtctaataatgttgaatttgctgttaatactgaaggtgtatatagtgaaccccgccccattggcaccagatacctgactcgtaatctg

SEQ ID NO: 632 - DNA, 2208 bp, Artificial Sequence
  Description of Artificial Sequence: Synthetic polynucleotide
atggctgccgatggttatcttccagattggctcgaggacaaccttagtgaaggaattcgcgagtggtgggctttgaaacctggagcccctcaacccaaggcaaatcaacaacatcaagacaacgctcgaggtcttgtgcttccgggttacaaataccttggacccggcaacggactcgacaagggggagccggtcaacgcagcagacgcggcggccctcgagcacgacaaggcctacgaccagcagctcaaggccggagacaacccgtacctcaagtacaaccacgccgacgccgagttccaggagcggctcaaagaagatacgtcttttgggggcaacctcgggcgagcagtcttccaggccaaaaagaggcttcttgaacctcttggtctggttgaggaagcggctaagacggctcctggaaagaagaggcctgtagagcagtctcctcaggaaccggactcctccgcgggtattggcaaatcgggtgcacagcccgctaagaagagactcaatttcggtcagactggcgacacagagtcagtcccagaccctcaaccaatcggagaacctcccgcagccccctcaggtgtgggatctcttacaatggcttcaggtggtggcgcaccagtggcagacaataacgaaggtgccgatggagtgggtagttcctcgggaaattggcattgcgattcccaatggctgggggacagagtcatcaccaccagcacccgaacctgggccctgcccacctacaacaatcacctctacaagcaaatctccaacagcacatctggaggatcttcaaatgacaacgcctacttcggctacagcaccccctgggggtattttgacttcaacagattccactgccacttctcaccacgtgactggcagcgactcatcaacaacaactggggattccggcctaagcgactcaacttcaagctcttcaacattcaggtcaaagaggttacggacaacaatggagtcaagaccatcgccaataaccttaccagcacggtccaggtcttcacggactcagactatcagctcccgtacgtgctcgggtcggctcacgagggctgcctcccgccgttcccagcggacgttttcatgattcctcagtacgggtatctgacgcttaatgatggaagccaggccgtgggtcgttcgtccttttactgcctggaatatttcccgtcgcaaatgctaagaacgggtaacaacttccagttcagctacgagtttgagaacgtacctttccatagcagctacgctcacagccaaagcctggaccgactaatgaatccacccatcgaccaatacttgtactatctctcaaagactattaacggttctggacagaatcaacaaacgctaaaattcagtgtggccggacccagcaacatggctgtccagggaagaaactacatacctggacccagctaccgacaacaacgtgtctcaaccactgtgactcaaaacaacaacagcgaatttgcttggcctggagcttcttcttgggctctcaatggacgtaatagcttgatgaatcctggacctgctatggccagccacaaagaaggagaggaccgtttctttcctttgtctggatctttaatttttggcaaacaaggaactggaagagacaacgtggatgcggacaaagtcatgataaccaacgaagaagaaattaaaactactaacccggtagcaacggagtcctatggacaagtggccacaaaccaccagagtgcccaagcacaggcgcagaccggctgggttcaaaaccaaggaatacttccgggtatggtttggcaggacagagatgtgtacctgcaaggacccatttgggccaaaattcctcacacggacggcaactttcacccttctccgctgatgggagggtttggaatgaagcacccgcctcctcagatcctcatcaaaaacacacctgtacctgcggatcctccaacggccttcaacaaggacaagctgaactctttcatcacccagtattctactggccaagtcagcgtggagatcgagtgggagctgcagaaggaaaacagcaagcgctggaacccggagatccagtacacttccaactattacaagtctaataatgttgaatttgctgttaatactgaaggtgtatatggtgaaccccgccccattggcaccagatacctgactcgtaatctg

SEQ ID NO: 633 - DNA, 2208 bp, Artificial Sequence
  Description of Artificial Sequence: Synthetic polynucleotide
atggctgccgatggttatcttccagattggctcgaggacaaccttagtgaaggaattcgcgagtggtgggctttgaaacctggagcccctcaacccaaggcaaatcaacaacatcaagacaacgctcgaggtcttgtgcttccgggttacaaataccttggacccggcaacggactcgacaagggggagccggtcaacgcagcagacgcggcggccctcgagcacgacaaggcctacgaccagcagctcaaggccggagacaacccgtacctcaagtacaaccacgccgacgccgagttccaggagcggctcaaagaagatacgtcttttgggggcaacctcgggcgagcagtcttccaggccaaaaagaggcttcttgaacctcttggtctggttgaggaagcggctaagacggctcctggaaagaagaggcctgtagagcagtctcctcaggaaccggactcctccgcgggtattggcaaatcgggtgcacagcccgctaaaaagagactcaatttcggtcagactggcgacacagagtcagtcccagaccctcaaccaatcggagaacctcccgcagccccctcaggtgtgggatctcttacaatggcttcaggtggtggcgcaccagtggcagacaataacgaaggtgccgatggagtgggtagttcctcgggaaattggcattgcgattcccaatggctgggggacagagtcatcaccaccagcacccgaacctgggccctgcccacctacaacaatcacctctacaagcaaatctccaacagcacatctggaggatcttcaaatgacaacgcctacttcggctacagcaccccctgggggtattttgacttcaacagattccactgccacttctcaccacgtgaccggcagcgactcatcaacaacaactggggattccggcctaagcgactcaacttcaagctcttcaacattcaggtcaaagaggttacggacaacaatggagtcaagaccatcgccaataaccttaccagcacggtccaggtcttcacggactcagactatcagctcccgtacgtgctcgggtcggctcacgagggctgcctcccgccgttcccagcggacgttttcatgattcctcagtacgggtatctgacgcttaatgatggaagccaggccgtgggtcgttcgtccttttactgcctggaatatttcccgtcgcaaatgctaagaacgggtaacaacttccagttcagctacgagtttgagaacgtacctttccatagcagctacgctcacagccaaagcctggaccgactaatgaatccactcatcgaccaatacttgtactatctctcaaagactattaacggttctggacagaatcaacaaacgctaaaattcagtgtggccggacccagcaacatggctgtccagggaagaaactacatacctggacccagctaccgacaacaacgtgtctcaaccactgtgactcaaaacaacaacagcgaatttgcttggcctggagcttcttcttgggctctcaatggacgtaatagcttgatgaatcctggacctgctatggccagccacaaagaaggagaggaccgtttctttcctttgtctggatctttaatttttggcaaacaaggaactggaagagacaacgtggatgcggacaaagtcatgataaccaacgaagaagaaattaaaactactaacccggtagcaacggagtcctatggacaagtggccacaaaccaccagagtgcccaagcacaggcgcagaccggctgggttcaaaaccaaggaatacttccgggtatggtttggcaggacagagatgtgtacctgcaaggacccatttgggccaaaattcctcacacggacggcaactttcacccttctccgctgatgggagggtttggaatgaagcacccgcctcctcagatcctcatcaaaaacacacctgtacctgcggatcctccaacggccttcaacaaggacaagctgaactctttcatcacccagtattctactggccaagtcagcgtggagatcgagtgggagctgcagaaggaaaacagcaagcgctggaacccggagatccagtacacttccaactattacaagtctaataatgttgaatttgctgttaatactgaaggtgtatatagtgaaccccgccccattggcaccagatacctgactcgtaatctg

SEQ ID NO: 634 - DNA, 2208 bp, Artificial Sequence
  Description of Artificial Sequence: Synthetic polynucleotide
atggctgccgatggttatcttccagattggctcgaggacaaccttagtgaaggaattcgcgagtggtgggctttgaaacctggagcccctcaacccaaggcaaatcaacaacatcaagacaacgctcgaggtcttgtgcttccgggttacaaataccttggacccggcaacggactcgacaagggggagccggtcaacgcagcagacgcggcagccctcgagcacgacaaggcctacgaccagcagctcaaggccggagacaacccgtacctcaagtacaaccacgccgacgccgagttccaggagcggctcaaagaagatacgtcttttgggggcaacctcgggcgagcagtcttccaggccaaaaagaggcttcttgaacctcttggtctggttgaggaagcggctaagacggctcctggaaagaagaggcctgtagagcagtctcctcaggaaccggactcctccgcgggtattggcaaatcgggtgcacagcccgctaaaaagagactcaatttcggtcagactggcgacacagagtcagtcccagaccctcaaccaatcggagaacctcccgcagccccctcaggtgtgggatctcttacaatggcttcaggtggtggcgcaccagtggcagacaataacgaaggtgccgatggagtgggtagttcctcgggaaattggcattgcaattcccaatggctgggggacagagtcatcaccaccagcacccgaacctgggccctgcccacctacaacaatcacctctacaagcaaatctccaacagcacatctggaggatcttcaaatgacaacgcctacttcggctacagcaccccctgggggtattttgacttcaacagattccactgccacttctcaccacgtgactggcagcgactcatcaacaacaactggggattccggcctaagcgactcaacttcaagctcttcaacattcaggtcaaagaggttacggacaacaatggagtcaagaccatcgccaataaccttaccagcacggtccaggtcttcacggactcagactatcagctcccgtacgtgctcgggtcggctcacgagggctgcctcccgccgttcccagcggacgttttcatgattcctcagtacgggtatctgacgcttaatgatggaagccaggccgtgggtcgttcgtccttttactgcctggaatatttcccgtcgcaaatgctaagaacgggtaacaacttccagttcagctacgagtttgagaacgtacctttccatagcagctacgctcacagccaaagcctggaccgactaatgaatccactcatcgaccaatacttgtactatctctcaaagactattaacggttctggacagaatcaacaaacgctaaaattcagtgtggccggacccggcaacatggctgtccagggaagaaactacatacctggacccagctaccgacaacaacgtgtctcaaccactgtgactcaaaacaacaacagcgaatttgcttggcctggagcttcttcttgggctctcaatggacgtaatagcttgatgaatcctggacctgctatggccagccacaaagaaggagaggaccgtttctttcctttgtctggatctttaatttttggcaaacaaggaactggaagagacaacgtggatgcggacaaagtcatgataaccaacgaagaagaaattaaaactactaacccggtagcaacggagtcctatggacaagtggccacaaaccaccagagtgcccaagcacaggcgcagaccggctgggttcaaaaccaaggaatacttccgggtatggtttggcaggacagagatgtgtacctgcaaggacccatttgggccaaaattcctcacacggacggcaactttcacccttctccgctgatgggagggtttggaatgaagcacccgcctcctcagatcctcatcaagaacacacctgtacctgcggatcctccaacggccttcaacaaggacaagctgaactctttcatcacccagtattctactggccaagtcagcgtggagatcgagtgggagctgcagaaggaaaacagcaagcgctggaacccggagatccagtacacttccaactattacaagtctaataatgttgaatttgctgttaatactgaaggtgtatatagtgaaccccgccccattggcaccagatacctgactcgtaatctg

SEQ ID NO: 635 - DNA, 2208 bp, Artificial Sequence
  Description of Artificial Sequence: Synthetic polynucleotide
atggctgccgatggttatcttccagattggctcgaggacaaccttagtgaaggaattcgcgagtggtgggctttgaaacctggagcccctcaacccaaggcaaatcaacaacatcaagacaacgctcgaggtcttgtgcttccgggttacagataccttggacccggcaacggactcgacaagggggagccggtcaacgcagcagacgcggcggccctcgagcacgacaaggcctacgaccagcagctcaaggccggagacaacccgtacctcaagtacaaccacgccgacgccgagttccaggagcggctcaaagaagatacgtcttttgggggtaacctcgggcgagcagtcttccaggccaaaaagaggcttcttgaacctcttggtctggttgaggaagcggctaagacggctcctggaaagaagaggcctgtagagcagtctcctcaggaaccggactcctccgcgggtatcggcaaatcgggtgcacagcccgctaaaaagagactcaatttcggtcagactggcgacacagagtcagtcccagaccctcaaccaatcggagaacctcccgcagccccctcaggtgtgggatctcttacaatggcttcaggtggtggcgcaccagtggcagacaataacgaaggtgccgatggagtgggtagttcctcgggaaattggcattgcgattcccaatggctgggggacagagtcatcaccaccagcacccgaacctgggccctgcccacctacaacaatcacctctacaagcaaatctccaacagcacatctggaggatcttcaaatgacaacgcctacttcggctacagcaccccctgggggtattttgacttcaacagattccactgccacttctcaccacgtgactggcagcgactcatcaacaacaactggggattccggcctaagcgactcaacttcaagctcttcaacattcaggtcaaagaggttacggacaacaatggagtcaagaccgtcgccaataaccttaccagcacggtccaggtcttcacggactcagactatcagctcccgtacgtgctcgggtcggctcacgagggctgcctcccgccgttcccagcggacgttttcatgattcctcagtacgggtatctgacgcttaatgatggaagccaggccgtgggtcgttcgtccttttactgcctggaatatttcccgtcgcaaatgctaagaacgggtaacaacttccagttcagctacgagtttgagaacgtacctttccatagcagctacgctcacagccaaagcctggaccgactaatgaatccactcatcgaccaatacttgtactatctctcaaagactattaacggttctggacagaatcaacaaacgctaaaattcagtgtggccggacccagcaacatggctgtccagggaagaaactacatacctggacccagctaccgacaacaacgtgtctcaaccactgtgactcaaaacaacaacagcgaatttgcttggcctggagcttcttcttgggctctcaatggacgtaatagcttgatgaatcctggacctgctatggccagccacaaagaaggagaggaccgtttctttcctttgtctggatctttaatttttggcaaacaaggaactggaagagacaacgtggatgcggacaaagtcatgataaccaacgaagaagaaattaaaactactaacccggtagcaacggagtcctatggacaagtggccacaaaccaccagagtgcccaagcacaggcgcagaccggctgggttcaaaaccaaggaatacttccgggtatggtttggcaggacagagatgtgtacctgcaaggacccatttgggccaaaattcctcacacggacggcaactttcacccttctccgctgatgggagggtttggaatgaagcacccgcctcctcagatcctcatcaaaaacacacctgtacctgcggatcctccaacggccttcaacaaggacaagctgaactctttcatcacccagtattctactggccaagtcagcgtggagatcgagtgggagctgcagaaggaaaacagcaagcgctggaacccggagatccagtacacttccaactattacaagtctaataatgttgaatttgctgttaatactgaaggtgtatatagtggaccccgccccattggcaccagatacctgactcgtaatctg

SEQ ID NO: 636 - DNA, 2208 bp, Artificial Sequence
  Description of Artificial Sequence: Synthetic polynucleotide
atggctgccgatggttatcttccagattggctcgaggacaaccttagtgaaggaattcgcgagtggtgggctttgaaacctggagcccctcaacccaaggcaaatcaacaacatcaagacaacgctcgaggtcttgtgcttccgggttacaaataccttggacccggcaacggactcgacaagggggagccggtcaacgcagcagacgcggcggccctcgagcacgacaaggcctacgaccagcagctcaaggccggagacaacccgtacctcaagtacaaccacgccgacgccgagttccaggagcggctcaaagaagatacgtcttttgggggcaacctcgggcgagcagtcttccaggccaaaaagaggcttcttgaacctcttggtctggttgaggaagcggctaagacggctcctggaaagaagaggcctgtagagcagtctcctcaggaaccggactcctccgcgggtattggcaaatcgggtgcacagcccgctaaaaagagactcaatttcggtcagactggcgacacagagtcagtcccagaccctcaaccaatcggagaacctcccgcagccccctcaggtgtgggatctcttacaatggcttcaggtggtggcgcaccagtggcagacaataacgaaggtgccgatggagtgggtagttcctcgggaaattggcattgcgattcccaatggctgggggacagagtcatcaccaccagcacccgaacctgggccctgcccacctacaacaatcacctctacaagcaaatctccaacagcacatctggaggatcttcaaatgacaacgcctacttcggctacagcaccccctgggggtattttgacttcaacagattccactgccacttctcaccacgtgactggcagcgactcatcaacaacaactggggattccggcctaagcgactcaacttcaagctcttcaacattcaggtcaaagaggttacggacaacaatggagtcaagaccatcgccaataaccttaccagcacggtccaggtcttcacggactcagactatcagctcccgtacgtgctcgggtcggctcacgagggctgcctcccgccgttcccagcggacgttttcatgattcctcagtacgggtatctgacgcttaatgatggaagccaggccgtgggtcgttcgtccttttactgcctggaatatttcccgtcgcaaatgctaagaacgggtaacaacttccagttcagctacgagtttgagaacgtacctttccatagcagctacgctcacagccaaagcctggaccgactaatgaatccactcatcgaccaatacttgtactatctctcaaagactattaacggttctggacagaatcaacaaacgctaaaattcagtgtggccggacccagcaacatggctgtccagggaagaaactacatacctggacccagctaccgacaacaacgtgtctcaaccactgtgactcaaaacaacaacagcgaatttgcttggcctggagcttcttcttgggctctcaatggacgtaatagcttgatgaatcctggacctgctatggccagccacaaagaaggagaggaccgtttctttcctttgtctggatctttaatttttggcaaacaaggaactggaagagacaacgtggatgcggacaaagtcatgataaccaacgaagaagaaattaaaactactaacccggtagcaacggagtcctatggacaagtggccacaaaccaccagagtgcccaagcacaggcgcagaccggctgggttcaaaaccaaggaatacttccgggtatggtttggcaggacagagatgtgtacctgcaaggacccatttgggccaaaattcctcacacggacggcaactttcacccttctccgctgatgggagggtttggaatgaagcacccgcctcctcagatcctcatcaaaaacacacctgtacctgcggatcctccaacggccttcaacaaggacaagctgaactctttcatcacccagtattctactggccaagtcagcgtggagatcgagtgggagctgcagaaggaaaacagcaagcgctggaacccggagatccagtacacttccaactattacaagtctaataatgttgaatttgctgttaatactgaaggtgtatatagtgaaccccgccccattggcaccagatacctgactcgtaatctg

SEQ ID NO: 637 - DNA, 2208 bp, Artificial Sequence
  Description of Artificial Sequence: Synthetic polynucleotide
atggctgccgatggttatcttccagattggctcgaggacaaccttagtgaaggaattcgcgagtggtgggctttgaaacctggagcccctcaacccaaggcaaatcaacaacgtcaagacaacgctcgaggtcttgtgcttccgggttacaaataccttggacccggcaacggactcgacaagggggagccggtcaacgcagcagacgcggcggccctcgagcacgacaaggcctacgaccagcagctcaaggccggaggcaacccgtgcctcaagtacaaccacgccgacgccgagttccaggagcggctcaaagaagatacgtcttttgggggcaacctcgggcgagcagtcttccaggccaaaaagaggcttcttgaacctcttggtctggttgaggaagcggctaagacggctcctggaaagaagaggcctgtagagcagtctcctcaggaaccggactcctccgcgggtattggcagatcgggtgcacagcccgctaaaaagagactcaatttcggtcagactggcgacacagagtcagtcccagaccctcaaccaatcggagaacctcccgcagccccctcaggtgtgggatctcttacaatggcttcaggtggtggcgcaccagtggcagacaataacgaaggtgccgatggagtgggtagttcctcgggaaattggcattgcgattcccaatggctgggggacagagtcatcaccaccagcacccgaacctgggccctgcccacctacaacaatcacctctacaagcaaatctccaacagcacatctggaggatcttcaaatgacaacgcctacttcggctacagcaccccctgggggtattttgacttcaacagattccactgccacttctcaccacgtgactggcagcgactcatcaacaacaactggggattccggcctaagcgactcaacttcaagctcttcaacattcaggtcaaagaggttacggacaacaatggagtcaaggccatcgccaataaccttaccagcacggtccaggtcttcacggactcagactatcagctcccgtacgtgctcgggtcggctcacgagggctgcctcccgccgttcccagcggacgttttcatgattcctcagtacgggtatctgacgcttaatgatggaagccaggccgtgggtcgttcgtccttttactgcctggaatatttcccgtcgcaaatgctaagaacgggtaacaacttccagttcagctacgagtttgagaacgtacctttccatagcagctacgctcacagccaaagcctggaccgactaatgaatccactcatcgaccaatacttgtactatctctcaaagactattgacggttctggacagaatcaacaaacgctaaaattcagtgtggccggacccagcaacatggctgtccagggaagaaactacatacctggacccagctaccgacaacaacgtgtctcaaccactgtgactcaaaacaacaacagcgaatttgcttggcctggagcttcttcttgggctctcaatggacgtaatagcttgatggatcctggacctgctatggccagccacaaagaaggagaggaccgtttctttcctttgtctggatctttaatttttggcaaacaaggaactggaagagacaacgtggatgcggacaaagtcatgataaccaacgaagaagaaattaaaactactaacccggtagcaacggagtcctatggacaagtggccacaaaccaccagagtgcccaagcacaggcgcagaccggctgggttcaaaaccaaggaatacttccgggtatggtttggcaggacagagatgtgtacctgcaaggacccatttgggccaaaattcctcacacgggcggcaactttcacccttctccgctgatgggagggtttggaatgaagcacccgcctcctcagatcctcatcaaaaacacacctgtacctgcggatcctccaacggccttcaacaaggacaagctgaactctttcatcacccagtattctactggccaagtcagcgtggagatcgagtgggagctgcagaaggaaaacagcaagcgctggaacccggagatccagtacacttccaactattacaagtctaataatgttgaatttgctgttaatactgaaggtgtatatagtgaaccccgccccattggcaccagatacctgactcgtaatctg

SEQ ID NO: 638 - DNA, 2208 bp, Artificial Sequence
  Description of Artificial Sequence: Synthetic polynucleotide
atggctgccgatggttatcttccagattggctcgaggacaaccttagtgaaggaattcgcgagtggtgggctttgaaacctggagcccctcaacccaaggcaaatcaacaacatcaagacaacgctcgaggtcttgtgcttccgggttacaaataccttggacccggcaacggactcgacaagggggagccggtcaacgcagcagacgcggcggccctcgagcacgacaaggcctacgaccagcagctcaaggccggagacaacccgtacctcaagtacaaccacgccgacgccgagttccaggagcggctcaaagaagatacgtcttttgggggcaacctcgggcgagcagtcttccaggccaaaaagaggcttcttgaacctcttggtctggttgaggaagcggctaagacggctcctggaaagaagaggcctgtagagcagtctcctcaggaaccggactcctccgcgggtattggcaaatcgggtgcacagcccgctaaaaagagactcaatttcggtcagactggcgacacagagtcagtcccagaccctcaaccaatcggagaacctcccgcagccccctcaggtgtgggatctcttacaatggcttcaggtggtggcgcaccagtggcagacaataacgaaggtgccgatggagtgggtagttcctcgggaaattggcattgcgattcccaatggctgggggacagagtcatcaccaccagcacccgaacctgggccctgcccacctacaacaatcacctctacaagcaaatctccaacagcacatctggaggatcttcaaatgacaacgcctacttcggctacagcaccccctgggggtattttgacttcaacagattccactgccacttctcaccacgtgactggcagcgactcatcaacaacaactggggattccggcctaagcgactcaacttcaagctcttcaacattcaggtcaaagaggttacggacaacaatggagtcaagaccatcgccaataaccttaccagcacggtccaggtcttcacggactcagactatcagctcccgtacgtgctcgggtcggctcacgagggctgcctcccgccgttcccagcggacgttttcatgattcctcagtacgggtatctgacgcttaatgatggaagccaggccgtgggtcgttcgtccttttactgcctggaatatttcccgtcgcaaatgctaagaacgggtaacaacttccagttcagctacgagtttgagaacgtacctttccatagcagctacgctcacagccaaagcctggaccgactaatgaatccactcatcgaccaatacttgtactatctctcaaagactattaacggttctggacagaatcaacaaacgctaaaattcagtgtggccggacccagcaacatggctgtccagggaagaaactacatacctggacccagctaccgacaacaacgtgtctcaaccactgtgactcaaaacaacaacagcgaatttgcttggcctggagcttcttcttgggctctcaatggacgtaatagcttgatgaatcctggacctgctatggccagccacaaagaaggagaggaccgtttctttcctttgtctggatctttaatttttggcaaacaaggaactggaagagacaacgtggatgcggacaaagtcatgataaccaacgaagaagaaattaaaactactaacccggtagcaacggagtcctatggacaagtggccacaaaccaccagagtgcccaagcacaggcgcagaccggctgggttcaaaaccaaggaatacttccgggtatggtttggcaggacagagatgtgtacctgcaaggacccatttgggccaaaattcctcacacggacggcaactttcacccttctccgctgatgggagggtttggaatgaagcacccgcctcctcagatcctcatcaaaaacacacctgtacctgcggatcctccaacggccttcaacaaggacaagctgaactctttcatcacccagtattctactggccaagtcagcgtggagatcgagtgggagctgcagaaggaaaacagcaagcgctggaacccggagatccagtacacttccaactattacaagcctaataatgttgaatttgctgttaatactgaaggtgtatatagtgaaccccgccccattggcaccagatacctgactcgtaatctg

SEQ ID NO: 639 - DNA, 2208 bp, Artificial Sequence
  Description of Artificial Sequence: Synthetic polynucleotide
atggctgccgatggttatcttccagattggctcgaggacaaccttagtgaaggaattcgcgagtggtgggctttgaaacctggagcccctcaacccaaggcaaatcaacaacatcaagacaacgctcgaggtcttgtgcttccgggttacaaataccttggacccggcaacggactcgacaagggggagccggtcaacgcagcagacgcggcggccctcgagcacaacaaggcctacgaccagcagctcaaggccggagacaacccgtacctcaagtgcaaccacgccgacgccgagttccaggagcggctcaaagaagatacgtcttttgggggcaacctcgggcgagcagtcttccaggccaaaaagaggcctcttgaacctcttggtctggttgaggaagcggctaagacggctcctggaaagaagaggcctgtagagcagtctcctcaggaaccggactcctccgcgggtattggcaaatcgggtgcacagcccgctaaaaagagactcaatttcggtcagactggcgacacagagtcagtcccagaccctcaaccaatcggagaacctcccgcagccccctcaggtgtgagatctcttacaatggcttcaggtggtggcgcaccagtggcagacaataacgaaggtgccgatggagtgggtagttcctcgggaaattggcattgcgattcccaatggctgggggacagagtcatcaccaccagcacccgaacctgggccctgcccacctacaacaatcacctctacaagcaaatctccaacagcacatctggaggatcttcaaatgacaacgcctacctcggctacagcaccccctgggggtattttgacttcaacagattccactgccacttctcaccacgtgactggcagcgactcatcaacaacaactggggattccggcctaagcgactcaacttcaagctcttcaacattcaggtcaaagaggttacggacaacaatggagtcaagaccatcgccaataaccttaccagcacggtccaggtcttcacggactcagactatcagctcccgtacgtgctcgggtcggctcacgagggctgcctcccgccgttcccagcggacgttttcatgattcctcagtacgggtatctgacgcttaatgatggaagccaggccgtgggtcgttcgtccttttactgcctggaatatttcccgtcgcaaatgctaagaacgggtaacaacttccagttcagctacgagtttgagaacgtacctttccatagcagctacgctcacagccaaagcctggaccgactaatgaatccactcatcgaccaatacttgtactatctctcaaagactattaacggttctggacagaatcaacaaacgctaaaattcagtgtggccggacccagcaacatggctgtccagggaagaaactacatacctggacccagctaccgacaacaacgtgtctcaaccactgtgactcaaaacaacaacagcgaatttgcttggcctggagcttcttcttgggctctcaatggacgtaatagcttgatgaatcctggacctactatggccagccacaaagaaggagaggaccgtttctttcctttgtctggatctttaatttttggcaaacaaggaactggaagagacaacgtggatgcggacaaagtcatgataaccaacgaagaagaaattaaaactactaacccggtagcaacggagtcctatggacaagtggccacaaaccaccagagtgcccaagcacaggcgcagaccggctgggttcaaaaccaaggaatacttccgggtatggtttggcaggacagagatgtgtacctgcaaggacccatttgggccaaaattcctcacacggacggcaactttcacccttctccgctgatgggagggtttggaatgaagcacccgcctcctcagatcctcatcaaaaacacacctgtacctgcggatcctccaacggccttcaacaaggacaagctgaactctttcatcacccagtattctactggccaagtcagcgtggagatcgagtgggagctgcagaaggaaaacagcaagcgctggaacccggagatccagtacacttccaactattacaagtctaataatgttgaatttgctgttaatactgaaggtgtatatagtgaaccccgccccattggcaccagatacctgactcgtaatctg

SEQ ID NO: 640 - DNA, 2208 bp, Artificial Sequence
  Description of Artificial Sequence: Synthetic polynucleotide
atggctgccgatggttatcttccagattggctcgaggacaaccttagtgaaggaattcgcgagtggtgggctttgaaacctggagcccctcaacccaaggcaaatcaacaacatcaagacaacgctcgaggtcttgtgcttccgggttacaaataccttggacccggcaacggactcgacaagggggagccggtcaacgcagcagacgcggcggccctcgtgcacgacaaggcctacgaccagcagctcaaggccggagacaacccgtacctcaagtgcaaccacgccgacgccgagttccaggagcggctcaaagaagatacgtcttttgggggcaacctcgggcgagcagtcttccaggccaaaaagaggcttcttgaacctcttggtctggttgaggaagcggctaagacggctcctggaaagaagaggcctgtagagcagtctcctcaggaaccggactcctccgcgggtattggcaaatcgggtgcacagcccgctaaaaagagactcaatttcggtcagactggcgacacagagtcagtcccagaccctcaaccaatcggagaacctcccgcagccccctcaggtgtgggatctcttacaatggcttcaggtggtggcgcaccagtggcagacaataacgaaggtgccgatggagtgggtagttcctcgggaaattggcattgcgattcccaatggctgggggacagagtcatcaccaccagcacccgaacctgggccctgcccacctacaacaatcacctctacaagcaaatctccaacagcacatctggaggatcttcaaatgacaacgcctacctcggctacagcaccccctgggggtattttgacttcaacagattccactgccacttctcaccacgtgactggcagcgactcatcaacaacaactggggattccggcctaagcgactcaacttcaagctcttcaacattcaggtcaaagaggttacggacaacaatggagtcaagaccatcgccaataaccttaccagcacggtccaggtcttcacggactcagactatcagctcccgtacgtgctcgggtcggctcacgagggctgcctcccgccgttcccagcggacgttttcacgattcctcagtacgggtatctgacgcttaatgatggaagccaggccgtgggtcgttcgtccttttactgcctggaatatttcccgtcgcaaatgctaagaacgggtaacaacttccagttcagctacgagtttgagaacgtacctttccatagcagctacgctcacagccaaagcctggaccgactaatgaatccactcatcgaccaatacttgtactatctctcaaagactattaacggttctggacagaatcaacaaacgctaaaattcagtgtggccggacccagcaacatggctgtccagggaagaaactacatacctggacccagctaccgacaacaacgtgtctcaaccactgtgactcaaaacaacaacagcgaatttgcttggcctggagcttcttcttgggctctcaatggacgtaatagcttgatgaatcctggacctgctatggccagccacaaagaaggagaggaccgtttctttcctttgtctggatctttaatttttggcaaacaaggaactggaagagacaacgtggatgcggacaaagtcatgataaccaacgaagaagaaattaaaactactaacccggtagcaacggagtcctatggacaagtggccacaaaccaccagagtgcccaagcacaggcgcagaccggctgggttcaaaaccaaggaatacttccgggtatggtttggcaggacagagatgtgtacctgcaaggacccatttgggccaaaattcctcacacggacggcaactttcacccttctccgctgatgggagggtttggaatgaagcacccgcctcctcagatcctcatcaaaaacacacctgtacctgcggatcctccaacggccttcaacaaggacaagctgaactctttcatcacccagtattctactggccaagtcagcgtggagatcgagtgggagctgcagaaggaaaacagcaagcgctggaacccggagatccagtacacttccaactattacaagtctaataatgttgaatttgctgttaatactgaaggtgtatatagtgaaccccgccccattgggccccgatacctgactcgtaatttt

SEQ ID NO: 641 - DNA, 2208 bp, Artificial Sequence
  Description of Artificial Sequence: Synthetic polynucleotide
atggctgccgatggttatcttccagattggctcgaggacaaccttagtgaaggaattcgcgagtggtgggctttgaaacctggagcccctcaacccaaggcaaatcaacaacatcaagacaacgctcgaggtcttgtgcttccgggttacaaataccttggacccggcaacggactcgacaagggggagccggtcaacgcagcagacgcggcggccctcgagcacaacaaggcctacgaccagcagctcaaggccggagacaacccgtacctcaagtgcaaccacgccgacgccgagttccaggagcggctcaaagaagatacgtcttttgggggcaacctcgggcgagcagtcttccaggccaaaaagaggcttcttgaacctcttggtctggttgaggaagcggctaagacggctcctggaaagaagaggcctgtagagcagtctcctcaggaaccggactcctccgcgggtattggcaaatcgggtgcacagcccgctaaaaagagactcaatttcggtcagactggcgacacagagtcagtcccagaccctcaaccaatcggagaacctcccgcagccccctcaggtgtgagatctcttacaatggcttcaggtggtggcgcaccagtggcagacaataacgaaggtgccgatggagtgggtagttcctcgggaaattggcattgcgattcccaatggctgggggacagagtcatcaccaccagcacccgaacctgggccctgcccacctacaacaatcacctctacaagcaaatctccaacagcacatctggaggatcttcaaatgacaacgcctacctcggctacagcaccccctgggggtattttgacttcaacagattccactgccacttctcaccacgtgactggcagcgactcatcaacaacaactggggattccggcctaagcgactcaacttcaagctcttcaacattcaggtcaaagaggttacggacaacaatggagtcaagaccatcgccaataaccttaccagcacggtccaggtcttcacggactcagactatcagctcccgtacgtgctcgggtcggctcacgagggctgcctcccgccgttcccagcggacgttttcatgattcctcagtacgggtatctgacgcttaatgatggaagccaggccgtgggtcgttcgtccttttactgcctggaatatttcccgtcgcaaatgctaagaacgggtaacaacttccagttcagctacgagtttgagaacgtacctttccatagcagctacgctcacagccaaagcctggaccgactaatgaatccactcatcgaccaatacttgtactatctctcaaagactattaacggttctggacagaatcaacaaacgctaaaattcagtgtggccggacccagcaacatggctgtccagggaagaaactacatacctggacccagctaccgacaacaacgtgtctcaaccactgtgactcaaaacaacaacagcgaatttgcttggcctggagcttcttcttgggctctcaatggacgtaatagcttgatgaatcctggacctgctatggccagccacaaagaaggagaggaccgtttctttcctttgtctggatctttaatttttggcaaacaaggaactggaagagacaacgtggatgcggacaaagtcatgataaccaacgaagaagaaattaaaactactaacccggtagcaacggagtcctatggacaagtggccacaaaccaccagagtgcccaagcacaggcgcagaccggctgggttcaaaaccaaggaatacttccgggtatggtttggcaggacagagatgtgtacctgcaaggacccatttgggccaaaattcctcacacggacggcaactttcacccttctccgctgatgggagggtttggaatgaagcacccgcctcctcagatcctcatcaaaaacacacctgtacctgcggatcctccaacggccttcaacaaggacaagctgaactctttcatcacccagtattctactggccaagtcagcgtggagatcgagtgggagctgcagaaggaaaacagcaagcgctggaacccggagatccagtacacttccaactattacaagtctaataatgttgaatttgctgttaatactgaaggtgtatatagtgaaccccgccccattggcaccagatacctgactcgtaatctg

SEQ ID NO: 642 - DNA, 2208 bp, Artificial Sequence
  Description of Artificial Sequence: Synthetic polynucleotide
atggctgccgatggttatcttccagattggctcgaggacaaccttagtgaaggaattcgcgagtggtgggctttgaaacctggagcccctcaacccaaggcaaatcaacaacatcaagacaacgctcgaggtcttgtgcttccgggttacaaataccttggacccggcaacggactcgacaagggggagccggtcaacgcagcagacgcggcggccctcgagcacgacaaggcctacgaccagcagctcaaggccggagacaacccgtacctcaagtgcaaccacgccgacgccgagttccaggagcggctcaaagaagatacgtcttttgggggcaacctcgggcgagcagtcttccaggccaaaaagaggcttcttgaacctcttggtctggttgaggaagcggctaagacggctcctggaaagaagaggcctgtagagcagtctcctcaggaaccggactcctccgcgggtattggcaaatcgggtgcacagcccgctaaaaagagactcaatttcggtcagactggcgacacagagtcagtcccagaccctcaaccaatcggagaacctcccgcagccccctcaggtgtgggatctcttacaatggcttcaggcggtggcgcaccagtggcagacaataacgaaggtgccgatggagtgggtagttcctcgggaaattggcattgcgattcccaatggctgggggacagagtcatcaccaccagcacccgaacctgggccctgcccacctacaacaatcacctctacaagcaaatctccaacagcacatctggaggatcttcaaatgacaacgcctacctcggctacagcaccccctgggggtattttgacttcaacagattccactgccacttctcaccacgtgactggcagcgactcatcaacaacaactggggattccggcctaagcgactcaacttcgagctcttcaacattcaggtcaaagaggttacggacaacaatggagtcaagaccatcgccaataaccttaccagcacggtccaggtcttcacggactcagactatcagctcccgtacgtgctcgggtcggctcacgagggctgcctcccgccgttcccagcggacgttttcatgattcctcagtacgggtatctgacgcttaatgatggaagccaggccgtgggtcgttcgtccttttactgcctggaatatttcccgtcgcaaatgctaagaacgggtaacaacttccagtccagctacgagtttgagaacgtacctttccatagcagctacgctcacagccaaagcctggaccgactaatgaatccactcatcgaccaatacttgtactatctctcaaagactattaacggttctggacagaatcaacaaacgctaaaattcagtgtggccggacccagcaacatggctgtccagggaagaaactacatacctggacccagctaccgacaacaacgtgcctcaaccactgtgactcaaaacaacaacagcgaatttgcttggcctggagcttcttcttgggctctcaatggacgtaatagcttgatgaatcctggacctgctatggccagccacaaagaaggggaggaccgtttctttcctttgtctggatctttaatttttggcaaacaaggaactggaagagacaacgtggatgcggacaaagtcatgataaccaacgaagaagaaattaaaactactaacccggtagcaacggagtcctatggacaagtggccacaaaccaccagagtgcccaagcacaggcgcagaccggctgggttcaaaaccaaggaatacttccgggtatggtttggcaggacagagatgtgtacctgcaaggacccatttgggccaaaattcctcacacggacggcaactttcacccttctccgctgatgggagggtttggaatgaagcacccgcctcctcagatcctcatcaaaaacacacctgtacctgcggatcctccaacggccttcaacaaggacaagctgaactctttcatcacccagtattctactggccaagtcagcgtggagatcgagtgggagctgcagaaggaaaacagcaagcgctggaacccggagatccagtacacttccaactattacaagtctaataatgttgaatttgctgttaatactgaaggtgtatatagtgaaccccgccccattggcaccagatacctgactcgtaatctg

SEQ ID NO: 643 - DNA, 2208 bp, Artificial Sequence
  Description of Artificial Sequence: Synthetic polynucleotide
atggctgccgatggttatcttccagattggctcgaggacaaccttagtgaaggaattcgcgagtggtgggctttgaaacctggagcccctcaacccaaggcaaatcaacaacatcaagacaacgctcgaggtcttgtgcttccgggttacaaataccttggacccggcaacggactcgacaagggggagccggtcaacgcagcagacgcggcggccctcgagcacgacaaggcctacgaccagcagctcaaggccggagacaacccgtacctcaagtgcaaccacgccgacgccgagttccaggagcggctcaaagaagatacgtcttttgggggcaacctcgggcgagcagtcttccaggccaaaaagaggcttcttgaacctcttggtctggttgaggaagcggctaagacggctcctggaaagaagaggcctgtagagcagtctcctcaggaaccggactcctccgcgggtattggcaaatcgggtgcacagcccgctaaaaagagactcaatttcggtcagactggcgacacagagtcagtcccagaccctcaaccaatcggagaacctcccgcagcccccccaggtgtgggatctcttacaatggcttcaggtggtggcgcaccagtggcggacaataacgaaggtgccgatggagtgggtagttcctcgggaaattggcattgcgattcccaatggctgggggacagagtcatcaccaccagcacccgaacctgggccctgcccacctacaacaatcacctctacaagcaaatctccaacagcacatctggaggatcttcaaatgacaacgcctacctcggctacagcaccccctgggggtattttgacttcaacagattccactgccacttctcaccacgtgactggcagcgactcatcaacaacaactggggattccggcctaagcgactcaacttcaagctcttcaacattcaggtcaaagaggttacggacaacaatggagtcaagaccatcgccaataaccttaccagcacggtccaggtcttcacggactcagactatcagctcccgtacgtgctcgggtcggctcacgagggctgcctcccgccgttcccagcggacgttttcatgattcctcagtacgggtatctgacgcttaatgatggaagccaggccgtgggtcgttcgtccttttactgcctggaatatttcccgtcgcaaatgctaagaacgggtaacaacttccagttcagctacgagtttgagaacgtacctttccatagcagctacgctcacagccaaagcctggaccgactaatgaatccactcatcgaccaatacttgtactatctctcaaagactattagcggttctggacagaatcaacaaacgctaaaattcagtgtggccggacccagcaacatggctgtccagggaagaaactacatacctggacccagctaccgacaacaacgtgtctcaaccactgtgactcaaaacaacagcagcgaatttgcttggcctggagcttcttcttgggctctcaatggacgtaatagcttgatgaatcctggacctgctatggccagccacaaagaaggagaggaccgtttctttcctttgtctggatctttaatttttggcaaacaaggaactggaagagacaacgtggatgcggacaaagtcatgataaccaacgaagaagaaattaaaactactaacccggtagcaacggagtcctatggacaagtggccacaaaccaccagagtgcccaagcacaggcgcagaccggctgggttcaaaaccaaggaatactttcgggtatggtttggcaggacagagatgtgtacctgcaaggacccatttgggccaaaattcctcacacggacggcaactttcacccttctccgctgatgggagggtttggaatgaagcacccgcctcctcagatcctcatcaaaaacacacctgtacctgcggatcctccaacggccttcaacaaggacaagctgaactctttcatcacccagtattctactggccaagtcagcgtggagatcgagtgggagctgcagaaggaaaacagcaagcgctggaacccggagatccagtacacttccaactattacaagtctaataatgttgaatttgctgttaatactgaaggtgtatatagtgaaccccgccccattggcaccagatacctgactcgtaatctg

SEQ ID NO: 644 - DNA, 2208 bp, Artificial Sequence
  Description of Artificial Sequence: Synthetic polynucleotide
atggctgccgatggttatcttccagattggctcgaggacaaccttagtgaaggaattcgcgagtggtgggctttgaaacctggagcccctcaacccaaggcaaatcaacaacatcaagacaacgctcgaggtcttgtgcttccgggttacaaataccttggacccggcaacggactcgacaagggggagccggtcaacgcagcagacgcggcggccctcgagcacgacaaggcctacgaccagcagctcaaggccggagacaacccgtacctcaagtgcaaccacgccgacgccgagttccaggagcggctcaaagaagatacgtcttttgggggcaacctcgggcgagcagtcttccaggccaaaaagaggcttcttgaacctcttggtctggttgaggaagcggctaagacggctcctggaaagaagaggcctgtagagcagtctcctcaggaaccggactcctccgcgggtattggcaaatcgggtgcacagcccgctaaaaagagactcaatttcggtcagactggcgacacagagtcagtcccagaccctcaaccaatcggagaacctcccgcagccccctcaggtgtgggatctcttacaatggcttcaggtggtggcgcaccagtggcagacaataacgaaggtgccgatggagtgggtagttcctcgggaaattggcattgcgattcccaatggctgggggacagagtcatcaccaccagcacccgaacctgggccctgcccacctacaacaatcacctctacaagcaaatctccaacagcacatctggaggatcttcaaatgacaacgcctacctcggctacagcaccccctgggggtattttgacttcaacagattccactgccacttctcaccacgtgactggcagcgactcatcaacaacaactggggattccggcctaagcgactcaacttcaagctcttcaacattcaggtcaaagaggttacggacaacaatggagtcaagaccatcgccaataaccttaccagcacggtccaggtcttcacggactcagactatcagctcccgtacgtgctcgggtcggctcacgagggctgcctcccgccgttcccagcggacgttttcatgattcctcagtacgggtatctgacgcttaatgatggaagccaggccgtgggtcgttcgtccttttactgcctggaatatttcccgtcgcaaatgctaagaacgggtaacaacttccagttcagctacgagtttgagaacgtacctttccatagcagctacgctcacagccaaagcctggaccgactaatgaatccactcatcgaccaatacttgtactatctctcaaagactattaacggttctggacagaatcaacaaacgctaaaattcagtgtggccggacccagcaacatggctgtccagggaagaaactacatacctggacccagctaccgacaacaacgtgtctcaaccactgtgactcaaaacaacaacagcgaatttgcttggcctggagcttcttcttgggctctcaatggacgtaatagcttgatgaatcctggacctgctatggccagccacaaagaaggagaggaccgtttctttcctttgtctggatctttaatttttggcaaacaaggaactggaagagacaacgtggatgcggacaaagtcatgataaccaacgaagaagaaattaaaactactaacccggtagcaacggagtcctatggacaagtggccacaaaccaccagagtgcccaagcacaggcgcagaccggctgggttcaaaaccaaggaatacttccgggtatggtttggcaggacagagatgtgtacctgcaaggacccatttgggccaaaattcctcacacggacggcaactttcacccttctccgctgatgggagggtttggaatgaagcacccgcctcctcagatcctcatcaaaaacacacctgtacctgcggatcctccaacggccttcaacaaggacaagctgaactctttcatcacccagtattctactggccaagtcagcgtggagatcgagtgggagctgcagaaggaaaacagcaagcgctggaacccggagatccagtacacttccaactattacaagtctaataatgttgaatttgctgttaatactgaaggtgtatatagtgaaccccgccccattggcaccagatacctgactcgtaatctg

SEQ ID NO: 645 - DNA, 2208 bp, Artificial Sequence; identical to SEQ ID NO: 644
  Description of Artificial Sequence: Synthetic polynucleotide

SEQ ID NO: 646 - DNA, 2208 bp, Artificial Sequence
  Description of Artificial Sequence: Synthetic polynucleotide
atggctgccgatggttatcttccagattggctcgaggacaaccttagtgaaggaattcgcgagtggtgggctttgaaacctggagcccctcaacccaaggcaaatcaacaacatcaagacaacgctcgaggtcttgtgcttccgggttacaaataccttggacccggcaacggactcgacaagggggagccggtcaacgcagcagacgcggcggccctcgagcacgacaaggcctacgaccagcagctcaaggccggagacaacccgtacctcaagtgcaaccacgccgacgccgagttccaggagcggctcaaagaagatacgtcttttgggggcaacctcgggcgagcagtcttccaggccaaaaagaggcttcttgaacctcttggtctggttgaggaagcggctaagacggctcctggaaagaagaggcctgtagagcagtctcctcaggaaccggactcctccgcgggtattggcaaatcgggtgcacagcccgctaaaaagagactcaatttcggtcagactggcgacacagagtcagtcccagaccctcaaccaatcggagaacctcccgcagccccctcaggtgtgggatctcttacaatggcttcaggtggtggcgcaccagtggcagacaataacgaaggtgccgatggagtgggtagttcctcgggaaattggcattgcgattcccaatggctgggggacagagtcatcaccaccagcacccgaacctgggccctgcccacctacaacaatcacctctacaagcaaatctccaacagcacatctggaggatcttcaaatgacaacgcctacctcgactacagcaccccctgggggtattttgacttcaacagattccactgccacttctcaccacgtgactggcagcggctcatcaacaacaactggggattccggcctaagcgactcaacttcaagctcttcaacattcaggtcaaagaggttacggacaacaatggagtcaagaccatcgccaataaccttaccagcacggtccaggtcttcacggactcagactatcagctcccgtacgtgctcgggtcggctcacgagggctgcctcccgccgttcccagcggacgttttcatgattcctcagtacgggtatctgacgcttaatgatggaagccaggccgtgggtcgttcgtccttttactgcctggaatatttcccgtcgcaaatgctaagaacgggtaacaacttccagttcagctacgagtttgagaacgtacctttccatagcagctacgctcacagccaaagcctggaccgactaatgaatccactcatcgaccaatacttgtactatctctcaaagactattaacggttctggacagaatcaacaaacgctaaaattcagtgtggccggacccagcaacatggctgtccagggaagaaactacatacctggacccagctaccgacaacaacgtgtctcaaccactgtgactcaaaacaacaacagcgaatttgcttggcctggagcttcttcttgggctctcaatggacgtaatagcttgatgaatcctggacctgctatggccagccacaaagaaggagaggaccgtttctttcctttgtctggatctttaatttttggcaaacaaggaactggaagagacaacgtggatgcggacaaagtcatgataaccaacgaagaagaaattaaaactactaacccggtagcaacggagtcctatggacaagtggccacaaaccaccagagtgcccaagcacaggcgcagaccggctgggttcaaaaccaaggaatacttccgggtatggtttggcagggcagagatgtgtacctgcaaggacccatttgggccaaaattcctcacacggacggcaactttcacccttctccgctgatgggagggtttggaatgaagcacccgcctcctcagatcctcatcaaaaacacacctgtacctgcggatcctccaacggccttcaacaaggacaagctgaactctttcatcacccagtattctactggccaagtcagcgtggagatcgagtgggagctgcagaaggaaaacagcaagcgctggaacccggagatccagtacacttccaactattacaagtctaataatgttgaatttgctgttaatactgaaggtgtatatagtgaaccccgccccattggcaccagatacctgactcgtaatctg

SEQ ID NO: 647 - DNA, 2208 bp, Artificial Sequence; identical to SEQ ID NO: 644
  Description of Artificial Sequence: Synthetic polynucleotide

SEQ ID NO: 648 - DNA, 2208 bp, Artificial Sequence
  Description of Artificial Sequence: Synthetic polynucleotide
atggctgccgatggttatcctccagattggctcgaggacaaccttagtgaaggaattcgcgagtggtgggctttgaaacctggagcccctcaacccaaggcaaatcaacaacatcaagacaacgctcgaggtcttgtgcttccgggttacaaataccttggacccggcaacggactcgacaagggggagccggtcaacgcagcagacgcggcggccctcgagcacgacaaggcctacgaccagcagctcaaggccggggacaacccgcacctcaagtacaaccacgccgacgccgagttccaggagcggctcaaagaagatacgtcttttgggggcaacctcgggcgagcagtcttccaggccaaaaagaggcttcttgaacctcttggtctggttgaggaagcggctaagacggctcctggaaagaagaggcccgtagagcagtctcctcaggaaccggactcctccgcgggtattggcaaatcgggtgcacagcccgctaagaagagactcaatttcggtcagactggcgacactgagtcagtcccagaccctcaaccaatcggagaacctcccgcagccccctcaggtgtgggatctcttacaatggcttcaggtggtggcgcaccagtggcagacaataacgaaggtgccgatggagtgggtagttcctcgggaaattggcattgcgattcccaatggctgggggacagagtcatcaccaccagcacccgaacctgggccctgcccacctacaacaatcacctctacaagcaaatctccaacagcacatctggaggatcttcaaatgacaacgcctacttcggctacagcaccccctgggggtattttgacttcaacagattccactgccacttctcaccacgtgactggcagcgactcatcaacaacaactggggattccggcctaagcgactcaacttcaagctcttcaacattcaggtcaaagaggttacggacaacaatggagtcaagaccatcgccaataaccttaccagcacggtccaggtcttcacggactcagactatcagctcccgtacgtgctcgggtcggctcacgagggctgcctcccgccgttcccagcggacgttttcatgattcctcagtacgggtatctgacgcttaatgatggaagccaggccgtgggtcgttcgtccttttactgcctggaatatttcccgtcgcaaatgctaagaacgggtaacaacttccagttcagctacgagtttgagaacgtacctttccatagcagctacgctcacagccaaagcctggaccgactaatgaatccactcatcgaccaatacttgtactatctctcaaagactattaacggttctggacagaatcaacaaacgctaaaattcagtgtggccggacccagcaacatggctgtccagggaagaaactacatacctggacccagctaccgacaacaacgtgtctcaaccactgtgactcaaaacaacaacagcgaatttgcttggcctggagcttcttcttgggctctcaatggacgtaatagcttgatgaatcctggacctgctatggccagccacaaagaaggagaggaccgtttctttcctttgtctggatctttaatttttggcaaacaaggaactggaagagacaacgtggatgcggacaaagtcatgataaccaacgaagaagaaattaaaactactaacccggtagcaacggagtcctatggacaagtggccacaaaccaccagagtgcccaagcacaggcgcagaccggctgggttcaaaaccaaggaatacttccgggtatggtttggcaggacagagatgtgtacctgcaaggacccatttgggccaaaattcctcacacggacggcaactttcacccttctccgctgatgggagggtttggagtgaagcacccgcctcctcagatcctcatcaaaaacacacctgtacctgcggatcctccaacggccttcaacaaggacaggctgaactctttcatcacccagtattctactggccaagtcagcgtggagatcgagtgggagctgcagaaggaaaacagcaagcgctggaacccggagatccagtacacttccaactattacaagtctaataatgttgaatttgctgttaatactgaaggtgtatatagtgaaccccgccccattggcaccagatacctgactcgtaatctg

SEQ ID NO: 649 - DNA, 2208 bp, Artificial Sequence
  Description of Artificial Sequence: Synthetic polynucleotide
atggctgccgatggttatcttccagattggctcgaggacaaccttagtgaaggaattcgcgagtggtgggctttgaaacctggagcccctcaacccaaggcaaatcaacaacatcaagacaacgctcgaggtcttgtgcttccgggttacaaataccttggacccggcaacggactcgacaagggggagccggtcaacgcagcagacgcggcggccctcgagcacgacaaggcctacgaccagcagctcaaggccggagacaacccgtacctcaagtacaaccacgccgacgccgagttccaggagcggctcaaagaagatacgtcttttgggggcaacctcgggcgagcagtcttccaggccaaaaagaggcttcttgaacctcttggtctggttgaggaagcggctaagacggctcctggaaagaagaggcctgtagagcagtctcctcaggaaccggactcctccgcgggtattggcaaatcgggtgcacagcccgctaaaaagagactcaatttcggtcagactggcgacacagagtcagtcccagaccctcaaccaatcggagaacctcccgcagccccctcaggtgtgggatctcttacaatggcttcaggtggtggcgcaccagtggcggacaataacgaaggtgccgatggagtgggtagttcctcgggaaattggcattgcgattcccaatggctgggggacagagtcatcaccaccagcacccgaacctgggccctgcccacctacaacaatcacctctacaagcaaatctccaacagcacatctggaggatcttcaaatgacaacgcctacttcggctacagcaccccctgggggtattttgacttcaacagattccactgccacttctcaccacgtgactggcagcgactcatcaacaacaactggggattccggcctaagcgactcaacttcaagctcttcaacattcaggtcaaagaggttacggacaacaatggagtcaagaccatcgccaataaccttaccagcacggtccaggtcttcacggactcagactatcagctcccgtacgtgctcgggtcggctcacgagggctgcctcccgccgttcccagcggacgttttcatgattcctcagtacgggtatctgacgcttaatgatggaagccaggccgtgggtcgttcgtccttttactgcctggaatatttcccgtcgcaaatgctaagaacgggtaacaacttccagttcagctacgagtttgagaacgtacctttccatagcagctacgctcacagccaaagcctggaccgactaatgaatccactcatcgaccaatacttgtactatctctcaaagactattaacggttctggacagaatcaacaaacgctaaaattcagtgtggccggacccagcaacatggctgtccagggaagaaactacatacctggacccagctaccgacaacaacgtgtctcaaccactgtgactcaaaacaacaacagcgaatttgcttggcctggagcttcttcttgggctctcaatggacgtaatagtttgatgaatcctggacctgctatggccagccacaaagaaggagaggaccgtttctttcctttgtctggatctttaatttttggcaaacaaggaactggaagagacaacgtggatgcggacaaagtcatgataaccaacgaagaagaaattaaaactactaacccggtagcaacggagtcctatggacaagtggccacaaaccaccagagtgcccaagcacaggcgcagaccggctgggttcaaaaccaaggaatacttccgggtatggtttggcaggacagagatgtgtacctgcaaggacccatttgggccaaaattcctcacacggacggcaactttcacccttctccgctgatgggagggtttggagtgaagcacccgcctcctcagatcctcatcaaaaacacacctgtacctgcggatcctccaacggccttcaacaaggacaagctgaactctttcatcacccagtattctactggccaagtcagcgtggagatcgagtgggagctgcagaaggaaaacagcaagcgctggaacccggagatccagtacacttccaactattacaagtctaataatgttgaatttgctgttaatactgaaggtgtatatagtgaaccccgccccattggcaccagatacctgactcgtaatctg

SEQ ID NO: 650 - DNA, 2208 bp, Artificial Sequence
  Description of Artificial Sequence: Synthetic polynucleotide
atggctgccgatggttatcttccagattggctcgaggacaaccttagtgaaggaattcgcgagtggtgggctttgaaacctggagcccctcaacccaaggcaaatcaacaacatcaagacaacgctcgaggtcttgtgcttccgggttacaaataccttggacccggcaacggactcgacaagggggagccggtcaacgcagcagacgcggcggccctcgagcacgacaaggcctacgaccagcagctcaaggccggagacaacccgtacctcaagtacaaccacgccgacgccgagttccaggagcggctcaaagaagatacgtcttttgggggcaacctcgggcgagcagtcttccaggccaaaaagaggcttcttgaacctcttggtctggttgaggaagcggctaagacggctcctggaaagaagaggcctgtagagcagtctcctcaggaaccggactcctccgcgggtattggcaaatcgggtgcacagcccgctaaaaagagactcaatttcggtcagactggcgacacagagtcagtcccagaccctcaaccaatcggagaacctcccgcagccccctcaggtgtgggatctcttacaatggcttcaggtggtggcgcaccagtggcagacaataacgaaggtgccgatggagtgggtagttcctcgggaaattggcattgcgattcccaatggctgggggacagagtcatcaccaccagcacccgaacctgggccctgcccacttacaacaatcacctctacaagcaaatctccaacagcacatctggaggatcttcaaatgacaacgcctacttcggctacagcaccccctgggggtattttgacttcaacagattccactgccacttctcaccacgtgactggcagcgactcaccaacaacaactggggattccggcctaagcgactcaacttcaagctcttcaacattcaggtcaaagaggttacggacaacaatggagtcaagaccatcgccaataaccttaccagcacggtccaggtcttcacggactcagactatcagctcccgtacgtgctcgggtcggctcacgagggctgcctcccgccgttcccagcggacgttttcatgattcctcagtacgggtatctgacgcttaatgatggaagccaggccgtgggtcgttcgtccttttactgcctggaatatatcccgtcgcaaatgctaagaacgggtaacaacttccagttcagctacgagtttgagaacgtacctttccatagcagctacgctcacagccaaagcctggaccgactaatgaatccactcatcgaccaatacttgtactatctctcaaagactattaacggttctggacagaatcaacaaacgctaaaattcagtgtggccggacccagcaacatggctgtccagggaagaaactacatacctggacccagctaccgacaacaacgtgtctcaaccactgtgactcaaaacaacaacagcgaatttgcttggcctggagcttcttcttgggctctcaatggacgtaatagcttgatgaatcctggacctgctatggccagccacaaagaaggagaggaccgtttctttcctttgtctggatctttaatttttggcaaacaaggaactggaagagacaacgtggatgcggacaaagtcatgataaccaacgaagaagaaattaaaactactaacccggtagcaacggagtcctatggacaagtggccacaaaccaccagagtgcccaagcacaggcgcagaccggctgggttcaaaaccaaggaatacttccgggtatggtttggcaggacagagatgtgtacctgcaaggacccatttgggccaaaattcctcacacggacggcaactttcacccttctccgctgatgggagggtttggagtgaagcacccgcctcctcagatcctcatcaaaaacacacctgtacctgcggatcctccaacggccttcaacaaggacaagctgaactctttcatcacccagtattctactggccaagtcagcgtggagatcgagtgggagctgcagaaggaaaacagcaagcgctggaacccggagatccagtacacttccaactattacaagtctaataatgttgaatttgctgttaatactgaaggtgtatatagtgaaccccgccccattggcaccagatacctgactcgtaatctg

SEQ ID NO: 651 - DNA, 2208 bp, Artificial Sequence
  Description of Artificial Sequence: Synthetic polynucleotide
atggctgccgatggttatcttccagattggctcgaggacaaccttagtgaaggaattcgcgagtggtgggctttgaaacctggagcccctcaacccaaggcaaatcaacaacatcaagacaacgctcgaggtcttgtgcttccgggttacaaataccttggacccggcaacggactcgacaagggggagccggtcaacgcagcagacgcggcggccctcgagcacgacaaggcctacgaccagcagctcaaggccggagacaacccgtacctcaagtacaaccacgccgacgccgagttccaggagcggctcaaagaagatacgtcttttgggggcaacctcgggcgagcagtcttccaggccaaaaagaggcttcttgaacctcttggtctggttgaggaagcggctaagacggctcctggaaagaagaggcctgtagagcagtctcctcaggaaccggactcctccgcgggtattggcaaatcgggtgcacagcccgctaaaaagagactcaatttcggtcagactggcgacacagagtcagtcccagaccctcaaccaatcggagaacctcccgcagccccctcaggtgtgggatctcttacaatggcttcaggtggtggcgcaccagtggcagacaataacgaaggtgccgatggagtgggtagttcctcgggaaattggcattgcgattcccaatggctgggggacagagtcatcaccaccagcacccgaacctgggccctgcccacctacaacaatcacctctacaagcaaatctccaacagcacatctggaggatcttcaaatgacaacgcctacttcggctacagcaccccctgggggtattttgacttcaacagattccactgccacttctcaccacgtgactggcagcgactcatcaacaacaactggggattccggcctaagcgactcaacttcaagctcttcaacattcaggtcaaagaggttacggacaacaatggagtcaagaccatcgccaataaccttaccagcacggtccaggtcttcacggactcagactatcagctcccgtacgtgctcgggtcggctcacgagggctgcctcccgccgttcccagcggacgttttcatgattcctcagtacgggtatctgacgcttaatgatggaagccaggccgtgggtcgttcgtccttttactgcctggaatatttcccgtcgcaaatgctaagaacgggtaacaacttccagtttagctacgagtttgagaacgtacctttccatagcagctacgctcacagccaaagcctggaccgactaatgaatccactcatcgaccaatacttgtactatctctcaaagactattaacggttctggacagaatcaacaaacgctaaaattcagtgtggccggacccagcaacatggctgtccagggaagaaactacatacctggacccagctaccgacaacaacgtgtctcaaccactgtgactcaaaacaacaacagcgaatttgcttggcctggagcttcttcttgggctctcaatggacgtaatagcttgatgaatcctggacctgctatggccagccacaaagaaggagaggaccgtttctttcctttgtctggatctttaatttctggcaaacaaggaactggaagagacaacgtggatgcgaacaaagtcatgataaccaacgaagaagaaattaaaactactaacccggtagcaacggagtcctatggacaagtggccacaaaccaccagagtgcccaagcacaggcgcagaccggctgggttcaaaaccaaggaatacttccgggtatggtttggcaggacagagatgtgtacctgcaaggacccatttgggccaaaattcctcacacggacggcaactttcacccttctccgctgatgggagggtttgaaatgaagcacccgcctcctcagatcctcatcaaaaacacacctgtacctgcggatcctccaacggccttcaacaaggacaagctgaactctttcatcacccagtattctactggccaagtcagcgtggagatcgagtgggagctgcagaaggaaaacagcaagcgctggaacccggagatccagtacacttccaactattacaagtctaataatgttgaatttgctgttaatactgaaggtgtatatagtgaaccccgccccattggcaccagatacctgactcgtaatctg

SEQ ID NO: 652 - DNA, 2208 bp, Artificial Sequence
  Description of Artificial Sequence: Synthetic polynucleotide
atggctgccgatggttatcttccagattggctcgaggacaaccttagtgaaggaattcgcgagtggtgggctttgaaacctggagcccctcaacccaaggcaaatcaacaacatcaagacaacgctcgaggtcttgtgcttccgggttacaaataccttggacccggcaacggactcgacaagggggagccggtcaacgcagcagacgcggcggccctcgagcacgacaaggcctacgaccagcagctcaaggccggagacaacccgtacctcaagtacaaccacgccgacgccgagttccaggagcggctcaaagaagatacgtcttttgggggcaacctcgggcgagcagtcttccaggccaaaaagaggcttcttgaacctcttggtctggttgaggaagcggctaagacggctcctggaaagaagaggcctgtagagcagtctcctcaggaaccggactcctccgcgggtattggcaaatcgggtgcacagcccgctaaaaagagactcaatttcggtcagactggcgacacagagtcagtcccagaccctcaaccaatcggagaacctcccgcagccccctcaggtgtgggatctcttacaatagcttcaggtggtggcgcaccagtggcagacaataacgaaggtgccgatggagtgggtagttcctcgggaaattggcattgcgattcccaatggctgggggacagagtcatcaccaccagcacccgaacctgggccctgcccacctacaacaatcacctctacaagcgaatctccaacagcacatctggaggatcttcaaatgacaacgcctacttcggctacagcaccccctgggggtattttgacttcaacagattccactgccacttctcaccacgtgactggcagcgactcatcaacaacaactggggattccggcctaagcgactcaacttcaagcttttcaacattcgggtcaaagaggttacggacaacaatggagtcaagaccatcaccaataaccttaccagcacggtccaggtcttcacggactcagactatcagctcccgtacgtgcttgggtcggctcacgagggctgcctcccgccgttcccagcggacgttttcatgattcctcagtacgggtatctgacgcttaatgatggaagccaggccgtgggtcgttcgtccttttactgcctggaatatttcccgtcgcaaatgctaagaacgggtaacaacttccagttcagctacgagtttgagaacgtacctttccatagcagctacgctcacagccaaagcctggaccgactaatgaatccactcatcgaccaatacttgtactatctctcaaagactattaacggttctggacagaatcaacaaacgctaaaattcagtgtggccggacccagcaacatggctgtccagggaagaaactacatacctggacccagctaccgacaacaacgtgtctcaaccactgtgactcgaaacaacaacagcgaatttgcttggcctggagcttcttcttgggctctcaatggacgtaatagcttgatgaatcctggacctgctatggccagccacaaagaaggagaggaccgtttctttcctttgtctggatctttaatttttggcaaacaaggaactggaagagacaacgtggatgcggacaaagtcatgataaccaacgaagaagaaattaaaactactaacccggtagcaacggagtcctatggacaagtggccacaaaccaccagagtgcccaagcacaggcgcagaccggctgggttcaaaaccaaggaatacttccgggtatggtttggcaggacagagatgtgtacctgcaaggacccatttgggccaaaattcctcacacggacggcaactttcacccttctccgctgatgggagggtttggagtgaagcacccgcctcctcagatcctcatcaaaaacacacctgtacctgcggatcctccaacggccttcaacaaggacaagctgaactctttcatcacccagtattctactggccaagtcagcgtggagatcgagtgggagctgcagaaggaaaacagcaagcgctggaacccggagatccagtacacttccaactattacaagtctaataatgttgaatttgctgttaatactgaaggtgtatatagtgaaccccgccccattggcaccagatacctgactcgtaatctg

SEQ ID NO: 653 - DNA, 2208 bp, Artificial Sequence
  Description of Artificial Sequence: Synthetic polynucleotide
atggctgccgatggttatcttccagattggctcgaggacaaccttagtgaaggaattcgcgagtggtgggctttgaaacctggagcccctcaacccaaggcaaatcaacaacatcaagacaacgctcgaggtcttgtgcttccgggttacaaataccttggacccggcaacggactcgacaagggggagccggtcaacgcagcagacgcggcggccctcgagcacgacaaggcctacgaccagcagctcaaggccggagacaacccgtacctcaagtacaaccacgccgacgccgagttccaggagcggctcaaagaagatacgtcttttgggggcaacctcgggcgagcagtcttccaggccaaaaagaggcttcttgaacctcttggtctggttgaggaagcggctaagacggctcctggaaagaagaggcctgtagagcagtctcctcaggaaccggactcctccgcgggtattggcaaatcgggcgcacagcccgctaaaaagagactcaatttcggtcagactggcgacacagagccagtcccagaccctcaaccaatcggagaacctcccgcagccccctcaggtgtgggatctcttacaatggcttcaggtggtggcgcaccagtggcagacaataacgaaggtgccgatggagtgggtagttcctcgggaaattggcattgcgattcccaatggctgggggacagagtcatcaccaccagcacccgaacctgggccctgcccacctacaacaatcacctctacaagcaaatctccaacagcacatctggaggatcttcaaatgacaacgcctacttcggctacagcaccccctgggggtattttgacttcaacagattccactgccacttctcaccacgtgactggcagcgactcatcaacaacaactggggattccggcctaagcgactcaacttcaagctcttcaacattcaggtcaaagaggttacggacaacaatggagtcaagaccatcgccaataaccttaccagcacggtccaggtcttcacggactcagactatcagctcccgtacgtgctcgggtcggctcacgagggctgcctcccgccgttcccagcgggcgttttcatgattcctcagtacgggtatctgacgcttaatgatggaagccaggccgtgggtcgttcgtccttttactgcctggaatatttcccgtcgcaaatgctaagaacgggtaacaacttccagttcagctacgagtttgagaacgtacctttccatagcagctacgctcacagccaaagcctggaccgactaatgaatccactcatcgaccaatacttgtactatctctcaaagactattaacggttctggacagaatcaacaaacgctaaaattcagtgtggccggacccagcaacatggctgtccagggaagaaactacatacctggacccagctaccgacaacaacgtgtctcaaccactgcgactcaaaacaacaacagcgaatttgcttggcctggagcttcttcttgggctctcaatggacgtaatagcttgatgaatcctggacctgctatggccagccacaaagaaggagaggaccgtttctttcctttgtctggatctttaatttttggcaaacaaggaactggaagagacaacgtggatgcggacaaagtcatgataaccaacgaagaagaaattaaaactactaacccggtagcaacggagtcctatggacaagtggccacaaaccaccagagtgcccaagcacaggcgcagaccggctgggttcaaaaccaaggaatacttccgggtatggtttggcaggacagagatgtgtacctgcaaggacccatttgggccaaaattcctcacacggacggcaactttcacccttctccgctgatgggagggtttggaatgaagcacccgcctcctcagatcctcatcaaaaacacacctgtacctgcggatcctccaacggccttcaacaaggacaagctgaactctttcatcacccagtattctactggccaagtcagcgtggagatcgagtgggagctgcagaaggaaaacagcaagcgctggaacccggagatccagtacacttccaactattacaagtctaataatgttgaatttgctgttaatactgaaggtgtatatagtgaaccccgccccattggcaccagatacctgactcgtaatctg

SEQ ID NO: 654 - DNA, 2208 bp, Artificial Sequence
  Description of Artificial Sequence: Synthetic polynucleotide
atggctgccgatggttatcttccagattggctcgaggacaaccttagtgaaggaattcgcgagtggtgggctttgaaacctggagcccctcaacccaaggcaaatcaacaacatcaagacaacgctcgaggtcttgtgcttccgggttacaaataccttggacccggcaacggactcgacaagggggagccggtcaacgcagcagacgcggcggccctcgagcacgacaaggcctacgaccagcagctcaaggccggagacaacccgtacctcaagtacaaccacgccgacgccgggttccaggagcggctcaaagaagatacgtcttttgggggcaacctcgggcgagcagtcttccaggccaaaaagaggcttcttgaacctcttggtctggttgaggaagcggctaagacggctcctggaaagaagaggcctgtagagcagtctcctcaggaaccggactcctccgcgggtattggcaaatcgggtgcacagcccgctaaaaagagactcaatttcggtcagactggcgacacagagtcagtcccagtccctcaaccaatcggagaacctcccgcagccccctcaggtgtgggatctcttacaatggcttcaggtggtggcgcaccagtggcagacaataacgaaggtgccgatggagtgggtagttcctcgggaaattggcattgcgattcccaatggctgggggacagagtcatcaccaccagcacccgaacctgggccctgcccacctacaacaatcacctctacaagcaaatctccaacagcacatctggaggatcttcaaatgacaacgcctacttcggctacagcaccccctgggggtattttgacttcaacagattccactgccacttctcaccacgtgactggcagcgactcatcaacaacaactggggattccggcctaagcgactcaacttcaagctcttcaacattcaggtcaaagaggttacggacaacaatggagtcaagaccatcgccaataaccttaccagcacggtccaggtcttcacggactcagactatcagctcccgtacgtgctcgggtcggctcacgagggctgcctcccgccgttcccagcggacgttttcatgattcctcagtacgggtatctgacgcttaatgatggaagccaggccgtgggtcgttcgtccttttactgcctggaatatttcccgtcgcaaatgctaagaacgggtaacaacttccagttcagctacgagtttgagaacgtacctttccatagcagctacgctcacagccaaagcctggaccgactaatgaatccactcatcgaccaatacttgtactatctctcaaagactattaacggttctggacagaatcaacaaacgctaaaattcagtgtggccggacccagcaacatggctgtccagggaagaaactacatacctggacccagctaccgacaacaacgtgtctcaaccactgtgactcaaaacaacaacagcgaatttgcttggcctggagcttcttcttgggctctcaatggacgtaatagcttgatgaatcctggacctgctatggccagccacaaagaaggagaggaccgtttctttcctttgtctggatctttaatttttggcaaacaaggagctggaagagacaacgtggatgcggacaaagtcatgataaccaacgaagaagaaattaaaactactaacccggtagcaacggagtcctatggacaagtggccacaaaccaccagagtgcccaagcacaggcgcagaccggctgggttcaaaaccaaggaatacttccgggtatggtttggcaggacagagatgtgtacctgcaaggacccatttgggccaaaattcctcacacggacggcaactttcacccttctccgctgatgggagggtttggaatgaagcacccgcctcctcagatcctcatcaaaaacacacctgtacctgcggatcctccaacggccttcaacaaggacaagctgaactctttcatcacccagtattctactggccaagtcagcgtggagatcgagtgggagctgcagaaggaaaacagcaagcgctggaacccggagatccagtacacttccaactattacaagtctaataatgttgaatttgctgttaatactgaaggtgtatatagtgaaccccgccccattggcaccagatacctgactcgtaatctg

SEQ ID NO: 655 - DNA, 2208 bp, Artificial Sequence
  Description of Artificial Sequence: Synthetic polynucleotide
  modified_base (377)..(377): a, c, t, or g
atggctgccgatggttatcttccagattggctcgaggacaaccttagtgaaggaattcgcgagaggtgggctttgaaacctggagcccctcaacccaaggcaaatcaacaacatcaagacaacgctcgaggtcttgtgcttccgggttacaaataccttggacccggcaacggactcgacaagggggagccggtcaacgcagcagacgcggcggccctcgagcacgacaaggcctacgaccagcagctcaaggccggagacaacccgtacctcaagtacaaccacgccgacgccgagttccaggagcggctcaaagaagatacgtcttttgggggcaacctcgggcgagcagtcttccaggccaaaaagaggcttcntgaacctcttggtctggttgaggaagcggctaagacggctcctggaaagaagaggcctgtagagcagtctcctcaggaaccggactcctccgcgggtattggcaaatcgggtgcacagcccgctaaaaagagactcaatttcggtcagactggcgacacagagtcagtcccagaccctcaaccaatcggagaacctcccgcagccccctcaggtgtgggatctcttacaatggcttcaggtggtggcgcaccagtggcagacaataacgaaggtgccgatggagtgggtagttcctcggggaattggcattgcgattcccaatggctgggggacagagtcatcaccaccagcacccgaacctgggccctgcccacctacaacaatcacctctacaagcaaatctccaacagcacatctggaggatcttcaaatgacaacgcctacttcggctacagcaccccctgggggtattttgacttcaacagattccactgccacttctcaccacgtgactggcagcgactcatcaacaacaactggggattccggcctaagcgactcaacttcaagctcttcaacattcaggtcaaagaggttacggacaacaatggagtcaagaccatcgccaataaccttaccagcacggtccaggtcttcacggactcagactatcagctcccgtacgtgctcgggtcggctcacgagggctgcctcccgccgttcccagcggacgttttcatgattcctcagtacgggtatctgacgcttaatgatggaagccaggccgtgggtcgttcgtccttttactgcctggaatatttcccgtcgcaaatgctaagaacgggtaacaacttccagttcagctacgagtttgagaacgtacctttccatagcagctacgctcacagccaaagcccggaccgactaatgaatccactcatcgaccaatacttgtactatctctcaaagactattaacggttctggacagaatcaacaaacgctaaaattcagtgtggccggacccagcaacatggctgtccagggaagaaactacatacctggacccagctaccgacaacaacgtgtctcaaccactgtgactcaaaacaacaacagcgaatttgcttggcctggagcttcttcttgggctctcaatggacgtaatagcttgatgaatcctggacctgctatggccagccacaaagaaggagaggaccgtttctttcctttgtctggatctttaatttttggcaaacaaggaactggaagagacaacgtggatgcggacaaagtcatgataaccaacgaagaagaaattaaaactactaacccggtagcaacggagtcctatggacaagtggccacaaaccaccagagtgcccaagcacaggcgcagaccggctgggttcaaaaccaaggaatacttccgggtatggtttggcaggacagagatgtgtacctgcaaggacccatttgggccaaaattcctcacacggacggcaactttcacccttctccgctgatgggagggtttggagtgaagcacccgcctcctcagatcctcatcaaaaacacacctgtacctgcggatcctccaacggccttcaacaaggacaagctgaactctttcatcacccagtattctactggccaagtcagcgtggagatcgagtgggagctgcagaaggaaaacagcaagcgctggaacccggagatccagtacacttccaactattacaagtctaataatgttgaatttgctgttaatactgaaggtgtatatagtgaaccccgccccattggcaccagatacctgactcgtaatctg

SEQ ID NO: 656 - DNA, 2208 bp, Artificial Sequence
  Description of Artificial Sequence: Synthetic polynucleotide
atggctgccgatggttatcttccagattggctcgaggacaaccttagtgaaggaattcgcgagtggtgggctttgaaacctggagcccctcaacccaaggcaaatcaacaacatcaagacaacgctcgaggtcttgtgcttccgggttacaaataccttggacccggcaacggactcgacaagggggagccggtcaacgcagcagacgcggcggccctcgagcacgacaaggcctacgaccagcagctcaaggccggagacaacccgtacctcaagtacaaccacgccgacgccgagttccaggagcggctcaaagaagatacgtcttttgggggcaacctcgggcgagcagtcttccaggccaaaaagaggcttcttgaacctcttggtctggttgaggaagcggctaagacggctcctggaaagaagaggcctgtagagcagtctcctcaggaaccggactcctccgcgggtattggcaaatcgggtgcacagcccgctaaaaagagactcaatttcggtcagactggcgacacagagtcagtcccagaccctcaaccaatcggagaacctcccgcagccccctcaggtgtgggatctcttacaatggcttcaggtggtggcgcaccagtggcagacaataacgaaggtgccgatggagtgggtagttcctcgggaaattggcattgcgattcccaatggctgggggacagagtcatcaccaccagcacccgaacctgggccctgcccacctacaacaatcacctctacaagcaaatctccaacagcacatctggaggatcttcaaatgacaacgcctacctcggctacagcaccccctgggggtattttgacttcaacagattccactgccacttctcaccacgtgactggcagcgactcatcaacaacaactggggattccggcctaagcgactcaacttcaagctcttcaacattcaggtcaaagaggttacggacaacaatggagtcaagaccatcgccaataaccttaccagcacggtccaggtcttcacggactcagactatcagctcccgtacgtgctcgggtcggctcacgagggctgcctcccgccgttcccagcggacgttttcatgattcctcagtacgggtatctgacgcttaatgatggaagccaggccgtgggtcgttcgtccttttactgcctggaatatttcccgtcgcaaatgctaagaacgggtaacaacttccagttcagctacgagtttgagaacgtacctttccatagcagctacgctcacagccaaagcctggaccgactaatgaatccactcatcgaccaatacttgtactatctctcaaagactattaacggttctggacagaatcaacaaacgctaaaattcagtgtggccggacccagcaacatggctgtccagggaagaaactacatacctggacccagctaccgacaacaacgtgtctcaaccactgtgactcaaaacaacaacagcgaatttgcttggcctggagcttcttcttgggctctcaatggacgtaatagcttgatgaatcctggacctgctatggccagccacaaagaaggagaggaccgtttctttcctttgtctggatctttaatttttggcaaacaaggaactggaagagacaacgtggatgcggacaaagtcatgataaccaacgaagaagaaattaaaactactaacccggtagcaacggagtcctatggacaagtggccacaaaccaccagagtgcccaagcacaggcgcagaccggctgggttcaaaaccaaggaatacttccgggtatggtttggcaggacagagatgtgtacctgcaaggacccatttgggccaaaattcctcacacggacggcaactttcacccttctccgctgatgggagggtttggaatgaagcacccgcctcctcagatcctcatcaaaaacacacctgtacctgcggatcctccaacggccttcaacaaggacaagctgaactctttcatcacccagtattctactggccaagtcagcgtggagatcgagtgggagctgcagaaggaaaacagcaagcgctggaacccggagatccagtacacttccaactattacaagtctaataatgttgaatttgctgttaatactgaaggtgtatatagtgaaccccgccccattggcaccagatacctgactcgtaatctg

SEQ ID NO: 657 - DNA, 2208 bp, Artificial Sequence
  Description of Artificial Sequence: Synthetic polynucleotide
atggctgccgatggttatcttccagattggctcgaggacaaccttagtgaaggaattcgcgagtggtgggctttgaaacctggagcccctcaacccaaggcaaatcaacaacatcaagacaacgctcgaggtcttgtgcttccgggttacaaataccttggacccggcaacggactcgacaagggggagccggtcaacgcagcagacgcggcggccctcgagcacgacaaggcctacgaccagcagctcaaggccggagacaacccgtacctcaagtacaaccacgccgacgccgagttccaggagcggctcaaagaagatacgtcttttgggggcaacctcgggcgagcagtcttccaggccaaaaagaggcttcttgaacctcttggtctggttgaggaagcggctaagacggctcctggaaagaagaggcctgtagagcagtctcctcaggaaccggactcctccgcgggtattggcaaatcgggtgcacagcccgctaaaaagagactcaatttcggtcagactggcgacacagagtcagtcccagaccctcaaccaatcggagaacctcccgcagccccctcaggtgtgggatctcttacaatggcttcaggtggtggcgcaccagtggcagacaataacgaaggtgccgatggagtgggtagttcctcgggaaattggcattgcgattcccaatggctgggggacagagtcatcaccaccagcacccgaacctgggccctgcccacctacaacaatcacctctacaagcaaatctccaacagcacatctggaggatcttcaaatgacaacgcctacttcggctacagcaccccctgggggtattttgacttcaacagattccactgccacttctcaccacgtgactggcagcgactcatcaacaacaactggggattccggcctaagcgactcaacttcaagctcttcaacattcaggtcaaagaggttacggacaacaatggagtcaagaccatcgccaataaccttaccagcacggtccaggtcttcacggactcagactatcagctcccgtacgtgctcgggtcggctcacgagggctgcctcccgccgttcccagcggacgttttcatgattcctcagtacgggtatctgacgcttaatgatggaagccaggccgtgggtcgttcgtccttttactgcctggaatatttcccgtcgcaaatgctaagaacgggtaacaacttccagttcagctacgagtttgagaacgtacctttccatagcagctacgctcacagccagagcctggaccgactaatgaatccactcatcgaccaatacttgtactatctctcaaagactattaacggttctggacagaatcaacaaacgctaaaattcagtgtggccggacccagcaacatggctgtccagggaagaaactacatacctggacccagctaccgacaacaacgtgtctcaaccactgtgactcaaaacaacaacagcgaatttgcttggcctggagcttcttcttgggctctcaatggacgtaatagcttgatgaatcctggacctgctatggccagccacaaagaaggagaggaccgtttctttcctttgtctggatctttaatttttggcaaacaaggaactggaagagacaacgtggatgcggacaaagtcatgataaccaacgaagaagaaattaaaactactaacccggtagcaacggagtcctatggacaagtggccacaaaccaccagagtgcccaagcacaggcgcagaccggctgggttcaaaaccaaggaatacttccgggtatggtttggcaggacagagatgtgtacctgcaaggacccatttgggccaaaattcctcacacggacggcaactttcacccttctccgctgatgggagggtttggaatgaagcacccgcctcctcagatcctcatcaaaaacacacctgtacctgcggatcctccaacggccttcaacaaggacaagctggactctttcatcacccagtattctactggccaagtcagcgtggagatcgagtgggagctgcagaaggaaaacagcaagcgctggaacccggtgatccagtacacttccaactattacaagtctaataatgttgaatttgctgttaatactgaaggtgtatatagtgaaccccgccccattggcaccagatacctgactcgtaatctg

SEQ ID NO: 658 - DNA, 2208 bp, Artificial Sequence
  Description of Artificial Sequence: Synthetic polynucleotide
atggctgccgatggttatcttccagattggctcgaggacaacctctctgagggcattcgcgagtggtgggacttgaaacctggagccccgaagcccaaagccaaccagcaaaagcaggacgacggccggggtctggtgcttcctggctacaagtacctcggacccttcaacggactcgacaagggggagcccgtcaacgcggcggacgcagcggccctcgagcacgacaaggcctacgaccagcagctcaaagcgggtgacaatccgtacctgcggtataaccacgccgacgccgagtttcaggagcgtctgcaagaagatacgtcttttgggggcaacctcgggcgagcagtcttccaggccaagaagcgggttctcgaacctctcggtctggttgaggaaggcgctaagacggctcctggaaagaaacgtccggtagagcagtcgccacaagagccagactcctcctcgggcatcggcaagacaggccagcagcccgctaaaaagagactcaattttggtcagactggcgactcagagtcagtccccgatccacaacctctcggagaacctccagcaacccccgctgctgtggggcctactacaatggcttcaggcggtggcgcaccaatggcagacaataacgaaggcgtcgacggagtgggtaatgcctcaggaaattggcattgcgattccacatggctgggcgacagagtcatcaccaccagcacccgcacctgggccttgcccacctacaataaccacctctacaagcaaatctccagtgcttcaacgggggccagcaacgacaaccactacttcggctacagcaccccctgggggtattttgatttcaacagattccactgccacttttcaccacgtgactggcagcgactcatcaacaacaattggggattccggcccaagagactcaacttcaaactcttcaacatccaagtcaaggaggtcacgacgaatgatggcgttacaaccatcgctaataaccttaccagcacggttcaagtcttctcggactcggagtaccagcttccgtacgtcctcggctctgcgcaccagggctgcctccctccgttcccggcggacgtgttcatgattccgcaatacggctacctgacgctcaacaatggcagccaagccgtgggacgttcatccttttactgcctggaatatttcccttctcagatgctgagaacgggcaacaactttaccttcagctacacctttgaggaagtgcctttccacagcagctacgcgcacagccagagcctggaccggctgatgaatcctctcatcgaccaatacctgtattacctgaacagaactcaaaatcagtccggaagtgcccaaaacaaggacttgctgtttagccgtgggtctccagctggcatgtctgttcagcccaaaaactggctacctggaccctgttatcggcagcagcgcgtttctaaaacaaaaacagacaacaacaacagcaattttacctggactggtgcttcaaaatataacctcaatgggcgtgaatccatcatcaaccctggcactgctatggcctcacacaaagacgacgaagacaagttctttcccatgagcggtgtcatgatttttggaaaagagagcgccggagcttcaaacactgcattggacaatgtcatgattacagacgaagaggaaattaaagccactaaccctgtggccaccgaaagatttgggaccgtggcagtcaatttccagagcagcagcacagaccctgcgaccggagatgtgcatgctatgggagcattacctggcatggtgtggcaagatagagacgtgtacctgcagggtcccatttgggccaaaattcctcacacagatggacactttcacccgtctcctcttatgggcggctttggactcaagaacccgcctcctcagatcctcatcaaaaacacgcctgttcctgcgaatcctccggcggagttttcagccacaaagcttgcttcattcatcacccaatactccacaggacaagtgagtgtggaaattgaatgggagctgcagaaagaaaacagcaagcgctggaatcccgaagtgcagtacacatccaattatgcaaaatctgccaacgttgattttactgtggacaacaatggactttatactgagcctcgccccattggcacccgttaccttacccgtcccctg

SEQ ID NO: 659 - DNA, 2208 bp, Artificial Sequence
  Description of Artificial Sequence: Synthetic polynucleotide
atggctgccgatggttatcttccagattggctcgaggacaacctctctgagggcattcgcgagtggtgggacttgaaacctggagccccgaagcccaaagccaaccagcaaaagcaggacgacggccggggtctggtgcttcctggctacaagtacctcggacccttcaacggactcgacaagggggagcccgtcaacgcggcggacgcagcggccctcgagcacgacaaggcctacgaccagcagctcaaagcgggtgacaatccgtacctgcggtataaccacgccgacgccgagtttcaggagcgtctgcaagaagatacgtcttttgggggcaacctcgggcgagcagtcttccaggccaagaagcgggttctcgaacctctcggtctggttgaggaaggcgctaagacggctcctggaaagagacgtccggtagagcagtcgccacaagagccagactcctcctcgggcatcggcaagacaggccagcagcccgctaaaaagagactcaattttggtcagactggcgactcagagtcagtccccgatccacaacctctcggagaacctccagcaacccccgctgctgtgggacctactacaatggcttcaggcggtggcgcaccaatggcagacaataacgaaggcgccgacggagtgggtaatgcctcaggaaattggcattgcgattccacatggctgggcgacagagtcatcaccaccagcacccgcacctgggccttgcccacctacaataaccacctctacaagcaaatctccagtgcttcaacgggggccagcaacgacaaccactacttcggctacagcaccccctgggggtattttgatttcaacagattccactgccacttttcaccacgtgactggcagcgactcatcaacaacaattggggattccggcccaagagactcaacttcaaactcttcaacatccaagtcaaggaggtcacgacgaatgatggcgtcacaaccatcgctaataaccttaccagcacggttcaagtcttctcggactcggagtaccagcttccgtacgtcctcggctctgcgcaccagggctgcctccctccgttcccggcggacgtgttcatgattccgcaatacggctacctgacgctcaacaatggcagccaagccgtgggacgttcatccttttactgcctggaatatttcccttctcagatgctgagaacgggcaacaactttaccttcagctacacctttgaggaagtgcctttccacagcagctacgcgcacagccagagcctggaccggctgatgaatcctctcatcgaccaatacctgtattacctgaacagaactcaaaatcagtccggaagtgcccaaaacaaggacttgctgtttagccgtgggtctccagctggcatgtctgttcagcccaaaaactggctacctggaccctgttatcggcagcagcgcgtttctaaaacaaaaacagacaacaacaacagcaattttacctggactggtgcttcaaaatataacctcaatgggcgtgaatccatcatcaaccctggcactgctatggcctcacacaaagacgacgaagacaagttctttcccatgagcggtgtcatgatttttggaaaagagagcgccggagcttcaaacactgcattggacaatgtcatgattacagacgaagaggaaattaaagccactaaccctgtggccaccgaaagatttgggaccgtggcagtcaatttccagagcagcagcacagaccctgcgaccggagatgtgcatgctatgggagcattacctggcatggtgtggcaagatagagacgtgtacctgcagggtcccatttgggccaaaattcctcacacagatggacactttcacccgtctcctcttatgggcggctttggactcaagaacccgcctcctcagatcctcatcaaaaacacgcctgttcctgcgaatcctccggcggagttttcagctacaaagtttgcttcgttcatcacccaatactccacaggacaagtgagtgtggaaattgaatgggagctgcagaaagaaaacagcaagcgctggaatcccgaagtgcagtacacatccaattatgcaaaatctgccaacgttgattttactgtggacaacaatggactttatactgagcctcgccccattggcacccgttaccttacccgtcccctg

SEQ ID NO: 660 - DNA, 2208 bp, Artificial Sequence
  Description of Artificial Sequence: Synthetic polynucleotide
atggctgccgatggttatcttccagattggctcgaggacaacctctctgagggcattcgcgagtggtgggacttgaaacctggagccccgaagcccaaagccaaccagcaaaagcaggacgacggccggggtctggtgcttcctggctacaagtacctcggacccttcaacggactcgacaagggggagcccgtcaacgcggcggacgcagcggccctcgagcacgacaaggcctacgaccagcagctcaaagcgggtgacaatccgtacccgcggtataaccacgccgacgccgagtttcaggagcgtctgcaagaagatacgtcttttgggggcaacctcgggcgagcagtcttccaggccaagaagcgggttctcgaacctctcggtctggttggggaaggcgctaagacggctcctggaaagaaacgtccggtagagcagtcgccacaagagccagactcctcctcgggcatcggcaagacaggccagcagcccgctaaaaagagactcaattttggtcagactggcgactcagagtcagtccccgatccacaacctctcggagaacctccagcaacccccgctgctgtgggacctactacaatggcttcaggcggtggcgcaccaatggcagacaataacgaaggcgccgacggagtgggtaatgcctcaggaaattggcattgcgattccacatggctgggcgacagagtcatcaccaccagcacccgcacctgggccttgcccacctacaataaccacctctacaagcaaatctccagtgcttcaacgggggccagcaacgacaaccactacttcggctacagcaccccctgggggtattttgatttcaacagattccactgccacttttcaccacgtgactggcagcgactcatcaacaacaattggggattccggcccaagagactcaacttcaaactcttcaacatccaagtcaaggaggtcacgacgaatgatggcgtcacaaccatcgctaataaccttaccagcacggttcaagtcttctcggactcggagtaccagcttccgtacgtcctcggctctgcgcaccagggctgcctccctccgttcccggcggacgtgttcatgattccgcaatacggctacctgacgctcaacaatggcagccaagccgtgggacgttcatccttttactgcctggaatatttcccttctcagatgctgagaacgggcaacaactttaccttcagctacacctttgaggaagtgcctttccacagcagctacgcgcacagccagagcctggaccggctgatgaatcctcccatcgaccaatacctgtattacctgaacagaactcaaaatcagtccggaagtgcccaaaacaaggacttgctgtttagccgtgggtctccagctggcatgtctgttcagcccaaaaactggctacctggaccctgttatcggcagcagcgcgtttctaaaacaaaaacagacaacaacaacagcaattttacctggactggtgcttcaaaatataacctcaatgggcgtgaatccatcatcaaccctggcactgctatggcctcacacaaagacgacgaagacaagttctttcccatgagcggtgtcatgatttttggaaaagagagcgccggagcttcaaacactgcattggacaatgtcatgattacagacgaagaggaaattaaagccactaaccctgtggccaccgaaagatttgggaccgtggcagtcaatttccagagcagcagcacagaccctgcgaccggagatgtgcatgctatgggagcattacctggcatggtgtggcaagatagagacgtgtacctgcagggtcccatttgggccaaaattcctcacacagatggacactttcacccgtctcctcttatgggcggctttggactcaagaacccgcctcctcagatcctcatcaaaaacacgcctgttcctgcgaatcctccggcggagttttcagctacaaagtttgcttcattcatcacccaatactccacaggacaagtgagtgtggaaattgaatgggagctgcagaaagaaaacagcaagcgctggaatcccgaagtgcagtacacatccaattatgcaaaatctgccaacgttgattttactgtggacaacaatggactttatactgagcctcgccccattggcacccgttaccttacccgtcccctg

SEQ ID NO: 661 - DNA, 2208 bp, Artificial Sequence
  Description of Artificial Sequence: Synthetic polynucleotide
atggctgccgatggttatcttccagattggctcgaggacaacctctctgagggcattcgcgagtggtgggacttgaaacctggagccccgaagcccaaagccaaccagcaaaagcaggacgacggccggggtctggtgcttcctggctacaagtacctcggacccttcaacggactcgacaagggggagcccgtcaacgcggcggacgcagcggccctcgagcacgacaaggcctacgaccagcagctcaaagcgggtgacaatccgtacctgcggtataaccacgccgacgccgagtttcaggagcgtctgcaagaagatacgtcttttgggggcaacctcgggcgagcagtcttccaggccaagaagcgggttctcgaacctctcggtctggttgaggaaggcgctaagacggctcctggaaagaaacgtccggtagagcagtcgccacaagagccagactcctcctcgggcatcggcaagacaggccagcagcccgctaaaaagagactcaattttggtcagactggcgactcagagtcagtccccgatccacgacctctcggagaacctccagcaacccccgctgctgtgggacctactacaatggcttcaggcggtggcgcaccaatggcagacaataacgaaggcgccgacggagtgggtaatgcctcaggaaattggcattgcgattccacatggctgggcgacagagtcatcaccaccagcacccgcacctgggccttgcccacctacaataaccacctctacaagcaaatctccagtgcttcaacgggggccagcaacgacaaccactacttcggctacagcaccccctgggggtattttgatttcaacagattccactgccacttttcaccacgcgactggcagcgactcatcaacaacaattggggattccggcccaagagactcaacttcaaactcttcaacatccaagtcaaggaggtcacgacgaatgatggcgtcacaaccatcgctaataaccttaccagcacggttcaagtcttctcggactcggagtaccagcttccgtacgtcctcggctctgcgcaccagggctgcctccctccgttcccggcggacgtgttcatgattccgcaatacggctacctgacgctcaacaatggcagccaagccgtgggacgttcatccttttactgcctggaatatttcccttctcagatgctgagaacgggcaacaactttaccttcagctacacctttgaggaagtgcctttccacagcagctacgcgcacagccagagcctggaccggctgatgaatcctctcatcgaccaatacctgtattacctgaacagaactcaaaatcagtccggaagtgcccaaaacaaggacttgctgtttagccgtgggcctccagctggcatgtctgttcagcccaaaaactggctacctggaccctgttatcggcagcagcgcgtttctaaaacaaaaacagacaacaacaacagcaattttacctggactggtgcttcaaaatataacctcaatgggcgtgaatccatcatcaaccctggcactgctatggcctcacacaaagacgacgaagacaagttctttcccatgagcggtgtcatgatttttggaaaagagagcgccggagcttcaaacactgcattggacaatgtcatgattacggacgaagaggaaattaaagccactaaccctgtggccaccgaaagatttgggaccgtggcagtcaatttccagagcagcagcacagaccctgcgaccggagatgtgcatgctatgggagcattacctggcatggtgtggcaagatagagacgtgtacctgcagggtcccatttgggccaaaattcctcacacagatggacactttcacccgtctcctcttatgggcggctttggactcaagaacccgcctcctcagatcctcatcaaaaacacgcctgttcctgcgaatcctccggcggagttttcagctacaaagtttgcttcattcatcacccaatactccacaggacaagtgagtgtggaaattgaatgggagctgcagaaagaaaacagcaagcgctggaatcccgaagtgcagtacacatccaattatgcaaaatctgccaacgttgattttactgtggacaacaatggactttatactgagcctcgccccattggcacccgttaccttacccgtcccctg

SEQ ID NO: 662 - DNA, 2208 bp, Artificial Sequence
  Description of Artificial Sequence: Synthetic polynucleotide
atggctgccgatggttatcttccagattggctcgaggacaacctctctgagggcattcgcgagtggtgggacttgaaacctggagccccgaagcccaaagccaaccagcaaaagcaggacgacggccggggtctggtgcttcctggctacaagtacctcggacccttcaacggactcgacaagggggagcccgtcaacgcggcggacgcagcggccctcgagcacgacaaggcctacgaccagcagctcaaagcgggtgacaatccgtacctgcggtataaccacgccgacgccgagtttcaggagcgtctgcaagaagatacgtcttttgggggcaacctcgggcgagcagtcttccaggccaagaagcgggttctcgaacctctcggtctggttgaggaaggcgctaagacggctcctggaaagaaacgtccggtagagcagtcgccacaagagccagactcctcctcgggcatcggcaagacaggccagcagcccgctaaaaagagactcaattttggtcagactggcggctcagagtcagtccccgatccacaacctctcggagaacctccagcaacccccgctgctgtgggacctactacaatggcttcaggcggtggcgcaccaatggcagacaataacgaaggcgccgacggagtgggtaatgcctcaggaaattggcattgcgattccacatggctgggcgacagagtcatcaccaccagcacccgcacctgggccttgcccacctacaataaccacctctacaagcaaatctccagtgcttcaacgggggccagcaacgacaaccactacttcggctacagcaccccctgggggtattttgatttcaacagattccactgccacttttcaccacgtgactggcagcgactcatcaacaacaattggggattccggcccaagagactcaacttcaaactcttcaacatccaagtcaaggaggtcacgacgaatgatggcgtcacaaccatcgctaataaccttaccagcacggttcaagtcttctcggactcggagtaccagcttccgtacgtcctcggctctgcgcaccagggctgcctccctccgttcccggcggacgtgttcatgattccgcaatacggctacctgacgctcaacaatggcagccaagccgtgggacgttcatccttttactgcctggaatatttcccttctcagatgctgagaacgggcaacaactttaccttcagctacacctttgaggaagtgcctttccacagcagctacgcgcacagccagagcctggaccggctgatgaatcctcccatcgaccaatacctgtattacctgaacagaactcaaaatcagtccgggagtgcccaaaacaaggacttgctgtttagccgtgggtctccagctggcatgtctgttcagcccaaaaactggctacctggaccctgttatcggcagcagcgcgtttctaaaacaaaaacagacaacaacaacagcaattttacctggactggtgcttcaaaatataacctcaatgggcgtgaatccatcatcaaccctggcactgctatggcctcacacaaagacgacgaagacaagttctttcccatgagcggtgtcatgatttttggaaaagagagcgccggagcttcaaacactgcattggacaatgtcatgattacagacgaagaggaaattaaagccactaaccctgtggccaccgaaagatttgggaccgtggcagtcaatttccagagcagcagcacagaccctgcgaccggagatgtgcatgctatgggagcattacctggcatggtgtggcaagatagagacgtgtacctgcagggtcccatttgggccaaaattcctcacacagatggacactttcacccgtctcctcttatgggcggctttggactcaagaacccgcctcctcagatcctcatcaaaaacacgcctgttcctgcgaatcctccggcggagttttcagctacaaagtttgcttcattcatcacccaatactccacaggacaagtgagtgtggaaattgaatgggagctgcagaaagaaaacagcaagcgctggaatcccgaagtgcagtacacatccaattatgcaaaatctgccaacgttgactttactgtggacaacaatggactttatactgagcctcgccccattggcacccgttaccttacccgtcccctg

SEQ ID NO: 663 - DNA, 2208 bp, Artificial Sequence
  Description of Artificial Sequence: Synthetic polynucleotide
atggctgccgatggttatcttccagattggctcgaggacaacctctctgagggcattcgcgagtggtgggacttgaaacctggagccccgaagcccaaagccaaccagcaaaagcaggacgacggccggggtctggtgcttcctggctacaagtacctcggacccttcaacggactcgacaagggggagcccgtcaacgcggcggacgcagcggccctcgagcacgacaaggcctacgaccagcagctcaaagcgggtgacaatccgtacctgcggtataaccacgccgacgccgagtttcaagagcgtctgcaagaagatacgtcttttgggggcaacctcgggcgagcagtcttccaggccaagaagcgggttctcgaacctctcggtctggttgaggaaggcgctaagacggctcctggaaagaaacgtccggtagagcagtcgccacaagagccagactcctcctcgggcatcggcaagacaggccagcagcccgctaaaaagagactcaattttggtcagactggcgactcagagtcagtccccgatccgcaacctctcggagaacctccagcaacccccgctgctgtgggacctactacaatggcttcaggcggtggcgcaccaatggcagacaataacgaaggcgccgacggagtgggtaatgcctcaggaaattggcattgcgattccacatggctgggcgacagagtcatcaccaccagcacccgcacctgggccttgcccacctacaataaccacctctacaagcaaatctccagtgcttcaacgggggccagcaacgacaaccactacttcggctacagcaccccctgggggtattttgatttcaacagattccactgccacttttcaccacgtgactggcagcgactcatcaacaacaattggggattccggcccaagagactcaacttcaaactcttcaacatccaagtcaaggaggtcacgacgaatgatggcgtcacaaccatcgctaataaccttaccagcacggttcaagtcttctcggactcggagtaccagcttccgtacgtcctcggctctgcgcaccagggctgcctccctccgttcccggcggacgtgttcatgattccgcaatacggctacctgacgctcaacaatggcagccaagccgtgggacgttcatccttttactgcctggaatatttcccttctcagatgctgagaacgggcaacaactttaccttcagctacacctttgaggaagtgcctttccacagcagctacgcgcacagccagagcctggaccggctgatgaatcctctcatcgaccaatacctgtattacctgaacagaactcaaaatcagtccggaagtgcccaaaacaaggacttgctgtttagccgtgggtctccagctggcatgtctgttcagcccaaaaactggctacctggaccctgttatcggcagcagcgcgtttctaaaacaaaaacagacaacaacaacagcaattttacctggactggtgcttcaaaatataacctcaatgggcgtgaatccatcatcaaccctggcactgctgtggcctcacacaaagacgacgaagacaagttctttcccatgagcggtgtcatgatttttggaaaagagagcgccggagcttcaaacactgcattggacaatgtcatgattacagacgaagaggaaattaaagccactaaccctgtggccaccgaaagatttgggaccgtggcagtcaatttccagagcagcagcacagaccctgcgaccggagatgtgcatgctatgggagcattacctggcatggtgtggcaagatagagacgtgtacctgcagggtcccatttgggccaaaattcctcacacagatggacactttcacccgtctcctcttatgggcggctttggactcaagaacccgcctcctcagatcctcatcaaaaacacgcctgttcctgcgaatcctccggcggagttttcagctacaaagtttgcttcattcatcacccaatactccacaggacaagtgagtgtggaaattgaatgggagctgcagaaagaaaacagcaagcgctggaatcccgaagtgcagtacacatccaattatgcaaaatctgccaacgttgattttactgtggacaacaatggactttatactgagcctcgccccattggcacccgttaccttacccgtcccctg

SEQ ID NO: 664 - DNA, 2208 bp, Artificial Sequence
  Description of Artificial Sequence: Synthetic polynucleotide
atggctgccgatggttatcttccagattggctcgaggacaacctctctgagggcattcgcgagtggtgggacttgaaacctggagccccgaagcccaaagccaaccagcaaaagcaggacgacggccggggtctggtgcttcctggctacaagtacctcggacccttcaacggactcgacaagggggagcccgtcaacgcggcggacgcagcggccctcgagcacgacaaggcctacgaccagcagctcaaagcgggtgacaatccgtacctgcggtataaccacgccgacgccgagtttcaggagcgtctgcaagaagatacgtcttttgggggcaacctcgggcgagcagtcttccaggccaagaagcgggttctcgaacctctcggtctggttgaggaaggcgctaagacggctcctggaaagaaacgtccggtagagcagtcgccacaagagccagactcctcctcgggcatcggcaagacaggccagcagcccgctaaaaagagactcaattttggtcagactggcgactcagagtcagtccccgatccacaacctctcggagaacctccagcaacccccgctgctgtgggacctactacaatggcttcaggcggtggcgcaccaatggcagacaataacgaaggcgccgacggagtgggtaatgcctcaggaaattggcattgcgattccacatggctgggcgacagagtcatcaccaccagcacccgcacctgggccttgcccacctacaataaccacctctacaagcaaatctccagtgcttcaacgggggccagcaacgacaaccactacttcggctacagcaccccctgggggtattttgatttcaacagattccactgccacttttcaccacgtgactggcagcaactcatcaacaacaattggggattccggcccaagagactcaacttcaaactcttcaacatccaagtcaaggaggtcacgacgaatgatggcgtcacaaccatcgctaataaccttaccagcacggttcaagtcttctcggactcggagtaccagcttccgtacgtcctcggctctgcgcaccagggctgcctccctccgttcccggcggacgtgttcatgattccgcaatacggctacctgacgctcaacaatggcagccaagccgtgggacgttcatccttttactgcctggaatatttcccttctcagatgctgagaacgggcaacaactttaccttcagctacacctttgaggaagtgcctttccacagcagctacgcgcacagccagagcctggaccggctgatgaatcctctcatcgaccaatacctgtattacctgaacagaactcaaaatcagtccggaagtgcccaaaacaaggacttgctgtttagccgtgggtctccagctggcatgtctgttcagcccaaaaactggctacctggaccctgttatcggcagcagcgcgtttctaaaacaaaaacagacaacaacaacagcaattttacctggactggtgcttcaaaatataacctcaatgggcgtgaatccatcatcaaccctggcactgctatggcctcacacaaagacgacgaagacaagttctttcccatgagcggtgtcatgatttttggaaaagagagcgccggagcttcaaacactgcattggacaatgtcatgattacagacgaagaggaaattaaagccactaaccctgtggccaccgaaagatttgggaccgtggcagtcaatttccagagcaccagcacagaccctgcgaccggagatgtgcatgctatgggagcattacctggcatggtgtggcaagatagagacgtgtacctgcagggtcccatttgggccaaaattcctcacacagatggacactttcacccgtctcctcttatgggcggctttggactcaagaacccgcctcctcagatcctcatcaaaaacacgcctgttcctgcgaatcctccggcggagttttcagctacaaagtttgcttcattcatcacccaatactccacaggacaagtgagtgtggaaattgaatgggagctgcagaaagaaaacagcaagcgctggaatcccgaagtgcagtacacatccaattatgcaaaatctgccgacgttgattttactgtggacaacaatggactttatactgagcctcgccccattggcacccgttaccttacccgtcccctg

SEQ ID NO: 665 - DNA, 2208 bp, Artificial Sequence
  Description of Artificial Sequence: Synthetic polynucleotide
atggctgccgatggttatcttccagattggctcgaggacaacctctctgagggcattcgcgagtggtgggacttgaaacctggagccccgaagcccaaagccaaccagcaaaagcaggacgacggccggggtctggtgcttcctggctacaagtacctcggacccttcaacggactcgacaagggggagcccgtcaacgcggcggacgcagcggccctcgagcacgacaaggcctacgaccagcagctcaaagcgggtgacaatccgtacctgcggtataaccacgccgacgccgagtttcaagagcgtctgcaagaagatacgtcttttgggggcaacctcgggcgagcagtcttccaggccaagaagcgggttctcgaacctctcggtctggttgaggaaggcgctaagacggctcctggaaagaaacgtccggtagagcagtcgccacaagagccagactcctcctcgggcatcggcaagacaggccagcagcccgctaaaaagagactcaattttggtcagactggcgactcagagtcagtccccgatccgcaacctctcggagaacctccagcaacccccgctgctgtgggacctactacaatggcttcaggcggtggcgcaccaatggcagacaataacgaaggcgccgacggagtgggtaatgcctcaggaaattggcattgcgattccacatggctgggcgacagagtcatcaccaccagcacccgcacctgggccttgcccacctacaataaccacctctacaagcaaatctccagtgcttcaacgggggccagcaacgacaaccactacttcggctacagcaccccctgggggtattttgatttcaacagattccactgccacttttcaccacgtgactggcagcgactcatcaacaacaattggggattccggcccaagagactcaacttcaaactcttcaacatccaagtcaaggaggtcacgacgaatgatggcgtcacaaccatcgctaataaccttaccagcacggttcaagtcttctcggactcggagtaccagcctccgtacgtcctcggctctgcgcaccagggctgcctccctccgttcccggcggacgtgttcatgattccgcaatacggccacctgacgctcaacaatggcagccaagccgtgggacgttcatccttttactgcctggaatatttcccttctcagatgctgagaacgggcaacaactttaccttcagctacacctttgaggaagtgcctttccacagcagctacgcgcacagccagagcctggaccggctgacgaatcctctcatcgaccaatacctgtattacctgaacagaactcaaaatcagtccggaagtgcccaaaacaaggacttgctgtttagccgtgggtctccagctggcatgtctgttcagcccaaaaactggctacctggaccctgttatcggcagcagcgcgtttctaaaacaaaaacagacaacaacaacagcaattttacctggactggtgcttcaaaatataacctcaatgggcgtgaatccatcatcaaccctggcactgctatggcctcacacaaagacgacgaagacaagttctttcccatgagcggtgtcatgatttttggaaaagagagcgccggagcttcaaacactgcattggacaatgtcatgattacagacgaagaggaaattaaagccactaaccctgtggccaccgaaagatttgggaccgtggcagtcaatttccagagcagcagcacagaccctgcgaccggagatgtgcatgctatgggagcattacctggcatggtgtggcaagatagagacgtgtacctgcagggtcccatttgggccaaaattcctcacacagatggacactttcacccgtctcctcttatgggcggctttggactcaagaacccgcctcctcagatcctcatcaaaaacacgcctgttcctgcgaatcctccggcggagttttcagctacaaagtttgcttcattcatcacccaatactccacaggacaagtgagtgtggaaattgaatgggagctgcagaaagaaaacagcaagcgctggaatcccgaagtgcagtacacatccaattatgcaaaatctgccaacgttgattttactgtggacaacaatggactttatactgagcctcgccccattggcacccgttaccttacccgtcccctg

SEQ ID NO: 666 - DNA, 2208 bp, Artificial Sequence
  Description of Artificial Sequence: Synthetic polynucleotide
atggctgccgatggttatcttccagattggctcgaggacaacctctctgagggcattcgcgagtggtgggacttgaaacctggagccccgaagcccaaagccaaccagcaagagcaggacgacggccggggtctggtgcttcctggctacaagtacctcggacccttcaacggactcgacaagggggagcccgtcaacgcggcggacgcagcggccctcgagcacgacaaggcctacgaccagcagctcaaagcgggtgacaatccgtacctgcggtataaccacgccgacgccgagtttcaggagcgtctgcaagaagatacgtcttttgggggcaacctcgggcgagcagtcttccaggccaagaagcgggttctcgaacctctcggtctggttgaggaaggcgctaagacggctcctggaaagaaacgtccggtagagcagtcgccacaagagccagactcctcctcgggcatcggcaagacaggccagcagcccgctaaaaagagactcaattttggtcagactggcgactcagagtcagtccccgatccacaacctctcggagaacctccagcaacccccgctgctgtgggacctactacaatggcttcaggcggtggcgcaccaatggcagacaataacgaaggcgccgacggagtgggtaatgcctcaggaaattggcattgcgattccacatggctgggcgacagagtcatcaccaccagcacccgcacctgggccttgcccacctacaataaccacctctacaagcaaatctccagtgcttcaacgggggccagcaacgacaaccactacttcggctacagcaccccctgggggtattttgatttcaacagattccactgccacttttcaccacgtgactggcagcgactcatcaacaacaattggggattccggcccaagagactcaacttcaaactcttcaacatccaagtcaaggaggtcacgacgaatgatggcgtcacaaccatcgctaataaccttaccagcacggttcaagtcttctcggactcggagtaccagcttccgtacgtcctcggctctgcgcaccagggctgcctccctccgttcccggcggacgtgttcatgattccgcaatacggctacctgacgctcaacaatggcagccaagccgtgggacgttcatccttttactgcctggaatatttcccttctcagatgctgagaacgggcaacaactttaccttcagctacacctttgaggaagtgcctttccacagcagctacgcgcacagccagagcctggaccggctgatgaatcctctcatcgaccaatacctgtattacctgaacagaactcaaaatcagtccggaagtgcccaaaacaaggacttgctgtttagccgtgggtctccagctggcatgtctgttcagcccaaaaactggctacctggaccctgttatcggcagcagcgcgtttctaaaacaaaaacagacaacaacaacagcaattttacctggactggtgcttcaaaatataacctcaatgggcgtgaatccatcatcaaccctggcactgctatggcctcacacaaagacgacgaagacaagttctttcccatgagcggtgtcatgatttttggaaaagagagcgccggagcttcaaacactgcattggacaatgtcatgattacagacgaagaggaaattaaagccactaaccctgtggccaccgaaagatttgggaccgtggcagtcaatttccagagcagcagcacagaccctgcgaccggagatgtgcatgctacgggaacattacctggcatggtgtggcaagatagagacgtgtacctgcagggtcccatttgggccaaaattcctcacacagatggacactttcacccgtctcctcttatgggcggctttggactcaagaacccgcctcctcagatcctcatcaaaaccacgcctgttcctgcgaatcctccggcggagttttcagctacaaagtttgcttcattcatcacccagtactccacaggacaagtgagtgtggaaattgaatgggagctgcagaaagaaaacagcaagcgctggaatcccgaagtgcagtacacatccaattatgcaaaatctgccaacgttgattttactgtggacgacaatggactttatactgagcctcgccccattggcacccgttaccttacccgtcccctg

SEQ ID NO: 667 - DNA, 2208 bp, Artificial Sequence
  Description of Artificial Sequence: Synthetic polynucleotide
atggctgccgatggttatcttccagattggctcgaggacaacctctctgagggcattcgcgagtggtgggacttgaaacctggagccccgaagcccaaagccaaccagcaaaagcaggacgacggccggggtctggtgcttcctggctacaagtacctcggacccttcaacggactcgacaagggggagcccgtcaacgcggcggacgcagcggccctcgagcacgacaaggcctacgaccagcagctcaaagcgggtgacaatccgtacctgcggtataaccacgccgacgccgagtttcaggagcgtctgcaagaagatacgtcttttgggggcaacctcgggcgagcagtcttccaggccaagaagcgggttctcgaacctctcggtctggttgaggaaggcgctaagacggctcctggaaagaaacgtccggtagagcagtcgctacaagagccagactcctcctcgggcatcggcaagacaggccagcagcccgctaaaaagagactcaattttggtcagactggcgactcagagtcagtccccgatccacaacctctcggagaacctccagcaacccccgctgctgtgggacctactacaatggcttcaggcggtggcgcaccaatggcagacaataacgaaggcgccgacggagtgggtaatgcctcaggaaattggcattgcgattccacatggctgggcgacagagtcatcaccaccagcacccgcacctgggccttgcccacctacaataaccacctctacaagcaaatctccagtgcttcaacgggggccagcaacgacaaccactacttcggctacagcaccccctgggggtattttgatttcaacagattccactgccacttttcaccacgtgactggcagcgactcatcaacaacaattggggattccggcccaagagactcaacttcaaactcttcaacatccaagtcaaggaggtcacgacgaatgatggcgtcacaaccatcgctaataaccttaccagcacggttcaagtcttctcggactcggagtaccagcttccgtacgtcctcggctctgcgcaccagggctgcctccctccgttcccggcggacgtgttcatgattccgcaatacggctacctgacgctcaacaatggcagccaagccgtgggacgttcatccttttactgcctggaatatttcccttctcagatgctgagaacgggcaacaactttaccttcagctacacctttgaggaagtgcctttccacagcagctacgcgcacagccagagcctggaccggctgatgaatcctctcatcgaccaatacctgtattacctgaacagaactcaaaatcagtccggaagtgcccaaaacaaggacttgctgtttagccgtgggtctccagctggcatgtctgttcagcccaaaaactggctacctggaccctgttatcggcagcagcgcgtttctaaaacaaaaacagacaacgacaacagcaattttacctggactggtgcttcaaaatataacctcaatgggcgtgaatccatcatcaaccctggcactgctatggcctcacacaaagacgacgaagacaagttctttcccatgagcggtgtcatgatttttggaaaagagagcgccggagcttcaaacactgcattggacaatgtcatgattacagacgaagaggaaattaaagccactaaccctgtggccaccgaaagatttgggaccgtggcagtcaatttccagagcagcagcacagaccctgcgaccggagatgtgcatgctatgggagcattacctggcatggtgtggcaagatagagacgtgtacctgcagggtcccatttgggccaaaattcctcacacagatggacactttcacccgtctcctcttatgggcggctttggactcaagaacccgcctcctcagatcctcatcaaaaacacgcctgttcctgcgaatcctccggcggagttttcagctacaaagtttgcttcattcatcacccaatactccacaggacaagtgagtgtggaaattgaatgggagctgcagaaagaaaacagcaagcgctggaatcccgaagtgcagtacacatccaattatgcaaaatctgccaacgttgattttactgtggacaacaatggactttatactgagcctcgccccattggcacccgttaccttacccgtcccctg

SEQ ID NO: 668 - DNA, 2208 bp, Artificial Sequence
  Description of Artificial Sequence: Synthetic polynucleotide
atggctgccgatggttatcttccagattggctcgaggacaacctctctgagggcattcgcgagtggtgggacttgaaacctggagctccgaagcccaaagccaaccagcaaaagcaggacgacggccggggtctggtgcttcctggctacaagtacctcggacccttcaacggactcgacaagggggagcccgtcaacgcggcggacgcagcggccctcgagcacgacaaggcctacgaccagcagctcaaagcgggtgacaatccgtacctgcggtataaccacgccgacgccgagtttcaggagcgtctgcaagaagatacgtcttttgggggcaacctcgggcgagcagtcttccaggccaagaagcgggttctcgaacctctcggtctggttgaggaaggcgctaagacggctcctggaaagaaacgtccggtagagcagtcgccacaagagccagactcctcctcgggcatcggcaagacaggccagcagcccgctaaaaagagactcaattttggtcagactggcgactcagagtcagtccccgatccacaacctctcggagaacctccagcaacccccgctgctgtgggacctactacaatggcttcaggcggtggcgcaccaatggcagacaataacgaaggcgccgacggagtgggtaatgcctcaggaaattggcattgcgattccacatggctgggcgacagagtcatcaccaccagcacccgcacctgggccttgcccacctacaataaccacctctacaagcaaatctccagtgcttcaacgggggccagcaacgacaaccactacttcggctacagcaccccctgggggtattttgatttcaacagattccactgccacttttcaccacgtgactggcagcgactcatcaacaacaattggggattccggcccaagagactcaacttcaaactcttcaacatccaagtcaaggaggtcacgacgaatgatggcgtcacaaccatcgctaataaccttaccagcacggttcaagtcttctcggactcggagtaccagcttccgtacgtcctcggctctgcgcaccagggctgcctccctccgttcccggcggacgtgttcatgattccgcaatacggctacctgacgctcaacaatggcagccaagccgtgggacgttcatccttttactgcctggaatatttcccttctcagatgctgagaacgggcaacaactttaccttcagctacacctttgaggaagcgcctttccacagcagctacgcgcacagccagagcctggaccggctgatgaatcctctcatcgaccaatacctgtattacctgaacagaactcaaaatcagtccggaagtgcccaaaacaaggacttgctgtttagccgtgggtctccagctggcatgtctgttcagcccaaaaactggctacctggaccctgttatcggcagcagcgcgtttctaaaacaaaaacagacaacaacaacagcaattttacctggactggtgcttcaaaatataacctcaatgggcgtgaatccatcatcaaccctggcactgctatggcctcacacaaagacgacgaagacaagttctttcccatgagcggtgtcatgatttttggaaaagagagcgccggagcttcaaacactgcattggacaatgtcatgattacagacgaagaggaaattaaagccactaaccctgtggccaccgaaagatttgggaccgtggcagtcaatttccagagcagcagcacagaccctgcgaccggagatgtgcatgctatgggagcattacctggcatggtgtggcaagatagagacgtgtacctgcagggtcccatttgggccaaaattcctcacacagatggacactttcacccgtctcctcttatgggcggctttggactcaagaacccgcctcctcagatcctcatcaaaaacacgcctgttcctgcgaatcctccggcggagttttcagctacaaagtttgcttcattcatcacccaatactccacaggacaagtgagtgtggaaattgaatgggagctgcagaaagaaaacagcaagcgctggaatcccgaagtgcagtacacatccaattatgcgaaatctgccaacgttgattttactgtggacaacaatggactttatactgagcctcgccccgttggcacccgttaccttacccgtcccctg

SEQ ID NO: 669 - DNA, 2208 bp, Artificial Sequence
  Description of Artificial Sequence: Synthetic polynucleotide
atggctgccgatggttatcttccagattggctcgaggacaacctctctgagggcattcgcgagtggtgggacttgaaacctggagccccgaagcccaaagccaaccagcaaaagcaggacgacggccggggtctggtgcttcctggctacaagtacctcggacccttcaacggactcgacaagggggagcccgtcaacgcggcggacgcagcggccctcgagcacgacaaggcctacgaccagcagctcaaagcgggtgacaatccatacctgcggtataaccacgccgacgccgagtttcaggagcgtctgcaagaaaatacgtcttttgggggcaacctcgggcgagcagtcttccaggccaagaagcgggttctcgaacctctcggtctggttgaggaaggcgctaagacggctcctggaaagaaacgtccggtagagcagtcgccacaagagccagactcctcctcgggcatcggcaagacaggccagcagcccgctaaaaagagactcaattttggtcagactggcgactcagagtcagtccccgatccacaacctctcggagaacctccagcaacccccgctgctgtgggacctactacaatggcttcaggcggtggcgcaccaatggcagacaataacgaaggcgccgacggagtgggtaatgcctcaggaaattggcattgcgattccacatggctgggcgacagagtcatcaccaccagcacccgcacctgggccttgcccacctacaataaccacctctacaagcaaatctccagtgcttcaacgggggccagcaacgacaaccactacttcggctacagcaccccctgggggtattttgatttcaacagattccactgccactttccaccacgtgactggcagcgactcatcaacaacaattggggattccggcccaagagactcaacttcaaactcttcaacatccaagtcaaggaggtcacgtcgaatgatggcgtcacaaccatcgctaataaccttaccagcacggttcaagtcttctcggactcggagtaccagcttccgtacgtcctcggctctgcgcaccagggctgcctccctccgttcccggcggacgtgttcatgattccgcaatacggctacctgacgctcaacaatggcagccaagccgtgggacgttcatccttttactgcctggaatatttcccttctcagatgctgagaacgggcaacaactttaccttcagctacacctttgaggaagtgcctttccacagcagctacgcgcacagccagagcctggaccggctgatgaatcctctcatcgaccaatacctgtattacctgaacagaactcaaaatcagtccggaagtgcccaaaacaaggacttgctgtttagccgtgggtctccagctggcatgtctgttcagcccaaaaactggctacctggtccctgttatcggcagcagcgcgtttctaaaacaaaaacagacaacaacaacagcaattttacctggactggtgcttcaaaatataacctcaatgggcgtgaatccatcatcaaccctggcactgctatggcctcacacaaagacgacgaagacaagttctttcccatgagcggtgtcatgatttttggaaaagagagcgccggagcttcaaacactgcattggacaatgtcatgattacagacgaagaggaaattaaagccactaaccctgtggccaccgaaagatttgggaccgtggcagtcaatttccagagcagcagcacagaccctgcgaccggagatgtgcatgctatgggagcattacctggcatggtgtggcaagatagagacgtgtacctgcagggtcccatttgggccaaaattcctcacacagatggacactttcacccgtctcctcttatgggcggctttggactcaagaacccgcctcctcagatcctcatcaaaaacacgcctgttcctgcgaatcctccggcggagttttcagctacaaagtttgcttcattcatcacccaatactccacaggacaagtgagtgtggaaattgaatgggagctgcagaaagaaaacagcaagcgctggaatcccgaagtgcagtacacatccaattatgcaaaatctgccaacgttgattttactgtggacaacaatggactttatactgagcctcgccccattggcacccgttaccttacccgtcccctg

SEQ ID NO: 670 - DNA, 2208 bp, Artificial Sequence
  Description of Artificial Sequence: Synthetic polynucleotide
atggctgccgatggttatcttccagattggctcgaggacaacctctctgagggcattcgcgagtggtgggacttgaaacctggagccccgaagcccaaagccaaccagcaaaagcaggacgacggccggggtctggtgcttcctggctacaagtacctcggacccttcaacggactcgacaagggggagcccgtcaacgcggcggacgcagcggccctcgagcacgacaaggcctacgaccagcagctcaaagcgggtgacaatccgtacctgcggtataaccacgccgacgccgagtttcaggagcgtctgcaagaagatacgtcttttgggggcaacctcgggcgagcagtcttccaggccaagaagcgggttctcgaacctctcggtctggttgaggaaggcgctaagacggctcctggaaagaaacgtccggtagagcagtcgccacaagagccagactcctcctcgggcatcggcaagacaggccagcagcccgctaaaaagagactcaattttggtcagactggcgactcagagtcagtccccgatccacaacctctcggagaacctccagcaacccccgctgctgtgggacctactacaatggcttcaggcggtggcgcaccaatggcagacaataacgaaggcgccgacggagtgggtaatgcctcaggaaattggcattgcgattccacatggctgggcgacagagtcatcaccaccagcacccgcacctgggccttgcccacctacaataaccacctctacaagcaaatctccagtgcttcaacgggggccagcaacgacaaccactacttcggctacagcaccccctgggggtattttgatttcaacagattccactgccacttttcaccacgtgactggcagcgactcatcaacaacaattggggattccggcccaagagactcaacttcaaactcttcaacatccaagtcaaggaggtcacgacgaatgatggcgtcacaaccatcgctaataaccttaccagcacggttcaagtcttctcggactcggagtaccagcttccgtacgtcctcggctctgcgcaccagggctgcctccctccgttcccggcggacgtgttcatgattccgcaatacggctacctgacgctcaacaatggcagccaagccgtgggacgttcatccttttactgcctggaatatttcccttctcagatgctgagaacgggcaacaactttaccttcagctacacctttgaggaagtgcctttccacagcagctacgcgcacagccagagcctggaccggctgatgaatcctctcatcgaccaatacctgtattacctgaacagaactcaaaatcagtccggaagtgcccaaaacaaggacttgctgtttagccgtgggtctccagctggcacgtctgttcagcccaaaaactggctacctggaccctgttatcggcagcagcgcgtttctaaaacaaaaacagacaacaacaacagcaattttacctggactggtgcttcaaaatataacctcaatgggcgtgaatccatcatcaaccctggcactgctatggcctcacacaaagacgacgaagacaagttctttcccatgagcggtgtcatgatttttggaaaagagagcgccggagcttcaaacactgcattggacaatgtcatgattacagacgaagaggaaattaaagccactaaccctgtggccaccgaaagatttgggaccgtggcagtcaatttccagagcagcagcacagaccctgcgaccggagatgtgcatgctatgggagcattacctggcatggtgtggcaagatagagacgtgtacctgcagggtcccatttgggccaaaattcctcacacagatggacactttcacccgtctcctcttatgggcggctttggactcaagaacccgcctcctcagatcctcatcaaaaacacgcctgttcctgcgaatcctccggcggagttttcagctacaaagtttgcttcattcatcacccaatactccacaggacaagtgagtgtggaaattgaatgggagctgcagaaagaaaacagcaagcgctggaatcccgaagtgcagtacacatccaattatgcaaaatctgccaacgttgattttactgtggacaacaatggactttatactgggcctcgccccattggcacccgttaccttacccgtcccctg

SEQ ID NO: 671 - DNA, 2208 bp, Artificial Sequence
  Description of Artificial Sequence: Synthetic polynucleotide
atggctgccgatggttatcttccagattggctcgaggacaacctctctgagggcattcgcgagtggtgggacttgaaacctggagccccgaagcccaaagccaaccagcaaaagcaggacgacggccggggtctggtgcttcctggctacaagtacctcggacccttcaacggactcgacaagggggagcccgtcaacgcggcggacgcagcggccctcgagcacgacaaggcctacgaccagcagctcaaagcgggtgacaatccgtacctgcggtataaccacgccgacgccgagtttcaggagcgtctgcaagaagatacgtcttttgggggcaacctcgggcgagcagtcttccaggccaagaagcgggttctcgaacctctcggtctggttgaggaaggcgctaagacggctcctggaaagaaacgtccggtagagcagtcgccacaagagccagactcctcctcgggcatcggcaagacaggccagcagcccgctaaaaagagactcaattttggtcagactggcgactcagagtcagtccccgatccacaacctctcggagaacctccagcaacccccgctgctgtgggacctactacaatggcttcaggcggtggcgcaccaatggcagacaataacgaaggcgccgacggagtgggtaatgccccaggaaattggcattgcgactccacatggctgggcgacagagtcatcaccaccagcacccgcacctgggccttgcccacctacaataaccacctctacaagcaaatctccagtgcttcaacgggggccagcaacgacaaccactacttcggctacagcaccccctgggggtattttgatttcaacagattccactgccacttttcaccacgtgactggcagcgactcatcaacaacaattggggattccggcccaagagactcaacttcaaactcttcaacatccaagtcaaggaggtcacgacgaatgatggcgtcacaaccatcgctaataaccttaccagcacggttcaagtcttctcggactcggagtaccagcttccgtacgtcctcggctctgcgcaccagggctgcctccctccgttcccggcggacgtgttcatgattccgcaatacggctacctgacgctcaacaatggcagccaagccgtgggacgttcatccttttactgcctggaatatttcccttctcagatgctgagaacgggcaacaactttaccttcagctacacctttgaggaagtgcctttccacagcagctacgcgcacagccagagcctggaccggctgatgaatcctctcatcgaccaatacctgtattacctgaacagaactcaaaatcagtccggaagtgcccaaaacaaggacttgctgtttagccgtgggtctccagctggcatgtctgttcagcccaaaaactggctacctggaccctgttatcggcagcagcgcgtttctaaaacaaaaacagacaacaacaacagcaattttacctggactggtgcttcaaaatataacctcaatgggcgtgaatccatcatcaaccctggcacagctatggcctcacacaaagacgacgaagacaagttctttcccatgagcggtgtcatgatttttggaaaagagagcgccggagcttcaaacactgcattggacaatgtcatgattacaggcgaagaggaaattaaagccactaaccctgtggccaccgaaagatttgggaccgtggcagtcaatttccagagcagcagcacagaccctgcgaccggagatgtgcatgctatgggagcattacctggcatggtgtggcaagatagagacgtgtacctgcagggtcccatttgggccaaaattcctcacacagatggacactttcacccgtctcctcttatgggcggctttggactcaagaacccgcctcctcagatcctcatcaaaaacacgcctgttcctgcgaatcctccggcggagttttcagctacaaagtttgcttcattcatcacccaatactccacaggacaagtgagtgtggaaattgaatgggagctgcagaaagaaaacagcaagcgctggaatcccgaagtgcagtacacatccaattatgcaaaatctgccaacgttgattttactgtggacaacaatggactttatactgagcctcgccccattggcacccgttaccttacccgtcccctg

SEQ ID NO: 672 - DNA, 2208 bp, Artificial Sequence
  Description of Artificial Sequence: Synthetic polynucleotide
atggctgccgatggttatcttccagattggctcgaggacaacctctctgagggcattcgcgagtggtgggacttgaaacctggagccccgaagcccaaagccaaccagcaaaagcaggacgacggccggggtctggtgcttcctggctacaagtacctcggacccttcaacagactcgacaagggggagcccgtcaacgcggcggacgcagcggccctcgagcacgacaaggcctacgaccagcagctcaaagcgggtgacaatccgtacctgcggtataaccacgccgacgccgagtttcaggagcgtctgcaagaagatacgtcttttgggggcaacctcgggcgagcagtcttccaggccaagaagcgggttctcgaacctctcggtctggttgaggaaggcgctaagacggctcctggaaggaaacgtccggtagagcagtcgccacaagagccagactcctcctcgggcatcggcaagacaggccagcagcccgctaaaaagagactcaattttggtcagactggcgactcagagtcagtccccgatccacaacctctcggagaacctccagcaacccccgctgctgtgggacctactacaatggcttcaggcggtggcgcgccaatggcagacaataacgaaggcgccgacggagtgggtaatgcctcaggaaattggcattgcgattccacatggctgggcgacagagtcatcaccaccagcacccgcacctgggccttgcccacctacaataaccacctctacaagcaaatctccagtgcttcaacgggggccagcaacgacaaccactacttcggctacagcaccccctgggggtattttgatttcaacagattccactgccacttttcaccacgtgactggcagcgactcatcaacaacaattggggattccggcccaagagactcaacttcaaactcttcaacatccaagtcaaggaggtcacgacgaatgatggcgtcacaaccatcgctaataaccttaccagcacggttcaagtcttctcggactcggagtaccagcttccgtacgtcctcggctctgcgcaccagggctgcctccctccgttcccggcggacgtgttcatgattccgcaatacggctacctgacgctcaacaatggcggccaagccgtgggacgttcatccttttactgcctggaatatttcccttctcagatgctgagaacgggcaacaactttaccttcagctacacctttgaggaagtgcctttccacagcagctacgcgcacagccagagcctggaccggctgatgaatcctctcatcgaccaatacctgtattacctgaacagaactcaaaatcagtccggaagtgcccaaaacaaggacttgctgtttagccgtgggtctccagctggcatgtctgttcagcccaaaaactggctacctggaccctgttatcggcagcagcgcgtttctaaaacaaaaacagacaacaacaacagcaattttacctggactggtgcttcaaaatatagcctcaatgggcgtgaatccatcatcaaccctggcactgctatggcctcacacaaagacgacgaagacaagttctttcccatgggcggtgtcatgatttttggaaaagagagcgccggagcttcaaacactgcattggacaatgccatgattacagacgaagaggaaattaaagccactaaccctgtggccaccgaaagatttgggaccgtggcagtcaatttccagagcagcagcacagaccctgcgaccggagatgtgcatgctatgggagcattacctggcatggtgtggcaagatagagacgtgtacctgcagggtcccatttgggccaaaattcctcacacagatggacactttcacccgtctcctcttatgggcggctttggactcaagaacccgcctcctcagatcctcatcaaaaacacgcctgttcctgcgaatcctccggcggagttttcagctacaaagtttgcttcattcatcacccaatactccacaggacaagtgagtgtggaaattgaatgggagctgcagaaagaaaacagcaagcgctggaatcccgaagtgcagtacacatccaattatgcaaaatctgccaacgttgattttactgtggacaacaatggactttatactgagcctcgccccattggcacccgttaccttacccgtcccctg

SEQ ID NO: 673 - DNA, 2208 bp, Artificial Sequence
  Description of Artificial Sequence: Synthetic polynucleotide
atggctgccgatggttatcttccagattggctcgaggacaacctctctgagggcattcgcgagtggtgggacttgaaacctggagccccgaagcccaaagccaaccagcaaaagcaggacgacggccggggtctggtgcttcctggctacaagtacctcggacccttcaacggactcgacaagggggagcccgtcaacgcggcggacgcagcggccctcgagcacgacaaggcctacgaccagcagctcaaagcgggtgacaatccgtacctgcggtataaccacgccgacgccgagtttcaggagcgtctgcaagaagatacgtcttttgggggcaacctcgggcgagcagtcttccaggccaagaagcgggttctcgaacctctcggtctggttgaggaaggcgctaagacggctcctggaaagaaacgtccggtagagcagtcgccacaagagccagactcctcctcgggcatcggcaagacaggccagcagcccgctaaaaagagactcaattttggtcagactggcgactcagagtcagtccccgatccacaacctctcggagaacctccagcaacccccgctgctgtgggacctactacaatggcttcaggcggtggcgcaccaatggcagacaataacgaaggcgccgacggagtgggtaatgcctcaggaaattggcattgcgattccacatggctgggcggcagagtcatcaccaccagcacccgcacctgggccttgcccacctacaataaccacctctacaagcaaatctccagtgcttcaacgggggccagcaacgacaaccactacttcggctacagcaccccctgggggtattttgatttcaacagattccactgccacttttcaccacgtgactggcagcgactcatcaacaacaattggggattccggcccaagagactcaacttcaaactcttcaacatccaagtcaaggaggtcacgacgaatgatggcgtcacaaccatcgctaataaccttaccagcacggttcaagtcttctcggactcggagtaccagcttccgtacgtcctcggctctgcgcaccagggctgcctccctccgttcccggcggacgtgttcatgattccgcaatacggctacctgacgctcaacaatggcagccaagccgtgggacgttcatccttttactgcctggaatatttcccttctcagatgctgagaacgggcaacaactctaccttcagctacacctttgaggaagtgcctttccacagcagctacgcgcacagccagagcctggaccggctgatgaatcctctcatcgaccaatacctgtattacctgaacagaactcaaaatcagtccggaagtgcccaaaacaaggacttgctgtttagccgtgggtctccagctggcatgtctgttcagcccaaaaactggctacctggaccctgttatcggcagcagcgcgtttctaaaacaaaaacagacaacaacaacagcaattttacctggactggtgcttcaaaatataacctcaatgggcgtgaatccatcatcaaccctggcactgctatggcctcacacaaagacgacgaagacaagttctttcccatgagcggtgtcatgatttttggaaaagagagcgccggagcttcaaacactgcattggacaatgtcatgattacagacgaagaggaaattaaagccactaaccctgtggccaccgaaagatttgggaccgtggcagtcaatttccagagcagcagcacagaccctgcgaccggagatgtgcatgctatgggaacattacctggcatggtgtggcaagatagagacgtgtacctgcagggtcccatttgggccaaaattcctcacacagatggacactttcacccgtctcctcttatgggcggctttggactcaagaacccgcctcctcagatcctcatcaaaaacacgcctgttcctgcgaatcctccggcggagttttcagctacaaagtttgcttcattcatcacccaatactccacaggacaagtgagtgtggaaattgaatgggagctgcagaaagaaaacagcaagcgctggaatcccgaagtgcagtacacatccaattatgcaaaatctgccaacgttgattttactgtggacaacaatggactttatactgagcctcgccccattggcacccgttaccttacccgtcccctg

SEQ ID NO: 674 - DNA, 2208 bp, Artificial Sequence
  Description of Artificial Sequence: Synthetic polynucleotide
atggctgccgatggttatctcccagattggctcgaggacaacctctctgagggcattcgcgagtggtgggacttgaaacctggagccccgaagcccaaagccaaccagcaaaagcaggacgacggccggggtctggtgcttcctggctacaagtacctcggacccttcaacggactcgacaagggggagcccgtcagcgcggcggacgcagcggccctcgagcacgacaaggcctacgaccagcagctcaaagcgggtgacaatccgtacctgcggtataaccacgccgacgccgagtttcaggagcgtctgcaagaagatacgtcttttgggggcaacctcgggcgagcagtcttccaggccaagaagcgggttctcgaacctctcggtctggttgaggaaggcgctaagacggctcctggaaagaaacgtccggtagagcagtcgccacaagagccagactcctcctcgggcatcggcaagacaggccagcagcccgctaaagagagactcaattttggtcagactggcgactcagagtcagtccccgatccacaacctctcggagaacctccagcaacccccgctgctgtgggacctactacaatggcttcaggcggtggcgcaccaatggcagacaataacgaaggcgccgacggagtgggtaatgcctcaggaaattggcattgcgattccacatggctgggcgacagagtcatcaccaccagcacccgcacctgggccttgcccacctacaataaccacctctacaagcaaatctccagtgcttcaacgggggccagcaacgacaaccactacttcggctacagcaccccctgggggtattttgatttcaacagattccactgccacttttcaccacgtgactggcagcgactcatcaacaacaattggggattccggcccaagagactcaacttcaaactcttcaacatccaagtcaaggaggtcacgacgaatgatggcgtcacaaccatcgccaataaccttaccagcacggttcaagtcttctcggactcggagtaccagcttccgtacgtcctcggctctgcgcaccagggctgcctccctccgttcccggcggacgtgttcatgattccgcaatacggctacctgacgctcaacaatggcagccaagccgtgggacgttcatccttttactgcctggaatatttcccttctcagatgctgagaacgggcaacaactttaccttcagctacacctttgaggaagtgcctttccacagcagctacgcgcacagccagagcctggaccggctgatgaatcctctcatcgaccaatacctgtattacctgaacagaactcaaaatcagtccggaagtgcccaaaacaaggacttgctgtttagccgtgggtctccagctggcatgtctgttcagcccaaaaactggctacctggaccctgttatcggcagcagcgcgtttctaaaacaaaaacagacaacaacaacagcaattttacctggactggtgcttcaaaatataacctcaatgggcgtgaatccatcatcaaccctggcactgctatggcctcacacaaagacgacgaagacaagttctttcccatgagcggtgtcatgatttttggaaaagagagcgccggagcttcaaacactgcattggacaatgtcatgattacagacgaagaggaaattaaagccactaaccctgtggccaccgaaagatttgggaccgtggcagtcaatttccagagcagcagcacagaccctgcgaccggagatgtgcatgctatgggagcattacctggcatggtgtggcaagatagagacgtgtacctgcagggtcccatttgggccaaaattcctcacacagatggacactttcacccgtctcctcttatgggcggctttggactcaagaacccgcctcctcagatcctcatcaaaaacacgcctgttcctgcgaatcctccggcggagttttcagctacaaagtttgcttcattcatcacccaatactccacaggacaagtgagtgtggaaattgaatgggagctgcagaaagaaaacagcaagcgctggaatcccgaagtgcagtacacatccaattatgcaaaatctgccaacgttgattttactgtggacaacaatggactttatactgagcctcgccccattggcacccgttaccttacccgtcccctg

SEQ ID NO: 675 - DNA, 2208 bp, Artificial Sequence
  Description of Artificial Sequence: Synthetic polynucleotide
atggctgccgatggttatcttccagattggctcgaggacaacctctctgagggcattcgcgagtggtgggacttgaaacctggagccccgaagcccaaagccaaccagcaaaagcaggacgacggccggggtctggtgcttcctggctacaagtacctcggacccttcaacggactcgacaagggggagcccgtcaacgcggcggacgcagcggccctcgagcacgacaaggcctacgaccagcagctcaaagcgggtgacaatccgtacctgcggtataaccacgccgacgccgagtttcaggagcgtctgcaagaagatacgtcttttgggggcaacctcgggcgagcagtcttccaggccaagaagcgggttctcgaacctctcggtctggttgaggaaggcgctaagacggctcctggaaagaaacgtccggtagagcagtcgccacaagagccagactcctcctcgggcatcggcaagacaggccagcagcccgctaaaaagagactcaattttggtcagactggcgactcagagtcagtccccgatccacaacctctcggagaacctccagcaacccccgctgctgtgggacctactacaatggcttcaggcggtggcgcaccaatggcagacaataacgaaggcgccgacggagtgggtaatgcctcaggaaattggcattgcgattccacatggctgggcgacagagtcatcaccaccagcacccgcacctgggccttgcccacctacaataaccacctctacaagcaaatctccagtgcttcaacgggggccagcaacgacaaccactacttcggctacagcaccccctgggggtattttgatttcaacagattccactgccacttttcaccacgtgactggcagcgactcatcaacaacaattggggattccggcccaagagactcaacttcaaactcttcaacatccaagtcaaggaggtcacgacgaatgatggcgtcacaaccatcgctaataaccttaccagcacggttcaagtcttctcggactcggagtaccagcttccgtacgtcctcggctctgcgcaccagggctgcctccctccgttcccggcggacgtgttcatgattccgcaatacggctacctgacgctcaacaatggcagccaagccgtgggacgttcatccttttactgcctggaatatttcccttctcagatgctgagaacgggcaacaactttaccttcagctacacctttgaggaagtgcctttccacagcagctacgcgcacagccagagcctggaccggctgatgaatcctctcatcgaccaatacctgtattacctgaacagaactcaaaatcagtccggaagtgcccaaaacaaggacttgctgtttagccgtgggtctccagctggcatgtctgttcagcccaaaaactggctacctggaccctgttatcggcagcagcgcgtttctaaaacaaaaacagacaacaacaacagcaattttacctggactggtgcttcaaaatataacctcaatgggcgtgaatccatcatcaaccctggcactgctatggcctcacacaaagacgacgaagacaagttctttcccatgagcggtgtcatgatttttggaaaagagagcgccggagcttcaaacactgcattggacaatgtcatgattacagacgaaggggaaattaaagccactaaccctgtggccaccgaaagatttgggaccgtggcagtcaatttccagagcagcagcacagaccctgcgaccggagatgtgcatgctatgggagcattacctggcatggtgtggcaagatagagacgtgtacctgcagggtcccatttgggccaaaattcctcacacagatggacactttcacccgtctcctcttatgggcggctttggactcaagaacccgcctcctcagatcctcatcaaaaacacgcctgttcctgcgaatcctccggcggagttttcagctacaaagtttgcttcattcatcacccaatactccacaggacaagtgagtgtggaaattgaatgggagctgcagaaagaaaacagcaagcgctggaatcccgaagtgcagtacacatccaattatgcaaaatctgccaacgttgattttactgtggacaacaatggactttatactgagcctcgccccattggcacccgttaccttacccgtcccctg

SEQ ID NO: 676 - DNA, 2208 bp, Artificial Sequence
  Description of Artificial Sequence: Synthetic polynucleotide
atggctgccgatggttatcttccagattggctcgaggacaacctctctgagggcattcgcgagtggtgggacttgaaacctggagccccgaaacctaaagccaaccagcaaaagcaggacgacggccggggtctggtgcttcctggctacaagtacctcggacccttcaacggactcgacaagggggagcccgtcaacgcggcggacgcagcggccctcgagcacgacaaggcctacgaccagcagctcaaagcgggtgacaatccgtacctgcggtataaccacgccgacgccgagtttcaggagcgtctgcaagaagatacgtcttttgggggcaacctcgggcgagcagtcttccaggccaagaagcgggttctcgaaccttttggtctggttgaggaaggcgctaagacggctcctggaaagaaacgtccggtagagcagtcgccacaagagccagactcctcctcgggcatcggcaagacaggccagcagcccgctaaaaagagactcaattttggtcagactggcgactcagagtcagtccccgacccacaacctctcggagaacctccagcaacccccgctgctgtgggacctactacaatggcttcaggcggtggcgcaccaatggcagacaataacgaaggcgccgacggagtgggtaatgcctcaggaaattggcattgcgattccacatggctgggcgacagagtcatcaccaccagcacccgcacctgggccttgcccacctacaataaccacctctacaagcaaatctccagtgcttcaacgggggccagcaacgacaaccactacttcggctacagcaccccctgggggtattttgatttcaacagattccactgccacttttcaccacgtgactggcagcgactcatcaacaacaattggggattccggcccaagagactcaacttcaagctcttcaacatccaagtcaaggaggtcacgacgaacgatggcgtcacgaccatcgctaataaccttaccagcacggttcaagtcttctcggattcagagtaccaactgccgtacgtcctcggctctgcgcaccagggctgcctccctccgttcccggcggacgtgtttatgattccgcagtacggctacctaacgctcaacaatggcagccaggccgtgggacgttcatccttttactgcccggaatatttcccttctcagatgctgagaacgggcaacaactttaccttcagctacacctttgaggaagtgcctttccacagcagctacgcgcacagccagagcctggaccggctgatgaatcctctcatcgaccaatacctgtattacctgaacagaactcaaaatcagtccggaagtgcccaaaacaaggacttgctgtttagccgtgggtctccagctggcatgtctgttcagcccaaaaactggctacctggaccctgttatcggcagcagcgcgtttctaaaacaaaaacagacaacaacaacagcaattttacctggactggtgcttcaaaatataacctcaatgggcgtgaatccatcatcaaccctggcactgctatggcctcacacaaagacgacaaagacaagttctttcccatgagcggtgtcatgatttttggaaaagagagcgccggagcttcaaatactgcattggacaatgtcatgatcacagatgaagaggaaattaaagccactaaccctgtggccaccgaaagatttgggaccgtggcagtcaatttccagagcagcaacacagaccccgcgaccggagatgtgcatgttatgggagccttacctggcatggtgtggcaagacagagacgtatacctgcagggtcccatttgggccaaaattcctcacacggatggacactttcacccgtctcctctcatgggcggctttggacttaagcacccgcctcctcaaatcctcatcaaaaacacgcctgttcctgcgaatcctccggcagagttttcggctacaaagtttgcttcattcatcacccagtactccacaggacaagtgagtgtggaaattgaatgggagctgcagaaagaaaacagcaagcgctggaatcccgaagtgcagtacacatccaattatgcaaaatctgccaacgttgatttcactgtggacaacaatggactttatactgagcctcgccccattggcacccgttaccttacccgtcccttg

SEQ ID NO: 677 - DNA, 2208 bp, Artificial Sequence
  Description of Artificial Sequence: Synthetic polynucleotide
atggctgccgatggttatcttccagattggctcgaggacaacctctctgagggcattcgcgagtggtgggacttgaaacctggagccccgaaacctaaagccaaccagcaaaagcaggacgacggccggggtctggtgcttcctggctacaagtacctcggacccttcaacggactcgacaagggggagcccgtcaacgcggcggacgcagcggccctcgagcacgacaaggcctacgaccagcagctcaaagcgggtgacaatccgtacctgcggtataaccacgccgacgccgagtttcaggagcgtctacaagaagatacgtcttttgggggcaacctcgggcgagcagtcttccaggccaagaagcgggttctcgaaccttttggtctggttgaggaaggcgctaagacggctcctggaaagaaacgtccggtagagcagtcgccacaagagccagactcctcctcgggcatcggcaagacaggccagcagcccgctaaaaagagactcaattttggtcagactggcgactcagagtcagtccccgacccacaacctctcggagaacctccagcaacccccgctgctgtgggacctactacaatggcttcaggcggtggcgcaccaatggcagacaataacgaaggcgccgacggagtgggtaatgcctcaggaaattggcattgcgattccacatggctgggcgacagagtcatcaccaccagcacccgcacctgggccttgcccacctacaataaccacctctacaagcaaatctccagtgcttcaacgggggccagcaacgacaaccactacttcggctacagcaccccctgggggtattttgatttcaacagattccactgccacttttcaccacgtgactggcagcgactcatcaacaacaattggggattccggcccaagagactcaacttcaagctcttcaacatccaagtcaaggaggtcacgacgaacgatggcgtcacgaccatcgctaataaccttaccagcacggttcaagtcttctcggattcagagtaccaactgccgtacgtcctcggctctgcgcaccagggctgcctccctccgttcccggcggacgtgttcatgattccgcagtacggctacctaacgctcaacaatggcagccaggccgtgggacgttcatccttttactgcctggaatatttcccttctcagatgctgagaacgggcaacaactttaccttcagctacacctttgaggaagtgcctttccacagcagctacgcgcacagccagagcctggaccggctgatgaatcctctcatcgaccaatacctgtattacctgaacagaactcaaaatcagtccggaagtgcccaaaacaaggacttgctgtttagccgtgggtctccagctggcatgtctgttcagcccaaaaactggctacctggaccctgttatcggcagcagcgcgtttctaaaacaaaaacagacaacaacaacagcaattttacctggactggtgcttcaaaatataacctcaatgggcgtgaatccatcatcaaccctggcactgctatggcctcacacaaagacgacaaagacaagttctttcccatgagcggtgtcatgatttttggaaaagagagcgccggagcttcaaatactgcattggacaatgtcatgatcacagatgaagaggaaattaaagccactaaccctgtggccaccgaaagatttgggaccgtggcagtcaatttccagagcagcgacacagaccccgcgaccggagatgtgcatgttatgggagccttacctggcatggtgtggcaagacagagacgtatacctgcagggtcccatttgggccaaaattcctcacacggatggacactttcacccgtctcctctcatgggcggctttggacttaagcacccgcctcctcaaatcctcatcaaaaacacgcctgttcctgcgaatcctccggcagagttttcggctacaaagtttgcttcattcatcacccagtactccacaggacaagtgagtgtggaaattgaatgggagctgcagaaagaaaacagcaagcgctggaatcccgaagtgcagtacacatccaattatgcaaaatctgccaacgttgatttcactgtggacaacaatggactttatactgagcctcgccccattggcacccgttaccttacccgtcccttg

SEQ ID NO: 678 - DNA, 2208 bp, Artificial Sequence
  Description of Artificial Sequence: Synthetic polynucleotide
atggctgccgatggttatcttccagattggctcgaggacaacctctctgagggcattcgcgagtggtgggacttgaaacctggagccccgaaacctaaagccaaccagcaaaagcagggcgacggccggggtctggtgcttcctggctacaagtacctcggacccttcaacggactcgacaagggggagcccgtcaacgcggcggacgcagcggccctcgagcacgacaaggcctacgaccagcagctcaaagcgggtgacaatccgtacctgcggtataaccacgccgacgccgagtttcaggagcgtctgcaagaagatacgtcttttgggggcaacctcgggcgagcagtcttccaggccaagaagcgggttctcgaaccttttggtctggttgaggaaggcgctaagacggctcctggaaagaaacgtccggtagagcagtcgccacaagagccagactcctcctcgggcatcggcaagacaggccagcagcccgctaaaaagagactcaattttggtcagactggcgactcagagtcagtccccgacccacaacctctcggagaacctccagcaacccccgctgctgtgggacctactacaatggcttcaggcggtggcgcaccaatggcagacaataacgaaggcgccgacggagtgggtaatgcctcaggaaattggcattgcgattccacatggctgggcgacagagtcatcaccaccaacactcgcacctgggccttgcccacctacaataaccacctctacaagcaaatctccagtgcttcaacgggggccagcaacgacaaccactacttcggctacagcaccccctgggggtattttgatttcaacagattccactgccacttttcaccacgtgactggcagcgactcatcaacaacaattggggattccggcccaagagactcaacttcaagctcttcaacatccaagtcaaggaggtcacgacgaacgatggcgtcacgaccatcgctaataaccttaccagcacggttcaagtcttctcggattcagagtaccaactgccgtacgtcctcggctctgcgcaccagggctgcctccctccgttcccggcggacgtgttcatgattccgcagtacggctacctaacgctcaacaatggcagccaggccgtgggacgttcatccttttactgcctggaatatttcccttctcagatgctgagaacgggcaacaactttaccttcagctacacctttgaggaagtgcctttccacagcagttacgggcacagccagagcctggaccggctgatgaatcttctcatcgaccaatacctgtattacctgaacagaactcaaaatcagtccggaagtgcccaaaacaaggacttgctgtttagccgtgggtctccagctggcatgtttgttcagcccaaaaactggctacctggaccctgttatcggcagcagcgcgtttctaaaacaaaaacagacaacaacaacagcaattttacctggactggtgcttcaaaatataacctcaatgggcgtgaatccatcatcaaccctggcactgctatggcctcacacaaagacgacgaagacaagttctttcccatgagcggtgtcatgatttttggaaaagagagcgccggagcttcaaatactgcattggacaatgtcatgatcacagatgaagaggaaattaaagccactaaccctgtggccaccgaaagatttgggaccgtggcagtcaatttccagagcagcagcacagaccccgcgaccggagatgtgcatgttatgggagccttacctggcatggtgtggcaagacagagacgtatacctgcagggtcccatttgggccaaaattcctcacacggatggacactttcacccgtctcctctcatgggcggctttggacttaagcacccgcctcctcaaatcctcatcaaaaacacgcctgttcctgcgaatcctccggcagagttttcggctacaaagtttgcttcattcatcacccagtactccacaggacaagtgagtgtggaaattgaatgggagctgcagaaagaaaacagcaagcgctggaatcccgaagtgcagtacacatccaattatgcaaaatctgccaacgttgatttcactgtggacaacaatggactttatactgagcctcgccccattggcacccgttaccttacccgtcccttg

SEQ ID NO: 679 - DNA, 2208 bp, Artificial Sequence
  Description of Artificial Sequence: Synthetic polynucleotide
atggctgccgatggttatcttccagattggctcgaggacaacctctctgagggcattcgcgagtggtgggacttgaaacctggagccccgaaacctaaagccaaccagcaaaagcaggacgacggccggggtctggtgcttcctggctacaagtacctcggacccttcaacggactcgacaagggggagcccgtcaacgcggcggacgcagcggccctcgagcacgacaaggcctacgaccagcagctcaaagcgggtgacaatccgtacctgcggtataaccacgccgacgccgagtttcaggagcgtctgcaagaagatacgtcttttgggggcaacctcgggcgagcagtcttccaggccaagaagcgggttctcgaaccttttggtctggttgaggaaggcgctaagacggctcctggaaagaaacgtccggtagagcagtcgccacaagagccagactcctcctcgggcatcggcaagacaggccagcagcccgctaaaaagagactcaattttggtcagactggcgactcagagtcagtccccgacccacaacctctcggagaacctccagcaacccccgctgctgtgggacctactacaatggcttcaggcggtggcgcaccaatggcagacaataacgaaggcgccgacggagtgggtaatgcctcaggaaattggcattgcgattccacatggctgggcgacagagtcatcaccaccaacacccgcacctgggccttgcccacctacaataaccacctctacaagcaaatctccagtgcttcaacgggggccagcaacgacaaccactacttcggctacagcaccccctgggggtattttgatttcaacagattccactgccacttttcaccacgtgactggcagcgactcatcaacaacaattggggattccggcccaagagactcaacttcaagctcttcaacatccaagtcaaggaggtcacgacgaacgatggcgtcacgaccatcgctaataaccttaccagcacggttcaagtcttctcggattcagagtaccaactgccgtacgtcctcggctctgcgcaccagggctgcctccctccgttcccggcggacgtgttcatgattccgcagtacggctacctaatgctcaacaatggcagccaggccgtgggacgttcatccttttactgcctggaatatttcccttctcagatgctgagaacgggcaacaactttaccttcagctacacctttgaggaagtgcctttccacagcagctacgcgcacagccagagcctggaccggctgatgaatcctctcatcgaccaatacctgtattacctgaacagaactcaaaatcagtccggaagtgcccaaaacaaggacttgctgtttagccgtgggtctccagctggcatgtctgttcagcccaaaaactggctacctggaccctgttatcggcagcagcgcgtttctaaaacaaaaacagacaacaacaacagcaattttacctggactggtgcttcaaaatataacctcaatgggcgtgaatccatcatcaaccctggcactgctatggcctcacacaaagacgacgaagacaagttctttcccatgagcggtgtcatgatttttggaaaagagagcgccggagcttcaaatactgcattggacaatgtcatgatcacagatgaagaggaaattaaagccactaaccctgcggccaccgaaagatttgggaccgtggcagtcaatttccagagcagcagcacagaccccgcgaccggagatgtgcatgttatgggagccttacctggcatggtgtggcaagacagagacgtatacctgcagggtcccatttgggccaaaattcctcacacggatggacactttcacccgtctcctctcatgggcggctttggacttaagcacccgcctcctcaaatcctcatcaaaaacacgcctgttcctgcgaatcctccggcagagttttcggctacaaagtttgcttcattcatcacccagtactccacaggacaagtgagtgtggaaattgaatgggagctgcagaaagaaaacagcaagcgctggaatcccgaagtgcagtacacatccaattatgcaaaatctgccaacgttgatttcactgtggacaacaatggactttatactgagcctcgccccattggcacccgttaccttacccgtcccttg

SEQ ID NO: 680 - DNA, 2208 bp, Artificial Sequence
  Description of Artificial Sequence: Synthetic polynucleotide
atggctgccgatggttatcttccagattggctcgaggacaacctctctgagggcattcgcgagtggtgggacttgaaacctggagccccgaaacctaaagccaaccagcaaaagcaggacgacggccggggtctggtgcttcctggctacaagtacctcggacccttcaacggactcgacaagggggagcccgtcaacgcggcggacgcagcggccctcgagcacgacaaggcctacgaccagcagctcaaagcgggtgacaatccgtacctgcggtataaccacgccgacgccgagtttcaggagcgtctgcaagaagatacgtcttttgggggcaacctcgggcgagcagtcttccaggccaagaagcgggttctcgaaccttttggtctggttgaggaaggcgctaagacggctcctggaaagaaacgtccggtagagcagtcgccacaagagccagactcctcctcgggcatcggcaagacgggccagcagcccgctaaaaagagactcaattttggtcagactggcgactcagagtcagtccccgacccacaacctctcggagaacctccagcaacccccgctgctgtgggacctactacaatggcttcaggcggtggcgcaccaatggcagacaataacgaaggcgccgacggagtgggtaatgcctcaggaaattggcattgcgattccacatggctgggcgacagagtcatcaccaccagcacccgcacctgggccttgcccacctacaataaccacctctacaagcaaatctccagtgcttcaacgggggccagcaacgacaaccactacttcggctacagcaccccctgggggtattttgatttcaacagattccactgccacttttcaccacgtgactggcagcgactcatcaacaacaattggggattccggcccaagagactcaacttcaagctcttcaacatccaagtcaaggaggtcacgacgaacgatggcgtcacgaccatcgctaataaccttaccagcacggttcaagtcttctcggattcagagtaccaactgccgtacgtcctcggctctgcgcaccagggctgcctccctccgttcccggcggacgtgttcatgattccgcagtacggctacctaacgctcaacaatggcagccaggccgtgggacgttcatccttttactgcctggaatatttcccttctcagatgctgagaacgggcaacaactttaccttcagctacacctttgaggaagtgcctttccacagcagctacgcgcacagccagagcctggaccggctgatgaatcctctcatcgaccaatacctgtattacctgaacagaactcaaaatcagtccggaagtgcccaaaacaaggacttgctgtttagccgtgggtctccagctggcatgtccgttcagcccaaaaactggctacctggaccctgttatcggcagcagcgcgtttctaaaacaaaaacagacaacaacaacagcaattttacctggactggtgcttcaaaatataacctcaatgggcgtgaatccatcatcaaccctggcactgctatggcctcacacaaagacgacgaagacaagttctttcccatgagcggtgtcatgatttttggaaaagagagcgccggagcttcaaatactgcattggacaatgtcatgatcacagatgaagaggaaattaaagccactaaccctgtggccaccgaaagatttgggaccgtggcagtcaatttccagagcagcagcacagaccccgcgaccggagatgtgcatgttatgggagccttacctggcatggtgtggcaagacagagacgtatacctgcagggtcccatttgggccaaaattcctcacacggatggacactttcacccgtctcctctcatgggcggctttggacttaagcacccgcctcctcaaatcctcatcaaaaacacgcctgttcctgcgaatcctccggcagagttttcggctacaaagtttgcttcattcatcacccagtactccacaggacaagtgagtgtggaaattgaatgggagctgcagaaagaaaacagcaagcgctggaatcccgaagtgcagtacacatccaattatgcaaaatctgccaacgttgatttcactgtggacaacaatggactttatactgagcctcgccccattggcacccgttaccttacccgtcccttg

SEQ ID NO: 681 - DNA, 2208 bp, Artificial Sequence
  Description of Artificial Sequence: Synthetic polynucleotide
  modified_base (305)..(305): a, c, t, or g
atggctgccgatggttatcttccagattggctcgaggacaacctctctgagggcattcgcgagtggtgggacttgaaacctggagccccgaaacctaaagccaaccagcaaaagcaggacgacggccggggtctggtgcttcctggctacaagtacctcggacccttcaacggactcgacaagggggagcccgtcaacgcggcggacgcagcggccctcgagcacgacaaggcctacgaccagcagctcaaagcgggtgacaatccgtacctgcggtataaccacgccgacgccgagtttcaggngcgtctgcaagaagatacgtcttttgggggcaacctcgggcgagcagtcttccaggccaagaagcgggttctcgaaccttttggtctggttgaggaaggcgctaagacggctcctggaaagaaacgtccggtagagcagtcgccacaagagccagactcctcctcgggcatcggcaagacaggccagcagcccgctaaaaagagactcaattttggtcagactggcgactcagagtcagtccccgacccacaacctctcggagaacctccagcaacccccgctgctgtgggacctactacaatggcttcaggcggtggcgcaccaatggcagacaataacgaaggcgccgacggagtgggtaatgcctcaggaaattggcattgcgattccacatggctgggcggcagagtcatcaccaccagcacccgcacctgggccttgcccacctacaataaccacctctacaagcaaatctccagtgcttcaacgggggccagcaacgacaaccactacttcggccacagcaccccctgggggtattttgatttcaacagattccactgccacttttcaccacgtgactggcagcgactcatcaacaacaattggggattccggcccaagagactcaacttcaagctcttcaacatccaagtcaaggaggtcacgacgaacgatggcgtcacgaccatcgctaataaccttaccagcacggttcaagtcttctcggattcagagtaccaactgccgtacgtcctcggctctgcgcaccagggctgcctccctccgtccccggcggacgtgttcatgattccgcagtacggctacctaacactcaacaatggcagccaggccgtgggacgttcatccttttactgcctggaatatttcccttctcagatgctgagaacgggcaacaactttaccttcagctacacctttgaggaagtgcctttccacagcagctacgcgcacagccagagcctggaccggctgatgaatcctctcatcgaccaatacctgtattacctgaacagaactcaaaatcagtccggaagtgcccaaaacaaggacttgctgtttagccgtgggtctccagctggcatgtctgttcagcccaaaaactggctacctggaccctgttatcggcagcagcgcgtttctaaaacaaaaacagacaacaacaacagcaattttacctggactggtgcttcaaaatataacctcaatgggcgtgaatccatcatcaaccctggcactgctatggcctcacacaaagacgacaaagacaagttctttcccatgagcggtgtcatgatttttggaaaagagagcgccggagcttcaaatactgcattggacaatgtcatgatcacagatgaagaggaaattaaagccactaaccctgtggccaccgaaagatttgggaccgtggcagtcaatttccagagcagcaacacagaccccgcgaccggagatgtgcatgttatgggagccttacctggcatggtgtggcaagacagagacgtatacctgcagggtcccatttgggccaaaattcctcacacggatggacactttcacccgtctcctctcatgggcggctttggacttaagcacccgcctcctcaaatcctcatcaaaaacacgcctgttcctgcgaatcctccggcagagttttcggctacaaagtttgcttcattcatcacccagtactccacaggacaagtgagtgtggaaattgaatgggagctgcagaaagaaaacagcaagcgctggaatcccgaagtgcagtacacatccaattatgcaaaatctgccaacgttgatttcactgtggacaacaatggactttatactgagcctcgccccattggcacccgttaccttacccgtcccttg

SEQ ID NO: 682 - DNA, 2208 bp, Artificial Sequence
  Description of Artificial Sequence: Synthetic polynucleotide
atggctgccgatggttattttccagattggctcgaggacaacctttctgagggcattcgcgagtggtgggacttgaaacctggagccccgaaacctaaagccaaccagcaaaagcaggacgacggccggggtctggtgcttcctggctacaagtacctcggacccttcaacggactcgacaagggggagcccgtcaacgcggcggacgcagcggccctcgagcacgacaaggcctacgaccagcagctcaaagcgggtgacaatccgtacctgcggtataaccacgccgacgccgagtttcaggagcgtctgcaagaagatacgtcttttgggggcaacctcgggcgagcagtcttccaggccaagaagcgggttctcgaaccttttggtctggttgaggaaggcgctaagacggctcctggaaagaaacgtccggtagagcagtcgccacaagagccagactcctcctcgggcatcggcaggacaggccagcagcccgctaaaaagagactcaattttggtcagactggcgactcagagtcagtccccgacccacaacctctcggagaacctccagcgacccccgctgctgtgggacctactacaatggcttcaggcggtggcgcaccaatggcagacaataacgaaggtgccgacggagtgggtaatgcctcaggaaattggcattgcgattccacatggctgggcgacagagtcatcaccaccagcacccgcacctgggccttgcccacctacaataaccacctctacaagcaaatctccagtgcttcaacgggggccagcaacgacaaccactacttcggctacagcaccccctgggggtattttgatttcaacagattccactgccacttttcaccacgtgactggcagcgactcatcaacaacaattggggattccggcccaagagactcaacttcaagctcttcaacatccaagtcaaggaggtcacgacgaacgatggcgtcacgaccatcgctaataaccttaccagcacggttcaagtcttctcggattcagagtaccaactgccgtacgtcctcggctctgcgcaccagggctgcctccctccgttcccggcggacgtgttcatgattccgcagtacggctacctaacgctcaacaatggcagccaggccgtgggacgttcatccttttactgcctggaatatttcccttctcagatgctgagaacgggcaacaactttaccttcagctacacctttgaggaagtgcctttccacagcagctacgcgcacagccagagcctggaccggctgatgaatcctctcatcgaccaatacctgtattacctgaacagaactcaaaatcagtccggaagtgcccaaaacaaggacttgctgtttagccgtgggtctccagctggcatgtctgttcagcccaaaaactggctacctggaccctgttatcggcagcagcgcgtttctaaaacaaaaacagacaacaacaacagcaattttacctggactggtgcttcaaaatataacctcaatgggcgtgaatccatcatcaaccctggcactgctatggcctcacacaaagacgacgaagacaagttctttcccatgagcggtgtcatgatttttggaaaagagagcgccggagcttcaaatactgcattggacaatgtcatgatcacagatgaagaggaaattaaagccactaaccctgtggccaccgaaagatttgggaccgtggcagtcaatttccagagcagcagcccagaccccgcgaccggagatgtgcatgttatgggagccttacctggcatggtgtggcaagacagagacgtatacctgcagggtcccatttgggccaaaattcctcacacggatggacactttcacccgtctcctctcatgggcggctttggacttaagcacccgcctcctcaaatcctcatcaaaaacacgcctgttcctgcgaatcctccggcagagttttcggctacaaagtttgcttcattcatcacccagtactccacaggacaagtgagtgtggaaattgaatgggagctgcagaaagaaaacagcaagcgctggaatcccgaagtgcagtacacatccaattatgcaaaatctgccaacgttgatttcactgtggacaacaatggactttatagtgagcctcgccccattggcacccgttaccttacccgtcccttg

SEQ ID NO: 683 - DNA, 2208 bp, Artificial Sequence
  Description of Artificial Sequence: Synthetic polynucleotide
atggctgccgatggttatcttccagattggctcgaggacaacctctctgagggcattcgcgagtggtgggacttgaaacctggagccccgaaacctaaagccaaccagcaaaagcaggacgacggccggggtctggtgcttcctggctacaagtacctcggacccttcaacggactcgacaagggggagcccgtcaacgcggcggacgcagcggccctcgagcacgacaaggcctacgaccagcagctcaaagcgggtgacaatccgtacctgcggtataaccacgccgacgccgagtttcaggagcgtctgcaagaagatacgtcttttgggggcaacctcgggcgagcagtcttccaggccaagaagcgggttctcgaaccttttggtctggttgaggaaggcgctaagacggctcctggaaagaaacgtccggtagagcagtcgccacaagagccagactcctcctcgggcatcggcaagacaggccagcagcccgctaaaaagagactcaattttggtcagactggcgactcagagtcagtccccgacccacaacctctcggagaacctccagcaacccccgctgctgtgggacctactacaatggcttcaggcggtggcgcaccaatggcagacaataacgaaggcgccgacggagtgggtaatgcctcaggaaattggcattgcgattccacatggctgggcgacagagtcatcaccaccagcacccgcacctgggccttgcccacctacaataaccacctctacaagcaaacctccagtgcttcaacgggggccagcaacgacaaccactacttcggctacagcaccccctgggggtattttgatttcaacagattccactgccacttttcaccacgtgactggcagcgactcatcaacaacaattggggattccggcccaagagactcaacttcaagctcttcaacatccaagtcaaggaggtcacgacgaacgatggcgtcacgaccatcgctaataaccttaccagcacggttcaagtcttctcggattcagagtaccaactgccgtacgtcctcggctctgcgcaccagggctgcctccctccgttcccggcggacgtgttcatgattccgcagtacggctacctaacgctcaacaatggcagccaggccgtgggacgttcatccttttactgcctggaatatttcccttctcagatgctgagaacgggcaacaactttaccttcagctacacctttgaggaagtgcctttccacagcagctacgcgcacagccagagcctggaccggctgatgaatcctctcatcgaccaatacctgtattacctgaacagaactcaaaatcagtccggaagtgcccaaaacaaggacttgctgtttagccgtgggtctccagctggcatgtctgttcagcccaaaaactggctacctggaccctgttatcggcagcagcgcgtttctaaaacaaaaacagactacaacaacagcaattttacctggactggtgcttcaaaatataacctcaatgggcgtgaatccatcatcaaccctggcactgctatggcctcacacaaagacgacgaagacaagttctttcccatgagcggtgtcatgatttttggaaaagagagcgccggagcttcaaatactgcattggacaatgtcatgatcacagatgaagaggaaattaaagccactaaccctgtggccaccgaaagatttgggaccgtggcagtcaatttccagagcagcagcacagaccccgcgaccggagatgtgcatgttatgggagccttacctggcatggtgtggcaagacagagacgtatacctgcagggtcccatttgggccaaaattcctcacacggatggacactttcacccgtctcctctcatgggcggctttggacttaagcacccgcctcctcaaatcctcatcaaaaacacgcctgttcctgcgaatcctccggcagagttttcggctacaaagtttgcttcattcatcacccagtactccacaggacaagtgagtgtggaaattgaatgggagctgcagaaagaaaacagcaagcgctggaatcccgaagtgcagtacacatccaattatgcaaaatctgccaacgttgatttcactgtggacaacaatggactttatactgagcctcgccccattggcacccgttaccttacccgtcccttg

SEQ ID NO: 684 - DNA, 2208 bp, Artificial Sequence
  Description of Artificial Sequence: Synthetic polynucleotide
atggctgccgatggttatcctccagattggctcgaggacaacctctctgagggcattcgcgagtggtgggacttgaaacctggagtcccgaaacctaaagccaaccagcaaaagcaggacgacggccggggtctggtgcttcctggctacaagtacctcggacccttcaacggactcgacaagggggagcccgtcaacgcggcggacgcagcggccctcgagcacgacaaggcctacgaccagcagctcaaagcgggtgacaatccgtacctgcggtataaccacgccgacgccgagtttcaggagcgtctgcaagaagatacgtcttttgggggcaacctcgggcgagcagtcttccaggccaagaagcgggttctcgaaccttttggtctggttgaggaaggcgctaagacggctcctggaaagaaacgtccggtagagcagtcgccacaagagccagactcctcctcgggcatcggcaagacaggccagcagcccgctaaaaagagactcaattttggtcagactggcgactcagagtcagtccccgacccacaacctctcggagaacctccagcaacccccgctgctgtgggacctactacaatggcttcaggcggtggcgcaccaatggcagacaataacgaaggcgccgacggagtgggtaatgcctcaggaaattggcattgcgattccacatggctgggcgacagagtcatcaccaccagcacccgcacctgggccttgcccacctacaataaccacctctacaagcaaatctccagtgcttcaacgggggccagcaacgacaaccactacttcggctacagcaccccctgggggtattttgatttcaacagattccactgccacttttcaccacgtgactggcagcgactcatcaacaacaattggggattccggcccaagagactcaacttcaagctcttcaacatccaagtcaaggaggtcacgacgaacgatggcgtcacgaccatcgctaataaccttaccagcacggttcaagtcttctcggattcagagtaccaactgccgtacgtcctcggctctgcgcaccagggctgcctccctccgttcccggcggacgtgttcatgattccgcagtacggctacctaacgctcaacaatggcagccaggccgtgggacgttcatccttttactgcctggaatatttcccttctcagatgctgagaacgggcaacaactttaccttcagctacacctttgaggaagtgcctttccacagcagctacgcgcacagccagagcctggaccggctgatgaatcctctcatcgaccaatacctgtattacctgaacagaactcaaaatcagtccggaagtgcccaaaacaaggacttgctgtttagccgtgggtctccagctggcatgtctgttcagcccaaaaactggctacctggaccctgttatcggcagcagcgcgtttctaaaacaaaaacagacaacaacaacagcaattttacctggactggtgcttcaaaatataacctcaatgggcgtgaatccatcatcaaccctggcactgctatggcctcacacaaagacgacgaagacaagttctttcccatgagcggtgtcatgatttttggaaaagagagcgccggagcttcaaatactgcattggacaatgtcatgatcacagatgaagaggaaattaaagccactaaccctgtggccaccgaaagatttgggaccgtggcagtcaatttccagagcagcagcacagaccccgcgaccggagatgtgcatgttatgggagccttacctggcatggtgtggcaagacagagacgtatacctgcagggtcccatttgggccaaaattcctcacacggatggacactttcacccgtctcctctcatgggcggctttggacttaagcacccgcctcctcaaatcctcatcaaaaacacgcctgttcctgcgaatcctccggcagagttttcggctacaaagtttgcttcattcatcacccagtactccacaggacaagtgagtgtggaaattgaatgggagctgcagaaagaaaacagcaagcgctggaatcccgaagtgcagtacacatccaattatgcaaaatctgccaacgttgatttcactgtggacaacaatggactttatactgagcctcgccccattggcacccgttaccttacccgtcccttg

SEQ ID NO: 685 - DNA, 2196 bp, Artificial Sequence
  Description of Artificial Sequence: Synthetic polynucleotide
atggctgccgatggttatcttccagattggctcgaggacaacctctctgagggcattcgcgagtggtgggacttgaaacctggagccccgaaacctaaagccaaccagcaaaagcaggacgacggccggggtctggtgcttcctggctacaagtacctcggacccttcaacggactcgacaagggggagcccgtcaacgcggcggacgcagcggccctcgagcacgacaaggcctacgaccagcagctcaaagcgggtgacaatccgtacctgcggtataaccacgccgacgccgagtttcaggagcgtctgcaagaagatacgtcttttgggggcaacctcgggcgagcagtcttccaggccaagaagcgggttctcgaaccttttggtctggttgaggaaggcgctaagacggctcctggaaagaaacgtccggtagagcagtcgccacaagagccagactcctcctcgggcatcggcaagacaggccagcagcccgctaaaaagagactcaattttggtcagactggcgactcagagtcagtccccgacccacaacctctcggagaacctccagcaacccccgctgctgtgggacctactacaatggcttcaggcggtggcgcaccaatggcagacaataacgaaggcgccgacggagtgggtaatgcctcaggaaattggcattgcgattccacatggctgggcgacagagtcatcaccaccagcacccgcacctgggccttgcccacctacaataaccacctctacaagcaaatctccagtgcttcaacgggggccagcaacgacaaccactacttcggctacagcaccccctgggggtattttgatttcaacagattccactgccacttttcaccacgtgactggcagcgactcatcaacaacaattggggattccggcccaagagactcaacttcaagctcttcaacatccaagtcaaggaggtcacgacgaacgatggcgtcacgaccatcgctaataaccttaccagcacggttcaagccttctcggattcagagtaccaactgccgtacgtcctcggctctgcgcaccagggctgcctccctccgttcccggcggacgtgttcatgattccgcagtacggctacctaacgctcaacaatggcagccaggccgtgggacgttcatccttttactgcctggaatatttcccttctcagatgctgagaacgggcaacaactttaccttcagctacacctttgaggaagtgcctttccacagcagctacgcgcacagccagagcctggaccggctgatgaatcctctcatcgacccatacctgtattacctgaacagaactcaaaatcagtccggaagtgcccaaaacaaggacttgctgtttagccgtgggtctccagctggcatgtctgttcagcccaaaaactggctacctggaccctgttatcggcagcagcgcgtttctaaaacaaaaacagacaacaacaacagcaattttacctggactggtgcttcaaaatataacctcaatgggcgtgaatccatcatcaaccctggcactgctatggcctcacacaaagacgacgaagacaagttctttcccatgagcggtgtcatgatttttggaaaagagagcgccggagcttcaaatactgcattggacaatgtcatgatcacagatgaagaggaaattaaagccactaaccctgtggccaccgaaagatttgggaccgtggcagtcaatttccagagcagcagcacagaccccgcgaccggagatgtgcatgttatgggagccttacctggcatggtgtggcaagacagagacgtatacctgcagggtcccatttgggccaaaattcctcacacggatggacactttcacccgtctcctctcatgggcggctttggacttaagcacccgcctcctcaaatcctcatcaaaaacacgcctgttcctgcgaatcctccggcagagttttcggctacaaagtttgcttcattcatcacccagtactccacaggacaagtgagtgtggaaattgaatgggagctgcagaaagaaaacagcaagcgctggaatcccgaagtgcagtacacatccaattatgcaaaatctgccaacgttgatttcactgtggacaacaatggactttatactgagcctcgccccattggcacccgttacctt

SEQ ID NO: 686 - DNA, 2208 bp, Artificial Sequence
  Description of Artificial Sequence: Synthetic polynucleotide
atggctgccgatggttatcttccagattggctcgaggacaacctctctgagggcattcgcgagtggtgggacttgaaacctggagccccgaaacctaaagccaaccagcaaaagcaggacgacggccggggtctggtgcttcctggctacaagtacctcggacccttcaacggactcgacaagggggagcccgtcaacgcggcggacgcagcggccctcgagcacgacaaggcctacgaccagcagctcaaagcgggtgacaatccgtacctgcggtataaccacgccgacgccgagtttcaggagcgtctgcaagaagatacgtcttttgggggcaacctcgggcgagcagtcttccaggccaagaagcgggttctcgaaccttttggtctggttgaggaaggcgctaagacggctcctggaaagaaacgtccggtagagcagtcgccacaagagccagactcctcctcgggcatcggcaagacaggccagcagcccgctaaaaagagactcaattttggtcagactggcgactcagagtcagtccccgacccacaacctctcggagaacctccagcaacccccgctgctgtgggacctactacaatggcttcaggcggtggcgcaccaatggcagacaataacgaaggcgccgacggagtgggtaatgcctcaggaaattggcattgcgattccacatggctgggcgacagagtcatcaccaccagcacccgcacctgggccttgcccacctacaataaccacctctacaagcaaatctccagtgcttcaacgggggccagcaacgacaaccactacttcggctacagcaccccctgggggtattttgatttcaacagattccactgccacttttcaccacgtgactggcagcgactcatcaacaacaattggggattccggcccaagagactcaacttcaagctcttcaacatccaagtcaaggaggtcacgacgaacgatggcgtcacgaccatcgctaataaccttaccagcacggttcaagtcttctcggattcagagtaccaactgccgtacgtcctcggctctgcgcaccagggctgcctccctccgttcccggcggacgtgttcatgattccgcagtacggctacctaacgctcaacaatggcagccaggccgtgggacgttcatccttttactgcctggaatatttcccttctcagatgctgagaacgggcaacaactttaccttcagctacacctttgaggaagtgcctttccacagcagctacgcgcacagccagagcctggaccggctgatgaatcctctcatcgaccaatacctgtattacctgaacagaactcaaaatcagtccggaagtgcccaaaacaaggacttgctgtttagccgtgggtctccagctggcatgtctgttcagcccaaaaactggctacctggaccctgttatcggcagcagcgcgtttctaaaacaaaaacagacaacaacaacagcaattttacctggactggtgcttcaaaatataacctcaatgggcgtgaatccatcatcaaccctggcactgctatggcctcacacaaagacgacgaagacaagttctttcccatgagcggtgtcatgatttttggaaaagagagcgccggagcttcaaatactgcattggacaatgtcatgatcacagatgaagaggaaattaaagccactaaccctgtggccaccgaaagatttgggaccgtggcagtcaatttccagagcagcagcacagaccccgcgaccggagatgtgcatgttatgggagccttacctggcatggtgtggcaagacagagacgtatacctgcagggtcccatttgggccaaaattcctcacacggatggacactctcacccgtctcctctcatgggcggctttggacttaagcacccgcctcctcaaatcctcatcaaaaacacgcctgttcctgcgaatcctccggcagagttttcggctacaaagtttgcttcattcatcacccagtactccacaggacaagtgagtgtggaaattgaatgggagctgcagaaagaaaacagcaagcgctggaatcccgaagtgcagtacacatccaattatgcaaaatctgccaacgttgatttcactgtggacaacaatggactttatactgagcctcgccccattggcacccgttaccttacccgtcccttg

SEQ ID NO: 687 - DNA, 2208 bp, Artificial Sequence
  Description of Artificial Sequence: Synthetic polynucleotide
atggctgccgatggttatcttccagattggctcgaggacaacctctctgagggcattcgcgagtggtgggacttgaaacctggagccccgaaacctaaagccaaccagcaaaagcaggacgacggccggggtctggtgcttcctggctacaagtacctcggacccttcaacggactcgacaagggggagcccgtcaacgcggcggacgcagcggccctcgagcacgacaaggcctacgaccagcagctcaaagcgggtgacaatccgtacctgcggtataaccacgccgacgccgagtttcaggagcgtctgcaagaagatacgtcttttgggggcaacctcgggcgagcagtcttccaggccaagaagcgggttctcgaaccttttggtctggttgaggaaggcgctaagacggctcctggaaagaaacgtccggtagagcagtcgccacaagagccagactcctcctcgggcatcggcaagacaggccagcagcccgctaaaaagagactcaattttggtcagactggcgactcagagtcagtccccgacccacaacctctcggagaacctccagcaacccccgctgctgtgggacctactacaatggcttcaggcggtggcgcaccaatggcagacaataacgaaggcgccgacggagtgggtaatgcctcaggaaattggcattgcgattccacatggctgggcgacagagtcatcaccaccagcacccgcacctgggccttgcccacctacaataaccacctctacaagcaaatctccagtgcttcaacgggggccagcaacgacaaccactacttcggctacagcaccccctgggggtattttgatttcaacagattccactgccacttttcaccacgtgactggcagcgactcatcaacaacaattggggattccggcccaagagactcaacttcaagctcttcaacatccaagtcaaggaggtcacgacgaacgatggcgtcacgaccatcgctaataaccttaccagcacggttcaagtcttctcggattcagagtaccaactgccgtacgtcctcggctctgcgcaccagggctgcctccctccgttcccggcggacgtgttcatgattccgcagtacggctacctaacgctcaacaatggcagccaggccgtgggacgttcatccttttactgcctggaatatttcccttctcagatgctgagaacgggcaacaactttaccttcagctacacctttgaggaagtgcctttccacagcagctacgcgcacagccagagcctggaccggctgatgaatcctctcatcgacctatacctgtattacctgaacagaactcaaaatcagtccggaagtgcccaaaacaaggacttgctgtttagccgtgggtctccagctggcatgtctgttcagcccaaaaactggctacctggaccctgttatcggcagcagcgcgtttctaaaacaaaaacagacaacaacaacagcaattttacctggactggtgcttcaaaatataacctcaatgggcgtgaatccatcatcaaccctggcactgctatggcctcacacaaagacgacgaagacaagttctttcccatgagcggtgtcatgatttttggaaaagagagcgccggaacttcaaatactgcattggacaatgtcatgatcacagatgaagaggaaattaaagccactaaccctgtggccaccgaaagatttgggaccgtggcagtcaatttccagagcagcagcacagaccccgcgaccggagatgtgcatgttatgggagccttacctggcatggtgtggcaagacagagacgtatacctgcagggtcccatttgggccaaaattcctcacacggatggacactttcacccgtctcctctcatgggcggctttggacttaagcacccgcctcctcaaatcctcatcaaaaacacgcctgttcctgcgaatcctccggcagagttttcggctacaaagtttgcttcattcatcacccagtactccacaggacaagtgagtgtggaaattgaatgggagctgcagaaagaaaacagcaagcgctggaatcccgaagtgcagtacacatccaattatgcaaaatctgccaacgttgatttcactgtggacaacaatggactttatactgagcctcgccccattggcacccgttaccttacccgtcccttg

SEQ ID NO: 688 - DNA, 2208 bp, Artificial Sequence
  Description of Artificial Sequence: Synthetic polynucleotide
atggctgccgatggttatcttccagattggctcgaggacagcctctctgagggcattcgcgagtggtgggacttgaaacctggagccccgaaacctaaagccaaccagcaaaagcaggacgacggccggggtctggtgcttcctggctacaagtacctcggacccttcaacggactcgacaagggggagcccgtcaacgcggcggacgcagcggccctcgagcacgacaaggcctacgaccagcagctcaaagcgggtgacaatccgtacctgcggtataaccacgccgacgccgagtttcaggagcgtctgcaagaagatacgtcttttgggggcaacctcgggcgagcagtcttccaggccaagaagcgggttctcgaaccttttggtctggttgaggaaggcgctaagacggctcctggaaagaaacgtccggtagagcagtcgccacaagagccagactcctcctcgggcatcggcaagacaggccagcagcccgctaaaaagagactcaattttggtcagactggcgactcagagtcagtccccgacccacaacctctcggagaacctccagcaacccccgctgctgtgggacctactacgatggcttcaggcggtggcgcaccaatggcagacaataacgaaggcgccgacggagtgggtaatgcctcaggaaattggcattgcgattccacatggctgggcgacagagtcatcaccaccagcacccgcacctgggccttgcccacctacaataaccacctctacaagcaaatctccagtgcttcaacgggggccagcaacgacaaccactacttcggctacagcaccccctgggggtattttgatttcaacagattccactgccacttttcaccacgtgactggcagcgactcatcaacaacaattggggattccggcccaagagactcaacttcaagctcttcaacatccaagtcaaggaggtcacgacgaacgatggcgtcacgaccatcgctaataaccttaccagcacggttcaagtcttctcggattcagagtaccaactgccgtacgtcctcggctctgcgcaccagggctgcctccctccgttcccggcggacgtgttcatgattccgcagtacggctacctaacgcccaacaatggcagccaggccgtgggacgttcatccttttactgcctggaatatttcccttctcagatgctgagaacgggcaacaactttaccttcagctacacctttgaggaagtgcctttccacagcagctacgcgcacagccagagcctggaccggctgatgaatcctctcatcgaccaataccagtattacctgaacagaactcaaaatcagtccggaagtgcccaaaacaaggacttgctgtttagccgtgggtctccagctggcatgtctgttcagcccaaaaactggctacctggaccctgttatcggcagcagcgcgtttctaaaacaaaaacagacaacaacaacagcaattttacctggactggtgcttcaaaatataacctcaatgggcgtgaatccatcatcaaccctggcactgctatggcctcacacaaagacgacgaagacaagttctttcccatgagcggtgtcatgatttttggaaaagagagcgccggagcttcaaatactgcattggacaatgtcatgatcacagatgaagaggaaattaaagccactaaccctgtggccaccgaaagatttgggaccgtggcagtcaatttccagagcagcagcacagaccccgcgaccggagatgtgcatgttatgggagccttacctggcatggtgtggcaagacagagacgtatacctgcagggtcccatttgggccaaaattcctcacacggatggacactttcacccgtctcctctcatgggcggctttggacttaagcacccgcctcctcaaatcctcatcaaaaacacgcctgttcctgcgaatcctccggcagagttttcggctacaaagtttgcttcattcatcacccagtactccacaggacaagtgagtgtggaaattgaatgggagctgcagaaagaaaacagcaagcgctggaatcccgaagtgcagtacacatccaattatgcaaaatctgccaacgttgatttcactgtggacaacaatggactttatactgagcctcgccccattggcacccgttaccttacccgtcccttg

SEQ ID NO: 689 - DNA, 2208 bp, Artificial Sequence; identical to SEQ ID NO: 680
  Description of Artificial Sequence: Synthetic polynucleotide

SEQ ID NO: 690 - DNA, 2205 bp, Artificial Sequence
  Description of Artificial Sequence: Synthetic polynucleotide
atggctgccgatggttatcttccagattggctcgaggacactctctctgaaggaataagacagtggtggaagctcaaacctggcccaccaccaccaaagcccgcagagcggcataaggacgacagcaggggtcttgtgcttcctgggtacaagtacctcggacccttcaacggactcgacaagggagagccggtcaacgaggcagacgccgcggccctcgagcacgacaaagcctacgaccggcagctcgacagcggagacaacccgtacctcaagtacaaccacgccgacgcggagtttcaggagcgccttaaagaagatacgtcttttgggggcaacctcggacgagcagtcttccaggcgaaaaagagggttcttgaacctctgggcctggttgaggaacctgttaagacggctccgggaaaaaagaggccggtagagcactctcctgtggagccagactcctcctcgggaaccggaaaggcgggccagcagcctgcaagaaaaagattgaattttggtcagactggagacgcagactcagtacctgacccccagcctctcggacagccaccagcagccccctctggtctgggaactaatacgatggctacaggcagtggcgcaccaatggcagacaataacgagggcgccgacggagtgggtaattcctcgggaaattggcattgcgattccacatggatgggcgacagagtcatcaccaccagcacccgaacctgggccctgcccacctacaacaaccacctctacaaacaaatttccagccaatcaggagcctcgaacgacaatcactactttggctacagcaccccttgggggtattttgacttcaacagattccactgccacttttcaccacgtgactggcaaagactcatcaacaacaactggggattccgacccaagagactcaacttcaagctctttaacattcaagtcaaagaggtcacgcagaatgacggtacgacgacgattgccaataaccttaccagcacggttcaggtgtttactgactcggagtaccagctcccgtacgtcctcggctcggcgcatcaaggatgcctcccgccgttcccagcagacgtcttcatggtgccacagtatggatacctcaccctgaacaacgggagtcaggcagtaggacgctcttcattttactgcctggagtactttccttctcagatgctgcgtaccggaaacaactttaccttcagctacacttttgaggacgttcctttccacagcagctacgctcacagccagagtctggaccgtctcatgaatcctctcatcgaccagtacctgtattacttgagcagaacaaacactccaagtggaaccaccacgcagtcaaggcttcagttttctcgggccggagcgagtgacattcgggaccagtctaggaactggcttcctggaccctgttaccgccagcagcgagtatcaaagacatctgcggataacaacaacagtgaatactcgtggactggagctaccaagtaccacctcaatggcagagactctctggtgaatccgggcccggccatggcaagccacaaggacgatgaagaaaagttttttcctcagagcggggttctcatctttgggaagcaaggctcagagaaaacaaatgtggacattgaaaaggtcatgattacagacgaagaggaaatcaggacaaccaatcccgtggctacggagcagtatggttctgtatctaccaacctccagagaggcaacagacaagcagctaccgcagatgtcaacacacaaggcgttcttccaggcatggtctggcaggacagagatgtgtaccttcaggggcccatctgggcaaagattccacacacggacggacattttcacccctctcccctcatgggtggattcggacttaaacaccctcctccacagattctcatcaagaacaccccggtacctgcgaatccttcgaccaccttcagtgcggcaaagtttgcttccttcatcacacagtactccacgggacaggtcagcgtggagatcgagtgggagctgcagaaggaaaacagcaaacgctggaatcccgaaattcagtacacttccaactacaacaagtctgttaatgtggactttactgtggacactaatggcgtgtattcagagcctcgccccattggcaccagatacctgactcgtaatctg

SEQ ID NO: 691 - protein, 736 aa, Artificial Sequence
  Description of Artificial Sequence: Synthetic polypeptide
MAADGYLPDWLEDNLSEGIREWWALKPGAPQPKANQQHQDNARGLVLPDYKYLGPGNGLDKGEPVNAADVAALEHDKAYDQQLKAGDNPYLKYNHADAEFQERLKEDTSFGGNLGRAVFQAKKRLLEPLGLVEEAAKTAPGKKRPVEQSPQEPDSSAGIGKSGAQPAKKRLNFGQTGDTESVPDPQPIGEPPAAPSGVGSLTMASGGGAPVADNNEGADGVGSSSGNWHCDSQWLGDGVITTSTRTWALPTYNNHLYKQISNSTSGGSSNDNAYFGYSTPWGYFDFNRFHCHFSPRDWQRLINNNWGFRPKRLNFKLFNIQVKEVTDNNGVKTIANNLTSTVQVFTDSDYQLPYVLGSAHEGCLPPFPADVFMIPQYGYLTLNDGSQAVGRSSFYCLEYFPSQMLRTGNNFQFSYEFENVPFHSSYAHSQSLDRLMNPLIDQYLHYLPKTINGSGQNQQTLKFSVAGPSNMAVQGRNYIPGPSYRQQRVSTTVTQNNNSEFAWPGASSWALNGRNSLMNPGPAMASYKEGEDSFFPLSGSLIFGKQGTGRDNVDADKVMITNEEEIKTTNPVATESYGQVATNHQSAQAQAQTGWVQNQGILPGMVWQDRDVYLQGPIWAKIPHTDGNFHPSPLMGGFGMKHPPPQTLIKNTPVPADPPTAFNKDKLNSFITQYSTGQVSVEIEWELQKENSKRWNPEIQYTSNYYKSNNVEFAVNTEGVYSEPRPIGTRYLTRNL

SEQ ID NO: 692 - protein, 736 aa, Artificial Sequence
  Description of Artificial Sequence: Synthetic polypeptide
MAADGYLPDWLEDNLSEGIREWWALKPGAPQPKANQQHQDNARGLVLPGYKYLGPGNGLDKGEPVNAADAAALEHDKAYDQQLKAGDNPYLKYNHADAEFQERLKEDTSFGGNLGRAVFQAKRRLLEPLGLVEEAAKTAPGKKRPVEQSPQEPDSSAGIGKSGAQPAKKRLNFGQTGDTESVPDPQPIGEPPAAPSGVGSLTMASGGGAPVADNNEGADGVGSSSGNWHCDSQWLGDRVITTSTRTWALPTYNNHLYKQISNSTSGGSSNDNAYFGYSTPWGYFDFNRFHCHFSPRDWQRLINNNWGFRPKRLNFKLFNIQIKEVTDNNGVKTIANNLTSTVQVFTDLDYQLPYVLGSAHEGCLPPFPADVFMIPQYGYLTLNDGSQAVGRSSFYCLEYFPSQMLRTGNNFQFSYEFENVPFHSSYAHSQSLDRLMNPLIDQYLHYLSKTINGSGQNQQTLKFSVAGPSNMAVQGRNYIPGPSYRQQRVSTTVTQNNNSEFAWPGASSWALNGRNSLMNPGPAMASYKEGEDSFFPLSGSLIFGKQGTGRDNVDADKVMITNEEEIKTTNPVATESYGQVATNHQSAQAQAQTGWVQNQGILPGMVWQDRDVYLQGPIWAKIPHTDGNFHPSPLMGGFGMKHPPPQTLIKNTPVPADPPTAFNKDKLNSFITQYSTGQVSVEIEWELQKENSKRWNPEIQYTSNYYKSNNVEFAVNTEGVYSEPRPIGTRYLTRNL

SEQ ID NO: 693 - protein, 736 aa, Artificial Sequence
  Description of Artificial Sequence: Synthetic polypeptide
MAADGYLPDWLEDNLSEGIREWWALKPGAPQPKANQQHQDNARGLVLPGYKYLGPGNGLDKGEPVSAADAAALEHDKAYDQQLKAGDNPYLKYNHADAEFQERLKEDTSFGGNLGRAVFQAKKRLLEPLGLVEEAAKTAPGKKRPVEQSPQEPDSSAGIGKSGAQPAKKRLNFGQTGDTESVSDPQPIGEPPAAPSGVGSLTMASGGGAPVADNNEGADGVGSSSGNWHCDSQWLGDRVITTSTRTWALPTYNNHLYKQISNSTSGGSSNDNAYFGYSTPWGYFDFNRFHCHFSPRDWQRLINNNWGFRPKRLNFKLFNIQVKEVTDNNGVKTIANNLTSTVQVFTDSDYQLPYVLGSAHEGCLPPSPADVFMIPQYGYLTLNDGSQAVGRSSFYCLEYFPSQMLRTGNNFQFSYEFENVPFHSSYAHSQSLDRLMNPLIDQYLHYLSKTINGSGQNQQTLKFSVAGPSNMAVQGRNYIPGPSYRQQRVSTTVTQNNNSEFAWPGASSWALNGRNSLMNPGPAMASYKEGEDSFFPLSGSLIFGKQGTGRDDVDADKVIITNEEEIKTTNPVATESYGQVATNHQSAQAQAQTGWVQNQGILPGMVWQDRDVYLQGPIWAKIPHTDGNFHPSPLMGGFGMKHPPPQTLIKNTPVPADPPTAFNKDKLNSFITQYSTGQVSVEIEWELQKENSKRWNPEIQYTSNYYKSNNVEFAVNTEGVYSEPRPIGTRYLTRNL

SEQ ID NO: 694 - protein, 736 aa, Artificial Sequence
  Description of Artificial Sequence: Synthetic polypeptide
MAADGYLPDWLEDNLSEGIREWWALKPGAPQPKANQQHQDNARGLVLPGYKYLGPGNGLDKGEPVNAADAAALEHDKAYDQQLKAGDNPYLKYNHAGAEFQERLKEDTSFGGNLGRAVFQAKKRLLEPLGLVEEAAKTAPGKKRPVEQSPQEPDSSAGIGKSGAQPAKKRLNFGQTGDTESVPDPQPIGEPPAAPSGVGSLTMASGGGAPVADNNEGAGGVGSSSGNWHCDSQWLGDRVVTTSTRTWALPTYNNHLYKQISNSTSGGSSNDNAYFGYSTPWGYFDFNRFHCHFSPRDWQRLINNNWGFRPKRLNFKLFNIQVKEVTDNNGVKTIANNLTSTVQVFTDSDYQLPYVLGSAHGGCLPPFPADVFMIPQYGYLTLNDGSQAVGRSSFYCLEYFPSQMLRTGNNFQFSYEFENVPFHSSYAHSQSLDRLMNPLIDQYLHYLSKTINGSGQNQQTLKFSVAGPSNMAVQGRSYIPGPSYRQQRVSTTVTQNNNSEFAWPGASSWALNGRNSLMNPGPAMASYKEGEDSFFPLSGSLIFGKQGTGRDNVDADKVMITNEEEIKTTNPVATESYGQVATNHQSAQAQAQTGWVQNQGILPGMVWQDRDVYLQGPIWAKIPHTDGNFHPSPLMGGFGMKHPPPQTLIKNTPVPADPPTAFNKDKLNSFITQYSTGQVSVEIEWELQKENSKRWNPEIQYTSNYYKSNNVEFAVNTEGVYSEPRPIGTRYLTRNL

SEQ ID NO: 695 - protein, 736 aa, Artificial Sequence
  Description of Artificial Sequence: Synthetic polypeptide
MAADGYLPDWLEDNLSEGIREWWALKPGAPQPKANQQHQDNARGLVLPGYKYLGPGNGLDKGEPVNAADAAALEHDKAYDQQLKAGDNPYLKYNHADAEFQERLKEDTSFGGNLGRAVFQAKKRLLEPLGLVEEAAKTAPGKKRPVEQSPQEPDSSAGIGKSGAQPAKKRLNFGQTGDTESVPDPQPIGEPPAAPSGVGSLTMASGGGAPVADNNEGADGVGSSSGNWHCDSQWLGDRVVTTSTRTWALPTYNNHLYKQISNSTSGGSSNDNAYFGYSTPWGYFDFNRFHCHFSPRDWQRLINNNWGFRPKRLNFKLFNIQVKEVTDNNGVKTIANNLTSTVQVFTDSDYQLPYVLGSAHEGCLPPFPADVFMIPQYGYLTLNDGSQAVGRSSFYCLEYFPSQMLRTGNNFQFSYEFENVPFHSSHAHSQSLDRLMNPLIDQYLHYLSKTINGSGQNQQTLKFSVAGHSNMAVQGRNYIPGPSYRQQRVSTTVTQNNNSEFAWPGASSWALNGRNSLMNPGPAMASYKEGEDSFFPLSGSLIFGKQGTGRDNVDADKVMITNEEEIKTTNPVATESYGQVATNHQSAQAQAQTGWVQNQGILPGMVWQDRDVYLQGPIWAKIPHTDGNFHPSPLMGGFGMKHPPPQTLIKNTPVPADPPTAFNKDKLNSFITQYSTGQVSVEIGWELQKENSKRWNPEIQYTSNYYKSNNVEFAVNTEGVYSEPRPIGTRYLTRNL

SEQ ID NO: 696 - protein, 736 aa, Artificial Sequence
  Description of Artificial Sequence: Synthetic polypeptide
MAADGYLPDWLEDNLSEGIREWWALKPGAPQPKANQQHQDNARGLVLPGYKYLGPGNGLDKGEPVNAADAAALEHDKAYDQQLKAGDNPYLKYNHADAEFQERLKEDTSFGGNLGRAVFQAKKRLLEPLGLVEEAAKTAPGKKRPVEQSPQEPDSSAGIGKSGAQPAKKRLNFGQTGDTESVPDPQPIGEPPAAPSGVGSLTMASGGGAPVADNNEGADGVGSSSGNWHCDSQWLGDRVITTSTRTWALPTYNNRLYKQISNSTSGGSSNDNAYFGYSTPWGYFDFNRFHCHFSPRDWQRLINNNWGFRPKRLNFKPFNIQVKEVTDNNGVKTIANNLTSTVQVFTDSDYQLPYVLGSAHEGCLPPFPADVFMIPQYGYLTLNDGSQAVGRSSFYCLEYFPSQMLRTGNNFQFSYEFENVPFHSSYAHSQSLDRLMNPLIDQYLHYLSKTINGSGQNQQTLKFSVAGPSNMAVQGRNYIPGPSYRQQRVSTTVTQNNNSEFAWPGASSWALNGRNSLMNPGPAMASYKEGEDSFFPLSGSLIFGKQGTGRDNVDADKVMITNEEEIKTTNPVATESYGQVATNHQSAQAQAQTGWVQNQGILPGMVWQDRDVYLQGPIWAKIPHTDGNFHPSPLMGGFGMKHPPPQTLIKNTPVPADPPTAFNKDKLNSFITQYSTGQVSVEIEWELQKENSKRWNPEIQYTSNYYKSNNVEFAVNTEGVYSEPRPIGTRYLTRNL

SEQ ID NO: 697 - protein, 736 aa, Artificial Sequence
  Description of Artificial Sequence: Synthetic polypeptide
MAADGYLPDWLEDNLSEGIREWWALKPGAPQPKANQQHQDNARGLVLPGYKYLGPGNGLDKGEPVNAADAAALEHDKAYDQQLKAGDNPYLKYNHADAEFQERLKEDTSFGGNLGRAVFQAKKRLLEPLGLVEEAAKTAPGKKRPVEQSPQEPDSSAGIGKSGAQPAKKRLNFGQTGDTESVPDPQPIGEPPAAPSGVGSLTMASGGGAPVADNNEGADGVGSSSGNWHCDSQWLGDRVITTSTRTWALPTYNNHLYKQISNSTSGGSSNDNAYFGYSTPWGYFDFNRFHCHFSPRDWQRLINNNWGFRPKRLNFKLFNIQVKEVTDNNGVKTIANNLTSTVQVFTDSDYQLPYVLGSAHEGCLPPFPADVFMIPQYGYLTLNDGSQAVGRSSFYCLEYFPSQMLRTGNNFQFSYEFENVPFHSSYAHSQSLDRLMNPLIDQYLHYLSKTINGSGQNQQTLKFSVAGPSNMAVQGRNYIPGPSYRQQRVSTTVTQNNNSEFAWPGASSWALNGRNSLMNPGPAMASYKEGEDSFFPLSGSLIFGKQGTGRDNVDADKVMITNEEEIKTTNPVATESYGQVATNHQSAQAQAQTGWVQNQGILPGMVWQDRDVYLQGPIWAKIPHTDGNFHPSPLMGGFGMKHPPPQTLIKNTPVPADPPTAFNKDKLNSFITQYSTGQVSVEIEWELQKENSKRWNPEIQYTSNYYKSNNVEFAVNTEGVYSEPRPIGTRYLTRNL

SEQ ID NO: 698 - protein, 736 aa, Artificial Sequence; identical to SEQ ID NO: 697
  Description of Artificial Sequence: Synthetic polypeptide

SEQ ID NO: 699 - protein, 736 aa, Artificial Sequence
  Description of Artificial Sequence: Synthetic polypeptide
MAADGYLPDWLEDNLSEGIREWWDLKPGAPKPKANQQKQDDGRGLVLPGYKYLGPFNGLDKGEPVNAADAAALEHDKAYDQQLKAGDNPYLRYNHADAEFQERLQEDTSFGGNLGRAVFQAKKRVLEPFGLVEEGAKTAPGKKRPVEQSPQEPDSSSGIGKSGQQPAKKRLNFGQTGDSESVPDPQPLGEPPATPAALGPTTMASGGGAPMADNNEGADGVGNASGNWHCDSTWLGDRVITTSTRTWALPTYNNHLYKQISSASTGASNDNHYFGYSTPWGYFDFNRFHCHFSPRDWQRLINNNWGFRPKRLNFKLFNIQVKEVTTNDGVTTIANNLTSTVQVFSDSEYQLPYVLGSAHQGCLPPFPADVFMIPQYGYLTLNNGSKAVGRSSFYCLEYFPSQMLRTGNNFTFSYTFEEVPFHSSYAHSQSLDRLMNPLIDQYLYYLNRTQNQSGSAQNKDLLFSRGSPAGMSVQPKNWLPGPCYRQQRVSKTKTDNNNSNFTWTGASKYNLNGRESIINPGTAMASHKDDEDKFFPMSGVMIFGKESAGASNTALDNVMITDEEEIKATNPVATERFGTVAVNFQSSSTDPATGDVHVMGALPGMVWQDRDVYLQGPIWAKIPHTDGHFHPSPLMGGFGLKHPPPQILIKNTPVPANPPAEFSATKFASFITQYSTGQVSVEIEWELQKENSKRWNPEVQYTSNYAKSANVDFTVDNNGLYTEPRPIGTRYLTRPL

SEQ ID NO: 700 - protein, 736 aa, Artificial Sequence
  Description of Artificial Sequence: Synthetic polypeptide
MAADGYLPDWLEDNLSEGIREWWDLKPGAPKPKANQQKQDDGRGLVLPGYKYLGPFNGLDKGEPVNAADAAALEHDKAYDQQLKAGDNPYLRYNHADAEFQERLQEDTSFGGNLGRAVFQAKKRVLEPLGLVEEGAKTAPGKKRPVEQSPQEPDSSSGIGKTGQQPAKKRLNFGQTGDSESVPDPQPLGEPPATPAAVGPTTMASGGGAPMADNNEGADGVGNASGNWHCDSTWLGDRVITTSTRTWALPTYNNHLYKQISSTSTGASNDNHYFGYSTPWGYFDFNRFHCHFSPRDWQRLINNNWGFRPKRLNFKLFNIQVKEVTTNDGVTTIANNLTSTVQVFSDSEYQLPYVLGSAHQGCLPPFPADVFMIPQYGYLTLNNGSQAVGRSSFYCLEYFPSQMLRTGNNFTFSYTFEEVPFHSSYAHSQSLDRLMNPLIDQYLYYLNRTQNQSGSAQNKDLLFSRGSPAGMSVQPKNWLPGPCYRQQRVSKTKTDNNNSNFTWTGASKYNLNGRESIINPGTAVASHKDDEDKFFPMSGVMIFGKESAGASNTALDNVMITDEEEIKATNPVATERFGTVAVNFQSSSTDPATGDVHAMGALPGMVWQDRDVYLQGPIWAKIPHTDGHFHPSPLMGGFGLKNPPPQILIKNTPVPANPPAEFSATKFASFITQYSTGQVSVEIEWELQKENSKRWNPEVQYTSNYAKSANVDFTVDNNGLYTEPRPIGTRYLTRPL

SEQ ID NO: 701 - protein, 736 aa, Artificial Sequence
  Description of Artificial Sequence: Synthetic polypeptide
MAADGYLPDWLEDNLSEGIREWWALKPGAPQPKANQQHQDNARGLVLPGYKYLGPGNGLDKGEPVNAADAAALEHDKAYDQQLKAGDNPYLKYNHADAEFQERLKEDTSFGGNLGRAVFQAKKRLLEPLGLVEEAAKTAPGKKRPVEQSPQEPDSSAGIGKSGAQPAKKRLNFGQTGDTESVPDPQPIGEPPAAPSGVGSLTMASGGGAPVADNNEGADGVGSSSGNWHCDSQWLGDRVITTSTRTWALPTYNNHLYKQISNSTSGGSSNDNAYFGYSTPWGYFDFNRFHCHFSPRDWQRLINNNWGFRPKRLNFKLFNIQVKEVTDNNGVKTIANNLTSTVQVFTDSDYQLPYVLGSAHEGCLPPFPADVFMIPQYGYLTLNDGSQAVGRSSFYCLEYFPSQMLRTGNNFQFGYEFENVPFHSSYAHSQSLDRLMNPLIDQYLYYLSKTINGSGQNQQTLKFSVAGPSNMAVQGRNYIPGPSYRQQRVSTTVTQNNNSEFAWPGASSWALNGRNSLMNPGPAMASHKEGEDRFFPLSGSLIFGKQGTGRDNVDADKVMITNEEEIKTTNPVATESYGQVATNHQSAQAQAQTGWVQNQGILPGMVWQDRDVYLQGPIWAKIPHTDGNFHPSPLMGGFGMKHPPPQILIKNTPVPADPPTAFNKDKLNSFITQYSTGQVSVEIEWELQKENSKRWDPEIQYTSNYYKSNNVEFAVNTEGVYSEPRPIGTRYLTRNL

SEQ ID NO: 702 - protein, 736 aa, Artificial Sequence
  Description of Artificial Sequence: Synthetic polypeptide
MAADGYLPDWLEDNLSEGIREWWALKPGAPQPKANQQHQDNARGLVLPGYKYLGPGNGLDKGEPVNAADAAALEHDKAYDQQLKAGDNPYLKYNHADAEFQERLKEDTSFGGNLGRAVFQAKKRLLEPLGLVEEAAKTAPGKKRPVEQSPQEPDSSAGIGKSGAQPAKKRLNFGQTGDTESVPDPQPIGEPPAAPSGVGSLTMASGGGAPVADNNEGADGVGSSSGNWHCDSQWLGDRVITTSTRTWALPTYNNHLYKQISNSTSGGSSNDNAYFGYSTPWGYFDFNRFHCRFSPRDWQRLINNNWGFRPKRLNFKLFNIQVKEVTDNNGVKTIANNLTSTVQVFTDSDYQLPYVLGSAHEGCLPPFPADVFMIPQYGYLTLNDGSQAVGRSSFYCLEYFPSQMLRTGNNFQFSYEFENVPFHSSYAHSQSLDRLMNPLIDQYLYYLSKTINGSGQNQQTLKFSVAGPSNMAVQGRNYIPGPSYRQQRVSTTVTQNNNSEFAWPGASSWALNGRNSLMNPGPAMASHKEGEDRFFPLSGSLIFGKQGTGRDNVDADKVMITNEEEIKTTNPVATESYGQVATNHQSAQAQAQTGWVQNQGILPGMVWQDRDVYLQGPIWAKIPHTDGNFHPSPLMGGFGMKHPPPQILIKNAPVPADPPTAFNKDKLNSFITQYSTGQVSVEIEWELQKENSKRWNPEIQYTSNYYKSNNVEFAVNTEGVYSEPRPIGTRYLTRNL

SEQ ID NO: 703 - protein, 736 aa, Artificial Sequence
  Description of Artificial Sequence: Synthetic polypeptide
MAADGYLPDWLEDNLSEGIREWWALKPGAPQPKANQQHQDNARGLVLPGYKYLGPGNGLDKGEPVSAADAAALEHDKAYDQQLKAGDNPYLKYNHADAEFQERLKEDTSFGGNLGRAVFQAKKRLLEPLGLVEEAAKTAPGKKRPVEQSPQEPDSSAGIGKSGAQPAKKRLNFGQTGDTESVPDPQPIGEPPAAPSGVGSLTMASGGGAPVADNNEGADGVGSSSGNWHCDSQWLGDRVITTSTRTWALPTYNNHLYKQISNSTSGGSSNDNAYFGYSTPWGYFDFNRFHCHFSPRDWQRLINNNWGFRPKRLNFKLFNIQVKEVTDNNGVKTIANNLTSTVQVFTDSDYQLPYVLGSAHEGCLPPFPADVFMIPQYGYLTLNDGSQAVGRSSFYCLEYFPSQMLRTGNNFQFSYEFENVPFHSSYAHSQSLDRLMNPLIDQYLYYLSKTINGSGQNQQTLKFSVAGPSNMAVQGRNYIPGPSYRQQRVSTTVTQNNNSEFAWPGASSWALNGRNSLMNPGPAMASHKEGEDRFFPLSGSLIFGKQGTGRDNVDADKVMITNEEEIKTTNPVATESYGQVATNHQSAQAQAQTGWVQNQGILPGMVWQDRDVYLQGPIWAKIPHTDGNFHPSPLMGGFGMKHPPPQILIKNTPVPADPPTAFNKDKLNSFITQYSTGQVSVEIEWELQKENSKRWNPEIQYTSNYYKSNNVEFAVNTEGVYSEPRPIGTRYLTRNL

SEQ ID NO: 704 - protein, 736 aa, Artificial Sequence
  Description of Artificial Sequence: Synthetic polypeptide
MAADGYLPDWLEDNLSEGIREWWALKPGAPQPKANQQHQDNARGLVLPGYKYLGPGNGLDKGEPVNAADAAALEHDKAYDQQLKAGDNPYLKYNHADAEFQERLKEDTSFGGNLGRAVFQAKKRLLEPLGLVEEAAKTAPGKKRPVEQSPQEPDSSAGIGKSGAQPAKKRLNFGQTGDTESVPDPQPIGEPPAAPSGVGSLTMASGGGAPVADNNEGADGVGSSSGNWHCDSQWLGDRVITTSTRTWALPTYNNHLYKQISNSTSGGSSNDNAYFGYSTPWGYFDFNRFHCHFSPRDWQRLINNNWGFRPKRLNFKLFNIQVKEVTDNNGVKTIANNLTSTVQVFTDSDYQLPYVLGSAHEGCLPPFPADVFMIPQYGYLTLNDGSQAVGRSSFYCLEYFPSQMLRTGNNFQFSYEFENVPFHSSYAHSQSLDRLMNPLIDQYLYYLSKTINGSGQNQQTLKFSVAGPSNTAVQGRNYIPGPSYRQQRVSTTVTQNNNSEFAWPGASSWALNGRNSLMNPGPAMASHKEGEDRFFPLSGSLIFGKQGTGRDNVDADKVMITNEEEIKTTNPVATESYGQVATNHQSAQAQAQTGWVQNQGILPGMVWQDRDVYLQGPIWAKIPHTDGNFHPSPLMGGFGMKHPPPQILIKNTPVPADPPTAFNKDKLNSFITQYSTGQVSVEIEWELQKENSKRWNPEIQYTSNYYKSNNVEFAVNTEGVYSEPRPIGTRYLTRNL

SEQ ID NO: 705 - protein, 736 aa, Artificial Sequence
  Description of Artificial Sequence: Synthetic polypeptide
MAADGYLPDWLEDNLSEGIREWWALKPGAPQPKANQQHQDNARGLVLPGYKYLGPGNGLDKGEPVNAADAAALEHDKAYDQQLKAGDNPYLKYNHADAEFQERLKEDTSFGGNLGRAVFQAKKRLLEPLGLVEEAAKTAPGKKRPVEQSPQEPDSSAGIGKSGAQPAKKRLNFGQTGDTESVPDPQPIGEPPAAPSGVGSLTMASGGGAPVADNNEGADGVGSSSGNWHCDSQWLGDRVITTSTRTWALPTYNNHLYKQISNSTSGGSSNDNAYFGYSTPWGYFDFNRFHCHFSPRDWQRLINNNWGFRPKRLNFKLFNIQVKEVTDNNGVKTIANNLTSTVQVFTDSDYQLPYVLGSAHEGCLPPFPADVFMIPQYGYLTLNDGSQAVGRSSFYCLEYFPSQMLRTGSNFQFSYEFENVPFHSSYAHSQSLDRLMNPLIDQYLYYLSKTINGSGQNQQTLKFSVAGPSNMAVQGRNYIPGPSYRQQRVSTTVTQNNNSEFAWPGASSWALNGRNSLMNPGPAMASHKEGEDRFFPLSGSLIFGKQGTGRDNVDADKVMITNEEEIKTTNPAATESYGQVATNHQSAQAQAQTGWVQNQGILPGMVWQDRDVYLQGPIWAKIPHTDGNFHPSPLMGGFGMKHPPPQILIKNTPVPADPPTAFNKDKLNSFITQYSTGQVSVEIEWELQKENSKRWNPEIQHTSNYYKSNNVEFAVNTEGVYSEPRPIGTRYLTRNL

SEQ ID NO: 706 - protein, 736 aa, Artificial Sequence
  Description of Artificial Sequence: Synthetic polypeptide
MAADGYLPDWLEDNLSEGIREWWALKPGAPQPKANQQHQDNARGLVLPGYKYLGPGNGLDKGEPVNAADAAALEHDKAYDQQLKAGDNPYLKYNHADAEFQERLKEDTSFGGNLGRAVFQAKKRLLEPLGLVEEAAKTAPGKKRPVEQSPQEPDSSAGIGKSGAQPAKKRLNFGQTGDTESVPDPQPIGEPPAAPSGVGSLTMASGGGAPVADNNEGADGVGSSSGNWHCDSQWLGDRVITTSTRTWALPTYNNHLYKQISNSTSGGSSNDNAYFGYSTPWGYFDFNRFHCHFSPRDWQRLINNNWGFRPKRLNFRLFNIQVKEVTDNNGVKTIANNLTSTVQVFTDSDYQLPYVLGSAHEGCLPPFPADVFMIPQYGYLTLNDGSQAVGRSSFYCLEYFPSQMLRTGNNFQFSYEFENVPFHSSYAHSQSLDRLMNPLIDQYLYYLSKTINGSGQNQQTLKFSVAGPSNMAVQGRNYIPGPSYRQQRVSTTVTQNNNSEFAWPGASSWALNGRNSLMNPGPAMASHKEGEDRFFPLSGSLIFGKQGTGRDNVDADKVMITNEEEIKTTNPVATESYGQVATNHQSAQAQAQTGWVQSQGILPGMVWQDRDVYLQGPIWAKIPHTDGNFHPSPLMGGFGMKHPPPQILIKNTPVPADPPTAFNKDKLNSFITQYSTGQVSVEIEWELQKENSKRWNPEIQYTSNYYKSNNVEFAVNTEGVYSEPRPIGTRYLTRNL

SEQ ID NO: 707 - protein, 735 aa, Artificial Sequence
  Description of Artificial Sequence: Synthetic polypeptide
MAADGYLPDWLEDNLSEGIREWWALKPGAPQPKANQQHQDNARGLVLPGYKYLGPGNGLDKGEPVNAADAAALEHDKAYDQQLKAGDNPYLKYNHADAEFQERLKEDTSFGGNLGRAVFQAKKRLLEPLGLVEEAAKTAPGKKRPVEQSPQEPDSSAGIGKSGAQPAKKRLNFGQTGDTESVPDPQPIGEPPAAPSGVGSLTMASGGGAPVADNNEGADGVGSSSGNWHCDSQWLGDRVITTSTRTWALPTYNNHLYKQISNSTSGGSSNDNAYFGYSTPWRYFDFNRFHCHFSPRDWQRLINNWGFRPKRLNFKLFNIQVKEVTDNNGVKTIANNLTSTVQAFTDSDYQLPYVLGSAHEGCLPPFPADVFMIPQYGYLTLNDGSQAVGRSSFYCLEYFPSQMLRTGNNFQFSYEFENVPFHSSYAHSQSLDRLMNPLIDQYLYYLSKTINGSGQNQQTLKFSVAGPSNMAVQGRNYIPGPSYRQQRVSTTVTQNNNSEFAWPGASSWALNGRNSLMNPGPAMASHKEGEDRFFPLSGSLIFGKQGTGRDNVDADKVMITNEEEIKTTNPVATESYGQVATNHQSAQAQAQTGWVQNQGILPGMVWQDRDVYLQGPIWAKIPHTDGNFHPSPLMGGFGMKHPPPQILIKNTPVPADPPTAFNKDELNSFITQYSTGQVSVEIEWELQKENSKRWNPEIQYTSNYYKSNNVEFAVNTEGVYSEPRPIGTRYLTRNL

SEQ ID NO: 708 - protein, 735 aa, Artificial Sequence
  Description of Artificial Sequence: Synthetic polypeptide
MAADGYLPDWLEDNLSEGIREWWALKPGAPQPKANQQHQDNARGLVLPGYKYLGPGNGLDKGEPVNAADAAALEHDKAYDQQLKAGDNPYLKYNHADAEFQERLKEDTSFGGNLGRAVFQDKKRLLEPLGLVEEAAKTAPGKKRPVEQSPQEPDSSAGIGKSGAQPAKKRLNFGQTGDTESVPDPQPIGEPPAAPSGVGSLTMASGGGAPVADNNEGADGVGSSSGNWHCDSQWLGDRVITTSTRTWALPTYNNHLYKQISNSTSGGSSNDNAYFGYSTPWGYFDFNRFHCHFSPRDWQRLINNWGFRPKRLNFKLFNIQVKEVTDNNGVKTIANNLTSTVQVFTDSDYQLPYVLGSAHEGCLPPFPADVFMIPQYGYLTLNDGSQAVGRSSFYCLEYFPSQMLRTGNNFQFSYEFENVPFHSSYAHSQSLDRLMNPLIDQYLYYLSKTINGSGQNQQTLKFSVAGPSNMAVQGRNYIPGPSYRQQRVSTTVTQNNNSEFAWPGASSWALNGRNSLMNPGPAMASHKEGEDRFFPLSGSLIFGKQGTGRDNVDADKVMITNEEEIKTTNPVATESYGQVATNHQSAQAQAQTGWVQNQGILPGMVWQDRDVYLQGPIWAKIPHTDGNFHPSPLMGGFGMKHPPPQILIKNTPVPADPPTAFNKDKLNSFITQYSTGQVSVEIEWELQKENSKRWNPEIQYTSNYYKSNNVEFAVNTEGVYSEPRPIGTRYLTRNL

SEQ ID NO: 709 - protein, 736 aa, Artificial Sequence
  Description of Artificial Sequence: Synthetic polypeptide
MAADGYLPDWLEDNLSEGIREWWALKPGAPQPKANQQHQDNARGLVLPGYKYLGPGNGLDKGEPVNAADAAALEHDKAYDQQLKAGDNPYLKYNHADAEFQERLKEDTSFGGNLGRAVFQAKKRLLEPLGLVEEAAKTAPGKKRPVEQSPQEPDSSAGIGKSGAQPAKKRLNFGQTGDTESVPDPQPIGEPPAAPSGVGSLTMASGGGAPVADNNEGADGVGSSSGNWHCDSQWLGDRAITTSTRTWALPTYNNHLYKQISNSTSGGSSNDNAYFGYSTPWGYFDFNRFHCHFSPRDWQRLINNNWGFRPKRLNFKLFNIQVKEVTDNNGVKTIANNLTSTVQVFTDSDYQLPYVLGSAHEGCLPPFPADVFMIPQYGYLTLNDGSQAVGRSSFYCLEYFPSQMLRTGNNFQFSYEFENVPFHSSYAHSQSLDRLMNPLIDQYLYYLSKTINGSGQNQQTLKFSVAGPSNMAVQGRNYIPGPSYRQQRVSTTVTQNNNSEFAWPGASSWALNGRNSLMNPGPAMASHKEGEDRFFPLSGSLIFGKQGTGRDNVDADKVMTTNEEEIKTTNPVATESYGQVATNHQSAQAQAQTGWVQNQGILPGMVWQDRDVYLQGPIWAKIPHTDGNFHPSPLMGGFGMKHPPPQILIKNTPVPADPPTAFNKDKLNSFITQYSTGQVSVEIEWELQKENSKRWNPEIQYTSNYYKSNNVEFAVNTEGVYSEPRPIGTRYLTRNL

SEQ ID NO: 710 - protein, 736 aa, Artificial Sequence
  Description of Artificial Sequence: Synthetic polypeptide
MAADGYLPDWLEDNLSEGIREWWALKPGAPQPKANQQHQDNARGLVLPGYKYLGPGNGLDKGEPVNAADAAALEHDKAYDQQLKAGDNPYLKYNHADAEFQERLKEDTSFGGNLGRAVFQTKKRLLEPLGLVEEAAKTAPGKKRPVEQSPQEPGSSAGIGKSGAQPAKKRLNFGQTGDTESVPDPQPIGEPPAAPSGVGSLTMASGGGAPVADNNEGADGVGSSSGNWHCDSQWLGDRVITTSTRTWALPTYNNHLYKQISNSTSGGSSNDNAYFGYSTPWGYFDFNRFHCHFSPRDWQRLINNNWGFRPKRLNFKLFNIQVKEVTDNNGVKTIANNLTSTVQVFTDSDYQLPYVLGSAHEGCLPPFPADVFMIPQYGYLTLNDGSQAVGRSSFYCLEYFPSQMLRTGNNFQFSYEFENVPFHSSYAHSQSLDRLMNPLIDQYLHYLSKTINGSGQNQQTLKFSVAGPSNMAVQGRNYIPGPSYRQQRVSTTVTQNNNSEFAWPGASSWALNGRNSLMNPGPAMASHKEGEDRFFPLSGSLIFGKQGTGRDNVDADKVMITNEEEIKTTNPVATESYGQVATNHQSAQAQAQTGWVQNQGILPGMVWQDRDVYLQGPIWAKIPHTDGNFHPSPLMGGFGMKHPPPQILIKNTPVPADPPTAFNKDKLNSFITQYSTGQVSVEIEWELQKENSKRWNPEIQYTSNYYKSNNVEFAVNTEGVYSEPRPIGTRYLTRNL

SEQ ID NO: 711 - protein, 736 aa, Artificial Sequence
  Description of Artificial Sequence: Synthetic polypeptide
MAADGYFPDWLEDNLSEGIREWWALKPGAPQPKANQQHQDNARGLVLPGYKYLGPGNGLDKGEPVNAADAAALEHDKAYDQQLKAGDNPYLKYNHADAEFQERLKEDTSFGGNLGRAVFQAKKRLLEPLGLVEEAAKTAPGKKRPVEQSPQEPDSSAGIGKSGAQPAKKRLNFGQTGDTESVPDPQPIGESPAAPSGVGSLTMASGGGAPVADNNEGADGVGSSSGNWHCDSQWLGDRVITTSTRTWALPTYNNHLYKQISNSTSGGSSNDNAYFGYSTPWGYFDFNRFHCHFSPRDWQRLINNNWGFRPKRLNFKLFNIQVKEVTDNNGVKTIANNLTSTVQVFTDSDYQLPYVLGSAHEGCLPPFPADVFMIPQYGYLTLNDGSQAVGRSSFYCLEYLPSQMLRTGNNFQFSYEFENVPFHSSYAHSQSLDRLMNPLIDQYLHYLSKTINGSGQNQQTLKFSVAGPSNMAVQGRNYIPGPSYRQQRVSTTVTQNNNSEFAWPGASSWALNGRNSLMNPGPAVASHKEGEDRFFPLSGSLIFGKQGTGRDNVDADKVMITNEEEIKTTNPVATESYGQVATNHQSAQAQAQTGWVQNQGILPGMVWQDRDVYLQGPIWAKIPHTDGNFHPSPLMGGFGMKHPPPQILIKNTPVPADPPTAFNKDKLNSFITQYSTGQVSVEIEWELQKENSKRWNPEIQYTSNYYKSNNVEFAVNTEGVYSEPRPIGTRYLTRNL

SEQ ID NO: 712 - protein, 736 aa, Artificial Sequence
  Description of Artificial Sequence: Synthetic polypeptide
MAADGYLPDWLEDNLSEGIREWWALKPGAPQPKANQQHQDNARGLVLPGYKYLGPGNGLDKGEPVNAADAAALEHDKAYDQQLKAGDNPYLKYNHADAEFQERLKEDTSFGGNLGRAVFQAKKRLLEPLGPVEEAAKTAPGKKRPVEQSPQEPDSSAGIGKSGAQPAKKRLNFGQTGDTESVPDPQPIGEPPAAPSGVGSLTMASGGGAPVADNNEGADGVGSSSGNWHCDSQWLGDRVITTSTRTWALPTYNNHLYKQISNSTSGGSSNDNAYFGYSTPWGYFDFNRFHCHFSPRDWQRLINNNWGFRPKRLNFKLFNIQVKEVTDNNGVKTIANNLTSTVQVFTDSDYQLPYVLGSAHEGCLPPFPADVFMIPQYGYLTLNDGSQAVGRSSFYCLEYFPSQMLRTGNNFQFSYEFENVPFHSSYAHSQSLDRLMNPLIDQYLYYLSKTINGSGQNQQTLKFSVAGPSNMAVQGRNYIPGPSYRQQRVSTTVTQNNNSEFAWPGASSWALNGRNSLMNPGPAMASHKEGEDRFFPLSGSLIFGKQGTGRDNVDADKVMITNEEEIKTTNPVATESYGQAATNHQSAQAQAQTGWVQNQGILPGMVWQDRDVYLQGPIWAKIPHTDGNFHPSPLMGGFGMKHPPPQILIKNTPVPADPPTAFNKDKLNSFITQYSTGQVSVEIEWELQKENSKRWNPEIQYTSNYYKSNNVEFAVNTEGVYSEPRPIGTRYLTRNL

SEQ ID NO: 713 - protein, 736 aa, Artificial Sequence
  Description of Artificial Sequence: Synthetic polypeptide
MAADGYLPDWLEDNLSEGIREWWALKPGAPQPKANQQHQDNARGLVLPGYKYLGPGNGLDKGEPVNAADAAALEHDKAYDQQLKAGDNPYLKYNHADAEFQERLKEDTSFGGNLGRAVFQAKKRLLEPLGPVEEAAKTAPGKKRPVEQSPQEPDSSAGIGKSGAQPAKKRLNFGQTGDTESVPDPQPIGEPPAAPSGVGSLTMASGGGAPVADNNEGADGVGSSSGNWHCDSQWLGDRVITTSTRTWALPTYNNHLYKQISNSTSGGSSNDNAYFGYSTPWGYFDFNRFHCHFSPRDWRRLINNNWGFRPKRLNFKLFNIQVKEVTDNNGVKTIANNLTSTVQVFTDSDYQLPYVLGSAHEGCLPPFPADVFMIPQYGYLTLNDGSQAVGRSSFYCLEYFPSQMLRTGNNFQFSYEFENVPFHSSYAHSQSLDRLMNPLIDQYLYYLSKTINGSGQNQQTLKFSVAGPSNMAVQGRNYIPGPSYRQQRVSTTVTQNNNSEFAWPGASSWALNGRNSLMNPGPAMASHKEGEDRFFPLSGSLIFGKQGTGRDNVDADKVMITNEEEIKTTNPVATESYGQVATNHQSAQAQAQTGWVQNQGILPGMVWQDRDVYLQGPIWAKIPHTDGNFHPSPLMGGFGMKHPPPQILIKNTPVPADPPTAFNKDKLNSFITQYSTGQVSVEIEWELQKENSKRWNPEIQYTSNYYKSNNVEFAVNTEGVYSEPRPIGTRYLTRNL

SEQ ID NO: 714 - protein, 736 aa, Artificial Sequence
  Description of Artificial Sequence: Synthetic polypeptide
MAADGYLPDWLEDNLSEGIREWWALKPGAPQPKANQQHQDNARGLVLPGYKYLGPGNGLDKGEPVNAADAAALEHDKAYDQQLKAGDNLYLKYNHADAEFQERLKEDTSFGGNLGRAVFQAKKRLLEPLGLVEEAAKTAPGKKRPVEQSPQEPDSSAGIGKSGAQPAKKRLNFGQTGDTESVPDPQPIGEPPAAPSGVGSLTMASGGGAPVADNNEGADGVGSSSGNWHCDSQWLGDRVITTSTRTWALPTYNNHLYKQISNSTSGGSSNDNAYFGYSTPWGYFDFNRFHCHFSPRDWQRLINNNWGFRPKRLNFKLFNIQVKEVTDNNGVKTIANNLTSTVQVFTDSDYQLPYVLGSAHEGCLPPFPADVFMIPQYGYLTLNDGSQAVGRSSFYCLEYFPSQMLRTGNNFQFSYEFENVPFHSSYAHSQSLDRLMNPLIDQYLHYLSKTINGSGQNQQTLKFSVAGPSNMAVQGRNYIPGPSYRQQRVSTTVTQNNNSEFAWPGASSWALNGRNSLMNPGPAMASHKEGEDRFFPLSGSLIFGKQGTGRDNVDADKVMITNEEEIKTTNPVATESYGQVATNHQSAQAQAQTGWVQNQGILPGMVWQDRDVYLQGPIWAKIPHTDGNFHPSPLMGGFGMKHPPPQILIKNTPVPADPPTAFNKDKLNSFITQYSTGQVSVEIEWELQKENSKRWNPEIQYTSNYYKSNNVEFAVNTEGVYSEPRPIGTRYLTRNL

SEQ ID NO: 715 - protein, 736 aa, Artificial Sequence
  Description of Artificial Sequence: Synthetic polypeptide
MAADGYLPDWLEDNLSEGIREWWALKPGAPQPKANQQHQDNARGLVLPGYKYLGPGNGLDKGEPVNAADAAALEHDKAYDQQLKAGDNPYLKYNHADAEFQERLKEDTSFGGNLGRAVFQAKKRLLEPLGLVEEAAKTAPGKKRPVEQSPQEPDSSAGIGKSGAQPAKKRLNFGQTGDTESVPDPQPIGEPPAAPSGVGSLTMASGGGAPVADNNEGADGVGSSSGNWHCDSQWLGDRVITTSTRTWALPTYNNHLYKQISNSTSGGSSNDNAYFGYSTPWGYFDFNRFHCHFSPRDWQRLINNNWGFRPKRLNFKLFNIQVKEVTDNNGVKTIANNLTSTVQVFTDSDYQLPYVLGSAHEGCLPPFPADVFMIPQYGYLTLNDGSQAVGRSSFYCLEYFPSQMLRTGNNFQFSYEFENVPFHSSYAHSQSLDRLMNPLIDQYLHYLSKTINGSGQNQQTLKFSVAGPSNMAVQGRNYIPGPSYRQQRVSTTVTQNNNSEFAWPGASSWALNGRNSLMNPGPAMASHKEGEDRFFPLSGSLIFGKQGTGRDNVDADKVMITNEEEIKTTNPVATESYGQVATNHQSAQAQAQTGWVQNQGILPGMVWQDRDVYLQGPIWAKIPHTDGNFHPSPLMGGFGMKHPPPQILIKNTPVPADPPTAFNKDKLNSFITQYSTGQVSVEIEWELQKENSKRWNPEIQYTSNYYKSNNVEFAVNTEGVYSEPRPIGTRYLTRNL

SEQ ID NO: 716 - protein, 736 aa, Artificial Sequence
  Description of Artificial Sequence: Synthetic polypeptide
  MOD_RES (442)..(442): Any naturally occurring amino acid
MAADGYLPDWLEDNLSEGIREWWALKPGAPQPKANQQHQDNARGLVLPGYKYLGPGNGLDKGEPVNAADAAALEHDKAYDQQLKAGDNPYLKYNHADAEFQERLKEDTSFGGNLGRAVFQAKKRLLEPLGLVEEAAKTAPGKKRPVEQSPQEPDSSAGIGKSGAQPAKKRLNFGQTGDTESVPDPQPIGEPPAAPSGVGSLTMASGGGAPVADNNEGADGVGSSSGNWHCDSQWLGDRVITTSTRTWALPTYNNHLYKQISTSTSGGSSNDNAYFGYSTPWGYFDFNRFHCHFSPRDWQRLINNNWGFRPKRLNFKLFNIQVKEVTDNNGVKTIANNLTSTVQVFTDSDYQLPYVLGSAHEGCLPPFPADVFMIPQYGYLTLNDGSQAVGRSSFYCLEYFPSQMLRTGNNFQFSYEFENVPFHSSYAHSQSLDRLMNPLIDXYLHYLSKTINGSGQNQQTLKFSVAGPSNMAVQGRNYIPGPSYRQQRVSTTVTQNNNSEFAWPGASSWALNGRNSLMNPGPAMASHKEGEDRFFPLSGSLIFGKQGTGRDNVDADKVMITNEEEIKTTNPVATESYGQVATNHQSAQAQAQTGWVQNQGILPDMVWQDRDVYLQGPIWAKIPHTDGNFHPSPLMGGFGMKHPPPQILIKNTPVPADPPTAFNKDKLNSFITQYSTGQVSVEIEWELQKENSKRWNPEIQYTSNYYKSNNVEFAVNTEGVYSEPRPIGTRYLTRNL

SEQ ID NO: 717 - protein, 736 aa, Artificial Sequence; identical to SEQ ID NO: 697
  Description of Artificial Sequence: Synthetic polypeptide

SEQ ID NO: 718 - protein, 736 aa, Artificial Sequence; identical to SEQ ID NO: 701
  Description of Artificial Sequence: Synthetic polypeptide

SEQ ID NO: 719 - protein, 736 aa, Artificial Sequence
  Description of Artificial Sequence: Synthetic polypeptide
MAADGYLPDWLEDNLSEGIREWWALKPGAPQPRANQQHQDNARGLVLPGYKYLGPGNGLDKGEPVNAADAAALEHDKAYDQQLKAGDNPYLKYNHADAEFQERLKEDTSFGGNLGRAVFQAKKRLLEPLGLVEEAAKTAPGKKRPVEQSPQEPDSSAGIGKSGAQPAKKRLNFGQTGDTESVPDPQPIGEPPAAPSGVGSLTMASGGGAPVADNNEGADGVGSSSGNWHCDSQWLGDRVITTSTRTWALPTYNNHLYKQISNSTSGGSSNDNAYFGYSTPWGYFDFNRFHCHFSPRDWQRLINNNWGFRPKRLNFKLFNIQVKEVTDNNGVKTIANNLTSTVQVFTDSDCQLPYVLGSAHEGCLPPFPADVFMIPQYGYLTLNDGSQAVGRSSFYCLEYFPSQMLRTGNNFQFSYEFENVPFHSSYAHSQSLDRLTNPLIDQYLYYLSKTINGSGQNQQTLKFSVAGPSNMAVQGRNYIPGPSYRQQRVSTTVTQNNNSEFAWPGASSWALNGRNSLMNPGPAMASHKEGEDRFFPLSGSLIFGKQGTGRDNVDADKVMITNEEEIKTTNPVATESHGQVATNHQSAQAQAQTGWVQNQGILPGMVWQDRDVYLQGPIWAKIPHTDGNFHPSPLMGGFGMKHPPPQILIKNTPVPADPPTAFNKDKLNSFITQYSTGQVSVEIEWELQKENSKRWNPEIQYTSNYYKSNNVEFAVNTEGVYSEPRPIGTRYLTRNL

SEQ ID NO: 720 - protein, 736 aa, Artificial Sequence
  Description of Artificial Sequence: Synthetic polypeptide
MAADGYLPDWLEDNLSEGIREWWALKPGAPQPKANQQHQDNARGLVLPGYKYLGPGNGLDKGEPVNAADAAALEHDKAYDQQLKAGDNPYLKYNHADAEFQERLKEDTSFGGNLGRAVFQAKKRLLEPLGLVEEAAKTAPGKKRPVEQSPQEPDSSAGIGKSGAQPAKKRLNFGQTGDTESVPDPQPIGEPPAAPSGVGSLTMASGGGAPVADNNEGADGVGSSSGNWHCDSQWLGDRVITTSTRTWALPTYNNHLYKQISNSTSGGSSNDNAYFGYSTPWGYFDFNRFHCHFSPRDWQRLINNNWGFRPKRLNFKLFNIQVKEVTDNNGVKTIANNLTSTVQVFTDSDYQLPYVLGSAHEGCLPPFPADVFMIPQYGYLTLNDGSQAVGRSSFYCLEYFPSQMLRTGNNFQFSYEFENVPFHSSYAHSQSLDRLMNPPIDQYLYYLSKTINGSGQNQQTLKFSVAGPSNMAVQGRNYIPGPSYRQQRVSTTVTQNNNSEFAWPGASSWALNGRNSLMNPGPAMASHKEGEDRFFPLSGSLIFGKQGTGRDNVDADKVMITNEEEIKTTNPVATESYGQVATNHQSAQAQAQTGWVQNQGILPGMVWQDRDVYLQGPIWAKIPHTDGNFHPSPLMGGFGMKHPPPQILIKNTPVPADPPTAFNKDKLNSFITQYSTGQVSVEIEWELQKENSKRWNPEIQYTSNYYKSNNVEFAVNTEGVYGEPRPIGTRYLTRNL

SEQ ID NO: 721 - protein, 736 aa, Artificial Sequence
  Description of Artificial Sequence: Synthetic polypeptide
MAADGYLPDWLEDNLSEGIREWWALKPGAPQPKANQQHQDNARGLVLPGYKYLGPGNGLDKGEPVNAADAAALEHDKAYDQQLKAGDNPYLKYNHADAEFQERLKEDTSFGGNLGRAVFQAKKRLLEPLGLVEEAAKTAPGKKRPVEQSPQEPDSSAGIGKSGAQPAKKRLNFGQTGDTESVPDPQPIGEPPAAPSGVGSLTMASGGGAPVADNNEGADGVGSSSGNWHCDSQWLGDRVITTSTRTWALPTYNNHLYKQISNSTSGGSSNDNAYFGYSTPWGYFDFNRFHCHFSPRDRQRLINNNWGFRPKRLNFKLFNIQVKEVTDNNGVKTIANNLTSTVQVFTDSDYQLPYVLGSAHEGCLPPFPADVFMIPQYGYLTLNDGSQAVGRSSFYCLEYFPSQMLRTGNNFQFSYEFENVPFHSSYAHSQSLDRLMNPLIDQYLYYLSKTINGSGQNQQTLKFSVAGPSNMAVQGRNYIPGPSYRQQRVSTTVTQNNNSEFAWPGASSWALNGRNSLMNPGPAMASHKEGEDRFFPLSGSLIFGKQGTGRDNVDADKVMITNEEEIKTTNPVATESYGQVATNHQSAQAQAQTGWVQNQGILPGMVWQDRDVYLQGPIWAKIPHTDGNFHPSPLMGGFGMKHPPPQILIKNTPVPADPPTAFNKDKLNSFITQYSTGQVSVEIEWELQKENSKRWNPEIQYTSNYYKSNNVEFAVNTEGVYSEPRPIGTRYLTRNL

SEQ ID NO: 722 - protein, 736 aa, Artificial Sequence
  Description of Artificial Sequence: Synthetic polypeptide
MAADGYLPDWLEDNLSEGIREWWALKPGAPQPKANQQHQDNARGLVLPGYKYLGPGNGLDKGEPVNAADAAALEHDKAYDQQLKAGDNPYLKYNHADAEFQERLKEDTSFGGNLGRAVFQAKKRLLEPLGLVEEAAKTAPGKKRPVEQSPQEPDSSAGIGKSGAQPAKKRLNFGQTGDTESVPDPQPIGEPPAAPSGVGSLTMASGGGAPVADNNEGADGVGSSSGNWHCNSQWLGDRVITTSTRTWALPTYNNHLYKQISNSTSGGSSNDNAYFGYSTPWGYFDFNRFHCHFSPRDWQRLINNNWGFRPKRLNFKLFNIQVKEVTDNNGVKTIANNLTSTVQVFTDSDYQLPYVLGSAHEGCLPPFPADVFMIPQYGYLTLNDGSQAVGRSSFYCLEYFPSQMLRTGNNFQFSYEFENVPFHSSYAHSQSLDRLMNPLIDQYLYYLSKTINGSGQNQQTLKFSVAGPGNMAVQGRNYIPGPSYRQQRVSTTVTQNNNSEFAWPGASSWALNGRNSLMNPGPAMASHKEGEDRFFPLSGSLIFGKQGTGRDNVDADKVMITNEEEIKTTNPVATESYGQVATNHQSAQAQAQTGWVQNQGILPGMVWQDRDVYLQGPIWAKIPHTDGNFHPSPLMGGFGMKHPPPQILIKNTPVPADPPTAFNKDKLNSFITQYSTGQVSVEIEWELQKENSKRWNPEIQYTSNYYKSNNVEFAVNTEGVYSEPRPIGTRYLTRNL

SEQ ID NO: 723 - protein, 736 aa, Artificial Sequence
  Description of Artificial Sequence: Synthetic polypeptide
MAADGYLPDWLEDNLSEGIREWWALKPGAPQPKANQQHQDNARGLVLPGYRYLGPGNGLDKGEPVNAADAAALEHDKAYDQQLKAGDNPYLKYNHADAEFQERLKEDTSFGGNLGRAVFQAKKRLLEPLGLVEEAAKTAPGKKRPVEQSPQEPDSSAGIGKSGAQPAKKRLNFGQTGDTESVPDPQPIGEPPAAPSGVGSLTMASGGGAPVADNNEGADGVGSSSGNWHCDSQWLGDRVITTSTRTWALPTYNNHLYKQISNSTSGGSSNDNAYFGYSTPWGYFDFNRFHCHFSPRDWQRLINNNWGFRPKRLNFKLFNIQVKEVTDNNGVKTVANNLTSTVQVFTDSDYQLPYVLGSAHEGCLPPFPADVFMIPQYGYLTLNDGSQAVGRSSFYCLEYFPSQMLRTGNNFQFSYEFENVPFHSSYAHSQSLDRLMNPLIDQYLYYLSKTINGSGQNQQTLKFSVAGPSNMAVQGRNYIPGPSYRQQRVSTTVTQNNNSEFAWPGASSWALNGRNSLMNPGPAMASHKEGEDRFFPLSGSLIFGKQGTGRDNVDADKVMITNEEEIKTTNPVATESYGQVATNHQSAQAQAQTGWVQNQGILPGMVWQDRDVYLQGPIWAKIPHTDGNFHPSPLMGGFGMKHPPPQILIKNTPVPADPPTAFNKDKLNSFITQYSTGQVSVEIEWELQKENSKRWNPEIQYTSNYYKSNNVEFAVNTEGVYSGPRPIGTRYLTRNL

SEQ ID NO: 724 - protein, 736 aa, Artificial Sequence; identical to SEQ ID NO: 134
  Description of Artificial Sequence: Synthetic polypeptide

SEQ ID NO: 725 - protein, 736 aa, Artificial Sequence
  Description of Artificial Sequence: Synthetic polypeptide
MAADGYLPDWLEDNLSEGIREWWALKPGAPQPKANQQRQDNARGLVLPGYKYLGPGNGLDKGEPVNAADAAALEHDKAYDQQLKAGGNPCLKYNHADAEFQERLKEDTSFGGNLGRAVFQAKKRLLEPLGLVEEAAKTAPGKKRPVEQSPQEPDSSAGIGRSGAQPAKKRLNFGQTGDTESVPDPQPIGEPPAAPSGVGSLTMASGGGAPVADNNEGADGVGSSSGNWHCDSQWLGDRVITTSTRTWALPTYNNHLYKQISNSTSGGSSNDNAYFGYSTPWGYFDFNRFHCHFSPRDWQRLINNNWGFRPKRLNFKLFNIQVKEVTDNNGVKAIANNLTSTVQVFTDSDYQLPYVLGSAHEGCLPPFPADVFMIPQYGYLTLNDGSQAVGRSSFYCLEYFPSQMLRTGNNFQFSYEFENVPFHSSYAHSQSLDRLMNPLIDQYLYYLSKTIDGSGQNQQTLKFSVAGPSNMAVQGRNYIPGPSYRQQRVSTTVTQNNNSEFAWPGASSWALNGRNSLMDPGPAMASHKEGEDRFFPLSGSLIFGKQGTGRDNVDADKVMITNEEEIKTTNPVATESYGQVATNHQSAQAQAQTGWVQNQGILPGMVWQDRDVYLQGPIWAKIPHTGGNFHPSPLMGGFGMKHPPPQILIKNTPVPADPPTAFNKDKLNSFITQYSTGQVSVEIEWELQKENSKRWNPEIQYTSNYYKSNNVEFAVNTEGVYSEPRPIGTRYLTRNL

SEQ ID NO: 726 - protein, 736 aa, Artificial Sequence
  Description of Artificial Sequence: Synthetic polypeptide
MAADGYLPDWLEDNLSEGIREWWALKPGAPQPKANQQHQDNARGLVLPGYKYLGPGNGLDKGEPVNAADAAALEHDKAYDQQLKAGDNPYLKYNHADAEFQERLKEDTSFGGNLGRAVFQAKKRLLEPLGLVEEAAKTAPGKKRPVEQSPQEPDSSAGIGKSGAQPAKKRLNFGQTGDTESVPDPQPIGEPPAAPSGVGSLTMASGGGAPVADNNEGADGVGSSSGNWHCDSQWLGDRVITTSTRTWALPTYNNHLYKQISNSTSGGSSNDNAYFGYSTPWGYFDFNRFHCHFSPRDWQRLINNNWGFRPKRLNFKLFNIQVKEVTDNNGVKTIANNLTSTVQVFTDSDYQLPYVLGSAHEGCLPPFPADVFMIPQYGYLTLNDGSQAVGRSSFYCLEYFPSQMLRTGNNFQFSYEFENVPFHSSYAHSQSLDRLMNPLIDQYLYYLSKTINGSGQNQQTLKFSVAGPSNMAVQGRNYIPGPSYRQQRVSTTVTQNNNSEFAWPGASSWALNGRNSLMNPGPAMASHKEGEDRFFPLSGSLIFGKQGTGRDNVDADKVMITNEEEIKTTNPVATESYGQVATNHQSAQAQAQTGWVQNQGILPGMVWQDRDVYLQGPIWAKIPHTDGNFHPSPLMGGFGMKHPPPQILIKNTPVPADPPTAFNKDKLNSFITQYSTGQVSVEIEWELQKENSKRWNPEIQYTSNYYKPNNVEFAVNTEGVYSEPRPIGTRYLTRNL

SEQ ID NO: 727 - protein, 736 aa, Artificial Sequence
  Description of Artificial Sequence: Synthetic polypeptide
MAADGYLPDWLEDNLSEGIREWWALKPGAPQPKANQQHQDNARGLVLPGYKYLGPGNGLDKGEPVNAADAAALEHNKAYDQQLKAGDNPYLKCNHADAEFQERLKEDTSFGGNLGRAVFQAKKRPLEPLGLVEEAAKTAPGKKRPVEQSPQEPDSSAGIGKSGAQPAKKRLNFGQTGDTESVPDPQPIGEPPAAPSGVRSLTMASGGGAPVADNNEGADGVGSSSGNWHCDSQWLGDRVITTSTRTWALPTYNNHLYKQISNSTSGGSSNDNAYLGYSTPWGYFDFNRFHCHFSPRDWQRLINNNWGFRPKRLNFKLFNIQVKEVTDNNGVKTIANNLTSTVQVFTDSDYQLPYVLGSAHEGCLPPFPADVFMIPQYGYLTLNDGSQAVGRSSFYCLEYFPSQMLRTGNNFQFSYEFENVPFHSSYAHSQSLDRLMNPLIDQYLYYLSKTINGSGQNQQTLKFSVAGPSNMAVQGRNYIPGPSYRQQRVSTTVTQNNNSEFAWPGASSWALNGRNSLMNPGPTMASHKEGEDRFFPLSGSLIFGKQGTGRDNVDADKVMITNEEEIKTTNPVATESYGQVATNHQSAQAQAQTGWVQNQGILPGMVWQDRDVYLQGPIWAKIPHTDGNFHPSPLMGGFGMKHPPPQILIKNTPVPADPPTAFNKDKLNSFITQYSTGQVSVEIEWELQKENSKRWNPEIQYTSNYYKSNNVEFAVNTEGVYSEPRPIGTRYLTRNL

SEQ ID NO: 728 - protein, 736 aa, Artificial Sequence
  Description of Artificial Sequence: Synthetic polypeptide
MAADGYLPDWLEDNLSEGIREWWALKPGAPQPKANQQHQDNARGLVLPGYKYLGPGNGLDKGEPVNAADAAALVHDKAYDQQLKAGDNPYLKCNHADAEFQERLKEDTSFGGNLGRAVFQAKKRLLEPLGLVEEAAKTAPGKKRPVEQSPQEPDSSAGIGKSGAQPAKKRLNFGQTGDTESVPDPQPIGEPPAAPSGVGSLTMASGGGAPVADNNEGADGVGSSSGNWHCDSQWLGDRVITTSTRTWALPTYNNHLYKQISNSTSGGSSNDNAYLGYSTPWGYFDFNRFHCHFSPRDWQRLINNNWGFRPKRLNFKLFNIQVKEVTDNNGVKTIANNLTSTVQVFTDSDYQLPYVLGSAHEGCLPPFPADVFTIPQYGYLTLNDGSQAVGRSSFYCLEYFPSQMLRTGNNFQFSYEFENVPFHSSYAHSQSLDRLMNPLIDQYLYYLSKTINGSGQNQQTLKFSVAGPSNMAVQGRNYIPGPSYRQQRVSTTVTQNNNSEFAWPGASSWALNGRNSLMNPGPAMASHKEGEDRFFPLSGSLIFGKQGTGRDNVDADKVMITNEEEIKTTNPVATESYGQVATNHQSAQAQAQTGWVQNQGILPGMVWQDRDVYLQGPIWAKIPHTDGNFHPSPLMGGFGMKHPPPQILIKNTPVPADPPTAFNKDKLNSFITQYSTGQVSVEIEWELQKENSKRWNPEIQYTSNYYKSNNVEFAVNTEGVYSEPRPIGPRYLTRNF

SEQ ID NO: 729 - protein, 736 aa, Artificial Sequence
  Description of Artificial Sequence: Synthetic polypeptide
MAADGYLPDWLEDNLSEGIREWWALKPGAPQPKANQQHQDNARGLVLPGYKYLGPGNGLDKGEPVNAADAAALEHNKAYDQQLKAGDNPYLKCNHADAEFQERLKEDTSFGGNLGRAVFQAKKRLLEPLGLVEEAAKTAPGKKRPVEQSPQEPDSSAGIGKSGAQPAKKRLNFGQTGDTESVPDPQPIGEPPAAPSGVRSLTMASGGGAPVADNNEGADGVGSSSGNWHCDSQWLGDRVITTSTRTWALPTYNNHLYKQISNSTSGGSSNDNAYLGYSTPWGYFDFNRFHCHFSPRDWQRLINNNWGFRPKRLNFKLFNIQVKEVTDNNGVKTIANNLTSTVQVFTDSDYQLPYVLGSAHEGCLPPFPADVFMIPQYGYLTLNDGSQAVGRSSFYCLEYFPSQMLRTGNNFQFSYEFENVPFHSSYAHSQSLDRLMNPLIDQYLYYLSKTINGSGQNQQTLKFSVAGPSNMAVQGRNYIPGPSYRQQRVSTTVTQNNNSEFAWPGASSWALNGRNSLMNPGPAMASHKEGEDRFFPLSGSLIFGKQGTGRDNVDADKVMITNEEEIKTTNPVATESYGQVATNHQSAQAQAQTGWVQNQGILPGMVWQDRDVYLQGPIWAKIPHTDGNFHPSPLMGGFGMKHPPPQILIKNTPVPADPPTAFNKDKLNSFITQYSTGQVSVEIEWELQKENSKRWNPEIQYTSNYYKSNNVEFAVNTEGVYSEPRPIGTRYLTRNL

SEQ ID NO: 730 - protein, 736 aa, Artificial Sequence
  Description of Artificial Sequence: Synthetic polypeptide
MAADGYLPDWLEDNLSEGIREWWALKPGAPQPKANQQHQDNARGLVLPGYKYLGPGNGLDKGEPVNAADAAALEHDKAYDQQLKAGDNPYLKCNHADAEFQERLKEDTSFGGNLGRAVFQAKKRLLEPLGLVEEAAKTAPGKKRPVEQSPQEPDSSAGIGKSGAQPAKKRLNFGQTGDTESVPDPQPIGEPPAAPSGVGSLTMASGGGAPVADNNEGADGVGSSSGNWHCDSQWLGDRVITTSTRTWALPTYNNHLYKQISNSTSGGSSNDNAYLGYSTPWGYFDFNRFHCHFSPRDWQRLINNNWGFRPKRLNFELFNIQVKEVTDNNGVKTIANNLTSTVQVFTDSDYQLPYVLGSAHEGCLPPFPADVFMIPQYGYLTLNDGSQAVGRSSFYCLEYFPSQMLRTGNNFQSSYEFENVPFHSSYAHSQSLDRLMNPLIDQYLYYLSKTINGSGQNQQTLKFSVAGPSNMAVQGRNYIPGPSYRQQRASTTVTQNNNSEFAWPGASSWALNGRNSLMNPGPAMASHKEGEDRFFPLSGSLIFGKQGTGRDNVDADKVMITNEEEIKTTNPVATESYGQVATNHQSAQAQAQTGWVQNQGILPGMVWQDRDVYLQGPIWAKIPHTDGNFHPSPLMGGFGMKHPPPQILIKNTPVPADPPTAFNKDKLNSFITQYSTGQVSVEIEWELQKENSKRWNPEIQYTSNYYKSNNVEFAVNTEGVYSEPRPIGTRYLTRNL

SEQ ID NO: 731 - protein, 736 aa, Artificial Sequence
  Description of Artificial Sequence: Synthetic polypeptide
MAADGYLPDWLEDNLSEGIREWWALKPGAPQPKANQQHQDNARGLVLPGYKYLGPGNGLDKGEPVNAADAAALEHDKAYDQQLKAGDNPYLKCNHADAEFQERLKEDTSFGGNLGRAVFQAKKRLLEPLGLVEEAAKTAPGKKRPVEQSPQEPDSSAGIGKSGAQPAKKRLNFGQTGDTESVPDPQPIGEPPAAPPGVGSLTMASGGGAPVADNNEGADGVGSSSGNWHCDSQWLGDRVITTSTRTWALPTYNNHLYKQISNSTSGGSSNDNAYLGYSTPWGYFDFNRFHCHFSPRDWQRLINNNWGFRPKRLNFKLFNIQVKEVTDNNGVKTIANNLTSTVQVFTDSDYQLPYVLGSAHEGCLPPFPADVFMIPQYGYLTLNDGSQAVGRSSFYCLEYFPSQMLRTGNNFQFSYEFENVPFHSSYAHSQSLDRLMNPLIDQYLYYLSKTISGSGQNQQTLKFSVAGPSNMAVQGRNYIPGPSYRQQRVSTTVTQNNSSEFAWPGASSWALNGRNSLMNPGPAMASHKEGEDRFFPLSGSLIFGKQGTGRDNVDADKVMITNEEEIKTTNPVATESYGQVATNHQSAQAQAQTGWVQNQGILSGMVWQDRDVYLQGPIWAKIPHTDGNFHPSPLMGGFGMKHPPPQILIKNTPVPADPPTAFNKDKLNSFITQYSTGQVSVEIEWELQKENSKRWNPEIQYTSNYYKSNNVEFAVNTEGVYSEPRPIGTRYLTRNL

SEQ ID NO: 732 - protein, 736 aa, Artificial Sequence
  Description of Artificial Sequence: Synthetic polypeptide
MAADGYLPDWLEDNLSEGIREWWALKPGAPQPKANQQHQDNARGLVLPGYKYLGPGNGLDKGEPVNAADAAALEHDKAYDQQLKAGDNPYLKCNHADAEFQERLKEDTSFGGNLGRAVFQAKKRLLEPLGLVEEAAKTAPGKKRPVEQSPQEPDSSAGIGKSGAQPAKKRLNFGQTGDTESVPDPQPIGEPPAAPSGVGSLTMASGGGAPVADNNEGADGVGSSSGNWHCDSQWLGDRVITTSTRTWALPTYNNHLYKQISNSTSGGSSNDNAYLGYSTPWGYFDFNRFHCHFSPRDWQRLINNNWGFRPKRLNFKLFNIQVKEVTDNNGVKTIANNLTSTVQVFTDSDYQLPYVLGSAHEGCLPPFPADVFMIPQYGYLTLNDGSQAVGRSSFYCLEYFPSQMLRTGNNFQFSYEFENVPFHSSYAHSQSLDRLMNPLIDQYLYYLSKTINGSGQNQQTLKFSVAGPSNMAVQGRNYIPGPSYRQQRVSTTVTQNNNSEFAWPGASSWALNGRNSLMNPGPAMASHKEGEDRFFPLSGSLIFGKQGTGRDNVDADKVMITNEEEIKTTNPVATESYGQVATNHQSAQAQAQTGWVQNQGILPGMVWQDRDVYLQGPIWAKIPHTDGNFHPSPLMGGFGMKHPPPQILIKNTPVPADPPTAFNKDKLNSFITQYSTGQVSVEIEWELQKENSKRWNPEIQYTSNYYKSNNVEFAVNTEGVYSEPRPIGTRYLTRNL

SEQ ID NO: 733 - protein, 736 aa, Artificial Sequence; identical to SEQ ID NO: 732
  Description of Artificial Sequence: Synthetic polypeptide

SEQ ID NO: 734 - protein, 736 aa, Artificial Sequence
  Description of Artificial Sequence: Synthetic polypeptide
MAADGYLPDWLEDNLSEGIREWWALKPGAPQPKANQQHQDNARGLVLPGYKYLGPGNGLDKGEPVNAADAAALEHDKAYDQQLKAGDNPYLKCNHADAEFQERLKEDTSFGGNLGRAVFQAKKRLLEPLGLVEEAAKTAPGKKRPVEQSPQEPDSSAGIGKSGAQPAKKRLNFGQTGDTESVPDPQPIGEPPAAPSGVGSLTMASGGGAPVADNNEGADGVGSSSGNWHCDSQWLGDRVITTSTRTWALPTYNNHLYKQISNSTSGGSSNDNAYLDYSTPWGYFDFNRFHCHFSPRDWQRLINNNWGFRPKRLNFKLFNIQVKEVTDNNGVKTIANNLTSTVQVFTDSDYQLPYVLGSAHEGCLPPFPADVFMIPQYGYLTLNDGSQAVGRSSFYCLEYFPSQMLRTGNNFQFSYEFENVPFHSSYAHSQSLDRLMNPLIDQYLYYLSKTINGSGQNQQTLKFSVAGPSNMAVQGRNYIPGPSYRQQRVSTTVTQNNNSEFAWPGASSWALNGRNSLMNPGPAMASHKEGEDRFFPLSGSLIFGKQGTGRDNVDADKVMITNEEEIKTTNPVATESYGQVATNHQSAQAQAQTGWVQNQGILPGMVWQGRDVYLQGPIWAKIPHTDGNFHPSPLMGGFGMKHPPPQILIKNTPVPADPPTAFNKDKLNSFITQYSTGQVSVEIEWELQKENSKRWNPEIQYTSNYYKSNNVEFAVNTEGVYSEPRPIGTRYLTRNL

SEQ ID NO: 735 - protein, 736 aa, Artificial Sequence; identical to SEQ ID NO: 732
  Description of Artificial Sequence: Synthetic polypeptide

SEQ ID NO: 736 - protein, 736 aa, Artificial Sequence
  Description of Artificial Sequence: Synthetic polypeptide
MAADGYPPDWLEDNLSEGIREWWALKPGAPQPKANQQHQDNARGLVLPGYKYLGPGNGLDKGEPVNAADAAALEHDKAYDQQLKAGDNPHLKYNHADAEFQERLKEDTSFGGNLGRAVFQAKKRLLEPLGLVEEAAKTAPGKKRPVEQSPQEPDSSAGIGKSGAQPAKKRLNFGQTGDTESVPDPQPIGEPPAAPSGVGSLTMASGGGAPVADNNEGADGVGSSSGNWHCDSQWLGDRVITTSTRTWALPTYNNHLYKQISNSTSGGSSNDNAYFGYSTPWGYFDFNRFHCHFSPRDWQRLINNNWGFRPKRLNFKLFNIQVKEVTDNNGVKTIANNLTSTVQVFTDSDYQLPYVLGSAHEGCLPPFPADVFMIPQYGYLTLNDGSQAVGRSSFYCLEYFPSQMLRTGNNFQFSYEFENVPFHSSYAHSQSLDRLMNPLIDQYLYYLSKTINGSGQNQQTLKFSVAGPSNMAVQGRNYIPGPSYRQQRVSTTVTQNNNSEFAWPGASSWALNGRNSLMNPGPAMASHKEGEDRFFPLSGSLIFGKQGTGRDNVDADKVMITNEEEIKTTNPVATESYGQVATNHQSAQAQAQTGWVQNQGILPGMVWQDRDVYLQGPIWAKIPHTDGNFHPSPLMGGFGVKHPPPQILIKNTPVPADPPTAFNKDRLNSFITQYSTGQVSVEIEWELQKENSKRWNPEIQYTSNYYKSNNVEFAVNTEGVYSEPRPIGTRYLTRNL

SEQ ID NO: 737 - protein, 736 aa, Artificial Sequence
  Description of Artificial Sequence: Synthetic polypeptide
MAADGYLPDWLEDNLSEGIREWWALKPGAPQPKANQQHQDNARGLVLPGYKYLGPGNGLDKGEPVNAADAAALEHDKAYDQQLKAGDNPYLKYNHADAEFQERLKEDTSFGGNLGRAVFQAKKRLLEPLGLVEEAAKTAPGKKRPVEQSPQEPDSSAGIGKSGAQPAKKRLNFGQTGDTESVPDPQPIGEPPAAPSGVGSLTMASGGGAPVADNNEGADGVGSSSGNWHCDSQWLGDRVITTSTRTWALPTYNNHLYKQISNSTSGGSSNDNAYFGYSTPWGYFDFNRFHCHFSPRDWQRLINNNWGFRPKRLNFKLFNIQVKEVTDNNGVKTIANNLTSTVQVFTDSDYQLPYVLGSAHEGCLPPFPADVFMIPQYGYLTLNDGSQAVGRSSFYCLEYFPSQMLRTGNNFQFSYEFENVPFHSSYAHSQSLDRLMNPLIDQYLYYLSKTINGSGQNQQTLKFSVAGPSNMAVQGRNYIPGPSYRQQRVSTTVTQNNNSEFAWPGASSWALNGRNSLMNPGPAMASHKEGEDRFFPLSGSLIFGKQGTGRDNVDADKVMITNEEEIKTTNPVATESYGQVATNHQSAQAQAQTGWVQNQGILPGMVWQDRDVYLQGPIWAKIPHTDGNFHPSPLMGGFGVKHPPPQILIKNTPVPADPPTAFNKDKLNSFITQYSTGQVSVEIEWELQKENSKRWNPEIQYTSNYYKSNNVEFAVNTEGVYSEPRPIGTRYLTRNL

SEQ ID NO: 738 - protein, 736 aa, Artificial Sequence
  Description of Artificial Sequence: Synthetic polypeptide
MAADGYLPDWLEDNLSEGIREWWALKPGAPQPKANQQHQDNARGLVLPGYKYLGPGNGLDKGEPVNAADAAALEHDKAYDQQLKAGDNPYLKYNHADAEFQERLKEDTSFGGNLGRAVFQAKKRLLEPLGLVEEAAKTAPGKKRPVEQSPQEPDSSAGIGKSGAQPAKKRLNFGQTGDTESVPDPQPIGEPPAAPSGVGSLTMASGGGAPVADNNEGADGVGSSSGNWHCDSQWLGDRVITTSTRTWALPTYNNHLYKQISNSTSGGSSNDNAYFGYSTPWGYFDFNRFHCHFSPRDWQRLTNNNWGFRPKRLNFKLFNIQVKEVTDNNGVKTIANNLTSTVQVFTDSDYQLPYVLGSAHEGCLPPFPADVFMIPQYGYLTLNDGSQAVGRSSFYCLEYIPSQMLRTGNNFQFSYEFENVPFHSSYAHSQSLDRLMNPLIDQYLYYLSKTINGSGQNQQTLKFSVAGPSNMAVQGRNYIPGPSYRQQRVSTTVTQNNNSEFAWPGASSWALNGRNSLMNPGPAMASHKEGEDRFFPLSGSLIFGKQGTGRDNVDADKVMITNEEEIKTTNPVATESYGQVATNHQSAQAQAQTGWVQNQGILPGMVWQDRDVYLQGPIWAKIPHTDGNFHPSPLMGGFGVKHPPPQILIKNTPVPADPPTAFNKDKLNSFITQYSTGQVSVEIEWELQKENSKRWNPEIQYTSNYYKSNNVEFAVNTEGVYSEPRPIGTRYLTRNL

SEQ ID NO: 739 - protein, 736 aa, Artificial Sequence
  Description of Artificial Sequence: Synthetic polypeptide
MAADGYLPDWLEDNLSEGIREWWALKPGAPQPKANQQHQDNARGLVLPGYKYLGPGNGLDKGEPVNAADAAALEHDKAYDQQLKAGDNPYLKYNHADAEFQERLKEDTSFGGNLGRAVFQAKKRLLEPLGLVEEAAKTAPGKKRPVEQSPQEPDSSAGIGKSGAQPAKKRLNFGQTGDTESVPDPQPIGEPPAAPSGVGSLTMASGGGAPVADNNEGADGVGSSSGNWHCDSQWLGDRVITTSTRTWALPTYNNHLYKQISNSTSGGSSNDNAYFGYSTPWGYFDFNRFHCHFSPRDWQRLINNNWGFRPKRLNFKLFNIQVKEVTDNNGVKTIANNLTSTVQVFTDSDYQLPYVLGSAHEGCLPPFPADVFMIPQYGYLTLNDGSQAVGRSSFYCLEYFPSQMLRTGNNFQFSYEFENVPFHSSYAHSQSLDRLMNPLIDQYLYYLSKTINGSGQNQQTLKFSVAGPSNMAVQGRNYIPGPSYRQQRVSTTVTQNNNSEFAWPGASSWALNGRNSLMNPGPAMASHKEGEDRFFPLSGSLISGKQGTGRDNVDANKVMITNEEEIKTTNPVATESYGQVATNHQSAQAQAQTGWVQNQGILPGMVWQDRDVYLQGPIWAKIPHTDGNFHPSPLMGGFEMKHPPPQILIKNTPVPADPPTAFNKDKLNSFITQYSTGQVSVEIEWELQKENSKRWNPEIQYTSNYYKSNNVEFAVNTEGVYSEPRPIGTRYLTRNL

SEQ ID NO: 740 - protein, 736 aa, Artificial Sequence
  Description of Artificial Sequence: Synthetic polypeptide
MAADGYLPDWLEDNLSEGIREWWALKPGAPQPKANQQHQDNARGLVLPGYKYLGPGNGLDKGEPVNAADAAALEHDKAYDQQLKAGDNPYLKYNHADAEFQERLKEDTSFGGNLGRAVFQAKKRLLEPLGLVEEAAKTAPGKKRPVEQSPQEPDSSAGIGKSGAQPAKKRLNFGQTGDTESVPDPQPIGEPPAAPSGVGSLTIASGGGAPVADNNEGADGVGSSSGNWHCDSQWLGDRVITTSTRTWALPTYNNHLYKRISNSTSGGSSNDNAYFGYSTPWGYFDFNRFHCHFSPRDWQRLINNNWGFRPKRLNFKLFNIRVKEVTDNNGVKTITNNLTSTVQVFTDSDYQLPYVLGSAHEGCLPPFPADVFMIPQYGYLTLNDGSQAVGRSSFYCLEYFPSQMLRTGNNFQFSYEFENVPFHSSYAHSQSLDRLMNPLIDQYLYYLSKTINGSGQNQQTLKFSVAGPSNMAVQGRNYIPGPSYRQQRVSTTVTRNNNSEFAWPGASSWALNGRNSLMNPGPAMASHKEGEDRFFPLSGSLIFGKQGTGRDNVDADKVMITNEEEIKTTNPVATESYGQVATNHQSAQAQAQTGWVQNQGILPGMVWQDRDVYLQGPIWAKIPHTDGNFHPSPLMGGFGVKHPPPQILIKNTPVPADPPTAFNKDKLNSFITQYSTGQVSVEIEWELQKENSKRWNPEIQYTSNYYKSNNVEFAVNTEGVYSEPRPIGTRYLTRNL

SEQ ID NO: 741 - protein, 736 aa, Artificial Sequence
  Description of Artificial Sequence: Synthetic polypeptide
MAADGYLPDWLEDNLSEGIREWWALKPGAPQPKANQQHQDNARGLVLPGYKYLGPGNGLDKGEPVNAADAAALEHDKAYDQQLKAGDNPYLKYNHADAEFQERLKEDTSFGGNLGRAVFQAKKRLLEPLGLVEEAAKTAPGKKRPVEQSPQEPDSSAGIGKSGAQPAKKRLNFGQTGDTEPVPDPQPIGEPPAAPSGVGSLTMASGGGAPVADNNEGADGVGSSSGNWHCDSQWLGDRVITTSTRTWALPTYNNHLYKQISNSTSGGSSNDNAYFGYSTPWGYFDFNRFHCHFSPRDWQRLINNNWGFRPKRLNFKLFNIQVKEVTDNNGVKTIANNLTSTVQVFTDSDYQLPYVLGSAHEGCLPPFPAGVFMIPQYGYLTLNDGSQAVGRSSFYCLEYFPSQMLRTGNNFQFSYEFENVPFHSSYAHSQSLDRLMNPLIDQYLYYLSKTINGSGQNQQTLKFSVAGPSNMAVQGRNYIPGPSYRQQRVSTTATQNNNSEFAWPGASSWALNGRNSLMNPGPAMASHKEGEDRFFPLSGSLIFGKQGTGRDNVDADKVMITNEEEIKTTNPVATESYGQVATNHQSAQAQAQTGWVQNQGILPGMVWQDRDVYLQGPIWAKIPHTDGNFHPSPLMGGFGMKHPPPQILIKNTPVPADPPTAFNKDKLNSFITQYSTGQVSVEIEWELQKENSKRWNPEIQYTSNYYKSNNVEFAVNTEGVYSEPRPIGTRYLTRNL

SEQ ID NO: 742 - protein, 736 aa, Artificial Sequence
  Description of Artificial Sequence: Synthetic polypeptide
MAADGYLPDWLEDNLSEGIREWWALKPGAPQPKANQQHQDNARGLVLPGYKYLGPGNGLDKGEPVNAADAAALEHDKAYDQQLKAGDNPYLKYNHADAGFQERLKEDTSFGGNLGRAVFQAKKRLLEPLGLVEEAAKTAPGKKRPVEQSPQEPDSSAGIGKSGAQPAKKRLNFGQTGDTESVPVPQPIGEPPAAPSGVGSLTMASGGGAPVADNNEGADGVGSSSGNWHCDSQWLGDRVITTSTRTWALPTYNNHLYKQISNSTSGGSSNDNAYFGYSTPWGYFDFNRFHCHFSPRDWQRLINNNWGFRPKRLNFKLFNIQVKEVTDNNGVKTIANNLTSTVQVFTDSDYQLPYVLGSAHEGCLPPFPADVFMIPQYGYLTLNDGSQAVGRSSFYCLEYFPSQMLRTGNNFQFSYEFENVPFHSSYAHSQSLDRLMNPLIDQYLYYLSKTINGSGQNQQTLKFSVAGPSNMAVQGRNYIPGPSYRQQRVSTTVTQNNNSEFAWPGASSWALNGRNSLMNPGPAMASHKEGEDRFFPLSGSLIFGKQGAGRDNVDADKVMITNEEEIKTTNPVATESYGQVATNHQSAQAQAQTGWVQNQGILPGMVWQDRDVYLQGPIWAKIPHTDGNFHPSPLMGGFGMKHPPPQILIKNTPVPADPPTAFNKDKLNSFITQYSTGQVSVEIEWELQKENSKRWNPEIQYTSNYYKSNNVEFAVNTEGVYSEPRPIGTRYLTRNL

SEQ ID NO: 743 - protein, 736 aa, Artificial Sequence
  Description of Artificial Sequence: Synthetic polypeptide
  MOD_RES (126)..(126): Any naturally occurring amino acid
MAADGYLPDWLEDNLSEGIRERWALKPGAPQPKANQQHQDNARGLVLPGYKYLGPGNGLDKGEPVNAADAAALEHDKAYDQQLKAGDNPYLKYNHADAEFQERLKEDTSFGGNLGRAVFQAKKRLXEPLGLVEEAAKTAPGKKRPVEQSPQEPDSSAGIGKSGAQPAKKRLNFGQTGDTESVPDPQPIGEPPAAPSGVGSLTMASGGGAPVADNNEGADGVGSSSGNWHCDSQWLGDRVITTSTRTWALPTYNNHLYKQISNSTSGGSSNDNAYFGYSTPWGYFDFNRFHCHFSPRDWQRLINNNWGFRPKRLNFKLFNIQVKEVTDNNGVKTIANNLTSTVQVFTDSDYQLPYVLGSAHEGCLPPFPADVFMIPQYGYLTLNDGSQAVGRSSFYCLEYFPSQMLRTGNNFQFSYEFENVPFHSSYAHSQSPDRLMNPLIDQYLYYLSKTINGSGQNQQTLKFSVAGPSNMAVQGRNYIPGPSYRQQRVSTTVTQNNNSEFAWPGASSWALNGRNSLMNPGPAMASHKEGEDRFFPLSGSLIFGKQGTGRDNVDADKVMITNEEEIKTTNPVATESYGQVATNHQSAQAQAQTGWVQNQGILPGMVWQDRDVYLQGPIWAKIPHTDGNFHPSPLMGGFGVKHPPPQILIKNTPVPADPPTAFNKDKLNSFITQYSTGQVSVEIEWELQKENSKRWNPEIQYTSNYYKSNNVEFAVNTEGVYSEPRPIGTRYLTRNL

SEQ ID NO: 744 - protein, 736 aa, Artificial Sequence
  Description of Artificial Sequence: Synthetic polypeptide
MAADGYLPDWLEDNLSEGIREWWALKPGAPQPKANQQHQDNARGLVLPGYKYLGPGNGLDKGEPVNAADAAALEHDKAYDQQLKAGDNPYLKYNHADAEFQERLKEDTSFGGNLGRAVFQAKKRLLEPLGLVEEAAKTAPGKKRPVEQSPQEPDSSAGIGKSGAQPAKKRLNFGQTGDTESVPDPQPIGEPPAAPSGVGSLTMASGGGAPVADNNEGADGVGSSSGNWHCDSQWLGDRVITTSTRTWALPTYNNHLYKQISNSTSGGSSNDNAYLGYSTPWGYFDFNRFHCHFSPRDWQRLINNNWGFRPKRLNFKLFNIQVKEVTDNNGVKTIANNLTSTVQVFTDSDYQLPYVLGSAHEGCLPPFPADVFMIPQYGYLTLNDGSQAVGRSSFYCLEYFPSQMLRTGNNFQFSYEFENVPFHSSYAHSQSLDRLMNPLIDQYLYYLSKTINGSGQNQQTLKFSVAGPSNMAVQGRNYIPGPSYRQQRVSTTVTQNNNSEFAWPGASSWALNGRNSLMNPGPAMASHKEGEDRFFPLSGSLIFGKQGTGRDNVDADKVMITNEEEIKTTNPVATESYGQVATNHQSAQAQAQTGWVQNQGILPGMVWQDRDVYLQGPIWAKIPHTDGNFHPSPLMGGFGMKHPPPQILIKNTPVPADPPTAFNKDKLNSFITQYSTGQVSVEIEWELQKENSKRWNPEIQYTSNYYKSNNVEFAVNTEGVYSEPRPIGTRYLTRNL

SEQ ID NO: 745 - protein, 736 aa, Artificial Sequence
  Description of Artificial Sequence: Synthetic polypeptide
MAADGYLPDWLEDNLSEGIREWWALKPGAPQPKANQQHQDNARGLVLPGYKYLGPGNGLDKGEPVNAADAAALEHDKAYDQQLKAGDNPYLKYNHADAEFQERLKEDTSFGGNLGRAVFQAKKRLLEPLGLVEEAAKTAPGKKRPVEQSPQEPDSSAGIGKSGAQPAKKRLNFGQTGDTESVPDPQPIGEPPAAPSGVGSLTMASGGGAPVADNNEGADGVGSSSGNWHCDSQWLGDRVITTSTRTWALPTYNNHLYKQISNSTSGGSSNDNAYFGYSTPWGYFDFNRFHCHFSPRDWQRLINNNWGFRPKRLNFKLFNIQVKEVTDNNGVKTIANNLTSTVQVFTDSDYQLPYVLGSAHEGCLPPFPADVFMIPQYGYLTLNDGSQAVGRSSFYCLEYFPSQMLRTGNNFQFSYEFENVPFHSSYAHSQSLDRLMNPLIDQYLYYLSKTINGSGQNQQTLKFSVAGPSNMAVQGRNYIPGPSYRQQRVSTTVTQNNNSEFAWPGASSWALNGRNSLMNPGPAMASHKEGEDRFFPLSGSLIFGKQGTGRDNVDADKVMITNEEEIKTTNPVATESYGQVATNHQSAQAQAQTGWVQNQGILPGMVWQDRDVYLQGPIWAKIPHTDGNFHPSPLMGGFGMKHPPPQILIKNTPVPADPPTAFNKDKLDSFITQYSTGQVSVEIEWELQKENSKRWNPVIQYTSNYYKSNNVEFAVNTEGVYSEPRPIGTRYLTRNL

SEQ ID NO: 746 - protein, 736 aa, Artificial Sequence
  Description of Artificial Sequence: Synthetic polypeptide
MAADGYLPDWLEDNLSEGIREWWDLKPGAPKPKANQQKQDDGRGLVLPGYKYLGPFNGLDKGEPVNAADAAALEHDKAYDQQLKAGDNPYLRYNHADAEFQERLQEDTSFGGNLGRAVFQAKKRVLEPLGLVEEGAKTAPGKKRPVEQSPQEPDSSSGIGKTGQQPAKKRLNFGQTGDSESVPDPQPLGEPPATPAAVGPTTMASGGGAPMADNNEGVDGVGNASGNWHCDSTWLGDRVITTSTRTWALPTYNNHLYKQISSASTGASNDNHYFGYSTPWGYFDFNRFHCHFSPRDWQRLINNNWGFRPKRLNFKLFNIQVKEVTTNDGVTTIANNLTSTVQVFSDSEYQLPYVLGSAHQGCLPPFPADVFMIPQYGYLTLNNGSQAVGRSSFYCLEYFPSQMLRTGNNFTFSYTFEEVPFHSSYAHSQSLDRLMNPLIDQYLYYLNRTQNQSGSAQNKDLLFSRGSPAGMSVQPKNWLPGPCYRQQRVSKTKTDNNNSNFTWTGASKYNLNGRESIINPGTAMASHKDDEDKFFPMSGVMIFGKESAGASNTALDNVMITDEEEIKATNPVATERFGTVAVNFQSSSTDPATGDVHAMGALPGMVWQDRDVYLQGPIWAKIPHTDGHFHPSPLMGGFGLKNPPPQILIKNTPVPANPPAEFSATKLASFITQYSTGQVSVEIEWELQKENSKRWNPEVQYTSNYAKSANVDFTVDNNGLYTEPRPIGTRYLTRPL

SEQ ID NO: 747 - protein, 736 aa, Artificial Sequence
  Description of Artificial Sequence: Synthetic polypeptide
MAADGYLPDWLEDNLSEGIREWWDLKPGAPKPKANQQKQDDGRGLVLPGYKYLGPFNGLDKGEPVNAADAAALEHDKAYDQQLKAGDNPYLRYNHADAEFQERLQEDTSFGGNLGRAVFQAKKRVLEPLGLVEEGAKTAPGKRRPVEQSPQEPDSSSGIGKTGQQPAKKRLNFGQTGDSESVPDPQPLGEPPATPAAVGPTTMASGGGAPMADNNEGADGVGNASGNWHCDSTWLGDRVITTSTRTWALPTYNNHLYKQISSASTGASNDNHYFGYSTPWGYFDFNRFHCHFSPRDWQRLINNNWGFRPKRLNFKLFNIQVKEVTTNDGVTTIANNLTSTVQVFSDSEYQLPYVLGSAHQGCLPPFPADVFMIPQYGYLTLNNGSQAVGRSSFYCLEYFPSQMLRTGNNFTFSYTFEEVPFHSSYAHSQSLDRLMNPLIDQYLYYLNRTQNQSGSAQNKDLLFSRGSPAGMSVQPKNWLPGPCYRQQRVSKTKTDNNNSNFTWTGASKYNLNGRESIINPGTAMASHKDDEDKFFPMSGVMIFGKESAGASNTALDNVMITDEEEIKATNPVATERFGTVAVNFQSSSTDPATGDVHAMGALPGMVWQDRDVYLQGPIWAKIPHTDGHFHPSPLMGGFGLKNPPPQILIKNTPVPANPPAEFSATKFASFITQYSTGQVSVEIEWELQKENSKRWNPEVQYTSNYAKSANVDFTVDNNGLYTEPRPIGTRYLTRPL

SEQ ID NO: 748 - protein, 736 aa, Artificial Sequence
  Description of Artificial Sequence: Synthetic polypeptide
MAADGYLPDWLEDNLSEGIREWWDLKPGAPKPKANQQKQDDGRGLVLPGYKYLGPFNGLDKGEPVNAADAAALEHDKAYDQQLKAGDNPYPRYNHADAEFQERLQEDTSFGGNLGRAVFQAKKRVLEPLGLVGEGAKTAPGKKRPVEQSPQEPDSSSGIGKTGQQPAKKRLNFGQTGDSESVPDPQPLGEPPATPAAVGPTTMASGGGAPMADNNEGADGVGNASGNWHCDSTWLGDRVITTSTRTWALPTYNNHLYKQISSASTGASNDNHYFGYSTPWGYFDFNRFHCHFSPRDWQRLINNNWGFRPKRLNFKLFNIQVKEVTTNDGVTTIANNLTSTVQVFSDSEYQLPYVLGSAHQGCLPPFPADVFMIPQYGYLTLNNGSQAVGRSSFYCLEYFPSQMLRTGNNFTFSYTFEEVPFHSSYAHSQSLDRLMNPPIDQYLYYLNRTQNQSGSAQNKDLLFSRGSPAGMSVQPKNWLPGPCYRQQRVSKTKTDNNNSNFTWTGASKYNLNGRESIINPGTAMASHKDDEDKFFPMSGVMIFGKESAGASNTALDNVMITDEEEIKATNPVATERFGTVAVNFQSSSTDPATGDVHAMGALPGMVWQDRDVYLQGPIWAKIPHTDGHFHPSPLMGGFGLKNPPPQILIKNTPVPANPPAEFSATKFASFITQYSTGQVSVEIEWELQKENSKRWNPEVQYTSNYAKSANVDFTVDNNGLYTEPRPIGTRYLTRPL

SEQ ID NO: 749 - protein, 736 aa, Artificial Sequence
  Description of Artificial Sequence: Synthetic polypeptide
MAADGYLPDWLEDNLSEGIREWWDLKPGAPKPKANQQKQDDGRGLVLPGYKYLGPFNGLDKGEPVNAADAAALEHDKAYDQQLKAGDNPYLRYNHADAEFQERLQEDTSFGGNLGRAVFQAKKRVLEPLGLVEEGAKTAPGKKRPVEQSPQEPDSSSGIGKTGQQPAKKRLNFGQTGDSESVPDPRPLGEPPATPAAVGPTTMASGGGAPMADNNEGADGVGNASGNWHCDSTWLGDRVITTSTRTWALPTYNNHLYKQISSASTGASNDNHYFGYSTPWGYFDFNRFHCHFSPRDWQRLINNNWGFRPKRLNFKLFNIQVKEVTTNDGVTTIANNLTSTVQVFSDSEYQLPYVLGSAHQGCLPPFPADVFMIPQYGYLTLNNGSQAVGRSSFYCLEYFPSQMLRTGNNFTFSYTFEEVPFHSSYAHSQSLDRLMNPLIDQYLYYLNRTQNQSGSAQNKDLLFSRGPPAGMSVQPKNWLPGPCYRQQRVSKTKTDNNNSNFTWTGASKYNLNGRESIINPGTAMASHKDDEDKFFPMSGVMIFGKESAGASNTALDNVMITDEEEIKATNPVATERFGTVAVNFQSSSTDPATGDVHAMGALPGMVWQDRDVYLQGPIWAKIPHTDGHFHPSPLMGGFGLKNPPPQILIKNTPVPANPPAEFSATKFASFITQYSTGQVSVEIEWELQKENSKRWNPEVQYTSNYAKSANVDFTVDNNGLYTEPRPIGTRYLTRPL

SEQ ID NO: 750 - protein, 736 aa, Artificial Sequence
  Description of Artificial Sequence: Synthetic polypeptide
MAADGYLPDWLEDNLSEGIREWWDLKPGAPKPKANQQKQDDGRGLVLPGYKYLGPFNGLDKGEPVNAADAAALEHDKAYDQQLKAGDNPYLRYNHADAEFQERLQEDTSFGGNLGRAVFQAKKRVLEPLGLVEEGAKTAPGKKRPVEQSPQEPDSSSGIGKTGQQPAKKRLNFGQTGGSESVPDPQPLGEPPATPAAVGPTTMASGGGAPMADNNEGADGVGNASGNWHCDSTWLGDRVITTSTRTWALPTYNNHLYKQISSASTGASNDNHYFGYSTPWGYFDFNRFHCHFSPRDWQRLINNNWGFRPKRLNFKLFNIQVKEVTTNDGVTTIANNLTSTVQVFSDSEYQLPYVLGSAHQGCLPPFPADVFMIPQYGYLTLNNGSQAVGRSSFYCLEYFPSQMLRTGNNFTFSYTFEEVPFHSSYAHSQSLDRLMNPPIDQYLYYLNRTQNQSGSAQNKDLLFSRGSPAGMSVQPKNWLPGPCYRQQRVSKTKTDNNNSNFTWTGASKYNLNGRESIINPGTAMASHKDDEDKFFPMSGVMIFGKESAGASNTALDNVMITDEEEIKATNPVATERFGTVAVNFQSSSTDPATGDVHAMGALPGMVWQDRDVYLQGPIWAKIPHTDGHFHPSPLMGGFGLKNPPPQILIKNTPVPANPPAEFSATKFASFITQYSTGQVSVEIEWELQKENSKRWNPEVQYTSNYAKSANVDFTVDNNGLYTEPRPIGTRYLTRPL

SEQ ID NO: 751 - protein, 736 aa, Artificial Sequence
  Description of Artificial Sequence: Synthetic polypeptide
MAADGYLPDWLEDNLSEGIREWWDLKPGAPKPKANQQKQDDGRGLVLPGYKYLGPFNGLDKGEPVNAADAAALEHDKAYDQQLKAGDNPYLRYNHADAEFQERLQEDTSFGGNLGRAVFQAKKRVLEPLGLVEEGAKTAPGKKRPVEQSPQEPDSSSGIGKTGQQPAKKRLNFGQTGDSESVPDPQPLGEPPATPAAVGPTTMASGGGAPMADNNEGADGVGNASGNWHCDSTWLGDRVITTSTRTWALPTYNNHLYKQISSASTGASNDNHYFGYSTPWGYFDFNRFHCHFSPRDWQRLINNNWGFRPKRLNFKLFNIQVKEVTTNDGVTTIANNLTSTVQVFSDSEYQLPYVLGSAHQGCLPPFPADVFMIPQYGYLTLNNGSQAVGRSSFYCLEYFPSQMLRTGNNFTFSYTFEEVPFHSSYAHSQSLDRLMNPLIDQYLYYLNRTQNQSGSAQNKDLLFSRGSPAGMSVQPKNWLPGPCYRQQRVSKTKTDNNNSNFTWTGASKYNLNGRESIINPGTAVASHKDDEDKFFPMSGVMIFGKESAGASNTALDNVMITDEEEIKATNPVATERFGTVAVNFQSSSTDPATGDVHAMGALPGMVWQDRDVYLQGPIWAKIPHTDGHFHPSPLMGGFGLKNPPPQILIKNTPVPANPPAEFSATKFASFITQYSTGQVSVEIEWELQKENSKRWNPEVQYTSNYAKSANVDFTVDNNGLYTEPRPIGTRYLTRPL

SEQ ID NO: 752 - protein, 736 aa, Artificial Sequence
  Description of Artificial Sequence: Synthetic polypeptide
MAADGYLPDWLEDNLSEGIREWWDLKPGAPKPKANQQKQDDGRGLVLPGYKYLGPFNGLDKGEPVNAADAAALEHDKAYDQQLKAGDNPYLRYNHADAEFQERLQEDTSFGGNLGRAVFQAKKRVLEPLGLVEEGAKTAPGKKRPVEQSPQEPDSSSGIGKTGQQPAKKRLNFGQTGDSESVPDPQPLGEPPATPAAVGPTTMASGGGAPMADNNEGADGVGNASGNWHCDSTWLGDRVITTSTRTWALPTYNNHLYKQISSASTGASNDNHYFGYSTPWGYFDFNRFHCHFSPRDWQQLINNNWGFRPKRLNFKLFNIQVKEVTTNDGVTTIANNLTSTVQVFSDSEYQLPYVLGSAHQGCLPPFPADVFMIPQYGYLTLNNGSQAVGRSSFYCLEYFPSQMLRTGNNFTFSYTFEEVPFHSSYAHSQSLDRLMNPLIDQYLYYLNRTQNQSGSAQNKDLLFSRGSPAGMSVQPKNWLPGPCYRQQRVSKTKTDNNNSNFTWTGASKYNLNGRESIINPGTAMASHKDDEDKFFPMSGVMIFGKESAGASNTALDNVMITDEEEIKATNPVATERFGTVAVNFQSTSTDPATGDVHAMGALPGMVWQDRDVYLQGPIWAKIPHTDGHFHPSPLMGGFGLKNPPPQILIKNTPVPANPPAEFSATKFASFITQYSTGQVSVEIEWELQKENSKRWNPEVQYTSNYAKSADVDFTVDNNGLYTEPRPIGTRYLTRPL

SEQ ID NO: 753 - protein, 736 aa, Artificial Sequence
  Description of Artificial Sequence: Synthetic polypeptide
MAADGYLPDWLEDNLSEGIREWWDLKPGAPKPKANQQKQDDGRGLVLPGYKYLGPFNGLDKGEPVNAADAAALEHDKAYDQQLKAGDNPYLRYNHADAEFQERLQEDTSFGGNLGRAVFQAKKRVLEPLGLVEEGAKTAPGKKRPVEQSPQEPDSSSGIGKTGQQPAKKRLNFGQTGDSESVPDPQPLGEPPATPAAVGPTTMASGGGAPMADNNEGADGVGNASGNWHCDSTWLGDRVITTSTRTWALPTYNNHLYKQISSASTGASNDNHYFGYSTPWGYFDFNRFHCHFSPRDWQRLINNNWGFRPKRLNFKLFNIQVKEVTTNDGVTTIANNLTSTVQVFSDSEYQPPYVLGSAHQGCLPPFPADVFMIPQYGHLTLNNGSQAVGRSSFYCLEYFPSQMLRTGNNFTFSYTFEEVPFHSSYAHSQSLDRLTNPLIDQYLYYLNRTQNQSGSAQNKDLLFSRGSPAGMSVQPKNWLPGPCYRQQRVSKTKTDNNNSNFTWTGASKYNLNGRESIINPGTAMASHKDDEDKFFPMSGVMIFGKESAGASNTALDNVMITDEEEIKATNPVATERFGTVAVNFQSSSTDPATGDVHAMGALPGMVWQDRDVYLQGPIWAKIPHTDGHFHPSPLMGGFGLKNPPPQILIKNTPVPANPPAEFSATKFASFITQYSTGQVSVEIEWELQKENSKRWNPEVQYTSNYAKSANVDFTVDNNGLYTEPRPIGTRYLTRPL

SEQ ID NO: 754 - protein, 736 aa, Artificial Sequence
  Description of Artificial Sequence: Synthetic polypeptide
MAADGYLPDWLEDNLSEGIREWWDLKPGAPKPKANQQEQDDGRGLVLPGYKYLGPFNGLDKGEPVNAADAAALEHDKAYDQQLKAGDNPYLRYNHADAEFQERLQEDTSFGGNLGRAVFQAKKRVLEPLGLVEEGAKTAPGKKRPVEQSPQEPDSSSGIGKTGQQPAKKRLNFGQTGDSESVPDPQPLGEPPATPAAVGPTTMASGGGAPMADNNEGADGVGNASGNWHCDSTWLGDRVITTSTRTWALPTYNNHLYKQISSASTGASNDNHYFGYSTPWGYFDFNRFHCHFSPRDWQRLINNNWGFRPKRLNFKLFNIQVKEVTTNDGVTTIANNLTSTVQVFSDSEYQLPYVLGSAHQGCLPPFPADVFMIPQYGYLTLNNGSQAVGRSSFYCLEYFPSQMLRTGNNFTFSYTFEEVPFHSSYAHSQSLDRLMNPLIDQYLYYLNRTQNQSGSAQNKDLLFSRGSPAGMSVQPKNWLPGPCYRQQRVSKTKTDNNNSNFTWTGASKYNLNGRESIINPGTAMASHKDDEDKFFPMSGVMIFGKESAGASNTALDNVMITDEEEIKATNPVATERFGTVAVNFQSSSTDPATGDVHATGTLPGMVWQDRDVYLQGPIWAKIPHTDGHFHPSPLMGGFGLKNPPPQILIKTTPVPANPPAEFSATKFASFITQYSTGQVSVEIEWELQKENSKRWNPEVQYTSNYAKSANVDFTVDDNGLYTEPRPIGTRYLTRPL

SEQ ID NO: 755 - protein, 736 aa, Artificial Sequence
  Description of Artificial Sequence: Synthetic polypeptide
MAADGYLPDWLEDNLSEGIREWWDLKPGAPKPKANQQKQDDGRGLVLPGYKYLGPFNGLDKGEPVNAADAAALEHDKAYDQQLKAGDNPYLRYNHADAEFQERLQEDTSFGGNLGRAVFQAKKRVLEPLGLVEEGAKTAPGKKRPVEQSLQEPDSSSGIGKTGQQPAKKRLNFGQTGDSESVPDPQPLGEPPATPAAVGPTTMASGGGAPMADNNEGADGVGNASGNWHCDSTWLGDRVITTSTRTWALPTYNNHLYKQISSASTGASNDNHYFGYSTPWGYFDFNRFHCHFSPRDWQRLINNNWGFRPKRLNFKLFNIQVKEVTTNDGVTTIANNLTSTVQVFSDSEYQLPYVLGSAHQGCLPPFPADVFMIPQYGYLTLNNGSQAVGRSSFYCLEYFPSQMLRTGNNFTFSYTFEEVPFHSSYAHSQSLDRLMNPLIDQYLYYLNRTQNQSGSAQNKDLLFSRGSPAGMSVQPKNWLPGPCYRQQRVSKTKTDNDNSNFTWTGASKYNLNGRESIINPGTAMASHKDDEDKFFPMSGVMIFGKESAGASNTALDNVMITDEEEIKATNPVATERFGTVAVNFQSSSTDPATGDVHAMGALPGMVWQDRDVYLQGPIWAKIPHTDGHFHPSPLMGGFGLKNPPPQILIKNTPVPANPPAEFSATKFASFITQYSTGQVSVEIEWELQKENSKRWNPEVQYTSNYAKSANVDFTVDNNGLYTEPRPIGTRYLTRPL

SEQ ID NO: 756 - protein, 736 aa, Artificial Sequence
  Description of Artificial Sequence: Synthetic polypeptide
MAADGYLPDWLEDNLSEGIREWWDLKPGAPKPKANQQKQDDGRGLVLPGYKYLGPFNGLDKGEPVNAADAAALEHDKAYDQQLKAGDNPYLRYNHADAEFQERLQEDTSFGGNLGRAVFQAKKRVLEPLGLVEEGAKTAPGKKRPVEQSPQEPDSSSGIGKTGQQPAKKRLNFGQTGDSESVPDPQPLGEPPATPAAVGPTTMASGGGAPMADNNEGADGVGNASGNWHCDSTWLGDRVITTSTRTWALPTYNNHLYKQISSASTGASNDNHYFGYSTPWGYFDFNRFHCHFSPRDWQRLINNNWGFRPKRLNFKLFNIQVKEVTTNDGVTTIANNLTSTVQVFSDSEYQLPYVLGSAHQGCLPPFPADVFMIPQYGYLTLNNGSQAVGRSSFYCLEYFPSQMLRTGNNFTFSYTFEEAPFHSSYAHSQSLDRLMNPLIDQYLYYLNRTQNQSGSAQNKDLLFSRGSPAGMSVQPKNWLPGPCYRQQRVSKTKTDNNNSNFTWTGASKYNLNGRESIINPGTAMASHKDDEDKFFPMSGVMIFGKESAGASNTALDNVMITDEEEIKATNPVATERFGTVAVNFQSSSTDPATGDVHAMGALPGMVWQDRDVYLQGPIWAKIPHTDGHFHPSPLMGGFGLKNPPPQILIKNTPVPANPPAEFSATKFASFITQYSTGQVSVEIEWELQKENSKRWNPEVQYTSNYAKSANVDFTVDNNGLYTEPRPVGTRYLTRPL

SEQ ID NO: 757 - protein, 736 aa, Artificial Sequence
  Description of Artificial Sequence: Synthetic polypeptide
MAADGYLPDWLEDNLSEGIREWWDLKPGAPKPKANQQKQDDGRGLVLPGYKYLGPFNGLDKGEPVNAADAAALEHDKAYDQQLKAGDNPYLRYNHADAEFQERLQENTSFGGNLGRAVFQAKKRVLEPLGLVEEGAKTAPGKKRPVEQSPQEPDSSSGIGKTGQQPAKKRLNFGQTGDSESVPDPQPLGEPPATPAAVGPTTMASGGGAPMADNNEGADGVGNASGNWHCDSTWLGDRVITTSTRTWALPTYNNHLYKQISSASTGASNDNHYFGYSTPWGYFDFNRFHCHFPPRDWQRLINNNWGFRPKRLNFKLFNIQVKEVTSNDGVTTIANNLTSTVQVFSDSEYQLPYVLGSAHQGCLPPFPADVFMIPQYGYLTLNNGSQAVGRSSFYCLEYFPSQMLRTGNNFTFSYTFEEVPFHSSYAHSQSLDRLMNPLIDQYLYYLNRTQNQSGSAQNKDLLFSRGSPAGMSVQPKNWLPGPCYRQQRVSKTKTDNNNSNFTWTGASKYNLNGRESIINPGTAMASHKDDEDKFFPMSGVMIFGKESAGASNTALDNVMITDEEEIKATNPVATERFGTVAVNFQSSSTDPATGDVHAMGALPGMVWQDRDVYLQGPIWAKIPHTDGHFHPSPLMGGFGLKNPPPQILIKNTPVPANPPAEFSATKFASFITQYSTGQVSVEIEWELQKENSKRWNPEVQYTSNYAKSANVDFTVDNNGLYTEPRPIGTRYLTRPL

SEQ ID NO: 758 - protein, 736 aa, Artificial Sequence
  Description of Artificial Sequence: Synthetic polypeptide
MAADGYLPDWLEDNLSEGIREWWDLKPGAPKPKANQQKQDDGRGLVLPGYKYLGPFNGLDKGEPVNAADAAALEHDKAYDQQLKAGDNPYLRYNHADAEFQERLQEDTSFGGNLGRAVFQAKKRVLEPLGLVEEGAKTAPGKKRPVEQSPQEPDSSSGIGKTGQQPAKKRLNFGQTGDSESVPDPQPLGEPPATPAAVGPTTMASGGGAPMADNNEGADGVGNASGNWHCDSTWLGDRVITTSTRTWALPTYNNHLYKQISSASTGASNDNHYFGYSTPWGYFDFNRFHCHFSPRDWQRLINNNWGFRPKRLNFKLFNIQVKEVTTNDGVTTIANNLTSTVQVFSDSEYQLPYVLGSAHQGCLPPFPADVFMIPQYGYLTLNNGSQAVGRSSFYCLEYFPSQMLRTGNNFTFSYTFEEVPFHSSYAHSQSLDRLMNPLIDQYLYYLNRTQNQSGSAQNKDLLFSRGSPAGTSVQPKNWLPGPCYRQQRVSKTKTDNNNSNFTWTGASKYNLNGRESIINPGTAMASHKDDEDKFFPMSGVMIFGKESAGASNTALDNVMITDEEEIKATNPVATERFGTVAVNFQSSSTDPATGDVHAMGALPGMVWQDRDVYLQGPIWAKIPHTDGHFHPSPLMGGFGLKNPPPQILIKNTPVPANPPAEFSATKFASFITQYSTGQVSVEIEWELQKENSKRWNPEVQYTSNYAKSANVDFTVDNNGLYTGPRPIGTRYLTRPL

SEQ ID NO: 759 - protein, 736 aa, Artificial Sequence
  Description of Artificial Sequence: Synthetic polypeptide
MAADGYLPDWLEDNLSEGIREWWDLKPGAPKPKANQQKQDDGRGLVLPGYKYLGPFNGLDKGEPVNAADAAALEHDKAYDQQLKAGDNPYLRYNHADAEFQERLQEDTSFGGNLGRAVFQAKKRVLEPLGLVEEGAKTAPGKKRPVEQSPQEPDSSSGIGKTGQQPAKKRLNFGQTGDSESVPDPQPLGEPPATPAAVGPTTMASGGGAPMADNNEGADGVGNAPGNWHCDSTWLGDRVITTSTRTWALPTYNNHLYKQISSASTGASNDNHYFGYSTPWGYFDFNRFHCHFSPRDWQRLINNNWGFRPKRLNFKLFNIQVKEVTTNDGVTTIANNLTSTVQVFSDSEYQLPYVLGSAHQGCLPPFPADVFMIPQYGYLTLNNGSQAVGRSSFYCLEYFPSQMLRTGNNFTFSYTFEEVPFHSSYAHSQSLDRLMNPLIDQYLYYLNRTQNQSGSAQNKDLLFSRGSPAGMSVQPKNWLPGPCYRQQRVSKTKTDNNNSNFTWTGASKYNLNGRESIINPGTAMASHKDDEDKFFPMSGVMIFGKESAGASNTALDNVMITGEEEIKATNPVATERFGTVAVNFQSSSTDPATGDVHAMGALPGMVWQDRDVYLQGPIWAKIPHTDGHFHPSPLMGGFGLKNPPPQILIKNTPVPANPPAEFSATKFASFITQYSTGQVSVEIEWELQKENSKRWNPEVQYTSNYAKSANVDFTVDNNGLYTEPRPIGTRYLTRPL

SEQ ID NO: 760 - protein, 736 aa, Artificial Sequence
  Description of Artificial Sequence: Synthetic polypeptide
MAADGYLPDWLEDNLSEGIREWWDLKPGAPKPKANQQKQDDGRGLVLPGYKYLGPFNRLDKGEPVNAADAAALEHDKAYDQQLKAGDNPYLRYNHADAEFQERLQEDTSFGGNLGRAVFQAKKRVLEPLGLVEEGAKTAPGRKRPVEQSPQEPDSSSGIGKTGQQPAKKRLNFGQTGDSESVPDPQPLGEPPATPAAVGPTTMASGGGAPMADNNEGADGVGNASGNWHCDSTWLGDRVITTSTRTWALPTYNNHLYKQISSASTGASNDNHYFGYSTPWGYFDFNRFHCHFSPRDWQRLINNNWGFRPKRLNFKLFNIQVKEVTTNDGVTTIANNLTSTVQVFSDSEYQLPYVLGSAHQGCLPPFPADVFMIPQYGYLTLNNGGQAVGRSSFYCLEYFPSQMLRTGNNFTFSYTFEEVPFHSSYAHSQSLDRLMNPLIDQYLYYLNRTQNQSGSAQNKDLLFSRGSPAGMSVQPKNWLPGPCYRQQRVSKTKTDNNNSNFTWTGASKYSLNGRESIINPGTAMASHKDDEDKFFPMGGVMIFGKESAGASNTALDNAMITDEEEIKATNPVATERFGTVAVNFQSSSTDPATGDVHAMGALPGMVWQDRDVYLQGPIWAKIPHTDGHFHPSPLMGGFGLKNPPPQILIKNTPVPANPPAEFSATKFASFITQYSTGQVSVEIEWELQKENSKRWNPEVQYTSNYAKSANVDFTVDNNGLYTEPRPIGTRYLTRPL

SEQ ID NO: 761 - protein, 736 aa, Artificial Sequence
  Description of Artificial Sequence: Synthetic polypeptide
MAADGYLPDWLEDNLSEGIREWWDLKPGAPKPKANQQKQDDGRGLVLPGYKYLGPFNGLDKGEPVNAADAAALEHDKAYDQQLKAGDNPYLRYNHADAEFQERLQEDTSFGGNLGRAVFQAKKRVLEPLGLVEEGAKTAPGKKRPVEQSPQEPDSSSGIGKTGQQPAKKRLNFGQTGDSESVPDPQPLGEPPATPAAVGPTTMASGGGAPMADNNEGADGVGNASGNWHCDSTWLGGRVITTSTRTWALPTYNNHLYKQISSASTGASNDNHYFGYSTPWGYFDFNRFHCHFSPRDWQRLINNNWGFRPKRLNFKLFNIQVKEVTTNDGVTTIANNLTSTVQVFSDSEYQLPYVLGSAHQGCLPPFPADVFMIPQYGYLTLNNGSQAVGRSSFYCLEYFPSQMLRTGNNSTFSYTFEEVPFHSSYAHSQSLDRLMNPLIDQYLYYLNRTQNQSGSAQNKDLLFSRGSPAGMSVQPKNWLPGPCYRQQRVSKTKTDNNNSNFTWTGASKYNLNGRESIINPGTAMASHKDDEDKFFPMSGVMIFGKESAGASNTALDNVMITDEEEIKATNPVATERFGTVAVNFQSSSTDPATGDVHAMGTLPGMVWQDRDVYLQGPIWAKIPHTDGHFHPSPLMGGFGLKNPPPQILIKNTPVPANPPAEFSATKFASFITQYSTGQVSVEIEWELQKENSKRWNPEVQYTSNYAKSANVDFTVDNNGLYTEPRPIGTRYLTRPL

SEQ ID NO: 762 - protein, 736 aa, Artificial Sequence
  Description of Artificial Sequence: Synthetic polypeptide
MAADGYLPDWLEDNLSEGIREWWDLKPGAPKPKANQQKQDDGRGLVLPGYKYLGPFNGLDKGEPVSAADAAALEHDKAYDQQLKAGDNPYLRYNHADAEFQERLQEDTSFGGNLGRAVFQAKKRVLEPLGLVEEGAKTAPGKKRPVEQSPQEPDSSSGIGKTGQQPAKERLNFGQTGDSESVPDPQPLGEPPATPAAVGPTTMASGGGAPMADNNEGADGVGNASGNWHCDSTWLGDRVITTSTRTWALPTYNNHLYKQISSASTGASNDNHYFGYSTPWGYFDFNRFHCHFSPRDWQRLINNNWGFRPKRLNFKLFNIQVKEVTTNDGVTTIANNLTSTVQVFSDSEYQLPYVLGSAHQGCLPPFPADVFMIPQYGYLTLNNGSQAVGRSSFYCLEYFPSQMLRTGNNFTFSYTFEEVPFHSSYAHSQSLDRLMNPLIDQYLYYLNRTQNQSGSAQNKDLLFSRGSPAGMSVQPKNWLPGPCYRQQRVSKTKTDNNNSNFTWTGASKYNLNGRESIINPGTAMASHKDDEDKFFPMSGVMIFGKESAGASNTALDNVMITDEEEIKATNPVATERFGTVAVNFQSSSTDPATGDVHAMGALPGMVWQDRDVYLQGPIWAKIPHTDGHFHPSPLMGGFGLKNPPPQILIKNTPVPANPPAEFSATKFASFITQYSTGQVSVEIEWELQKENSKRWNPEVQYTSNYAKSANVDFTVDNNGLYTEPRPIGTRYLTRPL

SEQ ID NO: 763 - protein, 736 aa, Artificial Sequence
  Description of Artificial Sequence: Synthetic polypeptide
MAADGYLPDWLEDNLSEGIREWWDLKPGAPKPKANQQKQDDGRGLVLPGYKYLGPFNGLDKGEPVNAADAAALEHDKAYDQQLKAGDNPYLRYNHADAEFQERLQEDTSFGGNLGRAVFQAKKRVLEPLGLVEEGAKTAPGKKRPVEQSPQEPDSSSGIGKTGQQPAKKRLNFGQTGDSESVPDPQPLGEPPATPAAVGPTTMASGGGAPMADNNEGADGVGNASGNWHCDSTWLGDRVITTSTRTWALPTYNNHLYKQISSASTGASNDNHYFGYSTPWGYFDFNRFHCHFSPRDWQRLINNNWGFRPKRLNFKLFNIQVKEVTTNDGVTTIANNLTSTVQVFSDSEYQLPYVLGSAHQGCLPPFPADVFMIPQYGYLTLNNGSQAVGRSSFYCLEYFPSQMLRTGNNFTFSYTFEEVPFHSSYAHSQSLDRLMNPLIDQYLYYLNRTQNQSGSAQNKDLLFSRGSPAGMSVQPKNWLPGPCYRQQRVSKTKTDNNNSNFTWTGASKYNLNGRESIINPGTAMASHKDDEDKFFPMSGVMIFGKESAGASNTALDNVMITDEGEIKATNPVATERFGTVAVNFQSSSTDPATGDVHAMGALPGMVWQDRDVYLQGPIWAKIPHTDGHFHPSPLMGGFGLKNPPPQILIKNTPVPANPPAEFSATKFASFITQYSTGQVSVEIEWELQKENSKRWNPEVQYTSNYAKSANVDFTVDNNGLYTEPRPIGTRYLTRPL

SEQ ID NO: 764 - protein, 736 aa, Artificial Sequence
  Description of Artificial Sequence: Synthetic polypeptide
MAADGYLPDWLEDNLSEGIREWWDLKPGAPKPKANQQKQDDGRGLVLPGYKYLGPFNGLDKGEPVNAADAAALEHDKAYDQQLKAGDNPYLRYNHADAEFQERLQEDTSFGGNLGRAVFQAKKRVLEPFGLVEEGAKTAPGKKRPVEQSPQEPDSSSGIGKTGQQPAKKRLNFGQTGDSESVPDPQPLGEPPATPAAVGPTTMASGGGAPMADNNEGADGVGNASGNWHCDSTWLGDRVITTSTRTWALPTYNNHLYKQISSASTGASNDNHYFGYSTPWGYFDFNRFHCHFSPRDWQRLINNNWGFRPKRLNFKLFNIQVKEVTTNDGVTTIANNLTSTVQVFSDSEYQLPYVLGSAHQGCLPPFPADVFMIPQYGYLTLNNGSQAVGRSSFYCPEYFPSQMLRTGNNFTFSYTFEEVPFHSSYAHSQSLDRLMNPLIDQYLYYLNRTQNQSGSAQNKDLLFSRGSPAGMSVQPKNWLPGPCYRQQRVSKTKTDNNNSNFTWTGASKYNLNGRESIINPGTAMASHKDDKDKFFPMSGVMIFGKESAGASNTALDNVMITDEEEIKATNPVATERFGTVAVNFQSSNTDPATGDVHVMGALPGMVWQDRDVYLQGPIWAKIPHTDGHFHPSPLMGGFGLKHPPPQILIKNTPVPANPPAEFSATKFASFITQYSTGQVSVEIEWELQKENSKRWNPEVQYTSNYAKSANVDFTVDNNGLYTEPRPIGTRYLTRPL

SEQ ID NO: 765 - protein, 736 aa, Artificial Sequence
  Description of Artificial Sequence: Synthetic polypeptide
MAADGYLPDWLEDNLSEGIREWWDLKPGAPKPKANQQKQDDGRGLVLPGYKYLGPFNGLDKGEPVNAADAAALEHDKAYDQQLKAGDNPYLRYNHADAEFQERLQEDTSFGGNLGRAVFQAKKRVLEPFGLVEEGAKTAPGKKRPVEQSPQEPDSSSGIGKTGQQPAKKRLNFGQTGDSESVPDPQPLGEPPATPAAVGPTTMASGGGAPMADNNEGADGVGNASGNWHCDSTWLGDRVITTSTRTWALPTYNNHLYKQISSASTGASNDNHYFGYSTPWGYFDFNRFHCHFSPRDWQRLINNNWGFRPKRLNFKLFNIQVKEVTTNDGVTTIANNLTSTVQVFSDSEYQLPYVLGSAHQGCLPPFPADVFMIPQYGYLTLNNGSQAVGRSSFYCLEYFPSQMLRTGNNFTFSYTFEEVPFHSSYAHSQSLDRLMNPLIDQYLYYLNRTQNQSGSAQNKDLLFSRGSPAGMSVQPKNWLPGPCYRQQRVSKTKTDNNNSNFTWTGASKYNLNGRESIINPGTAMASHKDDKDKFFPMSGVMIFGKESAGASNTALDNVMITDEEEIKATNPVATERFGTVAVNFQSSDTDPATGDVHVMGALPGMVWQDRDVYLQGPIWAKIPHTDGHFHPSPLMGGFGLKHPPPQILIKNTPVPANPPAEFSATKFASFITQYSTGQVSVEIEWELQKENSKRWNPEVQYTSNYAKSANVDFTVDNNGLYTEPRPIGTRYLTRPL

SEQ ID NO: 766 - protein, 736 aa, Artificial Sequence
  Description of Artificial Sequence: Synthetic polypeptide
MAADGYLPDWLEDNLSEGIREWWDLKPGAPKPKANQQKQGDGRGLVLPGYKYLGPFNGLDKGEPVNAADAAALEHDKAYDQQLKAGDNPYLRYNHADAEFQERLQEDTSFGGNLGRAVFQAKKRVLEPFGLVEEGAKTAPGKKRPVEQSPQEPDSSSGIGKTGQQPAKKRLNFGQTGDSESVPDPQPLGEPPATPAAVGPTTMASGGGAPMADNNEGADGVGNASGNWHCDSTWLGDRVITTNTRTWALPTYNNHLYKQISSASTGASNDNHYFGYSTPWGYFDFNRFHCHFSPRDWQRLINNNWGFRPKRLNFKLFNIQVKEVTTNDGVTTIANNLTSTVQVFSDSEYQLPYVLGSAHQGCLPPFPADVFMIPQYGYLTLNNGSQAVGRSSFYCLEYFPSQMLRTGNNFTFSYTFEEVPFHSSYGHSQSLDRLMNLLIDQYLYYLNRTQNQSGSAQNKDLLFSRGSPAGMFVQPKNWLPGPCYRQQRVSKTKTDNNNSNFTWTGASKYNLNGRESIINPGTAMASHKDDEDKFFPMSGVMIFGKESAGASNTALDNVMITDEEEIKATNPVATERFGTVAVNFQSSSTDPATGDVHVMGALPGMVWQDRDVYLQGPIWAKIPHTDGHFHPSPLMGGFGLKHPPPQILIKNTPVPANPPAEFSATKFASFITQYSTGQVSVEIEWELQKENSKRWNPEVQYTSNYAKSANVDFTVDNNGLYTEPRPIGTRYLTRPL

SEQ ID NO: 767 - protein, 736 aa, Artificial Sequence
  Description of Artificial Sequence: Synthetic polypeptide
MAADGYLPDWLEDNLSEGIREWWDLKPGAPKPKANQQKQDDGRGLVLPGYKYLGPFNGLDKGEPVNAADAAALEHDKAYDQQLKAGDNPYLRYNHADAEFQERLQEDTSFGGNLGRAVFQAKKRVLEPFGLVEEGAKTAPGKKRPVEQSPQEPDSSSGIGKTGQQPAKKRLNFGQTGDSESVPDPQPLGEPPATPAAVGPTTMASGGGAPMADNNEGADGVGNASGNWHCDSTWLGDRVITTNTRTWALPTYNNHLYKQISSASTGASNDNHYFGYSTPWGYFDFNRFHCHFSPRDWQRLINNNWGFRPKRLNFKLFNIQVKEVTTNDGVTTIANNLTSTVQVFSDSEYQLPYVLGSAHQGCLPPFPADVFMIPQYGYLMLNNGSQAVGRSSFYCLEYFPSQMLRTGNNFTFSYTFEEVPFHSSYAHSQSLDRLMNPLIDQYLYYLNRTQNQSGSAQNKDLLFSRGSPAGMSVQPKNWLPGPCYRQQRVSKTKTDNNNSNFTWTGASKYNLNGRESIINPGTAMASHKDDEDKFFPMSGVMIFGKESAGASNTALDNVMITDEEEIKATNPAATERFGTVAVNFQSSSTDPATGDVHVMGALPGMVWQDRDVYLQGPIWAKIPHTDGHFHPSPLMGGFGLKHPPPQILIKNTPVPANPPAEFSATKFASFITQYSTGQVSVEIEWELQKENSKRWNPEVQYTSNYAKSANVDFTVDNNGLYTEPRPIGTRYLTRPL

SEQ ID NO: 768 - protein, 736 aa, Artificial Sequence
  Description of Artificial Sequence: Synthetic polypeptide
MAADGYLPDWLEDNLSEGIREWWDLKPGAPKPKANQQKQDDGRGLVLPGYKYLGPFNGLDKGEPVNAADAAALEHDKAYDQQLKAGDNPYLRYNHADAEFQERLQEDTSFGGNLGRAVFQAKKRVLEPFGLVEEGAKTAPGKKRPVEQSPQEPDSSSGIGKTGQQPAKKRLNFGQTGDSESVPDPQPLGEPPATPAAVGPTTMASGGGAPMADNNEGADGVGNASGNWHCDSTWLGDRVITTSTRTWALPTYNNHLYKQISSASTGASNDNHYFGYSTPWGYFDFNRFHCHFSPRDWQRLINNNWGFRPKRLNFKLFNIQVKEVTTNDGVTTIANNLTSTVQVFSDSEYQLPYVLGSAHQGCLPPFPADVFMIPQYGYLTLNNGSQAVGRSSFYCLEYFPSQMLRTGNNFTFSYTFEEVPFHSSYAHSQSLDRLMNPLIDQYLYYLNRTQNQSGSAQNKDLLFSRGSPAGMSVQPKNWLPGPCYRQQRVSKTKTDNNNSNFTWTGASKYNLNGRESIINPGTAMASHKDDEDKFFPMSGVMIFGKESAGASNTALDNVMITDEEEIKATNPVATERFGTVAVNFQSSSTDPATGDVHVMGALPGMVWQDRDVYLQGPIWAKIPHTDGHFHPSPLMGGFGLKHPPPQILIKNTPVPANPPAEFSATKFASFITQYSTGQVSVEIEWELQKENSKRWNPEVQYTSNYAKSANVDFTVDNNGLYTEPRPIGTRYLTRPL

SEQ ID NO: 769 - protein, 736 aa, Artificial Sequence
  Description of Artificial Sequence: Synthetic polypeptide
  MOD_RES (102)..(102): Any amino acid
MAADGYLPDWLEDNLSEGIREWWDLKPGAPKPKANQQKQDDGRGLVLPGYKYLGPFNGLDKGEPVNAADAAALEHDKAYDQQLKAGDNPYLRYNHADAEFQXRLQEDTSFGGNLGRAVFQAKKRVLEPFGLVEEGAKTAPGKKRPVEQSPQEPDSSSGIGKTGQQPAKKRLNFGQTGDSESVPDPQPLGEPPATPAAVGPTTMASGGGAPMADNNEGADGVGNASGNWHCDSTWLGGRVITTSTRTWALPTYNNHLYKQISSASTGASNDNHYFGHSTPWGYFDFNRFHCHFSPRDWQRLINNNWGFRPKRLNFKLFNIQVKEVTTNDGVTTIANNLTSTVQVFSDSEYQLPYVLGSAHQGCLPPSPADVFMIPQYGYLTLNNGSQAVGRSSFYCLEYFPSQMLRTGNNFTFSYTFEEVPFHSSYAHSQSLDRLMNPLIDQYLYYLNRTQNQSGSAQNKDLLFSRGSPAGMSVQPKNWLPGPCYRQQRVSKTKTDNNNSNFTWTGASKYNLNGRESIINPGTAMASHKDDKDKFFPMSGVMIFGKESAGASNTALDNVMITDEEEIKATNPVATERFGTVAVNFQSSNTDPATGDVHVMGALPGMVWQDRDVYLQGPIWAKIPHTDGHFHPSPLMGGFGLKHPPPQILIKNTPVPANPPAEFSATKFASFITQYSTGQVSVEIEWELQKENSKRWNPEVQYTSNYAKSANVDFTVDNNGLYTEPRPIGTRYLTRPL

SEQ ID NO: 770 - protein, 736 aa, Artificial Sequence
  Description of Artificial Sequence: Synthetic polypeptide
MAADGYFPDWLEDNLSEGIREWWDLKPGAPKPKANQQKQDDGRGLVLPGYKYLGPFNGLDKGEPVNAADAAALEHDKAYDQQLKAGDNPYLRYNHADAEFQERLQEDTSFGGNLGRAVFQAKKRVLEPFGLVEEGAKTAPGKKRPVEQSPQEPDSSSGIGRTGQQPAKKRLNFGQTGDSESVPDPQPLGEPPATPAAVGPTTMASGGGAPMADNNEGADGVGNASGNWHCDSTWLGDRVITTSTRTWALPTYNNHLYKQISSASTGASNDNHYFGYSTPWGYFDFNRFHCHFSPRDWQRLINNNWGFRPKRLNFKLFNIQVKEVTTNDGVTTIANNLTSTVQVFSDSEYQLPYVLGSAHQGCLPPFPADVFMIPQYGYLTLNNGSQAVGRSSFYCLEYFPSQMLRTGNNFTFSYTFEEVPFHSSYAHSQSLDRLMNPLIDQYLYYLNRTQNQSGSAQNKDLLFSRGSPAGMSVQPKNWLPGPCYRQQRVSKTKTDNNNSNFTWTGASKYNLNGRESIINPGTAMASHKDDEDKFFPMSGVMIFGKESAGASNTALDNVMITDEEEIKATNPVATERFGTVAVNFQSSSPDPATGDVHVMGALPGMVWQDRDVYLQGPIWAKIPHTDGHFHPSPLMGGFGLKHPPPQILIKNTPVPANPPAEFSATKFASFITQYSTGQVSVEIEWELQKENSKRWNPEVQYTSNYAKSANVDFTVDNNGLYSEPRPIGTRYLTRPL

SEQ ID NO: 771 - protein, 736 aa, Artificial Sequence
  Description of Artificial Sequence: Synthetic polypeptide
MAADGYLPDWLEDNLSEGIREWWDLKPGAPKPKANQQKQDDGRGLVLPGYKYLGPFNGLDKGEPVNAADAAALEHDKAYDQQLKAGDNPYLRYNHADAEFQERLQEDTSFGGNLGRAVFQAKKRVLEPFGLVEEGAKTAPGKKRPVEQSPQEPDSSSGIGKTGQQPAKKRLNFGQTGDSESVPDPQPLGEPPATPAAVGPTTMASGGGAPMADNNEGADGVGNASGNWHCDSTWLGDRVITTSTRTWALPTYNNHLYKQTSSASTGASNDNHYFGYSTPWGYFDFNRFHCHFSPRDWQRLINNNWGFRPKRLNFKLFNIQVKEVTTNDGVTTIANNLTSTVQVFSDSEYQLPYVLGSAHQGCLPPFPADVFMIPQYGYLTLNNGSQAVGRSSFYCLEYFPSQMLRTGNNFTFSYTFEEVPFHSSYAHSQSLDRLMNPLIDQYLYYLNRTQNQSGSAQNKDLLFSRGSPAGMSVQPKNWLPGPCYRQQRVSKTKTDYNNSNFTWTGASKYNLNGRESIINPGTAMASHKDDEDKFFPMSGVMIFGKESAGASNTALDNVMITDEEEIKATNPVATERFGTVAVNFQSSSTDPATGDVHVMGALPGMVWQDRDVYLQGPIWAKIPHTDGHFHPSPLMGGFGLKHPPPQILIKNTPVPANPPAEFSATKFASFITQYSTGQVSVEIEWELQKENSKRWNPEVQYTSNYAKSANVDFTVDNNGLYTEPRPIGTRYLTRPL

SEQ ID NO: 772 - protein, 736 aa, Artificial Sequence
  Description of Artificial Sequence: Synthetic polypeptide
MAADGYPPDWLEDNLSEGIREWWDLKPGVPKPKANQQKQDDGRGLVLPGYKYLGPFNGLDKGEPVNAADAAALEHDKAYDQQLKAGDNPYLRYNHADAEFQERLQEDTSFGGNLGRAVFQAKKRVLEPFGLVEEGAKTAPGKKRPVEQSPQEPDSSSGIGKTGQQPAKKRLNFGQTGDSESVPDPQPLGEPPATPAAVGPTTMASGGGAPMADNNEGADGVGNASGNWHCDSTWLGDRVITTSTRTWALPTYNNHLYKQISSASTGASNDNHYFGYSTPWGYFDFNRFHCHFSPRDWQRLINNNWGFRPKRLNFKLFNIQVKEVTTNDGVTTIANNLTSTVQVFSDSEYQLPYVLGSAHQGCLPPFPADVFMIPQYGYLTLNNGSQAVGRSSFYCLEYFPSQMLRTGNNFTFSYTFEEVPFHSSYAHSQSLDRLMNPLIDQYLYYLNRTQNQSGSAQNKDLLFSRGSPAGMSVQPKNWLPGPCYRQQRVSKTKTDNNNSNFTWTGASKYNLNGRESIINPGTAMASHKDDEDKFFPMSGVMIFGKESAGASNTALDNVMITDEEEIKATNPVATERFGTVAVNFQSSSTDPATGDVHVMGALPGMVWQDRDVYLQGPIWAKIPHTDGHFHPSPLMGGFGLKHPPPQILIKNTPVPANPPAEFSATKFASFITQYSTGQVSVEIEWELQKENSKRWNPEVQYTSNYAKSANVDFTVDNNGLYTEPRPIGTRYLTRPL

SEQ ID NO: 773 - protein, 732 aa, Artificial Sequence
  Description of Artificial Sequence: Synthetic polypeptide
MAADGYLPDWLEDNLSEGIREWWDLKPGAPKPKANQQKQDDGRGLVLPGYKYLGPFNGLDKGEPVNAADAAALEHDKAYDQQLKAGDNPYLRYNHADAEFQERLQEDTSFGGNLGRAVFQAKKRVLEPFGLVEEGAKTAPGKKRPVEQSPQEPDSSSGIGKTGQQPAKKRLNFGQTGDSESVPDPQPLGEPPATPAAVGPTTMASGGGAPMADNNEGADGVGNASGNWHCDSTWLGDRVITTSTRTWALPTYNNHLYKQISSASTGASNDNHYFGYSTPWGYFDFNRFHCHFSPRDWQRLINNNWGFRPKRLNFKLFNIQVKEVTTNDGVTTIANNLTSTVQAFSDSEYQLPYVLGSAHQGCLPPFPADVFMIPQYGYLTLNNGSQAVGRSSFYCLEYFPSQMLRTGNNFTFSYTFEEVPFHSSYAHSQSLDRLMNPLIDPYLYYLNRTQNQSGSAQNKDLLFSRGSPAGMSVQPKNWLPGPCYRQQRVSKTKTDNNNSNFTWTGASKYNLNGRESIINPGTAMASHKDDEDKFFPMSGVMIFGKESAGASNTALDNVMITDEEEIKATNPVATERFGTVAVNFQSSSTDPATGDVHVMGALPGMVWQDRDVYLQGPIWAKIPHTDGHFHPSPLMGGFGLKHPPPQILIKNTPVPANPPAEFSATKFASFITQYSTGQVSVEIEWELQKENSKRWNPEVQYTSNYAKSANVDFTVDNNGLYTEPRPIGTRYL

SEQ ID NO: 774 - protein, 736 aa, Artificial Sequence
  Description of Artificial Sequence: Synthetic polypeptide
MAADGYLPDWLEDNLSEGIREWWDLKPGAPKPKANQQKQDDGRGLVLPGYKYLGPFNGLDKGEPVNAADAAALEHDKAYDQQLKAGDNPYLRYNHADAEFQERLQEDTSFGGNLGRAVFQAKKRVLEPFGLVEEGAKTAPGKKRPVEQSPQEPDSSSGIGKTGQQPAKKRLNFGQTGDSESVPDPQPLGEPPATPAAVGPTTMASGGGAPMADNNEGADGVGNASGNWHCDSTWLGDRVITTSTRTWALPTYNNHLYKQISSASTGASNDNHYFGYSTPWGYFDFNRFHCHFSPRDWQRLINNNWGFRPKRLNFKLFNIQVKEVTTNDGVTTIANNLTSTVQVFSDSEYQLPYVLGSAHQGCLPPFPADVFMIPQYGYLTLNNGSQAVGRSSFYCLEYFPSQMLRTGNNFTFSYTFEEVPFHSSYAHSQSLDRLMNPLIDQYLYYLNRTQNQSGSAQNKDLLFSRGSPAGMSVQPKNWLPGPCYRQQRVSKTKTDNNNSNFTWTGASKYNLNGRESIINPGTAMASHKDDEDKFFPMSGVMIFGKESAGASNTALDNVMITDEEEIKATNPVATERFGTVAVNFQSSSTDPATGDVHVMGALPGMVWQDRDVYLQGPIWAKIPHTDGHSHPSPLMGGFGLKHPPPQILIKNTPVPANPPAEFSATKFASFITQYSTGQVSVEIEWELQKENSKRWNPEVQYTSNYAKSANVDFTVDNNGLYTEPRPIGTRYLTRPL

SEQ ID NO: 775 - protein, 736 aa, Artificial Sequence
  Description of Artificial Sequence: Synthetic polypeptide
MAADGYLPDWLEDNLSEGIREWWDLKPGAPKPKANQQKQDDGRGLVLPGYKYLGPFNGLDKGEPVNAADAAALEHDKAYDQQLKAGDNPYLRYNHADAEFQERLQEDTSFGGNLGRAVFQAKKRVLEPFGLVEEGAKTAPGKKRPVEQSPQEPDSSSGIGKTGQQPAKKRLNFGQTGDSESVPDPQPLGEPPATPAAVGPTTMASGGGAPMADNNEGADGVGNASGNWHCDSTWLGDRVITTSTRTWALPTYNNHLYKQISSASTGASNDNHYFGYSTPWGYFDFNRFHCHFSPRDWQRLINNNWGFRPKRLNFKLFNIQVKEVTTNDGVTTIANNLTSTVQVFSDSEYQLPYVLGSAHQGCLPPFPADVFMIPQYGYLTLNNGSQAVGRSSFYCLEYFPSQMLRTGNNFTFSYTFEEVPFHSSYAHSQSLDRLMNPLIDLYLYYLNRTQNQSGSAQNKDLLFSRGSPAGMSVQPKNWLPGPCYRQQRVSKTKTDNNNSNFTWTGASKYNLNGRESIINPGTAMASHKDDEDKFFPMSGVMIFGKESAGTSNTALDNVMITDEEEIKATNPVATERFGTVAVNFQSSSTDPATGDVHVMGALPGMVWQDRDVYLQGPIWAKIPHTDGHFHPSPLMGGFGLKHPPPQILIKNTPVPANPPAEFSATKFASFITQYSTGQVSVEIEWELQKENSKRWNPEVQYTSNYAKSANVDFTVDNNGLYTEPRPIGTRYLTRPL

SEQ ID NO: 776 - protein, 736 aa, Artificial Sequence
  Description of Artificial Sequence: Synthetic polypeptide
MAADGYLPDWLEDSLSEGIREWWDLKPGAPKPKANQQKQDDGRGLVLPGYKYLGPFNGLDKGEPVNAADAAALEHDKAYDQQLKAGDNPYLRYNHADAEFQERLQEDTSFGGNLGRAVFQAKKRVLEPFGLVEEGAKTAPGKKRPVEQSPQEPDSSSGIGKTGQQPAKKRLNFGQTGDSESVPDPQPLGEPPATPAAVGPTTMASGGGAPMADNNEGADGVGNASGNWHCDSTWLGDRVITTSTRTWALPTYNNHLYKQISSASTGASNDNHYFGYSTPWGYFDFNRFHCHFSPRDWQRLINNNWGFRPKRLNFKLFNIQVKEVTTNDGVTTIANNLTSTVQVFSDSEYQLPYVLGSAHQGCLPPFPADVFMIPQYGYLTPNNGSQAVGRSSFYCLEYFPSQMLRTGNNFTFSYTFEEVPFHSSYAHSQSLDRLMNPLIDQYQYYLNRTQNQSGSAQNKDLLFSRGSPAGMSVQPKNWLPGPCYRQQRVSKTKTDNNNSNFTWTGASKYNLNGRESIINPGTAMASHKDDEDKFFPMSGVMIFGKESAGASNTALDNVMITDEEEIKATNPVATERFGTVAVNFQSSSTDPATGDVHVMGALPGMVWQDRDVYLQGPIWAKIPHTDGHFHPSPLMGGFGLKHPPPQILIKNTPVPANPPAEFSATKFASFITQYSTGQVSVEIEWELQKENSKRWNPEVQYTSNYAKSANVDFTVDNNGLYTEPRPIGTRYLTRPL

SEQ ID NO: 777 - protein, 736 aa, Artificial Sequence; identical to SEQ ID NO: 768
  Description of Artificial Sequence: Synthetic polypeptide

SEQ ID NO: 778 - protein, 735 aa, Artificial Sequence
  Description of Artificial Sequence: Synthetic polypeptide
MAADGYLPDWLEDTLSEGIRQWWKLKPGPPPPKPAERHKDDSRGLVLPGYKYLGPFNGLDKGEPVNEADAAALEHDKAYDRQLDSGDNPYLKYNHADAEFQERLKEDTSFGGNLGRAVFQAKKRVLEPLGLVEEPVKTAPGKKRPVEHSPVEPDSSSGTGKAGQQPARKRLNFGQTGDADSVPDPQPLGQPPAAPSGLGTNTMATGSGAPMADNNEGADGVGNSSGNWHCDSTWMGDRVITTSTRTWALPTYNNHLYKQISSQSGASNDNHYFGYSTPWGYFDFNRFHCHFSPRDWQRLINNNWGFRPKRLNFKLFNIQVKEVTQNDGTTTIANNLTSTVQVFTDSEYQLPYVLGSAHQGCLPPFPADVFMVPQYGYLTLNNGSQAVGRSSFYCLEYFPSQMLRTGNNFTFSYTFEDVPFHSSYAHSQSLDRLMNPLIDQYLYYLSRTNTPSGTTTQSRLQFSRAGASDIRDQSRNWLPGPCYRQQRVSKTSADNNNSEYSWTGATKYHLNGRDSLVNPGPAMASHKDDEEKFFPQSGVLIFGKQGSEKTNVDIEKVMITDEEEIRTTNPVATEQYGSVSTNLQRGNRQAATADVNTQGVLPGMVWQDRDVYLQGPIWAKIPHTDGHFHPSPLMGGFGLKHPPPQILIKNTPVPANPSTTFSAAKFASFITQYSTGQVSVEIEWELQKENSKRWNPEIQYTSNYNKSVNVDFTVDTNGVYSEPRPIGTRYLTRNL

SEQ ID NO: 779 - DNA, 2211 bp, Artificial Sequence
  Description of Artificial Sequence: Synthetic polynucleotide
atggctgctgacggttatcttccagattggctcgaggacaacctttctgaaggcattcgtgagtggtgggctctgaaacctggagtccctcaacccaaagcgaaccaacaacaccaggacaaccgtcggggtcttgtgcttccgggttacaaatacctcggacccggtaacggactcgacaaaggagagccggtcaacgaggcggacgcggcagccctcgaacacgacaaagcttacgaccagcagctcaaggccggtgacaacccgtacctcaagtacaaccacgccgacgccgagtttcaggagcgtcttcaagaagatacgtcttttgggggcaaccttggcagagcagtcttccaggccaaaaagaggatccttgagcctcttggtctggttgaggaagcagctaaaacggctcctggaaagaagaggcctgtagatcagtctcctcaggaaccggactcatcatctggtgttggcaaatcgggcaaacagcctgccagaaaaagactaaatttcggtcagactggcgactcagagtcagtcccagaccctcaacctctcggagaaccaccagcagcccccacaagtttgggatctaatacaatggcttcaggcggtggcgcaccaatggcagacaataacgagggtgccgatggagtgggtaattcctcaggaaattggcattgcgattcccaatggctgggcgacagagtcatcaccaccagcaccagaacctgggccctgcccacttacaacaaccatctctacaagcaaatctccagccaatcaggagcttcaaacgacaaccactactttggctacagcaccccttgggggtattttgactttaacagattccactgccacttctcaccacgtgactggcagcgactcattaacaacaactggggattccggcccaagaaactcagcttcaagctcttcaacatccaagttaaagaggtcacgcagaacgatggcacgacgactattgccaataaccttaccagcacggttcaagtgtttacggactcggagtatcagctcccgtacgtgctcgggtcggcgcaccaaggctgcctcccgccgtttccagcggacgtcttcatggtccctcagtatggatacctcaccctgaacaacggaagtcaagcggtgggacgctcatccttttactgcccggagtacttcccttcgcagatgctaaggactggaaataacttccaattcagctataccttcgaggatgtaccttttcacagcagctacgctcacagccagagtttggatcgcttgatgaatcctcttattgatcagtatctgtactacctgaacagaacgcaaggaacaacctctggaacaaccaaccaatcacggctgctttttagccaggctgggcctcagtctatgtctttgcaggccagaaattggctacctgggccctgctaccggcaacagagactttcaaagactgctaacgacaacaacaacagtaactttccttggacagcggccagcaaatatcatctcaatggccgcgactcgctggtgaatccaggaccagctatggccagtcacaaggacgatgaagaaaaatttttccctatgcacggcaatctaatatttggcaaagaagggacaacggcaagtaacgcagaattagataatgtaatgattacggatgaagaagagattcgtaccaccaatcctgtggcaacagagcagtatggaactgtggcaaataacttgcagagctcaaatacagctcccacgactagaactgtcaatgatcagggggccttacctggcatggtgtggcaagatcgtgacgtgtaccttcaaggacctatctgggcaaagattcctcacacggatggacactttcatccttctcctctgatgggaggctttggactgaaacatccgcctcctcaaatcatgatcaaaaatactccggtaccggcaaatcctccgacgactttcagcccggccaagtttgcttcatttatcactcagtactccactggacaggtcagcgtggaaattgagtgggagctacagaaagaaaacagcaaacgttggaatccagagattcagtacacttccaactacaacaagtctgttaatgtggactttactgtagacactaatggtgtttatagtgaacctcaccctattggaacccggtatctcacacgaaacttgtaa

SEQ ID NO: 780 - DNA, 2211 bp, Artificial Sequence
  Description of Artificial Sequence: Synthetic polynucleotide
atggctgctgatggttatcttccagattggctcgaggacaacctttctgaaggcattcgtgagtggtgggctctgaaacctggagtccctcaacccaaagcgaaccaacaacaccaggacaaccgtcggggtcttgtgcttccgggttacaaatacctcggacccggtaacggactcgacaaaggagagccggtcaacgaggcggacgcggcagccctcgaacacgacaaagcttacgaccagcagctcaaggccggtgacaacccgtacctcaagtacaaccacgccgacgccgagtttcaggagcgtcttcaagaagatacgtcttttgggggcaaccttggcagagcagtcttccaggccaaaaagaggatccttgagcctcttggtctggttgaggaagcagctaaaacggctcctggaaagaagaggcctgtagatcagtctcctcaggaaccggactcatcatctggtgttggcaaatcgggcaaacagcctgccagaaaaagactaaatttcggtcagactggcgactcagagtcagtcccagaccctcaacctctcggagaaccaccagcagcccccacaagtttgggatctaatacaatggcttcaggcggtggcgcaccaatggcagacaataacgagggtgccgatggagtgggtaattcctcaggaaattggcattgcgattcccaatggctgggcgacagagtcatcaccaccagcaccagaacctgggccctgcccacttacaacaaccatctctacaagcaaatctccagccaatcaggagcttcaaacgacaaccactactttggctacagcaccccttgggggtattttgactttaacagattccactgccacttctcaccacgtgactggcagcgactcattaacaacaactggggattccggcccaagaaactcagcttcaagctcttcaacatccaagttaaagaggtcacgcagaacgatggcacgacgactgttgccaataaccttaccagcacggttcaagtgtttacggactcggagtatcaactcccgtacgtgctcgggtcggcgcaccaaggctgtctcccgccgtttccagcggacgtcttcatggtccctcagtatggatacctcaccctgaacaacggaagtcaagcggtgggacgctcatccttttactgcctggagtacttcccttcgcagatgctaaggactggaaataacttccaattcagctataccttcgaggatgtaccttttcacagcagctacgctcacagccagagtttggatcgcttgatgaatcctcttattgatcagtatctgtactacctgaacagaacgcaaggaacaacctctggaacaaccaaccaatcacggctgctttttagccaggctgggcctcagtctatgtctttgcaggccagaaattggctacctgggccctgctaccggcaacagagactttcaaagactgctaacgacaacaacaacagtaactttccttggacagcggccagcaaatatcatctcaatggccgcgactcgctggtgaatccaggaccagctatggccagtcacaaggacgatgaagaaaaatttttccctatgcacggcaatctaatatttggcaaagaagggacaacggcaagtaacgcagaattagataatgtaatgattacggatgaagaagagattcgtaccaccaatcctgtggcaacagagcagtatggaactgtggcaaataacttgcagagctcaaatacagctcccacgactagaactgtcaatgatcagggggccttacctggcatggtgtggcaagatcgtgacgtgtaccttcaaggacctatctgggcaaagattcctcacacggatggacactttcatccttctcctctgatgggaggctttggactgaaacatccgcctcctcaaatcatgatcaaaaatactccggtaccggcaaatcctccgacgactttcagcccggccaagtttgcttcatttatcactcagtactccactggacaggtcagcgtggaaattgagtgggagctacagaaagaaaacagcaaacgttggaatccagagattcagtacacttccaactacaacaagtctgttaatgtggactttactgtagacactaatggtgtttatagtgaacctcgccctattggaacccggtatctcacacgaaacttgtaa

SEQ ID NO: 781 - DNA, 2211 bp, Artificial Sequence
  Description of Artificial Sequence: Synthetic polynucleotide
atggctgctgacggttatcttccagattggctcgaggacaacctttctgaaggcattcgtgagtggtgggctctgaaacctggagtccctcaacccaaagcgaaccaacaacaccaggacaaccgtcggggtcttgtgcttccgggttacaaatacctcggacccggtaacggactcgacaaaggagagccggtcaacgaggcggacgcggcagccctcgaacacgacaaagcttacgaccagcagctcaaggccggtgacaacccgtacctcaagtacaaccacgccgacgccgagtttcaggagcgtcttcaagaagatacgtcttttgggggcaaccttggcagagcagtcttccaggccaaaaagaggatccttgagcctcttggtctggttgaggaagcagctaaaacggctcctggaaagaagaggcctgtagatcagtctcctcaggaaccggactcatcatctggtgttggcaaatcgggcaaacagcctgccagaaaaagactaaatttcggtcagactggcgactcagagtcagtcccagaccctcaacctctcggagaaccaccagcagcccccacaagtttgggatctaatacaatggcttcaggcggtggcgcaccaatggcagacaataacgagggtgccgatggagtgggtaattcctcaggaaattggcattgcgattcccaatggctgggcgacagagtcatcaccaccagcaccagaacctgggccctgcccacttacaacaaccatctctacaagcaaatctccggccaatcaggagcttcaaacgacaaccactactttggctacagcaccccttgggggtattttgactttaacagattccactgccacttctcaccacgtgactggcagcgactcattaacaacaactggggattccggcccaagaaactcagcttcaagctcttcaacatccaagttaaagaggtcacgcagaacgatggcacgacgactattgccaataaccttaccagcacggttcaagtgtttacggactcggagtatcagctcccgtacgtgctcgggtcggcgcaccaaggctgtctcccgccgtttccagcggacgtcttcatggtccctcagtatggatacctcaccctgaacaacggaagtcaagcggtgggacgctcatccttttactgcctggagtacttcccttcgcagatgctaaggactggaaataacttccaattcagctataccttcgaggatgtaccttttcacagcagctacgctcacagccagagtttggatcgcttgatgaatcctcttattgatcagtatctgtactacctgaacagaacgcaaggaacaacctctggaacaaccaaccaatcacggctgctttttagccaggctgggcctcagtctatgtctttgcaggccagaaattggctacctgggccctgctaccggcaacagagactttcaaagactgctaacggcaacaacaacagtaactttccttggacagcggccagcaaatatcatctcaatggccgcgactcgctggtgaatccaggaccagctatggccagtcacaaggacgatgaagaaaaatttttccctatgcacggcaatctaatatttggcaaagaagggacaacggcaagtaacgcagaattagataatgtaatgattacggatgaagaagagattcgtaccaccaatcctgtggcaacagagcagtgtggaactgtggcaaataacttgcagagctcaaatacagctcccacgactagaactgtcaatgatcagggggccttacctggcatggtgtggcaagatcgtgacgtgtaccttcaaggacctatctgggcaaagattcctcacacggatggacactttcatccttctcctctgatgggaggctttggactgaaacatccgcctcctcaaatcatgatcaaaaatactccggtaccggcaaatcctccgacgactttcagcccggccaagtttgcttcatttatcactcagtactccactggacaggtcagcgtggaaattgagtgggagctacagaaagaaaacagcaaacgttggaatccagagattcagtacacttccaactacaacaagtctgttaatgtggactttactgtagacactaatggtgtttatagtgaacctcgccctattggaacccggtatctcacacgaaacttgtaa

SEQ ID NO: 782 - DNA, 2212 bp, Artificial Sequence
  Description of Artificial Sequence: Synthetic polynucleotide
  modified_base (1283)..(1283): a, c, t, or g
atggctgctgacggttatcttccagattggctcgaggacaacctttctgaaggcattcgtgagtggtgggctctgaaacctggagtccctcaacccaaagcgaaccaacaacaccaggacaaccgtcggggtcttgtgcttccgggttacaaatacctcggaccgggtaacggactcgacaaaggagagccggtcaacgaggcggacgcggcagccctcgaacacgacaaagcttacgaccagcagctcaaggccggtgacaacccgtacctcaagtacaaccacgccgacgccgagtttcaggagcgtcttcaagaagatacgtcttttgggggcaaccttggcagagcagtcttccaggccaaaaagaggatccttgagcctcttggtctggttgagggagcagctaaaacggctcctggaaagaagaggcctgtagatcagtctcctcaggaaccggactcatcatctggtgttggcaaatcgggcaaacagcctgccagaaaaagactaaatttcggtcagactggcgactcagagtcagtcccagaccctcaacctctcggagaaccaccagcagcccccacaagtttgggatctaatacaatggcttcaggcggtggcgcaccaatggcagacaataacgagggtgccgatggagtgggtaattcctcaggaaattggcattgcgattcccaatggctgggcgacagagtcatcaccaccagcaccagaacctgggccctgcccacttacaacagccatctctacaagcaaatctccagccaatcaggagcttcaaacgacaaccactactttggctacagcaccccttgggggtattttgactttaacagattccactgccacttctcaccacgtgactggcagcgactcattaacaacaactggggattccggcccaagaaactcagcttcaagctcttcaacatccaagttaaagaggtcacgcagaacgatggcacgacgactattgccaataaccttaccagcacggtccaagtgtttacggactcggagtatcagctcccgtacgtgctcgggtcggcgcaccaaggctgtctcccgccgtttccagcggacgccttcatggtccctcagtatggatacctcaccctgaacaacggaagtcaagcggtgggacgctcatccttttactgcctggagtacttcccttcgcagatgctaaggactggaaataacttccaattcagctataccttcgaggatgtaccttttcacggcagctacgctcacagccngagtttggatcgcttgatgaatcctcttattgatcagtatctgtactacctgaacagaacgcaaggaacaacctctggaacaaccaaccaatcacggctgctttttagccaggctgggcctcagtctatgtctttgcaggccagaaattggctacctgggccctgctaccggcaacagagacttttcaaagactgctaacgacaacaacaacagtaactttccttggacagcggccagcaaatatcatctcaatggccgcgactcgctggtgaatccaggaccagctatggccagtcacaaggacgatgaagaaaaatttttccctatgcacggcaatctaatatttggcaaagaagggacaacggcaagtaacgcagaattagataatgtaatgattacggatgaagaagagattcgtaccaccaatcctgtggcaacagagcagtatggaactgtggcaaataacttgcagagctcaaatacagctcccacgactagaactgtcaatgatcagggggccttacctggcatggtgtggcaagatcgtgacgtgtaccttcaaggacctatctgggcaaagattcctcacacggatggacactttcatccttctcctctgatgggaggctttggactgaaacatccgcctcctcaaatcatgatcaaaaatactccggtaccggcaaatcctccgacgactttcagcccggccaagtttgcttcatttatcactcagtactccactggacaggtcagcgtggaaattgagtgggagctacagaaagaaaacagcaaacgttggaatccagagattcagtacacttccaactacaacaagtctgttaatgtggactttactgtagacactaatggtgtttatagtgaacctcgccctattggaacccggtatctcacacgaaactcgtaa

SEQ ID NO: 783 - DNA, 2212 bp, Artificial Sequence
  Description of Artificial Sequence: Synthetic polynucleotide
atggctgctgacggttatcttccagattggctcgaggacaacctttctgaaggcattcgtgagtggtgggctctgaaacctggagtccctcaacccaaagcgaaccaacaacaccaggacaaccgtcggggtcttgtgcttccgggttacaaatacctcggacccggtaacggactcgacaaaggagagccggtcaacgaggcggacgcggcagccctcgaacacgacaaagcttacgaccagcagctcaaggccggtgacaacccgtacctcaagtacaaccacgccgacgccgagtttcaggagcgtcttcaagaagatacgtcttttgggggcaaccttggcagagcagtcttccaggccaaaaagaggatccttgagcctcttggtctggttgagggagcagctaaaacggctcctggaaagaagaggcctgtagatcagtctcctcaggaaccggactcatcatctggtgttggcaaatcgggcaaacagcttgccagaaaaagactaaatttcggtcagactggcgactcagagtcagtcccagaccctcaacctctcggagaaccaccagcagcccccacaagtttgggatctaatacaatggcttcaggcggtggcgcaccaatggcagacaataacgagggtgccgatggagtgggtaattcctcaggaaattggcattgcgattcccaatggctgggcgacagagtcatcaccaccagcaccagaacctgggccctgcccacttacaacagccatctctacaagcaaatctccggccaatcaggagcttcaaacgacaaccactactttggctacagcaccccctgggggtattttgactttaacagattccactgccacttctcaccacgtgactggcagcgactcattaacaacaactggggattccggcccaagaaactcagcttcaagctcttcaacatccaagttaaagaggtcacgcagaacgatggcacgacgactattgccaataaccttaccagcacggttcaagtgtttacggactcggagtatcagctcccgtacgtgctcgggtcggcgcaccaaggctgtctcccgccgtttccagcggacgtcttcatggtccctcagtatggatacctcaccctgaacaacggaagtcaagcggtgggacgctcatccttttactgcctggagtacttcccttcgcagatgctaaggactggaaataacttccaattcagctataccttcgaggatgtaccttttcacagcagctacgctcacagccagagtttggatcgcttgatgaatcctcttattgatcagtatctgtactacctgaacagaacgcaaggaacaacctctggaacaaccaaccaatcacggctgctttttagccaggctgggcctcagtctatgtctttgcaggccagaaattggctacctgggccctgctaccggcaacagagactttcaaagactgctaacgacaacaacaacagtaactttccttggacagcggccagcaaatatcatctcaatggccgcgactcgctggtgaatcccaggaccagctatggccagtcacaaggacgatgaagaaaaatttttccctatgcacggcaatctaatatttggcaaagaagggacaacggcaagtaacgcagaattagataatgtaatgattacggatgaagaagagattcgtaccaccaatcctgtggcaacagagcagtatggaactgtggcaaataacttgcagagctcaaatacagctcccacgactagaactgtcaatgatcagggggccttacctggcatggtgtggcaagatcgtgacgtgtaccttcaaggacctatctgggcaaagattcctcacacggatggacactttcatccttctcctctgatgggaggctttggactgaaacatccgcctcctcaaatcatgatcaaaaatactccggtaccggcaaatcctccgacgactttcagcccggccaagtttgcttcatttatcactcagtactccactggacaggtcagcgtggaaattgagtgggagctacagaaagaaaacagcaaacgttggaatccagagattcagtacacttccaactacaacaagtctgttaatgtggactttactgtagacactaatggtgtttatagtgaacctcgccctattggaacccggtatctcacacgaaacttgtaa

SEQ ID NO: 784 - DNA, 2212 bp, Artificial Sequence
  Description of Artificial Sequence: Synthetic polynucleotide
atggctgctgacggttatcttccagattggctcgaggacaacctttctgaaggcattcgtgagtggtgggctctgaaacctggagtccctcaacccaaagcgaaccaacaacaccaggacgaccgtcggggtcttgtgcttccgggttacaaatacctcggacccggtaacggactcgacaaaggagagccggtcaacgaggcggacgcggcagccctcgaacacgacaaagcttacgaccagcagctcaaggccggtgacaacccgtgcctcaagtacaaccacgccgacgccgagtttcaggagcgtcttcaagaagatacgtcttttgggggcaaccttggcagagcagtcttccaggccaaaaagaggatccttgagcctcttggtctggttgaggaagcagctaaaacggctcctggaaagaagaggcctgtagatcagtctcctcaggaaccggactcatcatctggtgttggcaaatcgggcaaacagcctgccagaaaaagactaaatttcggtcagactggcgactcagagtcagtcccagaccctcaacctctcggagaaccaccagcagcccccacaagtttgggatctaatacaatggcttcaggcggtagcgcaccaatggcagacaataacgagggtgccgatggagtgggtaattcctcaggaaattggcattgcgattcccaatggctgggcgacagagtcatcaccaccagcaccagaacctgggccctgcccacttacaacaaccatctctacaagcaaatctccagccaatcaggagcttcaaacgacaaccactactttggctacagcaccccttgggggtattttgactttaacagattccactgccacttctcaccacgtgactggcagcgactcattaacaacaactggggattccggcccaagaaactcagcttcaagctcttcaacatccaagttaaagaggtcacgcagaacgatggcacgacgactattgccaataaccttaccagcacggttcaagtgtttacggactcggagtatcagctcccgtacgtgctcgggtcggcgcaccaaggctgtctcccgccgtttccagcggacgtcttcatggtccctcagtatggatacctcaccctgaacaacggaagtcaagcggtgggacgctcatccttttactgcctggagtacttcccttcgcagatgctaaggactggaaataacttccaattcagctataccttcgaggatgtaccttttcacagcagctacgctcacagccagagtttggatcgcttgatggatcctcttattgatcagtatctgtactacctgaacagaacgcaaggaacaacctctggaacaaccaaccaatcacggctgctttttagccaggctgggcctcagtctatgtctttgcaggccagaaattggctacctgggccctgctaccggcaacagagactttcaaagactgctaacgacaacaacaacagtaactttccttggacagcggccagcaaatatcatctcaatggccgcgactcgctggtgaatccaggaccagctatggccagtcacaaaggacgatgaagaaaaatttttccctatgcacggcaatctaatatttggcaaagaagggacaacggcaagtaacgcagaattagataatgtaatgattacggatgaagaagagattcgtaccaccaatcctgtggcaacagagcagtatggaactgtggcaaataacttgcagagctcaaatacagctcccacgactagaactgtcaatgatcagggggccttacctggcatggtgtggcaagatcgtgacgtgtaccttcaaggacctatctgggcaaagattcctcacacggatggacactttcatccttctcctctgatgggaggctttggactgaaacatccgcctcctcaaatcatgatcaaaaatactccggtaccggcaaatcctccgacgactttcagcccggccaagtttgcttcatttatcactcagtactccactggacaggtcagcgtggaaattgagtgggagctacagaaagaaaacagcaaacgttggaatccagagattcagtacacttccaactacaacaagtctgttaatgtggactttactgtagacactaatggtgtttatagtgaacctcgccctattggaacccggtatctcacacgaaacctgtaa

SEQ ID NO: 785 - DNA, 2211 bp, Artificial Sequence
  Description of Artificial Sequence: Synthetic polynucleotide
atggctgctgacggttatcttccagattggctcgaggacaacctttctgaaggcattcgtgagtggtgggctctgaaacctggagtccctcaacccaaagcgaaccaacaacaccaggacgaccgtcggggtcttgtgcttccgggttacaaatacctcggacccggtaacggactcgacaaaggagagccggtcaacgaggcggacgcggcagccctcgaacacgacaaagcttacgaccagcagctcaaggccggtgacaacccgtacctcaagtacaaccacgccgacgccgagtttcaggagcgtcttcaagaagatacgtcttttgggggcaaccttggcagagcagtcttccaggccaaaaagaggatccttgagcctcttggtctggttgaggaagcagctaaaacggctcctggaaagaagaggcctgtagatcagtctcctcaggaaccggactcatcatctggtgttggcaaatcgggcaaacagcctgccagaaaaagactaaatttcggtcagactggcgactcagagtcagtcccagaccctcaacctctcggagaaccaccagcagcccccacaagtttgggatctaatacaatggcttcaggcggtggcgcaccaatggcagacaataacgagggtgccgatggagtgggtaattcctcaggaaattggcattgcgattcccaatggctgggcaacagagtcatcaccaccagcaccagaacctgggccctgcccacttacaacaaccatctctacaagcaaatctccagccaatcaggagcttcaaacgacaaccactactttggctacagcaccccttgggggtattttgactttaacagattccactgccacttctcaccacgtgactggcagcgactcattaacaacaactggggattccggcccaagaaactcagcttcaagctcttcaacatccaagttaaagaggtcacgcagaacgatggcacgacgactattgccaataaccttaccagcacggttcaagtgtttacggactcggagtatcagctcccgtacgtgctcgggtcggcgcaccaaggctgtctcccgccgtttccagcggacgtcttcatggtccctcagtatggatacctcaccctgaacaacggaagtcaagcggtgggacgctcatccttttactgcctggagtacttcccttcgcagatgctaaggactggaaataacttccaattcagctataccttcgaggatgtaccttttcacagcagctacgctcacagccagagtttggatcgcttgatgaatcctcttattgatcagtatctgtactacctgaacagaacgcaaggaacaacctctggaacaaccaaccaatcacggctgctttttagccaggctgggcctcagtctatgtctttgcaggccagaaattggctacctgggccctgctaccggcaacagagactttcaaagactgctaacgacaacaacaacagtaactttccttggacagcggccagcaaatatcatctcaatggccgcgactcgctggtgaatccaggaccagctatggccagtcacaaggacgatgaagaaaaatttttccctatgcacggcaatctaatatttggcaaagaagggacaacggcaagtaacgcagaattagataatgtaatgattacggatgaagaagagattcgtaccaccaatcctgtggcaacagagcagtatggaactgtggcaaataacttgcagagctcaaatacagctcccacgactagaactgtcaatgatcagggggccttacctggcatggtgtggcaagatcgtgacgtgtaccttcaaggacctatctgggcaaagattcctcacacggatggacactttcatccttctcctctgatgggaggctttggactgaaacatccgcctcctcaaatcatgatcaaaaatactccggtaccggcaaatcctccgacgactttcagcccggccaagtttgcttcatttatcactcagtactccactggacaggtcagcgtggaaattgagtgggagctacagaaagaaaacagcaaacgttggaatccagagattcagtacacttccaactacaacaagtctgttaatgtggactttactgtagacactaatggtgtttatagtgaacctcgccctattggaacccggtatctcacacgaaacttgtaa

SEQ ID NO: 786 - DNA, 2211 bp, Artificial Sequence
  Description of Artificial Sequence: Synthetic polynucleotide
atggctgctgacggttatcttccagattggctcgaggacaacctttctgaaggcattcgtgagtggtgggctctgaaacctggagtccctcaacccaaagcgaaccaacaacaccaggacgaccgtcggggtcttgtgcttccgggttacaaatacctcggacccggtaacggactcgacaaaggagagccggtcaacgaggcggacgcggcagccctcgaacacgacaaagcttacgaccagcagctcaaggccggtgacaacccgtacctcaagtacaaccacgccgacgccgagtttcaggagcgtcttcaagaagatacgtcttttgggggcaaccttggcagagcagtcttccaggccaaaaagaggatccttgagcctcttggtctggttgaggaagcagctaaaacggctcctggaaagaagaggcctgtagatcagtctcctcaggaaccggactcatcatctggtgttggcaaatcgggcaaacagcctgccagaaaaagactaaatttcggtcagactggcgactcagagtcagtcccagaccctcaacctctcggagaaccaccagcagcccccacaagtttgggatctaatacaatggcttcaggcggtggcgcaccaatggcggacaataacgagggtgccgatggagtgggtaattcctcaggaaattggcattgcgattcccaatggctgggcgacagagtcatcaccaccagcaccagaacctgggccctgcccacttacaacaaccatctctacaagcaaatctccagccaatcaggagcttcaaacgacaaccactactttggctacagcaccccttgggggtattttgactttaacagattccactgccacttctcaccacgtgactggcagcgactcattaacaacaactggggattccggcccaagaaactcagcttcaagctcttcaacatccaagttaaagaggtcacgcagaacgatggcacgacgactattgccaataaccttaccagcacggttcaagtgtttacggactcggagtatcagctcccgtacgtgctcgggtcggcgcaccaaggctgtctcccgccgtttccagcggacgtcttcatggtccctcagtatggatacctcaccctgaacaacggaagtcaagcggtgggacgctcatccttttactgcctggagtacttcccttcgcagatgctaaggactggaaataacttccaattcagctataccttcgaggatgtaccttttcacagcagctacgctcacagccagagtttggatcgcttgatgaatcctcttattgatcagtatctgtactacctgaacagaacgcaaggaacaacctctggaacaaccaaccaatcacggctgctttttagccaggctgggcctcagtctatgtctttgcaggccagaaattggctacctgggccctgctaccggcaacagagactttcaaagactgctaacgacaacaacaacagtaactttccttggacagcggccagcaaatatcatctcaatggccgcgactcgctggtgaatccaggaccagctatggccagtcacaaggacgatgaagaaaaatttttccctatgcacggcaatctaatatttggcaaagaagggacaacggcaagtaacgcagaattagataatgtaatgattacggatgaagaagagattcgtaccaccaatcctgtggcaacagtgcagtatggaactgtggcaaataacttgcagagctcaaatacagctcccacgactagaactgtcaatgatcagggggccttacctggcatggtgtggcaagatcgtgacgtgtaccttcaaggacctatctgggcaaagattcctcacacggatggacactttcatccttctcctctgatgggaggctttggactgaaacatccgcctcctcaaatcatgatcaaaaatactccggtaccggcaaatcctccgacgactttcagcccggccaagtttgcttcatttatcactcagtactccactggacaggtcagcgtggaaattgagtgggagctacagaaagaaaacagcaaacgttggaatccagagattcagtacacttccaactacaacaagtctgttaatgtggactttactgtagacactaatggtgtttatagtgaacctcgccctattggaacccggtatctcacacgaaacttgtaa

SEQ ID NO: 787 - DNA, 2211 bp, Artificial Sequence
  Description of Artificial Sequence: Synthetic polynucleotide
atggctgctgacggttatcttccagattggctcgaggacaacctttctgaaggcattcgtgagtggtgggctctgaaacctggagtccctcaacccaaagcgaaccaacaacaccaggacaaccgtcggggtcttgtgcttccgggttacaaatacctcggacccggtaacggactcgacaaaggagagccggtcaacgaggcggacgcggcagccctcgaacacgacaaagcttacgaccagcagctcaaggccggtgacaacccgtacctcaagtacaaccacgccgacgccgagtttcaggagcgtcttcaagaagatacgtcttttgggggcaaccttggcagagcagtcttccaggccaaaaaggggatccttgagcctcttggtctggttgaggaagcagctaaaacggctcctggaaagaagaggcctgtagatcagtctcctcaggaaccggactcatcatctggtgttggcaaatcgggcaaacagcctgccagaaaaagactaaatttcggtcagactggcgactcagagtcagtcccagaccctcaacctctcggagaaccaccagcagcccccacaagtttgggatctaatacaatggcttcaggcggtggcgcaccaatggcagacaataacgagggtgccgatggagtgggtaattcctcaggaaattggcattgcgattcccaatggctgggcgacagagtcatcaccaccagcaccagaacctgggccctgcccacttacaacaaccatctctacaagcaaatctccagccaatcaggagcttcaaacgacaaccactactttggctacagcaccccttgggggtattttgactttaacagattccactgccacttctcaccacgtgactggcagcgactcattaacaacaactggggattccggcccaagaaactcagcttcaagctcttcaacatccaagttaaagaggtcacgcagaacgatggcacgacgactattgccaataaccttaccagcacggttcaagtgtttacggactcggagtatcagctcccgtacgtgttcgggtcggcgcaccaaggctgtctcccgccgtttccagcggacgtcttcatggtccctcagtatggatacctcaccctgaacaacggaagtcaagcggtgggacgctcatccttttactgcctggagtacttcccttcgcagatgctaaggactggaaataacttccaattcagctataccttcgaggatgtaccttttcacagcagctacgctcacagccagagttcggatcgcttgatgaatcctcttattgatcagtatctgtactacctgaacagaacgcaaggaacaacctctggaacaaccaaccaatcacggctgctttttagccaggctgggcctcagtctatgtctttgcaggccagaaattggctacctgggccctgctaccggcaacagagactttcaaagactgctaacgacaacaacaacagtaactttccttgaacagcggccagcaaatatcatctcaatggccgcgactcgctggtgaatccaggaccagctatggccagtcacaaggacgatgaagaaaaatttttccctatgcacggcaatctaatatttggcaaagaagggacaacggcaagtaacgcagaattagataatgtaatgattacggatgaagaagagattcgtaccaccaatcctgtggcaacagagcagtatggaactgtggcaaataacttgcagagctcaaatacagctcccacgactagaactgtcaatgatcagggggccttacctggcatggtgtggcaagatcgtgacgtgtaccttcaaggacctatctgggcaaagattcctcacacggatggacactttcatccttctcctctgatgggaggctttggactgaaacatccgcctcctcaaatcatgatcaaaaatactccggtaccggcaaatcctccgacgactttcagcccggccaagtttgcttcatttatcactcagtactccactggacaggtcagcgtggaaattgagtgggagctacagaaagaaaacagcaaacgttggaatccagagattcagtacacttccaactacaacaagtctgttaatgtggactttactgtagacactaatggtgtttatagtgaacctcgccctattggaacccggtatctcacacgaaacttgtaa

SEQ ID NO: 788 - DNA, 2211 bp, Artificial Sequence
  Description of Artificial Sequence: Synthetic polynucleotide
atggctgctgacggttatcttccagattggctcgaggacaacctttctgaaggcattcgtgagtggtgggctctgaaacctggagtccctcaacccaaagcgaaccaacaacaccaggacaaccgtcggggtcttgtgcttccgggttacaaatacctcggacccggtaacggactcgacgaaggagagccggtcaacgaggcggacgcggcagccctcgaacacgacaaagcttacgaccagcagctcaaggccggtgacaacccgtacctcaagtacaaccacgccgacgccgagtttcaggagcgtcttcaagaagatacgtcttttgggggcaaccttggcagagcagtcttccaggccaaaaagaggatccttgagcctcttggtctggttgagggagcagctaaaacggctcctggaaagaagaggcctgtagatcagtctcctcaggaaccggactcatcatctggtgttggcaaatcgggcaaacagcctgccagaaaaagactaaatttcggtcagactggcgactcagagtcagtcccagaccctcaacctctcggagaaccaccagcagcccccacaagtttgggatctaatacaatggcttcaggcggtggcgcaccaatggcagacaataacgagggtgccgatggagtgggtaattcctcaggaaattggcattgcgattcccaatggctgggcgacagagtcatcaccaccagcaccagaacctgggccctgcccacttacaacagccacctctacaagcaaatctccagccaatcaggagcttcaaacgacaaccactactttggctacagcaccccttgggggtattttgactttaacagattccactgccacttctcaccacgtgactggcagcgactcattaacaacaactggggattccggcccaagaaactcagcttcaagctcttcaacatccaagttaaagaggtcacgcagaacgatggcacgacgactattgccaataaccttaccagcacggttcaagtgtttacggactcggagtatcagctcccgtacgtgctcgggtcggcgcaccaaggctgtctcccgccgtttccagcggacgtcttcatggtccctcagtatggatacctcaccctgaacaacggaagtcaagcggtgggacgctcatccttttactgcctggagtacttcccttcgcagatgctaaggactggaaataacttccaattcagctataccttcgaggatgtaccttttcacagcagctacgctcacagccagagtttggatcgcttgatgaatcctcttattgatcagtatctgtactacctgaacagaacgcaaggaacaacctctggaacaaccaaccaatcacggctgctttttagccaggctgggcctcagtctatgtctttgcaggccagaaattggctacctgggccctgctaccggcaacagagactttcaaagactgctaacgacaacaacaacagtaactttccttggacagcggccagcaaatatcatctcaatggccgcgactcgctggtgaatccaggaccagctatggccagtcacaaggacgatgaagaaaaatttttccctatgcacggcaatctaatatttggcaaagaagggacaacggcaagtaacgcagaattagataatgtaatgattacggatgaagaagagattcgtaccaccaatcctgtggcaacagagcagtatggaactgtggcaaataacttgcagagctcaaatacagctcccacgactagaactgtcaatgatcagggggccttacctggcatggtgtggcaagatcgtgacgtgtaccttcaaggacctatctgggcaaagattcctcacacggatggacactttcatccttctcctctgatgggaggctttggactgaaacatccgcctcctcaaatcatgatcaaaaatactccggtaccggcaaatcctccgacgactttcagcccggccaagtttgcttcatttatcactcagtactccactggacaggtcagcgtggaaattgagtgggagctacagaaagaaaacagcaaacgttggaatccagagattcagtacacttccaactacaacaagtctgttaatgtggactttactgtagacactaatggtgtttatagtgaacctcgccctattggaacccggtatctcacacgaaacttgtaa

SEQ ID NO: 789 - DNA, 2211 bp, Artificial Sequence
  Description of Artificial Sequence: Synthetic polynucleotide
atggctgctgacggttatcttccagattggctcgaggacaacctttctgaaggcattcgtgagtggtgggctctgaaacctggagtccctcaacccaaagcgaaccaacaacaccaggacaaccgtcggggtcttgtgcttccgggttacaaatacctcggacccggtaacggactcgacaaaggagagccggtcaacgaggcggacgcggcagccctcgaacacgacaaagcttacgaccagcagctcaaggccggtgacaacccgtacctcaagtacaaccacgccgacgccgagtttcaggagcgtcttcaagaagatacgtcttttgggggcaaccttggcagagcagtcttccaggccaaaaagaggatccttgagcctcttggtctggttgagggagcagctaaaacggctcctggaaagaagaggcctgtagatcagtctcctcaggaaccggactcatcatctggtgttggcaaatcgggcaaacagcctgccagaaaaagactaaatttcggtcagactggcgactcagagtcagtcccagaccctcaacctctcggagaaccaccagcagcccccacaagtttgggatctaatacaatggcttcaggcggtggcgcaccaatggcagacaataacgagggtgccgatggagtgggtaattcctcaggaaattggcattgcgattcccaatggctgggcgacagagtcatcaccaccagcaccagaacctgggccctgcccacttacaacagccatctctacaagcaaatctccagccaatcaggagcttcaaacgacaaccactactttggctacagcaccccttggggtattttgactttaacagattccactgccacttctcaccacgtgactggcagcgactcattaacaacaactggggattccggcccaagaaactcagcttcaagctcttcaacatccaagttaaagaggtcacgcagaacgatggcacgacgactattgccaataaccttaccagcacggttcaagtgtttacggactcggagtatcagctcccgtacgtgctcgggtcggcgcaccaaggctgtctcccgccgtttccagcggacgccttcatggtccctcagtatggatacctcaccctgaacaacggaagtcaagcggtgggacgctcatccttttactgcctggagtacttcccttcgcagatgctaaggactggaaataacttccaattcagctataccctcgaggatgtaccttttcacagcagctacgctcacagccagagtttggatcgcttgatgaatcctcttattgatcagtatctgtactacctgaacagaacgcaaggaacaacctctggaacaaccaaccaatcacggctgctttttagccaggctgggcctcagtctatgtctttgcaggccagaaattggctacctgggccctgctaccggcaacagagactttcaaagactgctaacgacaacaacaacagtaactttccttggacagcggccagcaaatatcatctcaatggccgcgactcgctggtgaatccaggaccagctatggccagtcacaaaggacgatgaagaaaaatttttccctatgcacggcaatctaatatttggcaaagaagggacaacggcaagtaacgcagaattagatagtgtaatgattacggatgaagaagagattcgtaccaccaatcctgtggcaacagagcagtatggaactgtggcaaataacttgcagagctcaaatacagctcccacgactagaactgtcaatgatcagggggccttacctggcatggtgtggcaagatcgtgacgtgtaccttcaaggacctatctgggcaaagattcctcacacggatggacactttcatccttctcctctgatgggaggctttggactgaaacatccgcctcctcaaatcatgatcaaaaatactccggtaccggcaaatcctccgacgactttcagcccggccaagtttgcttcatttatcactcagtactccactggacaggtcagcgtggaaattgagtgggagctacagaaagaaaacagcaaacgttggaatccagagattcagtacacttccaactacaacaagtctgttaatgtggactttactgtagacactaatggtgtttatagtgaacctcgccctattggaacccggtatctcacacgaaacttgtaa

SEQ ID NO: 790 - DNA, 2205 bp, Artificial Sequence
  Description of Artificial Sequence: Synthetic polynucleotide
atgactgacggttaccttccagattggctagaggacaacctctctgagggcgttcgagagtggtgggcgctgcaacctggagcccctaaacccaaggcaaatcaacaacatcaggacaacgctcggggtcttgtgcttccgggttacaaatacctcggacccggcaacggactcgacaagggggaacccgtcaacgcagcggacgcggcagccctcgagcacgacaaggcctacgaccagcagctcaaggccggtgacaacccctacctcaagtacaaccacgccgacgcggagttccagcagcggcttcagggcgacacatcgtttgggggcaacctcggcagagcagtcttccaggccaaaaagagggttcttgaacctcttggtctggttgagcaagcgggtgagacggctcctggaaagaagagaccgttgattgaatccccccagcagcccgactcctccacgggtatcggcaaaaaaggcaagcagccggctaaaaagaagctcgttttcgaagacgaaactggagcaggcgacggaccccctgagggatcaacttccggagccatgtctgatgacagtgagatgcgtgcagcaactggcggagctgcagtcgagggcggacaaggtgccgatggagtgggtaatgcctcgggtgattggcattgcgattccacctggtctgagggccacgtcacgaccaccagcaccagaacctgggtcttgcccacctacaacaaccacctctacaagcgactcggagagagcctgcagtccaacacctacaacggattctccaccccctggggatactttgacttcaaccgcttccactgccacttctcaccacgtgactggcagcgactcatcaacaacaactggggcatgcgacccaaagccatgcgggtcaaaatcttcaacatccaggtcaaggaggtcacgacgtcgaacggcgagacaacggtggctaataaccttaccagcacggttcagatctttgcggactcgtcgtacgaactgccgtacgtgatggatgcgggtcaagagggcagcctgcctccttttcccaacgacgtctttatggtgccccagtacggctactgtggactggtgaccggcaacacttcgcagcaacagactgacagaaatgccttctactgcctggagtactttccttcgcagatgctgcggactggcaacaactttgaaattacgtacagttttgagaaggtgcctttccactcgatgtacgcgcacagccagagcctggaccggctgatgaaccctctcatcgaccagtacctgtggggactgcaatcgaccaccaccggaaccaccctgaatgccgggactgccaccaccaactttaccaagctgcggcctaccaacctttccaactttaaaaagaactggctgcccgggccttcaatcaagcagcagggcttctcaaagactgccaatcaaaactacaagatccctgccaccgggtcagacagtctcatcaaatacgagacgcacagcactctggacggaagatggagtgccctgacccccggacctccaatggccacggctggacctgcggacagcaagttcagcaacagccagctcatctttgcggggcctaaacagaacggcaacacggccaccgtacccgggactctgatcttcacctctgaggaggagctggcagccaccaacgctaccgatacggacatgtggggcaacctacctggcggtgaccagagcaacagcaacctgccgaccgtggacagactgacagccttgggagccgtgcctggaatggtctggcaaaacagagacatttactaccagggtcccatttgggccaagattcctcataccgatggacactttcacccctcaccgctgattggtgggtttgggctgaaacacccgcctcctcaaatttttatcaagaacaccccggtacctgcgaatcctgcgacgaccttcagctctactccggtaaactccttcattactcagtacagcactggccaggtgtcggtgcagattgactgggagatccagaaggagcggtccaaacgctggaaccccgaggtccagtttacctccaactacggacagcaaaactctctgttgtgggctcccgatgcggctgggaaatacactgagcctagggctatcggtacccgctacctcacccaccacctgtaa

SEQ ID NO: 791 - DNA, 2205 bp, Artificial Sequence
  Description of Artificial Sequence: Synthetic polynucleotide
atgactgacggttaccttccagattggctagaggacaacctctctgaaggcgttcgagagtggtgggcgctgcaacctggagcccctaaacccaaggcaaatcaacaacatcaggacaacgctcggggtcttgtgcttccgggttacaaatacctcggacccggcaacggactcgacaagggggaacccgtcaacgcagcggacgcggcagccctcgagcacgacaaggcctacgaccagcagctcaaggccggtgacaacccctacctcaagtacaaccacgccgacgcggagttccagcagcggcttcagggcgacacatcgtttgggggcaacctcggcagagcagtcttccaggccaaaaagagggttcttgaacctcttggtctggttgagcaagcgggtgagacggctcctggaaagaagagaccgttgattgaatccccccagcagcccgactcctccacgggtatcggcaaaaaaggcaagcagccggctaaaaagaagctcgttttcgaagacgaaactggagcaggcgacggaccccctgagggatcaacttccggagccatgtctgatgacagtgagatgcgtgcagcagctggcggagctgcagtcgagggcggacaaggtgccgatggagtgggtaatgcctcgggtgattggcattgcgattccacctggtctgagggccacgtcacgaccaccagcaccagaacctgggtcttgcccacctacaacaaccacctctacaagcgactcggagagagcctgcagtccaacacctacaacggattctccaccccctggggatactttgacttcaaccgcttccactgccacttcttaccacgtgactggcagcgactcatcaacaacaactggggcgtgcgacccaaagccatgcgggtcaaaatcttcaacatccaggtcaaggaggtcacgacgtcgaacggcgagacaacggtggctaataaccttaccagcacggttcagatctttgcggactcgtcgtacgaactgccgtacgtgatggatgcgggtcaagagggcagcctgcctccttttcccaacgacgtctttatggtgccccagtacggctactgtggactggtgaccggcgacacttcgcagcaacagactgacagaaatgccttctactgcctggagtactttccttcgcagatgctgcggactggcaacaactttgaaattacgtacagttttgagaaggtgcctttccactcgatgtacgcgcacagccagagcctggaccggctgatgaaccctctcatcgaccagtacctgtggggactgcaatcgaccaccaccggaaccaccctgaatgccgggactgccaccaccaactttaccaagctgcggcctaccaacttttccaactttaaaaagaactggctgcccgggccttcaatcaagcagcagggcttctcaaagactgccaatcaaaactacaagatccctgccaccgggtcagacagtctcatcaaatacgagacgcacagcactctggacggaagatggagtgccctgacccccggacctccaatggccacggctggacctgcggacagcaagttcagcaacagccagctcatctttgcggggcctaaacagaacggcaacacggccaccgtacccgggactctgatcttcacctctgaggaggagctggcagccaccaacgccaccgatacggacatgtggggcaacctacctggcggtgaccagagcaacagcaacctgccgaccgtggacagactgacagccttgggagccgtgcctggaatggtctggcaaaacagagacatttactaccagggtcccatttgggccaagattcctcataccgatggacactttcacccctcaccgctgattggtgggtttgggctgaaacacccgcctcctcaaatttttatcaagaacaccccggtacctgcgaatcctgcgacgaccttcagctctactccggtaaactccttcattactcagtacagcactggccaggtgtcggtgcagattgactgggagatccagaaggagcggtccaaacgctggaaccccgaggtccagtttacctccaactacggacagcaaaactctctgttgtgggctcccgatgcggctgggaaatacactgagcctagggctatcggtacccgctacctcacccaccacctgtaa

SEQ ID NO: 792 - DNA, 2205 bp, Artificial Sequence
  Description of Artificial Sequence: Synthetic polynucleotide
atgactgacggttaccttccagattggctagaggacaacctctctgaaggcgttcgagagtggtgggcgctgcaacctggagcccctaaacccaaggcaaatcaacaacatcaggacaacgctcggggtcttgtgcttccgggttacaaatacctcggacccggcaacggactcgacgagggggaacccgtcaacgcagcggacgcggcagccctcgagcacgacaaggcctacgaccagcagctcaaggccggtgacaacccctacctcaagtacaaccacgccgacgcggagttccagcagcggcttcagggcgacacatcgtttgggggcaacctcggcagagcagtcttccaggccaaaaagagggttcttgaacctcttggtctggttgagcaagcgggtgagacggctcctggaaagaagagaccgttgattgaatccccccagcagcccgactcctccacgggtatcggcaaaaaaggcaagcagccggctaaaaagaagctcgttttcgaagacgaaactggagcaggcgacggaccccctgagggatcaacttccggagccatgtctgatgacagtgagatgcgtgcagcagctggcggagctgcagtcgagggcggacaaggtgccgatggagtgggtaatgcctcgggtgattggcattgcgattccacctggtctgagggccacgtcacgaccaccagcaccagaacctgggtcttgcccacctacaacaaccacctctacaagcgactcggagagagcctgcagtccaacacctacaacggattctccaccccctggggatactttgacttcaaccgcttccactgccacttctcaccacgtgactggcagcgactcatcaacaacaactggggcatgcgacccaaagccatgcgggtcaaaatcttcaacatccaggtcaaggaggtcacgacgtcgaacggcgagacaacggtggctaataaccttaccagcacggttcagatctttgcggactcgtcgtacgaactgccgtacgtgatggatgcgggtcaagagggcagcctgcctccttttcccaacgacgtctttatggtgccccagtacggctactgtggactggtgaccggcaacacttcgcagcaacagactgacagaaatgccttctactgcctggagtactttccttcgcagatgctgcggactggcaacaactttgaaattacgtacagttttgagaaggtgcctttccactcgatgtacgcgcacagccagagcctggaccggctgatgaaccctctcatcgaccagtacctgtggggactgcaatcgaccaccaccggaaccaccctgaatgccgggactgccaccaccaactttaccaagctgcggcctaccaacttttccaactttaaaaagaactggctgcccgggccttcaatcaagcagcagggcttctcaaagactgccaatcaaaactacaagatccctgccaccgggtcagacagtctcatcaaatacgagacgcacagcactctggacggaagatggagtgccctgacccccggacctccaatggccacggctggacctgcggacagcaagttcagcaacagccagctcatctttgcggggcctaaacagaacggcaacacggccaccgtacccgggactctgatcttcacctctgaggaggagctggcagccaccaacgctaccgatacggacatgtggggcaacctacctggcggtgaccagagcaacagcaacctgccgaccgtggacagactgacagccttgggagccgtgcctggaatggtctggcaaaacagagacatttactaccagggtcccatttgggccaagattcctcataccgatggacactttcacccctcaccgctgattggtgggtttgggctgaaacacccgcctcctcaaatttttatcaagaacaccccggtacctgcgaatcctgcgacgaccttcagctctactccggtaaactccttcattactcagtacagcactggccaggtgtcggtgcagattgactgggagatccagaaggagcggtccaaacgctggaaccccgaggtccagtttacctccaactacggacagcaaaactctctgttgtgggctcccgatgcggctgggaaatacactgagcctagggctatcggtacccgctacctcacccaccacctgtaa

SEQ ID NO: 793 - DNA, 2205 bp, Artificial Sequence
  Description of Artificial Sequence: Synthetic polynucleotide
atgactgacggttaccttccagattggctagaggacaacctctctgaaggcgttcgagagtggtgggcgctgcaacctggagcccctaaacccaaggcaaatcaacaacatcaggacaacgctcggggtcttgtgcttccgggttacaaatacctcggacccggcaacggactcgacaagggggaacccgtcaacgcagcggacgcggcagccctcgagcacgacaaggcctacgaccagcagctcaaggccggtgacaacccctacctcaagtacaaccacgccgacgcggagttccagcagcggcttcagggcgacacatcgtttgggggcaacctcggcagagcagtcttccaggccaaaaagagggttcttgaacctcttggtctggttgagcaagcgggtgagacggctcctggaaagaagagaccgttgattgaatccccccagcagcccgactcctccacgggtatcggcaaaaaaggcaagcagccggctaaaaagaagctcgttttcgaagacggaactggagcaggcgacggaccccctgagggatcaacttccggagccatgtctgatgacagtgagatgcgtgcagcagctggcggagctgcagtcgagggcggacaaggtgccgatggagtgggtaatgcctcgggtgattggcattgcgattccacctggtctgagggccacgtcacgaccaccagcaccagaacctgggtcttgcccacctacaacaaccacctctacaagcgactcggagagagcctgcagtccaacacctacaacggattccccaccccctggggatactttgacttcaaccgcttccactgccacttctcaccacgtgactggcagcgactcatcaacaacaactggggcatgcgacccaaagccatgcgggtcaaaatcttcaacatccaggtcaaggaggtcacgacgtcgaacggcgagacaacggcggctaataaccttaccagcacggttcagatctttgcggactcgtcgtacgaactgccgtacgtgatggatgcgggtcaagagggcagcctgcctccttttcccaacgacgtctttatggtgccccagtacggctactgtggactggtgaccggcaacacttcgcagcaacagactgacagaaatgccttctactgcctggagtactttccttcgcagatgctgcggactggcaacaactttgaaattacgtacagttttgagaaggtgcctttccactcgatgtacgcgcacagccagagcctggaccggctgatgaaccctctcatcgaccagtacctgtggggactgcaatcgaccaccaccggaaccaccctgaatgccgggactgccaccaccaactttaccaagctgcggcctaccaacttttccaactttaaaaagaactggctgcccgggccttcaatcaagcagcagggcttctcaaagactgccaatcaaaactacaagatccctgccaccgggtcagacagtctcatcaaatacgagacgcacagcactctggacggaagatggagtgccctgacccccggacctccaatggccacggctggacctgcggacagcaagttcagcaacagccagctcatctttgcggggcctaaacagaacggcaacacggccaccgtacccgggactctgatcttcacctctgaggaggagctggcagccaccaacgccaccgatacggacatgtggggcaacctacctggcggtgaccagagcaacagcaacctgccgaccgtggacagactgacagccttgggagccgtgcctggaatggtctggcaaaacagagacatttactaccagggtcccatttgggccaagattcctcataccgatggacactttcacccctcaccgctgattggtgggtttgggctgaaacacccgcctcctcaaatttttatcaagaacaccccggtacctgcgaatcctgcgacgaccttcagctctactccggtaaactccttcattactcagtacagcactggccaggtgtcggtgcagattgactgggagatccagaaggagcggtccaaacgctggaaccccgaggtccagtttacctccaactacggacagcaaaactctctgttgtgggctcccgatgcggctgggaaatacactgagcctagggctatcggtacccgctacctcacccaccacctgtaa

SEQ ID NO: 794 - DNA, 2205 bp, Artificial Sequence
  Description of Artificial Sequence: Synthetic polynucleotide
atgactgacggttaccttccagattggctagaggacaacctctctgaaggcgttcgagagtggtgggcgctgcaacctggagcccctaaacccaaggcaaatcaacaacatcaggacaacgctcggggtcttgtgcttccgggttacaaatacctcggacccggcaacggactcgacaagggggaacccgtcaacgcagcggacgcggcagccctcgagcacgacaaggcctacgaccagcagctcaaggccggtgacaacccctacctcaagtacaaccacgccgacgcggagttccagcagcggcttcagggcgacacatcgtttgggggcaacctcggcagagcagtcttccaggccaaaaagagggttcttgaacctcttggtctggttgagcaagcgggtgagacggctcctggaaagaagagaccgttgattgaatccccccagcagcccgactcctccacgggtatcggcaaaaaaggcaagcagccggctaaaaagaagctcgttttcgaagacgaaactggagcaggcgacggaccccctgagggatcaacttccggagccatgtctgatgacagtgagatgcgtgcagcagctggcggagctgcagtcgagggcggacaaggtgccgatggagtgggtaatgcctcgggtgattggcattgcgattccacctggtctgagggccacgtcacgaccaccagcaccagaacctgggtcttgcccacctacaacaaccacctctacaagcgactcggagagagcctgcagtccaacacctacaacggattctccaccccctggggatactttgacttcaaccgcttccactgccacttctcaccacgtgactggcagcgactcatcaacaacaactggggcatgcgacccaaagccatgcgggtcaaaatcttcaacatccaggtcaaggaggtcacgacgtcgaacggcgagacaacggtggctaataaccttaccagcacggttcagatctttgcggactcgtcgtacgaactgccgtacgtgatggatgcgggtcaagagggcagcctgcctccttttcccaacgacgtctttatggtgccccagtacggctaccgtggactggtgaccggcaacacttcgcagcaacagactgacagaaatgccttctactgcctggagtactttccttcgcagatgctgcggactggcaacaactttgaaattacgtacagttttgagaaggtgcctttccactcgatgtacgcgcacagccagagcctggaccggctgatgaaccctctcatcgaccagtacctgtggggactgcaatcgaccaccaccggaaccaccctgaatgccgggactgccaccaccaactttaccaagctgcggcctaccaacttttccaactttaaaaagaactggctgcccgggccttcaatcaagcagcagggcttctcaaagactgccaatcaaaactacaagatccctgccaccgggtcagacagtctcatcaaatacgagacgcacagcactctggacggaagatggagtgccctgacccccggacctccaatggccacggctggacctgcggacagcaagttcagcaacagccagctcatctttgcggggcctaaacagaacggcaacacggccaccgtacccgggactctgatcttcacctctgaggaggagctggcagccaccaacgccaccgatacggacatgtggggcaacctacctggcggtgaccagagcaacagcaacctgccgaccgtggacagactgacagccttgggagccgtgcctggaatggtctggcaaaacagagacatttactaccagggtcccatttgggccaagattcctcataccgatggacactttcacccctcaccgctgattggtgggtttgggctgaaacacccgcctcctcaaatttttatcaagaacaccccggtacctgcgaatcctgcgacgaccttcagctctactccggtaaactccttcattactcagtacagcactggccaggtgtcggtgcagattgactgggagatccagaaggagcggtccaaacgctggaaccccgaggtccagtttacctccaactacggacagcaaaactctctgttgtgggctcccgatgcggctgggaaatacactgagcctagggctatcggtacccgctacctcacccaccacctgtaa

SEQ ID NO: 795 - DNA, 2205 bp, Artificial Sequence
  Description of Artificial Sequence: Synthetic polynucleotide
atgactgacggttaccttccagattggctagaggacaacctctctgaaggcgttcgagagtggtgggcgctgcaacctggagcccctaaacccaaggcaaatcaacaacatcaggacaacgctcggggtcttgtgcttcagggttacaaatacctcggacccggcaacggactcgacaagggggaacccgtcaacgcagcggacgcggcagccctcgagcacgacaaggcctacgaccagcagctcaaggccggtgacaacccctacctcaagtacaaccacgccgacgcggagttccagcagcggcttcagggcgacacatcgtttgggggcaacctcggcagagcagtcttccaggccaaaaagagggttcttgaaccccttggtctggttgagcaagcgggtgagacggctcctggaaagaagagaccgttgattgaatccccccagcagcccgactcctccacgggtatcggcaaaaaaggcaagcagccggctaaaaagaagctcgttttcgaagacgaaactggagcaggcgacggaccccctgagggatcaacttccggagccatgtctgatgacagtgagatgcgtgcagcagctggcggagctgcagtcgagggcggacaaggtgccgatggagtgggtaatgcctcgggtgattggcattgcgattccacccggtctgagggccacgtcacgaccaccagcaccagaacctgggtcttgcccacctacaacaaccacctctacaagcgactcggagagagcctgcagtccaacacctacaacggattctccaccccctggggatactttgacttcaaccgcttccactgccacttctcaccacgtgactggcagcgactcatcaacaataactggggcatgcgacccaaagccatgcgggtcaaaatcttcaacatccaggtcaaggaggtcacgacgtcgaacggcgagacaacggtggctaataaccttaccagcacggttcagatctttgcggactcgtcgtacgaactgccgtacgtgatggatgcgggtcaagagggcagcctgcctccttttcccaacgacgtctttatggtgccccagtacggctactgtggactggtgaccggcaacacttcgcagcaacagactgacagaaatgccttctactgcctggagtactttccttcgcagatgctgcggactggcaacaactttgaaattacgtacagttttgagaaggtgcctttccactcgatgtacgcgcacagccagagcctggaccggctgatgaaccctctcatcgaccagtacctgtggggactgcaatcgaccaccaccggaaccaccctgaatgccgggactgccaccaccaactttaccaagctgcggcctaccaacttttccaactttaaaaagaactggctgcccgggccttcaatcaagcagcagggcttctcaaagactgccaatcaaaactacaagatccctgccaccgggtcagacagtctcatcaaatacgagacgcacagcactctggacggaagatggagtgcccggacccccggacctccaatggccacggctggacctgcggacagcaagttcagcaacagccagctcatctttgcggggcctaaacagaacggcaacacggccaccgtacccgggactctgatcttcacctctgaggaggagctggcagccaccaacgccaccgatacggacatgtggggcaacctacctggcggtgaccagagcaacagcaacctgccgaccgtggacagactgacagccttgggagccgtgcctggaatggtctggcaaaacagagacatttactaccagggtcccatttgggccaagattcctcataccgatggacactttcacccctcaccgctgattggtgggtttgggctgaaacacccgcctcctcaaatttttatcaagaacaccccggtacctgcgaatcctgcgacgaccttcagctctactccggtaaactccttcattactcagtacagcactggccaggtgtcggtgcagattgactgggagatccagaaggagcggtccaaacgctggaaccccgaggtccagtttacctccaactacggacagcaaaactctctgttgtgggctcccgatgcggctgggaaatacactgagcctagggctatcggtacccgctacctcacccaccacctgtaa

SEQ ID NO: 796 - DNA, 2175 bp, Artificial Sequence
  Description of Artificial Sequence: Synthetic polynucleotide
atgtcttttgttgatcaccctccagattggttggaagaagttggtgaaggtcttcgcgagtttttgggccttgaagcgggcccaccgaaaccaaaacccaatcagcagcatcaagatcaagcccgtggtcttgtgctgcctggttataactatctcggacccggaaacggtctcgatcgaggagagcctgtcaacagggcagacgaggtcgcgcgagagcacgacatctcgtacaacgagcagcttgaggcgggagacaacccctacctcaagtacaaccacgcggacgccgagtttcaggagaggctcgccgacgacacatccttcgggggaaacctcggaaaggcagtctttcaggccaagaaaagggttctcgaaccttttggcctggttgaagagggtgctaagacggcccctaccggaaagcggatagacgaccactttccaaaaagaaagaaggcccggaccgaagaggactccaagccttccacctcgtcagacgccgaagctggacccagcggatcccagcagctgcaaatcccagcccaaccagcctcaagtttgggagctgatacaatgtctgcgggaggtggcggcccattgggcgacaataaccaaggtgccgatggagtgggcaatgcctcgggagattggcattgcgattccacgtggatgggggacagagtcgtcaccaagtccacccgaacctgggtgctgcccagctacaacaaccaccagtaccgagagatcaaaagcggctccgtcgacggaagcaacgccaacgcctactttggatacagcaccccctgggggtactttgactttaaccgcttccacagccactggagcccccgagactggcaaagactcatcaacaactactggggcttcagaccccggtccctcagagtcaaaatcttcaacattcaagtcaaagaggtcacggtgcaggactccaccaccaccatcgccaacaacctcacctccaccgtccaagtgtttacggacgacgactaccagctgccctacgtcgtcggcaacgggaccgagggatgcctgccggccttccctccgcaggtctttacgctgccgcagtacggttacgcgacgctgaaccgcgacaacacagaaaatcccaccgagaggagcagcttcttctgcctagagtactttcccagcaagatgctgagaacgggcaacaactttgagtttacctacaactttgaggaggtgcccttccactccagcttcgctcccagtcagaacctcttcaagctggccaacccgctggtggaccagtacttgtaccgcttcgtgagcacaaataacactggcggagtccagttcaacaagaacctggccgggagatacgccaacacctacaaaaactggttcccggggcccatgggccgaacccagggctggaacctgggctccggggtcaaccgcgccagtgtcagcgccttcgccacgaccaataggatggagctcgagggcgcgagttaccaggtgcccccgcagccgaacggcatgaccaacaacctccagggcagcaacacctatgccctggagaacactatgatcttcaacagccagccggcgaacccgggcaccaccgccacgtacctcgagggcaacatgctcatcaccagcgagagcgagacgcagccggtgaaccgcgtggcgtacaacgtcggcgggcagatggccaccaacaaccagagctccaccactgcccccgcgaccggcacgtacaacctccaggaaatcgtgcccggcagcgtgtggatggagagggacgtgtacctccaaggacccatctgggccaagatcccagagacggaggcgcactttcacccctctccggccatgggcggattcggactcaaacacccaccgcccatgatgctcatcaagaacacgcctgtgcccggaaatatcaccagcttctcggacgtgcccgtcagcagcttcatcacccagtacagcaccgggcaggtcaccgtggagatggagtgggagctcaagaaggaaaactccaagaggtggaacccagagatccagtacacaaacaactacaacgacccccagtttgtggactttgccccggacagcaccggggaatacagaaccaccagacctatcggaacccgataccttacccgacccctttaa

SEQ ID NO: 797 - DNA, 2175 bp, Artificial Sequence
  Description of Artificial Sequence: Synthetic polynucleotide
atgtcttttgttgatcaccctccagattggttggaagaagttggtgaaggtcttcgcgagtttttgggccttgaagcgggcccaccgaaaccaaaacccaatcagcagcatcaagatcaagcccgtggtcttgtgctgcctggttataactatctcggacccggaaacggtctcgatcgaggagagcctgtcaacagggcagacgaggtcgcgcgagagcacgacatctcgtacaacgagcagcttgaggcgggagacaacccctacctcaagtacaaccacgcggacgccgagtttcaggagaagctcgccgacgacacatcctccgggggaaacctcggaaaggcagtctttcaggccaagaaaagggttctcgaaccttttggcctggttgaagagggtgctaagacggcccctaccggaaagcggatagacgaccactttccaaaaagaaagaaggcccggaccgaagaggactccaagccttccacctcgtcagacgccgaagctggacccagcggatcccagcagctgcaaatcccagcccaaccagcctcaagtttgggagctgatacaatgtctgcgggaggtggcggcccattgggcgacaataaccaaggtgccgatggagtgggcaatgcctcgggagattggcattgcgattccacgtggatgggggacagagtcgtcaccaagtccacccgaacctgggtgctgcccagctacaacaaccaccagtaccgagagatcaaaagcggctccgtcgacggaagcaacgccaacgcctactttggatacagcaccccctgggggtactttgactttaaccgcttccacagccactggagcccccgagactggcaaagactcatcaacaactactggggcttcagaccccggtccctcagagtcaaaatcttcaacattcaagtcaaagaggtcacggtgcaggactccaccaccaccatcgccaacaacctcacctccaccgtccaagtgtttacggacgacgactaccagctgccctacgtcgtcggcaacgggaccgagggatgcctgccggccttccctccgcaggtctttacgctgccgcagtacggttacgcgacgctgaaccgcgacaacacagaaaatcccaccgagaggagcagcttcttctgcctagagtactttcccagcaagatgctgagaacgggcaacaactttgagtttacctacaactttgaggaggtgcccttccactccagcttcgctcccagtcagaacctcttcaagctggccaacccgctagtggaccagtacttgtaccgcttcgtgagcacaaataacactggcggagtccagttcaacaagaacctggccgggagatacgccaacacctacaaaaactggttcccggggcccatgggccgaacccagggctggaacctgggctccggggtcaaccgcgccagtgtcagcgccttcgccacgaccaataggatggagctcgagggcgcgagttaccaggtgcccccgcagccgaacggcatgaccaacaacctccagggcagcaacacctatgccctggagaacactatgatcttcaacagccagccggcgaacccgggcaccaccgccacgtacctcgagggcaacatgctcatcaccagcgagagcgagacgcagccggtgaaccgcgtggcgtacaacgtcggcgggcagatggccaccaacaaccagagctccaccactgcccccgcgaccggcacgtacaacctccaggaaatcgtgcccggcagcgtgtggatggagagggacgtgtacctccaaggacccatctgggccaagatcccagagacgggggcgcactttcacccctctccggccatgggcggattcggactcaaacacccaccgcccatgatgctcatcaagaacacgcctgtgcccggaaatatcaccagcttctcggacgtgcccgtcagcagcttcatcacccagtacagcaccgggcaggtcaccgtggagatggagtgggagctcaagaaggaaaactccaagaggtggaacccagagatccagtacacaaacaactacaacgacccccagtttgtggactttgccccggacagcaccggggaatacagaaccaccagacctatcggaacccgataccttacccgacccctttaa

SEQ ID NO: 798 - DNA, 2175 bp, Artificial Sequence
  Description of Artificial Sequence: Synthetic polynucleotide
atgtcttttgttgatcaccctccagattggttggaagaagttggtgaaggtcttcgcgagtttttgggccttgaagcgggcccaccgaaaccaaaacccaatcagcagcatcaagatcaagcccgtggtcttgtgctgcctggttataactatctcggacccggaaacggtctcgatcgaggagagcctgtcaacagggcagacgaggtcgcgcgagagcacgacatctcgtacaacgagcagcttgaggcgggagacaacccctacctcaagtacaaccacgcggacgccgagtttcaggagaagctcgccgacgacacatccttcgggggaaacctcggaaaggcagtctttcaggccaagaaaagggttctcgaaccttttggcctggttgaagagggtgctaagacggcccctaccggaaagcggatagacgaccactttccaaaaagaaagaaggcccggaccgaagaggactccaagccttccacctcgtcagacgccgaagctggacccagcggatcccagcagctgcaaatcccagcccaaccagcctcaagtttgggagctgatacaatgtctgcgggaggtggcggcccattgggcgacaataaccaaggtgccgatggagtgggcaatgcctcgggagattggcattgcgattccacgtggatgggggacagagtcgtcaccaagtccacccgaacctgggtgctgcccagctacaacaaccaccagtaccgagagatcaaaagcggctccgtcgacggaagcaacgccaacgcctactttggatacagcaccccctgggggtactttgactttaaccgcttccacagccactggagcccccgagactggcaaagactcatcaacaactactggggcttcagaccccggtccctcagagtcaaaatcttcaacattcaagtcaaagaggtcacggtgcaggactccaccaccaccatcgccaacaacctcacctccaccgtccaagtgtttacggacgacgactaccagctgccctacgtcgtcggcaacgggaccgagggatgcctgccggccttccctccgcaggtctttacgctgccgcagtacggttacgcgacactgaaccgcgacaacacagaaaatcccaccgagaggagcagcttcttctgcctagagtactttcccagcaagatgctgagaacgggcaacaactttgagtttacctacaactttgaggaggtgcccttccactccagcttcgctcccagtcagaacctcttcaagctggccaacccgctggtggaccagtacttgtaccgcttcgtgagcacaaataacactggcggagtccagttcaacaagaacctggccgggagatacgccaacacctacaaaaactggttcccggggcccatgggccgaacccagggctggaacctgggctccggggtcaaccgcgccagtgtcagcgccttcgccacgaccaataggatggagctcgagggcgcgagttaccaggtgcccccgcagccgaacggcatgaccaacaacctccagggcagcaacacctatgccctggagaacactatgatcttcaacagccagccggcgaacccgggcaccaccgccacgtacctcgagggcaacatgctcatcaccagcgagagcgagacgcagccggtgaaccgcgtggcgtacaacgtcggcgggcagatggccaccaacaaccagagctccaccactgcccccgcgaccggcacgtacaacctccaggaaatcgtgcccggcagcgtgtggatggagagggacgtgtacctccaaggacccatctgggccaagatcccagagacgggggcgcactttcacccctctccggccatgggcggattcggactcaaacacccaccgcccatgatgctcatcaagagcacgcctgtgcccggaaatatcaccagcttctcggacgtgcccgtcagcagcttcatcacccagtacagcaccgggcaggtcaccgtggagatggagtgggagctcaagaaggaaaactccaagaggtggaacccagagatccagtacacaaacaactacaacgacccccagtttgtggactttgccccggacagcaccggggaatacagaaccaccagacctatcggaacccgataccttacccgacccctttaa

SEQ ID NO: 799 - DNA, 2175 bp, Artificial Sequence
  Description of Artificial Sequence: Synthetic polynucleotide
atgtcttttgttgatcaccctccagattggttggaagaagttggtgaaggtcttcgcgagtttttgggccctgaagcgggcccaccgaaaccaaaacccaatcagcagcatcaagatcaagcccgtggtcttgtgctgcctggttataactatctcggacccggaaacggtctcgatcgaggagagcctgtcaacagggcagacgaggtcgcgcgagagcacgacatctcgtacaacgagcagcttgaggcgggagacaacccctacctcaagtacaaccacgcggacgccgagtttcaggagaagctcgccgacgacacatccttcgggggaaacctcggaaaggcagtctttcaggccaagaaaagggttctcgaaccttttggcctggttgaagagggtgctaagacggcccctaccggaaagcggatagacgaccactttccaaaaagaaagaaggtccggaccgaagaggactccaagccttccacctcgtcagacgccgaagctggacccagcggatcccagcagctgcaaatcccagcccaaccagcctcaagtttgggagctgatacaatgtctgcgggaggtggcggcccattgggcgacaataaccaaggtgccgatggagtgggcaatgcctcgggagattggcattgcgattccacgtggatgggggacagagtcgtcaccaagtccacccgaacctgggtgccgcccagctacaacaaccaccagtaccgagagatcaaaagcggctccgtcgacggaagcaacgccaacgcctactttggatacagcaccccctgggggtactttgactttaaccgcttccacagccactggagcccccgagactggcaaagactcatcaacaactactggggcttcagaccccggtccctcagagtcaaaatcttcaacattcaagtcaaagaggtcacggtgcaggactccaccaccaccatcgccaacaacctcacctccaccgtccaagtgtttacggacgacgactaccagctgccctacgtcgtcggcaacgggaccgagggatgcctgccggccttccctccgcaggtctttacgctgccgcagtacggttacgcgacgctgaaccgcgacaacacagaaaatcccaccgagaggagcagcttcttctgcctagagtactttcccagcaagatgctgagaacgggcaacaactttgagtttacctacaactttgaggaggtgcccttccactccagcttcgctcccagtcagaacctcttcaagctggccaacccgctggtggaccagtacttgtaccgcttcgtgagcacaaataacactggcggagtccagttcaacaagaacctggccgggagatacgccaacacctacaaaaactggttcccggggcccatgggccgaacccagggctggaacctgggctccggggtcaaccgcgccagtgtcagcgccttcgccacgaccaataggatggagctcgagggcgcgagttaccaggtgcccccgcagccgaacggcatgaccaacaacctccagggcagcaacacctatgccctggagaacactatgatcttcaacagccagccggcgaacccgggcaccaccgccacgtacctcgagggcaacatgctcatcaccagcgagagcgagacgcagccggtgaaccgcgtggcgtgcaacgtcggcgggcagatggccaccaacaaccagagctccaccactgcccccgcgaccggcacgtacaacctccaggaaatcgtgcccggcagcgtgtggatggagagggacgtgtacctccaaggacccatctgggccaagatcccagagacgggggcgcactttcacccctctccggccatgggcggattcggactcaaacacccaccgcccatgatgctcatcaagaacacgcctgtgcccggaaatatcaccagcttctcggacgtgcccgtcagcagcttcatcacccagtacagcaccgggcaggtcaccgtggagatggagtgggagctcaagaaggaaaactccaagaggtggaacccagagatccagtacacaaacaactacaacgacccccagtttgtggactttgccccggacagcaccggggaatacagaaccaccagacctattggaacccgataccttacccgacccctttaa

SEQ ID NO: 800 - DNA, 2175 bp, Artificial Sequence
  Description of Artificial Sequence: Synthetic polynucleotide
atgtcttttgttgatcaccctccagattggttggaagaagttggtgaaggtcttcgcgagtttttgggccttgaagcgggcccaccgaaaccaaaacccaatcagcagcatcaagatcaagcccgtggtcttgtgctgcctggttataactatctcggacccggaaacggtctcgatcgaggagagcctgtcaacagggcagacgaggtcgcgcgagagcacgacatctcgtacaacgagcagcttgaggcgggagacaacccctacctcaagtacaaccacgcggacgccgagtttcaggagaagctcgccgacgacacatccttcgggggaaacctcggaaaggcagtctttcaggccaagaaaagggttctcgaaccttttggcctggttgaagagggtgctaagacggcccctaccggaaagcggatagacgaccactttccaaaaagaaagaaggcccggaccgaagaggactccaagccttccacctcgtcagacgccgaagctggacccagcggatcccagcagctgcaaatcccagcccaaccagcctcaagtttgggagctgatacaatgtctgcgggaggtggcggcccattgggcgacaataaccaaggtgccgatggagtgggcaatgcctcgggagattggcattgcgattccacgtggatgggggacagagtcgtcaccaagtccacccgaacctgggtgctgcccagctacaacaaccaccagtaccgagagatcaaaagcggctccgtcgacggaagcaacgccaacgcctactttggatacagcaccccctgggggtactttgactttaaccgcttccacagccactggagcccccgagactggcaaagactcatcaacaactactggggcttcagaccccggtccctcagagtcaaaatcttcaacattcaagtcaaagaggtcacggtgcaggactccaccaccaccatcgccaacaacctcacctccaccgtccaagtgtttacggacgacgactaccagctgccctacgtcgtcggcaacgggaccgagggatgcctgccggccttccctccgcaggtctttacgctgccgcagtacggttacgcgacgctgaaccgcgacaacaccgaaaatcccaccgagaggagcagcttcttctgcctagagtactttcccagcaagatgctgagaacgggcaacaactttgagtttacctacaactttgaggaggtgcccttccactccagcttcgctcccagtcagaacctcttcaagctggccaacccgctggtggaccagtacttgtaccgcttcgtgagcacaaataacactggcggagtccagttcaacaagaacctggccgggagatacgccaacacctacaaaaactggttcccggggcccatgggccgaacccagggctggaacctgggctccggggtcaaccgcgccagtgtcagcgccttcgccacgaccaataggatggagctcgagggcgcgagttaccaggtgcccccgcagccgaacggcatgaccaacaacctccagggcagcaacacctatgccctggagaacactatgatcttcaacagccagccggcgaacccgggcaccaccgccacgtacctcgagggcaacatgctcatcaccagcgagagcgagacgcagccggtgaaccgcgtggcgtacaacgtcggcgggcagatggccaccaacaaccagagctccaccactgcccccgcgaccggcgcgtacaacctccaggaaatcgtgcccggcagcgtgtggatggagagggacgtgtacctccaaggacccatctgggccaagatcccagagacgggggcgcactttcacccctctccggccatgggcggattcggactcaaacacccaccgcccatgatgctcatcaagaacacgcctgtgcccggaaatatcaccagcttctcggacgtgcccgtcagcagcttcatcacccagtacagcaccgggcaggtcaccgtggagatggagtgggagctcaagaaggaaaactccaagaggtggaacccagagatccagtacacaaacaactacaacgacccccagtttgtggactttgccccggacagcaccggggaatacagaaccaccagacctatcggaacccgataccttacccgacccctttaa

SEQ ID NO: 801 - DNA, 2175 bp, Artificial Sequence
  Description of Artificial Sequence: Synthetic polynucleotide
atgtcttttgttgatcaccctccagattggttggaagaagttggtgaaggtcttcgcgagtttttgggccttgaagcgggcccaccgaaaccaaaacccaatcagcagcatcaagatcaagcccgtggtcttgtgctgcctggttataactatctcggacccggaaacggtctcgatcgaggagagcctgtcaacagggcagacggggtcgcgcgagagcacgacatctcgtacaacgagcagcttgaggcgggagacaacccctacctcaagtacaaccacgcggacgccgagtttcaggagaagctcgccgacgacacatccttcgggggaaacctcggaaaggcagtctttcaggccaagaaaagggttctcgaaccttttggcctggttgaagagggtgctaagacggcccctaccggaaagcggatagacgaccactttccaaaaagaaagaaggcccggaccgaagaggactccaagccttccacctcgtcagacgccgaagctggacccagcggatcccagcagctgcaaatcccagcccaaccagcctcaagtttgggagctgatacaatgtctgcgggaggtggcggcccattgggcgacaataaccaaggtgccgatggagtgggcaatgcctcgggagattggcattgcgattccacgtggatgggggacagagtcgtcaccaagtccacccgaacctgggtgctgcccagctacaacaaccaccagtaccgagagatcaaaagcggctccgtcgacggaagcaacgccaacgcctactttggatacagcaccccctgggggtactttgactttaaccgcttccacagccactggagcccccgagactggcaaagactcatcaacaactactggggcttcagaccccggtccctcagagtcaaaatcttcaacattcaagtcaaagaggtcacggtgcaggactccaccaccaccatcgccaacaacctcacctccaccgtccaagcgtttacggacgacgactaccagctgccctacgtcgtcggcaacgggaccgagggatgcctgccggccttccctccgcaggtctttacgctgccgcagtacggttacgcgacgctgaaccgcgacaacacagaaaatcccaccgagaggagcagcttcttctgcctagagtactttcccagcaagatgctgagaacgggcaacaactttgagtttacctacaactttgaggaggtgcccttccactccagcttcgctcccagtcagaacctcttcaagctggccaacccgctggtggaccagtacttgtaccgcttcgtgagcacaaataacactggcggagtccagttcaacaagaacctggccgggagatacgccaacacctacaaaaactggttcccggggcccatgggccgaacccagggctggaacctgggctccggggtcaaccgcgccagtgtcagcgccttcgccacgaccaataggatggagctcgagggcgcgagttaccaggtgcccccgcagccgaacggcatgaccaacaacctccagggcagcaacacctatgccctggagaacactatgatcttcaacagccagccggcgaacccgggcaccaccgccacgtacctcgagggcaacatgctcatcaccagcgagagcgagacgcagccggtgaaccgcgtggcgtacaacgtcggcgggcagatggccaccaacaaccagagctccaccactgcccccgcgaccggcacgtacaacctccaggaaatcgtgcccggcagcgtgtggatggagagggacgtgtacctccaaggacccatctgggccaagatcccagagacgggggcgcactttcacccctctccggccatgggcggattcggactcaaacacccaccgcccatgatgctcatcaagaacacgcctgtgcccggaaatatcaccagcttctcggacgtgcccgtcagcagcttcatcacccagtacagcaccgggcaggtcaccgtggagatggagtgggagctcaagaaggaaaactccaagaggtggaacccagagatccagtacacaaacaactacaacgacccccagtttgtggactttgccccggacagcaccggggaatacagaaccaccagacctatcggaacccgataccttacccgacccctttaa

SEQ ID NO: 802 - DNA, 2175 bp, Artificial Sequence
  Description of Artificial Sequence: Synthetic polynucleotide
atgtcttttgttgatcaccctccagattggttggaagaagttggtgaaggtcttcgcgagtttttgggccttgaagcgggcccaccgaaaccaaaacccaatcagcagcatcaagatcaagcccgtggtcttgtgctgcctggttataactatctcggacccggaaacggtctcgatcgaggagagcctgtcaacagggcagacgaggtcgcgcgagagcacgacatctcgtacaacgagcagcttgaggcgggagacaacccctacctcaagtacaaccacgcggacgccgagtttcaggagaagctcgccgacgacacatccttcgggggaaacctcggaaaggcagtctttcaggccaagaaaagggttctcgaaccttttggcctggttgaagagggtgctaagacggcccctaccggaaagcggatagacgaccactttccaaaaagaaagaaggcccggaccgaagaggactccaagccttccacctcgtcagacgccgaagctggacccagcggatcccagcagctgcaaatcccagcccaaccagcctcaagtttgggagctgatacaatgtctgcgggaggtggcggcccattgggcgacaataaccaaggtgccgatggagtgggcaatgcctcgggagattggcattgcgattccacgtggatgggggacagagtcgtcaccaagtccacccgaacctgggtgctgcccagctacaacaaccaccagtaccgagagatcaaaagcggctccgtcgacggaagcaacgccaacgcctactttggatacagcaccccctgggggtactttgactttaaccgcttccacagccactggagcccccgagactggcaaagactcatcaacaactactggggcttcagaccccggtccctcagagtcaaaatcttcaacattcaagtcaaagaggtcacggtgcaggactccaccaccaccatcgccaacaacctcacctccaccgtccaagtgtttacggacgacgactaccagctgccctacgtcgtcggcaacgggaccgagggatgcctgccggccttccctccgcaggtctttacgctgccgcagtacggttacgcgacgctgaaccgcgacaacacagaaaatcccaccgagaggagcagcttcttctgcctagagtactttcccagcaagatgctgagaacgggcaacaactttgagtttacctacaactttgaggaggtgcccttccactccagcttcgctcccagtcagaacctcttcaagctggccaacccgctggtggaccagtacttgtaccgcttcgtgagcacaaataacactggcggagtccagttcaacaagaacctggccgggagatacgccaacacctacaaaaactggttcccggggcccatgggccgaacccagggctggaacctgggctccggggtcaaccgcgccagtgtcagcgccttcgccacgaccaataggatggagctcgagggcgcgagttactaggtgcccccgcagccgaacggcatgaccaacaacctccagggcagcaacacctatgccctggagaacactatgatcttcaacagccagccggcgaacccgggcaccaccgccacgtacctcgagggcaacatgctcatcaccagcgagagcgagacgcagccggtgaaccgcgtggcgtacaacgtcggcgggcagatggccaccaacaaccagagctccaccactgcccccgcgaccggcacgtacaacctccaggaaatcgtgcccggcagcgtgtggatggagggggacgtgtacctccaaggacccatctgggccaagatcccagagacgggggcgcactttcacccctctccggccatgggcggattcggactcaagcacccaccgcccatgatgctcatcaagaacacgcctgtgcccggaaatatcaccagcttctcggacgtgcccgtcagcagcttcatcacccagtacagcaccgggcaggtcaccgtggagatggagtgggagctcaagaaggaaaactccaagaggtggaacccagagatccagtacacaaacaactacaacgacccccagtttgtggactttgccccggacagcaccggggaatacagaaccaccagacctatcggaacccgataccttacccgacccctttaa

SEQ ID NO: 803 - DNA, 2175 bp, Artificial Sequence
  Description of Artificial Sequence: Synthetic polynucleotide
atgtcttttgttgatcaccctccagattggttggaagaagttggtgaaggtcttcgcgagtttttgggccttgaagcgggcccaccgaaaccaaaacccaatcagcagcatcaagatcaagcccgtggtcttgtgctgcctggttataactatctcggacccggaaacggtctcgatcgaggagagcctgtcaacagggcagacgaggtcgcgcgagagcacgacatctcgtacaacgagcagcttgaggcgggagacaacccctacctcaagtacaaccacgcggacgccgagtttcaggagaagctcgccgacgacacatccttcgggggaaacctcggaaaggcagtctttcaggccaagaaaagggttctcgaaccttttggcctggttgaagagggtgctaagacggcccctaccggaaagcggatagacgaccactttccaaaaagaaagaaggtccggaccgaagaggactccaagccttccacctcgtcagacgccgaagctggacccagcggatcccagcagctgcaaatcccagcccaaccagcctcaagtttgggagctgatacaatgtctgcgggaggtggcggcccattgggcgacaataaccaaggtgccgatggagtgggcaatgcctcgggagattggcattgcgattccacgtggatgggggacagagtcgtcaccaagtccacccgaacctgggtgctgcccagctacaacaaccaccagtaccgagagatcaaaagcggctccgtcgacggaagcaacgccaacgcctactttggatacagcaccccctgggggtactttgactttaaccgcttccacagccactggagcccccgagactggcaaagactcatcaacaactactggggcttcagaccccggtccctcagagtcaaaatcttcaacattcaagtcaaagaggtcacggtgcaggactccaccaccaccatcgccaacaacctcacctccaccgtccaagtgtttacggacgacgactaccagctgccctacgtcgtcggcaacgggaccgagggatgcctgccggccttccctccgcaggtctttacgctgccgcagtacggttacgcgacgctgaaccgcgacaacacagaaaatcccaccgagaggagcagcttcttctgcctagagtactttcccagcaagatgctgagaacgggcaacaactttgagtttacctacaactttgaggaggtgcccttccactccagcttcgctcccagtcagaacctcttcaagctggccaacccgctggtggaccagtacttgtaccgcttcgtgagcacaaataacactggcggagtccagttcaacaagaacctggccgggagatacgccaacacctacaaaaactggttcccggggcccatgggccgaacccagggctggaacctgggctccggggtcaaccgcgccagtgtcagcgccttcgccacgaccaataggatggagctcgagggcgcgagttaccaggtgcccccgcagccgaacggcatgaccaacaacctccagggcagcaacacctatgccctggagaacactatgatcttcaacagccagccggcgaacccgggcaccaccgccacgtacctcgagggcaacatgctcatcaccagcgagagcgagacgcagccggtgaaccgcgtggcgtacaacgtcggcgggcagatggccaccaacaaccagagctccaccactgcccccgcgaccggcacgtacaacctccaggaaatcgtgcccggcagcgtgtggatggagagggacgtgtacctccaaggacccatctgggccaagatcccagagacgggggcgcactttcacccctctccggccatgggcggattcggactcaaacacccaccgcccatgatgctcatcaagaacacgcctgtgcccggaaatatcaccagcttctcggacgtgcccgtcagcagcttcatcacccagtacagcaccgggcaggtcaccgtggagatggagtgggagctcaagaaggaaaactccgagaggtggaacccagagatccagtacacaaacaactacaacgacccccagtttgtggactttgccccggacagcaccggggaatacagaaccaccagacctattggaacccgataccttacccgacccctttaa

SEQ ID NO: 804 - DNA, 2175 bp, Artificial Sequence
  Description of Artificial Sequence: Synthetic polynucleotide
atgtcttttgttgatcaccctccagattggttggaagaagttggtgaaggtcttcgcgagtttttgggccttgaagcgggcccaccgaaaccaaaacccaatcagcagcatcaagatcaagcccgtggtcttgtgctgcctggttataactatctcggacccggaaacggtctcgatcgaggagagcctgtcaacagggcagacgaggtcgcgcgagagcacgacatctcgtacagcgagcagcttgaggcgggagacaacccctacctcaagtacaaccacgcggacgccgagtttcaggagaagctcgccgacgacacatccttcgggggaaacctcggaaaggcagtctttcaggccaagaaaagggttctcgaaccttttggcctggttgaagagggtgctaagacggcccctaccggaaagcggatagacgaccactttccaaaaagaaagaaggcccggaccgaagaggactccaagccttccacctcgtcagacgccgaagctggacccagcggatcccagcagctgcaaatcccagcccaaccagcctcaagtttgggagctgatacaatgtctgcgggaggtggcggcccattgggcgacaataaccaaggtgccgatggagtgggcaatgcctcgggagattggcattgcgattccacgtggatgggggacagagtcgtcaccaagtccacccgaacctgggtgctgcccagctacaacaaccaccagtaccgagagatcaaaagcggctccgtcgacggaagcaacgccaacgcctactttggatacagcaccccctgggggtactttgactttaaccgcttccacagccactggagcccccgagactggcaaagactcatcaacaactactggggcttcagaccccggtccctcagagtcaaaatcttcaacattcaagtcaaagaggtcacggtgcaggactccaccaccaccatcgccaacaacctcacctccaccgtccaagtgtttacggacgacgactaccagctgccctacgtcgtcggcaacgggaccgagggatgcctgccggccttccctccgcaggtctttacgctgccgcagtacggttacgcgacgctgaaccgcgacaacacagaaaatcccaccgagaggagcagcttcttctgcctagagtactttcccagcaagatgctgagaacgggcaacaactttgagtttacctacaactttgaggaggtgcccttccactccagcttcgctcccagtcagaacctcttcaagctggccaacccgctggtggaccagtacttgtaccgcttcgtgagcacaaataacactggcggagtccagttcaacaagaacctggccgggagatacgccaacacctacaaaaactggttcccggggcccatgggccgaacccagggctggaacctgggctccggggtcaaccgcgccagtgtcagcgccttcgccacgaccaataggatggagctcgagggcgcgagttaccaggtgcccccgcagccgaacggcatgaccaacaacctccagggcagcaacacctatgccctggagaacactatgatcttcaacagccagccggcgaacccgggcaccaccgccacgtacctcgagggcaacatgctcatcaccagcgagagcgagacgcagccggtgaaccgcgtggcgtacaacgtcggcgggcagatggccaccaacaaccagagctccaccactgcccccgcgaccggcacgtacaacctccaggaaatcgtgcccggcagcgtgtggatggagagggacgtgtacctccaaggacccatctgggccaagatcccagagacgggggcgcactttcacccctctccggccatgggcggattcggactcaaacacccaccgcccatgatgctcatcaagaacacgcctgtgcccggaaatatcaccagcttctcggacgtgcccgtcagcagcttcatcacccagtacagcaccgggcaggtcaccgtggagatggagtgggagctcaagaaggaaaactccaagaggtggaacccagagatccagtacacaaacaactacaacgacccccagtttgtggactttgccccggacagcaccggggaatacagaaccgccagacctatcggaacccgataccttacccgacccctttaa

SEQ ID NO: 805 - DNA, 2175 bp, Artificial Sequence
  Description of Artificial Sequence: Synthetic polynucleotide
atgtcttttgttgatcaccctccagattggttggaagaagttggtgaaggtcttcgcgagtttttgggccctgaagcgggcccaccgaaaccaaaacccaatcagcagcatcaagatcaagcccgtggtcttgtgctgcctggttataactatctcggacccggaaacggtctcgatcgaggagagcctgtcaacagggcagacgaggtcgcgcgagagcacgacatctcgtacaacgagcagcttgaggcgggagacaacccctacctcaagtacaaccacgcggacgccgagtttcaggagaagctcgccgacgacacatccttcgggggaaacctcggaaaggcagtctttcaggccaagaaaagggttctcgaaccttttggcctggttgaagagggtgctaagacggcccctaccggaaagcggatagacgaccactttccaaaaagaaagaaggcccggaccgaagaggactccaagccttccacctcgtcagacgccgaagctggacccagcggatcccagcagctgcaaatcccagcccaaccagcctcaagtttgggagctgatacaatgtctgcgggaggtggcggcccattgggcgacaataaccaaggtgccgatggagtgggcaatgcctcgggagattggcattgcgattccacgtggatgggggacagagtcgtcaccaagtccacccgaacctgggtgctgcccagctacaacaaccaccagtaccgagagatcaaaagcggctccgtcgacggaagcaacgccaacgcctactttggatacagcaccccctgggggtactttgactttaaccgcttccacagccactggagcccccgagactggcaaagactcatcaacaactactggggcttcagaccccggtccctcagagtcaaaatcttcaacattcaagtcaaagaggtcacggtgcaggactccaccaccaccatcgccaacaacctcacctccaccgtccaagtgtttacggacgacgactaccagctgccctacgtcgtcggcaacgggaccgagggatgcctgccggccttccctccgcaggtctttacgctgccgcagtacggttacgcgacgctgaaccgcgacaacacagaaaatcccaccgagaggagcagcttcttctgcctagagtactttcccagcaagatgctgagaacgggcaacaactttgagtttacctacaactttgaggaggtgcccttccactccagcttcgctcccagtcagaacctcttcaagctggccaacccgctggtggaccagtacttgtaccgcttcgtgagcacaaataacactggcggagtccagttcaacaagaacctggccgggagatacgccaacacctacaaaaactggttcccggggcccatgggccgaacccagggctggaacctgggctccggggtcaaccgcgccagtgtcagcgccttcgccacgaccaataggatggagctcgagggcgcgagttaccaggtgcccccgcagccgaacggcatgaccaacaacctccagggcagcaacacctatgccctggagaacactatgatcttcaacagccagccggcgaacccgggcaccaccgccacgtacctcgagggcaacatgctcatcaccagcgagagcgagacgcagccggtgaaccgcgtggcgtacaacgtcggcgggcagatgaccaccaacaaccagagctccaccactgcccccgcgaccggcacgtacaacctccaggaaatcgtgcccggcagcgtgtggatggagagggacgtgtacccccaaggacccatctgggccaagatcccagagacgggggcgcactttcacccctctccggccatgggcggattcggactcaaacacccaccgcccatgatgctcatcaagaacacgcctgtgcccggaaatatcaccagcttctcggacgtgcccgtcagcagcttcatcacccagtacagcaccgggcaggtcaccgtggagatggagtgggagctcaagaaggaaaactccaagaggtggaacccagagatccagtacacaaacaactacaacgacccccagtttgtggactttgccccggacagcaccggggaatacaggaccaccagacctatcggaacccgataccttacccgacccctttaa

SEQ ID NO: 806 - DNA, 2175 bp, Artificial Sequence
  Description of Artificial Sequence: Synthetic polynucleotide
atgtcttttgttgatcaccctccagattggttggaagaagttggtgaaggtcttcgcgagtttttgggccttgaagcgggcccaccgaaaccaaaacccaatcagcagcatcaagatcaagcccgtggtcttgtgctgcctggttataactatctcggacccggaaacggtctcgatcgaggagagcctgtcaacagggcagacgaggtcgcgcgagagcacgacatctcgtacaacgagcagcttgaggcgggagacaacccctacctcaagtacaaccacgcggacgccgagtttcaggagaagctcgccgacgacacatccttcgggggaaacctcggaaaggcagtctttcaggccaagaaaagggttctcgaaccttttggcctggttgaagagggtgctaagacggcccctaccggaaagcggatagacgaccactttccaaaaagaaagaaggcccggaccgaagaggactccaagccttccacctcgtcagacgccgaagctggacccagcggatcccagcagctgcaaatcccagcccaaccagcctcaagtttgggagctgatacaatgtctgcgggaggtggcggcccattgggcgacaataaccaaggtgccgatggagtgggcaatgcctcgggagattggcattgcgattccacgtggatgggggacagagtcgtcaccaagtccacccgaacctgggtgctgcccagctacaacaaccaccagtaccgagagatcaaaagcggctccgtcgacggaagcaacgccaacgcctactttggatacagcaccccctgggggtactttgactttaaccgcttccacagccactggagcccccgagactggcaaagactcatcaacaactactggggcttcagaccccggtccctcagagtcaaaatcttcaacattcaagtcaaagaggtcacggtgcaggactccaccaccaccatcgccaacaacctcacctccaccgtccaagtgtttacggacgacgactaccagctgccctacgtcgtcggcaacgggaccgagggatgcctgccggccttccctccgcaggtctttacgctgccgcagtacggttacgcgacgctgaaccgcgacaacacagaaaatcccaccgagaggagcagcttcctctgcctagagtactttcccagcaagatgctgagaacgggcaacaactttgagtttacctacaactttgaggaggtgcccttccactccagcttcgctcccagtcagaacctcttcaagctggccaacccgctggtggaccagtacttgtaccgcttcgtgagcacaaataacactggcggagtccagttcaacaagaacctggccgggagatacgccaacacctacaaaaactggttcccggggcccatgggccgaacccagggctggaacctgggctccggggtcaaccgcgccagtgtcagcgccttcgccacgaccaataggatggagctcgagggcgcgagttaccaggtgcccccgcagccgaacggcatgaccaacaacctccagggcagcaacacctatgccctggagaacactatgatcttcaacagccagccggcgaacccgggcaccaccgccacgtacctcgagggcaacatgctcatcaccagcgagagcgagacgcagccggtgaaccgcgtggcgtacaacgtcggcgggcagatggccaccaacaaccagagctccaccactgcccccgcgaccggcacgtacaacctccaggaaatcgtgcccggcagcgtgtggatgaagagggacgtgtacctccaaggacccatctgggccaagatcccagagacgggggcgcactttcacccctctccggccatgggcggattcggactcaaacacccaccgcccatgatgctcatcaagaacacgcctgtgcccggaaatatcaccagcttctcggacgtgcccgtcagcagcttcatcacccagtacagcaccgggcaggtcaccgtggagatggagtgggagctcaagaaggaaaactccaagaggtggaacccagagatccagtacacaaacaactacaacgacccccagtttgtggactttgccccggacagcaccggggaatacagaaccaccagacctatcggaacccgataccttacccgacccctttaa

SEQ ID NO: 807 - DNA, 2175 bp, Artificial Sequence
  Description of Artificial Sequence: Synthetic polynucleotide
atgtcttttgttgatcaccctccagattggttggaagaagttggtgaaggtcttcgcgagtttttgggccttgaggcgggcccaccgaaaccaaaacccaatcagcagcatcaagatcaagcccgtggtcttgtgctgcctggttataactatctcggacccggaaacggtctcgatcgaggagagcctgtcaacagggcagacgaggtcgcgcgagagcacgacatctcgtacaacgagcagcttgaggcgggagacaacccctacctcaagtacaaccacgcggacgccgagtttcaggagaagctcgccgacgacacatccttcgggggaaacctcggaaaggcagtctttcaggccaagaaaagggttctcgaaccttttggcctggttgaagagggtgctaagacggcccctaccggaaagcggatagacgaccactttccaaaaagaaagaaggcccggaccgaagaggactccaagccttccaccccgtcagacgccgaagctggacccagcggatcccagcagctgcaaatcccagcccaaccagcctcaagtttgggagctgatacaatgtctgcgggaggtggcggcccattgggcgacaataaccaaggtgccgatggagtgggcaatgcctcgggagattggcattgcgattccacgtggatgggggacagagtcgtcaccaagtccacccgaacctgggtgctgcccagctacaacaaccaccagtaccgagagatcaaaagcggctccgtcgacggaagcaacgccaacgcctactttggatacagcaccccctgggggtactttgactttaaccgcttccacagccactggagcccccgagactggcaaagactcatcaacaactactggggcttcagaccccggtccctcagagtcaaaatcttcaacattcaagtcaaagaggtcacggtgcaggactccaccaccaccatcgccaacaacctcacctccaccgtccaagtgtttacggacgacgactaccagctgccctacgtcgtcggcaacgggaccgagggatgcctgccggccttccctccgcaggtctttacgctgccgcagtacggttacgcgacgctgaaccgcgacaacacagaaaatcccaccgagaggagcagcttcttctgcctagagtactttcccagcaagatgctgagaacgggcaacaactttgagtttacctacaactttgaggaggtgcccttccactccagcttcgctcccagtcagaacctcttcaagctggccaacccgctggtggaccagtacttgtaccgcttcgtgagcacaaataacactggcggagtccagttcaacaagaacctggccgggagatacgccaacacctacaaaaactggttcccggggcccatgggccgaacccagggctggaacctgggctccggggtcaaccgcgccagtgtcagcgccttcgccacgaccaataggatggagctcgagggcgcgagttaccaggtgcccccgcagccgaacggcatgaccaacaacctccagggcagcaacacctatgccctggagaacactatgatcttcaacagccagccggcgaacccgggcaccaccgccacgtacctcgagggcaacatgctcatcaccagcgagagcgagacgcagccggtgaaccgcgtggcgtacaacgtcggcgggcagatggccaccaacaaccagagctccaccactgcccccgcgaccggcacgtacaacctccaggaaatcgtgcccggcagcgtgtggatggagagggacgtgtacctccaaggacccatctgggccaagatcccagagacgggggcgcactttcacccctctccggccatgggcggattcggactcaaacacccaccgcccatgatgctcatcaagaacacgcctgtgcccggaaatatcaccagcttctcggacgtgcccgtcagcagcttcatcacccagtacagcaccgggcaggtcaccgtggagatggagtgggagctcaagaaggaaaactccaagaggtggaacccagagatccagtacacaaacaactacaacgacccccagtttgtggactttgccccggacagcaccggggaatacagaaccaccagacctatcggaacccgataccttacccgacccctttaa

SEQ ID NO: 808 - DNA, 2175 bp, Artificial Sequence
  Description of Artificial Sequence: Synthetic polynucleotide
atgtcttttgttgatcaccctccagattggttggaagaagttggtgaaggtcttcgcgagtttttgggccttgaagcgggcccaccgaaaccaaaacccaatcagcagcatcaagatcaagcccgtggtcttgtgctgcctggttataactatctcggacccggaaacggtctcgatcgaggagagcctgtcaacagggcagacgaggtcgcgcgagagcacgacatctcgtacaacgagcagcttgaggcgggagacaacccctacctcaagtacaaccacgcggacgccgagtttcaggagaagctcgccgacgacacatccttcgggggaaacctcggaaaggcagtctttcaggccaagaaaagggttctcgaaccttttggcctggttgaagagggtgctaagacggcccctaccggaaagcggatagacgaccactttccaaaaagaaagaaggcccggaccgaagaggactccaagccttccacctcgtcagacgccgaagctggacccagcggatcccagcagctgcaaatcccagcccaaccagcctcaagtttgggagctgatacaatgtctgcgggaggtggcggcccattgggcgacaataaccaaggtgccgatggagtgggcaatgcctcgggagattggcattgcgattccacgtggatgggggacagagtcgtcaccaagtccacccgaacctgggtgctgcccagctacaacaaccaccagtaccgagagatcaaaagcggctccgtcgacggaagcaacgccaacgcctactttggatacagcaccccctgggggtactttgactttaaccgcttccacagccactggagcccccgagactggcaaagactcatcaacaactactggggcttcagaccccggtccctcagagtcaaaatcttcaacattcaagtcaaagaggtcacggtgcaggactccaccaccaccatcgccaacaacctcacctccaccgtccaagtgtttacggacgacgactaccagctgccctacgtcgtcggcaacgggaccgagggatgcctgccggccttccctccgcaggtctttacgctgccgcagtacggttacgcgacgctgaaccgcgacaacacagaaaatcccaccgagaggagcagcttcttctgcctagagtactttcccagcaagatgctgagaacgggcaacaactttgagtttacctacaactttgaggaggtgcccttccactccagcttcgctcccagtcagaacctcttcaagctggccaacccgctggtggaccagtacttgtaccgcttcgtgagcacaaataacactggcggagtccagttcaacaagaacctggccgggagatacgccaacacccacaaaaactggttcccggggcccatgggccgaacccagggctggaacctgggctccggggtcaaccgcgccagtgtcagcgccttcgccacgaccaataggatggagctcgagggcgcgagttaccaggtgcccccgcagtcgaacggcatgaccaacaacctccggggcagcaacacctatgccctggagaacactatgatcttcaacagccagccggcgaacccgggcaccaccgccacgtacctcgagggcaacatgctcatcaccagcgagagcgagacgcagccggtgaaccgcgtggcgtacaacgtcggcgggcagatggccaccaacaaccagagctccaccactgcccccgcgaccggcacgtacaacctccaggaaatcgtgcccggcagcgtgtggatggagagggacgtgtacctccaaggacccatctgggccaagatcccagagacgggggcgcactttcacccctctccggccatgggcggattcggactcaaacacccaccgcccatgatgctcatcaagaacacgcctgtgcccggaaatatcaccagcttctcggacgtgcccgtcagcagcttcatcacccagtacagcaccgggcaggtcaccgtggagatggagtgggagctcaagaaggaaaactccaagaggtggaacccagagatccagtacacaaacaactacaacgacccccagtttgtggactttgccccggacagcaccggggaatacagaaccaccagacctatcggaacccgataccttacccgacccctttaa

SEQ ID NO: 809 - DNA, 2175 bp, Artificial Sequence
  Description of Artificial Sequence: Synthetic polynucleotide
atgtcttttgttgatcaccctccagattggttggaagaagttggtgaaggtcttcgcgagtttttgggccttgaagcgggcccaccgaaaccaaaacccaatcagcagcatcaagatcaagcccgtggtcttgtgctgcctggttataactatctcggacccggaaacggtctcgatcgaggagagcctgtcaacagggcagacgaggtcgcgcgagagcacgacatctcgtacaacgagcagcttgaggcgggagacaacccctacctcaagtacaaccacgcggacgccgagtttcaggagaagctcgccgacgacacatccttcgggggaaacctcggaaaggcagtctttcaggccaagaaaagggttctcgaaccttttggcctggttgaagagggtgctaagacggcccctaccggaaagcggatagacgaccactttccaaaaagaaagaaggcccggaccgaagaggactccaagccttccacctcgtcagacgccgaagctggacccagcggatcccagcagctgcaaatcccagcccaaccagcctcaagtttgggagctgatacaatgtctgcgggaggtggcggcccattgggcgacaataaccaaggtgccgatggagtgggcaatgcctcgggagattggcattgcgattccacgtggatgggggacagagtcgtcaccaagtccacccgaacctgggtgctgcccagctacaacaaccaccagtaccgagagatcaaaagcggctccgtcgacggaagcaacgccaacgcctactttggatacagcaccccctgggggtactttgactttaaccgcttccacagccactggagcccccgagactggcaaagactcatcaacaactactggggcttcagaccccggtccctcagagtcaaaatcttcaacattcaagtcaaagaggtcacggtgcaggactccaccaccaccatcgccaacaacctcacctccaccgtccaagtgtttacggacgacgactaccagctgccctacgtcgtcggcaacgggaccgagggatgcctgccggccttccctccgcaggtctttacgctgccgcagtacggttacgcgacgctgaaccgcgacaacacagaaaatcccaccgagaggagcagcttcttctgcctagagtactttcccagcaagatgctgagaacgggcaacaactttgagtttacctacaactttgaggaggtgcccttccactccagcttcgctcccagtcagaacctcttcaagctggccaacccgctggtggaccagtacttgtaccgcttcgtgagcacaaataacactggcggagtccagttcaacaagaacctggccgggagatacgccaacacctacaaaaactggttcccggggcccatgggccgaacccagggctggaacctgggctccggggtcaaccgcgccagtgtcagcgccttcgccacgaccaataggatggagctcgagggcgcgagttaccaggtgcccccgcagccgaacggcatgaccaacaacctccagggcagcaacacctatgccctggagaacactatgatcttcaacagccagccggcgaacccgggcaccaccgccacgtacctcgagggcaacatgctcatcaccagcgagagcgagacgcagccggtgaaccgcgtggcgtacagcgtcggcgggcagatggccaccaacaaccagagctccaccactgcccccacgaccggcacgtacaacctccaggaaatcgtgcccggcagcgtgtggatggagagggacgtgtacctccaaggacccatctgggccaagatcccagagacgggggcgcactttcacccctctccggccatgggcggattcagactcaaacacccaccgcccatgatgctcatcaagaacacgcctgtgcccggaaatatcaccagcttctcggacgtgcccgtcagcagcttcatcacccagtacagcaccgggcaggtcaccgtggagatggagtgggagctcaagaaggaaaactccaagaggtggaacccagagatccagtacacaaacaactacaacgacccccagtttgtggactttgccccggacagcaccggggaatacagaaccaccagacctatcggaacccgataccttacccgacccctttaa

SEQ ID NO: 810 - DNA, 2175 bp, Artificial Sequence
  Description of Artificial Sequence: Synthetic polynucleotide
atgtcttttgttgatcaccctccagattggttggaagaagttggtgaaggtcttcgcgagtttttgggccttgaagcgggcccaccgaaaccaaaacccaatcagcagcatcaagatcaagcccgtggtcttgtgctgcctggttataactatctcggacccggaaacggtctcgatcgaggagagcctgtcaacagggcagacgaggtcgcgcgagagcacgacatctcgtacaacgagcagcttgaggcgggagacaacccctacctcaagtacaaccacgcggacgccgagtttcaggagaagctcgccgacgacacatccttcgggggaaacctcggaaaggcagtctttcaggccaagaaaagggttctcgaaccttttggcctggttgaagagggtgctaagacggcccctaccggaaagcggatagacgaccactttccaaaaagaaagaaggcccggaccgaagaggactccaagccttccacctcgtcagacgccgaagctggacccagcggatcccagcagctgcaaatcccagcccaaccagcctcaagtttgggagctgatacaatgtctgcgggaggtggcggcccattgggcgacaataaccaaggtgccgatggagtgggcaatgcctcgggagattggcattgcgattccacgtggatgggggacagagtcgtcaccaagtccacccgaacctgggtgctgcccagctacaacaaccaccagtaccgagagatcaaaagcggctccgtcgacggaagcaacgccaacgcctactttggatacagcaccccctgggggtactttgactttaaccgcttccacagccactggagcccccgagactggcaaagactcatcaacaactactggggcttcagaccccggtccctcagagtcaaaatcttcaacattcaagtcaaagaggtcacggtgcaggactccaccaccaccatcgccaacaacctcacctccaccgtccaagtgtttacggacgacgactaccagctgccctacgtcgtcggcaacgggaccgagggatgcctgccggccttccctccgcaggtctttacgctgccgcagtacggttacgcgacgctgaaccgcgacaacacagaaaatcccaccgagaggagcagcttcttctgcctagagtactttcccagcaagatgctgagaacgggcaacaactttgagtttacctacaactttgaggaggtgcccttccactccagcttcgctcccagtcagaacctcttcaagctggccaacccgctggtggaccagtacttgtaccgcttcgtgagcacaaataacactggcggagtccagttcaacaagaacctggccgggagatacgccaacacctacaaaaactggttcccggggcccatgggccgaacccagggctggaacctgggctccggggtcaaccgcgccagtgtcagcgccttcgccgcgaccaataggatggagctcgagggcgcgagttaccaggtgcccccgcagccgaacggcatgaccaacaacctccagggcagcaacacctatgccctggagaacactatgatcttcaacagccagccggcgaacccgggcaccaccgccacgtacctcgagggcaacatgctcatcaccagcgagagcgagacgcagccggtgaaccgcgtggcgtacaacgtcggcgggcagatggccaccaacaaccagagctccaccactgcccccgcgaccggcacgtacaacctccaggaaatcgtgcccggcggcgtgtggatggagagggacgtgtacctccaaggacccatctgggccaagatcccagagacgggggcgcactttcacccctctccggccatgggcggattcggactcaaacacccaccgcccatgatgctcatcaagaacacgcctgtgcccggaaataccaccagcttctcggacgtgcccgtcagcagcttcatcacccagtacagcaccgggcaggtcaccgtggagatggagtgggagctcaagaaggaaaactccaagaggtggaacccagagatccagtacacaaacaactacaacgacccccagtttgtggactttgccccggacagcaccggggaatacagaaccaccagacctatcggaacccgataccttacccgacccctttaa

SEQ ID NO: 811 - DNA, 2175 bp, Artificial Sequence
  Description of Artificial Sequence: Synthetic polynucleotide
atgtcttttgttgatcaccctccagattggttggaagaagttggtgaaggtcttcgcgagtttttgggccttgaagcgggcccaccgaaaccaaaacccaatcagcagcatcaagatcaagcccgtggtcttgtgctgcctggttataactatctcggacccggaaacggtctcgatcgaggagagcctgtcaacagggcagacgaggtcgcgcgagagcacgacatctcgtacaacgagcagcttgaggcgggagacaacccctacctcaagtacaaccacgcggacgccgagtttcaggagaagctcgccgacgacacatccttcgggggaaacctcggaaaggtagtctttcaggccaagaaaagggttctcgaaccttttggcctggttgaagagggtgctaagacggcccctaccggaaagcggatagacgaccactttccaaaaagaaagaaggcccggaccgaagaggactccaagccttccacctcgtcagacgccgaagctggacccagcggatcccagcagctgcaaatcccagcccaaccagcctcaagtttgggagctgatacaatgtctgcgggaggtggcggcccattgggcggcaataaccaaggtgccgatggagtgggcaatgcctcgggagattggcattgcgattccacgtggatgggggacagagtcgtcaccaagtccacccgaacctgggtgctgcccagctacaacaaccaccagtaccgagagatcaaaagcggctccgtcgacggaagcaacgccaacgcctactttggatacagcaccccctgggggtactttgactttaaccgcttccacagccactggggcccccgagactggcaaagactcatcaacaactactggggcttcagaccccggtccctcagagtcaaaatcttcaacattcaagtcaaagaggtcacggtgcaggactccaccaccaccatcgccaacaacctcacctccaccgtccaagtgtttacggacgacgactaccagctgccctacgtcgtcggcaacgggaccgagggatgcctgccggccttccctccgcaggtctttacgctgccgcagtacggttacgcgacgctgaaccgcgacaacacagaaaatcccaccgagaggagcagcttcttctgcctagagtactttcccagcaagatgctgagaacgggcaacaactttgagtttacctacaactttgaggaggtgcccttccactccagcttcgctcccagtcagaacctcttcaagctggccaacccgctggtggaccagtacttgtaccgcttcgtgagcacaaataacactggcggagtccagttcaacaagaacctggccgggagatacgccaacacctacaaaaactggttcccggggcccatgggccgaacccagggctggaacctgggctccggggtcaaccgcgccagtgtcagcgccctcgccacgaccaataggatggagctcgagggcgcgagttaccaggtgcccccgcagccgaacggcatgaccaacaacctccagggcagcaacacctatgccctggagaacactatgatcttcaacagccagccggcgaacccgggcaccaccgccacgtacctcgagggcaacatgctcatcaccagcgagagcgagacgcagccggtgaaccgcgtggcgtacaacgtcggcgggcagatggccaccaacaaccagagctccaccactgcccccgcgaccggcacgtacaacctccaggaaatcgtgcccggcagcgtgtggatggagagggacgtgtacctccaaggacccatctgggccaagatcccagagacgggggcgcactttcacccctctccggccatgggcggattcggactcaaacacccaccgcccatgatgctcatcaagaacacgcctgtgcccggaaatatcaccagcttctcggacgtgcccgtcagcagcttcatcacccagtacagcaccgggcaggtcaccgtggagatggagtgggagctcaagaaggaaaactccaagaggtggaacccagagatccagtacacaaacaactacaacgacccccagtttgtggactttgccccggacagcaccggggaatacagaaccaccagacctatcggaacccgataccttacccgacccctttaa

SEQ ID NO: 812 - DNA, 2175 bp, Artificial Sequence
  Description of Artificial Sequence: Synthetic polynucleotide
atgtcttttgttgatcaccctccagattggttggaagaagttggtgaaggtcttcgcgagtttttgggccttgaagcgggcccaccgaaaccaaaacccaatcagcagcatcaagatcaagcccgtggtcttgtgctgcctggttataactatctcggacccggaaacggtctcgatcgaggagagcctgtcaacagggcagacgaggtcgcgcgagagcacgacatctcgtacaacgagcagcttgaggcgggagacaacccctacctcaagtacaaccacgcggacgccgagtttcaggagaagctcgccgacgacacatccttcgggggaaacctcggaaaggcagtctttcaggccaagaaaagggttctcgaaccttttggcctggttgaagagggtgctaagacggcccctaccggaaagcggatagacgaccactttccaaaaagaaagaaggcccggaccgaagaggactccaagccttccacctcgtcagacgccgaagctggacccagcggatcccagcagctgcaaatcccagcccaaccagcctcaagtttgggagctgatacaatgtctgcgggaggtggcggcccattgggcgacaataaccaaggtgccgatggagtgggcaatgcctcgggagattggcattgcgattccacgtggatgggggacagagtcgtcaccaagtccacccgaacctgggtgctgcccagctacaacaaccaccagtaccgagagatcaaaagcggctccgtcgacggaagcaacgccaacgcctactttggatacagcaccccctgggggtactttgactttaaccgcttccacagccactggagcccccgagactggcaaagactcatcaacaactactggggcttcagaccccggtccctcagagtcaaaatcttcaacattcaagtcaaagaggtcacggtgcaggactccaccaccaccatcgccaacaacctcacctccaccgtccaagtgtttacggacgacgactaccagctgccctacgtcgtcggcaacgggaccgagggatgcctgccggccttccctccgcaggtctttacgctgccgcagtacggttacgcgacgctgaaccgcgacaacacagaaaatcccaccgagaggagcagcttcttctgcctagagtactttcccagcaagatgctgagaacgggcaacaactttgagtttacctacaactttgaggaggtgcccttccactccagcttcgctcccagtcagaacctcttcaagctggccaacccgctggtggaccagtacttgtaccgcttcgtgagcacaaataacactggcggagtccagttcaacaagaacctggccgggagatacgccaacacctacaaaaactggttcccggggcccatgggccgaacccagggctggaacctgggctccggggtcaaccgcgccagtgtcagcgccttcgccacgaccaataggatggagctcgagggcgcgagttaccaggtgcccccgcagccgaacggcatgaccaacaacctccagggcagcaacacctatgccctggagaacactatgatcttcaacagccagccggcgaacccgggcaccaccgccacgtacctcgagggcaacatgctcatcaccagcgagagcgagacgcagccggtgaaccgcgtggcgtacaacgtcggcgggcagatggccaccaacaaccagagctccaccactgcccccgcgaccggcacgtacaacctccaggaaatcgtgcccggcagcgtgtggatggagagggacgtgtacctccaaggacccatctgagccaagatcccagagacgggggcgcactttcacccctctccggccatgggcggattcggactcaaacacccaccgcccatgatgctcatcaagaacacgcctgtgcccggaaatatcaccagcttctcggacgtgcccgtcagcagcttcatcacccagtacagcaccgggcaggtcaccgtggagatggagtgggagctcaagaaggaaaactccaagaggtggaacccagagatccagtacacaaacaactacaacgacccccagtttgtggactttgccccggacagcaccggggaatgcagaaccaccagacctatcggaacccgataccttacccgacccctttaa

SEQ ID NO: 813 - DNA, 2175 bp, Artificial Sequence
  Description of Artificial Sequence: Synthetic polynucleotide
atgtcttttgttgatcaccctccagattggttggaagaagttggtgaaggtcttcgcgagtttttgggccttgaagcgggcccaccgaaaccaaaacccaatcagcagcatcaagatcaagcccgtggtcttgtgctgcctggttataactatctcggacccggaaacggtctcgatcgaggagagcctgtcaacagggcagacgaggtcgcgcgagagcacgacatctcgtacaacgagcagcttgaggcgggagacaacccctacctcaagtacaaccacgcggacgccgagtttcaggagaagctcgccgacgacacatccttcgggggaaacctcggaaaggcagtctttcaggccaagaaaagggttctcgaaccttttggcctggttgaagagggtgctaagacggcccctaccggaaagcggatagacgaccactttccaaaaagaaagaaggcccggaccgaagaggactccaagccttccacctcgtcagacgccgaagctggacccagcggatcccagcagctgcaaatcccagcccaaccagcctcaagtttgggagctgatacaatgtctgcgggaggtggcggcccattgggcgacaataaccaaggtgccgatggagtgggcaatgcctcgggagattggcattgcgattccacgtggatgggggacagagtcgtcaccaagtccacccgaacctgggtgctgcccagctacaacaaccaccagtaccgagagatcaaaagcggctccgtcgacggaagcaacgccaacgcctactttggatacagcaccccctgggggtactttgactttaaccgcttccacagccactggagcccccgagactggcaaagactcatcaacaactactggggcttcagaccccggtccctcagagtcaaaatcctcaacattcaagtcaaagaggtcacggtgcaggactccaccaccaccatcgccaacaacctcacctccaccgtccaagtgtttacggacgacgactaccagctgccctacgtcgtcggcaacgggaccgagggatgcctgccggccttccctccgcaggtctttacgctgccgcagtacggttacgcgacgctgaaccgcgacaacacagaaaatcccaccgagaggagcagcttcttctgcctagagtactttcccagcaagatgctgagaacgggcaacaactttgagtttacctacaactttgaggaggtgcccttccactccagcttcgctcccagtcagaacctcttcaagctggccaacccgctggtgggccagtacttgtaccgcttcgtgagcacaaataacactggcggagtccagttcaacgagaacctggccgggagatacgccaacacctacaaaaactggttcccggggcccatgggccgaacccagggctggaacctgggctccggggtcaaccgcgccagtgtcagcgccttcgccacgaccaataggatggagctcgagggcgcgagttaccaggtgcccccgcagccgaacggcatgaccaacaacctccagggcagcaacacctatgccctggagaacactatgatcttcaacagccagccggcgaacccgggcaccaccgccacgtacctcgagggcaacatgctcatcaccagcgagagcgagacgcagccggtgaaccgcgtggcgtacaacgtcggcgggcagatggccaccaacaaccagagctccaccactgcccccgcgaccggcacgtacaacctccaggaaatcgtgcccggcagcgtgtggatggagagggacgtgtacctccaaggacccatctgggccaagatcccagagacgggggcgcactttcacccctctccggccatgggcggattcggactcaaacacccaccgcccatgatgctcatcaagaacacgcctgtgcccggaaatatcaccagcttctcggacgtgcccgtcagcagcttcatcacccagtacagcaccgggcaggccaccgtggagatggagtgggagctcaagaaggaaaactccaagaggtggaacccagagatccagtacacaaacaactacaacgacccccagtttgtggactttgccccggacagcaccggggaatacagaaccaccagacctatcggaacccgataccttacccgacccctttaa

SEQ ID NO: 814 - DNA, 2175 bp, Artificial Sequence
  Description of Artificial Sequence: Synthetic polynucleotide
atgtcttttgttgatcaccctccagattggttggaagaagttggtgaaggtcttcgcgagtttttgggccttgaagcgggcccaccgaaaccaaaacccaatcagcagcatcaagatcaagcccgtggtcttgtgctgcctggttataactatctcggacccggaaacggcctcgatcgaggagagcctgtcaacagggcagacgaggtcgcgcgagagcacgacatctcgtacaacgagcagcttgaggcgggagacaacccctacctcaagtacaaccacgcggacgccgagtttcaggagaagctcgccgacgacacatccttcgggggaaacctcggaaaggcagtctttcaggccaagaaaagggttctcgaaccttttggcctggttgaagagggtgctaagacggcccctaccggaaagcggatagacgaccactttccaaaaagaaagaaggcccggaccgaagaggactccaagccttccacctcgtcagacgccgaagctggacccagcggatcccagcagctgcaaatcccagcccaaccagcctcaagtttgggagctgatacaatgtctgcgggaggtggcggcccattgggcgacaataaccaaggtgccgatggagtgggcaatgcctcgggagattggcattgcgattccacgtggatgggggacagagtcgtcaccaagtccacccgaacctgggtgctgcccagctacaacaaccaccagtaccgagagatcaaaagcggctccgtcgacggaagcaacgccaacgcctactttggatacagcaccccctgggggtactttgactttaaccgcttccacagccactggagcccccgagactggcaaagactcatcaacaactactggggcttcagaccccggtccctcagagtcaaaatcttcaacattcaagtcaaagaggtcacggtgcaggactccaccaccatcatcgccaacaacctcacctccaccgtccaagtgtttacggacgacgactaccagctgccctacgtcgtcggcaacgggaccgagggatgcctgccggccttccctccgcaggtctttacgctgccgcagtacggttacgcgacgctgaaccgcgacaacacagaaaatcccaccgagaggagcagcttcttctgcctagagtactttcccagcaagatgctgagaacgggcaacaactttgagtttacctacaactttgaggaggtgcccttccactccagcttcgcccccagtcagaacctcttcaagctggccaacccgctggtggaccagtacttgtaccgcttcgtgagcacaaataacactggcggagtccagttcaacaagaacctggccgggagatacgccaacacctacaaaaactggttcccggggcccatgggccgaacccagggctggaacctgggctccggggtcaaccgcgccagtgtcagcgccttcgccacgaccaataggatggagctcgagggcgcgagttaccaggtgcccccgcagccgaacggcatgaccaacaacctccagggcagcaacacctatgccctggagaacactatgatcttcaacagccagccggcgaacccgggcaccaccgccacgtacctcgagggcaacatgctcatcaccagcgagagcgagacgcagccggtgaaccgcgtggcgtacaacgtcggcgggcagatggccaccaacaaccagagctccaccactgcccccgcgaccggcacgtacaacctccaggaaatcgtgcccggcagcgtgtggatggagagggacgtgtacctccaaggacccatctgggccaagatcccagagacgggggcgcactttcacccctctccggccatgggcggattcggactcaaacacccaccgcccatgatgctcatcaagaacacgcctgtgcccggaaatatcaccagcttctcggacgtgcccgtcagcagcttcatcacccagtacagcaccgggcaggtcaccgtggagatggagtgggagctcaagaaggaaaactccaagaggtggaacccagagatccagtacacaaacaactacaacgacccccagtttgtggactttgccccggacagcaccggggaatacagaaccaccagacctatcggaacccgataccttacccgacccctttaa

SEQ ID NO: 815 - DNA, 2175 bp, Artificial Sequence
  Description of Artificial Sequence: Synthetic polynucleotide
atgtcttttgttgatcaccctccagattggttggaagaagttggtgaaggtcttcgcgagtttttgggccttgaagcgggcccaccgaaaccaaaacccaatcagcagcatcaagatcaagcccgtggtcttgtgctgcctggttataactatctcggacccggaaacggtctcgatcgaggagagcctgtcaacagggcagacgaggtcgcgcgagagcacgacatctcgtacaacgagcagcttgaggcgggagacaacccctacctcaagtacaaccacgcggacgccgagtttcaggagaagctcgccgacgacacatccttcgggggaaacctcggaaaggcagtctttcaggccaagaaaagggttctcgaaccttttggcctggttgaagagggtgctaagacggcccctaccggaaagcggatagacgaccactttccaaaaagaaagaaggcccggaccgaagaggactccaagccttccacctcgtcagacgccgaagctggacccagcggatcccagcagctgcaaatcccagcccaaccagcctcaagtttgggagctgatacaatgtctgcgggaggtggcggcccattgggcgacaataaccaaggtgccgatggagtgggcaatgcctcgggagattggcattgcgattccacgtggatgggggacagagtcgtcaccaagtccacccgaacctgggtgctgcccagctacaacaaccaccagtaccgagagatcaaaagcggctccgtcgacggaagcaacgccaacgcctactttggatacagcaccccctgggggtactttgactttaaccgcttccacagccactggagcccccgagactggcaaagactcatcaacaactactggggcttcagaccccggtccctcagagtcaaaatcttcaacattcaagtcaaagaggtcacggtgcaggactccaccaccaccatcgccaacaacctcacctccaccgtccaagtgtttacggacgacgactaccagctgccctacgtcgtcggcaacgggaccgagggatgcctgccggccttccctccgcaggtctttacgctgccgcagtacggttacgcgacgctgaaccgcgacaacacagaaaatcccaccgagaggagcagcttcttctgcctagagtactttcccagcaagatgctgagaacgggcaacaactttgagtttacctacaactttgaggaggtgcccttccactccagcttcgctcccagtcagaacctcttcaagctggccaacccgctggtggaccagtacttgtaccgcttcgtgagcacaaataacactggcggagtccagttcaacaagaacctggccgggagatacgccaacacctacaaaaactggttcccggggcccatgggccgaacccagggctggaacctgggctccggggtcaaccgcgccagtgtcagcgccttcgccacgaccaataggatggagctcgagggcgcgagttaccaggtgcccccgcagccgaacggcatgaccaacaacctccagggcagcaacacctatgccctggagaacactatgatcttcaacagccagccggcgaacccgggcaccaccgccacgtacctcgagggcaacatgctcatcaccagcgagagcgagacgcagccggtgaaccgcgtggcgtacaacgtcggcgggcagatggccaccaacaaccagagctccaccactgcccccgcgaccggcacgtacaacctccaggaaatcgtgcccggcagcgtgtggatggagagggacgtgtacctccaaggacccatctgggccaagatcccagagacgggggcgcactttcacccctctccggccatgggcggattcggactcaaacacccaccgcccatgatgctcatcaagaacacgcctgtgcccggaaatatcaccagcctctcggacgtgcccgtcagcagcttcatcacccagtacagcaccgggcaggtcaccgtggagatggagtgggagctcaagaaggaaaactccaagaggtggaacccagagatccagtacacaaacaactacaacgacccccagtttgtggactttgccccggacagcaccggggaatacagaaccaccagacctatcggaacccgataccttacccgacccctttaa

SEQ ID NO: 816 - DNA, 2175 bp, Artificial Sequence
  Description of Artificial Sequence: Synthetic polynucleotide
atgtcttttgttgatcaccctccagattggttggaagaagttggtgaaggtcttcgcgagtttttgggccttgaagcgggcccaccgaaaccaaaacccaatcagcagcatcaagatcaagcccgtggtcttgtgctgcctggttataactatctcggacccggaaacggtctcgatcgaggagagcctgccaacagggcagacgaggtcgcgcgagagcacgacatctcgtacaacgagcagcttgaggcgggagacaacccctacctcaagtacaaccacgcgggcgccgagtttcaggagaagctcgccgacgacacatccttcgggggaaacctcggaaaggcagtctttcaggccaagaaaagggttctcgaaccttttggcctggttgaagagggtgctaagacggcccctaccggaaagcggatagacgaccactttccaaaaagaaagaaggcccggaccgaagaggactccaagccttccacctcgtcagacgccgaagctggacccagcggatcccagcagctgcaaatcccagcccaaccagcctcaagtttgggagctgatacaatgtctgcgggaggtggcggcccattgggcgacaataaccaaggtgccgatggagtgggcaatgcctcgggagattggcattgcgattccacgtggatgggggacagagtcgtcaccaagtccacccgaacctgggtgctgcccggctacaacaaccaccagtaccgagagatcaaaagcggctccgtcgacggaagcaacgccaacgcctactttggatacagcaccccctgggggtactttgactttaaccgcttccacagccactggagcccccgagactggcaaagactcatcaacaactactggggcttcagaccccggtccctcagagtcaaaatcttcaacattcaagtcaaagaggtcacggtgcaggactccaccaccaccatcgccaacaacctcacctccaccgtccaagtgtttacggacgacgactaccagctgccctacgtcgtcggcaacgggaccgagggatgcctgccggccttccctccgcaggtctttacgctgccgcagtacggttacgcgacgctgaaccgcgacaacacagaaaatcccaccgagaggagcagcttcttctgcctagagtactttcccagcaagatgctgagaacgggcaacaactttgagtttacctacaactttgaggaggtgcccttccactccagcttcgctcccagtcagaacctcttcaagctggccaacccgctggtggaccagtacttgtaccgcttcgtgagcacaaataatactggcggagtccagttcaacaagaacctggccgggagatacgccaacacctacaaaaactggttcccggggcccatgggccgaacccagggctggaacctgggctccggggtcaaccgcgccagtgtcagcgccttcgccacgaccaataggatggagctcgagggcgcgagttaccaggtgcccccgcagccgaacggcatgaccaacaacctccagggcagcaacacctatgccctggagaacactatgatcttcaacagccagccggcgaacccgggcaccaccgccacgtacctcgagggcaacatgctcatcaccagcgagagcgagacgcagccggtgaaccgcgtggcgtacaacgtcggcgggcagatggccaccaacaaccagagctccaccactgcccccgcgaccggcacgtacaacctccaggaaatcgtgcccggcagcgtgtggatggagagggacgtgtacctccaaggacccatctgggccaagatcccagagacgggggcgcactttcacccctctccggccatgggcggattcggactcaaacacccaccgcccatgatgctcatcaagaacacgcctgtgcccggaaatatcaccagcttctcggacgtgcccgtcagcagcttcatcacccagtacagcaccgggcaggtcaccgtggagatggagtgggagctcaagaaggaaaactccaagaggtggaacccagagatccagtacacaaacaactacaacgacccccagtttgtggactttgccccggacagcaccggggaatacagaaccaccagacctatcggaacccgataccttacccgacccctttaa

SEQ ID NO: 817 - DNA, 2175 bp, Artificial Sequence
  Description of Artificial Sequence: Synthetic polynucleotide
atgtcttttgttgatcaccctccagattggttggaagaagttggtgaaggtcttcgcgagtttttgggccttgaagcgggcccaccgaaaccaaaacccaatcagcagcatcaagatcaagcccgtggtcttgtgctgcctggttataactatctcggacccggaaacggtctcgatcgaggagagcctgtcaacagggcagacgaggtcgcgcgagagcacgacatctcgtacaacgagcagcttgaggcgggagacaacccctacctcaagtacaaccacgcggacgccgagtttcaggagaagctcgccgacgacacatccttcgggggaaacctcggaaaggcagtctttcaggccaagaaaagggttctcgaaccttttggcctggttgaagagggtgctaagacggcccctaccggaaagcggatagacgaccactttccaaaaagaaagaaggcccggaccgaagaggactccaagcctcccacctcgtcagacgccgaagctggacccagcggatcccagcagctgcaaatcccagcccaaccagcctcaagtttgggagctgatacaatgtctgcgggaggtggcggcccattgggcgacaataaccaaggtgccgatggagtgggcaatgcctcgggagattggcattgcgattccacgtggatgggggacagagtcgtcaccaagtccacccgaacctgggtgctgcccagctacaacaaccaccagtaccgagagatcaaaagcggctccgtcgacggaagcaacgccaacgcctactttggatacagcaccccctgggggtactttgactttaaccgcttccacagccactggagcccccgagactggcaaagactcatcaacaactactggggcttcagaccccggtccctcagagtcaaaatcttcaacattcaagtcaaagaggtcacggtgcaggactccgccaccaccatcgccaacaacctcacctccaccgtccaagtgtttacggacgacgactaccagctgccctacgtcgtcggcaacgggaccgagggatgcctgccggccttccctccgcaggtctttacgctgccgcagtacggttacgcgacgctgaaccgcgacaacacagaaaatcccaccgagaggagcagcttcttctgcctagagtactttcccagcaagatgctgagaacgggcaacaactttgagtttacctacaactttgaggaggtgcccttccactccagcttcgctcccagtcagaacctcttcaagctggccaacccgctggtggaccagtacttgtaccgcttcgtgagcacaaataacactggcggagtccagttcaacaagaacctggccgggagatacgccaacacctacaaaaactggttcccggggcccatgggccgaacccagggctggaacctgggctccggggtcaaccgcgccagtgtcagcgccttcgccacgaccaataggatggagctcgagggcgcgagttaccaggtgcccccgcagccgaacggcatgaccaacaacctccagggcagcaacacctatgccctggagaacactatgatcttcaacagccagccggcgaacccgggcaccaccgccacgtacctcgagggcaacatgctcatcaccagcgagagcgagacgcagccggtgaaccgcgtggcgtacaacgtcggcgggcagatggccaccaacaaccagagctccaccactgcccccgcgaccggcacgtacaacctccaggaaatcgtgcccggcagcgtgtggatggagagggacgtgtacctccaaggacccatctgggccaagatcccagagacgggggcgcactttcacccctctccggccatgggcggattcggactcaaacacccaccgcccatgatgctcatcaagaacacgcctgtgcccggaaatatcaccagcttctcggacgtgcccgtcagcagcttcatcacccagtacagcaccgggcaggtcaccgtggagatggagtgggagctcaagaaggaaaactccaagaggtggaacccagagatccagtacacaaacaactacaacgacccccagtttgtggactttgccccggacagcaccggggaatacagaaccaccagacctatcggaacccgataccttacccgacccctttaa

SEQ ID NO: 818 - DNA, 2175 bp, Artificial Sequence
  Description of Artificial Sequence: Synthetic polynucleotide
atgtcttttgttgatcaccctccagattggttggaagaagttggtgaaggtcttcgcgagtttttgggccttgaagcgggcccaccgaaaccaaaacccaatcagcagcatcaagatcaagcccgtggtcttgtgctgcctggttataactatctcggacccggaaacggtctcgatcgaggagagcctgtcaacagggcagacgaggtcgcgcgagagcacgacatctcgtacaacgagcagcttgaggcgggagacaacccctacctcaagtacaaccacgcggacgccgagtttcaggagaagctcgccgacgacacatccttcgggggaaacctcggaaaggcagtctttcaggccaagaaaagggttctcgaaccttttggcctggttgaagagggtgctaagacggcccctaccggaaagcggatagacgaccactttccaaaaagaaagaaggcccggaccgaagaggactccaagccttccacctcgtcagacgccgaagctggacccagcggatcccagcagccgcaaatcccagcccaaccagcctcaagtttgggagctgatacaatgtctgcgggaggtggcggcccattgggcgacaataaccaaggtgccgatggagtgggcaatgcctcgggagattggcattgcgattccacgtggatgggggacagagtcgtcaccaagtccacccgaacctgggtgctgcccagctacaacaaccaccagtaccgagagatcaaaagcggctccgtcgacggaagcaacgccaacgcctactttggatacagcaccccctgggggtactttgactttaaccgcttccacagccactggagcccccgagactggcaaagactcatcaacaactactggggcttcagaccccggtccctcagagtcaaaatcttcaacattcaagtcaaagaggtcacggtgcaggactccaccaccaccatcgccaacaacctcacctccaccgtccaagtgtttacggacgacgactaccagctgccctacgtcgtcggcaacgggaccgagggatgcctgccggccttccctccgcaggtctttacgctgccgcagtacggttacgcgacgctgaaccgcgacaacacagaaaatcccaccgagaggagcagcttcttctgcctagagtactttcccagcaagatgctgagaacgggcaacaactttgagtttacctacaactttgaggaggtgcccttccactccagcttcgctcccagtcagaacctcttcaagctggccaacccgctggtggaccagtacttgtaccgcttcgtgagcacaaataacactggcggagtccagttcaacaagaacctggccgggagatacgccaacacctacaaaaactggttcccggggcccatgggccgaacccagggctggaacctgggctccggggtcaaccgcgccagtgtcagcgccttcgccacgaccaataggatggagctcgagggcgcgagttaccaggtgcccccgcagccgaacggcatgaccaacaacctccagggcagcaacacctatgccctggagaacactatgatcttcaacagccagccggcgaacccgggcaccaccgccacgtacctcgagggcaacatgctcatcaccagcgagagcgagacgcagccggtgaaccgcgtggcgtacaacgtcggcgggcagatggccaccaacaaccagagctccaccactgcccccgcgaccggcacgtacaacctccaggaaatcgtgcccggcagcgtgtggatggagagggacgtgtacctccaaggacccatctgggccaagatcccagagacgggggcgcactttcacccctctccggccatgggcggattcggactcaaacacccaccgcccatgatgctcatcaagaacacgcctgcgcccggaaatatcaccagcttctcggacgtgcccgtcagcagcttcatcacccagtacagcaccgggcaggtcaccgtggagatggagtgggagctcaagaaggaaaactccaagaggtggaacccagagatccagtacacaaacaactacaacgacccccagtttgtggactttgccccggacagcaccggggaatacagaaccaccagacctatcggaacccgataccttacccgacccctttaa

SEQ ID NO: 819 - DNA, 2175 bp, Artificial Sequence
  Description of Artificial Sequence: Synthetic polynucleotide
atgtcttttgttgatcaccctccagattggttggaagaagttggtgaaggtcttcgcgagtttttgggccttgaagcgggcccaccgaaaccaaaacccaatcagcagcatcaagatcaagcccgtggtcttgtgctgcctggttataactatctcggacccggaaacggtctcgatcgaggagagcctgtcaacagggcagacgaggtcgcgcgagagcacgacatctcgtacaacgagcagcttgaggcgggagacaacccctacctcaagtacaaccacgcggacgccgagtttcaggagaagctcgccgacgacacatccttcgggggaaacctcggaaaggcagtctttcaggccaagaaaagggttctcgaaccttttggcctggttgaagagggtgctaagacggcccctaccggaaagcggatagacgaccactttccaaaaagaaagaaggcccggaccgaagaggactccaagcctcccacctcgtcagacgccgaagctggacccagcggatcccagcagctgcaaatcccagcccaaccagcctcaagtttgggagctgatacaatgtctgcgggaggtggcggcccattgggcgacaataaccaaggtgccgatggagtgggcaatgcctcgggagattggcattgcgattccacgtggatgggggacagagtcgtcaccaagtccacccgaacctgggtgctgcccagctacaacaaccaccagtaccgagagatcaaaagcggctccgtcgacggaagcaacgccaacgcctactttggatacagcaccccctgggggtactttgactttaaccgcttccacagccactggagcccccgagactggcaaagactcatcaacaactactggggcttcagaccccggtccctcagagtcaaaatcttcaacattcaagtcaaagaggtcacggtgcaggactccaccaccaccatcgccaacaacctcacctccaccgtccaagtgtttacggacgacgactaccagctgccctacgtcgtcggcaacgggaccgagggatgcctgccggccttccctccgcaggtctttacgctgccgcagtacggttacgcgacgctgaaccgcgacaacacagaaaatcccaccgagaggagcagcttcttctgcctagagtactttcccagcaagatgctgagaacgggcaacaactttgagtttacctacaactttgaggaggtgcccttccactccagcttcgctcccagtcagaacctcttcaagctggccaacccgctggtggaccagtacttgtaccgcttcgtgagcacaaataacactggcggagtccagttcaacaagaacctggccgggagatacgccaacacctacaaaaactggttcccggggcccatgggccgaacccagggctggaacctgggctccggggtcaaccgcgccagtgtcagcgccttcgccacgaccaataggatggagctcgagggcgcgagttaccaggtgcccccgcagccgaacggcatgaccaacaacctccagggcagcaacacctatgccctggagaacactatgatcttcaacagccagccggcgaacccgggcaccaccgccacgtacctcgagggcaacatgctcatcaccagcgagagcgagacgcagccggtgaaccgcgtggcgtacaacgtcggcgggcagatggccaccaacaaccagagctccaccactgcccccgcgaccggcacgtacaacctccaggaaatcgtgcccggcagcgtgtggatggagagggacgtgtacctccaaggacccatctgggccaagatcccagagacgggggcgcactttcacccctctccggccatgggcggattcggactcaaacacccaccgcccatgatgctcatcaagaacacgcctgtgcccggaaatatcaccagcttctcggacgtgcccgtcagcagcttcatcacccagtacagcaccgggcaggtcaccgtggagatggagtgggagctcaagaaggaaaactccaagaggtggaacccagagatccagtacacaaacaactacaacgacccccagtttgtggactttgccccggacagcaccggggaatacagaaccaccagacctatcggaacccgataccttacccgacccctttaa

SEQ ID NO: 820 - DNA, 2175 bp, Artificial Sequence
  Description of Artificial Sequence: Synthetic polynucleotide
atgtcttttgttgatcaccctccagattggttggaagaagttggtgaaggtcttcgcgagtttttgggccttgaagcgggcccaccgaaaccaaaacccaatcagcagcatcaagatcaagcccgtggtcttgtgctgcctggttataactatctcggacccggaaacggtctcgatcgaggagagcctgtcaacagggcagacgaggtcgcgcgagagcacgacatctcgtacaacgagcagcttgaggcgggagacaacccctacctcaagtacaaccacgcggacgccgagtttcaggagaagctcgccgacgacacatccttcgggggaaacctcggaaaggcagtctttcaggccaagaaaagggttctcgaaccttttggcctggttgaagagggtgctaagacggcccctaccggaaagcggatagacgaccactttccaaaaagaaagaaggcccggaccgaagaggactccaagcctcccacctcgtcagacgccgaagctggacccagcggatcccagcagctgcaaatcccagcccaaccagcctcaagtttgggagctgatacaatgtctgcgggaggtggcggcccattgggcgacaataaccaaggtgccgatggagtgggcaatgcctcgggagattggcattgcgattccacgtggatgggggacagagtcgtcaccaagtccacccgaacctgggtgccgcccagctacaacaaccaccagtaccgagagatcaaaagcggctccgtcgacggaagcaacgccaacgcctactttggatacagcaccccctgggggtactttgactttaaccgcttccacagccactggagcccccgagactggcaaagactcatcaacaactactggggcttcagaccccggtccctcagagtcaaaatcttcaacattcaagtcaaagaggtcacggtgcaggactccaccaccaccatcgccaacaacctcacctccaccgtccaagtgtttacggacgacgactaccagctgccctacgtcgtcggcaacgggaccgagggatgcctgccggccttccctccgcaggtctttacgctgccgcagtacggttacgcgacgctgaaccgcgacaacacagaaaatcccaccgagaggagcagcttcttctgcctagagtactttcccagcaagatgctgagaacgggcaacaactttgagtttacctacaactttgaggaggtgcccttccactccagcttcgctcccagtcagaacctcttcaagctggccaacccgctggtggaccagtacttgtaccgcttcgtgagcacaaataacactggcggagtccagttcaacaagaacctggccgggagatacgccaacacctacaaaaactggttcccggggcccatgggccgaacccagggctggaacctgggctccggggtcaaccgcgccagtgtcagcgccttcgccacgaccaataggatggagctcgagggcgcgagttaccaggtgcccccgcagccgaacggcatgaccaacaacctccagggcagcaacacctatgccctggagaacactatgatcttcaacagccagccggcgaacccgggcaccaccgccacgtacctcgagggcaacatgctcatcaccagcgagagcgagacgcagccggtgaaccgcgtggcgtacaacgtcggcgggcagatggccaccaacaaccagagctccaccactgcccccgcgaccggcacgtacaacctccaggaaatcgtgcccggcagcgtgtggatggagagggacgtgtacctccaaggacccatctgggccaagatcccagagacgggggcgcactttcacccctctccggccatgggcggattcggactcaaacacccaccgcccatgatgctcatcaagaacacgcctgtgcccggaaatatcaccagcttctcggacgtgcccgtcagcagcttcatcacccagtacagcaccgggcaggtcgccgtggagatggagtgggagctcaagaaggaaaactccaagaggtggaacccagagatccagtacacaaacaactacaacgacccccagtttgtggactttgccccggacagcaccggggaatacagaaccaccagacctatcggaacccgataccttacccgacccctttaa

SEQ ID NO: 821 - DNA, 2175 bp, Artificial Sequence
  Description of Artificial Sequence: Synthetic polynucleotide
atgtcttttgttgatcaccctccagattggttggaagaagttggtgaaggtcttcgcgagtttttgggccttgaagcgggcccaccgaaaccaaaacccaatcagcagcatcaagatcaagcccgtggtcttgtgctgcctggttataactatctcggacccggaaacggtctcgatcgaggagagcctgtcaacagggcagacgaggtcgcgcgagagcacgacatctcgtacaacgagcagcttgaggcgggagacaacccctacctcaagtacaaccacgcggacgccgagtttcaggagaagctcgccgacgacacatccttcgggggaaacctcggaaaggcagtctttcaggccaagaaaagggttctcgaaccttttggcctggttgaagagggtgctaagacggcccctaccggaaagcggatagacgaccactttccaaaaagaaagaaggcccggaccgaagaggactccaagccttccacctcgtcagacgccgaagctggacccagcggatcccagcagctgcaaatcccagcccaaccagcctcaagtttgggagctgatacaatgtctgcgggaggtggcggcccattgggcgacaataaccaaggtgccgatggagtgggcaatgcctcgggagattggcattgcgattccacgtggatgggggacagagtcgtcaccaagtccacccgaacctgggtgctgcccagctacaacaaccaccagtaccgagagatcaaaagcggctccgtcgacggaagcaacgccaacgcctactttggatacagcaccccctgggggtactttgactttaaccgcttccacagccactggagcccccgagactggcaaagactcatcaacaactactggggcttcagaccccggtccctcagagtcaaaatcttcaacattcaagtcaaagaggtcacggtgcaggactccaccaccaccatcgccaacaacctcacctccaccgtccaagtgtttacggacgacgactaccagctgccctacgtcgtcggcaacgggaccgagggatgcctgccggccttccctccgcaggtctttacgctgccgcagtacggttacgcgacgctgaaccgcgacaacacagaaaatcccaccgagaggagcagcttcttctgcctagagtactttcccagcaagatgctgagaacgggcaacaactttgagtttacctacaactttgaggaggtgcccttccactccagcttcgctcccagtcagaacctcttcaagctggccaacccgctggtggaccagtacttgtaccgcttcgtgagcacaaataacactggcggagtccagttcaacaagaacctggccgggagatacgccaacacctacaaaaactggttcccggggcccatgggccgaacccagggctggaacctgggctccggggtcaaccgcgccagtgtcagcgccttcgccacgaccaataggatggagctcgagggcgcgagttaccaggtgcccccgcagccgaacggcatgaccaacaacctccagggcagcaacacctatgccctggagaacactatgatcttcaacagccagccggcgaacccgggcaccaccgccacgtacctcgagggcaacatgctcatcaccagcgagagcgagacgcagccggtgaaccgcgtggcgtacaacgtcggcgggcagatggccaccaacaaccagagctccaccactgcccccgcgaccggcacgtacaacctccaggaaatcgtgcccggcagcgtgtggatggagagggacgtgtacctccaaggacccatctgggccaagatcccagagacgggggcgcactttcacccctctccggccatgggcggattcggactcaaacacccaccgcccatgatgctcatcaagaacacgcctgcgcccggaaatatcaccagcttctcggacgtgcccgtcagcagcttcatcacccagtacagcaccgggcaggtcaccgtggagatggagtgggagctcaagaaggaaaactccaagaggtggaacccagagatccagtacacaaacaactacaacgacccccagtttgtggactttgccccggacagcaccggggaatacagaaccaccagacctatcggaacccgataccttacccgacccctttaa

SEQ ID NO: 822 - DNA, 2175 bp, Artificial Sequence
  Description of Artificial Sequence: Synthetic polynucleotide
atgtcttttgttgatcaccctccagattggttggaagaagttggtgaaggtcttcgcgagtttttgggccttgaagcgggcccaccgaaaccaaaacccaatcagcagcatcaagatcaagcccgtggtcttgtgctgcctggttataactatctcggacccggaaacggtctcgatcgaggagagcctgtcaacagggcagacgaggtcgcgcgagagcacgacatctcgtacaacgagcagcttgaggcgggagacaacccctacctcaagtacaaccacgcggacgccgagtttcaggagaagctcgccgacgacacatccttcgggggaaacctcggaaaggcagtctttcaggccaagaaaagggttctcgaaccttttggcctggctgaagagggtgctaagacggcccctaccggaaagcggatagacgaccactttccaaaaagaaagaaggcccggaccgaagaggactccaagccttccacctcgtcagacgccgaagctggacccagcggatcccagcagctgcaaatcccagcccaaccagcctcaagtttgggagctgatacaatgtctgcgggaggtggcggcccattgggcgacaataaccaaggtgccgatggagtgggcaatgcctcgggagattggcattgcgattccacgtggatgggggacagagtcgtcaccaagtccacccgaacctgggtgctgcccagctacaacaaccaccagtaccgagagatcaaaagcggctccgtcgacggaagcaacgccaacgcctactttggatacagcaccccctgggggtactttgactttaaccgcttccacagccactggagcccccgagactggcaaagactcatcaacaactactggggcttcagaccccggtccctcagagccaaaatcttcaacattcaagtcaaagaggtcacggtgcaggactccaccaccaccatcgccaacaacctcacctccaccgtccaagtgtttacggacgacgactaccagctgccctacgtcgtcggcaacgggaccgagggatgcctgccggccttccctccgcaggtctttacgctgccgcagtacggttacgcgacgctgaaccgcgacaacacagaaaatcccaccgagaggagcagcttcttctgcctagagtactttcccagcaagatgctgagaacgggcaacaaccttgagtttacctacaactttgaggaggtgcccttccactccagcttcgctcccagtcagaacctcttcaagctggccaacccgctggtggaccagtacttgtaccgcttcgtgagcacaaataacactggcggagtccagttcaacaagaacctggccgggagatacgccaacacctacaaaaactggttcccggggcccatgggccgaacccagggctggaacctgggctccggggtcaaccgcgccagtgtcagcgccttcgccacgaccaataggatggagctcgagggcgcgagttaccaggtgcccccgcagccgaacggcatgaccaacaacctccagggcagcaacacctatgccctggagaacactatgatcttcaacagccagccggcgaacccgggcaccaccgccacgtacctcgagggcaacatgctcatcaccagcgagagcgagacgcagccggtgaaccgcgtggtgcacaacgtcggcgggcagatggccaccaacaaccagagctccaccactgcccccgcgaccggcacgtacaacctccaggaaatcgtgcccggcagcgtgtggatggagagggacgtgtacctccaaggacccatctgggccaagatcccagagacgggggcgcactttcacccctctccggccatgggcggattcggactcaaacacccaccgcccatgatgctcatcaagaacacgcctgtgcccggaaatatcaccagcttctcggacgtgcccgtcagcagcttcatcacccagtacagcaccgggcaggtcaccgtggagatggagtgggagctcaagaaggaaaactccaagaggtggaacccggagatccagtacacaaacaactacaacgacccccagtttgtggactttgccccggacagcaccggggaatacagaaccaccagacctatcggaacccgataccttacccgacccctttaa

SEQ ID NO: 823 - DNA, 2175 bp, Artificial Sequence
  Description of Artificial Sequence: Synthetic polynucleotide
atgtcttttgttgatcaccctccagattggttggaagaagttggtgaaggtcttcgcgagtttttgggccttgaagcgggcccaccgaaaccaaaacccaatcagcagcatcaagatcaagcccgtggtcttgtgctgcctggttataactatctcggacccggaaacggtctcgatcgaggagagcctgtcaacagggcagacgaggtcgcgcgagagcacgacatctcgtacaacgagcagcttgaggcgggagacaacccctacctcaagtacaaccacgcggacgccgagtttcaggagaagctcgccgacgacacatccttcgggggaaacctcggaaaggcagtctttcaggccaagaaaagggttctcgaaccttttggcctggttgaagagggtgctaagacggcccctaccggaaagcggatagacgaccactttccaaaaagaaagaaggcccggaccgaagaggactccaagccttccacctcgtcagacgccgaagctggacccagcggatcccagcagctgcaaatcccagcccaaccagcctcaagtttgggagctgatacaatgtctgcgggaggtggcggcccattgggcgacaataaccaaggtgccgatggagtgggcaatgcctcgggagattggcattgcgattccacgtggatgggggacagagtcgtcaccaagtccacccgaacctgggtgctgcccagctacaacaaccaccagtaccgagagatcaaaagcggctccgtcgacggaggcaacgccaacgcctactttggatacagcaccccctgggggtactttgactttaaccgcttccacagccactggagcccccgggactggcaaagactcatcaacaactactggggcttcagaccccggtccctcagagtcaaaatcttcaacattcaagtcaaagaggtcacggtgcaggactccaccaccaccatcgccaacaacctcacctccaccgtccaagtgtttacggacgacgactaccagctgccctacgtcgtcggcaacgggaccgagggatgcctgccggccttccctccgcaggtctttacgctgccgcagtacggttacgcgacgctgaaccgcgacaacacagaaaatcccaccgagaggagcagcttcttctgcctagagtactttcccagcaagatgctgagaacgggcaacaactttgagtttacctacaactttgaggaggtgcccttccactccagcttcgctcccagtcagaacctcttcaagctggccaacccgctggtggaccagtacttgtaccgcttcgtgagcacaaataacactggcggagtccagttcaacaagaacctggccgggagatacgccaacacctacaaaaactggttcccggggcccatgggccgaacccagggctggaacctgggctccggggtcaaccgcgccagtgtcagcgccttcgccacgaccaataggatggagctcgagggcgcgagttaccaggtgcccccgcagccgaacggcatgaccaacaacctccagggcagcaacacctatgccctggagaacactatgatcttcaacagccagccggcgaacccgggcaccaccgccacgtacctcgagggcaacatgctcatcaccagcgagagcgagacgcagccggtgaaccgcgtggcgtacaacgtcggcgggcagatggccaccaacaaccagagctccaccactgcccccgcgaccggcacgtacaacctccaggaaatcgtgcccggcagcgtgtggatggagagggacgtgtacctccaaggacccatctgggccaagatcccagagacgggggcgcactttcacccctctccggccatgggcggattcggactcaaacacccaccgcccatgatgctcatcaagaacacgcctgcgcccggaaatatcaccagcttctcggacgtgcccgtcagcagcttcatcacccagtacagcaccgggcaggtcaccgtggagatggagtgggagctcaagaagggaaactccaagaggtggaacccagagatccagtacacaaacaactacaacgacccccagtttgtggactttgccccggacagcaccggggaatacagaaccaccagacctatcggaacccgataccttacccgacccctttaa

SEQ ID NO: 824 - DNA, 2175 bp, Artificial Sequence
  Description of Artificial Sequence: Synthetic polynucleotide
atgtcttttgttgatcaccctccagattggttggaagaagttggtgaaggtcttcgcgagtttttgggccttgaagcgggcccaccgaaaccaaaacccaatcagcagcatcaagatcaagcccgtggtcttgtgctgcctggttataactatctcggacccggaaacggtctcgatcgaggagagcctgtcaacagggcagacgaggtcgcgcgagagcacgacatctcgtacaacgagcagcttgaggcgggagacaacccctacctcaagtacaaccacgcggacgccgagtttcaggagaagctcgccgacgacacgtccttcgggggaaacctcggaaaggcagtctttcaggccaagaaaagggttctcgaaccttttggcctggttgaagagggtgctaagacggcccctaccggaaagcggatagacgaccactttccaaaaagaaagaaggcccggaccgaagaggactccaagccttccacctcgtcagacgccgaagctggacccagcggatcccagcagctgcaaatcccagcccaaccagcctcaagtttgggagctgatacaatgtctgcgggaggtggcggcccattgggcgacaataaccaaggtgccgatggagtgggcaatgcctcgggagattggcattgcgattccacgtggatgggggacagagtcgtcaccaagtccacccgaacctgggtgctgcccagctacaacaaccaccagtaccgagagatcaaaagcggctccgtcgacggaagcaacgccaacgcctactttggatacagcaccccctgggggtactttgactttaaccgcttccacagccactggagcccccgagactggcaaagactcatcaacaactactggggcttcagaccccggtccctcagagtcaaaatcttcaacattcaagtcaaagaggtcacggtgcaggactccaccaccaccatcgccaacaacctcacctccaccgtccaagtgtttacggacgacgactaccagctgccctacgtcgtcggcaacgggaccgagggatgcctgccggccttccctccgcaggtctttacgctgccgcagtacggttacgcgacgctgaaccgcgacaacacagaaaatcccaccgagaggagcagcttcttctgcctagagtactttcccagcaagatgctgagaacgggcaacaactttgagtttacctacaactttgaggaggtgcccttccactccagcttcgctcccagtcagaacctcttcaagctggccaacccgctggtggaccagtacttgtaccgcttcgtgagcacaaataacactggcggagtccagttcaacaagaacctggccgggagatacgccaacacctacaaaaactggttcccggggcccatgggccgaacccagggctggaacctgggctccggggtcaaccgcgccagtgtcagcgccttcgccacgaccaataggatggagctcgagggcgcgagttaccaggtgcccccgcagccgaacggcatgaccaacaacctccagggcagcaacacctatgccctggagaacactatgatcttcaacagccagccggcgaacccgggcaccaccgccacgtacctcgagggcaacatgctcatcaccagcgagagcgagacgcagccggtgaaccgcgtggcgtacaacgtcggcgggcagatggccaccaacaaccagagctccaccactgcccccgcgaccggcacgtacaacctccaggaaatcgtgcccggcagcgtgtggatggagagggacgtgtacctccaaggacccatctgggccaagatcccagagacgggggtgcactttcacccctctccggccatgggcggattcggactcaaacacccaccgcccatgatgctcatcaagaacacgcctgtgcccggaaatatcaccagcttctcggacgtgcccgtcagcagcttcatcacccagtacagcaccgggcaggtcaccgtggagatggagtgggagctcaagaaggaaaactccaagaggtggaacccagagatccagtacacaaacaactacaacgacccccagtttgtggactttgccccggacagcaccggggaatacagaaccaccagacctatcggaacccgataccttacccgacccctttaa

SEQ ID NO: 825 - DNA, 2175 bp, Artificial Sequence
  Description of Artificial Sequence: Synthetic polynucleotide
  modified_base (1652)..(1652): a, c, t, or g
atgtcttttgttgatcaccctccagattggttggaagaagttggtgaaggtcttcgcgagtttttgggccttgaagcgggcccaccgaaaccaaaacccaatcagcagcatcaagatcaagcccgtggtcttgtgctgcctggttataactatctcggacccggaaacggtctcgatcgaggagagcctgtcaacagggcagacgaggtcgcgcgagagcacgacatctcgtacaacgagcagcttgaggcgggagacaacccctacctcaagtacaaccacgcggacgccgagtttcaggagaagctcgccgacgacacatccttcgggggaaacctcggaaaggcagtctttcaggccaagaaaagggttctcgaaccttttggcctggttgaagagggtgctaagacggcccctaccggaaagcggatagacgaccactttccaaaaagaaagaaggcccggaccgaggaggactccaagccttccacctcgtcagacgccgaagctggacccagcggatcccagcagctgcaaatcccagcccaaccagcctcaagtttgggagctgatacaatgtctgcgggaggtggcggcccattgggcgacaataaccaaggtgccgatggagtgggcaatgcctcgggagattggcattgcgattccacgtggatgggggacagagtcgtcaccaagtccacccgaacctgggtgctgcccagctacaacaaccaccagtaccgagagatcaaaagcggctccgtcgacggaagcaacgccaacgcctactttggatacagcaccccctgggggtactttgactttaaccgcttccacagccactggagcccccgagactggcaaagactcatcaacaactactggggcttcagaccccggtccctcagagtcaaaatcttcaacattcaagtcaaagaggtcacggtgcaggactccaccaccaccatcgccaacaacctcacctccaccgtccaagtgtttacggacgacgactaccagctgccctacgtcgtcggcaacgggaccgagggatgcctgccggccttccctccgcaggtctttacgctgccgcagtacggttacgcgacgctgaaccgcgacaacacagaaaatcccaccgagaggagcagcttcttctgcctagagtactttcccagcaagatgctgagaacgggcaacaactttgagtttacctacaactttgaggaggtgcccttccactccagcttcgctcccagtcagaacctcttcaagctggccaacccgctggtggaccagtacttgtaccgcttcgtgagcacaaataacactggcggagtccagttcaacaagaacctggccgggagatacgccaacacctacaaaaactggttcccggggcccatgggccgaacccagggctggaacctgggctccggggtcaaccgcgccagtgtcagcgccttcgccacgaccaataggatggagctcgagggcgcgagttaccaggtgcccccgcagccgaacggcatgaccaacaacctccagggcagcaacacctatgccctggagaacactatgatcttcaacagccagccggcgaacccgggcaccaccgccacgtacctcgagggcagcatgctcatcaccancgagagcgagacgcagccggtgaaccgcgtggcgtacaacgtcggcgggcagatggccaccaacaaccagagctccaccactgcccccgcgaccggcacgtacaacctccaggaaatcgtgcccggcagcgtgtggatggagagggacgtgtacctccaaggacccatctgggccaagatcccagagacgggggcgcactttcacccctctccggccatgggcggattcggactcaaacacccaccgcccatgatgctcatcaagaacacgcctgtgcccggaaatatcaccagcttctcggacgtgcccgtcagcagcttcatcacccagtacagcaccgggcaggtcaccgtggagatggagtgggagctcaagaaggaaaactccaagaggtggaacccagagatccagtacacaaacaactacaacgacccccagtttgtggactttgccccggacagcaccggggaatacagaaccaccagacctatcggaacccgataccttacccgacccctttaa

SEQ ID NO: 826 - DNA, 2211 bp, Artificial Sequence
  Description of Artificial Sequence: Synthetic polynucleotide
atggctgctgacggttatcttccagattggctcgaggacaacctttctgaaggcattcgtgagtggtgggctctgaaacctggagtccctcaacccaaagcgaaccaacaacaccaggacaaccgtcggggtcttgtgcttccgggttacaaatacctcggacccggtaacggactcgacaaaggagagccggtcaacgaggcggacgcggcagccctcgaacacgacaaagcttacgaccagcagctcaaggccggtgacaacccgtacctcaagtacaaccacgccgacgccgagtttcaggagcgtcttcaagaagatacgtcttttgggggcaaccttggcagagcagtcttccaggccaaaaagaggatccttgagcctcttggtctggttgaggaagcagctaaaacggctcctggaaagaagaggcctgtagatcagtctcctcaggaaccggactcatcatctggtgttggcaaatcgggcaaacagcctgccagaaaaagactaaatttcggtcagactggcgactcagagtcagtcccagaccctcaacctctcggagaaccaccagcagcccccacaagtttgggatctaatacaatggcttcaggcggtggcgcaccaatggcagacaataacgagggtgccgatggagtgggtaattcctcaggaaattggcattgcgattcccaatggctgggcgacagagtcatcaccaccagcaccagaacctgggccctgcccacttacaacaaccatctctacaagcaaatctccagccaatcaggagcttcaaacgacaaccactactttggctacagcaccccttgggggtattttgactttaacagattccactgccacttctcaccacgtgactggcagcgactcattaacaacaactggggattccggcccaagaaactcagcttcaagctcttcaacatccaagttaaagaggtcacgcagaacgatggcacgacgactattgccaataaccttaccagcacggttcaagtgtttacggactcggagtatcagctcccgtacgtgctcgggtcggcgcaccaaggctgtctcccgccgtttccagcggacgtcttcatggtccctcagtatggatacctcaccctgaacaacggaagtcaagcggtgggacgctcatccttttactgcctggagtacttcccttcgcagatgctaaggactggaaataacttccaattcagctataccttcgaggatgtaccttttcacagcagctacgctcacagccagagtttggatcgcttgatgaatcctcttattgatcagtatctgtactacctgaacagaacgcaaggaacaacctctggaacaaccaaccaatcacggctgctttttagccaggctgggcctcagtctatgtctttgcaggccagaaattggctacctgggccctgctaccggcaacagagactttcaaagactgctaacgacaacaacaacagtaactttccttggacagcggccagcaaatatcatctcaatggccgcgactcgctggtgaatccaggaccagctatggccagtcacaaggacgatgaagaaaaatttttccctatgcacggcaatctaatatttggcaaagaagggacaacggcaagtaacgcagaattagataatgtaatgattacggatgaagaagagattcgtaccaccaatcctgtggcaacagagcagtatggaactgtggcaaataacttgcagagctcaaatacagctcccacgactagaactgtcaatgatcagggggccttacctggcatggtgtggcaagatcgtgacgtgtaccttcaaggacctatctgggcaaagattcctcacacggatggacactttcatccttctcctctgatgggaggctttggactgaaacatccgcctcctcaaatcatgatcaaaaatactccggtaccggcaaatcctccgacgactttcagcccggccaagtttgcttcatttatcactcagtactccactggacaggtcagcgtggaaattgagtgggagctacagaaagaaaacagcaaacgttggaatccagagattcagtacacttccaactacaacaagtctgttaatgtggactttactgtagacactaatggtgtttatagtgaacctcgccctattggaacccggtatctcacacgaaacttgtaa

SEQ ID NO: 827 - DNA, 2205 bp, Artificial Sequence; identical to SEQ ID NO: 95
  Description of Artificial Sequence: Synthetic polynucleotide

SEQ ID NO: 828 - DNA, 2234 bp, Artificial Sequence
  Description of Artificial Sequence: Synthetic polynucleotide
atgtcttttgttgatcaccctccagattggttggaagaagttggtgaaggtcttcgcgagtttttgggccttgaagcgggcccaccgaaaccaaaacccaatcagcagcatcaagatcaagcccgtggtcttgtgctgcctggttataactatctcggacccggaaacggtctcgatcgaggagagcctgtcaacagggcagacgaggtcgcgcgagagcacgacatctcgtacaacgagcagcttgaggcgggagacaacccctacctcaagtacaaccacgcggacgccgagtttcaggagaagctcgccgacgacacatccttcgggggaaacctcggaaaggcagtctttcaggccaagaaaagggttctcgaaccttttggcctggttgaagagggtgctaagacggcccctaccggaaagcggatagacgaccactttccaaaaagaaagaaggctcggaccgaagaggactccaagccttccacctcgtcagacgccgaagctggacccagcggatcccagcagctgcaaatcccagcccaaccagcctcaagtttgggagctgatacaatgtctgcgggaggtggcggcccattgggcgacaataaccaaggtgccgatggagtgggcaatgcctcgggagattggcattgcgattccacgtggatgggggacagagtcgtcaccaagtccacccgaacctgggtgctgcccagctacaacaaccaccagtaccgagagatcaaaagcggctccgtcgacggaagcaacgccaacgcctactttggatacagcaccccctgggggtactttgactttaaccgcttccacagccactggagcccccgagactggcaaagactcatcaacaactactggggcttcagaccccggtccctcagagtcaaaatcttcaacattcaagtcaaagaggtcacggtgcaggactccaccaccaccatcgccaacaacctcacctccaccgtccaagtgtttacggacgacgactaccagctgccctacgtcgtcggcaacgggaccgagggatgcctgccggccttccctccgcaggtctttacgctgccgcagtacggttacgcgacgctgaaccgcgacaacacagaaaatcccaccgagaggagcagcttcttctgcctagagtactttcccagcaagatgctgagaacgggcaacaactttgagtttacctacaactttgaggaggtgcccttccactccagcttcgctcccagtcagaacctgttcaagctggccaacccgctggtggaccagtacttgtaccgcttcgtgagcacaaataacactggcggagtccagttcaacaagaacctggccgggagatacgccaacacctacaaaaactggttcccggggcccatgggccgaacccagggctggaacctgggctccggggtcaaccgcgccagtgtcagcgccttcgccacgaccaataggatggagctcgagggcgcgagttaccaggtgcccccgcagccgaacggcatgaccaacaacctccagggcagcaacacctatgccctggagaacactatgatcttcaacagccagccggcgaacccgggcaccaccgccacgtacctcgagggcaacatgctcatcaccagcgagagcgagacgcagccggtgaaccgcgtggcgtacaacgtcggcgggcagatggccaccaacaaccagagctccaccactgcccccgcgaccggcacgtacaacctccaggaaatcgtgcccggcagcgtgtggatggagagggacgtgtacctccaaggacccatctgggccaagatcccagagacgggggcgcactttcacccctctccggccatgggcggattcggactcaaacacccaccgcccatgatgctcatcaagaacacgcctgtgcccggaaatatcaccagcttctcggacgtgcccgtcagcagcttcatcacccagtacagcaccgggcaggtcaccgtggagatggagtgggagctcaagaaggaaaactccaagaggtggaacccagagatccagtacacaaacaactacaacgacccccagtttgtggactttgccccggacagcaccggggaatacagaaccaccagacctatcggaacccgataccttacccgacccctttaacccattcatgtcgcataccctcaataaaccgtgtattcgtgtcagtaaaatactgcctc

SEQ ID NO: 829 - protein, 736 aa, Artificial Sequence
  Description of Artificial Sequence: Synthetic polypeptide
MAADGYLPDWLEDNLSEGIREWWALKPGVPQPKANQQHQDNRRGLVLPGYKYLGPGNGLDKGEPVNEADAAALEHDKAYDQQLKAGDNPYLKYNHADAEFQERLQEDTSFGGNLGRAVFQAKKRILEPLGLVEEAAKTAPGKKRPVDQSPQEPDSSSGVGKSGKQPARKRLNFGQTGDSESVPDPQPLGEPPAAPTSLGSNTMASGGGAPMADNNEGADGVGNSSGNWHCDSQWLGDRVITTSTRTWALPTYNNHLYKQISSQSGASNDNHYFGYSTPWGYFDFNRFHCHFSPRDWQRLINNNWGFRPKKLSFKLFNIQVKEVTQNDGTTTIANNLTSTVQVFTDSEYQLPYVLGSAHQGCLPPFPADVFMVPQYGYLTLNNGSQAVGRSSFYCPEYFPSQMLRTGNNFQFSYTFEDVPFHSSYAHSQSLDRLMNPLIDQYLYYLNRTQGTTSGTTNQSRLLFSQAGPQSMSLQARNWLPGPCYRQQRLSKTANDNNNSNFPWTAASKYHLNGRDSLVNPGPAMASHKDDEEKFFPMHGNLIFGKEGTTASNAELDNVMITDEEEIRTTNPVATEQYGTVANNLQSSNTAPTTRTVNDQGALPGMVWQDRDVYLQGPIWAKIPHTDGHFHPSPLMGGFGLKHPPPQIMIKNTPVPANPPTTFSPAKFASFITQYSTGQVSVEIEWELQKENSKRWNPEIQYTSNYNKSVNVDFTVDTNGVYSEPHPIGTRYLTRNL

SEQ ID NO: 830 - protein, 736 aa, Artificial Sequence
  Description of Artificial Sequence: Synthetic polypeptide
MAADGYLPDWLEDNLSEGIREWWALKPGVPQPKANQQHQDNRRGLVLPGYKYLGPGNGLDKGEPVNEADAAALEHDKAYDQQLKAGDNPYLKYNHADAEFQERLQEDTSFGGNLGRAVFQAKKRILEPLGLVEEAAKTAPGKKRPVDQSPQEPDSSSGVGKSGKQPARKRLNFGQTGDSESVPDPQPLGEPPAAPTSLGSNTMASGGGAPMADNNEGADGVGNSSGNWHCDSQWLGDRVITTSTRTWALPTYNNHLYKQISSQSGASNDNHYFGYSTPWGYFDFNRFHCHFSPRDWQRLINNNWGFRPKKLSFKLFNIQVKEVTQNDGTTTVANNLTSTVQVFTDSEYQLPYVLGSAHQGCLPPFPADVFMVPQYGYLTLNNGSQAVGRSSFYCLEYFPSQMLRTGNNFQFSYTFEDVPFHSSYAHSQSLDRLMNPLIDQYLYYLNRTQGTTSGTTNQSRLLFSQAGPQSMSLQARNWLPGPCYRQQRLSKTANDNNNSNFPWTAASKYHLNGRDSLVNPGPAMASHKDDEEKFFPMHGNLIFGKEGTTASNAELDNVMITDEEEIRTTNPVATEQYGTVANNLQSSNTAPTTRTVNDQGALPGMVWQDRDVYLQGPIWAKIPHTDGHFHPSPLMGGFGLKHPPPQIMIKNTPVPANPPTTFSPAKFASFITQYSTGQVSVEIEWELQKENSKRWNPEIQYTSNYNKSVNVDFTVDTNGVYSEPRPIGTRYLTRNL

SEQ ID NO: 831 - protein, 736 aa, Artificial Sequence
  Description of Artificial Sequence: Synthetic polypeptide
MAADGYLPDWLEDNLSEGIREWWALKPGVPQPKANQQHQDNRRGLVLPGYKYLGPGNGLDKGEPVNEADAAALEHDKAYDQQLKAGDNPYLKYNHADAEFQERLQEDTSFGGNLGRAVFQAKKRILEPLGLVEEAAKTAPGKKRPVDQSPQEPDSSSGVGKSGKQPARKRLNFGQTGDSESVPDPQPLGEPPAAPTSLGSNTMASGGGAPMADNNEGADGVGNSSGNWHCDSQWLGDRVITTSTRTWALPTYNNHLYKQISGQSGASNDNHYFGYSTPWGYFDFNRFHCHFSPRDWQRLINNNWGFRPKKLSFKLFNIQVKEVTQNDGTTTIANNLTSTVQVFTDSEYQLPYVLGSAHQGCLPPFPADVFMVPQYGYLTLNNGSQAVGRSSFYCLEYFPSQMLRTGNNFQFSYTFEDVPFHSSYAHSQSLDRLMNPLIDQYLYYLNRTQGTTSGTTNQSRLLFSQAGPQSMSLQARNWLPGPCYRQQRLSKTANGNNNSNFPWTAASKYHLNGRDSLVNPGPAMASHKDDEEKFFPMHGNLIFGKEGTTASNAELDNVMITDEEEIRTTNPVATEQCGTVANNLQSSNTAPTTRTVNDQGALPGMVWQDRDVYLQGPIWAKIPHTDGHFHPSPLMGGFGLKHPPPQIMIKNTPVPANPPTTFSPAKFASFITQYSTGQVSVEIEWELQKENSKRWNPEIQYTSNYNKSVNVDFTVDTNGVYSEPRPIGTRYLTRNL

SEQ ID NO: 832 - protein, 736 aa, Artificial Sequence
  Description of Artificial Sequence: Synthetic polypeptide
MAADGYLPDWLEDNLSEGIREWWALKPGVPQPKANQQHQDNRRGLVLPGYKYLGPGNGLDKGEPVNEADAAALEHDKAYDQQLKAGDNPYLKYNHADAEFQERLQEDTSFGGNLGRAVFQAKKRILEPLGLVEGAAKTAPGKKRPVDQSPQEPDSSSGVGKSGKQPARKRLNFGQTGDSESVPDPQPLGEPPAAPTSLGSNTMASGGGAPMADNNEGADGVGNSSGNWHCDSQWLGDRVITTSTRTWALPTYNSHLYKQISSQSGASNDNHYFGYSTPWGYFDFNRFHCHFSPRDWQRLINNNWGFRPKKLSFKLFNIQVKEVTQNDGTTTIANNLTSTVQVFTDSEYQLPYVLGSAHQGCLPPFPADAFMVPQYGYLTLNNGSQAVGRSSFYCLEYFPSQMLRTGNNFQFSYTFEDVPFHGSYAHSQSLDRLMNPLIDQYLYYLNRTQGTTSGTTNQSRLLFSQAGPQSMSLQARNWLPGPCYRQQRLSKTANDNNNSNFPWTAASKYHLNGRDSLVNPGPAMASHKDDEEKFFPMHGNLIFGKEGTTASNAELDNVMITDEEEIRTTNPVATEQYGTVANNLQSSNTAPTTRTVNDQGALPGMVWQDRDVYLQGPIWAKIPHTDGHFHPSPLMGGFGLKHPPPQIMIKNTPVPANPPTTFSPAKFASFITQYSTGQVSVEIEWELQKENSKRWNPEIQYTSNYNKSVNVDFTVDTNGVYSEPRPIGTRYLTRNS

SEQ ID NO: 833 - protein, 736 aa, Artificial Sequence
  Description of Artificial Sequence: Synthetic polypeptide
MAADGYLPDWLEDNLSEGIREWWALKPGVPQPKANQQHQDNRRGLVLPGYKYLGPGNGLDKGEPVNEADAAALEHDKAYDQQLKAGDNPYLKYNHADAEFQERLQEDTSFGGNLGRAVFQAKKRILEPLGLVEGAAKTAPGKKRPVDQSPQEPDSSSGVGKSGKQLARKRLNFGQTGDSESVPDPQPLGEPPAAPTSLGSNTMASGGGAPMADNNEGADGVGNSSGNWHCDSQWLGDRVITTSTRTWALPTYNSHLYKQISGQSGASNDNHYFGYSTPWGYFDFNRFHCHFSPRDWQRLINNNWGFRPKKLSFKLFNIQVKEVTQNDGTTTIANNLTSTVQVFTDSEYQLPYVLGSAHQGCLPPFPADVFMVPQYGYLTLNNGSQAVGRSSFYCLEYFPSQMLRTGNNFQFSYTFEDVPFHSSYAHSQSLDRLMNPLIDQYLYYLNRTQGTTSGTTNQSRLLFSQAGPQSMSLQARNWLPGPCYRQQRLSKTANDNNNSNFPWTAASKYHLNGRDSLVNPGPAMASHKDDEEKFFPMHGNLIFGKEGTTASNAELDNVMITDEEEIRTTNPVATEQYGTVANNLQSSNTAPTTRTVNDQGALPGMVWQDRDVYLQGPIWAKIPHTDGHFHPSPLMGGFGLKHPPPQIMIKNTPVPANPPTTFSPAKFASFITQYSTGQVSVEIEWELQKENSKRWNPEIQYTSNYNKSVNVDFTVDTNGVYSEPRPIGTRYLTRNL

SEQ ID NO: 834 - protein, 736 aa, Artificial Sequence
  Description of Artificial Sequence: Synthetic polypeptide
MAADGYLPDWLEDNLSEGIREWWALKPGVPQPKANQQHQDDRRGLVLPGYKYLGPGNGLDKGEPVNEADAAALEHDKAYDQQLKAGDNPCLKYNHADAEFQERLQEDTSFGGNLGRAVFQAKKRILEPLGLVEEAAKTAPGKKRPVDQSPQEPDSSSGVGKSGKQPARKRLNFGQTGDSESVPDPQPLGEPPAAPTSLGSNTMASGGSAPMADNNEGADGVGNSSGNWHCDSQWLGDRVITTSTRTWALPTYNNHLYKQISSQSGASNDNHYFGYSTPWGYFDFNRFHCHFSPRDWQRLINNNWGFRPKKLSFKLFNIQVKEVTQNDGTTTIANNLTSTVQVFTDSEYQLPYVLGSAHQGCLPPFPADVFMVPQYGYLTLNNGSQAVGRSSFYCLEYFPSQMLRTGNNFQFSYTFEDVPFHSSYAHSQSLDRLMDPLIDQYLYYLNRTQGTTSGTTNQSRLLFSQAGPQSMSLQARNWLPGPCYRQQRLSKTANDNNNSNFPWTAASKYHLNGRDSLVNPGPAMASHKDDEEKFFPMHGNLIFGKEGTTASNAELDNVMITDEEEIRTTNPVATEQYGTVANNLQSSNTAPTTRTVNDQGALPGMVWQDRDVYLQGPIWAKIPHTDGHFHPSPLMGGFGLKHPPPQIMIKNTPVPANPPTTFSPAKFASFITQYSTGQVSVEIEWELQKENSKRWNPEIQYTSNYNKSVNVDFTVDTNGVYSEPRPIGTRYLTRNL

SEQ ID NO: 835 - protein, 736 aa, Artificial Sequence
  Description of Artificial Sequence: Synthetic polypeptide
MAADGYLPDWLEDNLSEGIREWWALKPGVPQPKANQQHQDDRRGLVLPGYKYLGPGNGLDKGEPVNEADAAALEHDKAYDQQLKAGDNPYLKYNHADAEFQERLQEDTSFGGNLGRAVFQAKKRILEPLGLVEEAAKTAPGKKRPVDQSPQEPDSSSGVGKSGKQPARKRLNFGQTGDSESVPDPQPLGEPPAAPTSLGSNTMASGGGAPMADNNEGADGVGNSSGNWHCDSQWLGNRVITTSTRTWALPTYNNHLYKQISSQSGASNDNHYFGYSTPWGYFDFNRFHCHFSPRDWQRLINNNWGFRPKKLSFKLFNIQVKEVTQNDGTTTIANNLTSTVQVFTDSEYQLPYVLGSAHQGCLPPFPADVFMVPQYGYLTLNNGSQAVGRSSFYCLEYFPSQMLRTGNNFQFSYTFEDVPFHSSYAHSQSLDRLMNPLIDQYLYYLNRTQGTTSGTTNQSRLLFSQAGPQSMSLQARNWLPGPCYRQQRLSKTANDNNNSNFPWTAASKYHLNGRDSLVNPGPAMASHKDDEEKFFPMHGNLIFGKEGTTASNAELDNVMITDEEEIRTTNPVATEQYGTVANNLQSSNTAPTTRTVNDQGALPGMVWQDRDVYLQGPIWAKIPHTDGHFHPSPLMGGFGLKHPPPQIMIKNTPVPANPPTTFSPAKFASFITQYSTGQVSVEIEWELQKENSKRWNPEIQYTSNYNKSVNVDFTVDTNGVYSEPRPIGTRYLTRNL

SEQ ID NO: 836 - protein, 736 aa, Artificial Sequence
  Description of Artificial Sequence: Synthetic polypeptide
MAADGYLPDWLEDNLSEGIREWWALKPGVPQPKANQQHQDDRRGLVLPGYKYLGPGNGLDKGEPVNEADAAALEHDKAYDQQLKAGDNPYLKYNHADAEFQERLQEDTSFGGNLGRAVFQAKKRILEPLGLVEEAAKTAPGKKRPVDQSPQEPDSSSGVGKSGKQPARKRLNFGQTGDSESVPDPQPLGEPPAAPTSLGSNTMASGGGAPMADNNEGADGVGNSSGNWHCDSQWLGDRVITTSTRTWALPTYNNHLYKQISSQSGASNDNHYFGYSTPWGYFDFNRFHCHFSPRDWQRLINNNWGFRPKKLSFKLFNIQVKEVTQNDGTTTIANNLTSTVQVFTDSEYQLPYVLGSAHQGCLPPFPADVFMVPQYGYLTLNNGSQAVGRSSFYCLEYFPSQMLRTGNNFQFSYTFEDVPFHSSYAHSQSLDRLMNPLIDQYLYYLNRTQGTTSGTTNQSRLLFSQAGPQSMSLQARNWLPGPCYRQQRLSKTANDNNNSNFPWTAASKYHLNGRDSLVNPGPAMASHKDDEEKFFPMHGNLIFGKEGTTASNAELDNVMITDEEEIRTTNPVATVQYGTVANNLQSSNTAPTTRTVNDQGALPGMVWQDRDVYLQGPIWAKIPHTDGHFHPSPLMGGFGLKHPPPQIMIKNTPVPANPPTTFSPAKFASFITQYSTGQVSVEIEWELQKENSKRWNPEIQYTSNYNKSVNVDFTVDTNGVYSEPRPIGTRYLTRNL

SEQ ID NO: 837 - protein, 735 aa, Artificial Sequence
  Description of Artificial Sequence: Synthetic polypeptide
MAADGYLPDWLEDNLSEGIREWWALKPGVPQPKANQQHQDNRRGLVLPGYKYLGPGNGLDKGEPVNEADAAALEHDKAYDQQLKAGDNPYLKYNHADAEFQERLQEDTSFGGNLGRAVFQAKKGILEPLGLVEEAAKTAPGKKRPVDQSPQEPDSSSGVGKSGKQPARKRLNFGQTGDSESVPDPQPLGEPPAAPTSLGSNTMASGGGAPMADNNEGADGVGNSSGNWHCDSQWLGDRVITTSTRTWALPTYNNHLYKQISSQSGASNDNHYFGYSTPWGYFDFNRFHCHFSPRDWQRLINNNWGFRPKKLSFKLFNIQVKEVTQNDGTTTIANNLTSTVQVFTDSEYQLPYVFGSAHQGCLPPFPADVFMVPQYGYLTLNNGSQAVGRSSFYCLEYFPSQMLRTGNNFQFSYTFEDVPFHSSYAHSQSSDRLMNPLIDQYLYYLNRTQGTTSGTTNQSRLLFSQAGPQSMSLQARNWLPGPCYRQQRLSKTANDNNNSNFPTAASKYHLNGRDSLVNPGPAMASHKDDEEKFFPMHGNLIFGKEGTTASNAELDNVMITDEEEIRTTNPVATEQYGTVANNLQSSNTAPTTRTVNDQGALPGMVWQDRDVYLQGPIWAKIPHTDGHFHPSPLMGGFGLKHPPPQIMIKNTPVPANPPTTFSPAKFASFITQYSTGQVSVEIEWELQKENSKRWNPEIQYTSNYNKSVNVDFTVDTNGVYSEPRPIGTRYLTRNL

SEQ ID NO: 838 - protein, 736 aa, Artificial Sequence
  Description of Artificial Sequence: Synthetic polypeptide
MAADGYLPDWLEDNLSEGIREWWALKPGVPQPKANQQHQDNRRGLVLPGYKYLGPGNGLDEGEPVNEADAAALEHDKAYDQQLKAGDNPYLKYNHADAEFQERLQEDTSFGGNLGRAVFQAKKRILEPLGLVEGAAKTAPGKKRPVDQSPQEPDSSSGVGKSGKQPARKRLNFGQTGDSESVPDPQPLGEPPAAPTSLGSNTMASGGGAPMADNNEGADGVGNSSGNWHCDSQWLGDRVITTSTRTWALPTYNSHLYKQISSQSGASNDNHYFGYSTPWGYFDFNRFHCHFSPRDWQRLINNNWGFRPKKLSFKLFNIQVKEVTQNDGTTTIANNLTSTVQVFTDSEYQLPYVLGSAHQGCLPPFPADVFMVPQYGYLTLNNGSQAVGRSSFYCLEYFPSQMLRTGNNFQFSYTFEDVPFHSSYAHSQSLDRLMNPLIDQYLYYLNRTQGTTSGTTNQSRLLFSQAGPQSMSLQARNWLPGPCYRQQRLSKTANDNNNSNFPWTAASKYHLNGRDSLVNPGPAMASHKDDEEKFFPMHGNLIFGKEGTTASNAELDNVMITDEEEIRTTNPVATEQYGTVANNLQSSNTAPTTRTVNDQGALPGMVWQDRDVYLQGPIWAKIPHTDGHFHPSPLMGGFGLKHPPPQIMIKNTPVPANPPTTFSPAKFASFITQYSTGQVSVEIEWELQKENSKRWNPEIQYTSNYNKSVNVDFTVDTNGVYSEPRPIGTRYLTRNL

SEQ ID NO: 839 - protein, 668 aa, Artificial Sequence
  Description of Artificial Sequence: Synthetic polypeptide
MAADGYLPDWLEDNLSEGIREWWALKPGVPQPKANQQHQDNRRGLVLPGYKYLGPGNGLDKGEPVNEADAAALEHDKAYDQQLKAGDNPYLKYNHADAEFQERLQEDTSFGGNLGRAVFQAKKRILEPLGLVEGAAKTAPGKKRPVDQSPQEPDSSSGVGKSGKQPARKRLNFGQTGDSESVPDPQPLGEPPAAPTSLGSNTMASGGGAPMADNNEGADGVGNSSGNWHCDSQWLGDRVITTSTRTWALPTYNSHLYKQISSQSGASNDNHYFGYSTPWGILTLTDSTATSHHVTGSDSLTTTGDSGPRNSASSSSTSKLKRSRRTMARRLLPITLPARFKCLRTRSISSRTCSGRRTKAVSRRFQRTPSWSLSMDTSPTTEVKRWDAHPFTAWSTSLRRCGLEITSNSAIPSRMYLFTAATLTARVWIAILLLISICTTTERKEQPLEQPTNHGCFLARLGLSLCLCRPEIGYLGPATGNRDFQRLLTTTTTVTFLGQRPANIISMAATRWIQDQLWPVTRTMKKNFSLCTAIRGPYLAWCGKIVTCTFKDLSGQRFLTRMDTFILLLWEALDNIRLLKSSKILRYRQILRRLSARPSLLHLSLSTPLDRSAWKLSGSYRKKTANVGIQRFSTLPTTTSLLMWTLLTLMVFIVNLALLEPGISHETC

SEQ ID NO: 840 - protein, 734 aa, Artificial Sequence
  Description of Artificial Sequence: Synthetic polypeptide
MTDGYLPDWLEDNLSEGVREWWALQPGAPKPKANQQHQDNARGLVLPGYKYLGPGNGLDKGEPVNAADAAALEHDKAYDQQLKAGDNPYLKYNHADAEFQQRLQGDTSFGGNLGRAVFQAKKRVLEPLGLVEQAGETAPGKKRPLIESPQQPDSSTGIGKKGKQPAKKKLVFEDETGAGDGPPEGSTSGAMSDDSEMRAATGGAAVEGGQGADGVGNASGDWHCDSTWSEGHVTTTSTRTWVLPTYNNHLYKRLGESLQSNTYNGFSTPWGYFDFNRFHCHFSPRDWQRLINNNWGMRPKAMRVKIFNIQVKEVTTSNGETTVANNLTSTVQIFADSSYELPYVMDAGQEGSLPPFPNDVFMVPQYGYCGLVTGNTSQQQTDRNAFYCLEYFPSQMLRTGNNFEITYSFEKVPFHSMYAHSQSLDRLMNPLIDQYLWGLQSTTTGTTLNAGTATTNFTKLRPTNLSNFKKNWLPGPSIKQQGFSKTANQNYKIPATGSDSLIKYETHSTLDGRWSALTPGPPMATAGPADSKFSNSQLIFAGPKQNGNTATVPGTLIFTSEEELAATNATDTDMWGNLPGGDQSNSNLPTVDRLTALGAVPGMVWQNRDIYYQGPIWAKIPHTDGHFHPSPLIGGFGLKHPPPQIFIKNTPVPANPATTFSSTPVNSFITQYSTGQVSVQIDWEIQKERSKRWNPEVQFTSNYGQQNSLLWAPDAAGKYTEPRAIGTRYLTHHL

SEQ ID NO: 841 - protein, 734 aa, Artificial Sequence
  Description of Artificial Sequence: Synthetic polypeptide
MTDGYLPDWLEDNLSEGVREWWALQPGAPKPKANQQHQDNARGLVLPGYKYLGPGNGLDKGEPVNAADAAALEHDKAYDQQLKAGDNPYLKYNHADAEFQQRLQGDTSFGGNLGRAVFQAKKRVLEPLGLVEQAGETAPGKKRPLIESPQQPDSSTGIGKKGKQPAKKKLVFEDETGAGDGPPEGSTSGAMSDDSEMRAAAGGAAVEGGQGADGVGNASGDWHCDSTWSEGHVTTTSTRTWVLPTYNNHLYKRLGESLQSNTYNGFSTPWGYFDFNRFHCHFLPRDWQRLINNNWGVRPKAMRVKIFNIQVKEVTTSNGETTVANNLTSTVQIFADSSYELPYVMDAGQEGSLPPFPNDVFMVPQYGYCGLVTGDTSQQQTDRNAFYCLEYFPSQMLRTGNNFEITYSFEKVPFHSMYAHSQSLDRLMNPLIDQYLWGLQSTTTGTTLNAGTATTNFTKLRPTNFSNFKKNWLPGPSIKQQGFSKTANQNYKIPATGSDSLIKYETHSTLDGRWSALTPGPPMATAGPADSKFSNSQLIFAGPKQNGNTATVPGTLIFTSEEELAATNATDTDMWGNLPGGDQSNSNLPTVDRLTALGAVPGMVWQNRDIYYQGPIWAKIPHTDGHFHPSPLIGGFGLKHPPPQIFIKNTPVPANPATTFSSTPVNSFITQYSTGQVSVQIDWEIQKERSKRWNPEVQFTSNYGQQNSLLWAPDAAGKYTEPRAIGTRYLTHHL

SEQ ID NO: 842 - protein, 734 aa, Artificial Sequence
  Description of Artificial Sequence: Synthetic polypeptide
MTDGYLPDWLEDNLSEGVREWWALQPGAPKPKANQQHQDNARGLVLPGYKYLGPGNGLDEGEPVNAADAAALEHDKAYDQQLKAGDNPYLKYNHADAEFQQRLQGDTSFGGNLGRAVFQAKKRVLEPLGLVEQAGETAPGKKRPLIESPQQPDSSTGIGKKGKQPAKKKLVFEDETGAGDGPPEGSTSGAMSDDSEMRAAAGGAAVEGGQGADGVGNASGDWHCDSTWSEGHVTTTSTRTWVLPTYNNHLYKRLGESLQSNTYNGFSTPWGYFDFNRFHCHFSPRDWQRLINNNWGMRPKAMRVKIFNIQVKEVTTSNGETTVANNLTSTVQIFADSSYELPYVMDAGQEGSLPPFPNDVFMVPQYGYCGLVTGNTSQQQTDRNAFYCLEYFPSQMLRTGNNFEITYSFEKVPFHSMYAHSQSLDRLMNPLIDQYLWGLQSTTTGTTLNAGTATTNFTKLRPTNFSNFKKNWLPGPSIKQQGFSKTANQNYKIPATGSDSLIKYETHSTLDGRWSALTPGPPMATAGPADSKFSNSQLIFAGPKQNGNTATVPGTLIFTSEEELAATNATDTDMWGNLPGGDQSNSNLPTVDRLTALGAVPGMVWQNRDIYYQGPIWAKIPHTDGHFHPSPLIGGFGLKHPPPQIFIKNTPVPANPATTFSSTPVNSFITQYSTGQVSVQIDWEIQKERSKRWNPEVQFTSNYGQQNSLLWAPDAAGKYTEPRAIGTRYLTHHL

SEQ ID NO: 843 - protein, 734 aa, Artificial Sequence
  Description of Artificial Sequence: Synthetic polypeptide
MTDGYLPDWLEDNLSEGVREWWALQPGAPKPKANQQHQDNARGLVLPGYKYLGPGNGLDKGEPVNAADAAALEHDKAYDQQLKAGDNPYLKYNHADAEFQQRLQGDTSFGGNLGRAVFQAKKRVLEPLGLVEQAGETAPGKKRPLIESPQQPDSSTGIGKKGKQPAKKKLVFEDGTGAGDGPPEGSTSGAMSDDSEMRAAAGGAAVEGGQGADGVGNASGDWHCDSTWSEGHVTTTSTRTWVLPTYNNHLYKRLGESLQSNTYNGFPTPWGYFDFNRFHCHFSPRDWQRLINNNWGMRPKAMRVKIFNIQVKEVTTSNGETTAANNLTSTVQIFADSSYELPYVMDAGQEGSLPPFPNDVFMVPQYGYCGLVTGNTSQQQTDRNAFYCLEYFPSQMLRTGNNFEITYSFEKVPFHSMYAHSQSLDRLMNPLIDQYLWGLQSTTTGTTLNAGTATTNFTKLRPTNFSNFKKNWLPGPSIKQQGFSKTANQNYKIPATGSDSLIKYETHSTLDGRWSALTPGPPMATAGPADSKFSNSQLIFAGPKQNGNTATVPGTLIFTSEEELAATNATDTDMWGNLPGGDQSNSNLPTVDRLTALGAVPGMVWQNRDIYYQGPIWAKIPHTDGHFHPSPLIGGFGLKHPPPQIFIKNTPVPANPATTFSSTPVNSFITQYSTGQVSVQIDWEIQKERSKRWNPEVQFTSNYGQQNSLLWAPDAAGKYTEPRAIGTRYLTHHL

SEQ ID NO: 844 - protein, 734 aa, Artificial Sequence
  Description of Artificial Sequence: Synthetic polypeptide
MTDGYLPDWLEDNLSEGVREWWALQPGAPKPKANQQHQDNARGLVLPGYKYLGPGNGLDKGEPVNAADAAALEHDKAYDQQLKAGDNPYLKYNHADAEFQQRLQGDTSFGGNLGRAVFQAKKRVLEPLGLVEQAGETAPGKKRPLIESPQQPDSSTGIGKKGKQPAKKKLVFEDETGAGDGPPEGSTSGAMSDDSEMRAAAGGAAVEGGQGADGVGNASGDWHCDSTWSEGHVTTTSTRTWVLPTYNNHLYKRLGESLQSNTYNGFSTPWGYFDFNRFHCHFSPRDWQRLINNNWGMRPKAMRVKIFNIQVKEVTTSNGETTVANNLTSTVQIFADSSYELPYVMDAGQEGSLPPFPNDVFMVPQYGYRGLVTGNTSQQQTDRNAFYCLEYFPSQMLRTGNNFEITYSFEKVPFHSMYAHSQSLDRLMNPLIDQYLWGLQSTTTGTTLNAGTATTNFTKLRPTNFSNFKKNWLPGPSIKQQGFSKTANQNYKIPATGSDSLIKYETHSTLDGRWSALTPGPPMATAGPADSKFSNSQLIFAGPKQNGNTATVPGTLIFTSEEELAATNATDTDMWGNLPGGDQSNSNLPTVDRLTALGAVPGMVWQNRDIYYQGPIWAKIPHTDGHFHPSPLIGGFGLKHPPPQIFIKNTPVPANPATTFSSTPVNSFITQYSTGQVSVQIDWEIQKERSKRWNPEVQFTSNYGQQNSLLWAPDAAGKYTEPRAIGTRYLTHHL

SEQ ID NO: 845 - protein, 734 aa, Artificial Sequence
  Description of Artificial Sequence: Synthetic polypeptide
MTDGYLPDWLEDNLSEGVREWWALQPGAPKPKANQQHQDNARGLVLQGYKYLGPGNGLDKGEPVNAADAAALEHDKAYDQQLKAGDNPYLKYNHADAEFQQRLQGDTSFGGNLGRAVFQAKKRVLEPLGLVEQAGETAPGKKRPLIESPQQPDSSTGIGKKGKQPAKKKLVFEDETGAGDGPPEGSTSGAMSDDSEMRAAAGGAAVEGGQGADGVGNASGDWHCDSTRSEGHVTTTSTRTWVLPTYNNHLYKRLGESLQSNTYNGFSTPWGYFDFNRFHCHFSPRDWQRLINNNWGMRPKAMRVKIFNIQVKEVTTSNGETTVANNLTSTVQIFADSSYELPYVMDAGQEGSLPPFPNDVFMVPQYGYCGLVTGNTSQQQTDRNAFYCLEYFPSQMLRTGNNFEITYSFEKVPFHSMYAHSQSLDRLMNPLIDQYLWGLQSTTTGTTLNAGTATTNFTKLRPTNFSNFKKNWLPGPSIKQQGFSKTANQNYKIPATGSDSLIKYETHSTLDGRWSARTPGPPMATAGPADSKFSNSQLIFAGPKQNGNTATVPGTLIFTSEEELAATNATDTDMWGNLPGGDQSNSNLPTVDRLTALGAVPGMVWQNRDIYYQGPIWAKIPHTDGHFHPSPLIGGFGLKHPPPQIFIKNTPVPANPATTFSSTPVNSFITQYSTGQVSVQIDWEIQKERSKRWNPEVQFTSNYGQQNSLLWAPDAAGKYTEPRAIGTRYLTHHL

SEQ ID NO: 846 - protein, 724 aa, Artificial Sequence
  Description of Artificial Sequence: Synthetic polypeptide
MSFVDHPPDWLEEVGEGLREFLGLEAGPPKPKPNQQHQDQARGLVLPGYNYLGPGNGLDRGEPVNRADEVAREHDISYNEQLEAGDNPYLKYNHADAEFQERLADDTSFGGNLGKAVFQAKKRVLEPFGLVEEGAKTAPTGKRIDDHFPKRKKARTEEDSKPSTSSDAEAGPSGSQQLQIPAQPASSLGADTMSAGGGGPLGDNNQGADGVGNASGDWHCDSTWMGDRVVTKSTRTWVLPSYNNHQYREIKSGSVDGSNANAYFGYSTPWGYFDFNRFHSHWSPRDWQRLINNYWGFRPRSLRVKIFNIQVKEVTVQDSTTTIANNLTSTVQVFTDDDYQLPYVVGNGTEGCLPAFPPQVFTLPQYGYATLNRDNTENPTERSSFFCLEYFPSKMLRTGNNFEFTYNFEEVPFHSSFAPSQNLFKLANPLVDQYLYRFVSTNNTGGVQFNKNLAGRYANTYKNWFPGPMGRTQGWNLGSGVNRASVSAFATTNRMELEGASYQVPPQPNGMTNNLQGSNTYALENTMIFNSQPANPGTTATYLEGNMLITSESETQPVNRVAYNVGGQMATNNQSSTTAPATGTYNLQEIVPGSVWMERDVYLQGPIWAKIPETEAHFHPSPAMGGFGLKHPPPMMLIKNTPVPGNITSFSDVPVSSFITQYSTGQVTVEMEWELKKENSKRWNPEIQYTNNYNDPQFVDFAPDSTGEYRTTRPIGTRYLTRPL

SEQ ID NO: 847 - protein, 724 aa, Artificial Sequence
  Description of Artificial Sequence: Synthetic polypeptide
MSFVDHPPDWLEEVGEGLREFLGLEAGPPKPKPNQQHQDQARGLVLPGYNYLGPGNGLDRGEPVNRADEVAREHDISYNEQLEAGDNPYLKYNHADAEFQEKLADDTSSGGNLGKAVFQAKKRVLEPFGLVEEGAKTAPTGKRIDDHFPKRKKARTEEDSKPSTSSDAEAGPSGSQQLQIPAQPASSLGADTMSAGGGGPLGDNNQGADGVGNASGDWHCDSTWMGDRVVTKSTRTWVLPSYNNHQYREIKSGSVDGSNANAYFGYSTPWGYFDFNRFHSHWSPRDWQRLINNYWGFRPRSLRVKIFNIQVKEVTVQDSTTTIANNLTSTVQVFTDDDYQLPYVVGNGTEGCLPAFPPQVFTLPQYGYATLNRDNTENPTERSSFFCLEYFPSKMLRTGNNFEFTYNFEEVPFHSSFAPSQNLFKLANPLVDQYLYRFVSTNNTGGVQFNKNLAGRYANTYKNWFPGPMGRTQGWNLGSGVNRASVSAFATTNRMELEGASYQVPPQPNGMTNNLQGSNTYALENTMIFNSQPANPGTTATYLEGNMLITSESETQPVNRVAYNVGGQMATNNQSSTTAPATGTYNLQEIVPGSVWMERDVYLQGPIWAKIPETGAHFHPSPAMGGFGLKHPPPMMLIKNTPVPGNITSFSDVPVSSFITQYSTGQVTVEMEWELKKENSKRWNPEIQYTNNYNDPQFVDFAPDSTGEYRTTRPIGTRYLTRPL

SEQ ID NO: 848 - protein, 724 aa, Artificial Sequence
  Description of Artificial Sequence: Synthetic polypeptide
MSFVDHPPDWLEEVGEGLREFLGLEAGPPKPKPNQQHQDQARGLVLPGYNYLGPGNGLDRGEPVNRADEVAREHDISYNEQLEAGDNPYLKYNHADAEFQEKLADDTSFGGNLGKAVFQAKKRVLEPFGLVEEGAKTAPTGKRIDDHFPKRKKARTEEDSKPSTSSDAEAGPSGSQQLQIPAQPASSLGADTMSAGGGGPLGDNNQGADGVGNASGDWHCDSTWMGDRVVTKSTRTWVLPSYNNHQYREIKSGSVDGSNANAYFGYSTPWGYFDFNRFHSHWSPRDWQRLINNYWGFRPRSLRVKIFNIQVKEVTVQDSTTTIANNLTSTVQVFTDDDYQLPYVVGNGTEGCLPAFPPQVFTLPQYGYATLNRDNTENPTERSSFFCLEYFPSKMLRTGNNFEFTYNFEEVPFHSSFAPSQNLFKLANPLVDQYLYRFVSTNNTGGVQFNKNLAGRYANTYKNWFPGPMGRTQGWNLGSGVNRASVSAFATTNRMELEGASYQVPPQPNGMTNNLQGSNTYALENTMIFNSQPANPGTTATYLEGNMLITSESETQPVNRVAYNVGGQMATNNQSSTTAPATGTYNLQEIVPGSVWMERDVYLQGPIWAKIPETGAHFHPSPAMGGFGLKHPPPMMLIKSTPVPGNITSFSDVPVSSFITQYSTGQVTVEMEWELKKENSKRWNPEIQYTNNYNDPQFVDFAPDSTGEYRTTRPIGTRYLTRPL

SEQ ID NO: 849 - protein, 724 aa, Artificial Sequence
  Description of Artificial Sequence: Synthetic polypeptide
MSFVDHPPDWLEEVGEGLREFLGPEAGPPKPKPNQQHQDQARGLVLPGYNYLGPGNGLDRGEPVNRADEVAREHDISYNEQLEAGDNPYLKYNHADAEFQEKLADDTSFGGNLGKAVFQAKKRVLEPFGLVEEGAKTAPTGKRIDDHFPKRKKVRTEEDSKPSTSSDAEAGPSGSQQLQIPAQPASSLGADTMSAGGGGPLGDNNQGADGVGNASGDWHCDSTWMGDRVVTKSTRTWVPPSYNNHQYREIKSGSVDGSNANAYFGYSTPWGYFDFNRFHSHWSPRDWQRLINNYWGFRPRSLRVKIFNIQVKEVTVQDSTTTIANNLTSTVQVFTDDDYQLPYVVGNGTEGCLPAFPPQVFTLPQYGYATLNRDNTENPTERSSFFCLEYFPSKMLRTGNNFEFTYNFEEVPFHSSFAPSQNLFKLANPLVDQYLYRFVSTNNTGGVQFNKNLAGRYANTYKNWFPGPMGRTQGWNLGSGVNRASVSAFATTNRMELEGASYQVPPQPNGMTNNLQGSNTYALENTMIFNSQPANPGTTATYLEGNMLITSESETQPVNRVACNVGGQMATNNQSSTTAPATGTYNLQEIVPGSVWMERDVYLQGPIWAKIPETGAHFHPSPAMGGFGLKHPPPMMLIKNTPVPGNITSFSDVPVSSFITQYSTGQVTVEMEWELKKENSKRWNPEIQYTNNYNDPQFVDFAPDSTGEYRTTRPIGTRYLTRPL

SEQ ID NO: 850 - protein, 724 aa, Artificial Sequence
  Description of Artificial Sequence: Synthetic polypeptide
MSFVDHPPDWLEEVGEGLREFLGLEAGPPKPKPNQQHQDQARGLVLPGYNYLGPGNGLDRGEPVNRADEVAREHDISYNEQLEAGDNPYLKYNHADAEFQEKLADDTSFGGNLGKAVFQAKKRVLEPFGLVEEGAKTAPTGKRIDDHFPKRKKARTEEDSKPSTSSDAEAGPSGSQQLQIPAQPASSLGADTMSAGGGGPLGDNNQGADGVGNASGDWHCDSTWMGDRVVTKSTRTWVLPSYNNHQYREIKSGSVDGSNANAYFGYSTPWGYFDFNRFHSHWSPRDWQRLINNYWGFRPRSLRVKIFNIQVKEVTVQDSTTTIANNLTSTVQVFTDDDYQLPYVVGNGTEGCLPAFPPQVFTLPQYGYATLNRDNTENPTERSSFFCLEYFPSKMLRTGNNFEFTYNFEEVPFHSSFAPSQNLFKLANPLVDQYLYRFVSTNNTGGVQFNKNLAGRYANTYKNWFPGPMGRTQGWNLGSGVNRASVSAFATTNRMELEGASYQVPPQPNGMTNNLQGSNTYALENTMIFNSQPANPGTTATYLEGNMLITSESETQPVNRVAYNVGGQMATNNQSSTTAPATGAYNLQEIVPGSVWMERDVYLQGPIWAKIPETGAHFHPSPAMGGFGLKHPPPMMLIKNTPVPGNITSFSDVPVSSFITQYSTGQVTVEMEWELKKENSKRWNPEIQYTNNYNDPQFVDFAPDSTGEYRTTRPIGTRYLTRPL

SEQ ID NO: 851 - protein, 724 aa, Artificial Sequence
  Description of Artificial Sequence: Synthetic polypeptide
MSFVDHPPDWLEEVGEGLREFLGLEAGPPKPKPNQQHQDQARGLVLPGYNYLGPGNGLDRGEPVNRADGVAREHDISYNEQLEAGDNPYLKYNHADAEFQEKLADDTSFGGNLGKAVFQAKKRVLEPFGLVEEGAKTAPTGKRIDDHFPKRKKARTEEDSKPSTSSDAEAGPSGSQQLQIPAQPASSLGADTMSAGGGGPLGDNNQGADGVGNASGDWHCDSTWMGDRVVTKSTRTWVLPSYNNHQYREIKSGSVDGSNANAYFGYSTPWGYFDFNRFHSHWSPRDWQRLINNYWGFRPRSLRVKIFNIQVKEVTVQDSTTTIANNLTSTVQAFTDDDYQLPYVVGNGTEGCLPAFPPQVFTLPQYGYATLNRDNTENPTERSSFFCLEYFPSKMLRTGNNFEFTYNFEEVPFHSSFAPSQNLFKLANPLVDQYLYRFVSTNNTGGVQFNKNLAGRYANTYKNWFPGPMGRTQGWNLGSGVNRASVSAFATTNRMELEGASYQVPPQPNGMTNNLQGSNTYALENTMIFNSQPANPGTTATYLEGNMLITSESETQPVNRVAYNVGGQMATNNQSSTTAPATGTYNLQEIVPGSVWMERDVYLQGPIWAKIPETGAHFHPSPAMGGFGLKHPPPMMLIKNTPVPGNITSFSDVPVSSFITQYSTGQVTVEMEWELKKENSKRWNPEIQYTNNYNDPQFVDFAPDSTGEYRTTRPIGTRYLTRPL

SEQ ID NO: 852 - protein, 723 aa, Artificial Sequence
  Description of Artificial Sequence: Synthetic polypeptide
MSFVDHPPDWLEEVGEGLREFLGLEAGPPKPKPNQQHQDQARGLVLPGYNYLGPGNGLDRGEPVNRADEVAREHDISYNEQLEAGDNPYLKYNHADAEFQEKLADDTSFGGNLGKAVFQAKKRVLEPFGLVEEGAKTAPTGKRIDDHFPKRKKARTEEDSKPSTSSDAEAGPSGSQQLQIPAQPASSLGADTMSAGGGGPLGDNNQGADGVGNASGDWHCDSTWMGDRVVTKSTRTWVLPSYNNHQYREIKSGSVDGSNANAYFGYSTPWGYFDFNRFHSHWSPRDWQRLINNYWGFRPRSLRVKIFNIQVKEVTVQDSTTTIANNLTSTVQVFTDDDYQLPYVVGNGTEGCLPAFPPQVFTLPQYGYATLNRDNTENPTERSSFFCLEYFPSKMLRTGNNFEFTYNFEEVPFHSSFAPSQNLFKLANPLVDQYLYRFVSTNNTGGVQFNKNLAGRYANTYKNWFPGPMGRTQGWNLGSGVNRASVSAFATTNRMELEGASYVPPQPNGMTNNLQGSNTYALENTMIFNSQPANPGTTATYLEGNMLITSESETQPVNRVAYNVGGQMATNNQSSTTAPATGTYNLQEIVPGSVWMEGDVYLQGPIWAKIPETGAHFHPSPAMGGFGLKHPPPMMLIKNTPVPGNITSFSDVPVSSFITQYSTGQVTVEMEWELKKENSKRWNPEIQYTNNYNDPQFVDFAPDSTGEYRTTRPIGTRYLTRPL

SEQ ID NO: 853 - protein, 724 aa, Artificial Sequence
  Description of Artificial Sequence: Synthetic polypeptide
MSFVDHPPDWLEEVGEGLREFLGLEAGPPKPKPNQQHQDQARGLVLPGYNYLGPGNGLDRGEPVNRADEVAREHDISYNEQLEAGDNPYLKYNHADAEFQEKLADDTSFGGNLGKAVFQAKKRVLEPFGLVEEGAKTAPTGKRIDDHFPKRKKVRTEEDSKPSTSSDAEAGPSGSQQLQIPAQPASSLGADTMSAGGGGPLGDNNQGADGVGNASGDWHCDSTWMGDRVVTKSTRTWVLPSYNNHQYREIKSGSVDGSNANAYFGYSTPWGYFDFNRFHSHWSPRDWQRLINNYWGFRPRSLRVKIFNIQVKEVTVQDSTTTIANNLTSTVQVFTDDDYQLPYVVGNGTEGCLPAFPPQVFTLPQYGYATLNRDNTENPTERSSFFCLEYFPSKMLRTGNNFEFTYNFEEVPFHSSFAPSQNLFKLANPLVDQYLYRFVSTNNTGGVQFNKNLAGRYANTYKNWFPGPMGRTQGWNLGSGVNRASVSAFATTNRMELEGASYQVPPQPNGMTNNLQGSNTYALENTMIFNSQPANPGTTATYLEGNMLITSESETQPVNRVAYNVGGQMATNNQSSTTAPATGTYNLQEIVPGSVWMERDVYLQGPIWAKIPETGAHFHPSPAMGGFGLKHPPPMMLIKNTPVPGNITSFSDVPVSSFITQYSTGQVTVEMEWELKKENSERWNPEIQYTNNYNDPQFVDFAPDSTGEYRTTRPIGTRYLTRPL

SEQ ID NO: 854 - protein, 724 aa, Artificial Sequence
  Description of Artificial Sequence: Synthetic polypeptide
MSFVDHPPDWLEEVGEGLREFLGLEAGPPKPKPNQQHQDQARGLVLPGYNYLGPGNGLDRGEPVNRADEVAREHDISYSEQLEAGDNPYLKYNHADAEFQEKLADDTSFGGNLGKAVFQAKKRVLEPFGLVEEGAKTAPTGKRIDDHFPKRKKARTEEDSKPSTSSDAEAGPSGSQQLQIPAQPASSLGADTMSAGGGGPLGDNNQGADGVGNASGDWHCDSTWMGDRVVTKSTRTWVLPSYNNHQYREIKSGSVDGSNANAYFGYSTPWGYFDFNRFHSHWSPRDWQRLINNYWGFRPRSLRVKIFNIQVKEVTVQDSTTTIANNLTSTVQVFTDDDYQLPYVVGNGTEGCLPAFPPQVFTLPQYGYATLNRDNTENPTERSSFFCLEYFPSKMLRTGNNFEFTYNFEEVPFHSSFAPSQNLFKLANPLVDQYLYRFVSTNNTGGVQFNKNLAGRYANTYKNWFPGPMGRTQGWNLGSGVNRASVSAFATTNRMELEGASYQVPPQPNGMTNNLQGSNTYALENTMIFNSQPANPGTTATYLEGNMLITSESETQPVNRVAYNVGGQMATNNQSSTTAPATGTYNLQEIVPGSVWMERDVYLQGPIWAKIPETGAHFHPSPAMGGFGLKHPPPMMLIKNTPVPGNITSFSDVPVSSFITQYSTGQVTVEMEWELKKENSKRWNPEIQYTNNYNDPQFVDFAPDSTGEYRTARPIGTRYLTRPL

SEQ ID NO: 855 - protein, 724 aa, Artificial Sequence
  Description of Artificial Sequence: Synthetic polypeptide
MSFVDHPPDWLEEVGEGLREFLGPEAGPPKPKPNQQHQDQARGLVLPGYNYLGPGNGLDRGEPVNRADEVAREHDISYNEQLEAGDNPYLKYNHADAEFQEKLADDTSFGGNLGKAVFQAKKRVLEPFGLVEEGAKTAPTGKRIDDHFPKRKKARTEEDSKPSTSSDAEAGPSGSQQLQIPAQPASSLGADTMSAGGGGPLGDNNQGADGVGNASGDWHCDSTWMGDRVVTKSTRTWVLPSYNNHQYREIKSGSVDGSNANAYFGYSTPWGYFDFNRFHSHWSPRDWQRLINNYWGFRPRSLRVKIFNIQVKEVTVQDSTTTIANNLTSTVQVFTDDDYQLPYVVGNGTEGCLPAFPPQVFTLPQYGYATLNRDNTENPTERSSFFCLEYFPSKMLRTGNNFEFTYNFEEVPFHSSFAPSQNLFKLANPLVDQYLYRFVSTNNTGGVQFNKNLAGRYANTYKNWFPGPMGRTQGWNLGSGVNRASVSAFATTNRMELEGASYQVPPQPNGMTNNLQGSNTYALENTMIFNSQPANPGTTATYLEGNMLITSESETQPVNRVAYNVGGQMTTNNQSSTTAPATGTYNLQEIVPGSVWMERDVYPQGPIWAKIPETGAHFHPSPAMGGFGLKHPPPMMLIKNTPVPGNITSFSDVPVSSFITQYSTGQVTVEMEWELKKENSKRWNPEIQYTNNYNDPQFVDFAPDSTGEYRTTRPIGTRYLTRPL

SEQ ID NO: 856 - protein, 724 aa, Artificial Sequence
  Description of Artificial Sequence: Synthetic polypeptide
MSFVDHPPDWLEEVGEGLREFLGLEAGPPKPKPNQQHQDQARGLVLPGYNYLGPGNGLDRGEPVNRADEVAREHDISYNEQLEAGDNPYLKYNHADAEFQEKLADDTSFGGNLGKAVFQAKKRVLEPFGLVEEGAKTAPTGKRIDDHFPKRKKARTEEDSKPSTSSDAEAGPSGSQQLQIPAQPASSLGADTMSAGGGGPLGDNNQGADGVGNASGDWHCDSTWMGDRVVTKSTRTWVLPSYNNHQYREIKSGSVDGSNANAYFGYSTPWGYFDFNRFHSHWSPRDWQRLINNYWGFRPRSLRVKIFNIQVKEVTVQDSTTTIANNLTSTVQVFTDDDYQLPYVVGNGTEGCLPAFPPQVFTLPQYGYATLNRDNTENPTERSSFLCLEYFPSKMLRTGNNFEFTYNFEEVPFHSSFAPSQNLFKLANPLVDQYLYRFVSTNNTGGVQFNKNLAGRYANTYKNWFPGPMGRTQGWNLGSGVNRASVSAFATTNRMELEGASYQVPPQPNGMTNNLQGSNTYALENTMIFNSQPANPGTTATYLEGNMLITSESETQPVNRVAYNVGGQMATNNQSSTTAPATGTYNLQEIVPGSVWMKRDVYLQGPIWAKIPETGAHFHPSPAMGGFGLKHPPPMMLIKNTPVPGNITSFSDVPVSSFITQYSTGQVTVEMEWELKKENSKRWNPEIQYTNNYNDPQFVDFAPDSTGEYRTTRPIGTRYLTRPL

SEQ ID NO: 857 - protein, 724 aa, Artificial Sequence
  Description of Artificial Sequence: Synthetic polypeptide
MSFVDHPPDWLEEVGEGLREFLGLEAGPPKPKPNQQHQDQARGLVLPGYNYLGPGNGLDRGEPVNRADEVAREHDISYNEQLEAGDNPYLKYNHADAEFQEKLADDTSFGGNLGKAVFQAKKRVLEPFGLVEEGAKTAPTGKRIDDHFPKRKKARTEEDSKPSTPSDAEAGPSGSQQLQIPAQPASSLGADTMSAGGGGPLGDNNQGADGVGNASGDWHCDSTWMGDRVVTKSTRTWVLPSYNNHQYREIKSGSVDGSNANAYFGYSTPWGYFDFNRFHSHWSPRDWQRLINNYWGFRPRSLRVKIFNIQVKEVTVQDSTTTIANNLTSTVQVFTDDDYQLPYVVGNGTEGCLPAFPPQVFTLPQYGYATLNRDNTENPTERSSFFCLEYFPSKMLRTGNNFEFTYNFEEVPFHSSFAPSQNLFKLANPLVDQYLYRFVSTNNTGGVQFNKNLAGRYANTYKNWFPGPMGRTQGWNLGSGVNRASVSAFATTNRMELEGASYQVPPQPNGMTNNLQGSNTYALENTMIFNSQPANPGTTATYLEGNMLITSESETQPVNRVAYNVGGQMATNNQSSTTAPATGTYNLQEIVPGSVWMERDVYLQGPIWAKIPETGAHFHPSPAMGGFGLKHPPPMMLIKNTPVPGNITSFSDVPVSSFITQYSTGQVTVEMEWELKKENSKRWNPEIQYTNNYNDPQFVDFAPDSTGEYRTTRPIGTRYLTRPL

SEQ ID NO: 858 - protein, 724 aa, Artificial Sequence
  Description of Artificial Sequence: Synthetic polypeptide
MSFVDHPPDWLEEVGEGLREFLGLEAGPPKPKPNQQHQDQARGLVLPGYNYLGPGNGLDRGEPVNRADEVAREHDISYNEQLEAGDNPYLKYNHADAEFQEKLADDTSFGGNLGKAVFQAKKRVLEPFGLVEEGAKTAPTGKRIDDHFPKRKKARTEEDSKPSTSSDAEAGPSGSQQLQIPAQPASSLGADTMSAGGGGPLGDNNQGADGVGNASGDWHCDSTWMGDRVVTKSTRTWVLPSYNNHQYREIKSGSVDGSNANAYFGYSTPWGYFDFNRFHSHWSPRDWQRLINNYWGFRPRSLRVKIFNIQVKEVTVQDSTTTIANNLTSTVQVFTDDDYQLPYVVGNGTEGCLPAFPPQVFTLPQYGYATLNRDNTENPTERSSFFCLEYFPSKMLRTGNNFEFTYNFEEVPFHSSFAPSQNLFKLANPLVDQYLYRFVSTNNTGGVQFNKNLAGRYANTHKNWFPGPMGRTQGWNLGSGVNRASVSAFATTNRMELEGASYQVPPQSNGMTNNLRGSNTYALENTMIFNSQPANPGTTATYLEGNMLITSESETQPVNRVAYNVGGQMATNNQSSTTAPATGTYNLQEIVPGSVWMERDVYLQGPIWAKIPETGAHFHPSPAMGGFGLKHPPPMMLIKNTPVPGNITSFSDVPVSSFITQYSTGQVTVEMEWELKKENSKRWNPEIQYTNNYNDPQFVDFAPDSTGEYRTTRPIGTRYLTRPL

SEQ ID NO: 859 - protein, 724 aa, Artificial Sequence
  Description of Artificial Sequence: Synthetic polypeptide
MSFVDHPPDWLEEVGEGLREFLGLEAGPPKPKPNQQHQDQARGLVLPGYNYLGPGNGLDRGEPVNRADEVAREHDISYNEQLEAGDNPYLKYNHADAEFQEKLADDTSFGGNLGKAVFQAKKRVLEPFGLVEEGAKTAPTGKRIDDHFPKRKKARTEEDSKPSTSSDAEAGPSGSQQLQIPAQPASSLGADTMSAGGGGPLGDNNQGADGVGNASGDWHCDSTWMGDRVVTKSTRTWVLPSYNNHQYREIKSGSVDGSNANAYFGYSTPWGYFDFNRFHSHWSPRDWQRLINNYWGFRPRSLRVKIFNIQVKEVTVQDSTTTIANNLTSTVQVFTDDDYQLPYVVGNGTEGCLPAFPPQVFTLPQYGYATLNRDNTENPTERSSFFCLEYFPSKMLRTGNNFEFTYNFEEVPFHSSFAPSQNLFKLANPLVDQYLYRFVSTNNTGGVQFNKNLAGRYANTYKNWFPGPMGRTQGWNLGSGVNRASVSAFATTNRMELEGASYQVPPQPNGMTNNLQGSNTYALENTMIFNSQPANPGTTATYLEGNMLITSESETQPVNRVAYSVGGQMATNNQSSTTAPTTGTYNLQEIVPGSVWMERDVYLQGPIWAKIPETGAHFHPSPAMGGFRLKHPPPMMLIKNTPVPGNITSFSDVPVSSFITQYSTGQVTVEMEWELKKENSKRWNPEIQYTNNYNDPQFVDFAPDSTGEYRTTRPIGTRYLTRPL

SEQ ID NO: 860 - protein, 724 aa, Artificial Sequence
  Description of Artificial Sequence: Synthetic polypeptide
MSFVDHPPDWLEEVGEGLREFLGLEAGPPKPKPNQQHQDQARGLVLPGYNYLGPGNGLDRGEPVNRADEVAREHDISYNEQLEAGDNPYLKYNHADAEFQEKLADDTSFGGNLGKAVFQAKKRVLEPFGLVEEGAKTAPTGKRIDDHFPKRKKARTEEDSKPSTSSDAEAGPSGSQQLQIPAQPASSLGADTMSAGGGGPLGDNNQGADGVGNASGDWHCDSTWMGDRVVTKSTRTWVLPSYNNHQYREIKSGSVDGSNANAYFGYSTPWGYFDFNRFHSHWSPRDWQRLINNYWGFRPRSLRVKIFNIQVKEVTVQDSTTTIANNLTSTVQVFTDDDYQLPYVVGNGTEGCLPAFPPQVFTLPQYGYATLNRDNTENPTERSSFFCLEYFPSKMLRTGNNFEFTYNFEEVPFHSSFAPSQNLFKLANPLVDQYLYRFVSTNNTGGVQFNKNLAGRYANTYKNWFPGPMGRTQGWNLGSGVNRASVSAFAATNRMELEGASYQVPPQPNGMTNNLQGSNTYALENTMIFNSQPANPGTTATYLEGNMLITSESETQPVNRVAYNVGGQMATNNQSSTTAPATGTYNLQEIVPGGVWMERDVYLQGPIWAKIPETGAHFHPSPAMGGFGLKHPPPMMLIKNTPVPGNTTSFSDVPVSSFITQYSTGQVTVEMEWELKKENSKRWNPEIQYTNNYNDPQFVDFAPDSTGEYRTTRPIGTRYLTRPL

SEQ ID NO: 861 - protein, 724 aa, Artificial Sequence
  Description of Artificial Sequence: Synthetic polypeptide
MSFVDHPPDWLEEVGEGLREFLGLEAGPPKPKPNQQHQDQARGLVLPGYNYLGPGNGLDRGEPVNRADEVAREHDISYNEQLEAGDNPYLKYNHADAEFQEKLADDTSFGGNLGKVVFQAKKRVLEPFGLVEEGAKTAPTGKRIDDHFPKRKKARTEEDSKPSTSSDAEAGPSGSQQLQIPAQPASSLGADTMSAGGGGPLGGNNQGADGVGNASGDWHCDSTWMGDRVVTKSTRTWVLPSYNNHQYREIKSGSVDGSNANAYFGYSTPWGYFDFNRFHSHWGPRDWQRLINNYWGFRPRSLRVKIFNIQVKEVTVQDSTTTIANNLTSTVQVFTDDDYQLPYVVGNGTEGCLPAFPPQVFTLPQYGYATLNRDNTENPTERSSFFCLEYFPSKMLRTGNNFEFTYNFEEVPFHSSFAPSQNLFKLANPLVDQYLYRFVSTNNTGGVQFNKNLAGRYANTYKNWFPGPMGRTQGWNLGSGVNRASVSALATTNRMELEGASYQVPPQPNGMTNNLQGSNTYALENTMIFNSQPANPGTTATYLEGNMLITSESETQPVNRVAYNVGGQMATNNQSSTTAPATGTYNLQEIVPGSVWMERDVYLQGPIWAKIPETGAHFHPSPAMGGFGLKHPPPMMLIKNTPVPGNITSFSDVPVSSFITQYSTGQVTVEMEWELKKENSKRWNPEIQYTNNYNDPQFVDFAPDSTGEYRTTRPIGTRYLTRPL

SEQ ID NO: 862 - protein, 723 aa, Artificial Sequence
  Description of Artificial Sequence: Synthetic polypeptide
MSFVDHPPDWLEEVGEGLREFLGLEAGPPKPKPNQQHQDQARGLVLPGYNYLGPGNGLDRGEPVNRADEVAREHDISYNEQLEAGDNPYLKYNHADAEFQEKLADDTSFGGNLGKAVFQAKKRVLEPFGLVEEGAKTAPTGKRIDDHFPKRKKARTEEDSKPSTSSDAEAGPSGSQQLQIPAQPASSLGADTMSAGGGGPLGDNNQGADGVGNASGDWHCDSTWMGDRVVTKSTRTWVLPSYNNHQYREIKSGSVDGSNANAYFGYSTPWGYFDFNRFHSHWSPRDWQRLINNYWGFRPRSLRVKIFNIQVKEVTVQDSTTTIANNLTSTVQVFTDDDYQLPYVVGNGTEGCLPAFPPQVFTLPQYGYATLNRDNTENPTERSSFFCLEYFPSKMLRTGNNFEFTYNFEEVPFHSSFAPSQNLFKLANPLVDQYLYRFVSTNNTGGVQFNKNLAGRYANTYKNWFPGPMGRTQGWNLGSGVNRASVSAFATTNRMELEGASYQVPPQPNGMTNNLQGSNTYALENTMIFNSQPANPGTTATYLEGNMLITSESETQPVNRVAYNVGGQMATNNQSSTTAPATGTYNLQEIVPGSVWMERDVYLQGPIAKIPETGAHFHPSPAMGGFGLKHPPPMMLIKNTPVPGNITSFSDVPVSSFITQYSTGQVTVEMEWELKKENSKRWNPEIQYTNNYNDPQFVDFAPDSTGECRTTRPIGTRYLTRPL

SEQ ID NO: 863 - protein, 724 aa, Artificial Sequence
  Description of Artificial Sequence: Synthetic polypeptide
MSFVDHPPDWLEEVGEGLREFLGLEAGPPKPKPNQQHQDQARGLVLPGYNYLGPGNGLDRGEPVNRADEVAREHDISYNEQLEAGDNPYLKYNHADAEFQEKLADDTSFGGNLGKAVFQAKKRVLEPFGLVEEGAKTAPTGKRIDDHFPKRKKARTEEDSKPSTSSDAEAGPSGSQQLQIPAQPASSLGADTMSAGGGGPLGDNNQGADGVGNASGDWHCDSTWMGDRVVTKSTRTWVLPSYNNHQYREIKSGSVDGSNANAYFGYSTPWGYFDFNRFHSHWSPRDWQRLINNYWGFRPRSLRVKILNIQVKEVTVQDSTTTIANNLTSTVQVFTDDDYQLPYVVGNGTEGCLPAFPPQVFTLPQYGYATLNRDNTENPTERSSFFCLEYFPSKMLRTGNNFEFTYNFEEVPFHSSFAPSQNLFKLANPLVGQYLYRFVSTNNTGGVQFNENLAGRYANTYKNWFPGPMGRTQGWNLGSGVNRASVSAFATTNRMELEGASYQVPPQPNGMTNNLQGSNTYALENTMIFNSQPANPGTTATYLEGNMLITSESETQPVNRVAYNVGGQMATNNQSSTTAPATGTYNLQEIVPGSVWMERDVYLQGPIWAKIPETGAHFHPSPAMGGFGLKHPPPMMLIKNTPVPGNITSFSDVPVSSFITQYSTGQATVEMEWELKKENSKRWNPEIQYTNNYNDPQFVDFAPDSTGEYRTTRPIGTRYLTRPL

SEQ ID NO: 864 - protein, 724 aa, Artificial Sequence
  Description of Artificial Sequence: Synthetic polypeptide
MSFVDHPPDWLEEVGEGLREFLGLEAGPPKPKPNQQHQDQARGLVLPGYNYLGPGNGLDRGEPVNRADEVAREHDISYNEQLEAGDNPYLKYNHADAEFQEKLADDTSFGGNLGKAVFQAKKRVLEPFGLVEEGAKTAPTGKRIDDHFPKRKKARTEEDSKPSTSSDAEAGPSGSQQLQIPAQPASSLGADTMSAGGGGPLGDNNQGADGVGNASGDWHCDSTWMGDRVVTKSTRTWVLPSYNNHQYREIKSGSVDGSNANAYFGYSTPWGYFDFNRFHSHWSPRDWQRLINNYWGFRPRSLRVKIFNIQVKEVTVQDSTTIIANNLTSTVQVFTDDDYQLPYVVGNGTEGCLPAFPPQVFTLPQYGYATLNRDNTENPTERSSFFCLEYFPSKMLRTGNNFEFTYNFEEVPFHSSFAPSQNLFKLANPLVDQYLYRFVSTNNTGGVQFNKNLAGRYANTYKNWFPGPMGRTQGWNLGSGVNRASVSAFATTNRMELEGASYQVPPQPNGMTNNLQGSNTYALENTMIFNSQPANPGTTATYLEGNMLITSESETQPVNRVAYNVGGQMATNNQSSTTAPATGTYNLQEIVPGSVWMERDVYLQGPIWAKIPETGAHFHPSPAMGGFGLKHPPPMMLIKNTPVPGNITSFSDVPVSSFITQYSTGQVTVEMEWELKKENSKRWNPEIQYTNNYNDPQFVDFAPDSTGEYRTTRPIGTRYLTRPL

SEQ ID NO: 865 - protein, 724 aa, Artificial Sequence
  Description of Artificial Sequence: Synthetic polypeptide
MSFVDHPPDWLEEVGEGLREFLGLEAGPPKPKPNQQHQDQARGLVLPGYNYLGPGNGLDRGEPVNRADEVAREHDISYNEQLEAGDNPYLKYNHADAEFQEKLADDTSFGGNLGKAVFQAKKRVLEPFGLVEEGAKTAPTGKRIDDHFPKRKKARTEEDSKPSTSSDAEAGPSGSQQLQIPAQPASSLGADTMSAGGGGPLGDNNQGADGVGNASGDWHCDSTWMGDRVVTKSTRTWVLPSYNNHQYREIKSGSVDGSNANAYFGYSTPWGYFDFNRFHSHWSPRDWQRLINNYWGFRPRSLRVKIFNIQVKEVTVQDSTTTIANNLTSTVQVFTDDDYQLPYVVGNGTEGCLPAFPPQVFTLPQYGYATLNRDNTENPTERSSFFCLEYFPSKMLRTGNNFEFTYNFEEVPFHSSFAPSQNLFKLANPLVDQYLYRFVSTNNTGGVQFNKNLAGRYANTYKNWFPGPMGRTQGWNLGSGVNRASVSAFATTNRMELEGASYQVPPQPNGMTNNLQGSNTYALENTMIFNSQPANPGTTATYLEGNMLITSESETQPVNRVAYNVGGQMATNNQSSTTAPATGTYNLQEIVPGSVWMERDVYLQGPIWAKIPETGAHFHPSPAMGGFGLKHPPPMMLIKNTPVPGNITSLSDVPVSSFITQYSTGQVTVEMEWELKKENSKRWNPEIQYTNNYNDPQFVDFAPDSTGEYRTTRPIGTRYLTRPL

SEQ ID NO: 866 - protein, 724 aa, Artificial Sequence
  Description of Artificial Sequence: Synthetic polypeptide
MSFVDHPPDWLEEVGEGLREFLGLEAGPPKPKPNQQHQDQARGLVLPGYNYLGPGNGLDRGEPANRADEVAREHDISYNEQLEAGDNPYLKYNHAGAEFQEKLADDTSFGGNLGKAVFQAKKRVLEPFGLVEEGAKTAPTGKRIDDHFPKRKKARTEEDSKPSTSSDAEAGPSGSQQLQIPAQPASSLGADTMSAGGGGPLGDNNQGADGVGNASGDWHCDSTWMGDRVVTKSTRTWVLPGYNNHQYREIKSGSVDGSNANAYFGYSTPWGYFDFNRFHSHWSPRDWQRLINNYWGFRPRSLRVKIFNIQVKEVTVQDSTTTIANNLTSTVQVFTDDDYQLPYVVGNGTEGCLPAFPPQVFTLPQYGYATLNRDNTENPTERSSFFCLEYFPSKMLRTGNNFEFTYNFEEVPFHSSFAPSQNLFKLANPLVDQYLYRFVSTNNTGGVQFNKNLAGRYANTYKNWFPGPMGRTQGWNLGSGVNRASVSAFATTNRMELEGASYQVPPQPNGMTNNLQGSNTYALENTMIFNSQPANPGTTATYLEGNMLITSESETQPVNRVAYNVGGQMATNNQSSTTAPATGTYNLQEIVPGSVWMERDVYLQGPIWAKIPETGAHFHPSPAMGGFGLKHPPPMMLIKNTPVPGNITSFSDVPVSSFITQYSTGQVTVEMEWELKKENSKRWNPEIQYTNNYNDPQFVDFAPDSTGEYRTTRPIGTRYLTRPL

SEQ ID NO: 867 - protein, 724 aa, Artificial Sequence
  Description of Artificial Sequence: Synthetic polypeptide
MSFVDHPPDWLEEVGEGLREFLGLEAGPPKPKPNQQHQDQARGLVLPGYNYLGPGNGLDRGEPVNRADEVAREHDISYNEQLEAGDNPYLKYNHADAEFQEKLADDTSFGGNLGKAVFQAKKRVLEPFGLVEEGAKTAPTGKRIDDHFPKRKKARTEEDSKPPTSSDAEAGPSGSQQLQIPAQPASSLGADTMSAGGGGPLGDNNQGADGVGNASGDWHCDSTWMGDRVVTKSTRTWVLPSYNNHQYREIKSGSVDGSNANAYFGYSTPWGYFDFNRFHSHWSPRDWQRLINNYWGFRPRSLRVKIFNIQVKEVTVQDSATTIANNLTSTVQVFTDDDYQLPYVVGNGTEGCLPAFPPQVFTLPQYGYATLNRDNTENPTERSSFFCLEYFPSKMLRTGNNFEFTYNFEEVPFHSSFAPSQNLFKLANPLVDQYLYRFVSTNNTGGVQFNKNLAGRYANTYKNWFPGPMGRTQGWNLGSGVNRASVSAFATTNRMELEGASYQVPPQPNGMTNNLQGSNTYALENTMIFNSQPANPGTTATYLEGNMLITSESETQPVNRVAYNVGGQMATNNQSSTTAPATGTYNLQEIVPGSVWMERDVYLQGPIWAKIPETGAHFHPSPAMGGFGLKHPPPMMLIKNTPVPGNITSFSDVPVSSFITQYSTGQVTVEMEWELKKENSKRWNPEIQYTNNYNDPQFVDFAPDSTGEYRTTRPIGTRYLTRPL

SEQ ID NO: 868 - protein, 724 aa, Artificial Sequence
  Description of Artificial Sequence: Synthetic polypeptide
MSFVDHPPDWLEEVGEGLREFLGLEAGPPKPKPNQQHQDQARGLVLPGYNYLGPGNGLDRGEPVNRADEVAREHDISYNEQLEAGDNPYLKYNHADAEFQEKLADDTSFGGNLGKAVFQAKKRVLEPFGLVEEGAKTAPTGKRIDDHFPKRKKARTEEDSKPSTSSDAEAGPSGSQQPQIPAQPASSLGADTMSAGGGGPLGDNNQGADGVGNASGDWHCDSTWMGDRVVTKSTRTWVLPSYNNHQYREIKSGSVDGSNANAYFGYSTPWGYFDFNRFHSHWSPRDWQRLINNYWGFRPRSLRVKIFNIQVKEVTVQDSTTTIANNLTSTVQVFTDDDYQLPYVVGNGTEGCLPAFPPQVFTLPQYGYATLNRDNTENPTERSSFFCLEYFPSKMLRTGNNFEFTYNFEEVPFHSSFAPSQNLFKLANPLVDQYLYRFVSTNNTGGVQFNKNLAGRYANTYKNWFPGPMGRTQGWNLGSGVNRASVSAFATTNRMELEGASYQVPPQPNGMTNNLQGSNTYALENTMIFNSQPANPGTTATYLEGNMLITSESETQPVNRVAYNVGGQMATNNQSSTTAPATGTYNLQEIVPGSVWMERDVYLQGPIWAKIPETGAHFHPSPAMGGFGLKHPPPMMLIKNTPAPGNITSFSDVPVSSFITQYSTGQVTVEMEWELKKENSKRWNPEIQYTNNYNDPQFVDFAPDSTGEYRTTRPIGTRYLTRPL

SEQ ID NO: 869 - protein, 724 aa, Artificial Sequence
  Description of Artificial Sequence: Synthetic polypeptide
MSFVDHPPDWLEEVGEGLREFLGLEAGPPKPKPNQQHQDQARGLVLPGYNYLGPGNGLDRGEPVNRADEVAREHDISYNEQLEAGDNPYLKYNHADAEFQEKLADDTSFGGNLGKAVFQAKKRVLEPFGLVEEGAKTAPTGKRIDDHFPKRKKARTEEDSKPPTSSDAEAGPSGSQQLQIPAQPASSLGADTMSAGGGGPLGDNNQGADGVGNASGDWHCDSTWMGDRVVTKSTRTWVLPSYNNHQYREIKSGSVDGSNANAYFGYSTPWGYFDFNRFHSHWSPRDWQRLINNYWGFRPRSLRVKIFNIQVKEVTVQDSTTTIANNLTSTVQVFTDDDYQLPYVVGNGTEGCLPAFPPQVFTLPQYGYATLNRDNTENPTERSSFFCLEYFPSKMLRTGNNFEFTYNFEEVPFHSSFAPSQNLFKLANPLVDQYLYRFVSTNNTGGVQFNKNLAGRYANTYKNWFPGPMGRTQGWNLGSGVNRASVSAFATTNRMELEGASYQVPPQPNGMTNNLQGSNTYALENTMIFNSQPANPGTTATYLEGNMLITSESETQPVNRVAYNVGGQMATNNQSSTTAPATGTYNLQEIVPGSVWMERDVYLQGPIWAKIPETGAHFHPSPAMGGFGLKHPPPMMLIKNTPVPGNITSFSDVPVSSFITQYSTGQVTVEMEWELKKENSKRWNPEIQYTNNYNDPQFVDFAPDSTGEYRTTRPIGTRYLTRPL

SEQ ID NO: 870 - protein, 724 aa, Artificial Sequence
  Description of Artificial Sequence: Synthetic polypeptide
MSFVDHPPDWLEEVGEGLREFLGLEAGPPKPKPNQQHQDQARGLVLPGYNYLGPGNGLDRGEPVNRADEVAREHDISYNEQLEAGDNPYLKYNHADAEFQEKLADDTSFGGNLGKAVFQAKKRVLEPFGLVEEGAKTAPTGKRIDDHFPKRKKARTEEDSKPPTSSDAEAGPSGSQQLQIPAQPASSLGADTMSAGGGGPLGDNNQGADGVGNASGDWHCDSTWMGDRVVTKSTRTWVPPSYNNHQYREIKSGSVDGSNANAYFGYSTPWGYFDFNRFHSHWSPRDWQRLINNYWGFRPRSLRVKIFNIQVKEVTVQDSTTTIANNLTSTVQVFTDDDYQLPYVVGNGTEGCLPAFPPQVFTLPQYGYATLNRDNTENPTERSSFFCLEYFPSKMLRTGNNFEFTYNFEEVPFHSSFAPSQNLFKLANPLVDQYLYRFVSTNNTGGVQFNKNLAGRYANTYKNWFPGPMGRTQGWNLGSGVNRASVSAFATTNRMELEGASYQVPPQPNGMTNNLQGSNTYALENTMIFNSQPANPGTTATYLEGNMLITSESETQPVNRVAYNVGGQMATNNQSSTTAPATGTYNLQEIVPGSVWMERDVYLQGPIWAKIPETGAHFHPSPAMGGFGLKHPPPMMLIKNTPVPGNITSFSDVPVSSFITQYSTGQVAVEMEWELKKENSKRWNPEIQYTNNYNDPQFVDFAPDSTGEYRTTRPIGTRYLTRPL

SEQ ID NO: 871 - protein, 724 aa, Artificial Sequence
  Description of Artificial Sequence: Synthetic polypeptide
MSFVDHPPDWLEEVGEGLREFLGLEAGPPKPKPNQQHQDQARGLVLPGYNYLGPGNGLDRGEPVNRADEVAREHDISYNEQLEAGDNPYLKYNHADAEFQEKLADDTSFGGNLGKAVFQAKKRVLEPFGLVEEGAKTAPTGKRIDDHFPKRKKARTEEDSKPSTSSDAEAGPSGSQQLQIPAQPASSLGADTMSAGGGGPLGDNNQGADGVGNASGDWHCDSTWMGDRVVTKSTRTWVLPSYNNHQYREIKSGSVDGSNANAYFGYSTPWGYFDFNRFHSHWSPRDWQRLINNYWGFRPRSLRVKIFNIQVKEVTVQDSTTTIANNLTSTVQVFTDDDYQLPYVVGNGTEGCLPAFPPQVFTLPQYGYATLNRDNTENPTERSSFFCLEYFPSKMLRTGNNFEFTYNFEEVPFHSSFAPSQNLFKLANPLVDQYLYRFVSTNNTGGVQFNKNLAGRYANTYKNWFPGPMGRTQGWNLGSGVNRASVSAFATTNRMELEGASYQVPPQPNGMTNNLQGSNTYALENTMIFNSQPANPGTTATYLEGNMLITSESETQPVNRVAYNVGGQMATNNQSSTTAPATGTYNLQEIVPGSVWMERDVYLQGPIWAKIPETGAHFHPSPAMGGFGLKHPPPMMLIKNTPAPGNITSFSDVPVSSFITQYSTGQVTVEMEWELKKENSKRWNPEIQYTNNYNDPQFVDFAPDSTGEYRTTRPIGTRYLTRPL

SEQ ID NO: 872 - protein, 724 aa, Artificial Sequence
  Description of Artificial Sequence: Synthetic polypeptide
MSFVDHPPDWLEEVGEGLREFLGLEAGPPKPKPNQQHQDQARGLVLPGYNYLGPGNGLDRGEPVNRADEVAREHDISYNEQLEAGDNPYLKYNHADAEFQEKLADDTSFGGNLGKAVFQAKKRVLEPFGLAEEGAKTAPTGKRIDDHFPKRKKARTEEDSKPSTSSDAEAGPSGSQQLQIPAQPASSLGADTMSAGGGGPLGDNNQGADGVGNASGDWHCDSTWMGDRVVTKSTRTWVLPSYNNHQYREIKSGSVDGSNANAYFGYSTPWGYFDFNRFHSHWSPRDWQRLINNYWGFRPRSLRAKIFNIQVKEVTVQDSTTTIANNLTSTVQVFTDDDYQLPYVVGNGTEGCLPAFPPQVFTLPQYGYATLNRDNTENPTERSSFFCLEYFPSKMLRTGNNLEFTYNFEEVPFHSSFAPSQNLFKLANPLVDQYLYRFVSTNNTGGVQFNKNLAGRYANTYKNWFPGPMGRTQGWNLGSGVNRASVSAFATTNRMELEGASYQVPPQPNGMTNNLQGSNTYALENTMIFNSQPANPGTTATYLEGNMLITSESETQPVNRVVHNVGGQMATNNQSSTTAPATGTYNLQEIVPGSVWMERDVYLQGPIWAKIPETGAHFHPSPAMGGFGLKHPPPMMLIKNTPVPGNITSFSDVPVSSFITQYSTGQVTVEMEWELKKENSKRWNPEIQYTNNYNDPQFVDFAPDSTGEYRTTRPIGTRYLTRPL

SEQ ID NO: 873 - protein, 724 aa, Artificial Sequence
  Description of Artificial Sequence: Synthetic polypeptide
MSFVDHPPDWLEEVGEGLREFLGLEAGPPKPKPNQQHQDQARGLVLPGYNYLGPGNGLDRGEPVNRADEVAREHDISYNEQLEAGDNPYLKYNHADAEFQEKLADDTSFGGNLGKAVFQAKKRVLEPFGLVEEGAKTAPTGKRIDDHFPKRKKARTEEDSKPSTSSDAEAGPSGSQQLQIPAQPASSLGADTMSAGGGGPLGDNNQGADGVGNASGDWHCDSTWMGDRVVTKSTRTWVLPSYNNHQYREIKSGSVDGGNANAYFGYSTPWGYFDFNRFHSHWSPRDWQRLINNYWGFRPRSLRVKIFNIQVKEVTVQDSTTTIANNLTSTVQVFTDDDYQLPYVVGNGTEGCLPAFPPQVFTLPQYGYATLNRDNTENPTERSSFFCLEYFPSKMLRTGNNFEFTYNFEEVPFHSSFAPSQNLFKLANPLVDQYLYRFVSTNNTGGVQFNKNLAGRYANTYKNWFPGPMGRTQGWNLGSGVNRASVSAFATTNRMELEGASYQVPPQPNGMTNNLQGSNTYALENTMIFNSQPANPGTTATYLEGNMLITSESETQPVNRVAYNVGGQMATNNQSSTTAPATGTYNLQEIVPGSVWMERDVYLQGPIWAKIPETGAHFHPSPAMGGFGLKHPPPMMLIKNTPAPGNITSFSDVPVSSFITQYSTGQVTVEMEWELKKGNSKRWNPEIQYTNNYNDPQFVDFAPDSTGEYRTTRPIGTRYLTRPL

SEQ ID NO: 874 - protein, 724 aa, Artificial Sequence
  Description of Artificial Sequence: Synthetic polypeptide
MSFVDHPPDWLEEVGEGLREFLGLEAGPPKPKPNQQHQDQARGLVLPGYNYLGPGNGLDRGEPVNRADEVAREHDISYNEQLEAGDNPYLKYNHADAEFQEKLADDTSFGGNLGKAVFQAKKRVLEPFGLVEEGAKTAPTGKRIDDHFPKRKKARTEEDSKPSTSSDAEAGPSGSQQLQIPAQPASSLGADTMSAGGGGPLGDNNQGADGVGNASGDWHCDSTWMGDRVVTKSTRTWVLPSYNNHQYREIKSGSVDGSNANAYFGYSTPWGYFDFNRFHSHWSPRDWQRLINNYWGFRPRSLRVKIFNIQVKEVTVQDSTTTIANNLTSTVQVFTDDDYQLPYVVGNGTEGCLPAFPPQVFTLPQYGYATLNRDNTENPTERSSFFCLEYFPSKMLRTGNNFEFTYNFEEVPFHSSFAPSQNLFKLANPLVDQYLYRFVSTNNTGGVQFNKNLAGRYANTYKNWFPGPMGRTQGWNLGSGVNRASVSAFATTNRMELEGASYQVPPQPNGMTNNLQGSNTYALENTMIFNSQPANPGTTATYLEGNMLITSESETQPVNRVAYNVGGQMATNNQSSTTAPATGTYNLQEIVPGSVWMERDVYLQGPIWAKIPETGVHFHPSPAMGGFGLKHPPPMMLIKNTPVPGNITSFSDVPVSSFITQYSTGQVTVEMEWELKKENSKRWNPEIQYTNNYNDPQFVDFAPDSTGEYRTTRPIGTRYLTRPL

SEQ ID NO: 875 - protein, 724 aa, Artificial Sequence
  Description of Artificial Sequence: Synthetic polypeptide
  MOD_RES (551)..(551): Any naturally occurring amino acid
MSFVDHPPDWLEEVGEGLREFLGLEAGPPKPKPNQQHQDQARGLVLPGYNYLGPGNGLDRGEPVNRADEVAREHDISYNEQLEAGDNPYLKYNHADAEFQEKLADDTSFGGNLGKAVFQAKKRVLEPFGLVEEGAKTAPTGKRIDDHFPKRKKARTEEDSKPSTSSDAEAGPSGSQQLQIPAQPASSLGADTMSAGGGGPLGDNNQGADGVGNASGDWHCDSTWMGDRVVTKSTRTWVLPSYNNHQYREIKSGSVDGSNANAYFGYSTPWGYFDFNRFHSHWSPRDWQRLINNYWGFRPRSLRVKIFNIQVKEVTVQDSTTTIANNLTSTVQVFTDDDYQLPYVVGNGTEGCLPAFPPQVFTLPQYGYATLNRDNTENPTERSSFFCLEYFPSKMLRTGNNFEFTYNFEEVPFHSSFAPSQNLFKLANPLVDQYLYRFVSTNNTGGVQFNKNLAGRYANTYKNWFPGPMGRTQGWNLGSGVNRASVSAFATTNRMELEGASYQVPPQPNGMTNNLQGSNTYALENTMIFNSQPANPGTTATYLEGSMLITXESETQPVNRVAYNVGGQMATNNQSSTTAPATGTYNLQEIVPGSVWMERDVYLQGPIWAKIPETGAHFHPSPAMGGFGLKHPPPMMLIKNTPVPGNITSFSDVPVSSFITQYSTGQVTVEMEWELKKENSKRWNPEIQYTNNYNDPQFVDFAPDSTGEYRTTRPIGTRYLTRPL

SEQ ID NO: 876 - protein, 736 aa, Artificial Sequence; identical to SEQ ID NO: 50
  Description of Artificial Sequence: Synthetic polypeptide

SEQ ID NO: 877 - protein, 734 aa, Artificial Sequence; identical to SEQ ID NO: 68
  Description of Artificial Sequence: Synthetic polypeptide

SEQ ID NO: 878 - protein, 723 aa, Artificial Sequence
  Description of Artificial Sequence: Synthetic polypeptide
MSFVDHPPDWLEEVGEGLREFLGLEAGPPKPKPNQQHQDQARGLVLPGYNYLGPGNGLDRGEPVNRADEVAREHDISYNEQLEAGDNPYLKYNHADAEFQEKLADDTSFGGNLGKAVFQAKKRVLEPFGLVEEGAKTAPTGKRIDDHFPKRKKARTEEDSKPSTSSDAEAGPSGSQQLQIPAQPASSLGADTMSAGGGPLGDNNQGADGVGNASGDWHCDSTWMGDRVVTKSTRTWVLPSYNNHQYREIKSGSVDGSNANAYFGYSTPWGYFDFNRFHSHWSPRDWQRLINNYWGFRPRSLRVKIFNIQVKEVTVQDSTTTIANNLTSTVQVFTDDDYQLPYVVGNGTEGCLPAFPPQVFTLPQYGYATLNRDNTENPTERSSFFCLEYFPSKMLRTGNNFEFTYNFEEVPFHSSFAPSQNLFKLANPLVDQYLYRFVSTNNTGGVQFNKNLAGRYANTYKNWFPGPMGRTQGWNLGSGVNRASVSAFATTNRMELEGASYQVPPQPNGMTNNLQGSNTYALENTMIFNSQPANPGTTATYLEGNMLITSESETQPVNRVAYNVGGQMATNNQSSTTAPATGTYNLQEIVPGSVWMERDVYLQGPIWAKIPETGAHFHPSPAMGGFGLKHPPPMMLIKNTPVPGNITSFSDVPVSSFITQYSTGQVTVEMEWELKKENSKRWNPEIQYTNNYNDPQFVDFAPDSTGEYRTTRPIGTRYLTRPL

SEQ ID NO: 879 - protein, 534 aa, Artificial Sequence
  Description of Artificial Sequence: Synthetic polypeptide
MAEGGGGAMGDSSGGADGVGNASGNWHCDSQWMGNTVITKTTRTWVLPSYNNHIYKAITSGTSQDANVQYAGYSTPWGYFDFNRFHCHFSPRDWQRLINNHWGIRPKSLKFKIFNVQVKEVTTQDQTKTIANNLTSTIQVFTDDEHQLPYVLGSATEGTMPPFPSDVYALPQYGYCTMHTNQNGARFNDRSAFYCLEYFPSQMLRTGNNFEFTFDFEEVPFHSMFAHSQDLDRLMNPLVDQYLWNFNEVDSSRNAQFKKAVKGAYGTMGRNWLPGPKFLDQRVRAYTGGTDNYANWNIWSNGNKVNLKDRQYLLQPGPVSATYTEGEASSLPAQNILGIAKDPYRSGSTTAGISDIMVTEEQEVAPTNGVGWKPYGRTVTNEQNTTTAPTSSDLDVLGALPGMVWQNRDIYLQGPIGAKIPKTDGKFHPSPNLGGFGLHNPPPQVFIKNTPVPADPPVEYVHQKWNSYITQYSTGQCTVEMVWELRKENSKRWNPEIQFTSNFSNRTSIMFAPNETGGYVEDRLIGTRYLTQNL

SEQ ID NO: 880 - protein, 554 aa, Artificial Sequence
  Description of Artificial Sequence: Synthetic polypeptide
MTSVNSAEASTGAGGGGSNPVKSMWSEGATFSANSVTCTFSRQFLIPYDPEHHYKVFSPAASSCHNASGKEAKVCTISPIMGYSTPWRYLDFNALNLFFSPLEFQHLIENYGSIAPDALTVTISEIAVKDVTDKTGGGVQVTDSTTGRLCMLVDHEYKYPYVLGQGQDTLAPELPIWVYFPPQYAYLTVGDVNTQGISGDSKKLASEESAFYVLEHSSFQLLGTGGTATMSYKFPPVPPENLEGCSQHFYEMYNPLYGSRLGVPDTLGGDPKFRSLTHEDHAIQPQNFMPGPLVNSVSTKEGDSFNTGAGKALTGLSTGTSQNTRISLRPGPVSQPYHHWDTDKYVTGINAISHGQTTYGNAEDKEYQQGVGRFPNEKEQLKQLQGLNMHTYFPNKGTQQYTDQIERPLMVGSVWNRRALHYESQLWSKIPNLDDSFKTQFAALGGWGLHQPPPQIFLKILPQSGPIGGIKSMGITTLVQYAVGIMTVTMTFKLGPRKATGRWNPQPGVYPPHAAGHLPYVLYDPTATDAKQHHRHGYEKPEELWTAKSRVHPL

SEQ ID NO: 881 - protein, 587 aa, Artificial Sequence
  Description of Artificial Sequence: Synthetic polypeptide
MSDGTSQPDGGNAVHSAARVERAADGPGGSGGGGSGGGGVGVSTGSYDNQTHYRFLGDGWVEITALATRLVHLNMPKSENYCRIRVHNTTDTSVKGNMAKDDAHEQIWTPWSLVDANAWGVWLQPSDWQYICNTMSQLNLVSLDQEIFNVVLKTVTEQDSGGQAIKIYNNDLTACMMVAVDSNNILPYTPAANSMETLGFYPWKPTIASPYRYYFCVDRDLSVTYENQEGTIEHNVMGTPKGMNSQFFTIENTQQITLLRTGDEFATGTYYFDTNPVKLTHTWQTNRQLGQPPLLSTFPEADTDAGTLTAQGSRHGATQMEVNWVSEAIRTRPAQVGFCQPHNDFEASRAGPFAAPKVPADVTQGMDREANGSVRYSYGKQHGENWAAHGPAPERYTWDETNFGSGRDTRDGFIQSAPLVVPPPLNGILTNANPIGTKNDIHFSNVFNSYGPLTTFSHPSPVYPQGQIWDKELDLEHKPRLHITAPFVCKNNAPGQMLVRLGPNLTDQYDPNGATLSRIVTYGTFFWKGKLTMRAKLRANTTWNPVYQVSVEDNGNSYMSVTKWLPTATGNMQSVPLITRPVARNTY

SEQ ID NO: 882 - protein, 584 aa, Artificial Sequence
  Description of Artificial Sequence: Synthetic polypeptide
MSDGAVQPDGGQPAVRNERATGSGNGSGGGGGGGSGGVGISTGTFNNQTEFKFLENGWVEITANSSRLVHLNMPESENYKRVVVNNMDKTAVKGNMALDDIHVEIVTPWSLVDANAWGVWFNPGDWQLIVNTMSELHLVSFEQEIFNVVLKTVSESATQPPTKVYNNDLTASLMVALDSNNTMPFTPAAMRSETLGFYPWKPTIPTPWRYYFQWDRTLIPSHTGTSGTPTNVYHGTDPDDVQFYTIENSVPVHLLRTGDEFATGTFFFDCKPCRLTHTWQTNRALGLPPFLNSLPQSEGATNFGDIGVQQDKRRGVTQMGNTDYITEATIMRPAEVGYSAPYYSFEASTQGPFKTPIAAGRGGAQTDENQAADGDPRYAFGRQHGQKTTTTGETPERFTYIAHQDTGRYPEGDWIQNINFNLPVTNDNVLLPTDPIGGKTGINYTNIFNTYGPLTALNNVPPVYPNGQIWDKEFDTDLKPRLHINAPFVCQNNCPGQLFVKVAPNLTNQYDPDASANMSRIVTYSDFWWKGKLVFKAKLRASHTWNPIQQMSINVDNQFNYVPNNIGAMKIVYEKSQLAPRKLY

SEQ ID NO: 883 - protein, 548 aa, Artificial Sequence
  Description of Artificial Sequence: Synthetic polypeptide
GVGISTGTFNNQTEFKFLENGWVEITANSSRLVHLNMPESENYRRVVVNNMDKTAVNGNMALDDIHAQIVTPWSLVDANAWGVWFNPGDWQLIVNTMSELHLVSFEQEIFNVVLKTVSESATQPPTKVYNNDLTASLMVALDSNNTMPFTPAAMRSETLGFYPWKPTIPTPWRYYFQWDRTLIPSHTGTSGTPTNIYHGTDPDDVQFYTIENSVPVHLLRTGDEFATGTFFFDCKPCRLTHTWQTNRALGLPPFLNSLPQSEGATNFGDIGVQQDKRRGVTQMGNTNYITEATIMRPAEVGYSAPYYSFEASTQGPFKTPIAAGRGGAQTDENQAADGNPRYAFGRQHGQKTTTTGETPERFTYIAHQDTGRYPEGDWIQNINFNLPVTNDNVLLPTDPIGGKTGINYTNIFNTYGPLTALNNVPPVYPNGQIWDKEFDTDLKPRLHVNAPFVCQNNCPGQLFVKVAPNLTNEYDPDASANMSRIVTYSDFWWKGKLVFKAKLRASHTWNPIQQMSINVDNQFNYVPSNIGGMKIVYEKSQLAPRKLY

SEQ ID NO: 884 - protein, 736 aa, Artificial Sequence; identical to SEQ ID NO: 112
  Description of Artificial Sequence: Synthetic polypeptide

SEQ ID NO: 885 - protein, 736 aa, Artificial Sequence; identical to SEQ ID NO: 107
  Description of Artificial Sequence: Synthetic polypeptide

SEQ ID NO: 886 - protein, 736 aa, Artificial Sequence
  Description of Artificial Sequence: Synthetic polypeptide
MAADGYLPDWLEDTLSEGIRQWWKLKPGPPPPKPAERHKDDSRGLVLPGYKYLGPFNGLDKGEPVNEADAAALEHDKAYDRQLDSGDNPYLKYNHADAEFQERLKEDTSFGGNLGRAVFQAKKRVLEPLGLVEEPVKTAPGKKRPVEHSPVEEPDSSSGTGKAGQQPARKRLNFGQTGDADSVPDPQPLGQPPAAPSGLGTNTMATGSGAPMADNNEGADGVGNSSGNWHCDSTWMGDRVITTSTRTWALPTYNNHLYKQISSQSGASNDNHYFGYSTPWGYFDFNRFHCHFSPRDWQRLINNNWGFRPKRLNFKLFNIQVKEVTQNDGTTTIANNLTSTVQVFTDSEYQLPYVLGSAHQGCLPPFPADVFMVPQYGYLTLNNGSQAVGRSSFYCLEYFPSQMLRTGNNFTFSYTFEDVPFHSSYAHSQSLDRLMNPLIDQYLYYLSRTNTPSGTTTQSRLQFSQAGASDIRDQSRNWLPGPCYRQQRVSKTSADNNNSEYSWTGATKYHLNGRDSLVNPGPAMASHKDDEEKFFPQSGVLIFGKQGSEKTNVDIEKVMITDEEEIRTTNPVATEQYGSVSTNLQRGNRQAATADVNTQGVLPGMVWQDRDVYLQGPIWAKIPHTDGHFHPSPLMGGFGLKHPPPQILIKNTPVPANPSTTFSAAKFASFITQYSTGQVSVEIEWELQKENSKRWNPEIQYTSNYNKSVNVDFTVDTNGVYSEPRPIGTRYLTRNL

SEQ ID NO: 887 - protein, 736 aa, Artificial Sequence
  Description of Artificial Sequence: Synthetic polypeptide
MAADGYLPDWLEDNLSEGIREWWDLKPGAPKPKANQQKQDDGRGLVLPGYKYLGPFNGLDKGEPVNAADAAALEHDKAYDQQLKAGDNPYLRYNHADAEFQERLQEDTSFGGNLGRAVFQAKKRVLEPFGLVEEGAKTAPGKKRPVEQSPQEPDSSSGIGKTGQQPAKKRLNFGQTGDSESVPDPQPLGEPPATPAAVGPTTMASGGGAPMADNNEGADGVGNASGNWHCDSTWLGDRVITTSTRTWALPTYNNHLYKQISSASTGASNDNHYFGYSTPWGYFDFNRFHCHFSPRDWQRLINNNWGFRPKRLNFKLFNVQVKEVTTNDGVTTIANNLTSTVQVFSDSEYQLPYVLGSAHQGCLPPFPADVFMIPQYGYLTLNNGSQAVGRSSFYCLEYFPSQMLRTGNNFTFSYTFEDVPFHSSYAHSQSLDRLMNPLIDQYLYYLNRTQDQSGSAQNKDLLFSRGSPAGMSVQPKNWLPGPCYRQQRVSKTKTDNNNSNFTWTGASKYNLNGRESIINPGTAMASHKDDKNKFFPMSGVMIFGKESAGASNTALDNVMITDEEEIKATNPVATERFGTVAVNLQSSSTDPATGDVHVMGALPGMVWQDRDVYLQGPIWAKIPHTDGHFHPSPLMGGFGLKNPPPQILIKNTPVPANPPAEFSATKFASFITQYSTGQVSVEIEWELQKENSKRWNPEVQYTSNYAKSANVDFTVDNNGLYTEPRPIGTRYLTRPL

SEQ ID NO: 888 - protein, 737 aa, Artificial Sequence
  Description of Artificial Sequence: Synthetic polypeptide
MAADGYLPDWLEDTLSEGIRQWWKLKPGPPPPKPAERHKDDSRGLVLPGYKYLGPGNGLDKGEPVNAADAAALEHDKAYDQQLKAGDNPYLKYNHADAEFQERLKEDTSFGGNLGRAVFQAKKRVLEPLGLVEEGAKTAPGKKRPVEPSPQRSPDSSTGIGKKGQQPARKRLNFGQTGDSESVPDPQPLGEPPATPAAVGPTTMASGGGAPMADNNEGADGVGNASGNWHCDSTWLGDRVITTSTRTWALPTYNNHLYKQISSASTGASNDNHYFGYSTPWGYFDFNRFHCHFSPRDWQRLINNNWGFRPKRLNFKLFNIQVKEVTTNDGVTTIANNLTSTVQVFSDSEYQLPYVLGSAHQGCLPPFPADVFMIPQYGYLTLNNGSQAVGRSSFYCLEYFPSQMLRTGNNFTFSYTFEDVPFHSSYAHSQSLDRLMNPLIDQYLYYLNRTQNQSGSAQNKDLLFSRGSPAGMSVQPKNWLPGPCYRQQRVSKTKTDNNNSNFTWTGASKYNLNGRESIINPGTAMASHKDDKDKFFPMSGVMIFGKESAGASNTALDNVMITDEEEIKATNPVATERFGTVAVNLQSSSTDPATEDVHVMGALPGMVWQDRDVYLQGPIWAKIPHTDGHFHPSPLMGGFGLKNPPPQILIKNTPVPANPPAEFSATKFASFITQYSTGQVSVEIEWELQKENSKRWNPEVQYTSNYAKSANVDFTVDNNGLYTEPRPIGTRYLTRNL

SEQ ID NO: 889 - protein, 736 aa, Artificial Sequence
  Description of Artificial Sequence: Synthetic polypeptide
MAADGYLPDWLEDNLSEGIREWWDLKPGAPKPKANQQKQDDGRGLVLPGYKYLGPFNGLDKGEPVNAADAAALEHDKAYDQQLKAGDNPYLRYNHADAEFQERLQEDTSFGGNLGRAVFQAKKRVLEPFGLVEEGAKTAPGKKRPVEQSPQEPDSSSGIGKTGQQPAKKRLNFGQTGDSESVPDPQPLGEPPATPAAVGPTTMASGGGAPMADNNEGADGVGNASGNWHCDSTWLGDRVITTSTRTWALPTYNNHLYKQISSASTGASNDNHYFGYSTPWGYFDFNRFHCHFSPRDWQRLINNNWGFRPKRLNFKLFNVQVKEVTTNDGVTTIANNLTSTVQVFSDSEYQLPYVLGSAHQGCLPPFPADVFMIPQYGYLTLNNGSQAVGRSSFYCLEYFPSQMLRTGNNFTFSYTFEDVPFHSSYAHSQSLDRLMNPLIDQYLYYLNRTQDQSGSAQNKDLLFSRGSPAGMSVQPKNWLPGPCYRQQRVSKTKTDNNNSNFTWTGASKYNLNGRESIINPGTAMASHKDDKNKFFPMSGVMIFGKESAGASNTALDNVMITDEEEIKATNPVATERFGTVAVNLQSSSTDPATGDVHVMGALPGMVWQDRDVYLQGPIWAKIPHTDGHFHPSPLMGGFGLKHPPPQILIKNTPVPANPPAEFSATKFASFITQYSTGQVSVEIEWELQKENSKRWNPEVQYTSNYAKSANVDFTVDNNGLYTEPRPIGTRYLTRPL

SEQ ID NO: 890 - protein, 736 aa, Artificial Sequence
  Description of Artificial Sequence: Synthetic polypeptide
MAADGYLPDWLEDNLSEGIREWWDLKPGAPKPKANQQKQDDGRGLVLPGYKYLGPFNGLDKGEPVNAADAAALEHDKAYDQQLKAGDNPYLRYNHADAEFQERLQEDTSFGGNLGRAVFQAKKRVLEPFGLVEEGAKTAPGKKRPVEQSPQEPDSSSGIGKTGQQPAKKRLNFGQTGDSESVPDPQPLGEPPATPAAVGPTTMASGGGAPMADNNEGADGVGNASGNWHCDSTWLGDRVITTSTRTWALPTYNNHLYKQISSASTGASNDNHYFGYSTPWGYFDFNRFHCHFSPRDWQRLINNNWGFRPKRLNFKLFNVQVKEVTTNDGVTTIANNLTSTVQVFSDSEYQLPYVLGSAHQGCLPPFPADVFMIPQYGYLTLNNGSQAVGRSSFYCLEYFPSQMLRTGNNFTFSYTFEDVPFHSSYAHSQSLDRLMNPLIDQYLYYLNRTQDQSGSAQNKDLLFSRGSPAGMSVQPKNWLPGPCYRQQRVSKTKTDNNNSNFTWTGASKYNLNGRESIINPGTAMASHKDDKDKFFPMSGVMIFGKESAGASNTALDNVMITDEEEIKATNPVATERFGTVAVNLQSSSTDPATGDVHVMGALPGMVWQDRDVYLQGPIWAKIPHTDGHFHPSPLMGGFGLKHPPPQILIKNTPVPANPPAEFSATKFASFITQYSTGQVSVEIEWELQKENSKRWNPEVQYTSNYAKSANVDFTVDNNGLYTEPRPIGTRYLTRPL

SEQ ID NO: 891 - protein, 736 aa, Artificial Sequence
  Description of Artificial Sequence: Synthetic polypeptide
MAADGYLPDWLEDNLSEGIREWWDLKPGAPKPKANQQKQDDGRGLVLPGYKYLGPFNGLDKGEPVNAADAAALEHDKAYDQQLKAGDNPYLRYNHADAEFQERLQEDTSFGGNLGRAVFQAKKRVLEPFGLVEEGAKTAPGKKRPVEQSPQEPDSSSGIGKTGQQPAKKRLNFGQTGDSESVPDPQPLGEPPATPAAVGPTTMASGGGAPMADNNEGADGVGNASGNWHCDSTWLGDRVITTSTRTWALPTYNNHLYKQISSASTGASNDNHYFGYSTPWGYFDFNRFHCHFSPRDWQRLINNNWGFRPKRLNFKLFNIQVKEVTTNDGVTTIANNLTSTVQVFSDSEYQLPYVLGSAHQGCLPPFPADVFMIPQYGYLTLNNGSQAVGRSSFYCLEYFPSQMLRTGNNFTFSYTFEDVPFHSSYAHSQSLDRLMNPLIDQYLYYLNRTQDQSGSAQNKDLLFSRGSPAGMSVQPKNWLPGPCYRQQRVSKTKTDNNNSNFTWTGASKYNLNGRESIINPGTAMASHKDDKNKFFPMSGVMIFGKESAGASNTALDNVMITDEEEIKATNPVATERFGTVAVNLQSSSTDPATGDVHVMGALPGMVWQDRDVYLQGPIWAKIPHTDGHFHPSPLMGGFGLKHPPPQILIKNTPVPANPPAEFSATKFASFITQYSTGQVSVEIEWELQKENSKRWNPEVQYTSNYAKSANVDFTVDNNGLYTEPRPIGTRYLTRPL

SEQ ID NO: 892 - protein, 736 aa, Artificial Sequence
  Description of Artificial Sequence: Synthetic polypeptide
MAADGYLPDWLEDNLSEGIREWWDLKPGAPKPKANQQKQDDGRGLVLPGYKYLGPFNGLDKGEPVNAADAAALEHDKAYDQQLKAGDNPYLRYNHADAEFQERLQEDTSFGGNLGRAVFQAKKRVLEPFGLVEEGAKTAPGKKRPVEQSPQEPDSSSGIGKTGQQPAKKRLNFGQTGDSESVPDPQPLGEPPATPAAVGPTTMASGGGAPMADNNEGADGVGNASGNWHCDSTWLGDRVITTSTRTWALPTYNNHLYKQISSASTGASNDNHYFGYSTPWGYFDFNRFHCHFSPRDWQRLINNNWGFRPKRLNFKLFNVQVKEVTTNDGVTTIANNLTSTVQVFSDSEYQLPYVLGSAHQGCLPPFPADVFMIPQYGYLTLNNGSQAVGRSSFYCLEYFPSQMLRTGNNFTFSYTFEDVPFHSSYAHSQSLDRLMNPLIDQYLYYLNRTQNQSGSAQNKDLLFSRGSPAGMSVQPKNWLPGPCYRQQRVSKTKTDNNNSNFTWTGASKYNLNGRESIINPGTAMASHKDDKDKFFPMSGVMIFGKESAGASNTALDNVMITDEEEIKATNPVATERFGTVAVNLQSSSTDPATGDVHVMGALPGMVWQDRDVYLQGPIWAKIPHTDGHFHPSPLMGGFGLKHPPPQILIKNTPVPANPPAEFSATKFASFITQYSTGQVSVEIEWELQKENSKRWNPEVQYTSNYAKSANVDFTVDNNGLYTEPRPIGTRYLTRPL

SEQ ID NO: 893 - protein, 736 aa, Artificial Sequence
  Description of Artificial Sequence: Synthetic polypeptide
MAADGYLPDWLEDNLSEGIREWWDLKPGAPKPKANQQKQDDGRGLVLPGYKYLGPFNGLDKGEPVNAADAAALEHDKAYDQQLKAGDNPYLRYNHADAEFQERLQEDTSFGGNLGRAVFQAKKRVLEPFGLVEEGAKTAPGKKRPVEQSPQEPDSSSGIGKTGQQPAKKRLNFGQTGDSESVPDPQPLGEPPATPAAVGPTTMASGGGAPMADNNEGADGVGNASGNWHCDSTWLGDRVITTSTRTWALPTYNNHLYKQISSASTGASNDNHYFGYSTPWGYFDFNRFHCHFSPRDWQRLINNNWGFRPKRLNFKLFNVQVKEVTTNDGVTTIANNLTSTVQVFSDSEYQLPYVLGSAHQGCLPPFPADVFMIPQYGYLTLNNGSQAVGRSSFYCLEYFPSQMLRTGNNFTFSYTFEDVPFHSSYAHSQSLDRLMNPLIDQYLYYLNRTQNQSGSAQNKDLLFSRGSPAGMSVQPKNWLPGPCYRQQRVSKTKTDNNNSNFTWTGASKYNLNGRESIINPGTAMASHKDDKNKFFPMSGVMIFGKESAGASNTALDNVMITDEEEIKATNPVATERFGTVAVNLQSSSTDPATGDVHVMGALPGMVWQDRDVYLQGPIWAKIPHTDGHFHPSPLMGGFGLKHPPPQILIKNTPVPANPPAEFSATKFASFITQYSTGQVSVEIEWELQKENSKRWNPEVQYTSNYAKSANVDFTVDNNGLYTEPRPIGTRYLTRPL

SEQ ID NO: 894 - DNA, 2217 bp, Artificial Sequence
  Description of Artificial Sequence: Synthetic polynucleotide
atggctgccgatggttatcttccagattggctcgaggacaacctctctgagggcattcgcgagtggtgggacctgaaacctggagccccgaaacccaaagccaaccagcaaaagcaggacaacggccggggtctggtgcttcctggctacaagtacctcggacccttcaacggactcgacaagggggagcccgtcaacgcggcggacgcagcggccctcgagcacgacaaggcctacgaccagcagctccaagcgggtgacaatccgtacctgcggtataatcacgccgacgccgagtttcaggagcgtctgcaagaagatacgtcttttgggggcaacctcgggcgcgcagtcttccaggccaaaaagcgggttctcgaacctctgggcctggttgaatcgccggttaagacggctcctggaaagaagagaccggtagagccatcaccccagcgctctccagactcctctacgggcatcggcaagaaaggccagcagcccgcaaaaaagagactcaattttgggcagactggcgactcagagtcagtccccgaccctcaaccaatcggagaaccaccagcaggcccctctggtctgggatctggtacaatggctgcaggcggtggcgctccaatggcagacaataacgaaggcgccgacggagtgggtagttcctcaggaaattggcattgcgattccacatggctgggcgacagagtcatcaccaccagcacccgcacctgggccctgcccacctacaacaaccacctctacaagcaaatctccaacgggacctcgggaggaagcaccaacgacaacacctacttcggctacagcaccccctgggggtattttgacttcaacagattccactgccacttttcaccacgtgactggcagcgactcatcaacaacaactggggattccggcccaagaggctcaacttcaagctcttcaacatccaagtcaaggaggtcacgcagaatgaaggcaccaagaccatcgccaataaccttaccagcacgattcaggtctttacggactcggaataccagctcccgtacgtgctcggctcggcgcaccagggctgcctgcctccgttcccggcggacgtcttcatgattcctcagtacgggtacctgactctgaacaatggcagtcaggctgtgggccggtcgtccttctactgcctggagtactttccttctcaaatgctgagaacgggcaacaactttgaattcagctacaacttcgaggacgtgcccttccacagcagctacgcgcacagccagagcctggaccggctgatgaaccctctcatcgaccagtacttgtactacctgtcccggactcaaagcacgggcggtactgcaggaactcagcagttgctattttctcaggccgggcctaacaacatgtcggctcaggccaagaactggctacccggtccctgctaccggcagcaacgcgtctccacgacactgtcgcagaacaacaacagcaactttgcctggacgggtgccaccaagtatcatctgaatggcagagactctctggtgaatcctggcgttgccatggctacccacaaggacgacgaagagcgattttttccatccagcggagtcttaatgtttgggaaacagggagctggaaaagacaacgtggactatagcagcgtgatgctaaccagcgaggaagaaataaagaccaccaacccagtggccacagaacagtacggcgtggtggccgataacctgcaacagcaaaacgccgctcctattgtaggggccgtcaatagtcaaggagccttacctggcatggtgtggcagaaccgggacgtgtacctgcagggtcccatctgggccaagattcctcatacggacggcaactttcatccctcgccgctgatgggaggctttggactgaagcatccgcctcctcagatcctgattaaaaacacacctgttcccgcggatcctccgaccaccttcaatcaggccaagctggcttctttcatcacgcagtacagtaccggccaggtcagcgtggagatcgagtgggagctgcagaaggagaacagcaaacgctggaacccagagattcagtacacttccaactactacaaatctacaaatgtggactttgctgtcaatactgagggtacttattccgagcctcgccccattggcacccgttacctcacccgtaatctgtaa

SEQ ID NO: 895 - protein, 738 aa, Artificial Sequence
  Description of Artificial Sequence: Synthetic polypeptide
MAADGYLPDWLEDNLSEGIREWWDLKPGAPKPKANQQKQDNGRGLVLPGYKYLGPFNGLDKGEPVNAADAAALEHDKAYDQQLQAGDNPYLRYNHADAEFQERLQEDTSFGGNLGRAVFQAKKRVLEPLGLVESPVKTAPGKKRPVEPSPQRSPDSSTGIGKKGQQPAKKRLNFGQTGDSESVPDPQPIGEPPAGPSGLGSGTMAAGGGAPMADNNEGADGVGSSSGNWHCDSTWLGDRVITTSTRTWALPTYNNHLYKQISNGTSGGSTNDNTYFGYSTPWGYFDFNRFHCHFSPRDWQRLINNNWGFRPKRLNFKLFNIQVKEVTQNEGTKTIANNLTSTIQVFTDSEYQLPYVLGSAHQGCLPPFPADVFMIPQYGYLTLNNGSQAVGRSSFYCLEYFPSQMLRTGNNFEFSYNFEDVPFHSSYAHSQSLDRLMNPLIDQYLYYLSRTQSTGGTAGTQQLLFSQAGPNNMSAQAKNWLPGPCYRQQRVSTTLSQNNNSNFAWTGATKYHLNGRDSLVNPGVAMATHKDDEERFFPSSGVLMFGKQGAGKDNVDYSSVMLTSEEEIKTTNPVATEQYGVVADNLQQQNAAPIVGAVNSQGALPGMVWQNRDVYLQGPIWAKIPHTDGNFHPSPLMGGFGLKHPPPQILIKNTPVPADPPTTFNQAKLASFITQYSTGQVSVEIEWELQKENSKRWNPEIQYTSNYYKSTNVDFAVNTEGTYSEPRPIGTRYLTRNL

SEQ ID NO: 896 - protein, 738 aa, Artificial Sequence; identical to SEQ ID NO: 895
  Description of Artificial Sequence: Synthetic polypeptide

SEQ ID NO: 897 - DNA, 4472 bp, Artificial Sequence
  Description of Artificial Sequence: Synthetic polynucleotide
ctccatcactaggggtaaccgcgaagcgcctcccacgctgccgcgtcagcgctgacgtaaattacgtcataggggagtggtcctgtattagctgtcacgtgagtgcttttgcgacattttgcgacaccacgtggccattcatggtatatatggccgagtgagcgagcaggatctccattttgaccgcgaaatttgaacgagcagcagccatgccgggcttctacgagatcgtgcttaaggtgccgagcgacctggacgagcacctgccgggcatttctgactcgtttgtgaactgggtggcagagaaggaatgggagctgcccccggattctgacatggatcggaatctgattgagcaggcacccctgaccgtggccgagaagctacagcgcgacttcctggtccaatggcgccgcgtgagtaaggccccggaggccctcttctttgttcagttcgagaagggcgagtcctacttccacctccatattctggtagagaccacgggggtcaaatccatggtgctgggccgcttcctgagtcagattcgggacaagctggtgcagaccatctaccgcgggatcgagccgaccctgcccaactggttcgcggtgacaaagacgcgtaatggcgccggaggggggaacaaggtggtggacgagtgctacatccccaactacctgctgcccaagactcagcccgagctgcagtgggcgtggactaacatggaggagtatataagcgcgtgcttgaacctggccgagcgcaaacggctcgtggcgcagcacctgacccacgtcagccagacccaggagcagaacaaggagaatctgaacccgaattctgacgcgcctgtcatccggtcaaaaacctccgcgcgctacatggagctggtcgggtggctggtggaccggggcatcacctccgagaagcagtggatccaggaggaccaggcctcgtacatctccttcaacgccgcctccaactcgcggtctcagatcaaggccgcgctggacaatgccggcaagatcatggcgctgaccaaatccgcgcccgactacctggtaggccccgctctgcccgcggacattaaatccaaccgcatctaccgcatcctggagctgaatggctacgaccctgcctacgccggttccgtctttctcggctgggcccagaaaaagtttggcaaaaggaacaccatctggctgtttgggccggccaccacgggcaagaccaacatcgcggaagccatcgcccacgccgtgcccttctacggctgcgtcaactggaccaatgagaactttcccttcaacgattgcgtcgacaagatggtgatctggtgggaggagggcaagatgacggccaaggtcgtggagtccgccaaggccattctcggcggcagcaaggtgcgcgtggaccaaaagtgcaagtcgtccgcccagatcgatcccacccccgtgatcgtcacctccaacaccaacatgtgcgccgtgattgacgggaacagcaccaccttcgagcaccagcagccgttgcaggaccggatgttcaaatttgaacttacccgccgtctggagcacgactttggcaaggtgacaaagcaggaagtcaaagagttcttccgctgggcgcaggatcacgtgaccgaggtggcgcatgagttctacgtcagaaagggtggagctaacaaaagacccgcccccgatgacgcggatataagcgagcccaagcgggcctgcccctcagtcgcggatccatcgacgtcagacgcggaaggagctccggtggactttgccgacaggtaccaaaacaaatgttctcgtcacgcgggcatgcttcagatgctgtttccctgcaaaacatgcgagagaatgaatcagaatttcaacatttgcttcacgcacgggaccagagactgttcagaatgtttccctggcgtgtcagaatctcaaccggtcgtcagaaaaaagacgtatcggaaactctgtgcgattcatcatctgctggggcgggcacccgagattgcttgctcggcctgcgacctggtcaacgtggacctggatgactgtgtttctgagcaataaatgacttaaaccaggtatggctgccgatggttatcttccagattggctcgaggacaacctctctgagggcattcgcgagtggtgggacctgaaacctggagccccgaaacccaaagccaaccagcaaaagcaggacaacggccggggtctggtgcttcctggctacaagtacctcggacccttcaacggactcgacaagggggagcccgtcaacgcggcggacgcagcggccctcgagcacgacaaggcctacgaccagcagctccaagcgggtgacaatccgtacctgcggtataatcacgccgacgccgagtttcaggagcgtctgcaagaagatacgtcttttgggggcaacctcgggcgcgcagtcttccaggccaaaaagcgggttctcgaacctctgggcctggttgaatcgccggttaagacggctcctggaaagaagagaccggtagagccatcaccccagcgctctccagactcctctacgggcatcggcaagaaaggccagcagcccgcaaaaaagagactcaattttgggcagactggcgactcagagtcagtccccgaccctcaaccaatcggagaaccaccagcaggcccctctggtctgggatctggtacaatggctgcaggcggtggcgctccaatggcagacaataacgaaggcgccgacggagtgggtagttcctcaggaaattggcattgcgattccacatggctgggcgacagagtcatcaccaccagcacccgcacctgggccctgcccacctacaacaaccacctctacaagcaaatctccaacgggacctcgggaggaagcaccaacgacaacacctacttcggctacagcaccccctgggggtattttgacttcaacagattccactgccacttttcaccacgtgactggcagcgactcatcaacaacaactggggattccggcccaagaggctcaacttcaagctcttcaacatccaagtcaaggaggtcacgcagaatgaaggcaccaagaccatcgccaataaccttaccagcacgattcaggtctttacggactcggaataccagctcccgtacgtgctcggctcggcgcaccagggctgcctgcctccgttcccggcggacgtcttcatgattcctcagtacgggtacctgactctgaacaatggcagtcaggctgtgggccggtcgtccttctactgcctggagtactttccttctcaaatgctgagaacgggcaacaactttgaattcagctacaacttcgaggacgtgcccttccacagcagctacgcgcacagccagagcctggaccggctgatgaaccctctcatcgaccagtacttgtactacctgtcccggactcaaagcacgggcggtactgcaggaactcagcagttgctattttctcaggccgggcctaacaacatgtcggctcaggccaagaactggctacccggtccctgctaccggcagcaacgcgtctccacgacactgtcgcagaacaacaacagcaactttgcctggacgggtgccaccaagtatcatctgaatggcagagactctctggtgaatcctggcgttgccatggctacccacaaggacgacgaagagcgattttttccatccagcggagtcttaatgtttgggaaacagggagctggaaaagacaacgtggactatagcagcgtgatgctaaccagcgaggaagaaataaagaccaccaacccagtggccacagaacagtacggcgtggtggccgataacctgcaacagcaaaacgccgctcctattgtaggggccgtcaatagtcaaggagccttacctggcatggtgtggcagaaccgggacgtgtacctgcagggtcccatctgggccaagattcctcatacggacggcaactttcatccctcgccgctgatgggaggctttggactgaagcatccgcctcctcagatcctgattaaaaacacacctgttcccgcggatcctccgaccaccttcaatcaggccaagctggcttctttcatcacgcagtacagtaccggccaggtcagcgtggagatcgagtgggagctgcagaaggagaacagcaaacgctggaacccagagattcagtacacttccaactactacaaatctacaaatgtggactttgctgtcaatactgagggtacttattccgagcctcgccccattggcacccgttacctcacccgtaatctgtaattacatgttaatcaataaaccggttaattcgtttcagttgaactttggtctcctgtccttcttatcttatcggttaccatagaaactggttacttattaactgcttggtgcgcttcgcgataaaagacttacgtcatcgggttacccctagtgatgga

SEQ ID NO: 898 - protein, 738 aa, Artificial Sequence
  Description of Artificial Sequence: Synthetic polypeptide
MAADGYLPDWLEDNLSEGIREWWDLKPGAPKPKANQQKQDNGRGLVLPGYKYLGPFNGLDKGEPVNAADAAALEHDKAYDQQLQAGDNPYLRYNHADAEFQERLQEDTSFGGNLGRAVFQAKKRVLEPLGLVESPVKTAPGKKRPVEPSPQRSPDSSTGIGKKGQQPAKKRLNFGQTGDSESVPDPQPIGEPPAAPSGVGPNTMAAGGGAPMADNNEGADGVGSSSGNWHCDSTWLGDRVITTSTRTWALPTYNNHLYKQISNGTSGGSTNDNTYFGYSTPWGYFDFNRFHCHFSPRDWQRLINNNWGFRPKRLNFKLFNIQVKEVTQNEGTKTIANNLTSTIQVFTDSEYQLPYVLGSAHQGCLPPFPADVFMIPQYGYLTLNNGSQAVGRSSFYCLEYFPSQMLRTGNNFEFSYNFEDVPFHSSYAHSQSLDRLMNPLIDQYLYYLSRTQSTGGTAGTQQLLFSQAGPNNMSAQAKNWLPGPCYRQQRVSTTLSQNNNSNFAWTGATKYHLNGRDSLVNPGVAMATHKDDEERFFPSSGVLMFGKQGAGKDNVDYSSVMLTSEEEIKTTNPVATEQYGVVADNLQQQNAAPIVGAVNSQGALPGMVWQNRDVYLQGPIWAKIPHTDGNFHPSPLMGGFGLKHPPPQILIKNTPVPADPPTTFNQAKLASFITQYSTGQVSVEIEWELQKENSKRWNPEIQYTSNYYKSTNVDFAVNTEGTYSEPRPIGTRYLTRNL

SEQ ID NO: 899 - protein, 738 aa, Artificial Sequence
  Description of Artificial Sequence: Synthetic polypeptide
MAADGYLPDWLEDNLSEGIREWWDLKPGAPKPKANQQRQDNGRGLVLPGYRYLGPFNGLDKGEPVNAADAAALEHDRAYDQQLQAGDNPYLRYNHADAEFQERLQEDTSFGGNLGRAVFQAKKRVLEPLGLVESPVRTAPGKKRPVEPSPQRSPDSSTGIGKKGQQPARKRLNFGQTGDSESVPDPQPIGEPPAAPSGVGPNTMAAGGGAPMADNNEGADGVGSSSGNWHCDSTWLGDRVITTSTRTWALPTYNNHLYRQISNGTSGGSTNDNTYFGYSTPWGYFDFNRFHCHFSPRDWQRLINNNWGFRPKRLNFKLFNIQVKEVTQNEGTRTIANNLTSTIQVFTDSEYQLPYVLGSAHQGCLPPFPADVFMIPQYGYLTLNNGSQAVGRSSFYCLEYFPSQMLRTGNNFEFSYNFEDVPFHSSYAHSQSLDRLMNPLIDQYLYYLSRTQSTGGTAGTQQLLFSQAGPNNMSAQAKNWLPGPCYRQQRVSTTLSQNNNSNFAWTGATKYHLNGRDSLVNPGVAMATHRDDEERFFPSSGVLMFGRQGAGRDNVDYSSVMLTSEEEIRTTNPVATEQYGVVADNLQQQNAAPIVGAVNSQGALPGMVWQNRDVYLQGPIWAKIPHTDGNFHPSPLMGGFGLKHPPPQILIKNTPVPADPPTTFNQAKLASFITQYSTGQVSVEIEWELQKENSKRWNPEIQYTSNYYKSTNVDFAVNTEGTYSEPRPIGTRYLTRNL

SEQ ID NO: 900 - protein, 738 aa, Artificial Sequence
  Description of Artificial Sequence: Synthetic polypeptide
MAADGYLPDWLEDNLSEGIREWWDLKPGAPKPKANQQRQDNGRGLVLPGYRYLGPFNGLDKGEPVNAADAAALEHDRAYDQQLQAGDNPYLRYNHADAEFQERLQEDTSFGGNLGRAVFQAKKRVLEPLGLVESPVRTAPGKKRPVEPSPQRSPDSSTGIGKRGQQPARKRLNFGQTGDSESVPDPQPIGEPPAAPSGVGPNTMAAGGGAPMADNNEGADGVGSSSGNWHCDSTWLGDRVITTSTRTWALPTYNNHLYRQISNGTSGGSTNDNTYFGYSTPWGYFDFNRFHCHFSPRDWQRLINNNWGFRPKRLNFKLFNIQVKEVTQNEGTRTIANNLTSTIQVFTDSEYQLPYVLGSAHQGCLPPFPADVFMIPQYGYLTLNNGSQAVGRSSFYCLEYFPSQMLRTGNNFEFSYNFEDVPFHSSYAHSQSLDRLMNPLIDQYLYYLSRTQSTGGTAGTQQLLFSQAGPNNMSAQAKNWLPGPCYRQQRVSTTLSQNNNSNFAWTGATKYHLNGRDSLVNPGVAMATHRDDEERFFPSSGVLMFGKQGAGRDNVDYSSVMLTSEEEIRTTNPVATEQYGVVADNLQQQNAAPIVGAVNSQGALPGMVWQNRDVYLQGPIWAKIPHTDGNFHPSPLMGGFGLKHPPPQILIKNTPVPADPPTTFNQAKLASFITQYSTGQVSVEIEWELQKENSKRWNPEIQYTSNYYKSTNVDFAVNTEGTYSEPRPIGTRYLTRNL

SEQ ID NO: 901 - protein, 738 aa, Artificial Sequence
  Description of Artificial Sequence: Synthetic polypeptide
MAADGYLPDWLEDNLSEGIREWWDLKPGAPKPKANQQRQDNGRGLVLPGYRYLGPFNGLDKGEPVNAADAAALEHDRAYDQQLQAGDNPYLRYNHADAEFQERLQEDTSFGGNLGRAVFQAKKRVLEPLGLVESPVRTAPGKKRPVEPSPQRSPDSSTGIGKRGQQPAKKRLNFGQTGDSESVPDPQPIGEPPAAPSGVGPNTMAAGGGAPMADNNEGADGVGSSSGNWHCDSTWLGDRVITTSTRTWALPTYNNHLYRQISNGTSGGSTNDNTYFGYSTPWGYFDFNRFHCHFSPRDWQRLINNNWGFRPKRLNFKLFNIQVKEVTQNEGTRTIANNLTSTIQVFTDSEYQLPYVLGSAHQGCLPPFPADVFMIPQYGYLTLNNGSQAVGRSSFYCLEYFPSQMLRTGNNFEFSYNFEDVPFHSSYAHSQSLDRLMNPLIDQYLYYLSRTQSTGGTAGTQQLLFSQAGPNNMSAQAKNWLPGPCYRQQRVSTTLSQNNNSNFAWTGATKYHLNGRDSLVNPGVAMATHRDDEERFFPSSGVLMFGRQGAGRDNVDYSSVMLTSEEEIRTTNPVATEQYGVVADNLQQQNAAPIVGAVNSQGALPGMVWQNRDVYLQGPIWAKIPHTDGNFHPSPLMGGFGLKHPPPQILIKNTPVPADPPTTFNQAKLASFITQYSTGQVSVEIEWELQKENSKRWNPEIQYTSNYYKSTNVDFAVNTEGTYSEPRPIGTRYLTRNL

SEQ ID NO: 902 - protein, 738 aa, Artificial Sequence
  Description of Artificial Sequence: Synthetic polypeptide
MAADGYLPDWLEDNLSEGIREWWDLKPGAPKPKANQQRQDNGRGLVLPGYRYLGPFNGLDKGEPVNAADAAALEHDRAYDQQLQAGDNPYLRYNHADAEFQERLQEDTSFGGNLGRAVFQAKKRVLEPLGLVESPVRTAPGKKRPVEPSPQRSPDSSTGIGKRGQQPAKKRLNFGQTGDSESVPDPQPIGEPPAAPSGVGPNTMAAGGGAPMADNNEGADGVGSSSGNWHCDSTWLGDRVITTSTRTWALPTYNNHLYRQISNGTSGGSTNDNTYFGYSTPWGYFDFNRFHCHFSPRDWQRLINNNWGFRPKRLNFKLFNIQVKEVTQNEGTRTIANNLTSTIQVFTDSEYQLPYVLGSAHQGCLPPFPADVFMIPQYGYLTLNNGSQAVGRSSFYCLEYFPSQMLRTGNNFEFSYNFEDVPFHSSYAHSQSLDRLMNPLIDQYLYYLSRTQSTGGTAGTQQLLFSQAGPNNMSAQAKNWLPGPCYRQQRVSTTLSQNNNSNFAWTGATKYHLNGRDSLVNPGVAMATHRDDEERFFPSSGVLMFGKQGAGRDNVDYSSVMLTSEEEIRTTNPVATEQYGVVADNLQQQNAAPIVGAVNSQGALPGMVWQNRDVYLQGPIWAKIPHTDGNFHPSPLMGGFGLKHPPPQILIKNTPVPADPPTTFNQARLASFITQYSTGQVSVEIEWELQKENSKRWNPEIQYTSNYYKSTNVDFAVNTEGTYSEPRPIGTRYLTRNL

SEQ ID NO: 903 - protein, 738 aa, Artificial Sequence
  Description of Artificial Sequence: Synthetic polypeptide
MAADGYLPDWLEDNLSEGIREWWDLKPGAPKPKANQQRQDNGRGLVLPGYRYLGPFNGLDKGEPVNAADAAALEHDRAYDQQLQAGDNPYLRYNHADAEFQERLQEDTSFGGNLGRAVFQAKKRVLEPLGLVESPVRTAPGKKRPVEPSPQRSPDSSTGIGKKGQQPAKKRLNFGQTGDSESVPDPQPIGEPPAAPSGVGPNTMAAGGGAPMADNNEGADGVGSSSGNWHCDSTWLGDRVITTSTRTWALPTYNNHLYRQISNGTSGGSTNDNTYFGYSTPWGYFDFNRFHCHFSPRDWQRLINNNWGFRPKRLNFKLFNIQVKEVTQNEGTRTIANNLTSTIQVFTDSEYQLPYVLGSAHQGCLPPFPADVFMIPQYGYLTLNNGSQAVGRSSFYCLEYFPSQMLRTGNNFEFSYNFEDVPFHSSYAHSQSLDRLMNPLIDQYLYYLSRTQSTGGTAGTQQLLFSQAGPNNMSAQAKNWLPGPCYRQQRVSTTLSQNNNSNFAWTGATKYHLNGRDSLVNPGVAMATHRDDEERFFPSSGVLMFGRQGAGRDNVDYSSVMLTSEEEIRTTNPVATEQYGVVADNLQQQNAAPIVGAVNSQGALPGMVWQNRDVYLQGPIWAKIPHTDGNFHPSPLMGGFGLKHPPPQILIKNTPVPADPPTTFNQARLASFITQYSTGQVSVEIEWELQKENSKRWNPEIQYTSNYYKSTNVDFAVNTEGTYSEPRPIGTRYLTRNL

SEQ ID NO: 904 - DNA, 2214 bp, Artificial Sequence
  Description of Artificial Sequence: Synthetic polynucleotide
atggctgccgatggttatcttccagattggctcgaggacaacctctctgagggcattcgcgagtggtgggacctgaaacctggagccccgaaacccaaagccaaccagcaaaagcaggacaacggccggggtctggtgcttcctggctacaagtacctcggacccttcaacggactcgacaagggggagcccgtcaacgcggcggacgcagcggccctcgagcacgacaaggcctacgaccagcagctccaagcgggtgacaatccgtacctgcggtataatcacgccgacgccgagtttcaggagcgtctgcaagaagatacgtcttttgggggcaacctcgggcgcgcagtcttccaggccaaaaagcgggttctcgaacctctgggcctggttgaatcgccggttaagacggctcctggaaagaagagaccggtagagccatcaccccagcgctctccagactcctctacgggcatcggcaagaaaggccagcagcccgcaaaaaagagactcaattttgggcagactggcgactcagagtcagtccccgaccctcaaccaatcggagaaccaccagcagccccctctggtgtgggacctaatacaatggctgcaggcggtggcgctccaatggcagacaataacgaaggcgccgacggagtgggtagttcctcaggaaattggcattgcgattccacatggctgggcgacagagtcatcaccaccagcacccgcacctgggccctgcccacctacaacaaccacctctacaagcaaatctccaacgggacctcgggaggaagcaccaacgacaacacctacttcggctacagcaccccctgggggtattttgacttcaacagattccactgccacttttcaccacgtgactggcagcgactcatcaacaacaactggggattccggcccaagaggctcaacttcaagctcttcaacatccaagtcaaggaggtcacgcagaatgaaggcaccaagaccatcgccaataaccttaccagcacgattcaggtctttacggactcggaataccagctcccgtacgtgctcggctcggcgcaccagggctgcctgcctccgttcccggcggacgtcttcatgattcctcagtacgggtacctgactctgaacaatggcagtcaggctgtgggccggtcgtccttctactgcctggagtactttccttctcaaatgctgagaacgggcaacaactttgaattcagctacaacttcgaggacgtgcccttccacagcagctacgcgcacagccagagcctggaccggctgatgaaccctctcatcgaccagtacttgtactacctgtcccggactcaaagcacgggcggtactgcaggaactcagcagttgctattttctcaggccgggcctaacaacatgtcggctcaggccaagaactggctacccggtccctgctaccggcagcaacgcgtctccacgacactgtcgcagaacaacaacagcaactttgcctggacgggtgccaccaagtatcatctgaatggcagagactctctggtgaatcctggcgttgccatggctacccacaaggacgacgaagagcgattttttccatccagcggagtcttaatgtttgggaaacagggagctggaaaagacaacgtggactatagcagcgtgatgctaaccagcgaggaagaaataaagaccaccaacccagtggccacagaacagtacggcgtggtggccgataacctgcaacagcaaaacgccgctcctattgtaggggccgtcaatagtcaaggagccttacctggcatggtgtggcagaaccgggacgtgtacctgcagggtcccatctgggccaagattcctcatacggacggcaactttcatccctcgccgctgatgggaggctttggactgaagcatccgcctcctcagatcctgattaaaaacacacctgttcccgcggatcctccgaccaccttcaatcaggccaagctggcttctttcatcacgcagtacagtaccggccaggtcagcgtggagatcgagtgggagctgcagaaggagaacagcaaacgctggaacccagagattcagtacacttccaactactacaaatctacaaatgtggactttgctgtcaatactgagggtacttattccgagcctcgccccattggcacccgttacctcacccgtaatctg

SEQ ID NO: 905 - DNA, 2217 bp, Artificial Sequence
  Description of Artificial Sequence: Synthetic polynucleotide
atggctgccgatggttatcttccagattggctcgaggacaacctctctgagggcattcgcgagtggtgggacctgaaacctggagccccgaaacccaaagccaaccagcaaaggcaggacaacggccggggtctggtgcttcctggctacaggtacctcggacccttcaacggactcgacaagggggagcccgtcaacgcggcggacgcagcggccctcgagcacgacagggcctacgaccagcagctccaagcgggtgacaatccgtacctgcggtataatcacgccgacgccgagtttcaggagcgtctgcaagaagatacgtcttttgggggcaacctcgggcgcgcagtcttccaggccaaaaagcgggttctcgaacctctgggcctggttgaatcgccggttaggacggctcctggaaagaagagaccggtagagccatcaccccagcgctctccagactcctctacgggcatcggcaagaaaggccagcagcccgcaagaaagagactcaattttgggcagactggcgactcagagtcagtccccgaccctcaaccaatcggagaaccaccagcagccccctctggtgtgggacctaatacaatggctgcaggcggtggcgctccaatggcagacaataacgaaggcgccgacggagtgggtagttcctcaggaaattggcattgcgattccacatggctgggcgacagagtcatcaccaccagcacccgcacctgggccctgcccacctacaacaaccacctctacaggcaaatctccaacgggacctcgggaggaagcaccaacgacaacacctacttcggctacagcaccccctgggggtattttgacttcaacagattccactgccacttttcaccacgtgactggcagcgactcatcaacaacaactggggattccggcccaagaggctcaacttcaagctcttcaacatccaagtcaaggaggtcacgcagaatgaaggcaccaggaccatcgccaataaccttaccagcacgattcaggtctttacggactcggaataccagctcccgtacgtgctcggctcggcgcaccagggctgcctgcctccgttcccggcggacgtcttcatgattcctcagtacgggtacctgactctgaacaatggcagtcaggctgtgggccggtcgtccttctactgcctggagtactttccttctcaaatgctgagaacgggcaacaactttgaattcagctacaacttcgaggacgtgcccttccacagcagctacgcgcacagccagagcctggaccggctgatgaaccctctcatcgaccagtacttgtactacctgtcccggactcaaagcacgggcggtactgcaggaactcagcagttgctattttctcaggccgggcctaacaacatgtcggctcaggccaagaactggctacccggtccctgctaccggcagcaacgcgtctccacgacactgtcgcagaacaacaacagcaactttgcctggacgggtgccaccaagtatcatctgaatggcagagactctctggtgaatcctggcgttgccatggctacccacagggacgacgaagagcgattttttccatccagcggagtcttaatgtttgggagacagggagctggaagagacaacgtggactatagcagcgtgatgctaaccagcgaggaagaaataaggaccaccaacccagtggccacagaacagtacggcgtggtggccgataacctgcaacagcaaaacgccgctcctattgtaggggccgtcaatagtcaaggagccttacctggcatggtgtggcagaaccgggacgtgtacctgcagggtcccatctgggccaagattcctcatacggacggcaactttcatccctcgccgctgatgggaggctttggactgaagcatccgcctcctcagatcctgattaaaaacacacctgttcccgcggatcctccgaccaccttcaatcaggccaagctggcttctttcatcacgcagtacagtaccggccaggtcagcgtggagatcgagtgggagctgcagaaggagaacagcaaacgctggaacccagagattcagtacacttccaactactacaaatctacaaatgtggactttgctgtcaatactgagggtacttattccgagcctcgccccattggcacccgttacctcacccgtaatctgtaa

SEQ ID NO: 906 - DNA, 2217 bp, Artificial Sequence
  Description of Artificial Sequence: Synthetic polynucleotide
atggctgccgatggttatcttccagattggctcgaggacaacctctctgagggcattcgcgagtggtgggacctgaaacctggagccccgaaacccaaagccaaccagcaaaggcaggacaacggccggggtctggtgcttcctggctacaggtacctcggacccttcaacggactcgacaagggggagcccgtcaacgcggcggacgcagcggccctcgagcacgacagggcctacgaccagcagctccaagcgggtgacaatccgtacctgcggtataatcacgccgacgccgagtttcaggagcgtctgcaagaagatacgtcttttgggggcaacctcgggcgcgcagtcttccaggccaaaaagcgggttctcgaacctctgggcctggttgaatcgccggttaggacggctcctggaaagaagagaccggtagagccatcaccccagcgctctccagactcctctacgggcatcggcaagagaggccagcagcccgcaagaaagagactcaattttgggcagactggcgactcagagtcagtccccgaccctcaaccaatcggagaaccaccagcagccccctctggtgtgggacctaatacaatggctgcaggcggtggcgctccaatggcagacaataacgaaggcgccgacggagtgggtagttcctcaggaaattggcattgcgattccacatggctgggcgacagagtcatcaccaccagcacccgcacctgggccctgcccacctacaacaaccacctctacaggcaaatctccaacgggacctcgggaggaagcaccaacgacaacacctacttcggctacagcaccccctgggggtattttgacttcaacagattccactgccacttttcaccacgtgactggcagcgactcatcaacaacaactggggattccggcccaagaggctcaacttcaagctcttcaacatccaagtcaaggaggtcacgcagaatgaaggcaccaggaccatcgccaataaccttaccagcacgattcaggtctttacggactcggaataccagctcccgtacgtgctcggctcggcgcaccagggctgcctgcctccgttcccggcggacgtcttcatgattcctcagtacgggtacctgactctgaacaatggcagtcaggctgtgggccggtcgtccttctactgcctggagtactttccttctcaaatgctgagaacgggcaacaactttgaattcagctacaacttcgaggacgtgcccttccacagcagctacgcgcacagccagagcctggaccggctgatgaaccctctcatcgaccagtacttgtactacctgtcccggactcaaagcacgggcggtactgcaggaactcagcagttgctattttctcaggccgggcctaacaacatgtcggctcaggccaagaactggctacccggtccctgctaccggcagcaacgcgtctccacgacactgtcgcagaacaacaacagcaactttgcctggacgggtgccaccaagtatcatctgaatggcagagactctctggtgaatcctggcgttgccatggctacccacagggacgacgaagagcgattttttccatccagcggagtcttaatgtttgggaaacagggagctggaagagacaacgtggactatagcagcgtgatgctaaccagcgaggaagaaataaggaccaccaacccagtggccacagaacagtacggcgtggtggccgataacctgcaacagcaaaacgccgctcctattgtaggggccgtcaatagtcaaggagccttacctggcatggtgtggcagaaccgggacgtgtacctgcagggtcccatctgggccaagattcctcatacggacggcaactttcatccctcgccgctgatgggaggctttggactgaagcatccgcctcctcagatcctgattaaaaacacacctgttcccgcggatcctccgaccaccttcaatcaggccaagctggcttctttcatcacgcagtacagtaccggccaggtcagcgtggagatcgagtgggagctgcagaaggagaacagcaaacgctggaacccagagattcagtacacttccaactactacaaatctacaaatgtggactttgctgtcaatactgagggtacttattccgagcctcgccccattggcacccgttacctcacccgtaatctgtaa

SEQ ID NO: 907 - DNA, 2217 bp, Artificial Sequence
  Description of Artificial Sequence: Synthetic polynucleotide
atggctgccgatggttatcttccagattggctcgaggacaacctctctgagggcattcgcgagtggtgggacctgaaacctggagccccgaaacccaaagccaaccagcaaaggcaggacaacggccggggtctggtgcttcctggctacaggtacctcggacccttcaacggactcgacaagggggagcccgtcaacgcggcggacgcagcggccctcgagcacgacagggcctacgaccagcagctccaagcgggtgacaatccgtacctgcggtataatcacgccgacgccgagtttcaggagcgtctgcaagaagatacgtcttttgggggcaacctcgggcgcgcagtcttccaggccaaaaagcgggttctcgaacctctgggcctggttgaatcgccggttaggacggctcctggaaagaagagaccggtagagccatcaccccagcgctctccagactcctctacgggcatcggcaagagaggccagcagcccgcaaaaaagagactcaattttgggcagactggcgactcagagtcagtccccgaccctcaaccaatcggagaaccaccagcagccccctctggtgtgggacctaatacaatggctgcaggcggtggcgctccaatggcagacaataacgaaggcgccgacggagtgggtagttcctcaggaaattggcattgcgattccacatggctgggcgacagagtcatcaccaccagcacccgcacctgggccctgcccacctacaacaaccacctctacaggcaaatctccaacgggacctcgggaggaagcaccaacgacaacacctacttcggctacagcaccccctgggggtattttgacttcaacagattccactgccacttttcaccacgtgactggcagcgactcatcaacaacaactggggattccggcccaagaggctcaacttcaagctcttcaacatccaagtcaaggaggtcacgcagaatgaaggcaccaggaccatcgccaataaccttaccagcacgattcaggtctttacggactcggaataccagctcccgtacgtgctcggctcggcgcaccagggctgcctgcctccgttcccggcggacgtcttcatgattcctcagtacgggtacctgactctgaacaatggcagtcaggctgtgggccggtcgtccttctactgcctggagtactttccttctcaaatgctgagaacgggcaacaactttgaattcagctacaacttcgaggacgtgcccttccacagcagctacgcgcacagccagagcctggaccggctgatgaaccctctcatcgaccagtacttgtactacctgtcccggactcaaagcacgggcggtactgcaggaactcagcagttgctattttctcaggccgggcctaacaacatgtcggctcaggccaagaactggctacccggtccctgctaccggcagcaacgcgtctccacgacactgtcgcagaacaacaacagcaactttgcctggacgggtgccaccaagtatcatctgaatggcagagactctctggtgaatcctggcgttgccatggctacccacagggacgacgaagagcgattttttccatccagcggagtcttaatgtttgggagacagggagctggaagagacaacgtggactatagcagcgtgatgctaaccagcgaggaagaaataaggaccaccaacccagtggccacagaacagtacggcgtggtggccgataacctgcaacagcaaaacgccgctcctattgtaggggccgtcaatagtcaaggagccttacctggcatggtgtggcagaaccgggacgtgtacctgcagggtcccatctgggccaagattcctcatacggacggcaactttcatccctcgccgctgatgggaggctttggactgaagcatccgcctcctcagatcctgattaaaaacacacctgttcccgcggatcctccgaccaccttcaatcaggccaagctggcttctttcatcacgcagtacagtaccggccaggtcagcgtggagatcgagtgggagctgcagaaggagaacagcaaacgctggaacccagagattcagtacacttccaactactacaaatctacaaatgtggactttgctgtcaatactgagggtacttattccgagcctcgccccattggcacccgttacctcacccgtaatctgtaa

SEQ ID NO: 908 - DNA, 2217 bp, Artificial Sequence
  Description of Artificial Sequence: Synthetic polynucleotide
atggctgccgatggttatcttccagattggctcgaggacaacctctctgagggcattcgcgagtggtgggacctgaaacctggagccccgaaacccaaagccaaccagcaaaggcaggacaacggccggggtctggtgcttcctggctacaggtacctcggacccttcaacggactcgacaagggggagcccgtcaacgcggcggacgcagcggccctcgagcacgacagggcctacgaccagcagctccaagcgggtgacaatccgtacctgcggtataatcacgccgacgccgagtttcaggagcgtctgcaagaagatacgtcttttgggggcaacctcgggcgcgcagtcttccaggccaaaaagcgggttctcgaacctctgggcctggttgaatcgccggttaggacggctcctggaaagaagagaccggtagagccatcaccccagcgctctccagactcctctacgggcatcggcaagagaggccagcagcccgcaaaaaagagactcaattttgggcagactggcgactcagagtcagtccccgaccctcaaccaatcggagaaccaccagcagccccctctggtgtgggacctaatacaatggctgcaggcggtggcgctccaatggcagacaataacgaaggcgccgacggagtgggtagttcctcaggaaattggcattgcgattccacatggctgggcgacagagtcatcaccaccagcacccgcacctgggccctgcccacctacaacaaccacctctacaggcaaatctccaacgggacctcgggaggaagcaccaacgacaacacctacttcggctacagcaccccctgggggtattttgacttcaacagattccactgccacttttcaccacgtgactggcagcgactcatcaacaacaactggggattccggcccaagaggctcaacttcaagctcttcaacatccaagtcaaggaggtcacgcagaatgaaggcaccaggaccatcgccaataaccttaccagcacgattcaggtctttacggactcggaataccagctcccgtacgtgctcggctcggcgcaccagggctgcctgcctccgttcccggcggacgtcttcatgattcctcagtacgggtacctgactctgaacaatggcagtcaggctgtgggccggtcgtccttctactgcctggagtactttccttctcaaatgctgagaacgggcaacaactttgaattcagctacaacttcgaggacgtgcccttccacagcagctacgcgcacagccagagcctggaccggctgatgaaccctctcatcgaccagtacttgtactacctgtcccggactcaaagcacgggcggtactgcaggaactcagcagttgctattttctcaggccgggcctaacaacatgtcggctcaggccaagaactggctacccggtccctgctaccggcagcaacgcgtctccacgacactgtcgcagaacaacaacagcaactttgcctggacgggtgccaccaagtatcatctgaatggcagagactctctggtgaatcctggcgttgccatggctacccacagggacgacgaagagcgattttttccatccagcggagtcttaatgtttgggaaacagggagctggaagagacaacgtggactatagcagcgtgatgctaaccagcgaggaagaaataaggaccaccaacccagtggccacagaacagtacggcgtggtggccgataacctgcaacagcaaaacgccgctcctattgtaggggccgtcaatagtcaaggagccttacctggcatggtgtggcagaaccgggacgtgtacctgcagggtcccatctgggccaagattcctcatacggacggcaactttcatccctcgccgctgatgggaggctttggactgaagcatccgcctcctcagatcctgattaaaaacacacctgttcccgcggatcctccgaccaccttcaatcaggccaggctggcttctttcatcacgcagtacagtaccggccaggtcagcgtggagatcgagtgggagctgcagaaggagaacagcaaacgctggaacccagagattcagtacacttccaactactacaaatctacaaatgtggactttgctgtcaatactgagggtacttattccgagcctcgccccattggcacccgttacctcacccgtaatctgtaa

SEQ ID NO: 909 - DNA, 2217 bp, Artificial Sequence
  Description of Artificial Sequence: Synthetic polynucleotide
atggctgccgatggttatcttccagattggctcgaggacaacctctctgagggcattcgcgagtggtgggacctgaaacctggagccccgaaacccaaagccaaccagcaaaggcaggacaacggccggggtctggtgcttcctggctacaggtacctcggacccttcaacggactcgacaagggggagcccgtcaacgcggcggacgcagcggccctcgagcacgacagggcctacgaccagcagctccaagcgggtgacaatccgtacctgcggtataatcacgccgacgccgagtttcaggagcgtctgcaagaagatacgtcttttgggggcaacctcgggcgcgcagtcttccaggccaaaaagcgggttctcgaacctctgggcctggttgaatcgccggttaggacggctcctggaaagaagagaccggtagagccatcaccccagcgctctccagactcctctacgggcatcggcaagaaaggccagcagcccgcaaaaaagagactcaattttgggcagactggcgactcagagtcagtccccgaccctcaaccaatcggagaaccaccagcagccccctctggtgtgggacctaatacaatggctgcaggcggtggcgctccaatggcagacaataacgaaggcgccgacggagtgggtagttcctcaggaaattggcattgcgattccacatggctgggcgacagagtcatcaccaccagcacccgcacctgggccctgcccacctacaacaaccacctctacaggcaaatctccaacgggacctcgggaggaagcaccaacgacaacacctacttcggctacagcaccccctgggggtattttgacttcaacagattccactgccacttttcaccacgtgactggcagcgactcatcaacaacaactggggattccggcccaagaggctcaacttcaagctcttcaacatccaagtcaaggaggtcacgcagaatgaaggcaccaggaccatcgccaataaccttaccagcacgattcaggtctttacggactcggaataccagctcccgtacgtgctcggctcggcgcaccagggctgcctgcctccgttcccggcggacgtcttcatgattcctcagtacgggtacctgactctgaacaatggcagtcaggctgtgggccggtcgtccttctactgcctggagtactttccttctcaaatgctgagaacgggcaacaactttgaattcagctacaacttcgaggacgtgcccttccacagcagctacgcgcacagccagagcctggaccggctgatgaaccctctcatcgaccagtacttgtactacctgtcccggactcaaagcacgggcggtactgcaggaactcagcagttgctattttctcaggccgggcctaacaacatgtcggctcaggccaagaactggctacccggtccctgctaccggcagcaacgcgtctccacgacactgtcgcagaacaacaacagcaactttgcctggacgggtgccaccaagtatcatctgaatggcagagactctctggtgaatcctggcgttgccatggctacccacagggacgacgaagagcgattttttccatccagcggagtcttaatgtttgggagacagggagctggaagagacaacgtggactatagcagcgtgatgctaaccagcgaggaagaaataaggaccaccaacccagtggccacagaacagtacggcgtggtggccgataacctgcaacagcaaaacgccgctcctattgtaggggccgtcaatagtcaaggagccttacctggcatggtgtggcagaaccgggacgtgtacctgcagggtcccatctgggccaagattcctcatacggacggcaactttcatccctcgccgctgatgggaggctttggactgaagcatccgcctcctcagatcctgattaaaaacacacctgttcccgcggatcctccgaccaccttcaatcaggccaggctggcttctttcatcacgcagtacagtaccggccaggtcagcgtggagatcgagtgggagctgcagaaggagaacagcaaacgctggaacccagagattcagtacacttccaactactacaaatctacaaatgtggactttgctgtcaatactgagggtacttattccgagcctcgccccattggcacccgttacctcacccgtaatctgtaa

SEQ ID NO: 910 - protein, 744 aa, Artificial Sequence
  Description of Artificial Sequence: Synthetic polypeptide
MAADGYLPDWLEDTLSEGIRQWWKLKPGPPPPKPAERHKDDSRGLVLPGYKYLGPFNGLDKGEPVNEADAAALEHDKAYDRQLDSGDNPYLKYNHADAEFQERLKEDTSFGGNLGRAVFQAKKRVLEPLGLVEEPVKTAPGKKRPVEHSPVEPDSSSGTGKAGQQPARKRLNFGQTGDADSVPDPQPLGQPPAAPSGLGTNTMATGSGAPMADNNEGADGVGNSSGNWHCDSTWMGDRVITTSTRTWALPTYNNHLYKQISSQSGASNDNHYFGYSTPWGYFDFNRFHCHFSPRDWQRLINNNWGFRPKRLNFKLFNIQVKEVTQNDGTTTIANNLTSTVQVFTDSEYQLPYVLGSAHQGCLPPFPADVFMVPQYGYLTLNNGSQAVGRSSFYCLEYFPSQMLRTGNNFTFSYTFEDVPFHSSYAHSQSLDRLMNPLIDQYLYYLSRTNTPSGTTTQSRLQFSQAGASDIRDQSRNWLPGPCYRQQRVSKTSADNNNSEYSWTGATKYHLNGRDSLVNPGPAMASHKDDEEKFFPQSGVLIFGKQGSEKTNVDIEKVMITDEEEIRTTNPVATEQYGSVSTNLQRGQRGESGHGYFAQAATADVNTQGVLPGMVWQDRDVYLQGPIWAKIPHTDGHFHPSPLMGGFGLKHPPPQILIKNTPVPANPSTTFSAAKFASFITQYSTGQVSVEIEWELQKENSKRWNPEIQYTSNYNKSVNVDFTVDTNGVYSEPRPIGTRYLTRNL

SEQ ID NO: 911 - DNA, 8359 bp, Artificial Sequence
  Description of Artificial Sequence: Synthetic polynucleotide
catcatcaataatataccttattttggattgaagccaatatgataatgagggggtggagtttgtgacgtggcgcggggcgtgggaacggggcgggtgacgtagtagctctagaggtcctgtattagaggtcacgtgagtgttttgcgacattttgcgacaccatgtggtcacgctgggtatttaagcccgagtgagcacgcagggtctccattttgaagcgggaggtttgaacgcgcagccgccatgccggggttttacgagattgtgattaaggtccccagcgaccttgacgagcatctgcccggcatttctgacagctttgtgaactgggtggccgagaaggaatgggagttgccgccagattctgacatggatctgaatctgattgagcaggcacccctgaccgtggccgagaagctgcagcgcgactttctgacggaatggcgccgtgtgagtaaggcaccggaggcccttttctttgtgcaatttgagaagggagagagctacttccacatgcacgtgctcgtggaaaccaccggggtgaaatccatggttttgggacgtttcctgagtcagattcgcgaaaaactgattcagagaatttaccgcgggatcgagccgactttgccaaactggttcgcggtcacaaagaccagaaatggcgccggaggcgggaacaaggtggtggatgagtgctacatccccaattacttgctccccaaaacccagcctgagctccagtgggcgtggactaatatggaacagtatttaagcgcctgtttgaatctcacggagcgtaaacggttggtggcgcagcatctgacgcacgtgtcgcagacgcaggagcagaacaaagagaatcagaatcccaattctgatgcgccggtgatcagatcaaaaacttcagccaggtacatggagctggtcgggtggctcgtggacaaggggattacctcggagaagcagtggatccaggaggaccaggcctcatacatctccttcaatgcggcctccaactcgcggtcccaaatcaaggctgccttggacaatgcgggaaagattatgagcctgactaaaaccgcccccgactacctggtgggccagcagcccgtggaggacatttccagcaatcggatttataaaattttggaactaaacgggtacgatccccaatatgcggcttccgtctttctgggatgggccacgaaaaagttcggcaagaggaacaccatctggctgtttgggcctgcaactaccgggaagaccaacatcgcggaggccatagcccacactgtgcccttctacgggtgcgtaaactggaccaatgagaactttcccttcaacgactgtgtcgacaagatggtgatctggtgggaggaggggaagatgaccgccaaggtcgtggagtcggccaaagccattctcggaggaagcaaggtgcgcgtggaccagaaatgcaagtcctcggcccagatagacccgactcccgtgatcgtcacctccaacaccaacatgtgcgccgtgattgacgggaactcaacgaccttcgaacaccagcagccgttgcaagaccggatgttcaaatttgaactcacccgccgtctggatcatgactttgggaaggtcaccaagcaggaagtcaaagactttttccggtgggcaaaggatcacgtggttgaggtggagcatgaattctacgtcaaaaagggtggagccaagaaaagacccgcccccagtgacgcagatataagtgagcccaaacgggtgcgcgagtcagttgcgcagccatcgacgtcagacgcggaagcttcgatcaactacgcagacaggtaccaaaacaaatgttctcgtcacgtgggcatgaatctgatgctgtttccctgcagacaatgcgagagaatgaatcagaattcaaatatctgcttcactcacggacagaaagactgtttagagtgctttcccgtgtcagaatctcaacccgtttctgtcgtcaaaaaggcgtatcagaaactgtgctacattcatcatatcatgggaaaggtgccagacgcttgcactgcctgcgatctggtcaatgtggatttggatgactgcatctttgaacaataaatgatttaaatcaggtatggctgccgatggttatcttccagattggctcgaggacactctctctgaaggaataagacagtggtggaagctcaaacctggcccaccaccaccaaagcccgcagagcggcataaggacgacagcaggggtcttgtgcttcctgggtacaagtacctcggacccttcaacggactcgacaagggagagccggtcaacgaggcagacgccgcggccctcgagcacgacaaagcctacgaccggcagctcgacagcggagacaacccgtacctcaagtacaaccacgccgacgcggagtttcaggagcgccttaaagaagatacgtcttttgggggcaacctcggacgagcagtcttccaggcgaaaaagagggttcttgaacctctgggcctggttgaggaacctgttaagacggctccgggaaaaaagaggccggtagagcactctcctgtggagccagactcctcctcgggaaccggaaaggcgggccagcagcctgcaagaaaaagattgaattttggtcagactggagacgcagactcagtacctgacccccagcctctcggacagccaccagcagccccctctggtctgggaactaatacgatggctacaggcagtggcgcaccaatggcagacaataacgagggcgccgacggagtgggtaattcctcgggaaattggcattgcgattccacatggatgggcgacagagtcatcaccaccagcacccgaacctgggccctgcccacctacaacaaccacctctacaaacaaatttccagccaatcaggagcctcgaacgacaatcactactttggctacagcaccccttgggggtattttgacttcaacagattccactgccacttttcaccacgtgactggcaaagactcatcaacaacaactggggattccgacccaagagactcaacttcaagctctttaacattcaagtcaaagaggtcacgcagaatgacggtacgacgacgattgccaataaccttaccagcacggttcaggtgtttactgactcggagtaccagctcccgtacgtcctcggctcggcgcatcaaggatgcctcccgccgttcccagcagacgtcttcatggtgccacagtatggatacctcaccctgaacaacgggagtcaggcagtaggacgctcttcattttactgcctggagtactttccttctcagatgctgcgtaccggaaacaactttaccttcagctacacttttgaggacgttcctttccacagcagctacgctcacagccagagtctggaccgtctcatgaatcctctcatcgaccagtacctgtattacttgagcagaacaaacactccaagtggaaccaccacgcagtcaaggcttcagttttctcaggccggagcgagtgacattcgggaccagtctaggaactggcttcctggaccctgttaccgccagcagcgagtatcaaagacatctgcggataacaacaacagtgaatactcgtggactggagctaccaagtaccacctcaatggcagagactctctggtgaatccgggcccggccatggcaagccacaaggacgatgaagaaaagttttttcctcagagcggggttctcatctttgggaagcaaggctcagagaaaacaaatgtggacattgaaaaggtcatgattacagacgaagaggaaatcaggacaaccaatcccgtggctacggagcagtatggttctgtatctaccaacctccagagaggccagagaggcgagtctggtcatggttattttgcccaggcggccaccgcagatgtcaacacacaaggcgttcttccaggcatggtctggcaggacagagatgtgtaccttcaggggcccatctgggcaaagattccacacacggacggacattttcacccctctcccctcatgggtggattcggacttaaacaccctcctccacagattctcatcaagaacaccccggtacctgcgaatccttcgaccaccttcagtgcggcaaagtttgcttccttcatcacacagtactccacgggacaggtcagcgtggagatcgagtgggagctgcagaaggaaaacagcaaacgctggaatcccgaaattcagtacacttccaactacaacaagtctgttaatgtggactttactgtggacactaatggcgtgtattcagagcctcgccccattggcaccagatacctgactcgtaatctgtaattgcttgttaatcaataaaccgtttaattcgtttcagttgaactttggtctctgcgtatttctttcttatctagtttccatgctctagaggtcctgtattagaggtcacgtgagtgttttgcgacattttgcgacaccatgtggtcacgctgggtatttaagcccgagtgagcacgcagggtctccattttgaagcgggaggtttgaacgcgcagccaccacggcggggttttacgagattgtgattaaggtccccagcgaccttgacgagcatctgcccggcatttctgacagctttgtgaactgggtggccgagaaggaatgggagttgccgccagattctgacatggatctgaatctgattgagcaggcacccctgaccgtggccgagaagctgcatcgctggcgtaatagcgaagaggcccgcaccgatcgcccttcccaacagttgcgcagcctgaatggcgaatggcgattccgttgcaatggctggcggtaatattgttctggatattaccagcaaggccgatagtttgagttcttctactcaggcaagtgatgttattactaatcaaagaagtattgcgacaacggttaatttgcgtgatggacagactcttttactcggtggcctcactgattataaaaacacttctcaggattctggcgtaccgttcctgtctaaaatccctttaatcggcctcctgtttagctcccgctctgattctaacgaggaaagcacgttatacgtgctcgtcaaagcaaccatagtacgcgccctgtagcggcgcattaagcgcggcgggtgtggtggttacgcgcagcgtgaccgctacacttgccagcgccctagcgcccgctcctttcgctttcttcccttcctttctcgccacgttcgccggctttccccgtcaagctctaaatcgggggctccctttagggttccgatttagtgctttacggcacctcgaccccaaaaaacttgattagggtgatggttcacgtagtgggccatcgccctgatagacggtttttcgccctttgacgttggagtccacgttctttaatagtggactcttgttccaaactggaacaacactcaaccctatctcggtctattcttttgatttataagggattttgccgatttcggcctattggttaaaaaatgagctgatttaacaaaaatttaacgcgaattttaacaaaatattaacgtttacaatttaaatatttgcttatacaatcttcctgtttttggggcttttctgattatcaaccggggtacatatgattgacatgctagttttacgattaccgttcatcgattctcttgtttgctccagactctcaggcaatgacctgatagcctttgtagagacctctcaaaaatagctaccctctccggcatgaatttatcagctagaacggttgaatatcatattgatggtgatttgactgtctccggcctttctcacccgtttgaatctttacctacacattactcaggcattgcatttaaaatatatgagggttctaaaaatttttatccttgcgttgaaataaaggcttctcccgcaaaagtattacagggtcataatgtttttggtacaaccgatttagctttatgctctgaggctttattgcttaattttgctaattctttgccttgcctgtatgatttattggatgttggaattcctgatgcggtattttctccttacgcatctgtgcggtatttcacaccgcatatggtgcactctcagtacaatctgctctgatgccgcatagttaagccagccccgacacccgccaacacccgctgacgcgccctgacgggcttgtctgctcccggcatccgcttacagacaagctgtgaccgtctccgggagctgcatgtgtcagaggttttcaccgtcatcaccgaaacgcgcgagacgaaagggcctcgtgatacgcctatttttataggttaatgtcatgataataatggtttcttagacgtcaggtggcacttttcggggaaatgtgcgcggaacccctatttgtttatttttctaaatacattcaaatatgtatccgctcatgagacaataaccctgataaatgcttcaataatattgaaaaaggaagagtatgagtattcaacatttccgtgtcgcccttattcccttttttgcggcattttgccttcctgtttttgctcacccagaaacgctggtgaaagtaaaagatgctgaagatcagttgggtgcacgagtgggttacatcgaactggatctcaacagcggtaagatccttgagagttttcgccccgaagaacgttttccaatgatgagcacttttaaagttctgctatgtggcgcggtattatcccgtattgacgccgggcaagagcaactcggtcgccgcatacactattctcagaatgacttggttgagtactcaccagtcacagaaaagcatcttacggatggcatgacagtaagagaattatgcagtgctgccataaccatgagtgataacactgcggccaacttacttctgacaacgatcggaggaccgaaggagctaaccgcttttttgcacaacatgggggatcatgtaactcgccttgatcgttgggaaccggagctgaatgaagccataccaaacgacgagcgtgacaccacgatgcctgtagcaatggcaacaacgttgcgcaaactattaactggcgaactacttactctagcttcccggcaacaattaatagactggatggaggcggataaagttgcaggaccacttctgcgctcggcccttccggctggctggtttattgctgataaatctggagccggtgagcgtgggtctcgcggtatcattgcagcactggggccagatggtaagccctcccgtatcgtagttatctacacgacggggagtcaggcaactatggatgaacgaaatagacagatcgctgagataggtgcctcactgattaagcattggtaactgtcagaccaagtttactcatatatactttagattgatttaaaacttcatttttaatttaaaaggatctaggtgaagatcctttttgataatctcatgaccaaaatcccttaacgtgagttttcgttccactgagcgtcagaccccgtagaaaagatcaaaggatcttcttgagatcctttttttctgcgcgtaatctgctgcttgcaaacaaaaaaaccaccgctaccagcggtggtttgtttgccggatcaagagctaccaactctttttccgaaggtaactggcttcagcagagcgcagataccaaatactgtccttctagtgtagccgtagttaggccaccacttcaagaactctgtagcaccgcctacatacctcgctctgctaatcctgttaccagtggctgctgccagtggcgataagtcgtgtcttaccgggttggactcaagacgatagttaccggataaggcgcagcggtcgggctgaacggggggttcgtgcacacagcccagcttggagcgaacgacctacaccgaactgagatacctacagcgtgagctatgagaaagcgccacgcttcccgaagggagaaaggcggacaggtatccggtaagcggcagggtcggaacaggagagcgcacgagggagcttccagggggaaacgcctggtatctttatagtcctgtcgggtttcgccacctctgacttgagcgtcgatttttgtgatgctcgtcaggggggcggagcctatggaaaaacgccagcaacgcggcctttttacggttcctggccttttgctggccttttgctcacatgttctttcctgcgttatcccctgattctgtggataaccgtattaccgcctttgagtgagctgataccgctcgccgcagccgaacgaccgagcgcagcgagtcagtgagcgaggaagcggaagagcgcccaatacgcaaaccgcctctccccgcgcgttggccgattcattaatgcagaattcc

SEQ ID NO: 912 - protein, 736 aa, Artificial Sequence
  Description of Artificial Sequence: Synthetic polypeptide
  MOD_RES (168)..(168): Lys or Arg
  MOD_RES (204)..(204): Ala or Ser
  MOD_RES (266)..(266): Ala or Gly
  MOD_RES (311)..(311): Arg or Lys
  MOD_RES (411)..(411): Glu or Gln
  MOD_RES (460)..(460): Thr or Glu
  MOD_RES (493)..(493): Ala or Thr
  MOD_RES (562)..(562): Ser or Asn
  MOD_RES (576)..(576): Gln or Glu
  MOD_RES (587)..(587): Ser or Ala
  MOD_RES (609)..(609): Asn or Asp
MAADGYLPDWLEDNLSEGIREWWDLKPGAPKPKANQQKQDDGRGLVLPGYKYLGPFNGLDKGEPVNAADAAALEHDKAYDQQLKAGDNPYLRYNHADAEFQERLQEDTSFGGNLGRAVFQAKKRVLEPLGLVEEGAKTAPGKKRPVEQSPQEPDSSSGIGKKGQQPAXKRLNFGQTGDSESVPDPQPLGEPPAAPSGVGSNTMXAGGGAPMADNNEGADGVGNASGNWHCDSTWLGDRVITTSTRTWALPTYNNHLYKQISSQSGXSTNDNTYFGYSTPWGYFDFNRFHCHFSPRDWQRLINNNWGFRPKXLNFKLFNIQVKEVTTNDGTTTIANNLTSTVQVFTDSEYQLPYVLGSAHQGCLPPFPADVFMIPQYGYLTLNNGSQAVGRSSFYCLEYFPSQMLRTGNNFXFSYTFEDVPFHSSYAHSQSLDRLMNPLIDQYLYYLSRTQTTSGTAGNRXLQFSQAGPSSMANQAKNWLPGPCYRQQRVSKTXNQNNNSNFAWTGATKYHLNGRDSLVNPGPAMATHKDDEDKFFPMSGVLIFGKQGAGNSNVDLDNVMITXEEEIKTTNPVATEXYGTVATNLQSXNTAPATGTVNSQGALPGMVWQXRDVYLQGPIWAKIPHTDGHFHPSPLMGGFGLKHPPPQILIKNTPVPANPPTTFSPAKFASFITQYSTGQVSVEIEWELQKENSKRWNPEIQYTSNYNKSTNVDFAVDTNGVYSEPRPIGTRYLTRNL

SEQ ID NO: 913 - DNA, 2208 bp, Artificial Sequence
  Description of Artificial Sequence: Synthetic polynucleotide
  misc_feature (502)..(504): This region may encompass "aag" or "agg"
  misc_feature (610)..(612): This region may encompass "gca" or "agc"
  misc_feature (796)..(798): This region may encompass "gca" or "ggc"
  misc_feature (931)..(933): This region may encompass "aga" or "aag"
  misc_feature (1231)..(1233): This region may encompass "gag" or "cag"
  misc_feature (1378)..(1380): This region may encompass "acg" or "gag"
  misc_feature (1477)..(1479): This region may encompass "gcg" or "acc"
  misc_feature (1684)..(1686): This region may encompass "agt" or "aac"
  misc_feature (1726)..(1728): This region may encompass "cag" or "gag"
  misc_feature (1759)..(1761): This region may encompass "tca" or "gcc"
  misc_feature (1825)..(1827): This region may encompass "aac" or "gac"
atggctgccgatggttatcttccagattggctcgaggacaacctctctgagggcattcgcgagtggtgggacttgaaacctggagccccgaaacccaaagccaaccagcaaaagcaggacgacggccggggtctggtgcttcctggctacaagtacctcggacccttcaacggactcgacaagggggagcccgtcaacgcggcggacgcagcggccctcgagcacgacaaggcctacgaccagcagctcaaagcgggtgacaatccgtacctgcggtataaccacgccgacgccgagtttcaggagcgtctgcaagaagatacgtcttttgggggcaacctcgggcgagcagtcttccaggccaagaagcgggttctcgaacctctcggtctggttgaggaaggcgctaagacggctcctggaaagaagagaccggtagagcaatcaccccaggaaccagactcctcttcgggcatcggcaagaaaggccagcagcccgcgnnnaagagactcaactttgggcagacaggcgactcagagtcagtgcccgaccctcaaccactcggagaaccccccgcagccccctctggtgtgggatctaatacaatgnnngcaggcggtggcgctccaatggcagacaataacgaaggcgccgacggagtgggtaacgcctcaggaaattggcattgcgattccacatggctgggcgacagagtcatcaccaccagcacccgaacctgggccctccccacctacaacaaccacctctacaagcaaatctccagccaatcgggannnagcaccaacgacaacacctacttcggctacagcaccccctgggggtattttgactttaacagattccactgccacttctcaccacgtgactggcagcgactcatcaacaacaactggggattccggcccaagnnnctcaacttcaagctcttcaacatccaggtcaaggaggtcacgacgaatgatggcaccacgaccatcgccaataaccttaccagcacggttcaggtctttacggactcggaataccagctcccgtacgtcctcggctctgcgcaccagggctgcctgcctccgttcccggcggacgtcttcatgattcctcagtacgggtacctgactctgaacaatggcagtcaggccgtgggccgttcctccttctactgcctggagtactttccttctcaaatgctgagaacgggcaacaactttnnnttcagctacacgtttgaggacgtgccttttcacagcagctacgcgcacagccaaagcctggaccggctgatgaaccccctcatcgaccagtacctgtactacctgtctcggactcagaccacgagtggtaccgcaggaaatcggnnnttgcaattttctcaggccgggcctagtagcatggcgaatcaggccaaaaactggctacccgggccctgctaccggcagcaacgcgtctccaagacannnaatcaaaataacaacagcaactttgcctggaccggtgccaccaagtatcatctgaatggcagagactctctggtaaatcccggtcccgctatggcaacccacaaggacgacgaagacaaattttttccgatgagcggagtcttaatatttgggaaacagggagctggaaatagcaacgtggaccttgacaacgttatgataaccnnngaggaagaaattaaaaccaccaacccagtggccacagaannntacggcacggtggccactaacctgcaatcgnnnaacaccgctcctgctacagggaccgtcaacagtcaaggagccttacctggcatggtctggcagnnncgggacgtgtacctgcagggtcctatctgggccaagattcctcacacggacggacactttcatccctcgccgctgatgggaggctttggactgaaacacccgcctcctcagatcctgattaagaatacacctgttcccgcgaatcctccaactaccttcagtccagctaagtttgcgtcgttcatcacgcagtacagcaccggacaggtcagcgtggaaattgaatgggagctgcagaaagaaaacagcaaacgctggaacccagagattcaatacacttccaactacaacaaatctacaaatgtggactttgctgttgacacaaatggcgtttattctgagcctcgccccatcggcacccgttacctcacccgtaatctg

SEQ ID NO: 914 - protein, 737 aa, Artificial Sequence
  Description of Artificial Sequence: Synthetic polypeptide
  MOD_RES (157)..(157): Thr or Ser
  MOD_RES (168)..(168): Lys or Arg
  MOD_RES (262)..(262): Asn or Ser
  MOD_RES (263)..(263): Ser or His
  MOD_RES (312)..(312): Arg or Lys
  MOD_RES (412)..(412): Glu or Gln
  MOD_RES (460)..(460): Arg or Gln
  MOD_RES (461)..(461): Thr or Glu
  MOD_RES (552)..(552): Asp or Ser
  MOD_RES (556)..(556): Leu or Tyr
  MOD_RES (557)..(557): Asp or Ser
  MOD_RES (563)..(563): Ser or Asn
  MOD_RES (580)..(580): Val or Ile
  MOD_RES (588)..(588): Ala or Ser
  MOD_RES (664)..(664): Ser or Thr
MAADGYLPDWLEDNLSEGIREWWDLKPGAPKPKANQQKQDDGRGLVLPGYKYLGPFNGLDKGEPVNAADAAALEHDKAYDQQLKAGDNPYLRYNHADAEFQERLQEDTSFGGNLGRAVFQAKKRVLEPLGLVEEGAKTAPGKKRPVEQSPQEPDSSXGIGKKGQQPAXKRLNFGQTGDSESVPDPQPLGEPPAAPSGVGSNTMAAGGGAPMADNNEGADGVGNASGNWHCDSTWLGDRVITTSTRTWALPTYNNHLYKQISXXQSGGSTNDNTYFGYSTPWGYFDFNRFHCHFSPRDWQRLINNNWGFRPKXLNFKLFNIQVKEVTTNDGTTTIANNLTSTVQVFTDSEYQLPYVLGSAHQGCLPPFPADVFMIPQYGYLTLNNGSQAVGRSSFYCLEYFPSQMLRTGNNFXFSYTFEDVPFHSSYAHSQSLDRLMNPLIDQYLYYLSRTQTTGGTAGNXXLQFSQAGPSSMANQAKNWLPGPCYRQQRVSKTTNQNNNSNFAWTGATKYHLNGRDSLVNPGVAMATHKDDEDRFFPSSGVLIFGKQGAGNXNVDXXNVMITXEEEIKTTNPVATEEYGXVATNLQSXNTAPQTGTVNSQGALPGMVWQNRDVYLQGPIWAKIPHTDGNFHPSPLMGGFGLKHPPPQILIKNTPVPANPPTTFXPAKFASFITQYSTGQVSVEIEWELQKENSKRWNPEIQYTSNYNKSTNVDFAVDTEGVYSEPRPIGTRYLTRNL

SEQ ID NO: 915 - DNA, 2211 bp, Artificial Sequence
  Description of Artificial Sequence: Synthetic polynucleotide
  misc_feature (469)..(471): This region may encompass "acg" or "agc"
  misc_feature (502)..(504): This region may encompass "aaa" or "aga"
  misc_feature (784)..(786): This region may encompass "aac" or "agt"
  misc_feature (787)..(789): This region may encompass "agc" or "cac"
  misc_feature (934)..(936): This region may encompass "aga" or "aag"
  misc_feature (1234)..(1236): This region may encompass "gag" or "cag"
  misc_feature (1378)..(1380): This region may encompass "cgg" or "cag"
  misc_feature (1381)..(1383): This region may encompass "acg" or "gag"
  misc_feature (1654)..(1656): This region may encompass "gac" or "agc"
  misc_feature (1666)..(1668): This region may encompass "ctt" or "tac"
  misc_feature (1669)..(1671): This region may encompass "gac" or "agc"
  misc_feature (1687)..(1689): This region may encompass "agt" or "aac"
  misc_feature (1738)..(1740): This region may encompass "gtg" or "atc"
  misc_feature (1762)..(1764): This region may encompass "gca" or "agc"
  misc_feature (1990)..(1992): This region may encompass "agt" or "acc"
atggctgccgatggttatcttccagattggctcgaggacaacctctctgagggcattcgcgagtggtgggacttgaaacctggagccccgaaacccaaagccaaccagcaaaagcaggacgacggccggggtctggtgcttcctggctacaagtacctcggacccttcaacggactcgacaagggggagcccgtcaacgcggcggacgcagcggccctcgagcacgacaaggcctacgaccagcagctcaaagcgggtgacaatccgtacctgcggtataaccacgccgacgccgagtttcaggagcgtctgcaagaagatacgtcttttgggggcaacctcgggcgagcagtcttccaggccaagaagcgggttctcgaacctctcggtctggttgaggaaggcgctaagacggctcctggaaagaagagaccggtagagcaatcaccccaggaaccagactcctctnnnggcatcggcaagaaaggccagcagcccgcgnnnaagagactcaactttgggcagactggcgactcagagtcagtgcccgaccctcaaccactcggagaaccccccgcagccccctctggtgtgggatctaatacaatggctgcaggcggtggcgctccaatggcagacaataacgaaggcgccgacggagtgggtaatgcctcaggaaattggcattgcgattccacatggctgggcgacagagtcatcaccaccagcacccgaacctgggccctccccacctacaacaaccacctctacaagcaaatctccnnnnnncaatcgggaggaagcaccaacgacaacacctacttcggctacagcaccccctgggggtattttgactttaacagattccactgccacttctcaccacgtgactggcagcgactcatcaacaacaactggggattccggcccaagnnnctcaacttcaagctcttcaacatccaggtcaaggaggtcacgacgaatgatggcaccacgaccatcgccaataaccttaccagcacggttcaggtctttacggactcggaataccagctcccgtacgtcctcggctctgcgcaccagggctgcctgcctccgttcccggcggacgtcttcatgattcctcagtacgggtacctgactctgaacaatggcagtcaggccgtgggccgttcctccttctactgcctggagtactttccttctcaaatgctgagaacgggcaacaactttnnnttcagctacacgtttgaggacgtgccttttcacagcagctacgcgcacagccaaagcctggaccggctgatgaaccccctcatcgaccagtacctgtactacctgtctcggactcagaccacgggaggtaccgcaggaaatnnnnnnttgcaattttctcaggccgggcctagtagcatggcgaatcaggccaaaaactggctacccgggccctgctaccggcagcaacgcgtctccaagacaacgaatcaaaataacaacagcaactttgcctggaccggtgccaccaagtatcatctgaatggcagagactctctggtaaatcccggtgtcgctatggcaacccacaaggacgacgaagaccgattttttccgtccagcggagtcttaatatttgggaaacagggagctggaaatnnnaacgtggacnnnnnnaacgttatgataaccnnngaggaagaaattaaaaccaccaacccagtggccacagaagagtacggcnnngtggccactaacctgcaatcgnnnaacaccgctcctcaaacagggaccgtcaacagtcaaggagccttacctggcatggtctggcagaaccgggacgtgtacctgcagggtcctatctgggccaagattcctcacacggacggaaactttcatccctcgccgctgatgggaggctttggactgaaacacccgcctcctcagatcctgattaagaatacacctgttcccgcgaatcctccaactaccttcnnnccagctaagtttgcgtcgttcatcacgcagtacagcaccggacaggtcagcgtggaaattgaatgggagctgcagaaagaaaacagcaaacgctggaacccagagattcaatacacttccaactacaacaaatctacaaatgtggactttgctgttgacacagaaggcgtttattctgagcctcgccccatcggcacccgttacctcacccgtaatctg

SEQ ID NO: 916 - protein, 738 aa, Artificial Sequence
  Description of Artificial Sequence: Synthetic polypeptide
  MOD_RES (158)..(158): Thr or Ser
  MOD_RES (169)..(169): Lys or Arg
  MOD_RES (564)..(564): Ser or Asn
MAADGYLPDWLEDNLSEGIREWWDLKPGAPKPKANQQKQDDGRGLVLPGYKYLGPFNGLDKGEPVNAADAAALEHDKAYDQQLKAGDNPYLRYNHADAEFQERLQEDTSFGGNLGRAVFQAKKRVLEPLGLVEEGAKTAPGKKRPVEQSPQREPDSSXGIGKKGQQPAXKRLNFGQTGDSESVPDPQPLGEPPAAPSGVGSNTMAAGGGAPMADNNEGADGVGNSSGNWHCDSTWLGDRVITTSTRTWALPTYNNHLYKQISNGTSGGSTNDNTYFGYSTPWGYFDFNRFHCHFSPRDWQRLINNNWGFRPKRLNFKLFNIQVKEVTTNEGTKTIANNLTSTVQVFTDSEYQLPYVLGSAHQGCLPPFPADVFMIPQYGYLTLNNGSQAVGRSSFYCLEYFPSQMLRTGNNFQFSYTFEDVPFHSSYAHSQSLDRLMNPLIDQYLYYLSRTQTTGGTAGTQTLQFSQAGPSSMANQAKNWLPGPCYRQQRVSTTTNQNNNSNFAWTGATKYHLNGRDSLVNPGVAMATHKDDEDRFFPSSGVLIFGKQGAGNDNVDYSNVMITXEEEIKTTNPVATEEYGVVATNLQSANTAPQTGTVNSQGALPGMVWQNRDVYLQGPIWAKIPHTDGNFHPSPLMGGFGLKHPPPQILIKNTPVPADPPTTFNQAKLNSFITQYSTGQVSVEIEWELQKENSKRWNPEIQYTSNYYKSTNVDFAVNTEGVYSEPRPIGTRYLTRNL

SEQ ID NO: 917 - DNA, 2214 bp, Artificial Sequence
  Description of Artificial Sequence: Synthetic polynucleotide
  misc_feature (472)..(474): This region may encompass "acg" or "agc"
  misc_feature (505)..(507): This region may encompass "aaa" or "aga"
  misc_feature (1690)..(1692): This region may encompass "agc" or "aac"
atggctgccgatggttatcttccagattggctcgaggacaacctctctgagggcattcgcgagtggtgggacctgaaacctggagccccgaaacccaaagccaaccagcaaaagcaggacgacggccggggtctggtgcttcctggctacaagtacctcggacccttcaacggactcgacaagggggagcccgtcaacgcggcggacgcagcggccctcgagcacgacaaggcctacgaccagcagctcaaagcgggtgacaatccgtacctgcggtataatcacgccgacgccgagtttcaggagcgtctgcaagaagatacgtcttttgggggcaacctcgggcgagcagtcttccaggccaagaagcgggttctcgaacctctcggtctggttgaggaaggcgctaagacggctcctggaaagaagagaccggtagagcagtcaccacagcgtgagcccgactcctccnnnggcatcggcaagaaaggccagcagcccgccnnnaagagactcaatttcggtcagactggcgactcagagtcagtccccgaccctcaacctctcggagaacctccagcagcgccctctggtgtgggatctaatacaatggctgcaggcggtggcgcaccaatggcagacaataacgaaggtgccgacggagtgggtaattcctcgggaaattggcattgcgattccacatggctgggcgacagagtcatcaccaccagcacccgaacctgggccctgcccacctacaacaaccacctctacaagcaaatctccaacgggacctcgggaggcagcaccaacgacaacacctactttggctacagcaccccctgggggtattttgactttaacagattccactgccacttctcaccacgtgactggcagcgactcatcaacaacaactggggattccggcccaagagactcaacttcaagctcttcaacatccaggtcaaagaggtcacgacgaatgaaggcaccaagaccatcgccaataacctcaccagcaccgtccaggtgtttacggactcggaataccagctgccgtacgtcctcggctctgcccaccagggctgcctgcctccgttcccggcggacgtcttcatgattcctcagtacggctacctgactctcaacaacggtagtcaggccgtgggacgttcctccttctactgcctggagtacttcccctctcagatgctgagaacgggcaacaactttcaattcagctacactttcgaggacgtgcctttccacagcagctacgcgcacagccagagtttggacaggctgatgaatcctctcatcgaccagtacctgtactacctgtcaagaacccagactacgggaggcacagcgggaacccagacgttgcagttttctcaggccgggcctagcagcatggcgaatcaggccaaaaactggctgcctggaccctgctacagacagcagcgcgtctccacgacaacgaatcaaaacaacaacagcaactttgcctggactggtgccaccaagtatcatctgaacggcagagactctctggtgaatccgggcgtcgccatggcaacccacaaggacgacgaggaccgcttcttcccatccagcggcgtcctcatatttggcaagcagggagctggaaatgacaacgtggactatagcaacgtgatgataaccnnngaggaagaaatcaagaccaccaaccccgtggccacagaagagtatggcgtggtggctactaacctacagtcggcaaacaccgctcctcaaacggggaccgtcaacagccagggagccttacctggcatggtctggcagaaccgggacgtgtacctgcagggtcctatttgggccaagattcctcacacagatggcaactttcacccgtctcctttaatgggcggctttggacttaaacatccgcctcctcagatcctcatcaaaaacactcctgttcctgcggatcctccaacaacgttcaaccaggccaagctgaattctttcatcacgcagtacagcaccggacaagtcagcgtggagatcgagtgggagctgcagaaggagaacagcaagcgctggaacccagagattcagtatacttccaactactacaaatctacaaatgtggactttgctgttaatactgagggtgtttactctgagcctcgccccattggcactcgttacctcacccgtaatctg

SEQ ID NO: 918 - protein, 738 aa, Artificial Sequence
  Description of Artificial Sequence: Synthetic polypeptide
  MOD_RES (158)..(158): Thr or Ser
  MOD_RES (169)..(169): Arg or Lys
  MOD_RES (315)..(315): Asn or Ser
  MOD_RES (413)..(413): Gln or Glu
  MOD_RES (472)..(472): Asn, Thr or Ser
  MOD_RES (534)..(534): Asp or Glu
  MOD_RES (542)..(542): Ile or Val
  MOD_RES (595)..(595): Ile or Val
MAADGYLPDWLEDNLSEGIREWWDLKPGAPKPKANQQKQDDGRGLVLPGYKYLGPFNGLDKGEPVNAADAAALEHDKAYDQQLKAGDNPYLRYNHADAEFQERLQEDTSFGGNLGRAVFQAKKRVLEPLGLVEEGAKTAPGKKRPVEQSPQREPDSSXGIGKKGQQPAXKRLNFGQTGDSESVPDPQPLGEPPAAPSGVGSNTMAAGGGAPMADNNEGADGVGSSSGNWHCDSTWLGDRVITTSTRTWALPTYNNHLYKQISNGTSGGSTNDNTYFGYSTPWGYFDFNRFHCHFSPRDWQRLINNNWGFRPKRLXFKLFNIQVKEVTQNEGTKTIANNLTSTIQVFTDSEYQLPYVLGSAHQGCLPPFPADVFMIPQYGYLTLNNGSQAVGRSSFYCLEYFPSQMLRTGNNFXFSYTFEDVPFHSSYAHSQSLDRLMNPLIDQYLYYLSRTQTTGGTAGTQTLQFSQAGPSXMANQAKNWLPGPCYRQQRVSTTTSQNNNSNFAWTGATKYHLNGRDSLVNPGVAMATHKDDEXRFFPSSGXLIFGKQGAGKDNVDYSNVMLTSEEEIKTTNPVATEEYGVVADNLQQQNTAPQXGTVNSQGALPGMVWQNRDVYLQGPIWAKIPHTDGNFHPSPLMGGFGLKHPPPQILIKNTPVPADPPTTFNQAKLNSFITQYSTGQVSVEIEWELQKENSKRWNPEIQYTSNYYKSTNVDFAVNTEGVYSEPRPIGTRYLTRNL

SEQ ID NO: 919 - DNA, 2214 bp, Artificial Sequence
  Description of Artificial Sequence: Synthetic polynucleotide
  misc_feature (472)..(474): This region may encompass "acg" or "agc"
  misc_feature (505)..(507): This region may encompass "aga" or "aag"
  misc_feature (943)..(945): This region may encompass "aac" or "agc"
  misc_feature (1237)..(1239): This region may encompass "caa" or "gaa"
  misc_feature (1414)..(1416): This region may encompass "acc" or "aac" or "agc"
  misc_feature (1600)..(1602): This region may encompass "gac" or "gag"
  misc_feature (1624)..(1626): This region may encompass "atc" or "gtc"
  misc_feature (1783)..(1785): This region may encompass "ata" or "gta"
atggctgccgatggttatcttccagattggctcgaggacaacctctctgagggcattcgcgagtggtgggacctgaaacctggagccccgaaacccaaagccaaccagcaaaagcaggacgacggccggggtctggtgcttcctggctacaagtacctcggacccttcaacggactcgacaagggggagcccgtcaacgcggcggacgcagcggccctcgagcacgacaaggcctacgaccagcagctcaaagcgggtgacaatccgtacctgcggtataatcacgccgacgccgagtttcaggagcgtctgcaagaagatacgtcttttgggggcaacctcgggcgagcagtcttccaggccaagaagcgggttctcgaacctctcggtctggttgaggaaggcgctaagacggctcctggaaagaagagaccggtagagcagtcaccacagcgtgagcccgactcctccnnnggcatcggcaagaaaggccagcagcccgccnnnaagagactcaatttcggtcagactggcgactcagagtcagtccccgaccctcaacctctcggagaacctccagcagcgccctctggtgtgggatctaatacaatggctgcaggcggtggcgcaccaatggcagacaataacgaaggtgccgacggagtgggtagttcctcgggaaattggcattgcgattccacatggctgggcgacagagtcatcaccaccagcacccgaacctgggccctgcccacctacaacaaccacctctacaagcaaatctccaacgggacctcgggaggcagcaccaacgacaacacctactttggctacagcaccccctgggggtattttgactttaacagattccactgccacttctcaccacgtgactggcagcgactcatcaacaacaactggggattccggcccaagagactcnnnttcaagctcttcaacatccaggtcaaagaggtcacgcagaatgaaggcaccaagaccatcgccaataacctcaccagcaccatccaggtgtttacggactcggaataccagctgccgtacgtcctcggctctgcccaccagggctgcctgcctccgttcccggcggacgtcttcatgattcctcagtacggctacctgactctcaacaacggtagtcaggccgtgggacgttcctccttctactgcctggagtacttcccctctcagatgctgagaacgggcaacaactttnnnttcagctacactttcgaggacgtgcctttccacagcagctacgcgcacagccagagtttggacaggctgatgaatcctctcatcgaccagtacctgtactacctgtcaagaacccagactacgggaggcacagcgggaacccagacgttgcagttttctcaggccgggcctagcnnnatggcgaatcaggccaaaaactggctgcctggaccctgctacagacagcagcgcgtctccacgacaacgtcgcaaaacaacaacagcaactttgcctggactggtgccaccaagtatcatctgaacggcagagactctctggtgaatccgggcgtcgccatggcaacccacaaggacgacgagnnncgcttcttcccatccagcggcnnnctcatatttggcaagcagggagctggaaaagacaacgtggactatagcaacgtgatgctaaccagcgaggaagaaatcaagaccaccaaccccgtggccacagaagagtatggcgtggtggctgataacctacagcagcaaaacaccgctcctcaannngggaccgtcaacagccagggagccttacctggcatggtctggcagaaccgggacgtgtacctgcagggtcctatttgggccaagattcctcacacagatggcaactttcacccgtctcctttaatgggcggctttggacttaaacatccgcctcctcagatcctcatcaaaaacactcctgttcctgcggatcctccaacaacgttcaaccaggccaagctgaattctttcatcacgcagtacagcaccggacaagtcagcgtggagatcgagtgggagctgcagaaggagaacagcaagcgctggaacccagagattcagtatacttccaactactacaaatctacaaatgtggactttgctgttaatactgagggtgtttactctgagcctcgccccattggcactcgttacctcacccgtaatctg

SEQ ID NO: 920 - protein, 738 aa, Artificial Sequence
  Description of Artificial Sequence: Synthetic polypeptide
  MOD_RES (169)..(169): Arg or Lys
  MOD_RES (315)..(315): Asn or Ser
  MOD_RES (534)..(534): Asp or Glu
  MOD_RES (542)..(542): Ile or Val
MAADGYLPDWLEDNLSEGIREWWDLKPGAPKPKANQQKQDDGRGLVLPGYKYLGPFNGLDKGEPVNAADAAALEHDKAYDQQLKAGDNPYLRYNHADAEFQERLQEDTSFGGNLGRAVFQAKKRVLEPLGLVEEGAKTAPGKKRPVEPSPQRSPDSSTGIGKKGQQPAXKRLNFGQTGDSESVPDPQPIGEPPAAPSGVGSGTMAAGGGAPMADNNEGADGVGSSSGNWHCDSTWLGDRVITTSTRTWALPTYNNHLYKQISNGTSGGSTNDNTYFGYSTPWGYFDFNRFHCHFSPRDWQRLINNNWGFRPKRLXFKLFNIQVKEVTQNEGTKTIANNLTSTIQVFTDSEYQLPYVLGSAHQGCLPPFPADVFMIPQYGYLTLNNGSQAVGRSSFYCLEYFPSQMLRTGNNFEFSYTFEDVPFHSSYAHSQSLDRLMNPLIDQYLYYLSRTQSTGGTAGTQQLLFSQAGPSNMSAQAKNWLPGPCYRQQRVSTTLSQNNNSNFAWTGATKYHLNGRDSLVNPGVAMATHKDDEXRFFPSSGXLMFGKQGAGKDNVDYSNVMLTSEEEIKTTNPVATEQYGVVADNLQQQNTAPIVGAVNSQGALPGMVWQNRDVYLQGPIWAKIPHTDGNFHPSPLMGGFGLKHPPPQILIKNTPVPADPPTTFNQAKLNSFITQYSTGQVSVEIEWELQKENSKRWNPEIQYTSNYYKSTNVDFAVNTEGVYSEPRPIGTRYLTRNL

SEQ ID NO: 921 - DNA, 2214 bp, Artificial Sequence
  Description of Artificial Sequence: Synthetic polynucleotide
  misc_feature (505)..(507): This region may encompass "aga" or "aaa"
  misc_feature (943)..(945): This region may encompass "aac" or "agc"
  misc_feature (1600)..(1602): This region may encompass "gac" or "gag"
  misc_feature (1624)..(1626): This region may encompass "atc" or "gtc"
atggctgccgatggttatcttccagattggctcgaggacaacctctctgagggcattcgcgagtggtgggacctgaaacctggagccccgaaacccaaagccaaccagcaaaagcaggacgacggccggggtctggtgcttcctggctacaagtacctcggacccttcaacggactcgacaagggggagcccgtcaacgcggcggacgcagcggccctcgagcacgacaaggcctacgaccagcagctcaaagcgggtgacaatccgtacctgcggtataatcacgccgacgccgagtttcaggagcgtctgcaagaagatacgtcttttgggggcaacctcgggcgagcagtcttccaggccaagaagcgggttctcgaacctctcggtctggttgaggaaggcgctaagacggctcctggaaagaagagaccggtagagccgtcaccacagcgttcccccgactcctccacgggcatcggcaagaaaggccagcagcccgccnnnaagagactcaatttcggtcagactggcgactcagagtcagtccccgaccctcaacctatcggagaacctccagcagcgccctctggtgtgggatctggtacaatggctgcaggcggtggcgcaccaatggcagacaataacgaaggtgccgacggagtgggtagttcctcgggaaattggcattgcgattccacatggctgggcgacagagtcatcaccaccagcacccgaacctgggccctgcccacctacaacaaccacctctacaagcaaatctccaacgggacctcgggaggcagcaccaacgacaacacctactttggctacagcaccccctgggggtattttgactttaacagattccactgccacttctcaccacgtgactggcagcgactcatcaacaacaactggggattccggcccaagagactcnnnttcaagctcttcaacatccaggtcaaagaggtcacgcagaatgaaggcaccaagaccatcgccaataacctcaccagcaccatccaggtgtttacggactcggaataccagctgccgtacgtcctcggctctgcccaccagggctgcctgcctccgttcccggcggacgtcttcatgattcctcagtacggctacctgactctcaacaacggtagtcaggccgtgggacgttcctccttctactgcctggagtacttcccctctcagatgctgagaacgggcaacaactttgagttcagctacactttcgaggacgtgcctttccacagcagctacgcgcacagccagagtttggacaggctgatgaatcctctcatcgaccagtacctgtactacctgtcaagaacccagtctacgggaggcacagcgggaacccagcagttgctgttttctcaggccgggcctagcaacatgtcggctcaggccaaaaactggctgcctggaccctgctacagacagcagcgcgtctccacgacactgtcgcaaaacaacaacagcaactttgcctggactggtgccaccaagtatcatctgaacggcagagactctctggtgaatccgggcgtcgccatggcaacccacaaggacgacgagnnncgcttcttcccatccagcggcnnnctcatgtttggcaagcagggagctggaaaagacaacgtggactatagcaacgtgatgctaaccagcgaggaagaaatcaagaccaccaaccccgtggccacagaacagtatggcgtggtggctgataacctacagcagcaaaacaccgctcctattgtgggggccgtcaacagccagggagccttacctggcatggtctggcagaaccgggacgtgtacctgcagggtcctatttgggccaagattcctcacacagatggcaactttcacccgtctcctttaatgggcggctttggacttaaacatccgcctcctcagatcctcatcaaaaacactcctgttcctgcggatcctccaacaacgttcaaccaggccaagctgaattctttcatcacgcagtacagcaccggacaagtcagcgtggagatcgagtgggagctgcagaaggagaacagcaagcgctggaacccagagattcagtatacttccaactactacaaatctacaaatgtggactttgctgttaatactgagggtgtttactctgagcctcgccccattggcactcgttacctcacccgtaatctg

SEQ ID NO: 922 - protein, 738 aa, Artificial Sequence
  Description of Artificial Sequence: Synthetic polypeptide
  MOD_RES (471)..(471): Ser or Asn
MAADGYLPDWLEDNLSEGIREWWDLKPGAPKPKANQQKQDDGRGLVLPGYKYLGPFNGLDKGEPVNAADAAALEHDKAYDQQLKAGDNPYLRYNHADAEFQERLQEDTSFGGNLGRAVFQAKKRVLEPLGLVEEGAKTAPGKKRPVEPSPQRSPDSSTGIGKKGQQPAKKRLNFGQTGDSESVPDPQPIGEPPAGPSGLGSGTMAAGGGAPMADNNEGADGVGSSSGNWHCDSTWLGDRVITTSTRTWALPTYNNHLYKQISNGTSGGSTNDNTYFGYSTPWGYFDFNRFHCHFSPRDWQRLINNNWGFRPKRLNFKLFNIQVKEVTQNEGTKTIANNLTSTIQVFTDSEYQLPYVLGSAHQGCLPPFPADVFMIPQYGYLTLNNGSQAVGRSSFYCLEYFPSQMLRTGNNFEFSYTFEDVPFHSSYAHSQSLDRLMNPLIDQYLYYLSRTQSTGGTAGTQQLLFSQAGPXNMSAQAKNWLPGPCYRQQRVSTTLSQNNNSNFAWTGATKYHLNGRDSLVNPGVAMATHKDDEERFFPSSGVLMFGKQGAGKDNVDYSSVMLTSEEEIKTTNPVATEQYGVVADNLQQQNTAPIVGAVNSQGALPGMVWQNRDVYLQGPIWAKIPHTDGNFHPSPLMGGFGLKHPPPQILIKNTPVPADPPTTFSQAKLASFITQYSTGQVSVEIEWELQKENSKRWNPEIQYTSNYYKSTNVDFAVNTEGTYSEPRPIGTRYLTRNL

SEQ ID NO: 923 - DNA, 2214 bp, Artificial Sequence
  Description of Artificial Sequence: Synthetic polynucleotide
  misc_feature (1411)..(1413): This region may encompass "agt" or "aat"
atggctgccgatggttatcttccagattggctcgaggacaacctctctgagggcattcgcgagtggtgggacttgaaacctggagccccgaaacccaaagccaaccagcaaaagcaggacgacggccggggtctggtgcttcctggctacaagtacctcggacccttcaacggactcgacaagggggagcccgtcaacgcggcggacgcagcggccctcgagcacgacaaggcctacgaccagcagctcaaagcgggtgacaatccgtacctgcggtataaccacgccgacgccgagtttcaggagcgtctgcaagaagatacgtcttttgggggcaacctcgggcgagcagtcttccaggccaagaagcgggttctcgaacctctcggtctggttgaggaaggcgctaagacggctcctggaaagaagagaccggtagagccatcaccccagcgttctccagactcctctacgggcatcggcaagaaaggccagcagcccgcgaaaaagagactcaactttgggcagactggcgactcagagtcagtgcccgaccctcaaccaatcggagaaccccccgcaggcccctctggtctgggatctggtacaatggctgcaggcggtggcgctccaatggcagacaataacgaaggcgccgacggagtgggtagttcctcaggaaattggcattgcgattccacatggctgggcgacagagtcatcaccaccagcacccgaacctgggccctccccacctacaacaaccacctctacaagcaaatctccaacgggacttcgggaggaagcaccaacgacaacacctacttcggctacagcaccccctgggggtattttgactttaacagattccactgccacttctcaccacgtgactggcagcgactcatcaacaacaactggggattccggcccaagagactcaacttcaagctcttcaacatccaggtcaaggaggtcacgcagaatgaaggcaccaagaccatcgccaataaccttaccagcacgattcaggtctttacggactcggaataccagctcccgtacgtcctcggctctgcgcaccagggctgcctgcctccgttcccggcggacgtcttcatgattcctcagtacgggtacctgactctgaacaatggcagtcaggccgtgggccgttcctccttctactgcctggagtactttccttctcaaatgctgagaacgggcaacaactttgagttcagctacacgtttgaggacgtgccttttcacagcagctacgcgcacagccaaagcctggaccggctgatgaaccccctcatcgaccagtacctgtactacctgtctcggactcagtccacgggaggtaccgcaggaactcagcagttgctattttctcaggccgggcctnnnaacatgtcggctcaggccaaaaactggctacccgggccctgctaccggcagcaacgcgtctccacgacactgtcgcaaaataacaacagcaactttgcctggaccggtgccaccaagtatcatctgaatggcagagactctctggtaaatcccggtgtcgctatggcaacccacaaggacgacgaagagcgattttttccgtccagcggagtcttaatgtttgggaaacagggagctggaaaagacaacgtggactatagcagcgttatgctaaccagtgaggaagaaattaaaaccaccaacccagtggccacagaacagtacggcgtggtggccgataacctgcaacagcaaaacaccgctcctattgtaggggccgtcaacagtcaaggagccttacctggcatggtctggcagaaccgggacgtgtacctgcagggtcctatctgggccaagattcctcacacggacggaaactttcatccctcgccgctgatgggaggctttggactgaaacacccgcctcctcagatcctgattaagaatacacctgttcccgcggatcctccaactaccttcagtcaagctaagctggcgtcgttcatcacgcagtacagcaccggacaggtcagcgtggaaattgaatgggagctgcagaaagaaaacagcaaacgctggaacccagagattcaatacacttccaactactacaaatctacaaatgtggactttgctgttaacacagaaggcacttattctgagcctcgccccatcggcacccgttacctcacccgtaatctg

SEQ ID NO: 924 - protein, 737 aa, Artificial Sequence
  Description of Artificial Sequence: Synthetic polypeptide
  MOD_RES (148)..(148): Pro or Gln
  MOD_RES (169)..(169): Lys or Arg
  MOD_RES (314)..(314): Arg or Asn
  MOD_RES (466)..(466): Tyr or His
  MOD_RES (563)..(563): Asn or Ser
  MOD_RES (580)..(580): Val or Ile
  MOD_RES (588)..(588): Ala or Ser
MAADGYLPDWLEDNLSEGIREWWDLKPGAPKPKANQQKQDDGRGLVLPGYKYLGPFNGLDKGEPVNAADAAALEHDKAYDQQLKAGDNPYLRYNHADAEFQERLQEDTSFGGNLGRAVFQAKKRVLEPLGLVEEGAKTAPGKKRPVEXSPQRSPDSSTGIGKKGQQPAXKRLNFGQTGDSESVPDPQPLGEPPAAPSGVGSGTMAAGGGAPMADNNEGADGVGNASGNWHCDSTWLGDRVITTSTRTWALPTYNNHLYKQISSQSAGSTNDNTYFGYSTPWGYFDFNRFHCHFSPRDWQRLINNNWGFRPKKLXFKLFNIQVKEVTTNDGVTTIANNLTSTVQVFSDSEYQLPYVLGSAHQGCLPPFPADVFMIPQYGYLTLNNGSQSVGRSSFYCLEYFPSQMLRTGNNFEFSYTFEDVPFHSSYAHSQSLDRLMNPLIDQYLYYLARTQSTTGGTAGNRELQFXQAGPSTMAEQAKNWLPGPCYRQQRVSKTLDQNNNSNFAWTGATKYHLNGRNSLVNPGVAMATHKDDEDRFFPSSGVLIFGKTGAANKTTLENVLMTXEEEIKTTNPVATEEYGXVSSNLQSXNTAPQTQTVNSQGALPGMVWQNRDVYLQGPIWAKIPHTDGNFHPSPLMGGFGLKHPPPQILIKNTPVPANPPEVFTPAKFASFITQYSTGQVSVEIEWELQKENSKRWNPEIQYTSNYDKSTNVDFAVDSEGVYSEPRPIGTRYLTRNL

SEQ ID NO: 925 - DNA, 2211 bp, Artificial Sequence
  Description of Artificial Sequence: Synthetic polynucleotide
  misc_feature (442)..(444): This region may encompass "ccg" or "cag"
  misc_feature (505)..(507): This region may encompass "aaa" or "aga"
  misc_feature (940)..(942): This region may encompass "cgg" or "aac"
  misc_feature (1396)..(1398): This region may encompass "tac" or "cac"
  misc_feature (1687)..(1689): This region may encompass "aat" or "agt"
  misc_feature (1738)..(1740): This region may encompass "gta" or "ata"
  misc_feature (1762)..(1764): This region may encompass "gct" or "tct"
atggctgccgatggttatcttccagattggctcgaggacaacctctctgagggcattcgcgagtggtgggacctgaaacctggagccccgaaacccaaagccaaccagcaaaagcaggacgacggccggggtctggtgcttcctggctacaagtacctcggacccttcaacggactcgacaagggggagcccgtcaacgcggcggacgcagcggccctcgagcacgacaaggcctacgaccagcagctcaaagcgggtgacaatccgtacctgcggtataaccacgccgacgccgagtttcaggagcgtctgcaagaagatacgtcatttgggggcaacctcgggcgagcagtcttccaggccaagaagcgggttctcgaacctctcggtctggttgaggaaggcgctaagacggctcctggaaagaagagaccggtagagnnntcacctcagcgttcccccgactcctccacgggcatcggcaagaaaggccagcagcccgccnnnaagagactcaatttcggtcagactggcgactcagagtcagtccccgaccctcaacctctcggagaacctccagcagcgccctctggtgtgggatctggtacaatggctgcaggcggtggcgcaccaatggcagacaataacgaaggtgccgacggagtgggtaatgcctcaggaaattggcattgcgattccacatggctgggcgacagagtcattaccaccagcacccgaacctgggccctgcccacctacaacaaccacctctacaagcaaatctccagtcaaagtgcaggtagtaccaacgacaacacctacttcggctacagcaccccctgggggtattttgactttaacagattccactgccacttctcaccacgtgactggcagcgactcatcaacaacaactggggattccggcccaagaagctgnnnttcaagctcttcaacatccaggtcaaggaggtcacgacgaatgacggcgttacgaccatcgctaataaccttaccagcacggttcaggtattctcggactcggaataccagctgccgtacgtcctcggctctgcgcaccagggctgcctgcctccgttcccggcggacgtcttcatgattcctcagtacggctacctgactctcaacaatggcagtcagtctgtgggacgttcctccttctactgcctggagtacttcccctctcagatgctgagaacgggcaacaactttgagttcagctacaccttcgaggacgtgcctttccacagcagctacgcacacagccagagcctggaccggctgatgaatcccctcatcgaccagtacttgtactacctggccagaacacagagtaccacaggaggcacagctggcaatcgggaactgcagtttnnncaggccgggccttcaactatggccgaacaagccaagaattggttacctggaccttgctaccggcaacaaagagtctccaaaacgctggatcaaaacaacaacagcaactttgcttggactggtgccaccaaatatcacctgaacggcagaaactcgttggttaatcccggcgtcgccatggcaactcacaaggacgacgaggaccgctttttcccatccagcggagtcctgatttttggaaaaactggagcagctaacaaaactacattggaaaatgtgttaatgacannngaagaagaaattaaaactactaatcctgtagccacggaagaatacgggnnngtcagcagcaacttacaatcgnnnaatactgcaccccagacacaaactgtcaacagccagggagccttacctggcatggtctggcagaaccgggacgtgtacctgcagggtcccatctgggccaagattcctcacacggatggcaactttcacccgtctcctttgatgggcggctttggacttaaacatccgcctcctcagatcctgatcaagaacactcccgttcccgctaatcctccggaggtgtttactcctgccaagtttgcttcgttcatcacacagtacagcaccggacaagtcagcgtggaaatcgagtgggagctgcagaaggaaaacagcaagcgctggaacccggagattcagtacacctccaactatgataagtcgactaatgtggactttgccgttgacagcgagggtgtttactctgagcctcgccctattggcactcgttacctcacccgtaatctg

SEQ ID NO: 926 - protein, 735 aa, Artificial Sequence
  Description of Artificial Sequence: Synthetic polypeptide
  MOD_RES (162)..(162): Ser or Thr
  MOD_RES (168)..(168): Lys or Arg
  MOD_RES (224)..(224): Ala or Ser
  MOD_RES (310)..(310): Arg or Lys
  MOD_RES (410)..(410): Thr or Gln
  MOD_RES (446)..(446): Ser or Asn
  MOD_RES (461)..(461): Gln or Leu
  MOD_RES (471)..(471): Ala or Ser
  MOD_RES (708)..(708): Ala or Thr
MAADGYLPDWLEDNLSEGIREWWDLKPGAPKPKANQQKQDDGRGLVLPGYKYLGPFNGLDKGEPVNAADAAALEHDKAYDQQLKAGDNPYLRYNHADAEFQERLQEDTSFGGNLGRAVFQAKKRVLEPLGLVEEGAKTAPGKKRPVEQSPQEPDSSSGIGKXGQQPAXKRLNFGQTGDSESVPDPQPLGEPPAAPSGVGSNTMASGGGAPMADNNEGADGVGNXSGNWHCDSTWLGDRVITTSTRTWALPTYNNHLYKQISSQSGASNDNHYFGYSTPWGYFDFNRFHCHFSPRDWQRLINNNWGFRPKXLNFKLFNIQVKEVTTNDGTTTIANNLTSTVQVFTDSEYQLPYVLGSAHQGCLPPFPADVFMIPQYGYLTLNNGSQAVGRSSFYCLEYFPSQMLRTGNNFXFSYTFEDVPFHSSYAHSQSLDRLMNPLIDQYLYYLXRTQTTSGTAQNRELXFSQAGPSSMXNQAKNWLPGPCYRQQRVSKTANDNNNSNFAWTGATKYHLNGRDSLVNPGPAMASHKDDEDKFFPMSGVLIFGKQGAGASNVDLDNVMITDEEEIKTTNPVATEQYGTVATNLQSSNTAPATGTVNSQGALPGMVWQDRDVYLQGPIWAKIPHTDGHFHPSPLMGGFGLKHPPPQILIKNTPVPANPPTTFSPAKFASFITQYSTGQVSVEIEWELQKENSKRWNPEIQYTSNYNKSXNVDFTVDTNGVYSEPRPIGTRYLTRNL

SEQ ID NO: 927 - DNA, 2205 bp, Artificial Sequence
  Description of Artificial Sequence: Synthetic polynucleotide
  misc_feature (484)..(486): This region may encompass "tca" or "aca"
  misc_feature (502)..(504): This region may encompass "aaa" or "aga"
  misc_feature (670)..(672): This region may encompass "gcc" or "tcc"
  misc_feature (928)..(930): This region may encompass "aga" or "aaa"
  misc_feature (1228)..(1230): This region may encompass "acc" or "cag"
  misc_feature (1336)..(1338): This region may encompass "agc" or "aac"
  misc_feature (1381)..(1383): This region may encompass "cag" or "ctg"
  misc_feature (1411)..(1413): This region may encompass "gct" or "tct"
  misc_feature (2122)..(2124): This region may encompass "gcc" or "acc"
atggctgccgatggttatcttccagattggctcgaggacaacctctctgagggcattcgcgagtggtgggacttgaaacctggagccccgaaacccaaagccaaccagcaaaagcaggacgacggccggggtctggtgcttcctggctacaagtacctcggacccttcaacggactcgacaagggggagcccgtcaacgcggcggatgcagcggccctcgagcacgacaaggcctacgaccagcagctcaaagcgggtgacaatccgtacctgcggtataaccacgccgacgccgagtttcaggagcgtctgcaagaagatacgtcttttgggggcaacctcgggcgagcagtcttccaggccaagaagagggttctcgaacctcttggtctggttgaggaaggtgctaagacggctcctggaaagaaacgtccggtagagcagtcgccacaagagccagactcctcctcgggcattggcaagnnnggccagcagcccgctnnnaagagactcaattttggtcagactggcgactcagagtcagtccccgacccacaacctctcggagaacctccagcagccccctctggtgtgggatctaatacaatggcttcaggcggtggcgcaccaatggcagacaataacgaaggcgccgacggagtgggtaatnnntcaggaaattggcattgcgattccacatggctgggcgacagagtcatcaccaccagcacccgaacatgggccttgcccacctataacaaccacctctacaagcaaatctccagtcaatcaggggccagcaacgacaaccactacttcggctacagcaccccctgggggtattttgatttcaacagattccactgccatttctcaccacgtgactggcagcgactcatcaacaacaattggggattccggcccaagnnnctcaacttcaagctcttcaacatccaagtcaaggaggtcacgacgaatgatggcaccacgaccatcgctaataaccttaccagcacggttcaagtcttcacggactcggagtaccagttgccgtacgtcctcggctctgcgcaccagggctgcctccctccgttcccggcggacgtgttcatgattccgcagtacggctacctaacgctcaacaatggcagccaggcagtgggacggtcatccttttactgcctggaatatttcccatcgcagatgctgagaacgggcaataactttnnnttcagctacaccttcgaggacgtgcctttccacagcagctacgcgcacagccagagcctggaccggctgatgaatcctctcatcgaccagtacctgtattacctgnnnagaactcagactacgtccggaactgcccaaaacagggagttgnnntttagccaggcgggtccatctagcatgnnnaatcaggccaaaaactggctacctggaccctgttaccggcagcagcgcgtttctaaaacagcaaatgacaacaacaacagcaactttgcctggactggtgctacaaaatatcaccttaatgggcgtgattctttagtcaaccctggccctgctatggcctcacacaaagacgacgaagacaagttctttcccatgagcggtgtcttgatttttggaaagcagggcgccggagcttcaaacgttgatttggacaatgtcatgatcacagacgaagaggaaatcaaaaccactaaccccgtggccaccgaacaatatgggactgtggcaaccaatctccagagcagcaacacagcccctgcgaccggaactgtgaattctcagggagccttacctggaatggtgtggcaagacagagacgtatacctgcagggtcctatttgggccaaaattcctcacacggatggacactttcacccgtctcctctcatgggcggctttggacttaagcacccgcctcctcagatcctcatcaaaaacacgcctgttcctgcgaatcctccgacaacgttttcgcctgcaaagtttgcttcattcatcacccagtattccacaggacaagtgagcgtggagattgaatgggagctgcagaaagaaaacagcaaacgctggaatcccgaaatacagtatacatctaactataataaatctnnnaacgttgatttcactgtggacaccaatggagtttatagtgagcctcgccccattggcacccgttacctcacccgtaacctg

SEQ ID NO: 928 - protein, 735 aa, Artificial Sequence
  Description of Artificial Sequence: Synthetic polypeptide
  MOD_RES (42)..(42): Gly or Ser
  MOD_RES (168)..(168): Arg or Lys
  MOD_RES (310)..(310): Lys or Arg
  MOD_RES (410)..(410): Thr or Gln
  MOD_RES (446)..(446): Ser or Arg
  MOD_RES (461)..(461): Gln or Leu
  MOD_RES (471)..(471): Ala or Ser
  MOD_RES (475)..(475): Lys or Arg
  MOD_RES (504)..(504): Gly or Ala
  MOD_RES (539)..(539): Val or Asn
MAADGYLPDWLEDNLSEGIREWWDLKPGAPQPKANQQHQDDXRGLVLPGYKYLGPFNGLDKGEPVNEADAAALEHDKAYDQQLKAGDNPYLKYNHADAEFQERLQEDTSFGGNLGRAVFQAKKRVLEPLGLVEEAAKTAPGKKRPVEQSPQEPDSSSGIGKSGQQPAXKRLNFGQTGDSESVPDPQPLGEPPAAPSGVGSNTMASGGGAPMADNNEGADGVGNSSGNWHCDSTWLGDRVITTSTRTWALPTYNNHLYKQISSQSGASNDNHYFGYSTPWGYFDFNRFHCHFSPRDWQRLINNNWGFRPKXLNFKLFNIQVKEVTQNDGTTTIANNLTSTVQVFTDSEYQLPYVLGSAHQGCLPPFPADVFMIPQYGYLTLNNGSQAVGRSSFYCLEYFPSQMLRTGNNFXFSYTFEDVPFHSSYAHSQSLDRLMNPLIDQYLYYLXRTQTTSGTTQQSRLXFSQAGPSSMXQQAXNWLPGPCYRQQRVSKTANDNNNSNFAWTXATKYHLNGRDSLVNPGPAMASHKDDEEKFFPMHGXLIFGKQGTGASNVDLDNVMITDEEEIRTTNPVATEQYGTVATNLQSSNTAPATGTVNSQGALPGMVWQDRDVYLQGPIWAKIPHTDGHFHPSPLMGGFGLKHPPPQILIKNTPVPANPPTTFSPAKFASFITQYSTGQVSVEIEWELQKENSKRWNPEIQYTSNYNKSVNVDFTVDTNGVYSEPRPIGTRYLTRNL

SEQ ID NO: 929 - DNA, 2205 bp, Artificial Sequence
  Description of Artificial Sequence: Synthetic polynucleotide
  misc_feature (124)..(126): This region may encompass "ggt" or "agt"
  misc_feature (502)..(504): This region may encompass "aga" or "aaa"
  misc_feature (928)..(930): This region may encompass "aaa" or "aga"
  misc_feature (1228)..(1230): This region may encompass "aca" or "cag"
  misc_feature (1336)..(1338): This region may encompass "agc" or "aga"
  misc_feature (1381)..(1383): This region may encompass "caa" or "ctc"
  misc_feature (1411)..(1413): This region may encompass "gct" or "tct"
  misc_feature (1423)..(1425): This region may encompass "aaa" or "aga"
  misc_feature (1510)..(1512): This region may encompass "ggg" or "gcg"
  misc_feature (1615)..(1617): This region may encompass "gtt" or "aac"
atggctgctgacggttatcttccagattggctcgaggacaacctttctgaaggcattcgtgagtggtgggatctgaaacctggagcccctcaacccaaagcgaaccaacaacaccaggacgacnnncggggtcttgtgcttccgggttacaaatacctcggaccctttaacggactcgacaaaggagagccggtcaacgaggcggacgcggcagccctcgaacacgacaaagcttacgaccagcagctcaaggccggtgacaacccgtacctcaagtacaaccacgccgacgccgagtttcaggagcgtcttcaagaagatacgtcttttgggggcaaccttggcagagcagtcttccaggccaaaaagagggtccttgagcctcttggtctggttgaggaagcagctaaaacggctcctggaaagaagaggcctgtagaacagtctcctcaggaaccggactcatcatctggtattggcaaatcgggccaacagcctgccnnnaaaagactaaatttcggtcagactggagactcagagtcagtcccagaccctcaacctctcggagaaccaccagcagccccctcaggtgtgggatctaatacaatggcttcaggcggtggcgcaccaatggcagacaataacgagggtgccgatggagtgggtaattcctcaggaaattggcattgcgattccacatggctgggcgacagagtcatcaccaccagcaccagaacctgggccctgcccacttacaacaaccatctctacaagcaaatctccagccaatcaggagcttcaaacgacaaccactactttggctacagcaccccttgggggtattttgactttaacagattccactgccacttctcaccacgtgactggcagcgactcattaacaacaactggggattccggcccaagnnnctcaacttcaagctcttcaacatccaagttaaagaggtcacgcagaacgatggcacgacgactattgccaataaccttaccagcacggttcaagtgtttacggactcggagtatcagctcccgtacgtgctcgggtcggcgcaccaaggctgtctcccgccgtttccagcggacgtcttcatgatccctcagtatggatacctcaccctgaacaacggaagtcaagcggtgggacgctcatccttttactgcctggagtacttcccttcgcagatgctaaggactggaaataacttcnnnttcagctataccttcgaggatgtaccttttcacagcagctacgctcacagccagagtttggatcgcttgatgaatcctcttattgatcagtatctgtactacctgnnnagaacgcaaacaacctctggaacaacccaacaatcacggctgnnntttagccaggctgggccttcgtctatgnnncagcaggccnnnaattggctacctgggccctgctaccggcaacagagagtttcaaagactgctaacgacaacaacaacagtaactttgcttggacannngccaccaaatatcatctcaatggccgcgactcgctggtgaatccaggaccagctatggccagtcacaaggacgatgaagaaaaatttttccctatgcacggcnnnctaatatttggcaaacaagggacaggggcaagtaacgtagatttagataatgtaatgattacggatgaagaagagattcgtaccaccaatcctgtggcaacagagcagtatggaactgtggcaactaacttgcagagctcaaatacagctcccgcgactggaactgtcaatagtcagggggccttacctggcatggtgtggcaagatcgtgacgtgtaccttcaaggacctatctgggcaaagattcctcacacggatggacactttcatccttctcctctgatgggaggctttggactgaaacatccgcctcctcaaatcttgatcaaaaatactccggtaccggcaaatcctccgacgactttcagcccggccaagtttgcttcatttatcactcagtactccactggacaggtcagcgtggaaattgagtgggagctacagaaagaaaacagcaaacgttggaatccagagattcagtacacttccaactacaacaagtctgttaatgtggactttactgtagacactaatggtgtttatagtgaacctcgccctattggaacccggtatctcacacgaaacttg

SEQ ID NO: 930 - protein, 736 aa, Artificial Sequence
  Description of Artificial Sequence: Synthetic polypeptide
MAADGYLPDWLEDNLSEGIREWWDLKPGAPKPKANQQKQDDGRGLVLPGYKYLGPFNGLDKGEPVNAADAAALEHDKAYDQQLKAGDNPYLRYNHADAEFQERLQEDTSFGGNLGRAVFQAKKRVLEPLGLVEEGAKTAPGKKRPVEQSPQEPDSSSGIGKKGQQPARKRLNFGQTGDSESVPDPQPLGEPPAAPSGVGSNTMAAGGGAPMADNNEGADGVGNASGNWHCDSTWLGDRVITTSTRTWALPTYNNHLYKQISSQSGGSTNDNTYFGYSTPWGYFDFNRFHCHFSPRDWQRLINNNWGFRPKRLNFKLFNIQVKEVTTNDGTTTIANNLTSTVQVFTDSEYQLPYVLGSAHQGCLPPFPADVFMIPQYGYLTLNNGSQAVGRSSFYCLEYFPSQMLRTGNNFEFSYTFEDVPFHSSYAHSQSLDRLMNPLIDQYLYYLSRTQTTSGTAGNRTLQFSQAGPSSMANQAKNWLPGPCYRQQRVSKTANQNNNSNFAWTGATKYHLNGRDSLVNPGPAMATHKDDEDKFFPMSGVLIFGKQGAGNSNVDLDNVMITNEEEIKTTNPVATEQYGTVATNLQSANTAPATGTVNSQGALPGMVWQDRDVYLQGPIWAKIPHTDGHFHPSPLMGGFGLKHPPPQILIKNTPVPANPPTTFSPAKFASFITQYSTGQVSVEIEWELQKENSKRWNPEIQYTSNYNKSTNVDFAVDTNGVYSEPRPIGTRYLTRNL

SEQ ID NO: 931 - protein, 736 aa, Artificial Sequence
  Description of Artificial Sequence: Synthetic polypeptide
MAADGYLPDWLEDNLSEGIREWWDLKPGAPKPKANQQKQDDGRGLVLPGYKYLGPFNGLDKGEPVNAADAAALEHDKAYDQQLKAGDNPYLRYNHADAEFQERLQEDTSFGGNLGRAVFQAKKRVLEPLGLVEEGAKTAPGKKRPVEQSPQEPDSSSGIGKKGQQPAKKRLNFGQTGDSESVPDPQPLGEPPAAPSGVGSNTMASGGGAPMADNNEGADGVGNASGNWHCDSTWLGDRVITTSTRTWALPTYNNHLYKQISSQSGASTNDNTYFGYSTPWGYFDFNRFHCHFSPRDWQRLINNNWGFRPKRLNFKLFNIQVKEVTTNDGTTTIANNLTSTVQVFTDSEYQLPYVLGSAHQGCLPPFPADVFMIPQYGYLTLNNGSQAVGRSSFYCLEYFPSQMLRTGNNFQFSYTFEDVPFHSSYAHSQSLDRLMNPLIDQYLYYLSRTQTTSGTAGNRELQFSQAGPSSMANQAKNWLPGPCYRQQRVSKTTNQNNNSNFAWTGATKYHLNGRDSLVNPGPAMATHKDDEDKFFPMSGVLIFGKQGAGNSNVDLDNVMITNEEEIKTTNPVATEEYGTVATNLQSANTAPATGTVNSQGALPGMVWQNRDVYLQGPIWAKIPHTDGHFHPSPLMGGFGLKHPPPQILIKNTPVPANPPTTFSPAKFASFITQYSTGQVSVEIEWELQKENSKRWNPEIQYTSNYNKSTNVDFAVDTNGVYSEPRPIGTRYLTRNL

SEQ ID NO: 932 - protein, 736 aa, Artificial Sequence
  Description of Artificial Sequence: Synthetic polypeptide
MAADGYLPDWLEDNLSEGIREWWDLKPGAPKPKANQQKQDDGRGLVLPGYKYLGPFNGLDKGEPVNAADAAALEHDKAYDQQLKAGDNPYLRYNHADAEFQERLQEDTSFGGNLGRAVFQAKKRVLEPLGLVEEGAKTAPGKKRPVEQSPQEPDSSSGIGKKGQQPARKRLNFGQTGDSESVPDPQPLGEPPAAPSGVGSNTMAAGGGAPMADNNEGADGVGNASGNWHCDSTWLGDRVITTSTRTWALPTYNNHLYKQISSQSGGSTNDNTYFGYSTPWGYFDFNRFHCHFSPRDWQRLINNNWGFRPKRLNFKLFNIQVKEVTTNDGTTTIANNLTSTVQVFTDSEYQLPYVLGSAHQGCLPPFPADVFMIPQYGYLTLNNGSQAVGRSSFYCLEYFPSQMLRTGNNFEFSYTFEDVPFHSSYAHSQSLDRLMNPLIDQYLYYLSRTQTTSGTAGNRELQFSQAGPSSMANQAKNWLPGPCYRQQRVSKTTNQNNNSNFAWTGATKYHLNGRDSLVNPGPAMATHKDDEDKFFPMSGVLIFGKQGAGNSNVDLDNVMITSEEEIKTTNPVATEEYGTVATNLQSSNTAPATGTVNSQGALPGMVWQERDVYLQGPIWAKIPHTDGHFHPSPLMGGFGLKHPPPQILIKNTPVPANPPTTFSPAKFASFITQYSTGQVSVEIEWELQKENSKRWNPEIQYTSNYNKSTNVDFAVDTNGVYSEPRPIGTRYLTRNL

SEQ ID NO: 933 - protein, 736 aa, Artificial Sequence
  Description of Artificial Sequence: Synthetic polypeptide
MAADGYLPDWLEDNLSEGIREWWDLKPGAPKPKANQQKQDDGRGLVLPGYKYLGPFNGLDKGEPVNAADAAALEHDKAYDQQLKAGDNPYLRYNHADAEFQERLQEDTSFGGNLGRAVFQAKKRVLEPLGLVEEGAKTAPGKKRPVEQSPQEPDSSSGIGKKGQQPARKRLNFGQTGDSESVPDPQPLGEPPAAPSGVGSNTMASGGGAPMADNNEGADGVGNASGNWHCDSTWLGDRVITTSTRTWALPTYNNHLYKQISSQSGGSTNDNTYFGYSTPWGYFDFNRFHCHFSPRDWQRLINNNWGFRPKKLNFKLFNIQVKEVTTNDGTTTIANNLTSTVQVFTDSEYQLPYVLGSAHQGCLPPFPADVFMIPQYGYLTLNNGSQAVGRSSFYCLEYFPSQMLRTGNNFEFSYTFEDVPFHSSYAHSQSLDRLMNPLIDQYLYYLSRTQTTSGTAGNRELQFSQAGPSSMANQAKNWLPGPCYRQQRVSKTTNQNNNSNFAWTGATKYHLNGRDSLVNPGPAMATHKDDEDKFFPMSGVLIFGKQGAGNSNVDLDNVMITSEEEIKTTNPVATEEYGTVATNLQSANTAPATGTVNSQGALPGMVWQDRDVYLQGPIWAKIPHTDGHFHPSPLMGGFGLKHPPPQILIKNTPVPANPPTTFSPAKFASFITQYSTGQVSVEIEWELQKENSKRWNPEIQYTSNYNKSTNVDFAVDTNGVYSEPRPIGTRYLTRNL

SEQ ID NO: 934 - protein, 736 aa, Artificial Sequence
  Description of Artificial Sequence: Synthetic polypeptide
MAADGYLPDWLEDNLSEGIREWWDLKPGAPKPKANQQKQDDGRGLVLPGYKYLGPFNGLDKGEPVNAADAAALEHDKAYDQQLKAGDNPYLRYNHADAEFQERLQEDTSFGGNLGRAVFQAKKRVLEPLGLVEEGAKTAPGKKRPVEQSPQEPDSSSGIGKKGQQPARKRLNFGQTGDSESVPDPQPLGEPPAAPSGVGSNTMAAGGGAPMADNNEGADGVGNASGNWHCDSTWLGDRVITTSTRTWALPTYNNHLYKQISSQSGGSTNDNTYFGYSTPWGYFDFNRFHCHFSPRDWQRLINNNWGFRPKKLNFKLFNIQVKEVTTNDGTTTIANNLTSTVQVFTDSEYQLPYVLGSAHQGCLPPFPADVFMIPQYGYLTLNNGSQAVGRSSFYCLEYFPSQMLRTGNNFQFSYTFEDVPFHSSYAHSQSLDRLMNPLIDQYLYYLSRTQTTSGTAGNRTLQFSQAGPSSMANQAKNWLPGPCYRQQRVSKTTNQNNNSNFAWTGATKYHLNGRDSLVNPGPAMATHKDDEDKFFPMSGVLIFGKQGAGNSNVDLDNVMITNEEEIKTTNPVATEEYGTVATNLQSANTAPATGTVNSQGALPGMVWQDRDVYLQGPIWAKIPHTDGHFHPSPLMGGFGLKHPPPQILIKNTPVPANPPTTFSPAKFASFITQYSTGQVSVEIEWELQKENSKRWNPEIQYTSNYNKSTNVDFAVDTNGVYSEPRPIGTRYLTRNL

SEQ ID NO: 935 - protein, 736 aa, Artificial Sequence
  Description of Artificial Sequence: Synthetic polypeptide
MAADGYLPDWLEDNLSEGIREWWDLKPGAPKPKANQQKQDDGRGLVLPGYKYLGPFNGLDKGEPVNAADAAALEHDKAYDQQLKAGDNPYLRYNHADAEFQERLQEDTSFGGNLGRAVFQAKKRVLEPLGLVEEGAKTAPGKKRPVEQSPQEPDSSSGIGKKGQQPAKKRLNFGQTGDSESVPDPQPLGEPPAAPSGVGSNTMAAGGGAPMADNNEGADGVGNASGNWHCDSTWLGDRVITTSTRTWALPTYNNHLYKQISSQSGGSTNDNTYFGYSTPWGYFDFNRFHCHFSPRDWQRLINNNWGFRPKKLNFKLFNIQVKEVTTNDGTTTIANNLTSTVQVFTDSEYQLPYVLGSAHQGCLPPFPADVFMIPQYGYLTLNNGSQAVGRSSFYCLEYFPSQMLRTGNNFEFSYTFEDVPFHSSYAHSQSLDRLMNPLIDQYLYYLSRTQTTSGTAGNRTLQFSQAGPSSMANQAKNWLPGPCYRQQRVSKTANQNNNSNFAWTGATKYHLNGRDSLVNPGPAMATHKDDEDKFFPMSGVLIFGKQGAGNSNVDLDNVMITSEEEIKTTNPVATEQYGTVATNLQSSNTAPATGTVNSQGALPGMVWQNRDVYLQGPIWAKIPHTDGHFHPSPLMGGFGLKHPPPQILIKNTPVPANPPTTFSPAKFASFITQYSTGQVSVEIEWELQKENSKRWNPEIQYTSNYNKSTNVDFAVDTNGVYSEPRPIGTRYLTRNL

SEQ ID NO: 936 - protein, 736 aa, Artificial Sequence
  Description of Artificial Sequence: Synthetic polypeptide
MAADGYLPDWLEDNLSEGIREWWDLKPGAPKPKANQQKQDDGRGLVLPGYKYLGPFNGLDKGEPVNAADAAALEHDKAYDQQLKAGDNPYLRYNHADAEFQERLQEDTSFGGNLGRAVFQAKKRVLEPLGLVEEGAKTAPGKKRPVEQSPQEPDSSSGIGKKGQQPAKKRLNFGQTGDSESVPDPQPLGEPPAAPSGVGSNTMASGGGAPMADNNEGADGVGNASGNWHCDSTWLGDRVITTSTRTWALPTYNNHLYKQISSQSGGSTNDNTYFGYSTPWGYFDFNRFHCHFSPRDWQRLINNNWGFRPKKLNFKLFNIQVKEVTTNDGTTTIANNLTSTVQVFTDSEYQLPYVLGSAHQGCLPPFPADVFMIPQYGYLTLNNGSQAVGRSSFYCLEYFPSQMLRTGNNFEFSYTFEDVPFHSSYAHSQSLDRLMNPLIDQYLYYLSRTQTTSGTAGNRTLQFSQAGPSSMANQAKNWLPGPCYRQQRVSKTANQNNNSNFAWTGATKYHLNGRDSLVNPGPAMATHKDDEDKFFPMSGVLIFGKQGAGNSNVDLDNVMITSEEEIKTTNPVATEEYGTVATNLQSSNTAPATGTVNSQGALPGMVWQNRDVYLQGPIWAKIPHTDGHFHPSPLMGGFGLKHPPPQILIKNTPVPANPPTTFSPAKFASFITQYSTGQVSVEIEWELQKENSKRWNPEIQYTSNYNKSTNVDFAVDTNGVYSEPRPIGTRYLTRNL

SEQ ID NO: 937 - protein, 736 aa, Artificial Sequence
  Description of Artificial Sequence: Synthetic polypeptide
MAADGYLPDWLEDNLSEGIREWWDLKPGAPKPKANQQKQDDGRGLVLPGYKYLGPFNGLDKGEPVNAADAAALEHDKAYDQQLKAGDNPYLRYNHADAEFQERLQEDTSFGGNLGRAVFQAKKRVLEPLGLVEEGAKTAPGKKRPVEQSPQEPDSSSGIGKKGQQPAKKRLNFGQTGDSESVPDPQPLGEPPAAPSGVGSNTMASGGGAPMADNNEGADGVGNASGNWHCDSTWLGDRVITTSTRTWALPTYNNHLYKQISSQSGGSTNDNTYFGYSTPWGYFDFNRFHCHFSPRDWQRLINNNWGFRPKKLNFKLFNIQVKEVTTNDGTTTIANNLTSTVQVFTDSEYQLPYVLGSAHQGCLPPFPADVFMIPQYGYLTLNNGSQAVGRSSFYCLEYFPSQMLRTGNNFQFSYTFEDVPFHSSYAHSQSLDRLMNPLIDQYLYYLSRTQTTSGTAGNRELQFSQAGPSSMANQAKNWLPGPCYRQQRVSKTTNQNNNSNFAWTGATKYHLNGRDSLVNPGPAMATHKDDEDKFFPMSGVLIFGKQGAGNSNVDLDNVMITNEEEIKTTNPVATEQYGTVATNLQSANTAPATGTVNSQGALPGMVWQDRDVYLQGPIWAKIPHTDGHFHPSPLMGGFGLKHPPPQILIKNTPVPANPPTTFSPAKFASFITQYSTGQVSVEIEWELQKENSKRWNPEIQYTSNYNKSTNVDFAVDTNGVYSEPRPIGTRYLTRNL

SEQ ID NO: 938 - DNA, 2211 bp, Artificial Sequence
  Description of Artificial Sequence: Synthetic polynucleotide
atggctgccgatggttatcttccagattggctcgaggacaacctctctgagggcattcgcgagtggtgggacttgaaacctggagccccgaaacccaaagccaaccagcaaaagcaggacgacggccggggtctggtgcttcctggctacaagtacctcggacccttcaacggactcgacaagggggagcccgtcaacgcggcggacgcagcggccctcgagcacgacaaggcctacgaccagcagctcaaagcgggtgacaatccgtacctgcggtataaccacgccgacgccgagtttcaggagcgtctgcaagaagatacgtcttttgggggcaacctcgggcgagcagtcttccaggccaagaagcgggttctcgaacctctcggtctggttgaggaaggcgctaagacggctcctggaaagaagagaccggtagagcaatcaccccaggaaccagactcctcttcgggcatcggcaagaaaggccagcagcccgcgaaaaagagactcaactttgggcagacaggcgactcagagtcagtgcccgaccctcaaccactcggagaaccccccgcagccccctctggtgtgggatctaatacaatggctgcaggcggtggcgctccaatggcagacaataacgaaggcgccgacggagtgggtaacgcctcaggaaattggcattgcgattccacatggctgggcgacagagtcatcaccaccagcacccgaacctgggccctccccacctacaacaaccacctctacaagcaaatctccagccaatcgggagcaagcaccaacgacaacacctacttcggctacagcaccccctgggggtattttgactttaacagattccactgccacttctcaccacgtgactggcagcgactcatcaacaacaactggggattccggcccaagagactcaacttcaagctcttcaacatccaggtcaaggaggtcacgacgaatgatggcaccacgaccatcgccaataaccttaccagcacggttcaggtctttacggactcggaataccagctcccgtacgtcctcggctctgcgcaccagggctgcctgcctccgttcccggcggacgtcttcatgattcctcagtacgggtacctgactctgaacaatggcagtcaggccgtgggccgttcctccttctactgcctggagtactttccttctcaaatgctgagaacgggcaacaactttgagttcagctacacgtttgaggacgtgccttttcacagcagctacgcgcacagccaaagcctggaccggctgatgaaccccctcatcgaccagtacctgtactacctgtctcggactcagaccacgagtggtaccgcaggaaatcggacgttgcaattttctcaggccgggcctagtagcatggcgaatcaggccaaaaactggctacccgggccctgctaccggcagcaacgcgtctccaagacagcgaatcaaaataacaacagcaactttgcctggaccggtgccaccaagtatcatctgaatggcagagactctctggtaaatcccggtcccgctatggcaacccacaaggacgacgaagacaaattttttccgatgagcggagtcttaatatttgggaaacagggagctggaaatagcaacgtggaccttgacaacgttatgataaccagtgaggaagaaattaaaaccaccaacccagtggccacagaacagtacggcacggtggccactaacctgcaatcgtcaaacaccgctcctgctacagggaccgtcaacagtcaaggagccttacctggcatggtctggcagaaccgggacgtgtacctgcagggtcctatctgggccaagattcctcacacggacggacactttcatccctcgccgctgatgggaggctttggactgaaacacccgcctcctcagatcctgattaagaatacacctgttcccgcgaatcctccaactaccttcagtccagctaagtttgcgtcgttcatcacgcagtacagcaccggacaggtcagcgtggaaattgaatgggagctgcagaaagaaaacagcaaacgctggaacccagagattcaatacacttccaactacaacaaatctacaaatgtggactttgctgttgacacaaatggcgtttattctgagcctcgccccatcggcacccgttacctcacccgtaatctgtaa

SEQ ID NO: 939 - protein, 738 aa, Artificial Sequence; identical to SEQ ID NO: 18
  Description of Artificial Sequence: Synthetic polypeptide

SEQ ID NO: 940 - DNA, 2211 bp, Artificial Sequence
  Description of Artificial Sequence: Synthetic polynucleotide
atggctgccgatggttatcttccagattggctcgaggacaacctctctgagggcattcgcgagtggtgggacttgaaacctggagccccgaaacccaaagccaaccagcaaaagcaggacgacggccggggtctggtgcttcctggctacaagtacctcggacccttcaacggactcgacaagggggagcccgtcaacgcggcggacgcagcggccctcgagcacgacaaggcctacgaccagcagctcaaagcgggtgacaatccgtacctgcggtataaccacgccgacgccgagtttcaggagcgtctgcaagaagatacgtcttttgggggcaacctcgggcgagcagtcttccaggccaagaagcgggttctcgaaccttttggtctggttgaggaaggcgctaagacggctcctggaaagaaacgtccggtagagcagtcgccacaagagccagactcctcctcgggcatcggcaagacaggccagcagcccgctaaaaagagactcaattttggtcagactggcgactcagagtcagtccccgacccacaacctctcggagaacctccagcaacccccgctgctgtgggacctactacaatggcttcaggcggtggcgcaccaatggcagacaataacgaaggcgccgacggagtgggtaatgcctcaggaaattggcattgcgattccacatggctgggcgacagagtcatcaccaccagcacccgcacctgggccttgcccacctacaataaccacctctacaagcaaatctccagtgcttcaacgggggccagcaacgacaaccactacttcggctacagcaccccctgggggtattttgatttcaacagattccactgccacttttcaccgcgtgactggcagcgactcatcaacaacaattggggattccggcccaagagactcaacttcaagctcttcaacatccaagtcaaggaggtcacgacgagtgatggcgtcacaaccatcgctaataaccttaccagcacggttcaagtcttctcggactcggagtaccagcttccgtacgtcctcggctctgcgcaccagggctgcctccctccgttcccggcggacgtgttcatgattccgcaatacggctacctgacgctcaacaatggcagccaagccgtgggacgttcatccttttactgcctggaatatttcccttctcagatgctgagaacgggcaacaactttaccttcagctacacctttgaggaagtgcctttccacagcagctacgcgcacagccagagcctggaccggctgatgaatcctctcatcgaccaatacctgtattacctgaacagaactcaaaatcagtccggaagtgcccaaaacaaggacttgctgtttagccgtgggtctccagctggcatgtctgttcagcccaaaaactggctacctggaccctgttatcggcagcagcgcgtttctaaaacaaaaacaggcaacaacaacagcaattttacctggactggtgcttcaaaatataacctcaatgggcatgaatccatcatcaaccctggcactgctatggcctcacacaaagacgacgaagacaagttctttcccatgagcggtgtcatgatttttggaaaagagagcgccggagcttcaaacactgcattggacaatgtcatgattacagacgaagaggaaattaaagccactaaccctgtggccaccgaaagatttgggaccgtggcagtcaatttccagagcagcagcacacaccctgcgaccggagatgtgcatgttatgggagcattacctggcatggtgtggcaagatagagacgtgtacctgcagggtcccatctgggccaaaattcctcacacagatggacactttcacccgtctcctcttatgggcggctttggactcaagcacccgcctcctcagatcctcatcaaaaacacgcctgttcctgcgaatcctccggcggagttttcagctacaaagtttgcttcattcatcacccaatactccacaggacaagtgagtgtggaaattgaatgggagctgcagaaagaaaacagcaagcgctggaatcccgaagtgcagtacacatccaattatgcaaaatctgccaacgttgattttaccgtggacaacaatggactttatactgagcctcgccccattggcacccgttaccttacccgtcccctgtaa

SEQ ID NO: 941 - DNA, 2211 bp, Artificial Sequence; identical to SEQ ID NO: 940
  Description of Artificial Sequence: Synthetic polynucleotide

SEQ ID NO: 942 - DNA, 2202 bp, Artificial Sequence
  Description of Artificial Sequence: Synthetic polynucleotide
atgactgacggttaccttccagattggctagaggacaacctctctgaaggcgttcgagagtggtgggcgctgcaacctggagcccctaaacccaaggcaaatcaacaacatcaggacaacgctcggggtcttgtgcttccgggttacaaatacctcggacccggcaacggacttgacaagggggaacccgtcaacgcagcggacgcggcagccctcgaacacgacaaggcctacgaccagcagctcaaggccggtgacaacccctacctcaagtacaaccacgccgacgccgagtttcaggagcgtcttcaagaagatacgtcttttgggggcaacctcggacgagcagtcttccaggccaaaaagaggatccttgagcctctgggtctggttgaggaagcggctaagacggctcctggaaaaaagagacctgtagagcaatctccagcagaaccggactcctcttcgggcatcggcaaatcaggccagcagcccgctagaaaaagactgaattttggtcagactggcgacacagagtcagtcccagaccctcaaccactcggacaacctcccgcagccccctctggtgtgggatctactacaatggcttcaggcggtggcgcaccaatggcagacaataacgagggtgccgatggagtgggtaattcctcaggaaattggcattgcgattcccaatggctgggcgacagagtcatcaccaccagcacccgcacctgggccctgcccacctacaacaatcacctctacaagcaaatctccagccaatcaggagccaccaacgacaaccactactttggctacagcaccccctgggggtattttgacttcaacagattccactgccacttttcaccacgtgactggcaaagactcatcaacaacaactggggattccgacccaagagactcaacttcaagctctttaacattcaagtcaaagaggtcacgcagaatgacggtacgacgacgattgccaataaccttaccagcacggttcaggtgtttactgactccgagtaccagctcccgtacgtcctcggctcggcgcatcagggatgcctcccgccgttcccagcagacgtcttcatggtcccacagtatggatacctcaccctgaacaacgggagtcaggcggtaggacgctcttccttttactgcctggagtactttccttctcagatgctgcgtactggaaacaactttcagtttagctacacttttgaagacgtgcctttccacagcagctacgctcacagccaaagtctggaccgtctcatgaatcctctgatcgaccagtacctgtactatctgaacaggacacaaacagccagtggaactcagcagtctcggctactgtttagccaagctggacccaccagtatgtctcttcaagctaaaaactggctgcctggaccttgctacagacagcagcgtctgtcaaagcaggcaaacgacaacaacaacagcaactttccctggactggtgccaccaaatatcatctgaatggccgggactcattggtgaacccgggccctgctatggccagtcacaaggatgacaaagaaaagtttttccccatgcatggaaccctgatatttggtaaagaaggaacaaatgccaacaacgcggatttggaaaatgtcatgattacagatgaagaagaaatccgcaccaccaatcccgtggctacggagcagtacgggactgtgtcaaataatttgcaaaactcaaacgctggtccaactactggaactgtcaatcaccaaggagcgttacctggtatggtgtggcaggatcgagacgtgtacctgcagggacccatttgggccaagattcctcacaccgatggacactttcatccttctccactgatgggaggttttgggctcaaacacccgcctcctcagatcatgatcaaaaacactcccgttccagccaatcctcccacaaactttagtgcggcaaagtttgcttccttcatcacacagtactccacggggcaggtcagcgtggagatcgagtgggagctgcagaaggagaacagcaaacgctggaatcccgaaattcagtacacttccaactacaacaaatctgttaatgtggactttactgtggacactaatggtgtgtattcagagcctcgccccattggcaccagatacctgactcgtaatctgtaa

SEQ ID NO: 943 - DNA, 2211 bp, Artificial Sequence
  Description of Artificial Sequence: Synthetic polynucleotide
atggctgccgatggttatcttccagattggctcgaggacaacctctctgagggcattcgcgagtggtgggacttgaaacctggagccccgaaacccaaagccaaccagcaaaagcaggacgacggccggggtctggtgcttcctggctacaagtacctcggacccttcaacggactcgacaagggggagcccgtcaacgcggcggacgcagcggccctcgagcacgacaaggcctacgaccagcagctcaaagcgggtgacaatccgtacctgcggtataaccacgccgacgccgagtttcaggagcgtctgcaagaagatacgtcttttgggggcaacctcgggcgagcagtcttccaggccaagaagcgggttctcgaaccttttggtctggttgaggaaggcgctaagacggctcctggaaagaaacgtccggtagagcagtcgccacaagagccagactcctcctcgggcatcggcaagacaggccagcagcccgctaaaaagagactcaattttggtcagactggcgactcagagtcagtccccgacccacaacctctcggagaacctccagcaacccccgctgctgtgggacctactacaatggcttcaggcggtggcgcaccaatggcagacaataacgaaggcgccgacggagtgggtaatgcctcaggaaattggcattgcgattccacatggctgggcgacagagtcatcaccaccagcacccgcacctgggccttgcccacctacaataaccacctctacaagcaaatctccagtgcttcaacgggggccagcaacgacaaccactacttcggctacagcaccccctgggggtattttgatttcaacagattccactgccacttttcaccacgtgactggcagcgactcatcaacaacaattggggattccggcccaagagactcaacttcaagctcttcaacatccaagtcaaggaggtcacgacgaatgatggcgtcacaaccatcgctaataaccttaccagcacggttcaagtcttctcggactcggagtaccagcttccgtacgtcctcggctctgcgcaccagggctgcctccctccgttcccggcggacgtgttcatgattccgcaatacggctacctgacgctcaacaatggcagccaagccgtgggacgttcatccttttactgcctggaatatttcccttctcagatgctgagaacgggcaacaactttaccttcagctacacctttgaggaagtgcctttccacagcagctacgcgcacagccagagcctggaccggctgatgaatcctctcatcgaccaatacctgtattacctgaacagaactcaaaatcagtccggaagtgcccaaaacaaggacttgctgtttagccgtgggtctccagctggcatgtctgttcagcccaaaaactggctacctggaccctgttatcggcagcagcgcgtttctaaaacaaaaacagacaacaacaacagcaattttacctggactggtgcttcaaaatataacctcaatgggcgtgaatccatcatcaaccctggcactgctatggcctcacacaaagacgacgaagacaagttctttcccatgagcggtgtcatgatttttggaaaagagagcgccggagcttcaaacactgcattggacaatgtcatgattacagacgaagaggaaattaaagccactaaccctgtggccaccgaaagatttgggaccgtggcagtcaatttccagagcagcagcacagaccctgcgaccggagatgtgcatgttatgggagcattacctggcatggtgtggcaagatagagacgtgtacctgcagggtcccatctgggccaaaattcctcacacagatggacactttcacccgtctcctcttatgggcggctttggactcaagcacccgcctcctcagatcctcatcaaaaacacgcctgttcctgcgaatcctccggcggagttttcagctacaaagtttgcttcattcatcacccaatactccacaggacaagtgagtgtggaaattgaatgggagctgcagaaagaaaacagcaagcgctggaatcccgaagtgcagtacacatccaattatgcaaaatctgccaacgttgattttaccgtggacaacaatggactttatactgagcctcgccccattggcacccgttaccttacccgtcccctgtaa

SEQ ID NO: 944 - DNA, 2211 bp, Artificial Sequence
  Description of Artificial Sequence: Synthetic polynucleotide
atggctgccgatggttatcttccagattggctcgaggacaacctctctgagggcattcgcaagtggtgggacttgaaacctggagccccgaaacccaaagccaaccagcaaaagcaggacgacggccggggtctggtgcttcctggctacaagtacctcggacccttcaacggactcgacaagggggagcccgtcaacgcggcggacgcagcggccctcgagcacgacaaggcctacgaccagcagctcaaagcgggtgacaatccgtacctgcggtataaccacgccgacgccgagtttcaggagcgtctgcaagaagatacgtcttttgggggcaacctcgggagagcagtcttccaggccaagaagcgggttctcgaaccttttggtctggttgaggaaggcgctaagacggctcctggaaagaaacgtccggtagagcagtcgccacaagagccagactcctcctcgggcatcggcaagacaggccagcagcccgctaaaaagagactcaattttggtcagactggcgactcagagtcagtccccgacccacaacctctcggagaacctccagcaacccccgctgctgtgggacctactacaatggcttcaggcggtggcgcaccaatggcagacaataacgaaggcgccgacggagtgggtaatgcctcaggaaattggcattgcgattccacatggctgggcgacagagtcatcaccaccagcacccgcacctgggccttgcccacctacaataaccacctctacaagcaaatctccagtgcttcaacgggggccagcaacgacaaccactacttcggctacagcaccccctgggggtattttgatttcaacagattccactgccacttttcaccacgtgactggcagcgactcatcaacaacaattggggattccggcccaagagactcaacttcaagctcttcaacatccaagtcaaggaggtcacgacgaatgatggcgtcacaaccatcgctaataaccttaccagcacggttcaagtcttctcggactcggagtaccagcttccgtacgtcctcggctctgcgcaccagggctgcctccctccgttcccggcggacgtgttcatgattccgcaatacggctacctgacgctcaacaatggcagccaagccgtgggacgttcatccttttactgcctggaatatttcccttctcagatgctgagaacgggcaacaactttaccttcagctacacctttgaggaagtgcctttccacagcagctacgcgcacagccagagcctggaccggctgatgaatcctctcatcgaccaatacctgtattacctgaacagaactcaaaatcagtccggaagtgcccaaaacaaggacttgctgtttagccgtgggtctccagctggcatgtctgttcagcccaaaaactggctacctggaccctgttatcggcagcagcgcgtttctaaaacaaaaacagacaacaacaacagcaattttacctggactggtgcttcaaaatataacctcaatgggcgtgaatccatcatcaaccctggcactgctatggcctcacacaaagacgacaaagacaagttctttcccatgagcggtgtcatgatttttggaaaagagagcgccggagcttcaaacactgcattggacaatgtcatgattacagacgaagaggaaattaaagccactaaccctgtggccaccgaaagatttgggaccgtggcagtcaatttccagagcagcagcacagaccctgcgaccggagatgtgcatgttatgggagcattacctggcatggtgtggcaagatagagacgtgtacctgcagggtcccatttgggccaaaattcctcacacagatggacactttcacccgtctcctcttatgggcggctttggactcaagcacccgcctcctcagatcctcatcaaaaacacacctgttcctgcgaatcctccggcggagttttcagctacaaagtttgcttcattcatcacccaatactccacaggacaagtgagtgtggaaattgaatgggagctgcagaaagaaaacagcaagcgctggaatcccgaagtgcagtacacatccaattatgcaaaatctgccaacgttgattttaccgtggacaacaatggactttatactgagcctcgccccattggcacccgttaccttacccgtcccctgtaa

SEQ ID NO: 945 - DNA, 2211 bp, Artificial Sequence
  Description of Artificial Sequence: Synthetic polynucleotide
atggctgccgatggttatcttccagattggctcgaggacaacctctctgagggcattcgcgagtggtgggacttgaaacctggagccccgaaacccaaagccaaccagcaaaagcaggacaacggccggggtctggtgcttcctggctacaagtacctcggacccttcaacggactcgacaagggggagcccgtcaacgcggcggacgcagcggccctcgagcacgacaaggcctacgaccagcagctcaaagcgggtgacaatccgtacctgcggtataaccacgccgacgccgagtttcaggagcgtctgcaagaagatacgtcttttgggggcaacctcgggcgagcagtcttccaggccaagaagcgggttctcgaaccttttggtctggttgaggaaggcgctaagacggctcctggaaagaaacgtccggtagagcagtcgccacaagagccagactcctcctcgggcatcggcaagacaggccagcagcccgctaaaaagagactcaattttggtcagactggcgactcagagtcagtccccgacccacaacctctcggagaacctccagcaacccccgctgctgtgggacctactacaatggcttcaggcggtggcgcaccaatggcagacaataacgaaggcgccgacggagtgggtaatgcctcaggaaattggcattgcgattccacatggctgggcgacagagtcatcaccaccagcacccgcacctgggccttgcccacctacaataaccacctctacaagcaaatctccagtgcttcaacgggggccagcaacgacaaccactacttcggctacagcaccccctgggggtattttgatttcaacagattccactgccacttttcaccacgtgactggcagcgactcatcaacaacaattggggattccggcccaagagactcaacttcaagctcttcaacatccaagtcaaggaggtcacgacgaatgatggcgtcacaaccatcgctaataaccttaccagcacggttcaagtcttctcggactcggagtaccagcttccgtacgtcctcggctctgcgcaccagggctgcctccctccgttcccggcggacgtgttcatgattccgcaatacggctacctgacgctcaacaatggcagccaagccgtgggacgttcatccttttactgcctggaatatttcccttctcagatgctgagaacgggcaacaactttaccttcagctacacctttgaggaagtgcctttccacagcagctacgcgcacagccagagcctggaccggctgatgaatcctctcatcgaccaatacctgtattacctgaacagaactcaaaatcagtccggaagtgcccaaaacaaggacttgctgtttagccgtgggtctccagctggcatgtctgttcagcccaaaaactggctacctggaccctgttatcggcagcagcgcgtttctaaaacaaaaacagacaacaacaacagcaattttacctggactggtgcttcaaaatataacctcaatgggcgtgaatccatcatcaaccctggcactgctatggcctcacacaaagacgacgaagacaagttctttcccatgagcggtgtcatgatttttggaaaagagagcgccggagcttcaaacactgcattggacaatgtcatgattacagacgaagaggaaattaaagccactaaccctgtggccaccgaaagatttgggaccgtggcagtcaatttccagagcagcagcacacaccctgcgaccggagatgtgcatgttatgggagcattacctggcatggtgtggcaagatagagacgtgtacctgcagggtcccatctgggccaaaattcctcacacagatggacactttcacccgtctcctcttatgggcggctttggactcaagcacccgcctcctcagatcctcatcaaaaacacgcctgttcctgcgaatcctccggcggagttttcagctacaaagtttgcttcattcatcacccaatactccacaggacaagtgagtgtggaaattgaatgggagctgcagaaagaaaacagcaagcgctggaatcccgaagtgcagtacacatccaattatgcaaaatctgccaacgttgattttaccgtggacaacaatggactttatactgagcctcgccccattggcacccgttaccttacccgtcccctgtaa

SEQ ID NO: 946 - DNA, 2211 bp, Artificial Sequence
  Description of Artificial Sequence: Synthetic polynucleotide
atggctgccgatggttatcttccagattggctcgaggacaacctctctgagggcattcgcgagtggtgggacttgaaacctggagccccgaaacccaaagccaaccagcaaaagcaggacgacggccggggtctggtgcttcctggctacaagtacctcggacccttcaacggactcgacaagggggagcccgtcaacgcggcggacgcagcggccctcgagcacgacaaggcctacgaccagcagctcaaagcgggtgacaatccgtacctgcggtataaccacgccgacgccgagtttcaggagcgtctgcaagaagatacgtcttttgggggcaacctcgggcgagcagtcttccaggccaaaaagcgggttctcgaaccttttggtctggttgaggaaggcgctaagacggctcctggaaagaaacgtccggtagagcagtcgccacaagagccagactcctcctcgggcatcggcaagacaggccagcagcccgctaaaaagagactcaattttggtcagactggcgactcagagtcagtccccgacccacaacctctcggagaacctccagcaacccccgctgctgtgggacctactacaatggcttcaggcggtggcgcaccaatggcagacaataacgaaggcgccgacggagtgggtaatgcctcaggaaattggcattgcgattccacatggctgggcgacagagtcatcaccaccagcacccgcacctgggccttgcccacctacaataaccacctctacaagcaaatctccagtgcttcaacgggggccagcaacgacaaccactacttcggctacagcaccccctgggggtattttgatttcaacagattccactgccacttttcaccacgtgactggcagcgactcatcaacaacaattggggattccggcccaagagactcaacttcaagctcttcaacatccaagtcaaggaggtcacgacgaatgatggcgtcacaaccatcgctaataaccttaccagcacggttcaagtcttctcggactcggagtaccagcttccgtacgtcctcggctctgcgcaccagggctgcctccctccgttcccggcggacgtgttcatgattccgcaatacggctacctgacgctcaacaatggcagccaagccgtgggacgttcatccttttattgcctggaatatttcccatcgcagatgctgagaacgggcaataactttaccttcagctacacctttgaggacgtgcctttccacagcagctacgcgcacagccagagcctggaccggctgatgaatcctctcatcgaccagtacctgtattacctgaacagaactcagaaccagtccggaagtgcccaaaacaaggacttgctgtttagccgggggtctccagctggcatgtctgttcagctcaaaaactggctacctggaccctgttatcggcagcagcgcgtttctaaaacaaaaacagacaacaacaacagcaattttacctggactggtgcttcaaaatataaccttaatgggcgtgaatccatcatcaaccctggcactgctatggcctcacacaaagacgacgaagacaagttctttcccatgagcggtgtcatgatttttggaaaagagagcgccggagcttcaaacactgcattggacaatgtcatgattacagacgaagaggaaattaaagccactaaccctgtggccaccgaaagatttgggaccgtggcagtcaatttccagagcagcagcacagaccctgcgaccggagatgtgcatgttatgggagcattacctggcatggtgtggcaagatagagacgtgtacctgcagggtcccatttgggccaaaattcctcacacagatggacactttcacccgtctcctcttatgggcggctttggactcaaacacccgcctcctcagatcctcatcaaaaacacacctgttcctgcgaatcctccggcggagttttcagctacaaagtttgcttcattcatcacccaatactccacaggacaagtgagcgtggaaattgaatgggagctgcagaaagaaaacagcaagcgctggaatcccgaagtgcagtacacatccaattatgcaaaatctgccaacgttgattttaccgtggacaacaatggactttatactgagcctcgccccattggcacccgttaccttacccgtcccctgtaa

SEQ ID NO: 947 - DNA, 2211 bp, Artificial Sequence
  Description of Artificial Sequence: Synthetic polynucleotide
atggctgccgatggttatcttccagattggctcgaggacaacctctctgagggcattcgcgagtggtgggacttgaaacctggagccccgaaacccaaagccaaccagcaaaagcaggacgacggccggggtctggtgcttcctggctacaagtacctcggacccttcaacggactcgacaagggggagcccgtcaacgcggcggacgcagcggccctcgagcacgacaaggcctacgaccagcagctcaaagcgggtgacaatccgtacctgcggtataaccacgccgacgccgagtttcaggagcgtctgcaagaagatacgtcttttgggggcaacctcgggcgagcagtcttccaggccaagaagcgggttctcgaaccttttggtctggttgaggaaggtgctaagacggctcctggaaagaagagaccggtagagcagtcgccccaagaaccagactcctcatcgggcatcggcaaatcaggccagcagcccgctaaaaagagactcaattttggtcagactggcgactcagagtcagtccccgacccacaacctctcggagaacctccagcaacccccgctgctgtgggacctactacaatggcttcaggcggtggcgcaccaatggcagacaataacgaaggcgccgacggagtgggtaatgcctcaggaaattggcattgcgattccacatggctgggcgacagagtcattaccaccagcacccgaacctgggccctgcccacctataacaaccacctctacaaacaaatctccagcgcttcaacgggggccagcaacgacaaccactacttcggctacagcaccccctgggggtattttgattttaacagattccactgccacttctcaccacgtgactggcagcgactcatcaacaacaattggggattccggcccaagagactcaacttcaagctcttcaacatccaagtcaaggaggtcacgacgaacgatggcgtcacgaccatcgctaataaccttaccagcacggttcaagtcttctcggactcggagtaccagttgccgtacgtcctcggctctgcgcaccagggctgcctccctccgttcccggcggacgtgttcatgattccgcagtacggctacctaacactcaacaatggcagccaggccgtgggacgttcatccttttactgcctggaatatttcccatcgcagatgctgagaacgggcaataactttaccttcagctacacattcgaggacgtgcctttccacagcagctacgcgcacagccaaagcctggaccggctgatgaatcctctcatcgaccagtacttgtattacctaaacagaactcaaaatcagtccggaagtgcccaaaacaaggacttgctgtttagccgggggtctccagctggcatgtctgttcagcccaaaaactggctacctggaccctgttatcggcagcagcgcgtttctaaaacaaaaacagacaacaacaacagcaactttacctggactggtgcttcaaaatataaccttaatgggcgtgaatctataatcaaccctggcactgctatggcttcacacaaagacgacgaagacaagttctttccaatgagcggtgtcatgatttttggcaaggagagcgccggagcttcaaacactgcattggacaatgtcatgattacagacgaagaggaaattaaagccactaaccctgtggccaccgaaagatttgggaccgtggcagtcaatttccagagcagcagcacagaccctgcgaccggagatgtgcatgttatgggagcattacctggcatggtgtggcaagatagagacgtgtacctgcagggtccaatttgggccaaaattcctcacacagatggacactttcacccgtctcctcttatgggcggctttggacttaagcacccgcctcctcagatcctcatcaaaaacacgcctgttcctgcgaatcctccggcagagttttcggctacaaagtttgcttcattcatcacccagtattccacaggacaagtgagtgtggaaattgaatgggagttgcagaaagaaaacagcaagcgttggaatcccgaagtgcagtacacatctaattatgcaaaatctgccaacgttgatttcactgtggacaacaatggactttatactgagcctcgccccattggcacccgttacctcacccgtcccctgtaa

SEQ ID NO: 948 - DNA, 2211 bp, Artificial Sequence
  Description of Artificial Sequence: Synthetic polynucleotide
atggctgccgatggttatcttccagattggctcgaggacaacctctctgagggcattcgcgagtggtgggacttgaaacctggagccccgaaacccaaagccaaccagcaaaagcaggacgacggccggggtctggtgcttcctggctacaagtacctcggacccttcaacggactcgacaagggggagcccgtcaacgcggcggacgcagcggccctcgagcacgacaaggcctacgaccagcagctcaaagcgggtgacaatccgtacctgcggtataaccacgccgacgccgagtttcaggagcgtctgcaagaagatacgtcttttgggggcaacctcgggcgagcagtcttccaggccaagaagagggttctcgaaccttttggtctggttgaggaaggtgctaagacggctcctggaaagaaacgtccggtagagcagtcaccccaagaaccagactcctcctcgggcattggcaaatcaggccagcagcccgctaaaaagagactcaattttggtcagactggcgactcagagtcagtccccgacccacaacctctcggagaacctccagcaacccccgctgctttgggacctactacaatggcttcaggcggtggcgcaccaatggcagacaataacgaaggcgccgacggagtgggtaatgcctcaggaaattggcattgcgattccacatggctgggcgacagagtcatcaccaccagcacccgcacctgggccttgcccacctacaataaccacctctacaagcaaatctccagtgcttcaacgggggccagcaacgacaaccactacttcggctacagcaccccctgggggtattttgatttcaacagattccactgccatttctcaccacgtgactggcagcgactcatcaacaacaactggggattccggcccaagagactcaacttcaagctcttcaacatccaagtcaaggaggtcacgacgaacgatggcgtcacgaccatcgctaataaccttaccagcacggttcaagtcttctcggactcggagtaccagcttccgtacgtcctcggctctgcgcaccagggctgcctccctccgttcccggcggacgtgttcatgattccgcagtacggctacctgacgctcaacaatggcagcaaagccgtgggacgttcatccttttactgcctggaatatttcccttctcagatgctgagaacgggcaacaactttaccttcagctacacctttgaggaagtgcctttccacagcagctacgcgcacagccagagcctggaccggctgatgaatcctctcatcgaccaatacctgtattacctgaacagaactcaaaatcagtccggaagtgcccaaaacaaggacttgctgtttagccgtgggtctccagctggcatgtctgttcagcccaaaaactggctacctggaccctgttatcggcagcagcgcgtttctaaaacaaaaacagacaacaacaacagcaattttacctggactggtgcttcaaaatataacctcaatgggcgtgaatccatcatcaaccctggcactgctatggcctcacacaaagacgacgaagacaagttctttcccatgagcggtgtcatgatttttggaaaagagagcgccggagcttcaaacactgcattggacaatgtcatgattacagacgaagaggaaattaaagccactaaccctgtggccaccgaaagatttgggaccgtggcagtcaatttccagagcagcagcacagaccctgcgaccggagatgtgcatgttatgggagcattacctggcatggtgtggcaagatagagacgtgtacctgcagggtcccatttgggccaaaattcctcacacggatggacactttcacccgtctcctcttatgggcggctttggactcaagcacccgcctcctcagatcctcatcaaaaacacacctgttcctgcgaatcctccggcagagttttcggctacaaagtttgcttcattcatcacccagtactccacaggacaagtgagcgtggaaattgaatgggagttgcagaaagaaaacagtaagcgctggaatcccgaagtgcagtacacatctaattatgcaaaatctgccaacgttgacttcactgtggacaacaatggactttatactgagcctcgccccattggcacccgttacctcacccgtcccctgtaa

SEQ ID NO: 949 - DNA, 2970 bp, Artificial Sequence
  Description of Artificial Sequence: Synthetic polynucleotide
agatgaccgccaaggtcgtagagtccgccaaggccattctgggcggcagcaaggtgcgcgtggaccaaaaatgcaaggcctctgcgcagatcgaccccacccccgtgatcgtcacctccaacaccaacatgtgcgccgtgattgacgggaacagcaccaccttcgagcaccagcagcccctgcaggaccggatgttcaagtttgaactcacccgccgcctcgactacgactttggcaaggtcaccaagcaggaagtcaaggactttttccggtgggcggctgatcacgtgactgacgtggctcatgagttttacgtcacaaagggtggagctaagaaaaggcccgccccctctgacgaggatataagcgagcccaagcggccgcgcgtgtcatttgcgcagccggagacgtcagacgcggaagctcccggagacttcgccgacaggtaccaaaacaaatgttctcgtcacgcgggtatgctgcagatgctctttccctgcaagacgtgcgagagaatgaatcagaattccaacgtctgcttcacgcacggtcagaaagattgcggggagtgctttcccgggtcagaatctcaaccggtttctgtcgtcagaaaaacgtatcagaaactgtgcatccttcatcagctccggggggcacccgagatcgcctgctctgcttgcgaccaactcaaccccgatttggacgattgccaatttgagcaataaatgactgaaatcaggtatggctgctgacggttatcttccagattggctcgaggacaacctctctgaaggcattcgcgagtggtgggcgctgaaacctggagctccacaacccaaggccaaccaacagcatcaggacaacggcaggggtcttgtgcttcctgggtacaagtacctcggacccttcaacggactcgacaagggagagccggtcaacgaggcagacgccgcggccctcgagcacgacaaggcctacgacaagcagctcgagcagggggacaacccgtatctcaagtacaaccacggcgacgccgagttccagcagcgcttggcgaccgacacctcttttgggggcaacctcgggcgagcagtcttccaggccaaaaagaggattctcgagcctctgggtctggttgaagagggcgttaaaacggctcctggaaagaaacgcccattagaaaagactccaaatcggccgaccaacccggactctgggaaggccccggccaagaaaaagcaaaaagacggcgaaccagccgactctgctagaaggacactcgactttgaagactctggagcaggagacggaccccctgagggatcatcttccggagaaatgtctcatgatgctgagatgcgtgcggcgccaggcggaaatgctgtcgaggcgggacaaggtgccgatggagtgggtaatgcctccggtgattggcattgcgattccacctggtcagagggccgagtcaccaccaccagcacccgaacctgggtcctacccacgtacaacaaccacctgtacctgcgaatcggaacaacggccaacagcaacacctacaacggattctccaccccctggggatactttgactttaaccgcttccactgccacttttccccacgcgactggcagcgactcatcaacaacaactggggactcaggccgaaatcgatgcgtgttaaaatcttcaacatacaggtcaaggaggtcacgacgtcaaacggcgagactacggtcgctaataaccttaccagcacggttcagatctttgcggattcgacgtatgaactcccatacgtgatggacgccggtcaggaggggagctttcctccgtttcccaacgacgtctttatggttccccaatacggatactgcggagttgtcactggaaaaaaccagaaccagacagacagaaatgccttttactgcctggaatactttccatcccaaatgctaagaactggcaacaattttgaagtcagttaccaatttgaaaaagttcctttccattcaatgtacgcgcacagccagagcctggacagaatgatgaatcctttactggatcagtacctgtggcatctgcaatcgaccactaccggaaattcccttaatcaaggaacagctaccaccacgtacgggaaaattaccactggagactttgcctactacaggaaaaactggttgcctggagcctgcattaaacaacaaaaattttcaaagaatgccaatcaaaactacaagattcccgccagcgggggagacgcccttttaaagtatgacacgcataccactctaaatgggcgatggagtaacatggctcctggacctccaatggcaaccgcaggtgccggggactcggattttagcaacagccagctgatctttgccggacccaatccgagcggtaacacgaccacatcttcaaacaatttgttgtttacctcagaagaggagattgccacaacaaacccacgagacacggacatgtttggacagattgcagataataatcaaaatgccaccaccgcccctcacatcgctaacctggacgctatgggaattgttcccggaatggtctggcaaaacagagacatctactaccagggccctatttgggccaaggtccctcacacggacggacactttcacccttcgccgctgatgggaggatttggactgaaacacccgcctccacagattttcatcaaaaacacccccgtacccgccaatcccaatactacctttagcgctgcaaggattaattcttttctgacgcagtacagcaccggacaagttgccgttcagatcgactgggaaattcagaaggagcattccaaacgctggaatcccgaagttcaatttacttcaaactacggcactcaaaattctatgctgtgggctcccgacaatgctggcaactaccacgaactccgggctattgggtcccgtttcctcacccaccacttgtaa

SEQ ID NO: 950 - protein, 736 aa, Artificial Sequence
  Description of Artificial Sequence: Synthetic polypeptide
MAADGYLPDWLEDNLSEGIREWWDLKPGAPKPKANQQKQDDGRGLVLPGYKYLGPFNGLDKGEPVNAADAAALEHDKAYDQQLKAGDNPYLRYNHADAEFQERLQEDTSFGGNLGRAVFQAKKRVLEPFGLVEEGAKTAPGKKRPVEQSPQEPDSSSGIGKTGQQPAKKRLNFGQTGDSESVPDPQPLGEPPATPAAVGPTTMASGGGAPMADNNEGADGVGNASGNWHCDSTWLGDRVITTSTRTWALPTYNNHLYKQISSASTGASNDNHYFGYSTPWGYFDFNRFHCHFSPRDWQRLINNNWGFRPKRLNFKLFNIQVKEVTTSDGVTTIANNLTSTVQVFSDSEYQLPYVLGSAHQGCLPPFPADVFMIPQYGYLTLNNGSQAVGRSSFYCLEYFPSQMLRTGNNFTFSYTFEEVPFHSSYAHSQSLDRLMNPLIDQYLYYLNRTQNQSGSAQNKDLLFSRGSPAGMSVQPKNWLPGPCYRQQRVSKTKTGNNNSNFTWTGASKYNLNGHESIINPGTAMASHKDDEDKFFPMSGVMIFGKESAGASNTALDNVMITDEEEIKATNPVATERFGTVAVNFQSSSTHPATGDVHVMGALPGMVWQDRDVYLQGPIWAKIPHTDGHFHPSPLMGGFGLKHPPPQILIKNTPVPANPPAEFSATKFASFITQYSTGQVSVEIEWELQKENSKRWNPEVQYTSNYAKSANVDFTVDNNGLYTEPRPIGTRYLTRPL

SEQ ID NO: 951 - protein, 736 aa, Artificial Sequence; identical to SEQ ID NO: 950
  Description of Artificial Sequence: Synthetic polypeptide

SEQ ID NO: 952 - protein, 733 aa, Artificial Sequence
  Description of Artificial Sequence: Synthetic polypeptide
MTDGYLPDWLEDNLSEGVREWWALQPGAPKPKANQQHQDNARGLVLPGYKYLGPGNGLDKGEPVNAADAAALEHDKAYDQQLKAGDNPYLKYNHADAEFQERLQEDTSFGGNLGRAVFQAKKRILEPLGLVEEAAKTAPGKKRPVEQSPAEPDSSSGIGKSGQQPARKRLNFGQTGDTESVPDPQPLGQPPAAPSGVGSTTMASGGGAPMADNNEGADGVGNSSGNWHCDSQWLGDRVITTSTRTWALPTYNNHLYKQISSQSGATNDNHYFGYSTPWGYFDFNRFHCHFSPRDWQRLINNNWGFRPKRLNFKLFNIQVKEVTQNDGTTTIANNLTSTVQVFTDSEYQLPYVLGSAHQGCLPPFPADVFMVPQYGYLTLNNGSQAVGRSSFYCLEYFPSQMLRTGNNFQFSYTFEDVPFHSSYAHSQSLDRLMNPLIDQYLYYLNRTQTASGTQQSRLLFSQAGPTSMSLQAKNWLPGPCYRQQRLSKQANDNNNSNFPWTGATKYHLNGRDSLVNPGPAMASHKDDKEKFFPMHGTLIFGKEGTNANNADLENVMITDEEEIRTTNPVATEQYGTVSNNLQNSNAGPTTGTVNHQGALPGMVWQDRDVYLQGPIWAKIPHTDGHFHPSPLMGGFGLKHPPPQIMIKNTPVPANPPTNFSAAKFASFITQYSTGQVSVEIEWELQKENSKRWNPEIQYTSNYNKSVNVDFTVDTNGVYSEPRPIGTRYLTRNL

SEQ ID NO: 953 - protein, 736 aa, Artificial Sequence; identical to SEQ ID NO: 768
  Description of Artificial Sequence: Synthetic polypeptide

SEQ ID NO: 954 - protein, 736 aa, Artificial Sequence
  Description of Artificial Sequence: Synthetic polypeptide
MAADGYLPDWLEDNLSEGIRKWWDLKPGAPKPKANQQKQDDGRGLVLPGYKYLGPFNGLDKGEPVNAADAAALEHDKAYDQQLKAGDNPYLRYNHADAEFQERLQEDTSFGGNLGRAVFQAKKRVLEPFGLVEEGAKTAPGKKRPVEQSPQEPDSSSGIGKTGQQPAKKRLNFGQTGDSESVPDPQPLGEPPATPAAVGPTTMASGGGAPMADNNEGADGVGNASGNWHCDSTWLGDRVITTSTRTWALPTYNNHLYKQISSASTGASNDNHYFGYSTPWGYFDFNRFHCHFSPRDWQRLINNNWGFRPKRLNFKLFNIQVKEVTTNDGVTTIANNLTSTVQVFSDSEYQLPYVLGSAHQGCLPPFPADVFMIPQYGYLTLNNGSQAVGRSSFYCLEYFPSQMLRTGNNFTFSYTFEEVPFHSSYAHSQSLDRLMNPLIDQYLYYLNRTQNQSGSAQNKDLLFSRGSPAGMSVQPKNWLPGPCYRQQRVSKTKTDNNNSNFTWTGASKYNLNGRESIINPGTAMASHKDDKDKFFPMSGVMIFGKESAGASNTALDNVMITDEEEIKATNPVATERFGTVAVNFQSSSTDPATGDVHVMGALPGMVWQDRDVYLQGPIWAKIPHTDGHFHPSPLMGGFGLKHPPPQILIKNTPVPANPPAEFSATKFASFITQYSTGQVSVEIEWELQKENSKRWNPEVQYTSNYAKSANVDFTVDNNGLYTEPRPIGTRYLTRPL

SEQ ID NO: 955 - protein, 736 aa, Artificial Sequence
  Description of Artificial Sequence: Synthetic polypeptide
MAADGYLPDWLEDNLSEGIREWWDLKPGAPKPKANQQKQDNGRGLVLPGYKYLGPFNGLDKGEPVNAADAAALEHDKAYDQQLKAGDNPYLRYNHADAEFQERLQEDTSFGGNLGRAVFQAKKRVLEPFGLVEEGAKTAPGKKRPVEQSPQEPDSSSGIGKTGQQPAKKRLNFGQTGDSESVPDPQPLGEPPATPAAVGPTTMASGGGAPMADNNEGADGVGNASGNWHCDSTWLGDRVITTSTRTWALPTYNNHLYKQISSASTGASNDNHYFGYSTPWGYFDFNRFHCHFSPRDWQRLINNNWGFRPKRLNFKLFNIQVKEVTTNDGVTTIANNLTSTVQVFSDSEYQLPYVLGSAHQGCLPPFPADVFMIPQYGYLTLNNGSQAVGRSSFYCLEYFPSQMLRTGNNFTFSYTFEEVPFHSSYAHSQSLDRLMNPLIDQYLYYLNRTQNQSGSAQNKDLLFSRGSPAGMSVQPKNWLPGPCYRQQRVSKTKTDNNNSNFTWTGASKYNLNGRESIINPGTAMASHKDDEDKFFPMSGVMIFGKESAGASNTALDNVMITDEEEIKATNPVATERFGTVAVNFQSSSTHPATGDVHVMGALPGMVWQDRDVYLQGPIWAKIPHTDGHFHPSPLMGGFGLKHPPPQILIKNTPVPANPPAEFSATKFASFITQYSTGQVSVEIEWELQKENSKRWNPEVQYTSNYAKSANVDFTVDNNGLYTEPRPIGTRYLTRPL

SEQ ID NO: 956 - protein, 736 aa, Artificial Sequence
  Description of Artificial Sequence: Synthetic polypeptide
MAADGYLPDWLEDNLSEGIREWWDLKPGAPKPKANQQKQDDGRGLVLPGYKYLGPFNGLDKGEPVNAADAAALEHDKAYDQQLKAGDNPYLRYNHADAEFQERLQEDTSFGGNLGRAVFQAKKRVLEPFGLVEEGAKTAPGKKRPVEQSPQEPDSSSGIGKTGQQPAKKRLNFGQTGDSESVPDPQPLGEPPATPAAVGPTTMASGGGAPMADNNEGADGVGNASGNWHCDSTWLGDRVITTSTRTWALPTYNNHLYKQISSASTGASNDNHYFGYSTPWGYFDFNRFHCHFSPRDWQRLINNNWGFRPKRLNFKLFNIQVKEVTTNDGVTTIANNLTSTVQVFSDSEYQLPYVLGSAHQGCLPPFPADVFMIPQYGYLTLNNGSQAVGRSSFYCLEYFPSQMLRTGNNFTFSYTFEDVPFHSSYAHSQSLDRLMNPLIDQYLYYLNRTQNQSGSAQNKDLLFSRGSPAGMSVQLKNWLPGPCYRQQRVSKTKTDNNNSNFTWTGASKYNLNGRESIINPGTAMASHKDDEDKFFPMSGVMIFGKESAGASNTALDNVMITDEEEIKATNPVATERFGTVAVNFQSSSTDPATGDVHVMGALPGMVWQDRDVYLQGPIWAKIPHTDGHFHPSPLMGGFGLKHPPPQILIKNTPVPANPPAEFSATKFASFITQYSTGQVSVEIEWELQKENSKRWNPEVQYTSNYAKSANVDFTVDNNGLYTEPRPIGTRYLTRPL

SEQ ID NO: 957 - protein, 736 aa, Artificial Sequence
  Description of Artificial Sequence: Synthetic polypeptide
MAADGYLPDWLEDNLSEGIREWWDLKPGAPKPKANQQKQDDGRGLVLPGYKYLGPFNGLDKGEPVNAADAAALEHDKAYDQQLKAGDNPYLRYNHADAEFQERLQEDTSFGGNLGRAVFQAKKRVLEPFGLVEEGAKTAPGKKRPVEQSPQEPDSSSGIGKSGQQPAKKRLNFGQTGDSESVPDPQPLGEPPATPAAVGPTTMASGGGAPMADNNEGADGVGNASGNWHCDSTWLGDRVITTSTRTWALPTYNNHLYKQISSASTGASNDNHYFGYSTPWGYFDFNRFHCHFSPRDWQRLINNNWGFRPKRLNFKLFNIQVKEVTTNDGVTTIANNLTSTVQVFSDSEYQLPYVLGSAHQGCLPPFPADVFMIPQYGYLTLNNGSQAVGRSSFYCLEYFPSQMLRTGNNFTFSYTFEDVPFHSSYAHSQSLDRLMNPLIDQYLYYLNRTQNQSGSAQNKDLLFSRGSPAGMSVQPKNWLPGPCYRQQRVSKTKTDNNNSNFTWTGASKYNLNGRESIINPGTAMASHKDDEDKFFPMSGVMIFGKGSAGASNTALDNVMITDEEEIKATNPVATERFGTVAVNFQSSSTDPATGDVHVMGALPGMVWQDRDVYLQGPIWAKIPHTDGHFHPSPLMGGFGLKHPPPQILIKNTPVPANPPAEFSATKFASFITQYSTGQVSVEIEWELQKENSKRWNPEVQYTSNYAKSANVDFTVDNNGLYTEPRPIGTRYLTRPL

SEQ ID NO: 958 - protein, 736 aa, Artificial Sequence; identical to SEQ ID NO: 699
  Description of Artificial Sequence: Synthetic polypeptide

SEQ ID NO: 959 - protein, 742 aa, Artificial Sequence
  Description of Artificial Sequence: Synthetic polypeptide
MAADGYLPDWLEDNLSEGIREWWALKPGAPQPKANQQHQDNGRGLVLPGYKYLGPFNGLDKGEPVNEADAAALEHDKAYDKQLEQGDNPYLKYNHADAEFQQRLATDTSFGGNLGRAVFQAKKRILEPLGLVEEGVKTAPGKKRPLEKTPNRPTNPDSGKAPAKKKQKDGEPADSARRTLDFEDSGAGDGPPEGSSSGEMSHDAEMRAAPGGNAVEAGQGADGVGNASGDWHCDSTWSEGRVTTTSTRTWVLPTYNNHLYLRIGTTANSNTYNGFSTPWGYFDFNRFHCHFSPRDWQRLINNNWGLRPKSMRVKIFNIQVKEVTTSNGETTVANNLTSTVQIFADSTYELPYVMDAGQEGSFPPFPNDVFMVPQYGYCGVVTGKNQNQTDRNAFYCLEYFPSQMLRTGNNFEVSYQFEKVPFHSMYAHSQSLDRMMNPLLDQYLWHLQSTTTGNSLNQGTATTTYGKITTGDFAYYRKNWLPGACIKQQKFSKNANQNYKIPASGGDALLKYDTHTTLNGRWSNMAPGPPMATAGAGDSDFSNSQLIFAGPNPSGNTTTSSNNLLFTSEEEIATTNPRDTDMFGQIADNNQNATTAPHIANLDAMGIVPGMVWQNRDIYYQGPIWAKVPHTDGHFHPSPLMGGFGLKHPPPQIFIKNTPVPANPNTTFSAARINSFLTQYSTGQVAVQIDWEIQKEHSKRWNPEVQFTSNYGTQNSMLWAPDNAGNYHELRAIGSRFLTHHL

SEQ ID NO: 960 - DNA, 2211 bp, Artificial Sequence
  Description of Artificial Sequence: Synthetic polynucleotide
atggctgccgatggttatcttccagattggctcgaggacaacctctctgagggcattcgcgagtggtgggacttgaaacctggagccccgaagcccaaagccaaccagcaaaagcaggacgacggccggggtctggtgcttcctggctacaagtacctcggacccttcaacggactcgacaagggggagcccgtcaacgcggcggacgcagcggccctcgagcacgacaaggcctacgaccagcagctcaaagcgggtgacaatccgtacctgcggtataaccacgccgacgccgagtttcaggagcgtctgcaagaagatacgtcttttgggggcaacctcgggcgagcagtcttccaggccaagaagcgggttctcgaacctctcggtctggttgaggaaggcgctaaggcggctcctggaaagaaacgtccggtagagcagtcgccacaagagccagactcctcctcgggcatcggcaagacaggccagcagcccgctaaaaagagactcaattttggtcagactggcgactcagagtcagtccccgatccacaacctctcggagaacctccagcagccccctcaggtctgggacctaatacaatggcttcaggcggtggcgctccaatggcagacaataacgaaggcgccgacggagtgggtaattcctcgggaaattggcattgcgattccacatggctgggggacagagtcatcaccaccagcacccgaacctgggccctgcccacctacaacaaccacctctacaagcaaatctccaacggcacctcgggaggaagcaccaacgacaacacctattttggctacagcaccccctgggggtattttgacttcaacagattccactgtcacttttcaccacgtgactggcaacgactcatcaacaacaattggggattccggcccaaaagactcaacttcaagctgttcaacatccaggtcaaggaagtcacgacgaacgaaggcaccaagaccatcgccaataatctcaccagcaccgtgcaggtctttacggactcggagtaccagttaccgtacgtgctaggatccgctcaccagggatgtctgcctccgttcccggcggacgtcttcatggttcctcagtacggctatttaactttaaacaatggaagccaagccctgggacgttcctccttctactgtctggagtatttcccatcgcagatgctgagaaccggcaacaactttcagttcagctacaccttcgaggacgtgcctttccacagcagctacgcgcacagccagagcctggacaggctgatgaatcccctcatcgaccagtacctgtactacctggtcagaacgcaaacgactggaactggagggacgcagactctggcattcagccaagcgggtcctagctcaatggccaaccaggctagaaattgggtgcccggaccttgctaccggcagcagcgcgtctccacgacaaccaaccagaacaacaacagcaactttgcctggacgggagctgccaagtttaagctgaacggccgagactctctaatgaatccgggcgtggcaatggcttcccacaaggatgacgacgaccgcttcttcccttcgagcggggtcctgatttttggcaagcaaggagccgggaacgatggagtggattacagccaagtgctgattacagatgaggaagaaatcaaggctaccaaccccgtggccacagaagaatatggagcagtggccatcaacaaccaggccgccaatacgcaggcgcagaccggactcgtgcacaaccagggggtgattcccggcatggtgtggcagaatagagacgtgtacctgcagggtcccatctgggccaaaattcctcacacggacggcaactttcacccgtctcccctgatgggcggctttggactgaagcacccgcctcctcaaattctcatcaagaacacaccggttccagcggacccgccgcttaccttcaaccaggccaagctgaactctttcatcacgcagtacagcaccggacaggtcagcgtggaaatcgagtgggagctgcagaaagaaaacagcaaacgctggaatccagagattcaatacacttccaactactacaaatctacaaatgtggactttgctgtcaacacggagggggtttatagcgagcctcgccccattggcacccgttacctcacccgcaacctgtaa

SEQ ID NO: 961 - DNA, 2592 bp, Artificial Sequence
  Description of Artificial Sequence: Synthetic polynucleotide
ctggctgccgatggttatcttccagattggctcgaggacaacctctctgagggcattcgcgagtggtgggacttgaaacctggagccccgaagcccaaagccaaccagcaaaagcaggacgacggccggggtctggtgcttcctggctacaagtacctcggacccttcaacggactcgacaagggggagcccgtcaacgcggcggacgcagcggccctcgagcacgacaaggcctacgaccagcagctcaaagcgggtgacaatccgtacctgcggtataaccacgccgacgccgagtttcaggagcgtctgcaagaagatacgtcttttgggggcaacctcgggcgagcagtcttccaggccaagaagcgggttctcgaacctctcggtctggttgaggaaggcgctaagatggaagtgcagctccaagccagtggtggcggactggtgcaggcaggaggcagcttgaggctcagctgtgccgccagcggcttcaagatcacccactacaccatgggctggttccggcaggcccctggcaaggagagggagttcgtgagcaggattacctggggtggtgacaacaccttctacagcaacagcgtgaagggcaggttcaccatcagcagggacaacgccaagaacaccgtgtacctgcagatgaacagcctgaagcccgaggacaccgccgactactactgtgcagccggcagtaccagcaccgctacccccctgagggtggactactggggcaaaggcactcaggtgacagtgtcttcaggagggggtggcagcgctcctggaaagaaacgtccggtagagcagtcgccacaagagccagactcctcctcgggcatcggcaagacaggccagcagcccgctaaaaagagactcaattttggtcagactggcgactcagagtcagtccccgatccacaacctctcggagaacctccagcagccccctcaggtctgggacctaatacaatggcttcaggcggtggcgctccaatggcagacaataacgaaggcgccgacggagtgggtaattcctcgggaaattggcattgcgattccacatggctgggggacagagtcatcaccaccagcacccgaacctgggccctgcccacctacaacaaccacctctacaagcaaatctccaacggcacctcgggaggaagcaccaacgacaacacctattttggctacagcaccccctgggggtattttgacttcaacagattccactgtcacttttcaccacgtgactggcaacgactcatcaacaacaattggggattccggcccaaaagactcaacttcaagctgttcaacatccaggtcaaggaagtcacgacgaacgaaggcaccaagaccatcgccaataatctcaccagcaccgtgcaggtctttacggactcggagtaccagttaccgtacgtgctaggatccgctcaccagggatgtctgcctccgttcccggcggacgtcttcatggttcctcagtacggctatttaactttaaacaatggaagccaagccctgggacgttcctccttctactgtctggagtatttcccatcgcagatgctgagaaccggcaacaactttcagttcagctacaccttcgaggacgtgcctttccacagcagctacgcgcacagccagagcctggacaggctgatgaatcccctcatcgaccagtacctgtactacctggtcagaacgcaaacgactggaactggagggacgcagactctggcattcagccaagcgggtcctagctcaatggccaaccaggctagaaattgggtgcccggaccttgctaccggcagcagcgcgtctccacgacaaccaaccagaacaacaacagcaactttgcctggacgggagctgccaagtttaagctgaacggccgagactctctaatgaatccgggcgtggcaatggcttcccacaaggatgacgacgaccgcttcttcccttcgagcggggtcctgatttttggcaagcaaggagccgggaacgatggagtggattacagccaagtgctgattacagatgaggaagaaatcaaggctaccaaccccgtggccacagaagaatatggagcagtggccatcaacaaccaggccgccaatacgcaggcgcagaccggactcgtgcacaaccagggggtgattcccggcatggtgtggcagaatagagacgtgtacctgcagggtcccatctgggccaaaattcctcacacggacggcaactttcacccgtctcccctgatgggcggctttggactgaagcacccgcctcctcaaattctcatcaagaacacaccggttccagcggacccgccgcttaccttcaaccaggccaagctgaactctttcatcacgcagtacagcaccggacaggtcagcgtggaaatcgagtgggagctgcagaaagaaaacagcaaacgctggaatccagagattcaatacacttccaactactacaaatctacaaatgtggactttgctgtcaacacggagggggtttatagcgagcctcgccccattggcacccgttacctcacccgcaacctgtaa

SEQ ID NO: 962 - DNA, 2601 bp, Artificial Sequence
  Description of Artificial Sequence: Synthetic polynucleotide
ctggctgccgatggttatcttccagattggctcgaggacaacctctctgagggcattcgcgagtggtgggacttgaaacctggagccccgaagcccaaagccaaccagcaaaagcaggacgacggccggggtctggtgcttcctggctacaagtacctcggacccttcaacggactcgacaagggggagcccgtcaacgcggcggacgcagcggccctcgagcacgacaaggcctacgaccagcagctcaaagcgggtgacaatccgtacctgcggtataaccacgccgacgccgagtttcaggagcgtctgcaagaagatacgtcttttgggggcaacctcgggcgagcagtcttccaggccaagaagcgggttctcgaacctctcggtctggttgaggaaggcgctaagatggaggtgcagctgcaggcttctggaggaggactggtgcaggctggagggagtctgaggctgtcttgcagtgcctcagtgaggactttctccatctacgccatgggctggtttaggcaggctcccgggaaggagcgcgaattcgtggccggaatcaaccggtctggcgacgtgaccaagtacgctgatttcgtgaaaggccggtttagcatttccagagacaacgccaagaatatggtgtatctgcagatgaactccctgaaacctgaagacacagctctgtactattgtgccgctacttgggcctacgataccgtgggggctctgacatcaggatataatttttggggccaggggacccaggtgacagtgagctccggaggaggaggaagcgctcctggaaagaaacgtccggtagagcagtcgccacaagagccagactcctcctcgggcatcggcaagacaggccagcagcccgctaaaaagagactcaattttggtcagactggcgactcagagtcagtccccgatccacaacctctcggagaacctccagcagccccctcaggtctgggacctaatacaatggcttcaggcggtggcgctccaatggcagacaataacgaaggcgccgacggagtgggtaattcctcgggaaattggcattgcgattccacatggctgggggacagagtcatcaccaccagcacccgaacctgggccctgcccacctacaacaaccacctctacaagcaaatctccaacggcacctcgggaggaagcaccaacgacaacacctattttggctacagcaccccctgggggtattttgacttcaacagattccactgtcacttttcaccacgtgactggcaacgactcatcaacaacaattggggattccggcccaaaagactcaacttcaagctgttcaacatccaggtcaaggaagtcacgacgaacgaaggcaccaagaccatcgccaataatctcaccagcaccgtgcaggtctttacggactcggagtaccagttaccgtacgtgctaggatccgctcaccagggatgtctgcctccgttcccggcggacgtcttcatggttcctcagtacggctatttaactttaaacaatggaagccaagccctgggacgttcctccttctactgtctggagtatttcccatcgcagatgctgagaaccggcaacaactttcagttcagctacaccttcgaggacgtgcctttccacagcagctacgcgcacagccagagcctggacaggctgatgaatcccctcatcgaccagtacctgtactacctggtcagaacgcaaacgactggaactggagggacgcagactctggcattcagccaagcgggtcctagctcaatggccaaccaggctagaaattgggtgcccggaccttgctaccggcagcagcgcgtctccacgacaaccaaccagaacaacaacagcaactttgcctggacgggagctgccaagtttaagctgaacggccgagactctctaatgaatccgggcgtggcaatggcttcccacaaggatgacgacgaccgcttcttcccttcgagcggggtcctgatttttggcaagcaaggagccgggaacgatggagtggattacagccaagtgctgattacagatgaggaagaaatcaaggctaccaaccccgtggccacagaagaatatggagcagtggccatcaacaaccaggccgccaatacgcaggcgcagaccggactcgtgcacaaccagggggtgattcccggcatggtgtggcagaatagagacgtgtacctgcagggtcccatctgggccaaaattcctcacacggacggcaactttcacccgtctcccctgatgggcggctttggactgaagcacccgcctcctcaaattctcatcaagaacacaccggttccagcggacccgccgcttaccttcaaccaggccaagctgaactctttcatcacgcagtacagcaccggacaggtcagcgtggaaatcgagtgggagctgcagaaagaaaacagcaaacgctggaatccagagattcaatacacttccaactactacaaatctacaaatgtggactttgctgtcaacacggagggggtttatagcgagcctcgccccattggcacccgttacctcacccgcaacctgtaa

SEQ ID NO: 963 - DNA, 2367 bp, Artificial Sequence
  Description of Artificial Sequence: Synthetic polynucleotide
ctggctgccgatggttatcttccagattggctcgaggacaacctctctgagggcattcgcgagtggtgggacttgaaacctggagccccgaagcccaaagccaaccagcaaaagcaggacgacggccggggtctggtgcttcctggctacaagtacctcggacccttcaacggactcgacaagggggagcccgtcaacgcggcggacgcagcggccctcgagcacgacaaggcctacgaccagcagctcaaagcgggtgacaatccgtacctgcggtataaccacgccgacgccgagtttcaggagcgtctgcaagaagatacgtcttttgggggcaacctcgggcgagcagtcttccaggccaagaagcgggttctcgaacctctcggtctggttgaggaaggcgctaagatgccaagcagtgtaatcgatgcgctgcagtacaagctggagggcaccacgaggctgaccaggaagaggggtctgaagctggccacggccctcagccttagcaataagttcgtagagggcagccccagcggcggcggcggcagcggcggcggcggcagcgctcctggaaagaaacgtccggtagagcagtcgccacaagagccagactcctcctcgggcatcggcaagacaggccagcagcccgctaaaaagagactcaattttggtcagactggcgactcagagtcagtccccgatccacaacctctcggagaacctccagcagccccctcaggtctgggacctaatacaatggcttcaggcggtggcgctccaatggcagacaataacgaaggcgccgacggagtgggtaattcctcgggaaattggcattgcgattccacatggctgggggacagagtcatcaccaccagcacccgaacctgggccctgcccacctacaacaaccacctctacaagcaaatctccaacggcacctcgggaggaagcaccaacgacaacacctattttggctacagcaccccctgggggtattttgacttcaacagattccactgtcacttttcaccacgtgactggcaacgactcatcaacaacaattggggattccggcccaaaagactcaacttcaagctgttcaacatccaggtcaaggaagtcacgacgaacgaaggcaccaagaccatcgccaataatctcaccagcaccgtgcaggtctttacggactcggagtaccagttaccgtacgtgctaggatccgctcaccagggatgtctgcctccgttcccggcggacgtcttcatggttcctcagtacggctatttaactttaaacaatggaagccaagccctgggacgttcctccttctactgtctggagtatttcccatcgcagatgctgagaaccggcaacaactttcagttcagctacaccttcgaggacgtgcctttccacagcagctacgcgcacagccagagcctggacaggctgatgaatcccctcatcgaccagtacctgtactacctggtcagaacgcaaacgactggaactggagggacgcagactctggcattcagccaagcgggtcctagctcaatggccaaccaggctagaaattgggtgcccggaccttgctaccggcagcagcgcgtctccacgacaaccaaccagaacaacaacagcaactttgcctggacgggagctgccaagtttaagctgaacggccgagactctctaatgaatccgggcgtggcaatggcttcccacaaggatgacgacgaccgcttcttcccttcgagcggggtcctgatttttggcaagcaaggagccgggaacgatggagtggattacagccaagtgctgattacagatgaggaagaaatcaaggctaccaaccccgtggccacagaagaatatggagcagtggccatcaacaaccaggccgccaatacgcaggcgcagaccggactcgtgcacaaccagggggtgattcccggcatggtgtggcagaatagagacgtgtacctgcagggtcccatctgggccaaaattcctcacacggacggcaactttcacccgtctcccctgatgggcggctttggactgaagcacccgcctcctcaaattctcatcaagaacacaccggttccagcggacccgccgcttaccttcaaccaggccaagctgaactctttcatcacgcagtacagcaccggacaggtcagcgtggaaatcgagtgggagctgcagaaagaaaacagcaaacgctggaatccagagattcaatacacttccaactactacaaatctacaaatgtggactttgctgtcaacacggagggggtttatagcgagcctcgccccattggcacccgttacctcacccgcaacctgtaa

SEQ ID NO: 964 - DNA, 2328 bp, Artificial Sequence
  Description of Artificial Sequence: Synthetic polynucleotide
ctggctgccgatggttatcttccagattggctcgaggacaacctctctgagggcattcgcgagtggtgggacttgaaacctggagccccgaagcccaaagccaaccagcaaaagcaggacgacggccggggtctggtgcttcctggctacaagtacctcggacccttcaacggactcgacaagggggagcccgtcaacgcggcggacgcagcggccctcgagcacgacaaggcctacgaccagcagctcaaagcgggtgacaatccgtacctgcggtataaccacgccgacgccgagtttcaggagcgtctgcaagaagatacgtcttttgggggcaacctcgggcgagcagtcttccaggccaagaagcgggttctcgaacctctcggtctggttgaggaaggcgctaagatgtataccatctggatgcccgagaaccccaggcccggtaccccctgcgacatcttcaccaacagcaggggcaagcgagccagcaacggcggcggcggcggcagcggcggcggcggcagcgctcctggaaagaaacgtccggtagagcagtcgccacaagagccagactcctcctcgggcatcggcaagacaggccagcagcccgctaaaaagagactcaattttggtcagactggcgactcagagtcagtccccgatccacaacctctcggagaacctccagcagccccctcaggtctgggacctaatacaatggcttcaggcggtggcgctccaatggcagacaataacgaaggcgccgacggagtgggtaattcctcgggaaattggcattgcgattccacatggctgggggacagagtcatcaccaccagcacccgaacctgggccctgcccacctacaacaaccacctctacaagcaaatctccaacggcacctcgggaggaagcaccaacgacaacacctattttggctacagcaccccctgggggtattttgacttcaacagattccactgtcacttttcaccacgtgactggcaacgactcatcaacaacaattggggattccggcccaaaagactcaacttcaagctgttcaacatccaggtcaaggaagtcacgacgaacgaaggcaccaagaccatcgccaataatctcaccagcaccgtgcaggtctttacggactcggagtaccagttaccgtacgtgctaggatccgctcaccagggatgtctgcctccgttcccggcggacgtcttcatggttcctcagtacggctatttaactttaaacaatggaagccaagccctgggacgttcctccttctactgtctggagtatttcccatcgcagatgctgagaaccggcaacaactttcagttcagctacaccttcgaggacgtgcctttccacagcagctacgcgcacagccagagcctggacaggctgatgaatcccctcatcgaccagtacctgtactacctggtcagaacgcaaacgactggaactggagggacgcagactctggcattcagccaagcgggtcctagctcaatggccaaccaggctagaaattgggtgcccggaccttgctaccggcagcagcgcgtctccacgacaaccaaccagaacaacaacagcaactttgcctggacgggagctgccaagtttaagctgaacggccgagactctctaatgaatccgggcgtggcaatggcttcccacaaggatgacgacgaccgcttcttcccttcgagcggggtcctgatttttggcaagcaaggagccgggaacgatggagtggattacagccaagtgctgattacagatgaggaagaaatcaaggctaccaaccccgtggccacagaagaatatggagcagtggccatcaacaaccaggccgccaatacgcaggcgcagaccggactcgtgcacaaccagggggtgattcccggcatggtgtggcagaatagagacgtgtacctgcagggtcccatctgggccaaaattcctcacacggacggcaactttcacccgtctcccctgatgggcggctttggactgaagcacccgcctcctcaaattctcatcaagaacacaccggttccagcggacccgccgcttaccttcaaccaggccaagctgaactctttcatcacgcagtacagcaccggacaggtcagcgtggaaatcgagtgggagctgcagaaagaaaacagcaaacgctggaatccagagattcaatacacttccaactactacaaatctacaaatgtggactttgctgtcaacacggagggggtttatagcgagcctcgccccattggcacccgttacctcacccgcaacctgtaa

SEQ ID NO: 965 - DNA, 2298 bp, Artificial Sequence
  Description of Artificial Sequence: Synthetic polynucleotide
ctggctgccgatggttatcttccagattggctcgaggacaacctctctgagggcattcgcgagtggtgggacttgaaacctggagccccgaagcccaaagccaaccagcaaaagcaggacgacggccggggtctggtgcttcctggctacaagtacctcggacccttcaacggactcgacaagggggagcccgtcaacgcggcggacgcagcggccctcgagcacgacaaggcctacgaccagcagctcaaagcgggtgacaatccgtacctgcggtataaccacgccgacgccgagtttcaggagcgtctgcaagaagatacgtcttttgggggcaacctcgggcgagcagtcttccaggccaagaagcgggttctcgaacctctcggtctggttgaggaaggcgctaagatgaccttcttctacggcggcagcaggggcaagaggaacaacttcaagaccgaggagtacggcggcggcggcagcggcggcggcggcagcgctcctggaaagaaacgtccggtagagcagtcgccacaagagccagactcctcctcgggcatcggcaagacaggccagcagcccgctaaaaagagactcaattttggtcagactggcgactcagagtcagtccccgatccacaacctctcggagaacctccagcagccccctcaggtctgggacctaatacaatggcttcaggcggtggcgctccaatggcagacaataacgaaggcgccgacggagtgggtaattcctcgggaaattggcattgcgattccacatggctgggggacagagtcatcaccaccagcacccgaacctgggccctgcccacctacaacaaccacctctacaagcaaatctccaacggcacctcgggaggaagcaccaacgacaacacctattttggctacagcaccccctgggggtattttgacttcaacagattccactgtcacttttcaccacgtgactggcaacgactcatcaacaacaattggggattccggcccaaaagactcaacttcaagctgttcaacatccaggtcaaggaagtcacgacgaacgaaggcaccaagaccatcgccaataatctcaccagcaccgtgcaggtctttacggactcggagtaccagttaccgtacgtgctaggatccgctcaccagggatgtctgcctccgttcccggcggacgtcttcatggttcctcagtacggctatttaactttaaacaatggaagccaagccctgggacgttcctccttctactgtctggagtatttcccatcgcagatgctgagaaccggcaacaactttcagttcagctacaccttcgaggacgtgcctttccacagcagctacgcgcacagccagagcctggacaggctgatgaatcccctcatcgaccagtacctgtactacctggtcagaacgcaaacgactggaactggagggacgcagactctggcattcagccaagcgggtcctagctcaatggccaaccaggctagaaattgggtgcccggaccttgctaccggcagcagcgcgtctccacgacaaccaaccagaacaacaacagcaactttgcctggacgggagctgccaagtttaagctgaacggccgagactctctaatgaatccgggcgtggcaatggcttcccacaaggatgacgacgaccgcttcttcccttcgagcggggtcctgatttttggcaagcaaggagccgggaacgatggagtggattacagccaagtgctgattacagatgaggaagaaatcaaggctaccaaccccgtggccacagaagaatatggagcagtggccatcaacaaccaggccgccaatacgcaggcgcagaccggactcgtgcacaaccagggggtgattcccggcatggtgtggcagaatagagacgtgtacctgcagggtcccatctgggccaaaattcctcacacggacggcaactttcacccgtctcccctgatgggcggctttggactgaagcacccgcctcctcaaattctcatcaagaacacaccggttccagcggacccgccgcttaccttcaaccaggccaagctgaactctttcatcacgcagtacagcaccggacaggtcagcgtggaaatcgagtgggagctgcagaaagaaaacagcaaacgctggaatccagagattcaatacacttccaactactacaaatctacaaatgtggactttgctgtcaacacggagggggtttatagcgagcctcgccccattggcacccgttacctcacccgcaacctgtaa

SEQ ID NO: 966 - DNA, 2211 bp, Artificial Sequence
  Description of Artificial Sequence: Synthetic polynucleotide
atggctgccgatggttatcttccagattggctcgaggacaaccttagtgaaggaattcgcgagtggtgggctttgaaacctggagcccctcaacccaaggcaaatcaacaacatcaagacaacgctcgaggtcttgtgcttccgggttacaaataccttggacccggcaacggactcgacaagggggagccggtcaacgcagcagacgcggcggccctcgagcacgacaaggcctacgaccagcagctcaaggccggagacaacccgtacctcaagtacaaccacgccgacgccgagttccaggagcggctcaaagaagatacgtcttttgggggcaacctcgggcgagcagtcttccaggccaaaaagaggcttcttgaacctcttggtctggttgaggaagcggctaaggcggctcctggaaagaagaggcctgtagagcagtctcctcaggaaccggactcctccgcgggtattggcaaatcgggtgcacagcccgctaaaaagagactcaatttcggtcagactggcgacacagagtcagtcccagaccctcaaccaatcggagaacctcccgcagccccctcaggtgtgggatctcttacaatggcttcaggtggtggcgcaccagtggcagacaataacgaaggtgccgatggagtgggtagttcctcgggaaattggcattgcgattcccaatggctgggggacagagtcatcaccaccagcacccgaacctgggccctgcccacctacaacaatcacctctacaagcaaatctccaacagcacatctggaggatcttcaaatgacaacgcctacttcggctacagcaccccctgggggtattttgacttcaacagattccactgccacttctcaccacgtgactggcagcgactcatcaacaacaactggggattccggcctaagcgactcaacttcaagctcttcaacattcaggtcaaagaggttacggacaacaatggagtcaagaccatcgccaataaccttaccagcacggtccaggtcttcacggactcagactatcagctcccgtacgtgctcgggtcggctcacgagggctgcctcccgccgttcccagcggacgttttcatgattcctcagtacgggtatctgacgcttaatgatggaagccaggccgtgggtcgttcgtccttttactgcctggaatatttcccgtcgcaaatgctaagaacgggtaacaacttccagttcaactacgagtttgagaacgtacctttccatagcagctacgctcacagccaaagcctggaccgactaatgaatccactcatcgaccaatacttgtactatctctcaaagactattaacgattctggacagaatcaacaaacgctaaaattcagtgtggccggacccagcaacatggctgtccagggaagaaactacatacctggacccagctaccgacaacaacgtgtctcaaccactgtgactcaaaacaacaacagcgaatttgcttggcctggagcttcttcttgggctctcaatggacgtaatagcttgatgaatcctggacctgctatggccagccacaaagaaggagaggaccgtttctttcctttgtctggatctttaatttttggcaaacaaggaactggaagagacaacgtggatgcggacgaagtcatgataaccaacgaagaagaaattaaaactactaacccggtagcaacggagtcctatggacaagtggccataaaccaccagagtgcccaagcacaggcgcagaccggctgggttcaaaaccaaggaatacttccgggtatggtttggcaggacagagatgtgtacctgcaaggacccatttgggccaaaattcctcacacggacggcaactttcacccttctccgctgatgggagggtttggaatgaagcacccgcctcctcagatcctcatcaaaaacacacctgtacctgcggatcctccaacggccttcaacaaggacaagctgaactctttcatcacccagtattctactggccaagtcagcgtggagatcgagtgggagctgcagaaggaaaacagcaagcgctggaacccggagatccagtacacttccaactattacaagtctaataatgttgaatttgctgttaatactgaaggtgtatatagtgaaccccgccccattggcaccagatacctgactcgtaatctgtaa

SEQ ID NO: 967 - DNA, 2277 bp, Artificial Sequence
  Description of Artificial Sequence: Synthetic polynucleotide
ctggctgccgatggttatcttccagattggctcgaggacaaccttagtgaaggaattcgcgagtggtgggctttgaaacctggagcccctcaacccaaggcaaatcaacaacatcaagacaacgctcgaggtcttgtgcttccgggttacaaataccttggacccggcaacggactcgacaagggggagccggtcaacgcagcagacgcggcggccctcgagcacgacaaggcctacgaccagcagctcaaggccggagacaacccgtacctcaagtacaaccacgccgacgccgagttccaggagcggctcaaagaagatacgtcttttgggggcaacctcgggcgagcagtcttccaggccaaaaagaggcttcttgaacctcttggtctggttgaggaagcggctaagatgaacaaccagaagatcgtgaacctgaaggagaaggtggcccagctggaggccggcggcggcggcagcgctcctggaaagaagaggcctgtagagcagtctcctcaggaaccggactcctccgcgggtattggcaaatcgggtgcacagcccgctaaaaagagactcaatttcggtcagactggcgacacagagtcagtcccagaccctcaaccaatcggagaacctcccgcagccccctcaggtgtgggatctcttacaatggcttcaggtggtggcgcaccagtggcagacaataacgaaggtgccgatggagtgggtagttcctcgggaaattggcattgcgattcccaatggctgggggacagagtcatcaccaccagcacccgaacctgggccctgcccacctacaacaatcacctctacaagcaaatctccaacagcacatctggaggatcttcaaatgacaacgcctacttcggctacagcaccccctgggggtattttgacttcaacagattccactgccacttctcaccacgtgactggcagcgactcatcaacaacaactggggattccggcctaagcgactcaacttcaagctcttcaacattcaggtcaaagaggttacggacaacaatggagtcaagaccatcgccaataaccttaccagcacggtccaggtcttcacggactcagactatcagctcccgtacgtgctcgggtcggctcacgagggctgcctcccgccgttcccagcggacgttttcatgattcctcagtacgggtatctgacgcttaatgatggaagccaggccgtgggtcgttcgtccttttactgcctggaatatttcccgtcgcaaatgctaagaacgggtaacaacttccagttcaactacgagtttgagaacgtacctttccatagcagctacgctcacagccaaagcctggaccgactaatgaatccactcatcgaccaatacttgtactatctctcaaagactattaacgattctggacagaatcaacaaacgctaaaattcagtgtggccggacccagcaacatggctgtccagggaagaaactacatacctggacccagctaccgacaacaacgtgtctcaaccactgtgactcaaaacaacaacagcgaatttgcttggcctggagcttcttcttgggctctcaatggacgtaatagcttgatgaatcctggacctgctatggccagccacaaagaaggagaggaccgtttctttcctttgtctggatctttaatttttggcaaacaaggaactggaagagacaacgtggatgcggacgaagtcatgataaccaacgaagaagaaattaaaactactaacccggtagcaacggagtcctatggacaagtggccataaaccaccagagtgcccaagcacaggcgcagaccggctgggttcaaaaccaaggaatacttccgggtatggtttggcaggacagagatgtgtacctgcaaggacccatttgggccaaaattcctcacacggacggcaactttcacccttctccgctgatgggagggtttggaatgaagcacccgcctcctcagatcctcatcaaaaacacacctgtacctgcggatcctccaacggccttcaacaaggacaagctgaactctttcatcacccagtattctactggccaagtcagcgtggagatcgagtgggagctgcagaaggaaaacagcaagcgctggaacccggagatccagtacacttccaactattacaagtctaataatgttgaatttgctgttaatactgaaggtgtatatagtgaaccccgccccattggcaccagatacctgactcgtaatctgtaa

SEQ ID NO: 968 - DNA, 2313 bp, Artificial Sequence
  Description of Artificial Sequence: Synthetic polynucleotide
ctggctgccgatggttatcttccagattggctcgaggacaaccttagtgaaggaattcgcgagtggtgggctttgaaacctggagcccctcaacccaaggcaaatcaacaacatcaagacaacgctcgaggtcttgtgcttccgggttacaaataccttggacccggcaacggactcgacaagggggagccggtcaacgcagcagacgcggcggccctcgagcacgacaaggcctacgaccagcagctcaaggccggagacaacccgtacctcaagtacaaccacgccgacgccgagttccaggagcggctcaaagaagatacgtcttttgggggcaacctcgggcgagcagtcttccaggccaaaaagaggcttcttgaacctcttggtctggttgaggaagcggctaagatgtataccatctggatgcccgagaaccccaggcccggtaccccctgcgacatcttcaccaacagcaggggcaagcgagccagcaacggcggcggcggcggcagcgctcctggaaagaagaggcctgtagagcagtctcctcaggaaccggactcctccgcgggtattggcaaatcgggtgcacagcccgctaaaaagagactcaatttcggtcagactggcgacacagagtcagtcccagaccctcaaccaatcggagaacctcccgcagccccctcaggtgtgggatctcttacaatggcttcaggtggtggcgcaccagtggcagacaataacgaaggtgccgatggagtgggtagttcctcgggaaattggcattgcgattcccaatggctgggggacagagtcatcaccaccagcacccgaacctgggccctgcccacctacaacaatcacctctacaagcaaatctccaacagcacatctggaggatcttcaaatgacaacgcctacttcggctacagcaccccctgggggtattttgacttcaacagattccactgccacttctcaccacgtgactggcagcgactcatcaacaacaactggggattccggcctaagcgactcaacttcaagctcttcaacattcaggtcaaagaggttacggacaacaatggagtcaagaccatcgccaataaccttaccagcacggtccaggtcttcacggactcagactatcagctcccgtacgtgctcgggtcggctcacgagggctgcctcccgccgttcccagcggacgttttcatgattcctcagtacgggtatctgacgcttaatgatggaagccaggccgtgggtcgttcgtccttttactgcctggaatatttcccgtcgcaaatgctaagaacgggtaacaacttccagttcaactacgagtttgagaacgtacctttccatagcagctacgctcacagccaaagcctggaccgactaatgaatccactcatcgaccaatacttgtactatctctcaaagactattaacgattctggacagaatcaacaaacgctaaaattcagtgtggccggacccagcaacatggctgtccagggaagaaactacatacctggacccagctaccgacaacaacgtgtctcaaccactgtgactcaaaacaacaacagcgaatttgcttggcctggagcttcttcttgggctctcaatggacgtaatagcttgatgaatcctggacctgctatggccagccacaaagaaggagaggaccgtttctttcctttgtctggatctttaatttttggcaaacaaggaactggaagagacaacgtggatgcggacgaagtcatgataaccaacgaagaagaaattaaaactactaacccggtagcaacggagtcctatggacaagtggccataaaccaccagagtgcccaagcacaggcgcagaccggctgggttcaaaaccaaggaatacttccgggtatggtttggcaggacagagatgtgtacctgcaaggacccatttgggccaaaattcctcacacggacggcaactttcacccttctccgctgatgggagggtttggaatgaagcacccgcctcctcagatcctcatcaaaaacacacctgtacctgcggatcctccaacggccttcaacaaggacaagctgaactctttcatcacccagtattctactggccaagtcagcgtggagatcgagtgggagctgcagaaggaaaacagcaagcgctggaacccggagatccagtacacttccaactattacaagtctaataatgttgaatttgctgttaatactgaaggtgtatatagtgaaccccgccccattggcaccagatacctgactcgtaatctgtaa

SEQ ID NO: 969 - DNA, 2283 bp, Artificial Sequence
  Description of Artificial Sequence: Synthetic polynucleotide
ctggctgccgatggttatcttccagattggctcgaggacaaccttagtgaaggaattcgcgagtggtgggctttgaaacctggagcccctcaacccaaggcaaatcaacaacatcaagacaacgctcgaggtcttgtgcttccgggttacaaataccttggacccggcaacggactcgacaagggggagccggtcaacgcagcagacgcggcggccctcgagcacgacaaggcctacgaccagcagctcaaggccggagacaacccgtacctcaagtacaaccacgccgacgccgagttccaggagcggctcaaagaagatacgtcttttgggggcaacctcgggcgagcagtcttccaggccaaaaagaggcttcttgaacctcttggtctggttgaggaagcggctaagatgaccttcttctacggcggcagcaggggcaagaggaacaacttcaagaccgaggagtacggcggcggcggcagcgctcctggaaagaagaggcctgtagagcagtctcctcaggaaccggactcctccgcgggtattggcaaatcgggtgcacagcccgctaaaaagagactcaatttcggtcagactggcgacacagagtcagtcccagaccctcaaccaatcggagaacctcccgcagccccctcaggtgtgggatctcttacaatggcttcaggtggtggcgcaccagtggcagacaataacgaaggtgccgatggagtgggtagttcctcgggaaattggcattgcgattcccaatggctgggggacagagtcatcaccaccagcacccgaacctgggccctgcccacctacaacaatcacctctacaagcaaatctccaacagcacatctggaggatcttcaaatgacaacgcctacttcggctacagcaccccctgggggtattttgacttcaacagattccactgccacttctcaccacgtgactggcagcgactcatcaacaacaactggggattccggcctaagcgactcaacttcaagctcttcaacattcaggtcaaagaggttacggacaacaatggagtcaagaccatcgccaataaccttaccagcacggtccaggtcttcacggactcagactatcagctcccgtacgtgctcgggtcggctcacgagggctgcctcccgccgttcccagcggacgttttcatgattcctcagtacgggtatctgacgcttaatgatggaagccaggccgtgggtcgttcgtccttttactgcctggaatatttcccgtcgcaaatgctaagaacgggtaacaacttccagttcaactacgagtttgagaacgtacctttccatagcagctacgctcacagccaaagcctggaccgactaatgaatccactcatcgaccaatacttgtactatctctcaaagactattaacgattctggacagaatcaacaaacgctaaaattcagtgtggccggacccagcaacatggctgtccagggaagaaactacatacctggacccagctaccgacaacaacgtgtctcaaccactgtgactcaaaacaacaacagcgaatttgcttggcctggagcttcttcttgggctctcaatggacgtaatagcttgatgaatcctggacctgctatggccagccacaaagaaggagaggaccgtttctttcctttgtctggatctttaatttttggcaaacaaggaactggaagagacaacgtggatgcggacgaagtcatgataaccaacgaagaagaaattaaaactactaacccggtagcaacggagtcctatggacaagtggccataaaccaccagagtgcccaagcacaggcgcagaccggctgggttcaaaaccaaggaatacttccgggtatggtttggcaggacagagatgtgtacctgcaaggacccatttgggccaaaattcctcacacggacggcaactttcacccttctccgctgatgggagggtttggaatgaagcacccgcctcctcagatcctcatcaaaaacacacctgtacctgcggatcctccaacggccttcaacaaggacaagctgaactctttcatcacccagtattctactggccaagtcagcgtggagatcgagtgggagctgcagaaggaaaacagcaagcgctggaacccggagatccagtacacttccaactattacaagtctaataatgttgaatttgctgttaatactgaaggtgtatatagtgaaccccgccccattggcaccagatacctgactcgtaatctgtaa

SEQ ID NO: 970 - DNA, 2283 bp, Artificial Sequence
  Description of Artificial Sequence: Synthetic polynucleotide
ctggctgccgatggttatcttccagattggctcgaggacaaccttagtgaaggaattcgcgagtggtgggctttgaaacctggagcccctcaacccaaggcaaatcaacaacatcaagacaacgctcgaggtcttgtgcttccgggttacaaataccttggacccggcaacggactcgacaagggggagccggtcaacgcagcagacgcggcggccctcgagcacgacaaggcctacgaccagcagctcaaggccggagacaacccgtacctcaagtacaaccacgccgacgccgagttccaggagcggctcaaagaagatacgtcttttgggggcaacctcgggcgagcagtcttccaggccaaaaagaggcttcttgaacctcttggtctggttgaggaagcggctaagatggcagctgcggccgccgcggctgcagcggctgcagccgccgcagctgcggctgcagcgggcggcggcggcagcgctcctggaaagaagaggcctgtagagcagtctcctcaggaaccggactcctccgcgggtattggcaaatcgggtgcacagcccgctaaaaagagactcaatttcggtcagactggcgacacagagtcagtcccagaccctcaaccaatcggagaacctcccgcagccccctcaggtgtgggatctcttacaatggcttcaggtggtggcgcaccagtggcagacaataacgaaggtgccgatggagtgggtagttcctcgggaaattggcattgcgattcccaatggctgggggacagagtcatcaccaccagcacccgaacctgggccctgcccacctacaacaatcacctctacaagcaaatctccaacagcacatctggaggatcttcaaatgacaacgcctacttcggctacagcaccccctgggggtattttgacttcaacagattccactgccacttctcaccacgtgactggcagcgactcatcaacaacaactggggattccggcctaagcgactcaacttcaagctcttcaacattcaggtcaaagaggttacggacaacaatggagtcaagaccatcgccaataaccttaccagcacggtccaggtcttcacggactcagactatcagctcccgtacgtgctcgggtcggctcacgagggctgcctcccgccgttcccagcggacgttttcatgattcctcagtacgggtatctgacgcttaatgatggaagccaggccgtgggtcgttcgtccttttactgcctggaatatttcccgtcgcaaatgctaagaacgggtaacaacttccagttcaactacgagtttgagaacgtacctttccatagcagctacgctcacagccaaagcctggaccgactaatgaatccactcatcgaccaatacttgtactatctctcaaagactattaacgattctggacagaatcaacaaacgctaaaattcagtgtggccggacccagcaacatggctgtccagggaagaaactacatacctggacccagctaccgacaacaacgtgtctcaaccactgtgactcaaaacaacaacagcgaatttgcttggcctggagcttcttcttgggctctcaatggacgtaatagcttgatgaatcctggacctgctatggccagccacaaagaaggagaggaccgtttctttcctttgtctggatctttaatttttggcaaacaaggaactggaagagacaacgtggatgcggacgaagtcatgataaccaacgaagaagaaattaaaactactaacccggtagcaacggagtcctatggacaagtggccataaaccaccagagtgcccaagcacaggcgcagaccggctgggttcaaaaccaaggaatacttccgggtatggtttggcaggacagagatgtgtacctgcaaggacccatttgggccaaaattcctcacacggacggcaactttcacccttctccgctgatgggagggtttggaatgaagcacccgcctcctcagatcctcatcaaaaacacacctgtacctgcggatcctccaacggccttcaacaaggacaagctgaactctttcatcacccagtattctactggccaagtcagcgtggagatcgagtgggagctgcagaaggaaaacagcaagcgctggaacccggagatccagtacacttccaactattacaagtctaataatgttgaatttgctgttaatactgaaggtgtatatagtgaaccccgccccattggcaccagatacctgactcgtaatctgtaa

SEQ ID NO: 971 - protein, 726 aa, Artificial Sequence
  Description of Artificial Sequence: Synthetic polypeptide
MEVQLQASGGGLVQAGGSLRLSCAASGFKITHYTMGWFRQAPGKEREFVSRITWGGDNTFYSNSVKGRFTISRDNAKNTVYLQMNSLKPEDTADYYCAAGSTSTATPLRVDYWGKGTQVTVSSGGGGSAPGKKRPVEQSPQEPDSSSGIGKTGQQPAKKRLNFGQTGDSESVPDPQPLGEPPAAPSGLGPNTMASGGGAPMADNNEGADGVGNSSGNWHCDSTWLGDRVITTSTRTWALPTYNNHLYKQISNGTSGGSTNDNTYFGYSTPWGYFDFNRFHCHFSPRDWQRLINNNWGFRPKRLNFKLFNIQVKEVTTNEGTKTIANNLTSTVQVFTDSEYQLPYVLGSAHQGCLPPFPADVFMVPQYGYLTLNNGSQALGRSSFYCLEYFPSQMLRTGNNFQFSYTFEDVPFHSSYAHSQSLDRLMNPLIDQYLYYLVRTQTTGTGGTQTLAFSQAGPSSMANQARNWVPGPCYRQQRVSTTTNQNNNSNFAWTGAAKFKLNGRDSLMNPGVAMASHKDDDDRFFPSSGVLIFGKQGAGNDGVDYSQVLITDEEEIKATNPVATEEYGAVAINNQAANTQAQTGLVHNQGVIPGMVWQNRDVYLQGPIWAKIPHTDGNFHPSPLMGGFGLKHPPPQILIKNTPVPADPPLTFNQAKLNSFITQYSTGQVSVEIEWELQKENSKRWNPEIQYTSNYYKSTNVDFAVNTEGVYSEPRPIGTRYLTRNL

SEQ ID NO: 972 - protein, 729 aa, Artificial Sequence
  Description of Artificial Sequence: Synthetic polypeptide
MEVQLQASGGGLVQAGGSLRLSCSASVRTFSIYAMGWFRQAPGKEREFVAGINRSGDVTKYADFVKGRFSISRDNAKNMVYLQMNSLKPEDTALYYCAATWAYDTVGALTSGYNFWGQGTQVTVSSGGGGSAPGKKRPVEQSPQEPDSSSGIGKTGQQPAKKRLNFGQTGDSESVPDPQPLGEPPAAPSGLGPNTMASGGGAPMADNNEGADGVGNSSGNWHCDSTWLGDRVITTSTRTWALPTYNNHLYKQISNGTSGGSTNDNTYFGYSTPWGYFDFNRFHCHFSPRDWQRLINNNWGFRPKRLNFKLFNIQVKEVTTNEGTKTIANNLTSTVQVFTDSEYQLPYVLGSAHQGCLPPFPADVFMVPQYGYLTLNNGSQALGRSSFYCLEYFPSQMLRTGNNFQFSYTFEDVPFHSSYAHSQSLDRLMNPLIDQYLYYLVRTQTTGTGGTQTLAFSQAGPSSMANQARNWVPGPCYRQQRVSTTTNQNNNSNFAWTGAAKFKLNGRDSLMNPGVAMASHKDDDDRFFPSSGVLIFGKQGAGNDGVDYSQVLITDEEEIKATNPVATEEYGAVAINNQAANTQAQTGLVHNQGVIPGMVWQNRDVYLQGPIWAKIPHTDGNFHPSPLMGGFGLKHPPPQILIKNTPVPADPPLTFNQAKLNSFITQYSTGQVSVEIEWELQKENSKRWNPEIQYTSNYYKSTNVDFAVNTEGVYSEPRPIGTRYLTRNL

SEQ ID NO: 973 - protein, 651 aa, Artificial Sequence
  Description of Artificial Sequence: Synthetic polypeptide
MPSSVIDALQYKLEGTTRLTRKRGLKLATALSLSNKFVEGSPSGGGGSGGGGSAPGKKRPVEQSPQEPDSSSGIGKTGQQPAKKRLNFGQTGDSESVPDPQPLGEPPAAPSGLGPNTMASGGGAPMADNNEGADGVGNSSGNWHCDSTWLGDRVITTSTRTWALPTYNNHLYKQISNGTSGGSTNDNTYFGYSTPWGYFDFNRFHCHFSPRDWQRLINNNWGFRPKRLNFKLFNIQVKEVTTNEGTKTIANNLTSTVQVFTDSEYQLPYVLGSAHQGCLPPFPADVFMVPQYGYLTLNNGSQALGRSSFYCLEYFPSQMLRTGNNFQFSYTFEDVPFHSSYAHSQSLDRLMNPLIDQYLYYLVRTQTTGTGGTQTLAFSQAGPSSMANQARNWVPGPCYRQQRVSTTTNQNNNSNFAWTGAAKFKLNGRDSLMNPGVAMASHKDDDDRFFPSSGVLIFGKQGAGNDGVDYSQVLITDEEEIKATNPVATEEYGAVAINNQAANTQAQTGLVHNQGVIPGMVWQNRDVYLQGPIWAKIPHTDGNFHPSPLMGGFGLKHPPPQILIKNTPVPADPPLTFNQAKLNSFITQYSTGQVSVEIEWELQKENSKRWNPEIQYTSNYYKSTNVDFAVNTEGVYSEPRPIGTRYLTRNL

SEQ ID NO: 974 - protein, 638 aa, Artificial Sequence
  Description of Artificial Sequence: Synthetic polypeptide
MYTIWMPENPRPGTPCDIFTNSRGKRASNGGGGGSGGGGSAPGKKRPVEQSPQEPDSSSGIGKTGQQPAKKRLNFGQTGDSESVPDPQPLGEPPAAPSGLGPNTMASGGGAPMADNNEGADGVGNSSGNWHCDSTWLGDRVITTSTRTWALPTYNNHLYKQISNGTSGGSTNDNTYFGYSTPWGYFDFNRFHCHFSPRDWQRLINNNWGFRPKRLNFKLFNIQVKEVTTNEGTKTIANNLTSTVQVFTDSEYQLPYVLGSAHQGCLPPFPADVFMVPQYGYLTLNNGSQALGRSSFYCLEYFPSQMLRTGNNFQFSYTFEDVPFHSSYAHSQSLDRLMNPLIDQYLYYLVRTQTTGTGGTQTLAFSQAGPSSMANQARNWVPGPCYRQQRVSTTTNQNNNSNFAWTGAAKFKLNGRDSLMNPGVAMASHKDDDDRFFPSSGVLIFGKQGAGNDGVDYSQVLITDEEEIKATNPVATEEYGAVAINNQAANTQAQTGLVHNQGVIPGMVWQNRDVYLQGPIWAKIPHTDGNFHPSPLMGGFGLKHPPPQILIKNTPVPADPPLTFNQAKLNSFITQYSTGQVSVEIEWELQKENSKRWNPEIQYTSNYYKSTNVDFAVNTEGVYSEPRPIGTRYLTRNL

SEQ ID NO: 975 - protein, 628 aa, Artificial Sequence
  Description of Artificial Sequence: Synthetic polypeptide
MTFFYGGSRGKRNNFKTEEYGGGGSGGGGSAPGKKRPVEQSPQEPDSSSGIGKTGQQPAKKRLNFGQTGDSESVPDPQPLGEPPAAPSGLGPNTMASGGGAPMADNNEGADGVGNSSGNWHCDSTWLGDRVITTSTRTWALPTYNNHLYKQISNGTSGGSTNDNTYFGYSTPWGYFDFNRFHCHFSPRDWQRLINNNWGFRPKRLNFKLFNIQVKEVTTNEGTKTIANNLTSTVQVFTDSEYQLPYVLGSAHQGCLPPFPADVFMVPQYGYLTLNNGSQALGRSSFYCLEYFPSQMLRTGNNFQFSYTFEDVPFHSSYAHSQSLDRLMNPLIDQYLYYLVRTQTTGTGGTQTLAFSQAGPSSMANQARNWVPGPCYRQQRVSTTTNQNNNSNFAWTGAAKFKLNGRDSLMNPGVAMASHKDDDDRFFPSSGVLIFGKQGAGNDGVDYSQVLITDEEEIKATNPVATEEYGAVAINNQAANTQAQTGLVHNQGVIPGMVWQNRDVYLQGPIWAKIPHTDGNFHPSPLMGGFGLKHPPPQILIKNTPVPADPPLTFNQAKLNSFITQYSTGQVSVEIEWELQKENSKRWNPEIQYTSNYYKSTNVDFAVNTEGVYSEPRPIGTRYLTRNL

SEQ ID NO: 976 - protein, 621 aa, Artificial Sequence
  Description of Artificial Sequence: Synthetic polypeptide
MNNQKIVNLKEKVAQLEAGGGGSAPGKKRPVEQSPQEPDSSAGIGKSGAQPAKKRLNFGQTGDTESVPDPQPIGEPPAAPSGVGSLTMASGGGAPVADNNEGADGVGSSSGNWHCDSQWLGDRVITTSTRTWALPTYNNHLYKQISNSTSGGSSNDNAYFGYSTPWGYFDFNRFHCHFSPRDWQRLINNNWGFRPKRLNFKLFNIQVKEVTDNNGVKTIANNLTSTVQVFTDSDYQLPYVLGSAHEGCLPPFPADVFMIPQYGYLTLNDGSQAVGRSSFYCLEYFPSQMLRTGNNFQFNYEFENVPFHSSYAHSQSLDRLMNPLIDQYLYYLSKTINDSGQNQQTLKFSVAGPSNMAVQGRNYIPGPSYRQQRVSTTVTQNNNSEFAWPGASSWALNGRNSLMNPGPAMASHKEGEDRFFPLSGSLIFGKQGTGRDNVDADEVMITNEEEIKTTNPVATESYGQVAINHQSAQAQAQTGWVQNQGILPGMVWQDRDVYLQGPIWAKIPHTDGNFHPSPLMGGFGMKHPPPQILIKNTPVPADPPTAFNKDKLNSFITQYSTGQVSVEIEWELQKENSKRWNPEIQYTSNYYKSNNVEFAVNTEGVYSEPRPIGTRYLTRNL

SEQ ID NO: 977 - protein, 633 aa, Artificial Sequence
  Description of Artificial Sequence: Synthetic polypeptide
MYTIWMPENPRPGTPCDIFTNSRGKRASNGGGGGSAPGKKRPVEQSPQEPDSSAGIGKSGAQPAKKRLNFGQTGDTESVPDPQPIGEPPAAPSGVGSLTMASGGGAPVADNNEGADGVGSSSGNWHCDSQWLGDRVITTSTRTWALPTYNNHLYKQISNSTSGGSSNDNAYFGYSTPWGYFDFNRFHCHFSPRDWQRLINNNWGFRPKRLNFKLFNIQVKEVTDNNGVKTIANNLTSTVQVFTDSDYQLPYVLGSAHEGCLPPFPADVFMIPQYGYLTLNDGSQAVGRSSFYCLEYFPSQMLRTGNNFQFNYEFENVPFHSSYAHSQSLDRLMNPLIDQYLYYLSKTINDSGQNQQTLKFSVAGPSNMAVQGRNYIPGPSYRQQRVSTTVTQNNNSEFAWPGASSWALNGRNSLMNPGPAMASHKEGEDRFFPLSGSLIFGKQGTGRDNVDADEVMITNEEEIKTTNPVATESYGQVAINHQSAQAQAQTGWVQNQGILPGMVWQDRDVYLQGPIWAKIPHTDGNFHPSPLMGGFGMKHPPPQILIKNTPVPADPPTAFNKDKLNSFITQYSTGQVSVEIEWELQKENSKRWNPEIQYTSNYYKSNNVEFAVNTEGVYSEPRPIGTRYLTRNL

SEQ ID NO: 978 - protein, 623 aa, Artificial Sequence
  Description of Artificial Sequence: Synthetic polypeptide
MTFFYGGSRGKRNNFKTEEYGGGGSAPGKKRPVEQSPQEPDSSAGIGKSGAQPAKKRLNFGQTGDTESVPDPQPIGEPPAAPSGVGSLTMASGGGAPVADNNEGADGVGSSSGNWHCDSQWLGDRVITTSTRTWALPTYNNHLYKQISNSTSGGSSNDNAYFGYSTPWGYFDFNRFHCHFSPRDWQRLINNNWGFRPKRLNFKLFNIQVKEVTDNNGVKTIANNLTSTVQVFTDSDYQLPYVLGSAHEGCLPPFPADVFMIPQYGYLTLNDGSQAVGRSSFYCLEYFPSQMLRTGNNFQFNYEFENVPFHSSYAHSQSLDRLMNPLIDQYLYYLSKTINDSGQNQQTLKFSVAGPSNMAVQGRNYIPGPSYRQQRVSTTVTQNNNSEFAWPGASSWALNGRNSLMNPGPAMASHKEGEDRFFPLSGSLIFGKQGTGRDNVDADEVMITNEEEIKTTNPVATESYGQVAINHQSAQAQAQTGWVQNQGILPGMVWQDRDVYLQGPIWAKIPHTDGNFHPSPLMGGFGMKHPPPQILIKNTPVPADPPTAFNKDKLNSFITQYSTGQVSVEIEWELQKENSKRWNPEIQYTSNYYKSNNVEFAVNTEGVYSEPRPIGTRYLTRNL

SEQ ID NO: 979 - protein, 623 aa, Artificial Sequence
  Description of Artificial Sequence: Synthetic polypeptide
MAAAAAAAAAAAAAAAAAAAGGGGSAPGKKRPVEQSPQEPDSSAGIGKSGAQPAKKRLNFGQTGDTESVPDPQPIGEPPAAPSGVGSLTMASGGGAPVADNNEGADGVGSSSGNWHCDSQWLGDRVITTSTRTWALPTYNNHLYKQISNSTSGGSSNDNAYFGYSTPWGYFDFNRFHCHFSPRDWQRLINNNWGFRPKRLNFKLFNIQVKEVTDNNGVKTIANNLTSTVQVFTDSDYQLPYVLGSAHEGCLPPFPADVFMIPQYGYLTLNDGSQAVGRSSFYCLEYFPSQMLRTGNNFQFNYEFENVPFHSSYAHSQSLDRLMNPLIDQYLYYLSKTINDSGQNQQTLKFSVAGPSNMAVQGRNYIPGPSYRQQRVSTTVTQNNNSEFAWPGASSWALNGRNSLMNPGPAMASHKEGEDRFFPLSGSLIFGKQGTGRDNVDADEVMITNEEEIKTTNPVATESYGQVAINHQSAQAQAQTGWVQNQGILPGMVWQDRDVYLQGPIWAKIPHTDGNFHPSPLMGGFGMKHPPPQILIKNTPVPADPPTAFNKDKLNSFITQYSTGQVSVEIEWELQKENSKRWNPEIQYTSNYYKSNNVEFAVNTEGVYSEPRPIGTRYLTRNL

SEQ ID NO: 980 - DNA, 2214 bp, Artificial Sequence
  Description of Artificial Sequence: Synthetic polynucleotide
atggctgccgatggttatcttccagattggctcgaggacaacctctctgagggcattcgcgagtggtgggacttgaaacctggagccccgaagcccaaagccaaccagcaaaagcaggacgacggccggggtctggtgcttcctggctacaagtacctcggacccttcaacggactcgacaagggggagcccgtcaacgcggcggacgcagcggccctcgagcacgacaaggcctacgaccagcagctcaaagcgggtgacaatccgtacctgcggtataaccacgccgacgtcgagtttcaggagcgtctgcaagaagatacgtcttttgggggcaacctcgggcgagcagtcttccaggccaagaagagggttctcgaaccttttggtctggttgaggaaggcgctaagacggctcctggaaagaaacgtccggtagagcagtcgccacaagagccagactcctcctcgggcatcggcaagaaaggccaacagcccgccagaaaaagactcaattttggccagactggcgactcagagtcagttccagaccctcaacctctcggagaacctccagcagcgccctctggtgtgggacctaatacaatggctgcaggcggtggcgcaccaatggcagacaataacgagggcgccgacggagtgggtaattcctcgggaaattggcattgcgattccacatggatgggggacagagtcatcaccaccagcacccgaacctgggccctgcccacctacaacaaccacctctacaagcaaatctccaacggcacctcgggaggaagcaccaacgacaacacctattttggctacagcaccccctgggggtattttgatttcaacagattccactgccacttctcaccacgtgactggcagcgactcatcaacaacaactggggattccggccaaaaagactcagcttcaagctcttcaacatccaggtcaaggaggtcacgcagaatgaaggcaccaagaccatcgccaataaccttaccagcacgattcaggtatttacggactcggaataccagctgccatacgtcctcggctccgcgcaccagggctgcctgcctccgttcccggcggacgtcttcatgattccccagtacggctaccttacactgaacaatggaagtcaagccgtaggccgttcctccttctactgcctggaatattttccttctcaaatgctgagaacgggcaacaactttgagttcagctaccagtttgaggacgtgccttttcacagcagctacgcgcacagccaaagcctggaccggctgatgaaccccctcatcgaccagtacctgtactacctgtctcggactcagtccacgggaggtaccgcaagaactcagcagttgctattttctcaggccgggcctaatacaatggccaatcaggcaaagaactggctgccaggaccctgttaccgccaacaacgcgtctcaacgacaaccgggcaaaacaacaatagcaactctgcctggactgctgggaccaaataccatctgaatggaagaaattcattggctaatcctggcatcgctatggcaacacacaaagacgacgaggagcgtttttttcccagtaacgggatcctgatttttggcaaacaaaatgctgccagagacaatgcggattacagcgatgtcatgctcaccagcgaggaagaaatcaaaaccactaaccctgtggctacagaggaatacggtatcgtggcagataacttgcagcagcaaaacacggctcctcaaattggaactgtcaacagccagggggccttacccggtatggtctggcagaaccgggacgtgtacctgcagggtcccatctgggccaagattcctcacacggacggcaacttccacccatctccgctgatgggcggctttggcctgaaacatcctccgcctcagatcctgatcaagaacacgcctgtacctgcggatcctccgaccaccttcaaccagtcaaagctgaactctttcatcacgcaatacagcaccggacaggtcagcgtggaaattgaatgggagctacagaaggaaaacagcaagcgctggaaccccgagatccagtacacctccaactactacaaatctacaagtgtggactttgctgttaatacagaaggcgtgtactctgaaccccgccccattggcacccgttacctcacccgtaatctgtaa

SEQ ID NO: 981 - DNA, 2214 bp, Artificial Sequence
  Description of Artificial Sequence: Synthetic polynucleotide
atggctgccgatggttatcttccagattggctcgaggacaacctctctgagggcattcgcgagtggtgggcgctgaaacctggagccccgaagcccaaagccaaccagcaaaagcaggacgacggccggggtctggtgcttcctggctacaagtacctcggacccttcaacggactcgacaagggggagcccgtcaacgcggcggacgcagcggccctcgagcacgacaaggcctacgaccagcagctcaaagcgggtgacaatccgtacctgcggtataaccacgccgacgccgagtttcaggagcgtctgcaagaagatacgtcttttgggggcaacctcgggcgagcagtcttccaggccaagaagcgggttctcgaacctctcggtctggttgaggacggcgctaagacggctcctggaaagaagagaccagtagagcagtcaccccaagaaccagactcctcctcgggcatcggcaagaaaggccaacagcccgccagaaaaagactcaattttggccagactggcgactcagagtcagttccagaccctcaacctctcggagaacctccagcaacccccgctgctgtgggacctactacaatggcttcaggcggtggcgcaccaatggcagacaataacgaaggcgccgacggagtgggtagttcctcgggaaattggcattgcgattccacatggctgggcgacagagtcatcaccaccagcacccgaacctgggccctgcccacctacaacaaccacctctacaagcaaatctccaacgggacatcgggaggagccaccaacgacaacacctacttcggctacagcaccccctgggggtattttgactttaacagattccactgccacttttcaccacgtgactggcagcgactcatcaacaacaactggggattccggcccaagagactcagcttcaagctcttcaacatccaggtcaaggaggtcacgcagaatgaaggcaccaagaccatcgccaataacctcaccagcaccatccaggtgtttacggactcggagtaccagctgccgtacgttctcggctctgcccaccagggctgcctgcctccgttcccggcggacgtgttcatgattccccagtacggctacctaacactcaacaacggtagtcaggccgtgggacgctcctccttctactgcctggaatactttccttcgcagatgctgagaaccggcaacaacttccagtttacttacaccttcgaggacgtgcctttccacagcagctacgcccacagccagagcttggaccggctgatgaatcctctgattgaccagtacctgtactacttgtctcggactcaaacaacaggaggcacggcaaatacgcagactctgggcttcagccaaggtgggcctaatacaatggccaatcaggcaaagaactggctgccaggaccctgttaccgccaacaacgcgtctcaacgacaaccgggcaaaacaacaatagcaactttgcctggactgctgggaccaaataccatctgaatggaagaaattcattggctaatcctggcatcgctatggcaacacacaaggacgacgaggagcgtttttttcccagtaacgggatcctgatttttggcaaacaaaatgctgccagagacaatgcggattacagcgatgtcatgctcaccagcgaggaagaaatcaaaaccactaaccctgtggctacagaggaatacggtatcgtggcagataacttgcagcagcaaaacacggctcctcaaattggaactgtcaacagccagggggccttacccggtatggtctggcagaaccgggacgtgtacctgcagggtcccatctgggccaagattcctcacacggacggcaacttccacccgtctccgctgatgggcggctttggcctgaaacatcctccgcctcagatcctgatcaagaacacgcctgtacctgcggatcctccgaccaccttcaaccagtcaaagctgaactctttcatcacgcaatacagcaccggacaggtcagcgtggaaatcgagtgggagctgcagaaagaaaacagcaagcgctggaaccccgagatccagtacacctccaactactacaaatctacaaatgtggactttgctgtcaacacggagggggtttatagcgagcctcgccccattggcacccgttacctcacccgcaacctgtaa

SEQ ID NO: 982 - DNA, 2211 bp, Artificial Sequence
  Description of Artificial Sequence: Synthetic polynucleotide
  modified_base (715)..(715): a, c, t, or g
atggctgccgatggttatcttccagattggctcgaggacaacctctctgagggcattcgcgagtggtgggcgctgaaacctggagccccgaagcccaaagccaaccagcaaaagcaggacgacggccggggtctggtgcttcctggctacaagtacctcggacccttcaacggactcgacaagggggagcccgtcaacgcggcggacgcagcggccctcgagcacgacaaggcctacgaccagcagctcaaagcgggtgacaatccgtacctgcggtataaccacgccgacgccgagtttcaggagcgtctgcaagaagatacgtcttttgggggcaacctcgggcgagcagtcttccaggccaagaagcgggttctcgaacctctcggtctggttgaggaaggcgctaagacggctcctggaaagaaacgtccggtagagcagtcgccacaagagccagactcctcctcgggcatcggcaagacaggccagcagcccgctaaaaagaggctcaattttggtcagactggcgactcagagtcagtccccgacccacaacctctcggagaacctccagcaacccccgctgctgtgggacctactacaatggcttcaggcggtggcgcaccaatggcagacaataacgaaggcgccgacggagtgggtaatgcctcaggaaattggcattgcgattccacatggctgggcgacagantcatcaccaccagcacccgaacatgggccttgcccacctataacaaccacctctacaagcaaatctccagtgcttcaacgggggccagcaacgacaaccactacttcggctacagcaccccctgggggtattttgatttcaacagattccactgccatttctcaccacgtgactggcagcgactcatcaacaacaattggggattccggcccaagagactcaacttcaagctcttcaacatccaagtcaaggaggtcacgcagaatgaaggcaccaagaccatcgccaataacctcaccagcaccatccaggtgtttacggactcggagtaccagctgccgtacgttctcggctctgcccaccagggctgcctgcctccgttcccggcggacgtgttcatgattccccagtacggctacctaacactcaacaacggtagtcaggccgtgggacgctcctccttctactgcctggaatattttccatctcaaatgctgcgaactggaaacaattttgaattcagctacaccttcgaggacgtgcctttccacagcagctacgcacacagccagagcttggaccgactgatgaatcctctcatcgaccagtacctgtactacttgtctcggactcaaacaacaggaggcacggcaaatacgcagactctgggcttcagccaaggtgggcctaatacaatggccaatcaggcaaagaactggctgccaggaccctgttaccgccaacaacgcgtctcaacgacaaccgggcaaaacaacaatagcaactttgcctggactgctgggaccaaataccatctgaatggaagaaattcattggctaatcctggcatcgctatggcaacacacaaagacgacgaggagcgtttttttcccagtaacgggatcctgatttttggcaaacaaaatgctgccagagacaatgcggattacagcgatgtcatgctcaccagcgaggaagaaatcaaaaccactaaccctgtggctacagaggaatacggtatcgtggcagataacttgcagcagcaaaacacggctcctcaaattggaactgtcaacagccaggggaccttacccggtatggtctggcagaaccgggacgtgtacctgcagggtcccatctgggccaagattcctcacacggacggcaacttccacccgtctccgctgatgggcggctttggcctgaaacatcctccgcctcagatcctgatcaagaacacgcctgtacctgcggatcctccgaccaccttcaaccagtcaaagctgaactctttcatcacgcaatacagcaccggacaggtcagcgtggaaattgaatgggagctacagaaggaaaacagcaagcgctggaaccccgagatccagtacacctccaattactacaaatctacaagtgtggactttgctgttaatacagaaggcgtgtactctgaaccccgccccattggcacgcgtttcctcacccgtaatctgtaa

SEQ ID NO: 983 - DNA, 2214 bp, Artificial Sequence
  Description of Artificial Sequence: Synthetic polynucleotide
atggctgccgatggttatcttccagattggctcgaggacaacctctctgagggcattcgcgagtggtgggcgctgaaacctggagccccgaagcccaaagccaaccagcaaaagcaggacgacggccggggtctggtgcttcctggctacaagtacctcggacccttcaacggactcgacaagggggagcccgtcaacgcggcggacgcagcggccctcgagcacgacaaggcctacgaccagcagctcaaagcgggtgacaatccgtacctgcggtataaccacgccgacgccgagtttcaggagcgtctgcaagaagatacgtcttttgggggcaacctcgggcgagcagtcttccaggccaagaagcgggttctcgaacctctcggtctggttgaggaaggcgctaagacggctcctggaaagaaacgtccggtagagcagtcgccacaagagccagactcctcctcgggcatcggcaagacaggccagcagcccgctaaaaagaggctcaattttggccagactggcgactcagagtcagttccagaccctcaacctctcggagaacctccagcagcgccctctggtgtgggacctaatacaatggctgcaggcggtggcgcaccaatggcagacaataacgaaggcgccgacggagtgggtagttcctcgggaaattggcattgcgattccacatggctgggcgacagagtcatcaccaccagcacccgaacctgggccctgcccacctacaacaaccacctctacaagcaaatctccaacgggacatcgggaggagccaccaacgacaacacctacttcggctacagcaccccctgggggtattttgactttaacagattccactgccacttttcaccacgtgactggcagcgactcatcaacaacaactggggattccggcccaagagactcagcttcaagctcttcaacatccaggtcaaggaggtcacgcagaatgaaggcaccaagaccatcgccaataacctcaccagcaccatccaggtgtttacggactcggagtaccagctgccgtacgtactaggatccgctcaccagggatgtctgcctccgttcccggcggacgtgttcatgattccccagtacggctacctaacactcaacaacggtagtcaggccgtgggacgctcctccttctactgcctggaatattttccatctcagatgctgagaacgggcaataactttaccttcagctacaccttcgaggacgtgcctttccacagcagctatgcccacagccagagcttggaccggctgatgaatcctctgattgaccagtacctgtactacttgtctcggactcaaacaacaggaggcacggcaaatacgcagactctgggcttcagccaaggtgggcctaatacaatggccaatcaggcaaagaactggctgccaggaccctgttaccgccaacaacgcgtctcaacgacaaccgggcaaaacaacaatagcaactttgcctggactgctgggaccaaataccatctgaatggaagaaattcattggctaatcctggcatcgctatggcaacacacaaagacgacgaggagcgtttttttcccagtaacgggatcctgatttttggcaaacaaaatgctgccagagacaatgcggattacagcgatgtcatgctcaccagcgaggaagaaatcaaaaccactaaccctgtggctacagaggaatacggtatcgtggcagataacttgcagcagcaaaacacggctcctcaaattggaactgtcaacagccagggggccttacccggtatggtctggcagaaccgggacgtgtacctgcagggtcccatctgggccaagattcctcacacggacggcaacttccacccgtctccgctaatgggaggatttggactgaagcacccacctcctcagatcctgatcaagaacacgccggtacctgcggatcctccgaccaccttcaaccagtcaaagctgtactctttcatcacgcaatacagcaccggacaggtcagcgtggaaattgaatgggagctgcagaaggaaaacagcaagcgctggaaccccgagatccaatacacctccaactactacaaatctacaagtgtggactttgctgttaatacagaaggcgtgtactctgaaccccgccccattggcacccgttacctcacccgtaatctgtaa

SEQ ID NO: 984 - protein, 737 aa, Artificial Sequence
  Description of Artificial Sequence: Synthetic polypeptide
MAADGYLPDWLEDNLSEGIREWWDLKPGAPKPKANQQKQDDGRGLVLPGYKYLGPFNGLDKGEPVNAADAAALEHDKAYDQQLKAGDNPYLRYNHADVEFQERLQEDTSFGGNLGRAVFQAKKRVLEPFGLVEEGAKTAPGKKRPVEQSPQEPDSSSGIGKKGQQPARKRLNFGQTGDSESVPDPQPLGEPPAAPSGVGPNTMAAGGGAPMADNNEGADGVGNSSGNWHCDSTWMGDRVITTSTRTWALPTYNNHLYKQISNGTSGGSTNDNTYFGYSTPWGYFDFNRFHCHFSPRDWQRLINNNWGFRPKRLSFKLFNIQVKEVTQNEGTKTIANNLTSTIQVFTDSEYQLPYVLGSAHQGCLPPFPADVFMIPQYGYLTLNNGSQAVGRSSFYCLEYFPSQMLRTGNNFEFSYQFEDVPFHSSYAHSQSLDRLMNPLIDQYLYYLSRTQSTGGTARTQQLLFSQAGPNTMANQAKNWLPGPCYRQQRVSTTTGQNNNSNSAWTAGTKYHLNGRNSLANPGIAMATHKDDEERFFPSNGILIFGKQNAARDNADYSDVMLTSEEEIKTTNPVATEEYGIVADNLQQQNTAPQIGTVNSQGALPGMVWQNRDVYLQGPIWAKIPHTDGNFHPSPLMGGFGLKHPPPQILIKNTPVPADPPTTFNQSKLNSFITQYSTGQVSVEIEWELQKENSKRWNPEIQYTSNYYKSTSVDFAVNTEGVYSEPRPIGTRYLTRNL

SEQ ID NO: 985 - protein, 737 aa, Artificial Sequence
  Description of Artificial Sequence: Synthetic polypeptide
MAADGYLPDWLEDNLSEGIREWWALKPGAPKPKANQQKQDDGRGLVLPGYKYLGPFNGLDKGEPVNAADAAALEHDKAYDQQLKAGDNPYLRYNHADAEFQERLQEDTSFGGNLGRAVFQAKKRVLEPLGLVEDGAKTAPGKKRPVEQSPQEPDSSSGIGKKGQQPARKRLNFGQTGDSESVPDPQPLGEPPATPAAVGPTTMASGGGAPMADNNEGADGVGSSSGNWHCDSTWLGDRVITTSTRTWALPTYNNHLYKQISNGTSGGATNDNTYFGYSTPWGYFDFNRFHCHFSPRDWQRLINNNWGFRPKRLSFKLFNIQVKEVTQNEGTKTIANNLTSTIQVFTDSEYQLPYVLGSAHQGCLPPFPADVFMIPQYGYLTLNNGSQAVGRSSFYCLEYFPSQMLRTGNNFQFTYTFEDVPFHSSYAHSQSLDRLMNPLIDQYLYYLSRTQTTGGTANTQTLGFSQGGPNTMANQAKNWLPGPCYRQQRVSTTTGQNNNSNFAWTAGTKYHLNGRNSLANPGIAMATHKDDEERFFPSNGILIFGKQNAARDNADYSDVMLTSEEEIKTTNPVATEEYGIVADNLQQQNTAPQIGTVNSQGALPGMVWQNRDVYLQGPIWAKIPHTDGNFHPSPLMGGFGLKHPPPQILIKNTPVPADPPTTFNQSKLNSFITQYSTGQVSVEIEWELQKENSKRWNPEIQYTSNYYKSTNVDFAVNTEGVYSEPRPIGTRYLTRNL

SEQ ID NO: 986 - protein, 736 aa, Artificial Sequence
  Description of Artificial Sequence: Synthetic polypeptide
  MOD_RES (239)..(239): Any naturally occurring amino acid
MAADGYLPDWLEDNLSEGIREWWALKPGAPKPKANQQKQDDGRGLVLPGYKYLGPFNGLDKGEPVNAADAAALEHDKAYDQQLKAGDNPYLRYNHADAEFQERLQEDTSFGGNLGRAVFQAKKRVLEPLGLVEEGAKTAPGKKRPVEQSPQEPDSSSGIGKTGQQPAKKRLNFGQTGDSESVPDPQPLGEPPATPAAVGPTTMASGGGAPMADNNEGADGVGNASGNWHCDSTWLGDRXITTSTRTWALPTYNNHLYKQISSASTGASNDNHYFGYSTPWGYFDFNRFHCHFSPRDWQRLINNNWGFRPKRLNFKLFNIQVKEVTQNEGTKTIANNLTSTIQVFTDSEYQLPYVLGSAHQGCLPPFPADVFMIPQYGYLTLNNGSQAVGRSSFYCLEYFPSQMLRTGNNFEFSYTFEDVPFHSSYAHSQSLDRLMNPLIDQYLYYLSRTQTTGGTANTQTLGFSQGGPNTMANQAKNWLPGPCYRQQRVSTTTGQNNNSNFAWTAGTKYHLNGRNSLANPGIAMATHKDDEERFFPSNGILIFGKQNAARDNADYSDVMLTSEEEIKTTNPVATEEYGIVADNLQQQNTAPQIGTVNSQGTLPGMVWQNRDVYLQGPIWAKIPHTDGNFHPSPLMGGFGLKHPPPQILIKNTPVPADPPTTFNQSKLNSFITQYSTGQVSVEIEWELQKENSKRWNPEIQYTSNYYKSTSVDFAVNTEGVYSEPRPIGTRFLTRNL

SEQ ID NO: 987 - protein, 737 aa, Artificial Sequence
  Description of Artificial Sequence: Synthetic polypeptide
MAADGYLPDWLEDNLSEGIREWWALKPGAPKPKANQQKQDDGRGLVLPGYKYLGPFNGLDKGEPVNAADAAALEHDKAYDQQLKAGDNPYLRYNHADAEFQERLQEDTSFGGNLGRAVFQAKKRVLEPLGLVEEGAKTAPGKKRPVEQSPQEPDSSSGIGKTGQQPAKKRLNFGQTGDSESVPDPQPLGEPPAAPSGVGPNTMAAGGGAPMADNNEGADGVGSSSGNWHCDSTWLGDRVITTSTRTWALPTYNNHLYKQISNGTSGGATNDNTYFGYSTPWGYFDFNRFHCHFSPRDWQRLINNNWGFRPKRLSFKLFNIQVKEVTQNEGTKTIANNLTSTIQVFTDSEYQLPYVLGSAHQGCLPPFPADVFMIPQYGYLTLNNGSQAVGRSSFYCLEYFPSQMLRTGNNFTFSYTFEDVPFHSSYAHSQSLDRLMNPLIDQYLYYLSRTQTTGGTANTQTLGFSQGGPNTMANQAKNWLPGPCYRQQRVSTTTGQNNNSNFAWTAGTKYHLNGRNSLANPGIAMATHKDDEERFFPSNGILIFGKQNAARDNADYSDVMLTSEEEIKTTNPVATEEYGIVADNLQQQNTAPQIGTVNSQGALPGMVWQNRDVYLQGPIWAKIPHTDGNFHPSPLMGGFGLKHPPPQILIKNTPVPADPPTTFNQSKLYSFITQYSTGQVSVEIEWELQKENSKRWNPEIQYTSNYYKSTSVDFAVNTEGVYSEPRPIGTRYLTRNL

SEQ ID NO: 988 - DNA, 2208 bp, Artificial Sequence
  Description of Artificial Sequence: Synthetic polynucleotide
atggctgccgatggttatcttccagattggctcgaggacaacctctctgagggcattcgcgagtggtgggacttgaaacctggagccccgaaacccaaagccaaccagcaaaagcaggacgacggccggggtctggtgcttcctggctacaagtacctcggacccttcaacggactcgacaagggggagcccgtcaacgcggcggatgcagcggccctcgagcacgacaaagcctacgaccggcagctcgacagcggagacaacccgtacctcaagtacaaccacgccgacgcggagtttcaggagcgccttaaagaagatacgtcttttgggggcaacctcggacgagcagtcttccaggccaagaagagggttctcgaaccttttggtctggttgaggaaggtgctaagacggctcctggaaagaaacgtccggtagagcagtcgccacaagagccagactcctcctcgggcattggcaagacaggccagcagcccgctaaaaagagactcaattttggtcagactggcgactcagagtcagtccccgacccacaacctctcggagaacctccagcaacccccgctgctgtgggacctactacaatggcttcaggtggtggcgcaccagtggcagacaataacgaaggcgccgacggagtgggtagttcctcgggaaattggcattgcgattccacatggctgggcgacagagtcatcaccaccagcacccgaacatgggccttgcccacctataacaaccacctctacaagcaaatctccagtgcttcgacgggggccagcaacgacaaccactacttcggctacagcaccccctgggggtattttgatttcaacaggttccactgccatttctcaccacgtgactggcagcgactcatcaacaacaattggggattccggcccaaaagactcaacttcaagctgttcaacatccaggtcaaggaagtcacgacgaacgaaggcaccaagaccatcgccaataatctcaccagcaccgtgcaggtctttacggactcggagtaccagttaccgtacgtgctaggatccgctcaccagggatgtctgcctccgttcccggcggacgtcttcatggttcctcagtacggctatttaactttaaacaatggaagccaagccctgggacgttcctccttctactgtctggagtatttcccatcgcagatgctgagaacgggcaacaactttacctttagctacaccttcgaggacgtgcctttccacagcagctacgcgcacagccagagcctggacaggctgatgaatcccctcatcgaccagtacctgtactacctggtcagaacgcaaacgactggaactggagggacgcagactctggcattcagccaagcgggtcctagctcaatggccaaccaggctagaaattgggtgcccggaccttgctaccggcagcagcgcgtctccacgacaaccaaccagaacaacaacagcaactttgcctggacgggagctgccaagtttaagctgaacggccgagactctctaatgaatccgggcgtggcaatggcttcccacaaggatgacgacgaccgcttcttcccttcgagcggggtcctgatttttggcaagcaaggagccgggaacgatggagtggattacagccaagtgctgattacagatgaggaagaaatcaaggctaccaaccccgtggccacagaagaatatggagcagtggccatcaacaaccaggccgccaatacgcaggcgcagaccggactcgtgcacaaccagggggtgattcccggcatggtgtggcagaatagagacgtgtacctgcagggtcccatctgggccaaaattcctcacacggacggcaactttcacccgtctcccctgatgggcggctttggactgaagcacccgcctcctcaaattctcatcaagaacacaccggttccagcggacccgccgcttaccttcaaccaggccaagctgaactctttcatcacgcagtacagcaccggacaggtcagcgtggaaatcgagtgggagctgcagaaagaaaacagcaaacgctggaatccagagattcaatacacttccaactactacaaatctacaaatgtggactttgctgtcaacacggagggggtttatagcgagcctcgccccattggcacccgttacctcacccgcaacctgtaa

SEQ ID NO: 989 - DNA, 2211 bp, Artificial Sequence
  Description of Artificial Sequence: Synthetic polynucleotide
  modified_base (337)..(337): a, c, g, or t
atggctgccgatggttatcttccagattggctcgaggacactctctctgaaggaataagacagtggtggaagctcaaacctggcccaccaccaccaaagcccgcagagcggcataaggacgacagcaggggtcttgtgcttcctggctacaagtacctcggacccttcaacggactcgacaagggggagcccgtcaacgcggcggacgcagcgaccctcgagcacgacaaggcctacgaccagcagctcaaagcgggtgacaatccgtacctgcggtataaccacgccgacgccgagtttcaggagcgtctgcaagaagatacgtcttttgggggcnacctcgggcgagcagtcttccaggccaagaagcgggttctcgaacctctcggtctggttgaggaagctgctaagacggctcctggaaagaagagaccagtagagccatcaccccagcgttctccagactcctctacgggcatcggcaagaaaggccaacagcccgccagaaaaagactcaattttggtcagactggcgactcagagtcagttccagaccctcaacctctcggagaacctccagcagcgccctctggtgtgggacctaatacaatggctgcaggcggtggcgcaccaatggcagacaataacgaaggcgccgacggagtgggtagttcctcgggaaattggcattgcgattccacatggctgggcgacagagtcatcaccaccagcacccgaacctgggccctgcccacctacaacaaccacctctacaagcaaatctccagtgcttcaacgggggccagcaacgacaaccactacttcggctacagcaccccctgggggtattttgatttcaacagattccactgccatttctcaccacgtgactggcagcgactcatcaacaacaattggggattccggcccaagagactcaacttcaagctcttcaacatccaagtcaaggaggtcacgacgaatgatggcgtcacgaccatcgctaataaccttaccagcacggttcaagtcttctcggactcagactatcagctcccgtacgtgctcgggtcggctcacgagggctgcctcccgccgttcccagcggacgttttcatgattcctcagtacggctatttaactttaaacaatggaagccaagccctgggacgttcctccttctactgtctggagtatttcccatcgcagatgctgagaaccggcaacaactttcagttcagctacaccttcgaggacgtgcctttccacagcagctacgcgcacagccagagcctggacaggctgatgaatcccctcatcgaccagtacctgtactacctggtcagaacgcaaacgactggaactggagggacgcagactctggcattcagccaagcgggtcctagctcaatggccaaccaggctagaaattgggtgcccggaccttgctaccggcagcagcgcgtctccacgacaaccaaccagaacaacaacagcaactttgcctggacgggagctgccaagtttaagctgaacggccgagactctctaatgaatccgggcgtggcaatggcttcccacaaggatgacgacgaccgcttcttcccttcgagcggggtcctgatttttggcaagcaaggagccgggaacgatggagtggattacagccaagtgctgattacagatgaggaagaaatcaaggctaccaaccccgtagccacagaagaatatggagcagtggccatcaacaaccaggccgccaatacgcaggcgcagaccggactcgtgcacaaccagggggtgattcccggaatggtgtggcaagacagagacgtatacctgcagggtcctatttgggccaaaattcctcacacggatggacactttcacccgtctcctctcatgggcggctttggacttaagcacccgcctcctcagatcctcatcaaaaacacgcctgttcctgcgaatcctccggcagagttttcggctacaaagtttgcttcattcatcacccagtattccacaggacaagtgagcgtggagattgaatgggagctgcagaaagaaaacagcaaacgctggaatcccgaagtgcagtatacatctaactatgcaaaatctgccaacgttgatttcactgtggacaacaatggactttatactgagcctcgccccattggcacccgttacctcacccgtcccctgtaa

SEQ ID NO: 990 - DNA, 2214 bp, Artificial Sequence
  Description of Artificial Sequence: Synthetic polynucleotide
  modified_base (335)..(335): a, c, g, or t
atgactgacggttaccttccagattggctagaggacaacctctctgaaggcgttcgagagtggtgggcgctgcaacctggagccccgaagcccaaagccaaccagcaaaagcaggacgacggccggggtctggtgcttcctggctacaagtacctcggacccttcaacggactcgacaagggggagcccgtcaacgcggcggacgcagcggccctcgagcacgacaaggcctacgaccagcagctcaaagcgggtgacaatccgtacctgcggtataaccacgccgacgccgagtttcaggagcgtctgcaagaagatacgtcttttgggggcancctcgggcgagcagtcttccaggccaagaagcgggttctcgaacctctcggtctggttgaggaaggcgctaagacggctcctggaaagaaacgtccggtagagccatcaccccagcgttctccagactcctctacgggcatcggcaagaaaggccaacagcccgccagaaaaagactcaattttggtcagactggcgactcagagtcagttccagaccctcaacctctcggagaacctccagcagcgccctcaggtgtgggatctcttacaatggcttcaggtggtggcgcaccagtggcagacaataacgaaggtgccgatggagtgggtagttcctcgggaaattggcattgcgattcccaatggctgggggacagagtcatcaccaccagcacccgaacctgggccctgcccacctacaacaatcacctctacaagcaaatctccaacagcacatctggaggatcttcaaatgacaacgcctacttcggctacagcaccccctgggggtattttgacttcaacagattccactgccacttctcaccacgtgactggcagcgactcatcaacaacaactggggattccggcccaagagactcagcttcaagctcttcaacatccaggtcaaggaggtcacgcagaatgaaggcaccaagaccatcgccaataacctcaccagcaccatccaggtgtttacggactcggagtaccagctgccgtacgttctcggctctgcccaccagggctgcctgcctccgttcccggcggacgtgttcatgattccccagtacggctacctaacactcaacaacggtagtcaggccgtgggacgctcctccttctactgcctggaatactttccttcgcagatgctgagaaccggcaacaacttccagtttacttacaccttcgaggacgtgcctttccacagcagctacgcccacagccagagcttggaccggctgatgaatcctctgattgaccagtacctgtactacttgtctcggactcaaacaacaggaggcacggcaaatacgcagactctgggcttcagccaaggtgggcctaatacaatggccaatcaggcaaagaactggctgccaggaccctgttaccgccaacaacgcgtctcaacgacaaccgggcaaaacaacaatagcaactttgcctggactgctgggaccaaataccatctgaatggaagaaattcattggctaatcctggcatcgctatggcaacacacaaagacgacgaggagcgtttttttcccagtaacgggatcctgatttttggcaaacaaaatgctgccagagacaatgcggattacagcgatgtcatgctcaccagcgaggaagaaatcaaaaccactaaccctgtggctacagaggaatacggtatcgtggcagataacttgcagcagcaaaacacggctcctcaaattggaactgtcaacagccagggggccttacccggtatggtctggcagaaccgggacgtgtacctgcagggtcccatctgggccaagattcctcacacggacggcaacttccacccgtctccgctgatgggcggctttggcctgaaacatcctccgcctcagatcctgatcaagaacacgcctgtacctgcggatcctccgaccaccttaaaccaggccaagctgaactctttcatcacgcaatacagcaccggacaggtcagcgtggaaattgaatgggagctgcagaaggaaaacagcaagcgctggaacccagagattcagtacacttcaaactactacaaatctacaaatgtggactttgctgtcaatacagagggaacttatagtgaaccccgccccattggcaccagatttctgactcgtaatctgtaa

SEQ ID NO: 991 - DNA, 2211 bp, Artificial Sequence
  Description of Artificial Sequence: Synthetic polynucleotide
  modified_base (338)..(338): a, c, g, or t
atggctgccgatggttatcttccagattggctcgaggacactctctctgaaggaataagacagtggtggaagctcaaacctggcccaccaccaccaaagcccgcagagcggcataaggacgacagcaggggtcttgtgcttcctgggtacaagtacctcggccccttcaacggactcgacaagggggagcccgtcaacgcggcggacgcagcggccctcgagcacgacaaggcctacgaccagcagctcgaagcgggtgacaatccgtacctgcggtataaccacgccgacgccgagtttcaggagcgtctgcaagaagatacgtcttttgggggcancctcgggcgagcagtcttccaggccaagaagcgggttctcgaacctctcggtctggttgaggaaggcgctaagacggctcctggaaagaagagaccagtagagcagtcaccccaagaaccagactcctcctcgggcatcggcaggaaaggccaacagcccgccagaaaaagactcaattttggccagactggcgactcagagtcagttccagaccctcaacctctcggagaacctccagcagcgccctctggtgtgggacctaatacaatggcttcaggcggtggcgctccaatggcagacaataacgaaggcgccgacggagtgggtaatgcctcaggaaattggcattgcgattccacatggctgggcgacagagtcatcaccaccagcacccgcacctgggccttgcccacctacaataaccacctctacaagcaaatctccagtgcttcaacgggggccagcaacgacaaccactacttcggctacagcaccccctgggggtattttgatttcaacagattccactgccacttttcaccacgtgactggcagcgactcatcaacaacaattggggattccggcccaagagactcaacttcaaactcttcaacatccaggtcaaggaggtcacgcagaatgaaggcactaagaccatcgccaataaccttaccagcacgattcaggtatttacggactcggaataccagctgccgtacgtcctcggctccgcgcaccagggctgcctgcctccgttcccggcggacgtcttcatgattccccagtacggctaccttacactgaacaatggaagtcaagccgtaggccgttcctccttctactgcctggaatattttccatctcaaatgctgcgaactggcaacaacttccagtttacctacaccttcgaggacgtgcctttccacagcagctacgcccacagccagagcttggaccggctgatgaatcctctgattgaccagtacctgtactacttgtctcggactcagtccacaggaggaactcaaggtacccagcaattgttattttctcaagctgggcctgcaaacatgtcggctcaggctaagaactggctacctggaccttgctaccggcagcagcgagtctctacgacactgtcgcaaaacaacaacagcaactttgcttggactggtgccaccaaatatcacctgaacggaagagactctttggtaaatcccggtgtcgccatggcaacccacaaggacgacgaggaacgcttcttcccgtcgagtggagtcctgatgtttggaaaacagggtgctggaagagacaatgtggactacagcagcgttatgctaaccagcgaagaagaaattaaaaccactaaccctgtagccacagaacaatacggtgtggtggttgataacttgcagcaaaccaatacggggcctattgtgggaaatgtcaacagccaaggagccttacctggtatggtctggcagaaccgggacgtgtacctgcagggtcccatctgggccaagattcctcacacggacggcaacttccacccgtctccgctgatgggcggctttggcctgaaacatcctccgcctcagatcctcatcaaaaacacacctgtacctgcggatcctccaacggccttcaacaaggacaagctgaactctttcatcacccagtattctactggccaagtcagcgtggagatcgagtgggagctgcagaaggaaaacagcaagcgctggaacccggagatccagtacacttccaactattacaagtctaataatgttgaatttgctgttaatactgaaggtgtatatagtgaaccccgccccattggcaccagatacctgactcgtaatctgtaa

SEQ ID NO: 992 - protein, 735 aa, Artificial Sequence
  Description of Artificial Sequence: Synthetic polypeptide
MAADGYLPDWLEDNLSEGIREWWDLKPGAPKPKANQQKQDDGRGLVLPGYKYLGPFNGLDKGEPVNAADAAALEHDKAYDRQLDSGDNPYLKYNHADAEFQERLKEDTSFGGNLGRAVFQAKKRVLEPFGLVEEGAKTAPGKKRPVEQSPQEPDSSSGIGKTGQQPAKKRLNFGQTGDSESVPDPQPLGEPPATPAAVGPTTMASGGGAPVADNNEGADGVGSSSGNWHCDSTWLGDRVITTSTRTWALPTYNNHLYKQISSASTGASNDNHYFGYSTPWGYFDFNRFHCHFSPRDWQRLINNNWGFRPKRLNFKLFNIQVKEVTTNEGTKTIANNLTSTVQVFTDSEYQLPYVLGSAHQGCLPPFPADVFMVPQYGYLTLNNGSQALGRSSFYCLEYFPSQMLRTGNNFTFSYTFEDVPFHSSYAHSQSLDRLMNPLIDQYLYYLVRTQTTGTGGTQTLAFSQAGPSSMANQARNWVPGPCYRQQRVSTTTNQNNNSNFAWTGAAKFKLNGRDSLMNPGVAMASHKDDDDRFFPSSGVLIFGKQGAGNDGVDYSQVLITDEEEIKATNPVATEEYGAVAINNQAANTQAQTGLVHNQGVIPGMVWQNRDVYLQGPIWAKIPHTDGNFHPSPLMGGFGLKHPPPQILIKNTPVPADPPLTFNQAKLNSFITQYSTGQVSVEIEWELQKENSKRWNPEIQYTSNYYKSTNVDFAVNTEGVYSEPRPIGTRYLTRNL

SEQ ID NO: 993 - protein, 736 aa, Artificial Sequence
  Description of Artificial Sequence: Synthetic polypeptide
  MOD_RES (113)..(113): Any naturally occurring amino acid
MAADGYLPDWLEDTLSEGIRQWWKLKPGPPPPKPAERHKDDSRGLVLPGYKYLGPFNGLDKGEPVNAADAATLEHDKAYDQQLKAGDNPYLRYNHADAEFQERLQEDTSFGGXLGRAVFQAKKRVLEPLGLVEEAAKTAPGKKRPVEPSPQRSPDSSTGIGKKGQQPARKRLNFGQTGDSESVPDPQPLGEPPAAPSGVGPNTMAAGGGAPMADNNEGADGVGSSSGNWHCDSTWLGDRVITTSTRTWALPTYNNHLYKQISSASTGASNDNHYFGYSTPWGYFDFNRFHCHFSPRDWQRLINNNWGFRPKRLNFKLFNIQVKEVTTNDGVTTIANNLTSTVQVFSDSDYQLPYVLGSAHEGCLPPFPADVFMIPQYGYLTLNNGSQALGRSSFYCLEYFPSQMLRTGNNFQFSYTFEDVPFHSSYAHSQSLDRLMNPLIDQYLYYLVRTQTTGTGGTQTLAFSQAGPSSMANQARNWVPGPCYRQQRVSTTTNQNNNSNFAWTGAAKFKLNGRDSLMNPGVAMASHKDDDDRFFPSSGVLIFGKQGAGNDGVDYSQVLITDEEEIKATNPVATEEYGAVAINNQAANTQAQTGLVHNQGVIPGMVWQDRDVYLQGPIWAKIPHTDGHFHPSPLMGGFGLKHPPPQILIKNTPVPANPPAEFSATKFASFITQYSTGQVSVEIEWELQKENSKRWNPEVQYTSNYAKSANVDFTVDNNGLYTEPRPIGTRYLTRPL

SEQ ID NO: 994 - protein, 737 aa, Artificial Sequence
  Description of Artificial Sequence: Synthetic polypeptide
  MOD_RES (112)..(112): Any naturally occurring amino acid
MTDGYLPDWLEDNLSEGVREWWALQPGAPKPKANQQKQDDGRGLVLPGYKYLGPFNGLDKGEPVNAADAAALEHDKAYDQQLKAGDNPYLRYNHADAEFQERLQEDTSFGGXLGRAVFQAKKRVLEPLGLVEEGAKTAPGKKRPVEPSPQRSPDSSTGIGKKGQQPARKRLNFGQTGDSESVPDPQPLGEPPAAPSGVGSLTMASGGGAPVADNNEGADGVGSSSGNWHCDSQWLGDRVITTSTRTWALPTYNNHLYKQISNSTSGGSSNDNAYFGYSTPWGYFDFNRFHCHFSPRDWQRLINNNWGFRPKRLSFKLFNIQVKEVTQNEGTKTIANNLTSTIQVFTDSEYQLPYVLGSAHQGCLPPFPADVFMIPQYGYLTLNNGSQAVGRSSFYCLEYFPSQMLRTGNNFQFTYTFEDVPFHSSYAHSQSLDRLMNPLIDQYLYYLSRTQTTGGTANTQTLGFSQGGPNTMANQAKNWLPGPCYRQQRVSTTTGQNNNSNFAWTAGTKYHLNGRNSLANPGIAMATHKDDEERFFPSNGILIFGKQNAARDNADYSDVMLTSEEEIKTTNPVATEEYGIVADNLQQQNTAPQIGTVNSQGALPGMVWQNRDVYLQGPIWAKIPHTDGNFHPSPLMGGFGLKHPPPQILIKNTPVPADPPTTLNQAKLNSFITQYSTGQVSVEIEWELQKENSKRWNPEIQYTSNYYKSTNVDFAVNTEGTYSEPRPIGTRFLTRNL

SEQ ID NO: 995 - protein, 736 aa, Artificial Sequence
  Description of Artificial Sequence: Synthetic polypeptide
  MOD_RES (113)..(113): Any naturally occurring amino acid
MAADGYLPDWLEDTLSEGIRQWWKLKPGPPPPKPAERHKDDSRGLVLPGYKYLGPFNGLDKGEPVNAADAAALEHDKAYDQQLEAGDNPYLRYNHADAEFQERLQEDTSFGGXLGRAVFQAKKRVLEPLGLVEEGAKTAPGKKRPVEQSPQEPDSSSGIGRKGQQPARKRLNFGQTGDSESVPDPQPLGEPPAAPSGVGPNTMASGGGAPMADNNEGADGVGNASGNWHCDSTWLGDRVITTSTRTWALPTYNNHLYKQISSASTGASNDNHYFGYSTPWGYFDFNRFHCHFSPRDWQRLINNNWGFRPKRLNFKLFNIQVKEVTQNEGTKTIANNLTSTIQVFTDSEYQLPYVLGSAHQGCLPPFPADVFMIPQYGYLTLNNGSQAVGRSSFYCLEYFPSQMLRTGNNFQFTYTFEDVPFHSSYAHSQSLDRLMNPLIDQYLYYLSRTQSTGGTQGTQQLLFSQAGPANMSAQAKNWLPGPCYRQQRVSTTLSQNNNSNFAWTGATKYHLNGRDSLVNPGVAMATHKDDEERFFPSSGVLMFGKQGAGRDNVDYSSVMLTSEEEIKTTNPVATEQYGVVVDNLQQTNTGPIVGNVNSQGALPGMVWQNRDVYLQGPIWAKIPHTDGNFHPSPLMGGFGLKHPPPQILIKNTPVPADPPTAFNKDKLNSFITQYSTGQVSVEIEWELQKENSKRWNPEIQYTSNYYKSNNVEFAVNTEGVYSEPRPIGTRYLTRNL

SEQ ID NO: 996 - DNA, 2211 bp, Artificial Sequence
  Description of Artificial Sequence: Synthetic AAV9 VP1
atggccgccgacggctacctgcccgactggctggaggacaacctgagcgagggcatccgcgagtggtgggccctgaagcccggcgccccccagcccaaggccaaccagcagcaccaggacaacgcccgcggcctggtgctgcccggctacaagtacctgggccccggcaacggcctggacaagggcgagcccgtgaacgccgccgacgccgccgccctggagcacgacaaggcctacgaccagcagctgaaggccggcgacaacccctacctgaagtacaaccacgccgacgccgagttccaggagcgcctgaaggaggacaccagcttcggcggcaacctgggccgcgccgtgttccaggccaagaagcgcctgctggagcccctgggcctggtggaggaggccgccaagaccgcccccggcaagaagcgccccgtggagcagagcccccaggagcccgacagcagcgccggcatcggcaagagcggcgcccagcccgccaagaagcgcctgaacttcggccagaccggcgacaccgagagcgtgcccgacccccagcccatcggcgagccccccgccgcccccagcggcgtgggcagcctgaccatggccagcggcggcggcgcccccgtggccgacaacaacgagggcgccgacggcgtgggcagcagcagcggcaactggcactgcgacagccagtggctgggcgaccgcgtgatcaccaccagcacccgcacctgggccctgcccacctacaacaaccacctgtacaagcagatcagcaacagcaccagcggcggcagcagcaacgacaacgcctacttcggctacagcaccccctggggctacttcgacttcaaccgcttccactgccacttcagcccccgcgactggcagcgcctgatcaacaacaactggggcttccgccccaagcgcctgaacttcaagctgttcaacatccaggtgaaggaggtgaccgacaacaacggcgtgaagaccatcgccaacaacctgaccagcaccgtgcaggtgttcaccgacagcgactaccagctgccctacgtgctgggcagcgcccacgagggctgcctgccccccttccccgccgacgtgttcatgatcccccagtacggctacctgaccctgaacgacggcagccaggccgtgggccgcagcagcttctactgcctggagtacttccccagccagatgctgcgcaccggcaacaacttccagttcagctacgagttcgagaacgtgcccttccacagcagctacgcccacagccagagcctggaccgcctgatgaaccccctgatcgaccagtacctgtactacctgagcaagaccatcaacggcagcggccagaaccagcagaccctgaagttcagcgtggccggccccagcaacatggccgtgcagggccgcaactacatccccggccccagctaccgccagcagcgcgtgagcaccaccgtgacccagaacaacaacagcgagttcgcctggcccggcgccagcagctgggccctgaacggccgcaacagcctgatgaaccccggccccgccatggccagccacaaggagggcgaggaccgcttcttccccctgagcggcagcctgatcttcggcaagcagggcaccggccgcgacaacgtggacgccgacaaggtgatgatcaccaacgaggaggagatcaagaccaccaaccccgtggccaccgagagctacggccaggtggccaccaaccaccagagcgcccaggcccaggcccagaccggctgggtgcagaaccagggcatcctgcccggcatggtgtggcaggaccgcgacgtgtacctgcagggccccatctgggccaagatcccccacaccgacggcaacttccaccccagccccctgatgggcggcttcggcatgaagcacccccccccccagatcctgatcaagaacacccccgtgcccgccgacccccccaccgccttcaacaaggacaagctgaacagcttcatcacccagtacagcaccggccaggtgagcgtggagatcgagtgggagctgcagaaggagaacagcaagcgctggaaccccgagatccagtacaccagcaactactacaagagcaacaacgtggagttcgccgtgaacaccgagggcgtgtacagcgagccccgccccatcggcacccgctacctgacccgcaacctgtaa

SEQ ID NO: 997 - DNA, 2211 bp, Artificial Sequence
  Description of Artificial Sequence: Synthetic polynucleotide
atggctgccgatggttatcttccagattggctcgaggacactctctctgaaggaataagacagtggtggaagctcaaacctggcccaccaccaccaaagcccgcagagcggcataaggacgacagcaggggtcttgtgcttcctgggtacaagtacctcggacccttcaacggactcgacaagggagagccggtcaacgaggcagacgccgcggccctcgagcacgacaaggcctacgaccagcagctcaaggccggagacaacccgtacctcaagtacaaccacgccgacgccgagttccaggagcggctcaaagaagatacgtcttttgggggcaacctcggacgagcagtcttccaggccaagaagcgggttctcgaacctctcggtctggttgaggaaggcgctaagacggctcctggaaagaaacgtccggtagagcagtcgccacaagagccagactcctcctcgggcattggcaagacaggccagcagcccgctaaaaagagactcaattttggtcagactggcgactcagagtcagtccccgacccacaacctctcggagaacctccagcaacccccgctgctgtgggacctactacaatggcttcaggcggtggcgcaccaatggcggacaataacgaaggcgccgatggagtgggtagttcctcgggaaattggcattgcgattcccaatggctgggggacagagtcatcaccaccagcacccgaacatgggccttgcccacctataacaaccacctctacaagcaaatctccagtgcttcaacgggggccagcaacgacaaccactacttcggctacagcaccccctgggggtattttgacttcaacagattccactgccacttctcaccacgtgactggcagcgactcatcaacaacaactggggattccgacccaagagactcaacttcaagctctttaacattcaagtcaaggaggtcacgcagaatgaaggcaccaagaccatcgccaataacctcaccagcaccatccaggtgtttacggactcggagtaccagctgccgtacgttctcggctccgcccaccagggctgcctgcctccgttcccggcggacgtgttcatgattccccagtacggctacctaacactcaacaacggtagtcaggccgtgggacgctcctccttctactgcctggaatactttccttcgcagatgctgagaaccggcaacaacttccagtttacttacaccttcgaggacgtgcctttccacagcagctacgcccacagccagagcttggaccggctgatgaatcctctgattgaccagtacctgtactacttgtctcggactcaaacaacaggaggcacggcaaatacgcagactctgggcttcagccaaggtgggcctaatacaatggccaatcaggcaaagaactggctgccaggaccctgttaccgccaacaacgcgtctcaacgacaaccgggcaaaacaacaatagcaactttgcctggactgctgggaccaaataccatctgaatggaagaaattcattggctaatcctggcatcgctatggcaacacacaaagacgacaaggagcgtttttttcccagtaacgggatcctgatttttggcaaacaaaatgctgccagagacaatgcggattacagcgatgtcatgctcaccagcgaggaagaaatcaaaaccactaaccctgtggctacagaggaatacggtatcgtggcagataacttgcagcagcaaaacacggctcctcaaattggaactgtcaacagccagggggccttacccggtatggtctggcagaaccgggacgtgtacctgcagggtcccatctgggccaagattcctcacacggacggcaacttccacccgtctccgctgatgggcggctttggcctgaaacatcctccgcctcagatcctgatcaagaacacgcctgtacctgcggatcctccgaccaccttcaaccagtcaaagctgaactctttcatcacgcaatacagcaccggacaggtcagcgtggaaattgaatgggagctgcagaaagaaaacagcaaacgctggaacccagagattcaatacacttccaactactacaaatctacaagtgtggactttgctgttaatacagaaggcgtgtactctgaaccccaccccattggcacccgttacctcacccgtcccctgtaa

SEQ ID NO: 998 - DNA, 2211 bp, Artificial Sequence
  Description of Artificial Sequence: Synthetic polynucleotide
atggctgccgatggttatcttccagattggctcgaggacaacctctctgagggcattcgcgagtggtgggcgctgaaacctggagccccgaagcccaaagccaaccagcaaaagcaggacgacggccggggtctggtgcttcctggctacaagtacctcggacccttcaacggactcgacaagggggagccggtcaacgcagcagacgcggcggccctcgagcacgacaaggcctacgaccagcagctcaaggccggagacaacccgtacctcaagtacaaccacgccgacgccgagttccaggagcggctcaaagaagatacgtcttttgggggcaacctcgggcgagcagtcttccaggccaaaaagaggcttcttgaacctcttggtctggttgaggaagcggctaagacggctcctggaaagaagaggcctgtagagcagtctcctcaggaaccggactcctccgcgggtattggcaaatcgggtgcacagcccgctaaaaagagactcaattttggtcagactggcgactcagagtcagtccccgacccacaacctctcggagaacctccagcaacccccgctgctgtgggacctactacaatggcttcaggcggtggcgcaccaatggcagacaataacgaaggcgccgacggagtgggtaatgcctcaggaaattggcattgcgattccacatggctgggcgacagagtcatcaccaccagcacccgaacctgggccctgcccacctacaataaccacctctacaagcaaatctccagtgcttcaacgggggccagcaacgacaaccactacttcggctacagcaccccctgggggtattttgatttcaacagattccactgccacttttcaccacgtgactggcagcgactcatcaacaacaattggggattccggcccaagagactcaacttcaaactcttcaacatccaagtcaaggaggtcacgcagaatgaaggcaccaagaccatcgccaataacctcaccagcaccatccaggtgtttacggactcggagtaccagctgccgtacgttctcggctctgcccaccagggctgcctgcctccgttcccggcggacgtgttcatgattccccagtacggctacctaacactcaacaacggtagtcaggccgtgggacgctcctccttctactgcctggaatactttccttcgcagatgctgagaaccggcaacaacttccagtttacttacaccttcgaggacgtgcctttccacagcagctacgcccacagccagagcttggaccggctgatgaatcctctgattgaccagtacctgtactacttgtctcggactcaaacaacaggaggcacggcaaatacgcagactctgggcttcagccaaggtgggcctaatacaatggccaatcaggcaaagaactggctgccaggaccctgttaccgccaacaacgcgtctcaacgacaaccgggcaaaacaacaatagcaactttgcctggactgctgggaccaaataccatctgaatggaagaaattcattggctaatcctggcatcgctatggcaacacacaaagacgacaaggagcgtttttttcccagtaacgggatcctgatttttggcaaacaaaatgctgccagagacaatgcggattacagcgatgtcatgctcaccagcgaggaagaaatcaaagccactaaccctgtggctacagaggaatacggtatcgtggcagataacttgcagcagcaaaacacggctcctcaaattggaactgtcaacagccagggggccttacccggtatggtttggcagaaccgggacgtgtacctgcagggtcccatctgggccaagattcctcacacggacggcaacttccacccgtctccgctgatgggcggctttggcctgaaacatcctccgcctcagatcctgatcaagaacacgcctgtacctgcggatcctccgaccaccttcaaccagtcaaagctgaactctttcatcacgcaatacagcaccggacaggtcagcgtggaaattgaatgggagctgcagaaggaaaacagcaagcgctggaaccccgagatccagtacacctccaactactacaaatctacaagtgtggactttgctgttaatacagaaggcgtgtactctgaaccccaccccattggcacccgttacctcacccgtcccctgtaa

SEQ ID NO: 999 - DNA, 2214 bp, Artificial Sequence
  Description of Artificial Sequence: Synthetic polynucleotide
atggctgccgatggttatcttccagattggctcgaggacaacctctctgagggcattcgcgagtggtgggacttgaaacctggagccccgaagcccaaagccaaccagcaaaagcaggacgacggccggggtctggtgcttcctggctacaagtacctcggacccttcaacggactcgacaagggggagcccgtcaacgcggcggacgcagcggccctcgagcacgacaaggcctacgaccagcagctcaaagcgggtgacaatccgtacctgcggtataaccacgccgacgccgagtttcaggagcgtctgcaagaagatacgtcttttgggggcaacctcgggcgagcagtcttccaggccaagaagcgggttctcgaacctctcggtctggttgaggaaggcgctaatacggctcctggaaagaaacgtccggtagagcagtcgccacaagagccagactcctccgcgggtattggcaaatcgggtgcacagcccgctaaaaagagactcaatttcggtcagactggcgacacagagtcagtcccagaccctcaaccaatcggagaacctcccgcagccccctcaggtgtgggatctcttacaatggcttcaggtggtggcgcaccagtggcagacaataacgaaggtgccgatggagtgggtagttcctcgggaaattggcattgcgattcccaatggctgggggacagagtcatcaccaccagcacccgaacctgggccctgcccacctacaacaatcacctctacaagcaaatctccaacagcacatctggaggatcttcaaatgacaacgcctacttcggctacagcaccccctgggggtattttgacttcaacagattccactgccacttctcaccacgtgactggcagcgactcatcaacaacaactggggattccggcctaagcgactcaacttcaagctcttcaacattcaggtcaaagaggttacggacaacaatggagtcaagaccatcgccaataacctcaccagcaccatccaggtgtttacggactcggagtaccagctgccgtacgttctcggctccgcccaccagggctgcctgcctccgttcccggcggacgtgttcatgattccccagtacggctacctaacactcaacaacggtagtcaggccgtgggacgctcctccttctactgcctggaatactttccttcgcagatgctgagaaccggcaacaacttccagtttacttacaccttcgaggacgtgcctttccacagcagctacgcccacagccagagcttggaccggctgatgaatcctctgattgaccagtacctgtactacttgtctcggactcaaacaacaggaggcacggcaaatacgcagactctgggcttcagccaaggtgggcctaatacaatggccaatcaggcaaagaactggctgccaggaccctgttaccgccaacaacgcgtctcaacgacaaccgggcaaaacaacaatagcaactttgcctggactgctgggaccaaataccatctgaatggaagaaattcattggctaatcctggcatcgctatggcctcacacaaagacgacaaggagcgtttttttcccagtaacgggatcctgatttttggcaaacaaaatgctgccagagacaatgcggattacagcgatgtcatgctcaccagcgaggaagaaatcaaaaccactaaccctgtggctacagaggaatacggtatcgtggcagataacttgcagcagcaaaacacggctcctcaaattggaactgtcaacagtcaaggagccttacctggcatggtctggcagaaccgggacgtgtacctgcagggtcccatctgggccaagattcctcacacggacggcaacttccacccgtctccgctgatgggcggctttggcctgaaacatcctccgcctcagatcctgatcaagaacacgcctgtacctgcggatcctccgaccaccttcaaccagtcaaagctgaactctttcatcacgcaatacagcaccggacaggtcagcgtggaaattgaatgggagctgcagaaggaaaacagcaagcgctggaaccccgagatccagtacaccaccaactactacaaatctacaagtgtggactttgctgttaatacagaaggcgtgtactctgaaccccaccccattggcacccgttacctcacccgtcccctgtaa

SEQ ID NO: 1000 - DNA, 2211 bp, Artificial Sequence
  Description of Artificial Sequence: Synthetic polynucleotide
atggctgccgatggttatcttccagattggctcgaggacaacctctctgagggcattcgcgagtggtgggcgctgaaacctggagccccgaagcccaaagccaaccagcaaaagcaggacgacggccggggtctggtgcttcctggctacaagtacctcggacccttcaacggactcgacaaaggagagccggtcaacgaggcggacgcggcagccctcgaacacgacaaagcttacgaccagcagctcaaggccggtgacaatccgtacctgcggtataaccacgccgacgccgagtttcaggagcgtcttcaagaagatacgtcttttgggggcaacctcgggcgagcagtcttccaggccaagaagcgggttctcgaacctctcggtctggttgaggaaggcgctaagacggctcctggaaagaaacgtccggtagagcagtcgccacaagagccagactcctcctcgggcatcggcaagacaggccagcagcccgctaaaaagagactcaattttggtcagactggcgactcagagtcagtccccgacccacaacctctcggagaacctccagcaacccccgctgctgtgggacctactacaatggcttcaggcggtggcgcaccaatggcagacaataacgaaggcgccgacggagtgggtaatgcctcaggaaattggcattgcgattccacatggctgggcgacagagtcatcaccaccagcacccgcacctgggccttgcccacctacaataaccacctctacaagcaaatctccagtgcttcaacgggggccagcaacgacaaccactacttcggctacagcaccccctgggggtattttgactttaacagattccactgccacttttcaccacgtgactggcaaagactcatcaacaacaactggggattccggcccaagagactcaacttcaagctcttcaacatccaggtcaaggaggtcacgcagaatgaaggcaccaagaccatcgccaataaccttaccagcacgattcaggtctttacggactcggaataccagctcccgtacgtcctcggctctgcgcaccagggctgcctccctccgttcccggcggacgtgttcatgattccgcagtacggctacctaacactcaacaacggtagtcaggccgtgggacgctcctccttctactgcctggaatactttccttcgcagatgctgagaaccggcaacaacttccagtttacttacaccttcgaggacgtgcctttccacagcagctacgcccacagccagagcttggaccggctgatgaatcctctgattgaccagtacctgtactacttgtctcggactcaaacaacaggaggcacggcaaatacgcagactctgggcttcagccaaggtgggcctaatacaatggccaatcaggcaaagaactggctgccaggaccctgttaccgccaacaacgcgtctcaacgacaaccgggcaaaacaacaatagcaactttgcctggactgctgggaccaaataccatctgaatggaagaaattcattggctaatcctggcatcgctatggcaacacacaaagacgacaaggagcgtttttttcccagtaacgggatcctgatttttggcaaacaaaatgctgccagagacaatgcggattacagcgatgtcatgctcaccagcgaggaagaaatcaaaaccactaaccctgtggctacagaggaatacggtatcgtggcagataacttgcagcagcaaaacacggctcctcaaattggaactgtcaacagccagggggccttacccggtatggtctggcagaaccgggacgtgtacctgcagggtcccatctgggccaagattcctcacacggacggcaacttccacccgtctccgctgatgggcggctttggcctgaaacatcctccgcctcagatcctgatcaagaacacgcctgtacctgcggatcctccgaccaccttcaaccagtcaaagctgaactctttcatcacgcaatacagcaccggacaggtcagcgtggaaattgaatgggagctgcagaaggaaaacagcaagcgctggaaccccgagatccagtacacctccaactactacaaatctacaagtgtggactttgctgttaatacagaaggcgtgtactctgaaccccaccccattggcacccgttacctcacccgtcccctgtaa

SEQ ID NO: 1001 - DNA, 2211 bp, Artificial Sequence
  Description of Artificial Sequence: Synthetic polynucleotide
atggctgccgatggttatcttccagattggctcgaggacaacctctctgagggcattcgcgagtggtgggcgctgaaacctggagccccgaagcccaaagccaaccagcaaaagcaggacgacggccggggtctggtgcttcctggctacaagtacctcggacccttcaacggactcgacaaaggagagccggtcaacgaggcggacgcggcagccctcgaacacgacaaagcttacgaccagcagctcaaagcgggtgacaatccgtacctgcggtataaccacgccgacgccgagtttcaggagcgtctgcaagaagatacgtcttttgggggcaacctcgggcgagcagtcttccaggccaagaagagggttctcgaaccttttggtctggttgaggaaggtgctaagacggctcctggaaagaaacgtccggtagagcagtcgccacaagagccagactcctcctcgggcattggcaagacaggccagcagcccgctaaaaagagactcaattttggtcagactggcgactcagagtcagtccccgacccacaacctctcggagaacctccagcaacccccgctgctgtgggacctactacaatggcttcaggcggtggcgcaccaatggcagacaataacgaaggcgccgacggagtgggtaatgcctcaggaaattggcattgcgattcccaatggctgggcgacagagtcatcaccaccagcaccagaacctgggccttgcccacctataacaaccacctctacaagcaaatctccagtgcttcaacgggggccagcaacgacaaccactacttcggctacagcaccccctgggggtattttgatttcaacagattccactgccacttctcaccacgtgactggcagcgactcatcaacaacaactggggattccggcctaagcgactcaacttcaagctcttcaacattcaggtcaaagaggttacggacaacaatggagtcaagaccatcgccaataaccttaccagcacggttcaagtcttctcggactcggagtaccagttgccgtacgtcctcggctctgcgcaccagggctgcctccctccgttcccggcggacgtgttcatgattccccagtacggctacctaacactcaacaacggtagtcaggccgtgggacgctcctccttctactgcctggaatactttccttcgcagatgctgagaaccggcaacaacttccagtttacttacaccttcgaggacgtgcctttccacagcagctacgcgcacagccagagcttggaccggctgatgaatcctctgattgaccagtacctgtactacttgtctcggactcaaacaacaggaggcacggcaaatacgcagactctgggcttcagccaaggtgggcctaatacaatggccaatcaggcaaagaactggctgccaggaccctgttaccgccaacaacgcgtctcaacgacaaccgggcaaaacaacaatagcaactttgcctggactgctgggaccaaataccatctgaatggaagaaattcattggctaatcctggcatcgctatggcaacacacaaagacgacaaggagcgtttttttcccagtaacgggatcctgatttttggcaaacaaaatgctgccagagacaatgcggattacagcgatgtcatgctcaccagcgaggaagaaatcaaaaccactaaccctgtggctacagaggaatacggtatcgtggcagataacttgcagcagcaaaacacggctcctcaaattggaactgtcaacagccagggggccttacccggtatggtctggcagaaccgggacgtgtacctgcagggtcccatctgggccaagattcctcacacggacggcaacttccacccgtctccgctgatgggcggctttggcctgaaacatcctccgcctcagatcctgatcaagaacacgcctgtacctgcggatcctccgaccaccttcaaccagtcaaagctgaactctttcatcacgcaatacagcaccggacaggtcagcgtggaaattgaatgggagctgcagaaggaaaacagcaagcgctggaaccccgagatccagtacacctccaactactacaaatctacaagtgtggactttgctgttaatacagaaggcgtgtactctgaaccccaccccattggcacccgttacctcacccgtcccctgtaa

SEQ ID NO: 1002 - DNA, 2244 bp, Artificial Sequence
  Description of Artificial Sequence: Synthetic polynucleotide
  modified_base (2241)..(2241): a, c, g, or t
atggctgccgatggttatcttccagattggctcgaggacactctctctgaaggaataagacagtggtggaagctcaaacctggcccaccaccaccaaagcccgcagagcggcataaggacgacagcaggggtcttgtgcttcctgggtacaagtacctcggacccttcaacggactcgacaagggagagccggtcaacgaggcagacgccgcggccctcgagcacgacaaagcctacgaccggcagctcgacagcggagacaacccgtacctcaagtacaaccacgccgacgcggagtttcaggagcgccttaaagaagatacgtcttttgggggcaacctcgggcgagcagtcttccaggccaagaagagggttctcgaaccttttggtctggttgaggaaggtgctaagacggctcctggaaagaaacgtccggtagagcagtcgccacaagagccagactcctcctcgggcattggcaagacaggccagcagcccgctaaaaagagactcaattttggtcagactggcgactcagagtcagtccccgacccacaacctctcggagaacctccagcaacccccgctgctgtgggacctactacaatggcttcaggcggtggcgcaccaatggcagacaataacgaaggcgccgacggagtgggtaatgcctcaggaaattggcattgcgattccacatggctgggcgacagagtcatcaccaccagcacccgaacatgggccttgcccacctataacaaccacctctacaagcaaatctccagtgcttcaacgggggccagcaacgacaaccactacttcggctacagcaccccctgggggtattttgacttcaacagattccactgccacttctcaccacgtgactggcagcgactcatcaacaacaactggggattccggcctaagcgactcaacttcaagctcttcaacattcaggtcaaagaggttacggacaacaatggagtcaagaccatcgccaataaccttaccagcacggtccaggtcttcacggactcagactatcagctcccgtacgtgctcgggtcggctcacgagggctgcctcccgccgttcccagcggacgttttcatgattcctcagtacggctacctaacactcaacaacggtagtcaggccgtgggacgctcctccttctactgcctggaatactttccttcgcagatgctgagaaccggcaacaacttccagtttacttacaccttcgaggacgtgcctttccacagcagctacgcgcacagccagagcttggaccggctgatgaatcctctgattgaccagtacctgtactacttgtctcggactcaaacaacaggaggcacggcaaatacgcagactctgggcttcagccaaggtgggcctaatacaatggccaatcaggcaaagaactggctgccaggaccctgttaccgccaacaacgcgtctcaacgacaaccgggcaaaacaacaatagcaactttgcctggactgctgggaccaaataccatctgaatggaagaaattcattggctaatcctggcatcgctatggcaacacacaaagacgacaaggagcgtttttttcccagtaacgggatcctgatttttggcaaacaaaatgctgccagagacaatgcggattacagcgatgtcatgctcaccagcgaggaagaaatcaaaaccactaaccctgtggctacagaggaatacggtatcgtggcagataacttgcagcagcaaaacacggctcctcaaattggaactgtcaacagccagggggccttacccggtatggtctggcagaaccgggacgtgtacctgcagggtcccatctgggccaagattcctcacacggacggcaacttccacccgtctccgctgatgggcggctttggcctgaaacatcctccgcctcagatcctgatcaagaacacgcctgtacctgcggatcctccgaccaccttcaaccagtcaaagctgaactctttcatcacgcaatacagcaccggacaggtcagcgtggaaattgaatgggagctgcagaaggaaaacagcaagcgctggaaccccgagatccagtacacctccaactactacaaatctacaagtgtggactttgctgttaatacagaaggcgtgtactctgaaccccaccccattggcaccagatacctgactcgtaatctgtaattgcttgttaatcaataaaccgtttaattnttt

SEQ ID NO: 1003 - DNA, 2217 bp, Artificial Sequence
  Description of Artificial Sequence: Synthetic polynucleotide
atggctgccgatggttatcttccagattggctcgaggacaacctctctgagggcattcgcgagtggtgggacttgaaacctggagccccgaaacccaaagccaaccagcaaaagcaggacgacggccggggtctggtgcttcctggctacaagtacctcggacccttcaacggactcgacaagggggagcccgtcaacgcggcggacgcagcggccctcgagcacgacaaggcctacgaccagcagctccaagcgggtgacaatccgtacctgcggtataaccacgccgacgccgagtttcaggagcgtctgcaagaagatacgtcttttgggggcaacctcggacgagcagtcttccaggcgaaaaagagggttctcgaacctctcggtctggttgaggaaggcgctaagacggctcctggaaagaagagaccggtagagccatcaccccagcgttctccagactcctctacgggcatcggcaagaaaggccaacagcccgccagaaaaagactcaattttggtcagactggcgactcagagtcagttccagaccctcaacctctcggagaacctccagcagcgccctctggtgtgggacctaatacaatggctgcaggcggtggcgcaccaatggcagacaataacgaaggcgccgacggagtgggtagttcctcgggaaattggcattgcgattcccaatggctgggggacagagtcatcaccaccagcacccgaacctgggccctgcccacctacaacaatcacctctacaagcaaatctccaacagcacatctggaggatcttcaaatgacaacgcctacttcggctacagcaccccctgggggtattttgacttcaaccgcttccactgccacttctcaccacgtgactggcagcgactcatcaacaacaactggggattccggcccaagagactcagcttcaaactcttcaacatccaggtcaaggaggtcacgcagaatgaaggcaccaagaccatcgccaataacctcaccagcaccatccaggtgtttacggactcggagtaccagctgccgtacgttctcggctctgcccaccagggctgcctgcctccgttcccggcggacgtgttcatgattcctcagtacggctacctaacgctcaacaatggcagccaggcagtgggacggtcatccttttactgcctggaatatttcccatcgcagatgctgagaacgggcaacaactttaccttcagctacacctttgaggacgttcctttccacagcagctacgctcacagccagagtctggaccgtctcatgaatcctctgattgaccagtacctgtactacttgtctcggactcaaacaacaggaggcacggcaaatacgcagactctgggcttcagccaaggtgggcctaatacaatggccaatcaggcaaagaactggctgccaggaccctgttaccgccaacaacgcgtctcaacgacaaccgggcaaaacaacaatagcaactttgcctggactgctgggaccaaataccatctgaatggaagaaattcattggctaatcctggcatcgctatggcaacacacaaagacgacaaggagcgtttttttcccagtaacgggatcctgatttttggcaaacaaaatgctgccagagacaatgcggattacagcgatgtcatgctcaccagcgaggaagaaatcaaaaccactaaccctgtggctacagaggaatacggtatcgtggcagataacttgcagcagcaaaacacggctcctcaaattggaactgtcaacagccagggggccttacccggtatggtctggcagaaccgggacgtgtacctgcagggtcccatctgggccaagattcctcacacggacggcaacttccacccgtctccgctgatgggcggctttggacttaagcacccgcctcctcagatcctcatcaaaaacacgcctgttcctgcggatcctccgaccaccttcaaccagtcaaagctgaactctttcatcacgcaatacagcaccggacaggtcagcgtggaaattgaatgggagctgcagaaggaaaacagcaagcgctggaaccccgagatccagtacacctccaactactacaaatctacaagtgtggactttgctgttaatacagaaggcgtgtactctgaaccccaccccattggcacccgttacctcacccgtcccctgtaa

SEQ ID NO: 1004 - DNA, 2214 bp, Artificial Sequence
  Description of Artificial Sequence: Synthetic polynucleotide
atggctgccgatggttatcttccagattggctcgaggacaacctctctgagggcattcgcgagtggtgggacttgaaacctggagccccgaagcccaaagccaaccagcaaaagcaggacgacggccggggtctggtgcttcctggctacaagtacctcggacccttcaacggactcgacaagggggagcccgtcaacgcggcggatgcagcggccctcgagcacgacaaagcctacgaccagcagctcaaagcgggtgacaatccgtacctgcggtataaccacgccgacgccgagtttcaggagcgtctgcaagaagatacgtcttttgggggcaacctcgggcgagcagtcttccaggccaagaagagggttctcgaaccttttggtctggttgaggaaggtgctaagacggctcctggaaagaaacgtccggtagagcagtcgccacaagagccagactcctcctcgggcattggcaagacaggccagcagcccgctaaaaagagactcaattttggtcagactggcgactcagagtcagtccccgacccacaacctctcggagaacctccagcaacccccgctgctgtgggacctactacaatggcttcaggcggtggcgcacccatgcaagacaataacgaaggcgccgacggagtgggtagttcctcgggaaattggcattgcgattccacatggctgggcgacagagtcatcaccaccagcacccgaacctgggccctgcccacctacaacaaccacctctacaagcaaatctccaacgggacatcgggaggagccaccaacgacaacacctacttcggctacagcaccccctgggggtattttgactttaacagattccactgccacttttcaccacgtgactggcagcgactcatcaacaacaactggggattccggcccaagagactcaacttcaagctcttcaacatccaggtcaaggaggtcacgcagaatgaaggcaccaagaccatcgccaataaccttaccagcacgattcaggtctttacggattcggaataccagctcccgtacgtcctcggctctgcgcaccagggctgcctccctccgttcccggcggacgtgttcatgattccgcagtacggctacctaacgctcaacaatggtagccaggcagtgggacggtcatccttttactgcctggaatatttcccatcgcagatgctgagaacgggcaacaactttaccttcagctacacctttgaggacgttcctttccacagcagctacgctcacagccagagtctggaccgtctcatgaatcctctgattgaccagtacctgtactacttgtctcggactcaaacaacaggaggcacggcaaatacgcagactctgggcttcagccaaggtgggcctaatacaatggccaatcaggcaaagaactggctgccaggaccctgttaccgccaacaacgcgtctcaacgacaaccgggcaaaacaacaatagcaactttgcctggactgctgggaccaaataccatctgaatggaagaaattcattggctaatcctggcatcgctatggcaacacacaaagacgacaaggagcgtttttttcccagtaacgggatcctgatttttggcaaacaaaatgctgccagagacaatgcggattacagcgatgtcatgctcaccagcgaggaagaaatcaaaaccactaaccctgtggctacagaggaatacggtatcgtggcagataacttgcagcagcaaaacacggctcctcaaattggaactgtcaacagccagggggccttacccggtatggtctggcagaaccgggacgtgtacctgcagggtcccatctgggccaagattcctcacacggacggcaacttccacccgtctccgctgatgggcggctttggcctgaaacatcctccgcctcagatcctgatcaagaacacgcctgtacctgcggatcctccgaccaccttcaaccagtcaaagctgaactctttcatcacgcaatacagcaccggacaggtcagcgtggaaattgaatgggagctgcagaaggaaaacagcaagcgctggaaccccgagatccagtacacctccaactactacaaatctacaagtgtggactttgctgttaatacagaaggcgtgtactctgaaccccaccccattggcacccgttacctcacccgtcccctgtaa

SEQ ID NO: 1005 - DNA, 2211 bp, Artificial Sequence
  Description of Artificial Sequence: Synthetic polynucleotide
atggctgccgatggttatcttccagattggctcgaggacaacctctctgagggcattcgcgagtggtgggcgctgaaacctggagccccgaagcccaaagccaaccagcaaaagcaggacgacggccggggtctggtgcttcctggctacaagtacctcggacccttcaacggactcgacaagggggagcccgtcaacgcggcggacgcagcggccctcgagcacgacaaggcctacgaccagcagctcaaagcgggtgacaatccgtacctgcggtataaccacgccgacgccgagtttcaggagcgtctgcaagaagatacgtcttttgggggcaacctcgggcgagcagtcttccaggccaagaagcgggttctcgaacctctcggtctggttgaggaaggcgctaagacggctcctggaaagaaacgtccggtagagcagtcgccacaagagccagactcctcctcgggcatcggcaagacaggccagcagcccgctaaaaagagactcaattttggtcagactggcgactcagagtcagtccccgacccacaacctctcggagaacctccagcaacccccgctgctgtgggacctactacaatggcttcaggcggtggcgcaccaatggcagacaataacgaaggcgccgacggagtgggtagttcctcgggaaattggcattgcgattccacatggctgggcgacagagtcatcaccaccagcacccgcacctgggccttgcccacctacaataaccacctctacaagcaaatctccagtgcttcaacgggggccagcaacgacaaccactacttcggctacagcaccccctgggggtattttgacttcaacagattccactgccacttctcaccacgtgactggcagcgactcatcaacaacaactggggattccggcctaagcgactcaacttcaagctcttcaacattcaggtcaaagaggttacggacaacaatggagtcaagaccatcgccaataaccttaccagcacggtccaggtcttcacggactcagactatcagctcccgtacgtgctcgggtcggctcacgagggctgcctcccgccgttcccagcggacgttttcatgattcctcagtacgggtatctgacgctcaacaatggcagccaggcagtgggacggtcatccttttactgcctggaatatttcccatcgcagatgctgagaacgggcaataactttaccttcagctacaccttcgaggacgtgcctttccacagcagctacgcgcacagccagagcctggaccggctgatgaatcctctgattgaccagtacctgtactacttgtctcggactcaaacaacaggaggcacggcaaatacgcagactctgggcttcagccaaggtgggcctaatacaatggccaatcaggcaaagaactggctgccaggaccctgttaccgccaacaacgcgtctcaacgacaaccgggcaaaacaacaatagcaactttgcctggactgctgggaccaaataccatctgaatggaagaaattcattggctaatcctggcatcgctatggcaacacacaaagacgacaaggagcgtttttttcccagtaacgggatcctgatttttggcaaacaaaatgctgccagagacaatgcggattacagcgatgtcatgctcaccagcgaggaagaaatcaaaaccactaaccctgtggctacagaggaatacggtatcgtggcagataacttgcagcagcaaaacacggctcctcaaattggaactgtcaacagccagggggccttacccggtatggtctggcagaaccgggacgtgtacctgcagggtcccatctgggccaagattcctcacacggacggcaacttccacccgtctccgctgatgggcggctttggcctgaaacatcctccgcctcagatcctgatcaagaacacgcctgtacctgcggatcctccgaccaccttcaaccagtcaaagctgaactctttcatcacgcaatacagcaccggacaggtcagcgtggaaattgaatgggagctgcagaaggaaaacagcaagcgctggaaccccgagatccagtacacctccaactactacaaatctacaagtgtggactttgctgttaatacagaaggcgtgtactctgaaccccaccccattggcacccgttacctcacccgtcccctgtaa

SEQ ID NO: 1006 - DNA, 2214 bp, Artificial Sequence
  Description of Artificial Sequence: Synthetic polynucleotide
atggctgccgatggttatcttccagattggctcgaggacaacctctctgagggcattcgcgagtggtgggacttgaaacctggagccccgaaacccaaagccaaccagcaaaagcaggacgacggccggggtctggtgcttcctggctacaagtacctcggacccttcaacggactcgacaagggggagcccgtcaacgcggcggatgcagcggccctcgagcacgacaaggcctacgaccagcagctcaaagcgggtgacaatccgtacctgcggtataaccacgccgacgccgagtttcaggagcgtctgcaagaagatacgtcttttgggggcaacctcgggcgagcagtcttccaggccaagaagcgggttctcgaacctctcggtctggttgaggaaggcgctaagacggctcctggaaagaagagaccggtagagccatcaccccagcgttctccagactcctctacgggcatcggcaagaaaggccaacagcccgccagaaaaagactcaattttggtcagactggcgactcagagtcagtccccgacccacaacctctcggagaacctccagcaacccccgctgctgtgggacctactacaatggcttcaggcggtggcgcaccaatggcagacaataacgaaggcgccgacggagtgggtaatgcctcaggaaattggcattgcgattccacatggctgggcgacagagtcatcaccaccagcacccgaacatgggccttgcccacctataacaaccacctctacaagcaaatctccagtgcttcaacgggggccagcaacgacaaccactacttcggctacagcaccccctgggggtattttgatttcaacagattccactgccatttctcaccacgtgactggcagcgactcatcaacaacaatttgggatcccggcccaagagactcaacttcaagctcttcatcatccaagtcaaggaggtcacgacgaatgatggcgtcacgaccatcgctaataaccttaccagcacggttcaagtcttctcggactcggagtaccagttgccgtacgtcctcggctctgcgcaccagggctgcctccctccgttcccggcggacgtgttcatgattccgcagtacggctacctaacgctcaacaatggcagccaggcagtgggacggtcatccttttactgcctggaatatttcccatcgcagatgctgagaacgggcaataactttaccttcagctacaccttcgaggacgtgcctttccacagcagctacgcgcacagccagagcctggaccggctgatgaatcctctcatcgaccagtacctgtattacctgaacagaactcagaatcagtccggaagtgcccaaaacaaggacttgctgtttagccgggggtctccagctggcatgtctgttcagcccaaaaactggctacctggaccctgttaccggcagcagcgcgtttctaaaacaaaaacagacaacaacaacagcaactttacctggactggtgcttcaaaatataaccttaatgggcgtgaatctataatcaaccctggcactgctatggcctcacacaaagacgacaaagacaagttctttcccatgagcggtgtcatgatttttggaaaggagagcgccggagcttcaaacactgcattggacaatgtcatgatcacagacgaagaggaaatcaaagccactaaccccgtggccaccgaaagatttgggactgtggcagtcaatctccagagcagcagcacagaccctgcgaccggagatgtgcatgttatgggagccttacctggaatggtgtggcaagacagagacgtatacctgcagggtcctatttgggccaaaattcctcacacggatggacactttcacccgtctcctctcatgggcggctttggacttaagcacccgcctcctcagatcctcatcaaaaacacgcctgttcctgcgaatcctccggcagagttttcggctacaaagtttgcttcattcatcacccagtattccacaggacaagtgagcgtggagattgaatgggagctgcagaaagaaaacagcaaacgctggaatcccgaagtgcagtatacatctaactatgcaaaatctgccaacgttgatttcactgtggacaacaatggactttatactgagcctcgccccattggcacccgttacctcacccgtcccctgtaa

SEQ ID NO: 1007 - DNA, 2211 bp, Artificial Sequence
  Description of Artificial Sequence: Synthetic polynucleotide
atggctgccgatggttatcttccagattggctcgaggacaacctctctgagggcattcgcgagtggtgggcgctgaaacctggagccccgaaacccaaagccaaccagcaaaagcaggacgacggccggggtctggtgcttcctggctacaagtacctcggacccttcaacggactcgacaagggggagcccgtcaacgcggcggacgcagcggccctcgagcacgacaaggcctacgaccagcagctcaaggcgggtgacaatccgtacctgcggtataaccacgccgacgccgagtttcaggagcgtctgcaagaagatacgtcttttgggggcaacctcgggcgagcagtcttccaggccaaaaagaggcttcttgaacctcttggtctggttgaggaagcggctaagacggctcctggaaagaaacgtccggtagagcagtcgccacaagagccagactcctcctcgggcattggcaagacaggccagcagcccgctaaaaagagactcaactttgggcagactggcgactcagagtcagtgcccgaccctcaaccaatcggagaacctccagcaacccccgctgctgtgggacctactacaatggcttcaggcggtggcgcaccaatggcggacaataacgaaggcgccgatggagtgggtaattcctcgggaaattggcattgcgattccacatggctgggcgacagagtcatcaccaccagcacccgaacctgggccctgcccacctacaacaatcacctctacaagcaaatctccagtgcttcaacgggggccagcaacgacaaccactacttcggctacagcaccccctgggggtattttgatttcaacagattccactgccacttttcaccacgtgactggcagcgactcatcaacaacaactggggattccggcccaagagactcaacttcaagctcttcaacatccaggtcaaggaggtcacgcagaatgaaggcaccaagaccatcgccaataacctcaccagcaccatccaggtgtttacggactcggagtaccagctgccgtacgttctcggctccgcccaccagggctgcctgcctccgttcccggcggacgtgttcatgattccgcagtacggctacctaacgctcaacaatggcagccaggcagtgggacggtcatccttttactgcctggaatatttcccatcgcagatgctgagaacgggcaacaactttaccttcagctacacctttgaggacgttcctttccacagcagctacgctcacagccagagtctggaccgtctcatgaatcctctgattgaccagtacctgtactacttgtctcggactcaaacaacaggaggcacggcaaatacgcagactctgggcttcagccaaggtgggcctaatacaatggccaatcaggcaaagaactggctgccaggaccctgttaccgccaacaacgcgtctcaacgacaaccgggcaaaacaacaatagcaactttgcctggactgctgggaccaaataccatctgaatggaagaaattcattggctaatcctggcatcgctatggcaacacacaaagacgacaaggagcgtttttttcccagtaacgggatcctgatttttggcaaacaaaatgctgccagagacaatgcggattacagcgatgtcatgctcaccagcgaggaagaaatcaaaaccactaaccctgtggctacagaggaatacggtatcgtggcagataacttgcagcagcaaaacacggctcctcaaattggaactgtcaacagccagggggccttacccggtatggtctggcagaaccgggacgtgtacctgcagggtcccatctgggccaagattcctcacacggacggcaacttccacccgtctccgctgatgggcggctttggcctgaaacatcctccgcctcagatcctgatcaagaacacgcctgtacctgcggatcctccgaccaccttcaaccagtcaaagctgaactctttcatcacgcaatacagcaccggacaggtcagcgtggaaattgaatgggagctgcagaaggaaaacagcaagcgctggaaccccgagatccagtacacctccaactactacaaatctacaagtgtggactttgctgttaatacagaaggcgtgtactctgatccccaccccattggcacccgttacctcacccgtcccctgtaa

SEQ ID NO: 1008 - DNA, 2211 bp, Artificial Sequence
  Description of Artificial Sequence: Synthetic polynucleotide
atggctgccgatggttatcttccagattggctcgaggacaacctctctgagggcattcgcgagtggtgggcgctgaaacctggagccccgaagcccaaagccaaccagcaagagcaggacgacggccggggtctggtgcttcctggctacaagtacctcggacccttcaacggactcgacaagggagagcccgtcaacgcggcggatgcagcggccctcgagcacgacaaagcctacgaccagcagctcaaagcgggtgacaatccgtacctgcggtataaccacgccgacgccgagtttcaggagcgtctgcaagaagatacgtcttttgggggcaacctcgggcgagcagtcttccaggccaagaagagggttctcgaaccttttggtctggttgaggaaggtgctaagacggctcctggaaagaaacgtccggtagagcagtcgccacaagagccagactcctcctcgggcattggcaagacaggccagcagcccgctaaaaagagactcaattttggtcagactggcgactcagagtcagttccagaccctcaacctctcggagaacctccagcagcgccctctggtgtgggacctaatacaatggctgcaggcggtggcgcaccaatggcagacaataacgaaggcgccgacggagtgggtagttcctcgggaaattggcattgcgattccacatggctgggcgacagagtcatcaccaccagcacccgaacctgggccctgcccacctacaacaaccacctctacaagcaaatctccagtgcttcaacgggggccagcaacgacaaccactacttcggctacagcaccccctgggggtattttgactttaacagattccactgccacttttcaccacgtgactggcagcgactcatcaacaacaactggggattccggcccaagagactcaacttcaagctcttcaacatccaggtcaaggaggtcacgcagaatgaaggcaccaagaccatcgccaataaccttaccagcacgattcaggtctttacggattcggaataccagctcccgtacgtcctcggctctgcgcaccagggctgcctccctccgttcccggcggacgtgttcatgattccgcagtacggctacctaacgctcaacaatggtagccaggcagtgggacggtcatcctttttctgcctggaatatttcccatcgcagatgctgagaacgggcaacaactttaccttcagctacacctttgaggacgttcctttccacagcagctacgctcacagccagagtctggaccgtctcatgaatcctctgattgaccagtacctgtactacttgtctcggactcaaacaacaggaggcacggcaaatacgcagactctgggcttcagccaaggtgggcctaatacaatggccaatcaggcaaagaactggctgccaggaccctgttaccgccaacaacgcgtctcaacgacaaccgggcaaaacaacaatagcaactttgcctggactgctgggaccaaataccatctgaatggaagaaattcattggctaatcctggcatcgctatggcaacacacaaagacgacaaggagcgtttttttcccagtaacgggatcctgatttttggcaaacaaaatgctgccagagacaatgcggattacagcgatgtcatgctcaccagcgaggaagaaatcaaaaccactaaccctgtggctacagaggaatacggtatcgtggcagataacttgcagcagcaaaacacggctcctcaaattggaactgtcaacagccagggggccttacccggtatggtctggcagaaccgagacgtgtacctgcagggtcccatctgggccaagattcctcacacggacggcaacttccacccgtctccgctgatgggcggctttggcctgaaacatcctccgcctcagatcctgatcaagaacacgcctgtacctgcggatcctccgaccaccttcaaccagtcaaagctgaactctttcatcacgcaatacagcaccggacaggtcagcgtggaaattgaatgggagctgcagaaggaaaacagcaagcgctggaaccccgagatccagtacacctccaactactacaaatctacaagtgtggactttgctgttaatacagaaggcgtgtactctgaaccccaccccattggcacccgttacctcacccgtcccctgtaa

SEQ ID NO: 1009 - DNA, 2211 bp, Artificial Sequence
  Description of Artificial Sequence: Synthetic polynucleotide
atggctgccgatggttatcttccagattggctcgaggacaacctctctgagggcattcgcgagtggtgggacttgaaacctggagccccgaagcccaaagccaaccagcaaaagcaggacgacggccggggtctggtgcttcctggctacaagtacctcggacccttcaacggactcgacaagggggagcccgtcaacgcggcggacgcagcggccctcgagcacgacaaggcctacgaccagcagctcaaagcgggtgacaatccgtacctgcggtataaccacgccgacgccgagtttcaggagcgtctgcaagaagatacgtcttttgggggcaacctcgggcgagcagtcttccaggccaagaagcgggttctcgaacctctcggtctggttgaggaaggcgctaagacggctcctggaaagaaacgtccggtagagcagtcaccacaagagccagactcctcctcgggcatcggcaagacaggccagcagcccgctaaaaagagactcaattttggtcagactggcgactcagagtcagtccccgacccacaacctctcggagaacctccagcaacccccgctgctgtgggacctactacaatggcttcaggcggtggcgcaccaatggcggacaataacgaaggcgccgacggagtgggtaatgcctcaggaaattggcattgcgattccacatggctgggcgacagagtcatcaccaccagcacccgaacatgggccttgcccacctataacaaccacctctacaagcaaatctccagtgcttcaacgggggccagcaacgacaaccactacttcggctacagcaccccctgggggtattttgatttcaacagattccactgccatttctcaccacgtgactggcagcgactcatcaacaacaattggggattccggcccaagagactcaacttcaagctcttcaacatccaagtcaaggaggtcacgacgaatgatggcgtcacgaccatcgctaataaccttaccagcacggttcaagtcttctcggactcggagtaccagttgccgtacgtcctcggctctgcgcaccagggctgcctccctccgttcccggcggacgtgttcatgattccgcagtacggctacctaacgctcaacaatggcagccaggcagtgggacggtcatccttttactgcctggaatatttcccatcgcagatgctgagaacgggcaataactttaccttcagctacaccttcgaggacgtgcctttccacagcagctacgcgcacagccagagcctggaccggctgatgaatcctctcatcgaccagtacctgtattacctgaacagaactcagaatcagtccggaagtgcccaaaacaaggacttgctgtttagccgggggtctccagctggcatgtctgttcagcccaaaaactggctacctggaccctgttaccggcagcagcgcgtttctaaaacaaaaacagacaacaacaacagcaactttacctggacaggtgcttcaaaatataaccttaatgggcgtgaatctataatcaaccctggcactgctatggcctcacacaaagacgacaaagacaagttctttcccatgagcggtgtcatgatttttggaaaggagagcgccggagcttcaaacactgcattggacaatgtcatgatcacagacgaagaggaaatcaaagccactaaccccgtggccaccgaaagatttgggactgtggcagtcaatctccagaacagcagcacagaccctgcgaccggagatgtgcatgttatgggagccttacctggaatggtgtggcaagacagagacgtatacctgcagggtcctatttgggccaaaattcctcacacggatggacactttcacccgtctcctctcatgggcggctttggacttaagcacccgcctcctcagatcctcatcaaaaacacgcctgttcctgcgaatcctccggcagagttttcggctacaaagtttgcttcattcatcacccagtattccacaggacaagtgagcgtggagattgaatgggagctgcagaaagaaaacagcaaacgctggaatcccgaagtgcagtatacatctaactatgcaaaatctgccaacgttgatttcactgtagacaacaatggactttatactgtgcctcgccccattggcacccgttacctcacccgtcccctgtaa

SEQ ID NO: 1010 - DNA, 2211 bp, Artificial Sequence
  Description of Artificial Sequence: Synthetic polynucleotide
atggctgccgatggttatcttccagattggctcgaggacaacctctctgagggcattcgcgagtggtgggcgctgaaacctggagccccgaagcccaaagccaaccagcaaaagcaggacgacggccggggtctggtgcttcctggctacaagtacctcggacccttcaacggactcgacaaaggagagccggtcaacgcggcggacgcggcggccctcgaacacgacaaggcttacgaccagcagctcaaggcgggtgacaacccctacctgcggtataaccacgccgacgccgagttccaggagcggctgcaagaagatacgtcttttgggggcaacctcgggcgagcagtcttccaggccaaaaagaggcttcttgaacctcttggtctggttgaggaaggcgctaagacggctcctggaaagaagaggcctgtagagcagtctcctcaagaaccggactcctcctcgggtattggcaaaacaggtgagcagcccgctaaaaagagactcaattttggtcagactggcgactcagagtcagtccccgacccacaacctctcggagaacctccagcaacccccgctgctgtgggacctactacaatggcttcaggcggtggcgcaccaatggcagacaataacgaaggcgccgacggagtgggtagtgcctcaggaaattggcattgcgattccacatggctgggcgacagagtcatcaccaccagcacccgaacctgggccctgcccacctataacaaccatctctacaagcaaatctccagtgcttcaacgggggccagcaacgacaaccactacttcggctacagcaccccctgggggtattttgacttcaacagattccactgccacttctcaccacgtgactggcagcgactcatcaacaacaactggggattccggcctaagcgactcaacttcaagctcttcaacattcaggtcaaagaggttacggacaacaatggagtcaagaccatcgccaataacctcaccagcaccatccaggtgttcacggactcagagtatcagctgccgtacgtgctcgggtcggctcaccagggctgcctccctccgttcccagcggacgtgttcatgattcctcagtacgggtatctgacactcaacaacggcagtcaggcagtgggacggtcatccttctactgcctggaatattttccatcgcagatgctgagaaccggcaacaactttccgttcagttacaccttcgaggacgtgcctttccacagcagctacgcgcacagccagagcctggaccggctgatgaatcctctgattgaccagtacctgtactacttgtctcggactcaaacaacaggaggcacggcaaatacgcagactctgggcttcagccaaggtgggcctaatacaatggccaatcaggcaaagaactggctgccaggaccctgttaccgccaacaacgcgtctcaacgacaaccgggcaaaacaacaatagcaactttgcctggactgctgggaccaaataccatctgaatggaagaaattcattggctaatcctggcatcgctatggcaacacacaaagacgacaaggagcgtttttttcccagtaacgggatcctgatttttggcaaacaaaatgctgccagagacaatgcggattacagcgatgtcatgctcaccagcgaggaagaaatcaaaaccactaaccctgtggctacagaggaatacggtatcgtggcagataacttgcagcagcaaaacacggctcctcaaattggaactgtcaacagccagggggccttacccggtatggtctggcagaaccgggacgtgtacctgcagggtcccatctgggccaagattcctcacacggacggcaacttccacccgtctccgctgatgggcggctttggcctgaaacatcctccgcctcagatcctgatcaagaacacgcctgtacctgcggatcctccgaccaccttcaaccagtcaaagctgaactctttcatcacgcaatacagcaccggacaggtcagcgtggaaattgaatgggagctgcagaaggaaaacagcaagcgctggaaccccgagatccagtacacctccaactactacaaatctacaagtgtggactttgctgttaatacagaaggcgtgtactctgaaccccaccccattggcacccgttacctcacccgtcccctgtaa

SEQ ID NO: 1011 - DNA, 2211 bp, Artificial Sequence
  Description of Artificial Sequence: Synthetic polynucleotide
atggctgccgatggttatcttccagattggctcgaggacaacctctctgagggcattcgcgagtggtgggcgctgaaacctggagccccgaagcccaaagccaaccagcaaaagcaggacgacggccggggtctggtgcttcctggctacaagtacctcggacccttcaacggactcgacaagggggagcccgtcaacgcggcggacgcagcggccctcgagcacgacaaggcctacgaccagcagctcaaagcgggtgacaatccgtacctgcggtataaccacgccgacgccgagtttcaggagcgtctgcaagaagatacgtcttttgggggcaacctcgggcgagcagtcttccaggccaagaagcgggttctcgaacctctcggtctggttgaggaaggcgctaagacggctcctggaaagaaacgtccggtagaacagtcgccacaagagccagactcctcctcgggcatcggcaagacaggccagcagcccgctaaaaagagactcaattttggtcagactggcgactcagagtcagtccccgatccacaacctctcggagaacctccagcaacccccgctgctgtgggacctactacaatggcttcaggcggtggcgcaccaatggcagacaataacgaaggcgccgacggagtgggtagttcctcgggaaattggcattgcgattcccaatggctgggggacagagtcatcaccaccagcacccgaacctgggccctgcccacctacaacaaccacctctacaagcaaatctccagtgcttcaacgggggccagcaacgacaaccactacttcggctacagcaccccctgggggtattttgatttcaacagattccactgccatttctcaccacgtgactggcagcgactcatcaacaacaactggggattccggcctaagcgactcaacttcaagctcttcaacattcaggtcaaagaggttacggacaacaatggagtcaagaccatcgccaataaccttaccagcacggtccaggtcttcacggactcggagtaccagttgccgtacgtcctcggctctgcgcaccaggactgcctccctccgttcccggcggacgtgttcatgattccgcagtacggctacctaacgctcaacaatggcagccaggcagtgggacggtcatccttttactgcctggaatatttcccatcgcagatgctgagaacgggcaacaactttaccttcagctacacctttgaggacgttcctttccacagcagctacgctcacagccagagtctggaccgtctcatgaatcctctgattgaccagtacctgtactacttgtctcggactcaaacaacaggaggcacggcaaatacgcagactctgggcttcagccaaggtgggcctaatacaatggccaatcaggcaaagaactggctgccaggaccctgttaccgccaacaacgcgtctcaacgacaaccggacaaaacaacaatagcaactttgcctggactgctgggaccaaataccatctgaatggaagaaattcattggctaatcctggcatcgctatggcaacacacaaagacgacaaggagcgtttttttcccagtaacgggatcctgatttttggcaaacaaaatgctgccagagacaatgcggattacagcgatgtcatgctcaccagcgaggaagaaatcaaaaccactaaccctgtggctacagaggaatacggtatcgtggcagataacttgcagcagcaaaacacggctcctcaaattggaactgtcaacagccagggggccttacccggtatggtctggcagaaccgggacgtgtacctgcagggtcccatctgggccaagattcctcacacggacggcaacttccacccgtctccgctgatgggcggctttggcctgaaacatcctccgcctcagatcctgatcaagaacacgcctgtacctgcggatcctccgaccaccttcaaccagtcaaagctgaactctttcatcacgcaatacagcaccggacaggtcagcgtggaaattgaatgggagctgcagaaggaaaacagcaagcgctggaaccccgagatccagtacacctccaactactacaaatctacaagtgtggactttgctgttaatacagaaggcgtgtactctgaaccccaccccattggcacccgttacctcacccgtcccctgtaa

SEQ ID NO: 1012 - DNA, 2211 bp, Artificial Sequence
  Description of Artificial Sequence: Synthetic polynucleotide
atggctgccgatggttatcttccagattggctcgaggacaacctctctgagggcattcgcgagtggtgggacttgaaacctggagccccgaagcccaaagccaaccagcaaaagcaggacgacggccggggtctggtgcttcctggctacaagtacctcggacccttcaacggactcgacaagggggagcccgtcaacgcggcggacgcagcggccctcgagcacgacaaggcctacgaccagcagctcaaagcgggtgacaatccgtacctgcggtataaccacgccgacgccgagtttcaggagcgtctgcaagaagatacgtcttttgggggcaacctcgggcgagcagtcttccaggccaagaagcgggttctcgaacctctcggtctggttgaggaaggcgctaagacggctcctggaaagaaacgtccggtagagcagtcaccacaagagccagactcctcctcgggcatcggcaagacaggccagcagcccgctaaaaagagactcaattttggtcagactggcgactcagagtcagtccccgacccacaacctctcggagaacctccagcaacccccgctgctgtgggacctactacaatggcttcaggcggtggcgcaccaatggcagacaataacgaaggtgccgacggagtgggtaatgcctcaggaaattggcattgcgattccacatggctgggcgactgagtcatcaccaccagcacccgcacctgggccttgcccacctacaataaccacctctacaagcaaatctccagtgcttcaacgggggccagcaacgacaaccactacttcggctacagcaccccctgggggtattttgatttcaacagattccactgccacttttcaccacgtgactggcagcgactcatcaacaacaattggggattccggcccaagagactcaacttcaaactcttcaacatccaagtcaaggaggtcacgcagaatgaaggcaccaagaccatcgccaataacctcaccagcaccatccaggtgtttacggactcggagtaccagctgccgtacgttctcggctctgcccaccagggctgcctgcctccgttcccggcggacgtgttcatgattccccagtacggctacctaacgctcaacaatggcagccaggcagtgggacggtcatccttttactgcctggaatactttccttcgcagatgctgagaaccggcaacaacttccagtttacttacaccttcgaggacgtgcctttccacagcagctacgcccacagccagagcttggaccggctgatgaatcctctgattgaccagtacctgtactacttgtctcggactcaaacaacaggaggcacggcaaatacgcagactctgggcttcagccaaggtgggcctaatacaatggccaatcaggcaaagaactggctgccaggaccctgttaccgccaacaacgcgtctcaacgacaaccgggcaaaacaacaatagcaactttgcctggactgctgggaccaaataccatctgaatggaagaaattcattggctaatcctggcatcgctatggcaacacacaaagacgacaaggagcgtttttttcccagtaacgggatcctgatttttggcaaacaaaatgctgccagagacaatgcggattacagcgatgtcatactcaccagcgaggaagaaatcaaaaccactaaccctgtggctacagaggaatacggtatcgtggcagataacttgcagcagcaaaacacggctcctcaaattggaactgtcaacagccagggggccttacccggtatggtctggcagaaccgggacgtgtacctgcagggtcccatctgggccaagattcctcacacggacggcaacttccacccgtctccgctgatgggcggctttggcctgaaacatcctccgcctcagatcctgatcaagaacacgcctgtacctgcggatcctccgaccaccttcaaccagtcaaagctgaactctttcatcacgcaatacagcaccggacaggtcagcgtggaaattgaatgggagctgcagaaggaaaacagcaagcgctggaaccccgagatccagtacacctccaactactacaaatctacaagtgtggactttgctgttaatacagaaggcgtgtactctgaaccccaccccattggcacccgttacctcacccgtcccctgtaa

SEQ ID NO: 1013 - DNA, 2211 bp, Artificial Sequence
  Description of Artificial Sequence: Synthetic polynucleotide
atggctgccgatggttatcttccagattggctcgaggacactctctctgaaggaataagacagtggtggaagctcaaacctggcccaccaccaccaaagcccgcagagcggcataaggacgacagcaggggtcttgtgcttcctgggtacaagtacctcggacccttcaacggactcgacaagggagagccggtcaacgaggcagacgccgcggccctcgagcacgacaaagcctacgaccggcagctcgacagcggagacaacccgtacctcaagtacaaccacgccgacgcggagtttcaggagcgccttaaagaagatacgtcttttgggggcaacctcgggcgagcagtcttccaggccaagaagagggttctcgaaccttttggtctggttgaggaaggtgctaagacggctcctggaaagaaacgtccggtagagcagtcgccacaagagccagactcctcctcgggcattggcaagacaggccagcagcccgctaaaaagagactcaattttggtcagactggcgactcagagtcagtccccgacccacaacctctcggagaacctccagcaacccccgctgctgtgggacctactacaatggcttcaggcggtggcgcaccaatggcagacaataacgaaggcgccgacggagtgggtaatgcctcaggaaattggcattgcgattccacatggctgggcgacagagtcatcaccaccagcacccgaacatgggccttgcccacctataacaaccacctctacaagcaaatctccagtacttcaacgggggccagtaacgacaaccactacttcggctacagcaccccctgggggtattttgacttcaacagattccactgccacttctcaccacgtgactggcagcgactcatcaacaacaactggggattccggcctaagcgactcaacttcaagctcttcaacattcaggtcaaagaggttacggacaacaatggagtcaagaccatcgccaataaccttaccagcacggtccaggtcttcacggactcggagtaccagttgccgtacgtcctcggctctgcgcaccagggctgcctgcctccgttcccggcggacgtgttcatgattccgcagtacggctacctaacgctcaacaatggcagccaggcagtgggacggtcatccttttactgcctggaatatttcccatcgcagatgctgagaacgggcaacaactttaccttcagctacacttttgaggacgttcctttccacagcagctacgctcacagccagagtctggaccgtctcatgaatcctctgattgaccagtacctgtactacttgtctcggactcaaacaacaggaggcacggcaaatacgcagactctgggcttcagccaaggtgggcctaatacaatggccaatcaggcaaagaactggctgccaggaccctgttaccgccaacaacgcgtctcaacgacaaccggacaaaacaacaatagcaactttgcctggactgctgggaccaaataccatctgaatggaagaaattcattggctaatcctggcatcgctatggcaacacacaaagacgacaaggagcgtttttttcccagtaacgggatcctgatttttggcaaacaaaatgctgccagagacaatgcggattacagcgatgtcatgctcaccagcgaggaagaaatcaaaaccactaaccctgtggctacagaggaatacggtatcgtggcagataacttgcagcagcaaaacacggctcctcaaattggaactgtcaacagccagggggccttacccggtatggtctggcagaaccgggacgtgtacctgcagggtcccatctgggccaagattcctcacacggacggcaacttccacccgtctccgctgatgggcggctttggcctgaaacatcctccgcctcagatcctgatcaagaacacgcctgtacctgcggatcctccgaccaccttcaaccagtcaaagctgaactctttcatcacgcaatacagcaccggacaggtcagcgtggaaattgaatgggagctgcagaaggaaaacagcaagcgctggaaccccgagatccagtacacctccaactactacaaatctacaagtgtggactttgctgttaatacagaaggcgtgtactctgaaccccaccccattggcacccgttacctcacccgtcccctgtaa

SEQ ID NO: 1014 - DNA, 2208 bp, Artificial Sequence
  Description of Artificial Sequence: Synthetic polynucleotide
atggctgccgatggttatcttccagattggctcgaggacaacctctctgagggcattcgcgagtggtgggacttgaaacctggagccccgaagcccaaagccaaccagcaaaagcaggacgacggccggggtctggtgcttcctggctacaagtacctcggacccttcaacggactcgacaagggggagcccgtcaacgcggcggatgcagcggccctcgagcacgacaaggcctacgaccggcagctcgacagcggagacaacccgtacctgcggtataaccacgccgacgcggagtttcaggagcgccttaaagaagatacgtcttttgggggcaacctcgggcgagcagtcttccaggccaagaagagggttctcgaaccttttggtctggttgaggaaggtgctaagacggctcctggaaagaaacgtccggtagagcagtcgccacaagagccagactcctcctcgggcattggcaagacaggccagcagcccgctaaaaagagactcaattttggtcagactggcgactcagagtcagtccccgacccacaacctctcggagaacctccagcaacccccgctgctgtgggacctactacaatggcttcaggcggtggcgcaccaatggcagacaataacgaaggcgccgacggagtgggtaatgcctcaggaaattggcattgcgattccacatggctgggcgacagagtcatcaccaccagcacccgcacctgggccttgcccacctacaataaccacctctacaagcaaatctccagtgcttcaacgggggccagcaacgacaaccactacttcggctacagcaccccctgggggtattttgactttaacagattccactgccacttttcaccacgtgactggcaaagactcatcaacaacaactggggattccggcccaagagactcaacttcaagctcttcaacatccaggtcaaggaggtcacgcagaatgaaggcaccaagaccatcgccaataaccttaccagcacgattcaggtctttacggactcggaataccagctcccgtacgtcctcggctctgcgcaccagggctgcctccctccgttcccggcggacgtgttcatgattccgcagtacggctacctaacactcaacaacggtagtcaggccgtgggacgctcctccttctactgcctggaatactttccttcgcagatgctgagaaccggcaacaacttccagtttacttacaccttcgaggacgtgcctttccacagcagctacgcccacagccagagcttggaccggctgatgaatcctctgattgaccagtacctgtactacttgtctcggactcaaacaacaggaggcacggcaaatacgcagactctgggcttcagccaaggtgggcctaatacaatggccaatcaggcaaagaactggctgccaggaccctgttaccgccaacaacgcgtctcaacgacaaccgggcaaaacaacaatagcaactttgcctggactgctgggaccaaataccatctgaatggaagaaattcactggctaatcctggcatcgctatggcaacacacaaagacgacaggagcgtttttttccagtaccgggatcctgattttggcaaacaaaatgctgccagagacaatgcggattacagcgatgtcatgctcaccagcgaggaagaaatcaaaaccactaaccctgtggctacagaggaatacggtatcgtggcagataacttgcagcagcaaaacacggctcctcaaattggaactgtcaacagccagggggccttacccggtatggtctggcagaaccgggacgtgtacctgcagggtcccatctgggccaagattcctcacacggacggcaacttccacccgtctccgctgatgggcggctttggcctgaaacatcctccgcctcagatcctgatcaagaacacgcctgtacctgcggatcctccgaccaccttcaaccagtcaaagctgaactctttcatcacgcaatacagcaccggacaggtcagcgtggaaattgaatgggagctgcagaaggaaaacagcaagcgctggaaccccgagatccagtacacctccaactactacaaatctacaagtgtggactttgctgttaatacagaaggcgtgtactctgaaccccaccccattggcacccgttacctcacccgtcccctgtaa

SEQ ID NO: 1015 - DNA, 2211 bp, Artificial Sequence
  Description of Artificial Sequence: Synthetic polynucleotide
atggctgccgatggttatcttccagattggctcgaggacaacctctctgagggcattcgcgagtggtgggcgctgaaacctggagccccgaagcccaaagccaaccagcaaaagcaggacgacggccggggtctggtgcttcctggctacaagtacctcggacccttcaacggactcgacaagggggagcccgtcaacgcggcggatgcagcagccctcgaacacgacaaagcttacgaccagcagctcaaggccggtgacaacccctacctcaagtataaccacgccgacgccgagtttcaggagcgtcttcaaggagatacgtcttttgggggcaacctcggacgagcagtcttccaggccaagaagcgggttctcgaacctcttggtctggttgaggaagcggctaagacggctcctggaaagaagaggcctgtagagcagtctcctcaggaaccggactcctccgcgggtattggcaaatcgggtgcacagcccgctaaaaagagactcaatttcggtcagactggcgacacagagtcagtcccagaccctcaacctctcggagaacctccagcagcgccctctggtgtgggacctaatacaatggctgcaggcggtggcgcaccaatggcagacaataacgaaggtgccgatggagtgggtagttcctcgggaaattggcattgcgattcccaatggctgggggacagagtcatcaccaccagcacccgaacctgggccctgcccacctacaacaaccacctctacaagcaaatctccagtgcttcaacgggggccagcaacgacaaccactacttcggctacagcaccccttgggggtattttgacttcaacagattccactgccacttttcaccacgtgactggcagcgactcatcaacaacaactggggattccggcctaagcgactcaacttcaagctcttcaacattcaggtcaaagaggttacggacaacaatggagtcaagaccatcgccaataaccttaccagcacggtccaggtcttcacggactcagactatcagctcccgtacgtgctcgggtcggctcacgagggctgcctccctccgttcccggcggacgtgttcatgattccgcagtacggctacctaacgctcaacaatggcagccaggcagtgggacggtcatccttttactgcctggaatactttccttcgcagatgctgagaaccggcaacaacttccagtttacttacaccttcgaggacgtgcctttccacagcagctacgctcacagccagagtctggaccgtctcatgaatcctctgattgaccagtacctgtactacttgtctcggactcaaacaacaggaggcacggcaaatacgcagactctgggcttcagccaaggtgggcctaatacaatggccaatcaggcaaagaactggctgccaggaccctgttaccgccaacaacgcgtctcaacgacaaccgggcaaaacaacaatagcaactttgcctggactgctgggaccaaataccatctgaatggaagaaattcattggctaatcctggcatcgctatggcaacacacaaagacgacaaggagcgtttttttcccagtaacgggatcctgatttttggcaaacaaaatgctgccagagacaatgcggattacagcgatgtcatgctcaccagcgaggaagaaatcaaaaccactaaccctgtggctacagaggaatacggtatcgtagcagataacttgcagcagcaaaacacggctcctcaaattggaactgtcaacagccagggggccttacccggtatggtctggcagaaccgggacgtgtacctgcagggtcccatctgggccaagattcctcacacggacggcaacttccacccgtctccgctgatgggcggctttggcctgaaacatcctccgcctcagatcctgatcaagaacacgcctgtacctgcggatcctccgaccaccttcaaccagtcaaagctgaactctttcatcacgcaatacagcaccggacaggtcagcgtggaaattgaatgggagctgcagaaggaaaacagcaagcgctggaaccccgagatccagtacacctccaactactacaaatctacaagtgtggactttgctgttaatacagaaggcgtgtactctgaaccccaccccattggcacccgttacctcacccgtcccctgtaa

SEQ ID NO: 1016 - DNA, 2211 bp, Artificial Sequence
  Description of Artificial Sequence: Synthetic polynucleotide
atggctgccgatggttatcttccagattggctcgaggacactctctctgaaggaataagacagtggtggaagctcaaacctggcccaccaccaccaaagcccgcagagcggcataaggacgacagcaggggtcttgtgcttcctgggtacaagtacctcggacccttcaacggactcgacaagggagagccggtcaacgaggcagacgccgcggccctcgagcacgacaaagcctacgaccggcagctcgacagcggagacaacccgtacctcaagtacaaccacgccgacgcggagtttcaggagcgccttaaagaagatacgtcttttgggggcaacctcgggcgagcagtcttccaggccaagaagagggttctcgaaccttttggtctggttgaggaagcggctaagacggctcctggaaagaaacgtccggtagagcagtcgccacaagagccagactcctcctcgggcattggcaagacaggccagcagcccgctaaaaagagactcaattttggtcagactggcgactcagagtcagtccccgacccacaacctctcggagaacctccagcaacccccgctgctgtgggacctactacaatggcttcaggcggtggcgcaccaatggcagacaataacgaaggcgccgacggagtgggtaatgcctcaggaaattggcattgcgattccacatggctgggcgacagagtcatcaccaccagcacccgaacatgggccttgcccacctataacaaccacctctacaagcaaatctccagtgcttcaacgggggccagcaacgacaaccactacttcggctacagcaccccctgggggtattttgacttcaacagattccactgccacttctcaccacgtgactggcagcgactcatcaacaacaactggggattccggcctaagcgactcaacttcaagctcttcaacattcaggtcaaagaggttacggacaacaatggagtcaagaccatcgccaataaccttaccagcacggtccaggtcttcacggactcagactatcagctcccgtacgtgctcgggtcggctcacgagggctgcctcccgccgttcccagcggacgttttcatgattcctcagtacggctacctaacactcaacaacggtagtcaggccgtgggacgctcctccttctactgcctggaatactttccttcgcagatgctgagaacgggcaacaactttaccttcagctacacctttgaggacgttcctttccacagcagctacgctcacagccagagtctggaccgtctcatgaatcctctgattgaccagtacctgtactacttgtctcggactcaaacaacaggaggcacggcaaatacgcagactctgggcttcagccaaggtgggcctaatacaatggccaatcaggcaaagaactggctgccaggaccctgttaccgccaacaacgcgtctcaacgacaaccgggcaaaacaacaatagcaactttgcctggactgctgggacaaaataccatctgaatggaagaaattcattggctaatcctggcatcgctatggcaacacacaaagacgacaaggagcgtttttttcccagtaacgggattctgatttttggcaaacaaaatgctgccagagacaatgcggattacagcgatgtcatgctcaccagcgaggaagaaatcaaaaccactaaccctgtggctacagaggaatacggtatcgtggcagataacttgcagcagcaaaacacggctcctcaaattggaactgtcaacagccagggggccttacccggtatggtctggcagaaccgggacgtgtacctgcagggtcccatctgggccaagattcctcacacggacggcaacttccacccgtctccgctgatgggcggctttggacttaagcacccgcctcctcagatcctcatcaaaaacacgcctgttcctgcggatcctccgaccaccttcaaccagtcaaagctgaactctttcatcacgcaatacagcaccggacaggtcagcgtggaaattgaatgggagctgcagaaggaaaacagcaagcgctggaaccccgagatccagtacacctccaactactacaaatctacaagtgtggactttgctgttaatacagaaggcgtgtactctgaaccccaccccattggcacccgttacctcacccgtcccctgtaa

SEQ ID NO: 1017 - DNA, 2211 bp, Artificial Sequence
  Description of Artificial Sequence: Synthetic polynucleotide
atggctgccgatggttatcttccagattggctcgaggacaacctctctgagggcattcgcgagtggtgggcgctgaaacctggagccccgaagcccaaagccaaccagcaaaagcaggacgacggccggggtctggtgcttcctggctacaagtacctcggacccttcaacggactcgacaaaggagagccggtcaacgcggcggacgcagcggccctcgagcacgacaaggcctacgaccagcagctcaaagcgggtgacaatccgtacctgcggtataaccacgccgacgccgagtttcaggagcgtctgcaagaagatacgtcttttgggggcaacctcgggcgagcagtcttccaggccaagaagcgggttctcgaacctctcggtctggttgaggaaggcgctaagacggctcctggaaagaaacgtccggtagagcagtcgccacaagagccagactcctcctcgggcatcggcaagacaggccagcagcccgctaaaaagagactcaattttggtcagactggcgactcagagtcagtccccgacccacaacctctcggagaacctccagcaacccccgctgctgtgggacctactacaatggcttcaggcggtggcgcaccaatggcagacaataacgaaggcgccgacggagtgggtagttcctcgggaaattggcattgcgattccacatggctgggcgacagagtcatcaccaccagcacccgcacctgggccttgcccacctacaataaccacctctacaagcaaatctccagtgcttcaacgggggccagcaacgacaaccactacttcggctacagcaccccctgggggtattttgacttcaacagattccactgccacttctcaccacgtgactggcagcgactcatcaacaacaactggggattccggcctaagcgactcaacttcaagctcttcaacattcaggtcaaagaggttacggacaacaatggagtcaagaccatcgccaataaccttaccagcacggtccaggtcttcacggactcggagtaccagttgccgtacgtcctcggctctgcgcaccagggctgcctccctccgttcccggcggacgtgttcatgattccgcagtacggctacctaacgctcaacaatggcagccaggcagtgggacggtcatccttttactgcctggaatatttcccatcgcagatgctgagaacgggcaacaactttaccttcagctacacctttgaggacgttcctttccacagcagctacgctcacagccagagtctggaccgtctcatgaatcctctgattgaccagtacctgtactacttgtctcggactcaaacaacaggaggcacggcaaatacgcagactctgggcttcagccaaggtgggcctaatacaatggccaatcaggcaaagaactggctgccaggaccctgttaccgccaacaacgcgtctcaacgacaaccgggcaaaacaacaatagcaactttgcctggactgctgggaccaaataccatctgaatggaagaaattcattggctaatcctggcatcgctatggcaacacacaaagacgacaaggagcgtttttttcccagtaacgggatcctgatttttggcaaacaaaatgctgccagagacaatgcggattacagcgatgtcatgctcaccagcgaggaagaaatcaaaaccactaaccctgtggctacagaggaatacggtatcgtggcagataacttgcagcagcaaaacacggctcctcaaattggaactgtcaacagccagggggccttacccggtatggtctggcagaaccgggatgtgtacctgcagggtcccatctgggccaagattcctcacacggacggcaacttccacccgtctccgctgatgggcggctttggcctgaaacatcctccgcctcagatcctgatcaagaacacgcctgtacctgcggatcctccgaccaccttcaaccagtcaaagctgaactctttcatcacgcaatacagcaccggacaggtcagcgtggaaattgaatgggagctgcagaaggaaaacagcaagcgctggaaccccgagatccagtacacctccaactactacaaatctacaagtgtggactttgctgttaatacagaaggcgtgtactctgaaccccaccccattggcacccgttacctcacccgtcccctgtaa

SEQ ID NO: 1018 - DNA, 2214 bp, Artificial Sequence
  Description of Artificial Sequence: Synthetic polynucleotide
atggctgccgatggttatcttccagattggctcgaggacaaccttagtgaaggaattcgcgagtggtgggcgctgaaacctggagccccgaagcccaaagccaaccagcaaaagcaggacgacggccggggtctggtgcttcctggctacaagtacctcggacccttcaacggactcgacaagggggagcccgtcaacgcggcggacgcagcggccctcgagcacgacaaggcctacgaccagcagctcaaagcgggtgacaatccgtacctgcggtataaccacgccgacgccgagtttcaggagcgtctgcaagaagatacgtcttttgggggcaacctcgggcgagcagtcttccaggccaagaagcgggttctcgaacctctcggtctggttgaggaaggcgctaagacggctcctggaaagaaacgtccggtagagcagtcgccacaagagccagactcctcctcgggcatcggcaagacaggccagcagcccgctaaaaagagactcaatttcggtcagactggcgacacagagtcagtcccagaccctcaaccaatcggagaacctcccgcagccccctcaggtgtgggatctcttacaatggcttcaggtggtggcgcaccagtggcagacaataacgaaggtgccgatggagtgggtagttcctcgggaaattggcattgcgattcccaatggctgggggacagagtcatcaccaccagcaccagaacctgggccttgcccacctacaataaccacctctacaagcaaatctccaacagcacatctggaggatcttcaaatgacaacgcctacttcggctacagcaccccctgggggtattttgactttaacagattccactgccacttttcaccacgtgactggcagcgactcatcaacaacaactggggattccgacccaagagactcaacttcaagctcttcaacatccaggtcaaggaggtcacgcagaacgaaggcaccaagaccatcgccaataacctcaccagcaccatccaggtgtttacggactcggagtaccagctgccgtacgttctcggctccgcccaccagggctgcctgcctccgttcccggcggacgtgttcatgattccccagtacggctacctaacgctcaacaacggtagtcaggccgtgggacgctcctccttctactgcctggaatactttccttcgcagatgctgagaaccggcaacaacttccagtttacttacaccttcgaggacgtgcctttccacagcagctacgcgcacagccagagcttggaccggctgatgaatcctctgattgaccagtacctgtactacttgtctcggactcaaacaacaggaggcacggcaaatacgcagactctgggcttcagccaaggtgggcctaatacaatggccaatcaggcaaagaactggctgccaggaccctgttaccgccaacaacgcgtctcaacgacaaccgggcaaaacaacaatagcaactttgcctggactgctgggaccaaataccatctgaatggaagaaattcattggctaatcctggcatcgctatggcaacacacaaagacgacaaggagcgtttttttcccagtaacgggatcctgatttttggcaaacaaaatgctgccagagacaatgcggattacagcgatgtcatgctcaccagcgaggaagaaatcaaaaccactaaccctgtggctacagaggaatacggtatcgtggcagataacttgcagcagcaaaacacggctcctcaaattggaactgtcaacagccagggggccttacccggtatggtctggcagaaccgggacgtgtacctgcagggtcccatctgggccaagattcctcacacggacggcaacttccacccgtctccgctgatgggcggctttggcctgaaacatcctccgcctcagatcctgatcaagaacacgcctgtacctgcggatcctccgaccaccttcaaccagtcaaagctgaactctttcatcacgcaatacagcaccggacaggtcagcgtggaaattgaatgggagctgcagaaggaaaacagcaagcgctggaaccccgagatccagtacacctccaactactacaaatctacaagtgtggactttgctgttaatacagaaggcgtgtactctgaaccccaccccattggcactcgttacctcacccgtcccctgtaa

SEQ ID NO: 1019 - DNA, 2211 bp, Artificial Sequence
  Description of Artificial Sequence: Synthetic polynucleotide
atggctgccgatggttatcttccagattggctcgaggacaacctctctgagggcattcgcgagtggtgggcgctgaaacctggagccccgaagcccaaagccaaccagcaaaagcaggacgacggccggggtctggtgcttcctggctacaagtacctcggacccttcaacggactcgacaagggggagcccgtcaacgcggcggatgcagcagccctcgaacacgacaaagcttacgaccagcagctcaaggccggtgacaacccctacctcaagtataaccacgccgacgccgagtttcaggagcgtcttcaaggagatacgtcttttgggggcaacctcggacgagcagtcttccaggccaagaagcgggttctcgaacctcttggtctggttgaggaagcggctaagacggctcctggaaagaagaggcctgtagagcagtctcctcaggaaccggactcctccgcgggtattggcaaatcgggtgcacagcccgctaaaaagagactcaatttcggtcagactggcgacacagagtcagtcccagaccctcaacctctcggagaacctccagcagcgccctctggtgtgggacctaatacaatggctgcaggcggtggcgcaccaatggcagacaataacgaaggtgccgatggagtgggtagttcctcgggaaattggcattgcgattcccaatggctgggggacagagtcatcaccaccagcacccgaacctgggccctgcccacctacaacaaccacctctacaagcaaatctccagtgcttcaacgggggccagcaacgacaaccactacttcggctacagcaccccttgggggtattttgacttcaacagattccactgccacttctcaccacgtgactggcagcgactcatcaacaacaactggggattccggcctaagcgactcaacttcaagctcttcaacattcaggtcaaagaggttacggacaacaatggagtcaagaccatcgccaataaccttaccagcacggtccaggtcttcacggactcggagtaccagttgccgtacgtcctcggctctgcgcaccagggctgcctccctccgttcccggcggacgtgttcatgattccgcagtacggctacctaacgctcaacaatggcagccaggcagtgggacggtcatccttttactgcctggaatatttcccatcgcagatgctgagaacgggcaacaactttaccttcagctacacctttgaggacgttcctttccacagcagctacgctcacagccagagtctggaccgtctcatgaatcctctgattgaccagtacctgtactacttgtctcggactcaaacaacaggaggcacggcaaatacgcagactctgggcttcagccaaggtgggcctaatacaatggccaatcaggcaaagaactggctgccaggaccctgttaccgccaacaacgcgtctcaacgacaaccgggcaaaacaacaatagcaactttgcctggactgctgggaccaaataccatctgaatggaagaaattcattggctaatcctggcatcgctatggcaacacacaaagacgacaaggagcgtttttttcccagtaacgggatcctgatttttgacaaacaaaatgctgccagagacaatgcggattacagcgatgtcatgctcaccagcgaggaagaaatcaaaaccactaaccctgtggctacagaggaatacggtatcgtggcagataacttgcagcagcaaaacacggctcctcaaattggaactgtcaacagccagggggccttacccggtatggtctggcagaaccgggatgtgtacctgcagggtcccatctgggccaagattcctcacacggacggcaacttccacccgtctccgctgatgggcggctttggcctgaaacatcctccgcctcagatcctgatcaagaacacgcctgtacctgcggatcctccgaccaccttcaaccagtcaaagctgaactctttcatcacgcaatacagcaccggacaggtcagcgtggaaattgaatgggagctgcagaaggaaaacagcaagcgctggaaccccgagatccagtacacctccaactactacaaatctacaagtgtggactttgctgttaatacagaaggcgtgtactctgaaccccaccccattggcacccgttacctcacccgtcccctgtaa

SEQ ID NO: 1020 - DNA, 2211 bp, Artificial Sequence
  Description of Artificial Sequence: Synthetic polynucleotide
atggctgccgatggttatcttccagattggctcgaggacactctctctgaaggaataagacagtggtggaagctcaaacctggcccaccaccaccaaagcccgcagagcggcataaggacgacagcaggggtcttgtgcttcctgggtacaagtacctcggacccttcaacggactcgacaagggagagccggtcaacgaggcagacgccgcggccctcgagcacgacaaagcctacgaccggcagctcgacagcggagacaacccgtacctcaagtacaaccacgccgacgcggagtttcaggagcgccttaaagaagatacgtcttttgggggcaacctcggacgagcagtcttccaggcgaaaaagagggttcttgaacctctgggcctggttgaggaacctgttaagacggctccgggaaaaaagaggccggtagagcactctcctgtggagccagactcctcctcgggaaccggaaaggcgggccagcagcctgcaagaaaaagattgaattttggtcagactggcgactcagagtcagtccccgacccacaacctctcggagaacctccagcaacccccgctgctgtgggacctaatacgatggctacaggcagtggcgcaccaatggcagacaataacgagggcgccgacggagtgggtaattcctcgggaaattggcattgcgattccacatggatgggcgacagagtcatcaccaccagcaccagaacctgggccctgcccacttacaacaaccatctctacaagcaaatctccagtgcttcaacgggggccagcaacgacaaccactacttcggctacagcaccccctgggggtattttgacttcaacagattccactgccacttctcaccacgtgactggcagcgactcatcaacaacaactggggattccggcctaagcgactcaacttcaagctcttcaacattcaggtcaaagaggttacggacaacaatggagtcaagaccatcgccaataaccttaccagcaccatccaggtctttacggactcggaataccagctgccgtacgttctcggctctgcccaccagggctgcctgcctccgttcccggcggacgtgttcatgattccccagtacggctacctaacactcaacaacggtagtcaggccgtgggacgctcctccttctactgcctggaatatttcccatcgcagatgctgagaacgggcaacaactttaccttcagctacacctttgaggacgttcctttccacagcagctacgctcacagccagagtctggaccgtctcatgaatcctctgattgaccagtacctgtactacttgtctcggactcaaacaacaggaggcaaggcaaatacgcagactctgggcttcagccaaggtgggcctaatacaatggccaatcaggcaaagaactggctgccaggaccctgttaccgccaacaacgcgtctcaacgacaaccgggcaaaacaacaatagcaactttgcctggactgctgggaccaaataccatctgaatggaagaaattcattggctaatcctggcatcgctatggcaacacacaaagacgacaaggagcgtttttttcccagtaacgggatcctgatttttggcaaacaaaatgctgccagagacaatgcggattacagcgatgtcatgctcaccagcgaggaagaaatcaaaaccactaaccctgtggctacagaggaatacggtatcgtggcagataacttgcagcagcaaaacacggctcctcaaattggaactgtcaacagccagggggccttacccggtatggtctggcagaaccgggacgtgtacctgcagggtcccatctgggccaagattcctcacacggacggcaacttccacccgtctccgctgatgggcggctttggcctgaaacatcctccgcctcagatcctgatcaagaacacgcctgtacctgcggatcctccgaccaccttcaaccagtcaaagctgaactctttcatcacgcaatacagcaccggacaggtcagcgtggaaattgaatgggagctgcagaaggaaaacagcaagcgctggaaccccgagatccagtacacctccaactactacaaatctacaagtgtggactttgctgttaatacagaaggcgtgtactctgaaccccaccccattggcacccgttacctcacccgtcccctgtaa

SEQ ID NO: 1021 - DNA, 2211 bp, Artificial Sequence
  Description of Artificial Sequence: Synthetic polynucleotide
atggctgccgatggttatcttccagattggctcgaggacaacctctctgagggcattcgcgagtggtgggcgctgaaacctggagccccgaagcccaaagccaaccagcaaaagcaggacgacggccggggtctggtgcttcctggctacaagtacctcggacccttcaacggactcgacaagggggagcccgtcaacgcggcggacgcagcggccctcgagcacgacaaggcctacgaccagcagctcaaagcgggtgacaatccgtacctgcggtataaccacgccgacgccgagtttcaggagcgtctgcaagaagatacgtcttttgggggcaacctcgggcgagcagtcttccaggccaagaagcgggttctcgaaccttttggtctggttgaggaaggtgctaagacggctcctggaaagaaacgtccggtagagcagtcgccacaagagccagactcctcctcgggcatcggcaagacaggccagcagcccgctaaaaagagactcaattttggtcagactggcgactcagagtcagtccccgacccacaacctctcggagaacctccagcaacccccgctgctgtgggacctactacaatggcttcaggcggtggcgcaccaatggcggacaataacgaaggcgccgacggagtgggtaatgcctcaggaaattggcattgcgattccacatggctgggcgacagagtcatcaccaccagcacccgcacctgggccttgcccacctacaataaccacctctacaagcaaatctccagtgcttcaacgggggccagcaacgacaaccactacttcggctacagcaccccctgggggtattttgacttcaacagattccactgccacttttcaccacgtgactggcaaagactcatcaacaacaactggggattccggcctaagcgactcaacttcaagctcttcaacattcaggtcaaagaggttacggacaacaatggagtcaagaccatcgccaataaccttaccagcacggtccaggtcttcacggactcggagtaccagttgccgtacgtcctcggctctgcgcaccagggctgcctccctccgttcccggcggacgtgttcatgattccgcagtacggctacctaacgctcaacaatggcagccaggcagtgggacggtcatccttttactgcctggaatatttcccatcgcagatgctgagaacgggcaacaactttaccttcagctacacctttgaggacgttcctttccacagcagctacgctcacagccagagtctggaccgtctcatgaatcctctgattgaccagtacctgtactacttgtctcggactcaaacaacaggaggcacgggaaatacgcagactctgggcttcagccaaggtgggcctaatacaatggccaatcaggcaaagaactggctgccaggaccctgttaccgccaacaacgcgtctcaacgacaaccgggcaaaacaacaatagcaactttgcctggactgctgggaccaaataccatctgaatggaagaaattcattggctaatcctggcatcgctatggcaacacacaaagacgacaaggagcgtttttttcccagtaacgggatcctgatttttggcaaacaaaatgctgccagagacaatgcggattacagcgatgtcatgctcaccagcgaggaagaaatcaaaaccactaaccctgtggctacagaggaatacggtatcgtggcagataacttgcagcagcaaaacacggctcctcaaattggaactgtcaacagccagggggccttacccggtatggtctggcagaaccgggacgtgtacctgcagggtcccatctgggccaagattcctcacacggacggcaacttccacccgtctccgctgatgggcggctttggcctgaaacatcctccgcctcagatcctgatcaagaacacgcctgtacctgcggatcctccgaccaccttcaaccagtcaaagctgaactctttcatcacgcaatacagcaccggacaggtcagcgtggaaattgaatgggagctgcagaaggaaaacagcaagcgctggaaccccgagatccagtacacctccaactactacaaatctacaagtgtggactttgctgttaatacagaaggcgtgtactctgaaccccaccccattggcacccgttacctcacccgtcccctgtaa

SEQ ID NO: 1022 - DNA, 2211 bp, Artificial Sequence
  Description of Artificial Sequence: Synthetic polynucleotide
atggctgccgatggttatcttccagattggctcgaggacaacctctctgagggcattcgcgagtggtgggacttgaaacctggagccccgaaacccaaagccaaccagcaaaagcaggacgacggccggggtctggtgcttcctggctacaagtacctcggacccttcaacggactcgacaagggggagcccgtcaacgcggcggacgcagcggccctcgagcacgacaaggcctacgaccagcagctcaaagcgggtgacaatccgtacctgcggtataaccacgccgacgccgagtttcaggagcgtctgcaagaagatacgtcttttgggggcaacctcgggcgagcagtcttccaggccaagaagcgggttctcgaacctctcggtctggttgaggaaggcgctaagacggctcctggaaagaagaggcctgtagagcagtcgccacaagagccagactcctcctcgggcatcggcaagacaggccagcagcccgctaaaaagagactcaattttggtcagactggcgactcagagtcagtccccgatccacaacctctcggagaacctccagcaacccccgctgctgtgggacctactacaatggcttcaggcggtggcgcaccaatggcagacaataacgaaggcgccgacggagtgggtagttcctcgggaaattggcattgcgattccacatggctgggcgacagagtcatcaccaccagcacccgaacatgggccttgcccacctataacaaccacctctacaagcaaatctccagtgcttcaacgggggccagcaacgacaaccactacttcggctacagcaccccctgggggtattttgacttcaacagattccactgccacttctcaccacgtgactggcagcgactcatcaacaacaactggggattccggcctaagcgactcaacttcaagctcttcaacatccaggtcaaggaggtcacgcagaatgaaggcaccaagaccatcgccaataacctcaccagcaccatccaggtgtttacggactcggagtaccagcttccgtacgtcctcggctctgcgcaccagggctgcctccctccgttcccggcggacgtgttcatgattccgcagtacggctacctaacgctcaacaatggcagccaggcagtgggacggtcatccttttactgcctggaatatttcccatcgcagatgctgagaacgggcaacaactttaccttcagctacacctttgaggacgttcctttccacagcagctacgcgcacagccagagcttggaccggctgatgaatcctctgattgaccagtacctgtactacttgtctcggactcaaacaacaggaggcacggcaaatacgcagactctgggcttcagccaaggtgggcctaatacaatggccaatcaggcaaagaactggctgccaggaccctgttaccgccaacaacgcgtctcaacgacaaccgggcaaaacaacaatagcaactttgcctggactgctgggaccaaataccatctgaatggaagaaattcattggctaatcctggcatcgctatggcaacacacaaagacgacaaggagcgtttttttcccagtaacgggatcctgatttttggcaaacaaaatgctgccagagacaatgcggattacagcgatgtcatgctcaccagcgaggaagaaatcaaaaccactaaccctgtggctacagaggaatacggtatcgtggcagataacttgcagcagcaaaacacggctcctcaaattggaactgtcaacagccagggggccttacccggtatggtctggcagaaccgggacgtgtacctgcagggtcccatctgggccaagattcctcacacggacggcaacttccacccgtctccgctgatgggcggctttggcctgaaacatcctccgcctcagatcctgatcaagaacacgcctgtacctgcggatcctccgaccaccttcaaccagtcaaagctgaactctttcatcacgcaatacagcaccggacaggtcagcgtggaaattgaatgggagctgcagaaggaaaacagcaagcgctggaaccccgagatccagtacacctccaactactacaaatctacaagtgtggactttgctgttaatacagaaggcgtgtactctgaaccccaccccattggcacccgttacctcacccgtcccctgtaa

SEQ ID NO: 1023 - DNA, 2211 bp, Artificial Sequence
  Description of Artificial Sequence: Synthetic polynucleotide
atggctgccgatggttatcttccagattggctcgaggacaacctctctgagggcattcgcgagtggtgggcgctgaaacctggagccccgaagcccaaagccaaccagcaaaagcaggacgacggccggggtctggtgcttcctggctacaagtacctcggacccttcaacggactcgacaagggggagcccgtcaacgcggcggatgcagcggccctcgagcacgacaaggcctacgaccagcagctcaaagcgggtgacaatccgtacctgcggtataaccacgccgacgccgagtttcaggagcgtctgcaagaagatacgtcttttgggggcaacctcgggcgagcagtcttccaggccaagaagcgggttctcgaacctctcggtctggttgaggaaggcgctaagacggctcctggaaagaaacgtccggtagagcagtcgccacaagagccagactcctcctcgggcatcggcaagacaggccagcagcccgctaaaaagagactcaattttggtcagactggcgactcagagtcagtccccgacccacaacctctcggagaacctccagcaacccccgctgctgtgggacctactacaatggctgcaggcggtggcgcaccaatggcagacaataacgaaggcgccgacggagtgggtagttcctcgggaaattggcattgcgattccacatggatgggcgacagagtcatcaccaccagcacccgaacctgggccttgcccacctataacaaccatctctacaagcaaatctccagtgcttcaacgggggccagcaacgacaaccactacttcggctacagcaccccctgggggtattttgacttcaacagattccactgccacttctcaccacgtgactggcagcgactcatcaacaacaactggggattccggcccaagagactcagcttcaagctcttcaacatccaggtcaaggaggtcacgcagaatgaaggcaccaagaccatcgccaataacctcaccagcaccatccaggtgtttacggactcggagtaccagctgccgtacgtcctcggctctgcgcaccagggctgcctccctccgttcccggcggacgtgttcatgattccgcagtacggctacctaacgctcaacaatggcagccaggcagtgggacggtcatccttttactgcctggaatatttcccatcgcagatgctgagaacgggcaacaactttaccttcagctacacctttgaggacgttcctttccacagcagctacgctcacagccagagcttggaccggctgatgaatcctctgattgaccagtacctgtactacttgtctcggactcaaacaacaggaggcacggcaaatacgcagactctgggtttcagccaaggtgggcctaatacaatggccaatcaggcaaagaactggctgcaaggaccctgttaccgccaacaacgcgtctcaacgacaaccgggcaaaacaacaatagcaactttgcctggactgctgggaccaaataccatctgaatggaagaaattcattggctaatcctggcatcgctatggcaacacacaaagacgacaaggagcgtttttttcccagtaacgggatcctgatttttggcaaacaaaatgctgccagagacaatgcggattacagcgatgtcatgctcaccagcgaggaagaaatcaaaaccactaaccctgtggctacagaggaatacggtatcgtggcagataacttgcagcagcaaaacacggctcctcaaattggaactgtcaacagccagggggccttacccggtatggtctggcagaacctggacgtgtacctgcagggtcccatctgggccaagattcctcacacggacggcaacttccacccgtctccgctgatgggcggctttggcctgaaacatcctccgcctcagatcctgatcaagaacacgcctgtacctgcggatcctccgaccaccttcaaccagtcaaagctgaactctttcatcacgcaatacagcaccggacaggtcagcgtggaaattgaatgggagctgcagaaggaaaacagcaagcgctggaaccccgagatccagtacacctccaactactacaaatctacaagtgtggactttgctgttaatacagaaggcgtgtactctgaaccccaccccattggcacccgttacctcacccgtcccctgtaa

SEQ ID NO: 1024 - DNA, 2214 bp, Artificial Sequence
  Description of Artificial Sequence: Synthetic polynucleotide
atggctgccgatggttatcttccagattggctcgaggacaacctctctgagggcattcgcgagtggtgggcgctgaaacctggagccccgaagcccaaagccaaccagcaaaagcaggacgacggccggggtctggtgcttcctggctacaagtacctcggacccttcaacggactcgacaagggagagcccgtcaacgcggcggacgcagcggccctcgagcacgacaaggcctacgaccagcagctcaaagcgggtgacaatccgtacctgcggtataaccacgccgacgccgagtttcaggagcgtctgcaagaagatacgtcttttgggggcaacctcgggcgagcagtcttccaggccaagaagcgggttctcgaacctctcggtctggttgaggaaggcgctaagacggctcctggaaagaagagaccggtagagccatcaccccagcgttctccagactcctcctcgggcatcggcaagacaggccagcagcccgctaaaaagagactcaattttggtcagactggcgactcagagtcagtccccgacccacaacctctcggagaacctccagcaacccccgctgctgtgggacctactacaatggcttcaggtggtggcgcaccaatggcagacaataacgaaggcgccgacggagtgggtaatgcctcaggaaattggcattgcgattcccaatggctgggcgacagagtcatcaccaccagcacccgaacatgggccttgcccacctataacaaccacctctacaagcaaatctccagtgcttcaacgggggccagcaacgacaaccactacttcggctacagcaccccctgggggtattttgacttcaacagattccactgccacttttcaccacgtgactggcagcgactcatcaacaacaactggggattccggcctaagcgactcaacttcaagctcttcaacattcaggtcaaagaggttacggacaacaatggagtcaagaccatcgccaataaccttaccagcacggtccaggtcttcacggactcagactatcagctcccgtacgtgctcgggtcggctcacgagggctgcctcccgccgttcccagcggacgttttcatgattccccagtacggctacctaacactcaacaacggtagtcaggccgtgggacgctcctccttctactgcctggaatactttccttcgcagatgctgagaaccggcaacaacttccagtttacttacaccttcgaggacgtgcctttccacagcagctacgctcacagccagagcttggaccggctgatgaatcctctgattgaccagtacctgtactacttgtctcggactcaaacaacaggaggcacggcaaatacgcagactttgggcttcagccaaggtgggcctaatacaatggccaatcaggcaaagaactgggtgccaggaccctgttaccgccaacaacgggtttcaacggcaaccgggcaaaacaacaatagcaactttgcctggactgctgggaccaaataccatctgaaaggaagaaattcattggctaatcctggcatcgctatggcaacacacaaagacgacaaggagcgtttttttcccagtaacgggatcctgatttttggcaaacaaaatgctgccagagacaatgcggattacagcgatgtcatgctcaccagcgaggaagaaatcaaaaccactaaccctgtggctacagaggaatacggtatcgtggcagataacttgcagcagcaaaacacggctcctcaaattggaactgtcaacagccagggggccttacccggtatggtctggcagaaccgggacgtgtacctgcagggtcccatctgggccaagattcctcacacggacggcaacttccacccgtctccgctgatgggcggctttggcctgaaacatcctccgcctcagatcctgatcaagaacacgcctgtacctgcggatcctccgaccaccttcaaccagtcaaagctgaactctttcatcacgcaatacagcaccggacaggtcagcgtggaaattgaatgggagctgcagaaggaaaacagcaaacgctggaacccagagattcaatacacttccaactactacaaatctacaagtgtggactttgctgttaatacagaaggcgtgtactctgaaccccaccccattggcacccgttacctcacccgtcccctgtaa

SEQ ID NO: 1025 - DNA, 2214 bp, Artificial Sequence
  Description of Artificial Sequence: Synthetic polynucleotide
  modified_base (676)..(676): a, c, g, or t
  modified_base (697)..(697): a, c, g, or t
  modified_base (715)..(715): a, c, g, or t
  modified_base (748)..(748): a, c, g, or t
  modified_base (750)..(750): a, c, g, or t
  modified_base (757)..(757): a, c, g, or t
  modified_base (763)..(763): a, c, g, or t
atggctgccgatggttatcttccagattggctcgaggacactctctctgaaggaataagacagtggtggaagctcaaacctggcccaccaccaccaaagcccgcagagcggcataaggacgacagcaggggtcttgtgcttcctgggtacaagtacctcggacccttcaacggactcgacaagggagagccggtcaacgaggcagacgccgcggccctcgagcacgacaaagcctacgaccggcagctcgacagcggagacaacccgtacctcaagtacaaccacgccgacgcggagtttcaggagcgccttaaagaagatacgtcttttgggggcaacctcggacgagcagtcttccaggcgaaaaagagggttcttgaacctctcggtctggttgaggaaggcgctaagacggctcctggaaagaaacgtccggtagagcagtcgccacaagagccagactcctcctcgggcatcggcaagacaggccagcagcccgctaaaaagagactcaattttggtcagactggcgactcagagtcagtccccgacccacaacctctcggagaacctccagcaacgccctctggtgtgggacctaatacaatggctgcaggcggtggcgctccaatggcagacaataacgaaggcgccgacggagtgggtagttcctcangaaattggcattgcgattccncatggctgggcgacagantcatcaccaccagcacccgaacctgggccctgncnacctacnacaacnacctctacaagcaaatctccaacagcacatctggaggagccaccaacgacaacacctacttcggctacagcaccccctgggggtattttgactttaacagattccactgccacttttcaccacgtgactggcagcgactcatcaacaacaactggggattccggcctaagcgactcaacttcaagctcttcaacatccaggtcaaggaggtcacgcagaatgaaggcaccaagaccatcgccaataacctcaccagcaccatccaggtgtttacggactcggagtaccagctgccgtacgttctcggctctgcccaccagggctgcctgcctccgttcccggcggacgtgttcatgattccccagtacggctacctaacactcaacaacggtagtcaggccgtgggacgctcctccttctactgcctggaatactttccttcgcagatgctgagaaccggcaacaacttccagtttacttacaccttcgaggacgtgcctttccacagcagctacgcccacagccagagcttggaccggctgatgaatcctctgattgaccagtacctgtactacttgtctcggactcaaacaacaggaggcacggcaaatacgcagactctgggcttcagccaaggtgggcctaatacaatggccaatcaggcaaagaactggctgccaggaccctgttaccgccaacaacgcgtctcaacgacaaccgggcaaaacaacaatagcaactttgcctggactgctgggaccaaataccatctgaatggaagaaattcattggctaatcctggcatcgctatggcaacacacaaagacgacaaggagcgtttttttcccagtaacgggatcctgatttttggcaaacaaaatgctgccagagacaatgcggattacagcgatgtcatgctcaccagcgaggaagaaatcaaaaccactaaccctgtggctacagaggaatacggtatcgtggcagataacttgcagcagcaaaacacggctcctcaaattggaactgtcaacagccagggggccttacccggtatggtttggcagaaccgggacgtgtacctgcagggtcctatctgggccaagattcctcacacggacggaaactttcatccctcgccgctgatgggaggctttggactgaaacacccgcctcctcagatcctgattaagaatacacctgttcccgcggatcctccaactaccttcagtcaagctaagctggcgtcgttcatcacgcaatacagcacaggacaagtgagtgtggaaattgaatgggagctgcagaaagaaaacagcaagcgctggaatcccgaagtgcagtacacatccaattatgcaaaatctgccaacgttgattttactgtggacaacaatggactttatactgagcctcgccccattggcacccgttaccttacccgtcccctgtaa

SEQ ID NO: 1026 - DNA, 2214 bp, Artificial Sequence
  Description of Artificial Sequence: Synthetic polynucleotide
atggctgccgatggttatcttccagattggctcgaggacaacctctctgagggcattcgcgagtggtgggacttgaaacctggagccccgaagcccaaagccaaccagcaaaagcaggacgacggccggggtctggtgcttcctggctacaagtacctcggacccttcaacggactcgacaagggggagcccgtcaacgcggcggacgcagcggccctcgagcacgacaaggcctacgaccagcagctcaaagcgggtgacaatccgtacctgcggtataaccacgccgacgccgagtttcaggagcgtctgcaagaagatacgtcttttgggggcaacctcgggcgagcagtcttccaggccaagaagcgggttctcgaacctctcggtctggttgaggaaggcgctaagacggctcctggaaagaagagaccggtagagccatcaccccagcgttctccagactcctctacgggcatcggcaagaaaggccagcagcccgcgaaaaagagactcaactttgggcagactggcgactcagagtcagtgcccgaccctcaaccaatcggagaaccccccgcaggcccctctggtgtgggatctcttacaatggcttcaggtggtggcgcaccagtggcagacaataacgaaggtgccgatggagtgggtagttcctcgggaaattggcattgcgattcccaatggctgggggacagagtcatcaccaccagcacccgaacatgggccttgcccacctataacaaccacctctacaagcaaatctccagtgcttcaacgggggccagcaacgacaaccactacttcggctacagcaccccctgggggtattttgactttaacagattccactgccacttctcaccacgtgactggcagcgactcatcaacaacaactggggattccggcccaagagactcaacttcaagctcttcaacatccaggtcaaggaggtcacggacaatgatggagtcaagaccatcgccaataaccttaccagcacgattcaggtctttacggactcggaataccagttgccgtacgtcctcggctctgcgcaccagggctgcctgcctccgttcccggcggacgtgttcatgattccgcagtacggctacctaacgctcaacaatggcagccaggcagtgggacggtcatccttttactgcctggaatatttcccatcgcagatgctgagaacgggcaacaactttaccttcagctacacttttgaggacgttcctttccacagcagctacgctcacagccagagtctggaccgtctcatgaatcctctgattgaccagtacctgtactacttgtctcggactcaaacaacaggaggcacggcaaatacgcagactctgggcttcagccaaggtgggcctaatacaatggccaatcacgcaaagaactggctgccaggaccctgttaccgccaacaacgcgtctcaacgacaaccggacaaaacaacaatagcaactttgcctggactgctgggaccaaataccatctgaatggaagaaattcattggctaatcctggcatcgctatggcaacacacaaagacgacaaggagcgtttttttcccagtaacgggatcctgatttttggcaaacaaaatgctgccagagacaatgcggattacagcgatgtcatgctcaccagcgaggaagaaatcaaaaccactaaccctgtggctacagaggaatacggtatcgtggcagataacttgcagcagcaaaacacggctcctcaaattggaactgtcaacagccagggggccttacccggtatggtctggcagaaccgggacgtgtacctgcagggtcccatctgggccaagattcctcacacggacggcaacttccacccgtctccgctgatgggcggctttggcctgaaacatcctccgcctcagatcctgatcaagaacacgcctgtacctgcggatcctccgaccaccttcaaccagtcaaagctgaactctttcatcacgcaatacagcaccggacaggtcagcgtggaaattgaatgggagctgcagaaggaaaacagcaagcgctggaaccccgagatccagtacacctccaactactacaaatctacaagtgtggactttgctgttaatacagaaggcgtgtactctgaaccccaccccattggcacccgttacctcacccgtcccctgtaa

SEQ ID NO: 1027 - DNA, 2211 bp, Artificial Sequence
  Description of Artificial Sequence: Synthetic polynucleotide
atggctgccgatggttatcttccagattggctcgaggacactctctctgaaggaataagacagtggtggaagctcaaacctggcccaccaccaccaaagcccgcagagcggcacaaggacgacagcaggggtcttgtgcttcctgggtacaagtacctcggacccttcaacggactcgacaagggagagccggtcaacgaggcagacgccgcggccctcgagcacgacaaagcctacgaccggcagctcgacagcggagacaacccgtacctcaagtacaaccacgccgacgcggagtttcaggagcgccttaaagaagatacgtcttttgggggcaacctcggacgagcagtcttccaggcgaaaaagagggttcttgaacctctgggcctggttgaggaacctgttaagacggctccgggaaaaaagaggccggtagagcactctcctgtggagccagactcctcctcgggaaccggaaaggcgggccagcagcctgctaaaaagagactcaattttggtcagactggcgactcagagtcagtccccgacccacaacctctcggagaacctccagcaacccccgctgctgtgggacctactacaatggcttcaggtggtggcgcaccaatggcagacaataacgaaggcgccgacggagtgggtaatgcctcaggaaattggcattgcgattccacatggctgggcgacagagtcatcaccaccagcacccgcacctgggccttgcccacctacaataaccacctctacaagcaaatctccagtgcttcaacgggggccagcaacgacaaccactacttcggctacagcaccccctgggggtattttgacttcaacagattccactgccacttctcaccacgtgactggcagcgactcatcaacaacaactggggattccggcccaagagactcaacttcaaactcttcaacatccaagtcaaggaggtcacgcagaatgaaggcaccaagaccatcgccaataacctcaccagcaccatccaggtgtttacggactcggagtaccagctgccgtacgttctcggctctgcccaccagggctgcctgcctccgttcccggcggacgtgttcatgattccccagtacggctacctaacactcaacaacggtagtcaggccgtgggacgctcctccttctactgcctggaatactttccttcgcagatgctgagaaccggcaacaacttccagtttacttacaccttcgaggacgtgcctttccacagcagctacgcgcacagccagagcttggaccggctgatgaatcctctgattgaccagtacctgtactacttgtctcggactcaaacaacaggaggcacggcaaatacgcagactctgggcttcagccaaggtgggcctaatacaatggccaatcaggcaaagaactggctgccaggaccctgttaccgccaacaacgcgtctcaacgacaaccgggcaaaacaacaatagcaactttgcctggactgctgggaccaaataccatctgaatggaagaaattcattggctaatcctggcatcgctatggcaacacacaaagacgacaaggagcgtttttttcccagtaacgggatcctgatttttggcaaacaaaatgctgccagagacaatgcggattacagcgatgtcatgctcaccagcgaggaagaaatcaaaaccactaaccctgtggctacagaggaatacggtatcgtggcagataacttgcagcagcaaaacacggctcctcaaattggaactgtcaacagccagggggccttacccggtatggtctggcagaaccgggacgtgtacctgcagggtcccatctgggccaagattcctcacacggacggcaacttccacccgtctccgctgatgggcggctttggcctgaaacatcctccgcctcagatcctgatcaagaacacgcctgtacctgcggatcctccgaccaccttcaaccagtcaaagctgaactctttcatcacgcaatacagcaccggacaggtcagcgtggaaattgaatgggagctgcagaaggaaaacagcaagcgctggaaccccgagatccagtacacctccaactactacaaatctacaagtgtggactttgctgttaatacagaaggcgtgtactctgaaccccaccccattggcacccgttacctcacccgtcccctgtaa

SEQ ID NO: 1028 - DNA, 2211 bp, Artificial Sequence
  Description of Artificial Sequence: Synthetic polynucleotide
atggctgccgatggttatcttccagattggctcgaggacaacctctctgagggcattcgcgagtggtgggcgctgaaacctggagccccgaagcccaaagccaaccagcaaaagcaggacgacggccggggtctggtgcttcctggctacaagtacctcggacccttcaacggactcgacaagggggagcccgtcaacgcggcggatgcagcggccctcgagcacgacaaggcctacgaccagcagctccaagcgggtgacaatccgtacctgcggtataaccacgccgacgccgagtttcaggagcgtcttcaaggagatacgtcttttgggggcaacctcggacgagcagtcttccaggccaagaagcgggttctcgaacctctcggtctggttgaggaaggcgctaagacggctcctggaaagaaacgtccggtagagcagtcgccacaagagccagactcctcctcgggcatcggcaagacaggccagcagcccgctaaaaagagactcaattttggtcagactggcgactcagagtcagtccccgacccacaacctctcggagaacctccagcaacccccgctgctgtgggacctactacaatggcttcaggcggtggcgcaccaatggcggacaataacgaaggcgccgatggagtgggtaatgcctcaggaaattggcattgcgattccacatggctgggcgacagagtcatcaccaccagcacccgcacctgggccttgcccacctacaataaccacctctacaagcaaatctccagtgcttcaacgggggccagcaacgacaaccactacttcggctacagcaccccctgggggtattttgacttcaacagattccactgccacttctcaccacgtgactggcagcgactcatcaacaacaactggggattccggcctaagcgactcaacttcaagctcttcaacattcaggtcaaagaggttacggacaacaatggagtcaagaccatcgccaataacctcaccagcaccatccaggtgtttacggactcggagtaccagctgccgtacgttctcggctctgcccaccagggctgcctgcctccgttcccggcggacgtgttcatgattccccagtacggctacctaacactcaacaacggtagtcaggccgtgggacgctcctccttctactgcctggaatactttccttcgcagatgctgagaaccggcaacaacttccagtttacttacaccttcgaggacgtgcctttccacagcagctacgcccacagccagagcttggaccggctgatgaatcctctgattgaccagtacctgtactacttgtctcggactcaaacaacaggaggcacggcaaatacgcagactctgggcttcagccaaggtgggcctaatacaatggccaatcaggcaaagaactggctgccaggaccctgttaccgccaacaacgcgtctcaacgacaaccgggcaaaacaacaatagcaactttgcctggactgctgggaccaaataccatctgaatggaagaaattcattggctaatcctggcatcgctatggcaacacacaaagacgacaaggagcgtttttttcccagtaacgggatcctgatttttggcaaacaaaatgctgccagagacaatgcggattacagcgatgtcatgctcaccagcgaggaagaaatcaaaaccactaaccctgtggctacagaggaatacggtatcgtggcagataacttgcagcagcaaaacacggctcctcaaattggaactgtcaacagccagggggccttacccggtatggtctggcagaaccgggacgtgtacctgcagggtcccatctgggccaagattcctcacacggacggcaacttccacccgtctccgctgatgggcggctttggcctgaaacatcctccgcctcagatcctgatcaagaacacgcctgtacctgcggatcctccgaccaccttcaaccagtcaaagctgaactctttcatcacgcaatacagcaccggacaggtcagcgtggaaattgaatgggagctgcagaaggaaaacagcaagcgctggaaccccgagatccagtacacctccaactactacaaatctacaagtgtggactttgctgttaatacagaaggcgtgtactctgaaccccaccccattggcacccgttacctcacccgtcccctgtaa

SEQ ID NO: 1029 - DNA, 2217 bp, Artificial Sequence
  Description of Artificial Sequence: Synthetic polynucleotide
atggctgccgatggttatcttccagattggctcgaggacactctctctgaaggaataagacagtggtggaagctcaaacctggcccaccaccaccaaagcccgcagagcggcataaggacgacagcaggggtcttgtgcttcctgggtacaagtacctcggacccttcaacggactcgacaagggggagcccgtcaacgcggcggatgcagcggccctcgagcacgacaaggcctacgaccagcagctcaaagcgggtgacaatccgtacctgcggtataaccacgccgacgcggagtttcaggagcgccttaaagaagatacgtcttttgggggcaacctcggacgagcagtcttccaggcgaaaaagagggttcttgaacctctcggtctggttgaggaaggcgctaagacggctcctggaaagaagagaccggtagagccatcaccccagcgttctccagactcctctacgggcatcggcaagaaaggccaacagcccgccagaaaaagactcaattttggtcagactggcgactcagagtcagttccagaccctcaacctctcggagaacctccagcagcgccctctggtgtgggacctaatacaatggctgcaggcggtggcgcaccaatggcagacaataacgaaggcgccgacggagtgggtagttcctcgggaaattggcattgcgattcccaatggctgggggacagagtcatcaccaccagcaccagaacctgggccctgcccacctacaacaatcacctctacaagcaaatctccaacagcacatctggaggatcttcaaatgacaacgcctacttcggctacagcaccccctgggggtattttgacttcaaccgcttccactgccacttctcaccacgtgactggcagcgactcatcaacaacaactggggattccggcccaagagactcaacttcaagctcttcaacattcaggtcaaagaggttacggacaacaatggagtcaagaccatcgccaataaccttaccagcacggtccaggtctttacggactcggagtaccagttgccgtacgtcctcggctctgcgcaccagggctgcctccctccgttcccggcggacgtgttcatgattccccagtacggctacctaacactcaacaacggtagtcaggccgtgggacgctcctccttctactgcctggaatatttcccttctcagatgctgagaacgggcaacaactttaccttcagctacacctttgaggacgttcctttccacagcagctacgctcacagccagagtctggaccgtctcatgaatcctctgattgaccagtacctgtactacttgtctcggactcaaacaacaggaggcacggcaaatacgcagactctgggcttcagccaaggtgggcctaatacaatggccaatcaggcaaagaactggctgccaggaccctgttaccgccaacaacgcgtctcaacgacaaccgggcaaaacaacaatagcaactttgcctggactgctgggaccaaataccatctgaatggaagaaattcattggctaatcctggcatcgctatggcaacacacaaagacgacaaggagcgtttttttcccagtaacgggatcctgatttttggcaaacaaaatgctgccagagacaatgcggattacagcgatgtcatgctcaccagcgaggaagaaatcaaaaccactaaccctgtggctacagaggaatacggtatcgtggcagataacttgcagcagcaaaacacggctcctcaaattggaactgtcaacagccagggggccttacccggtatggtctggcagaaccgggacgtgtacctgcagggtcccatctgggcaaagattccacacacggacggacattttcacccctctcccctcatgggtggattcggacttaaacaccctcctccacagattctcatcaagaacaccccggtacctgcgaatcctccgaccaccttcaaccagtcaaagctgaactctttcatcacgcaatacagcacaggacaagtgagtgtggaaattgaatgggagctgcagaaagaaaacagcaagcgctggaatcccgaagtgcagtacacatccaattatgcaaaatctgccaacgttgattttactgtggacaacaatggactttatactgagcctcgccccattggcacccgttaccttacccgtcccctgtaa

SEQ ID NO: 1030 - DNA, 2211 bp, Artificial Sequence
  Description of Artificial Sequence: Synthetic polynucleotide
atggctgccgatggttatcttccagattggctcgaggacaacctctctgagggcattcgcgagtggtgggcgctgaaacctggagccccgaaacccaaagccaaccagcaaaagcaggacgacggccggggtctggtgcttcctggctacaagtacctcggacccttcaacggactcgacaagggggagcccgtcaacgcggcggacgcagcggccctcgagcacgacaaggcctacgaccagcagctcaaggcgggtgacaatccgtacctgcggtataaccacgccgacgccgagtttcaggagcgtctgcaagaagatacgtcttttgggggcaacctcgggcgagcagtcttccaggccaaaaagaggcttcttgaacctcttggtctggttgaggaaggggctaagacggctcctggaaagaaacgtccggtagagcagtcgccacaagagccagactcctcctcgggcattggcaagacaggccagcagcccgctaaaaagagactcaactttgggcagactggcgactcagagtcagtgcccgatcctcaacctctcggagaacctccagcaacccccgctgctgtgggacctactacaatggcttcaggcggtggcgcaccaatggcggacaataacgaaggcgccgatggagtgggtaattcctcgggaaattggcattgcgattccacatggatgggcgacagagtcatcaccaccagcacccgaacctgggccctgcccacctacaacaatcacctctacaagcaaatctccagtgcttcaacgggggccagcaacgacaaccactacttcggctacagcaccccctgggggtattttgatttcaacagattccactgccatttttcaccacgtgactggcagcgactcatcaacaacaactggggattccggcccaagagactcaacttcaagctcttcaacatccaggtcaaggaggtcacgcagaatgaaggcaccaagaccatcgccaataaccttaccagcacgattcaggtctttacggattcggaataccagctcccgtacgtcctcggctctgcgcaccagggctgcctccctccgttcccggcggacgtgttcattattccgcagtacggctacctaacgctcaacaatggtagccaggcagtgggacggtcatccttttactgcctggaatatttcccatcgcagatgctgagaacgggcaacaactttaccttcagctacacctttgaggacgttcctttccacagcagctacgctcacagccagagtctggaccgtctcatgaatcctctgattgaccagtacctgtactacttgtctcggactcaaacaacaggaggcacggcaaatacgcagactctgggcttcagccaaggtgggcctaatacaatggccaatcaggcaaagaactggctgccaggaccctgttaccgccaacaacgcgtctcaacgacaaccgggcaaaacaacaatagcaactttgcctggactgctgggaccaaataccatctgaatggaagaaattcattggctaatcctggcatcgctatggcaacacacaaagacgacaaggagcgtttttttcccagtaacgggatcctgatttttggcaaacaaaatgctgccagagacaatgcggattacagcgatgtcatgctcaccagcgaggaagaaatcaaaaccactaaccctgtggctacagaggaatacggtatcgtggcagataacttgcagcagcaaaacacggctcctcaaattggaactgtcaacagccagggggccttacccggtatggtctggcagaaccgggacgtgtacctgcagggtcccatctgggccaagattcctcacacggacggcaacttccacccgtctccgctgatgggcggctttggcctgaaacatcctccgcctcagatcctgatcaagaacacgccagtacctgcggatcctccgaccaccttcaaccagtcaaagctgaactctttcatcacgcaatacagcaccggacaggtcagcgtggaaattgaatgggagctgcagaaggaaaacagcaagcgctggaaccccgagatccagtacacctccaactactacaaatctacaagtgtggactttgctgttaatacagaaggcgtgtactctgaaccccaccccattggcacccgttacctcacccgtcccctgtaa

SEQ ID NO: 1031 - DNA, 2211 bp, Artificial Sequence
  Description of Artificial Sequence: Synthetic polynucleotide
atggctgccgatggttatcttccagattggctcgaggacaacctctctgagggcattcgcgagtggtgggcgctgaaacctggagccccgaaacccaaagccaaccagcaaaagcaggacgacggccggggtctggtgcttcctggctacaagtacctcggacccttcaacggactcgacaagggggagcccgtcaacgcggcggatgcagcggccctcgagcacgacaaggcctacgaccagcagctcaaggcgggtgacaatccgtacctgcggtataaccacgccgacgccgagtttcaggagcgtctgcaagaagatacgtcttttgggggcaacctcgggcgagcagtcttccaggccaaaaagagggttcttgaaccttttggtctggttgaggaagctgctaagacggctcctggaaagaaacgtccggtagagcagtcgccacaagagccagactcctcctcgggcattggcaagacaggccagcagcccgctaaaaagagactcaattttggtcagactggcgactcagagtcagtgcccgaccctcaacctctcggagaacctccagcaacccccgctgctgtgggacctactacaatggcttcaggcggtggcgcaccaatggcagacaataacgaaggcgccgatggagtgggtaatgcctcaggaaattggcattgcgattccacatggctgggcgacagagtcatcaccaccagcacccgaacctgggccctgcccacctacaacaatcacctctacaagcaaatctccagtgcttcaacgggggccagcaacgacaaccactacttcggctacagcaccccctgggggtattttgactttaacagattccactgccacttttcaccacgtgactggcagcgactcatcaacaacaactggggattccggcccaagagactcaacttcaagctcttcaacatccaggtcaaggaggtcacgcagaatgaaggcaccaagaccatcgccaataacctcaccagcaccattcaggtctttacggattcggaataccagctcccgtacgtcctcggctctgcccaccagggctgcctccctccgttcccggcggacgtgttcatgattccgcagtacggctacctaacgctcaacaatggtagccaggcagtgggacggtcatccttttactgcctggaatatttcccatcgcagatgctgagaacgggcaacaactttaccttcagctacacctttgaggacgttcctttccacagcagctacgctcacagccagagtctggaccgtctcatgaatcctctgattgaccagtacctgtactacttgtctcggactcaaacaacaggaggcacggcaaatacgcagactctgggcttcagccaaggtgggcctaatacaatggccaatcacgcaaagaactggctgccaggaccctgttaccgccaacaacgcgtctcaacgacaaccgggcaaaacaacaatagcaactttgcctggactgctgggaccaaataccatctgaatggaagaaattcattggctaatcctggcatcgctatggcaacacacaaagacgacaaggagcgtttttttcccagtaacgggatcctgatttttggcaaacaaaatgctgccagagacaatgcggattacagcgatgtcatgctcaccagcgaggaagaaatcaaaaccactaaccctgtggctacagaggaatacggtatcgtggcagataacttgcagcagcaaaacacggctcctcaaattggaactgtcaacagccagggggccttacccggtatggtctggcagaaccgggacgtgtacctgcagggtcccatctgggccaagattcctcacacggacggcaacttccacccgtctccgctgatgggcggctttggcctgaaacatcctccgcctcagatcctgatcaagaacacgcctgtacctgcggatcctccgaccaccttcaaccagtcaaagctgaactctttcatcacgcaatacagcaccggacaggtcagcgtggaaattgaatgggagctgcagaaggaaaacagcaagcgctggaaccccgagatccagtacacctccaactactacaaatctacaagtgtggactttgctgttaatacagaaggcgtgtactctgaaccccaccccattggcacccgttacctcacccgtcccctgtaa

SEQ ID NO: 1032 - DNA, 2211 bp, Artificial Sequence
  Description of Artificial Sequence: Synthetic polynucleotide
atggctgccgatggttatcttccagattggctcgaggacaacctctctgagggcattcgcgagtggtgggcgctgaaacctggagccccgaagcccaaagccaaccagcaaaagcaggacgacggccggggtctggtgcttcctggctacaagtacctcggacccttcaacggactcgacaaaggagagcccgtcaacgaggcggacgcggcggccctcgaacacgacaaggcttacgaccagcagctcaaggccggtgacaacccctacctgcggtacaaccacgccgacgccgagttccaggagcggctgcaagaagatacgtcttttgggggcaacctcgggcgagcagtcttccaggccaagaagaggcttcttgaacctcttggtctggttgaggaagcggctaagacggctcctggaaagaagaggcctgtagagcagtctcctcaggaaccggactcctccgcgggtattggcaaatcaggtgcacagcccgctaaaaagagactcaattttggtcagactggcgactcagagtcagtccccgacccacaacctctcggagaacctccagcaacccccgctgctgtgggacctactacaatggcttcaggcggtggcgcaccaatggcagacaataacgaaggcgccgatggagtgggtaatgcctcaggaaattggcattgcgattccacatggctgggcgacagagtcatcaccaccagcacccgaacctgggccctgcccacctataacaaccatctctacaagcaaatctccagtgcttcaacgggggccagtaacgacaaccactacttcggctacagcaccccctgggggtattttgactttaacagattccactgccacttctcaccacgtgactggcagcgactcatcaacaacaactggggattccggcccaagcgactcaacttcaagctcttcaacattcaggtcaaagaggttacggacaacgatggagtcaagaccatcgccaataaccttaccagcaccattcaggtgtttacggactcggaataccagctgccgtacgttctcggctccgcccaccagggctgcctgcctccgttcccggcggacgtgttcatgattccccagtacggctacctaacactcaacaacggtagtcaggccgtgggacgctcctccttctactgcctggaatactttccttcgcagatgctgagaactggcaacaacttccagtttacttacaccttcgaggacgtgcctttccacagcagctacgcccacagccagagcttggaccggctgatgaatcctctgattgaccagtacctgtactacttgtctcggactcaaacaacaggaggcacggcaaatacgcagactctgggcttcagccaaggtgggcctaatacaatggccaatcaggcaaagaactggctgccaggaccctgttaccgccaacaacgcgtctcaacgacaaccgggcaaaacaacaatagcaactttgcctggactgctgggaccaaataccatctgaatggaagaaattcattggctaatcctggcatcgctatggcaacacacaaagacgacaaggagcgtttttttcccagtaacgggatcctgatttttggcaaacaaaatgctgccagagacaatgcggattacagcgatgtcatgctcaccagcgaggaagaaatcaaaaccactaaccctgtggctacagaggaatacggtatcgtggcagataacttgcagcagcaaaacacggctcctcaaattggaactgtcaacagccagggggccttacccggtatggtctggcagaaccgggacgtgtacctgcagggtcccatctgggccaagattcctcacacggacggcaacttccacccgtctccgctgatgggcggctttggcctgaaacatcctccgcctcagatcctgatcaagaacacgcctgtacctgcggatcctccgaccaccttcaaccagtcaaagctgaactctttcatcacgcaatacagcaccggacaggtcagcgtggaaattgaatgggagctgcagaaggaaaacagcaagcgctggaaccccgagatccagtacacctccaactactacaaatctacaagtgtggactttgctgttaatacagaaggcgtgtactctgaaccccaccccattggcacccgttacctcacccgtcccctgtaa

SEQ ID NO: 1033 - DNA, 2211 bp, Artificial Sequence
  Description of Artificial Sequence: Synthetic polynucleotide
atggctgccgatggttatcttccagattggctcgaggacaacctctctgagggcattcgcgagtggtgggcgctgaaacctggagccccgaagcccaaagccaaccagcaaaagcaggacgacggccggggtctggtgcttcctggctacaagtacctcggacccttcaacggactcgacaagggggagcccgtcaacgcggcggatgcagcggccctcgagcacgacaaagcctacgaccagcagctcaaagcgggtgacaatccgtacctgcggtataaccacgccgacgccgagtttcaggagcgtctgcaagaagatacgtcttttgggggcaacctcgggcgagcagtcttccaggccaagaagagggttctcgaacctttgggtctggttgaggaaggggctaagacggctcctggaaagaaaaggccggtagagcagtctcctcaggaaccggactcctccgcgggtattggcaagacaggtgcacagcccgctaaaaagagactcaattttggtcagactggcgactcagagtcagtccccgacccacaacctctcggagaacctccagcaacccccgctgctgtgggacctactacaatggcttcaggcggtggcgcaccaatggcagacaataacgaaggcgccgacggagtgggtagtgcctcgggaaattggcattgcgattccacatggctgggcgacagagtcatcaccaccagcacccgaacctgggccctgcccacctataacaaccatctctacaagcaaatctccagtgcttcaacgggggccagtaacgacaaccactacttcggctacagcaccccctgggggtattttgacttcaacagattccactgccacttctcaccacgtgactggcagcgactcatcaacaacaactggggattccggcccaagcgactcaacttcaagctcttcaacattcaggtcaaagaggttacggacaacaatggagtcaagaccatcgccaataaccttaccagcacgatccaggtctttacggactcggagtaccagctgccgtacgtcctcggctctgcgcaccagggctgcctgcctccgttcccggcggacgtgttcatgattccgcagtacggctacctaacgctcaacaatggtagccaggcagtgggacggtcatccttttactgcctggaatatttcccatcgcagatgctgagaacgggcaacaactttaccttcagctacacctttgaggacgttcctttccacagcagctacgctcacagccagagtctggaccgtctcatgaatcctctgattgaccagtacctgtactacttgtctcggactcaaacaacaggaggcacggcaaatacgcagactctgggcttcagccaaggtgggcctaatacaatggccaatcaggcaaagaactggctgccaggaccctgttaccgccaacaacgcgtctcaacgacaaccgggcaaaacaacaatagcaactttgcctggactgctgggaccaaataccatctgaatggaagaaattcattggctaatcctggcatcgctatggcaacacacaaagacgacaaggagcgtttttttcccagtaacgggatcctgatttttggcaaacaaaatgctgccagagacaatgcggattacagcgatgtcatgctcaccagcgaggaagaaatcaaaaccactaaccctgtggctacagaggaatacggtatcgtggcagataacttgcagcagcaaaacacggctcctcaaattggaactgtcaacagccagggggccttacccggtatggtctggcagaaccgggacgtgtacctgcagggtcccatctgggccaagattcctcacacggacggcaacttccacccgtctccgctgatgggcggctttggcctgaaacatcctccgcctcagatcctgatcaagaacacgcctgtacctgcggatcctccgaccaccttcaaccagtcaaagctgaactctttcatcacgcaatacagcaccggacaggtcagcgtggaaattgaatgggagctgcagaaggaaaacagcaagcgctggaaccccgagatccagtacacctccaactactacaaatctacaagtgtggactttgctgttaatacagaaggcgtgtactctgaaccccaccccattggcacccgttacctcacccgtcccctgtaa

SEQ ID NO: 1034 - DNA, 2211 bp, Artificial Sequence
  Description of Artificial Sequence: Synthetic polynucleotide
atggctgccgatggttatcttccagattggctcgaggacaacctctctgagggcattcgcgagtggtgggacttgaaacctggagccccgaagcccaaagccaaccagcaaaagcaggacgacggccggggtctggtgcttcctggctacaagtacctcggacccttcaacggactcgacaagggggagcccgtcaacgcggcggacgcagcggccctcgagcacgacaaggcctacgaccagcagctcaaagcgggtgacaatccgtacctgcggtataaccacgccgacgccgagtttcaggagcgtctgcaagaagatacgtcttttgggggcaacctcggacgagcagtcttccaggccaaaaagaggcttcttgaacctcttggtctggttgaggaagcggctaagacggctcctggaaagaagaggcctgtagagcagtctcctcaggaaccggactcctccgcgggtattggcaaatcgggtgcacagcccgctaaaaagagactcaatttcggtcagactggcgacacagagtcagtcccagaccctcaaccaatcggagaacctccagcagcgccctctggtgtgggacctaatacaatggctgcaggcggtggcgcaccaatggcagacaataacgaaggtgccgatggagtgggtagttcctcgggaaattggcattgcgattcccaatggctgggggacagagtcatcaccaccagcacccgaacctgggccctgcccacctataacaaccacctctacaagcaaatctccagtgcttcaacgggggccagcaacgacaaccactactttggctacagcaccccttgggggtattttgacttcaacagattccactgccacttttcaccacgtgactggcaaagactcatcaacaacaactggggattccgacccaagagactcaacttcaagctcttcaacatccaggtcaaggaggtcacgcagaatgaaggcaccaagaccatcgccaataacctcaccagcaccatccaggtgtttacggactcggagtaccagctgccgtacgttctcggctctgcccaccagggctgcctgcctccgttcccggcggacgtgttcatgattccccagtacggctacctaacactcaacaacggtagtcaggccgtgggacgctcctccttctactgcctggaatactttccttcgcagatgctgagaaccggcaacaacttccagtttacttacaccttcgaggacgtgcctttccacagcagctacgcgcacagccagagcttggaccggctgatgaatcctctgattgaccagtacctgtactacttgtctcggactcaaacaacaggaggcacggcaaatacgcagactctgggcttcagccaaggtgggcctaatacaatggccaatcacgcaaagaactggctgccaggaccctgttaccgccaacaacgcgtctcaacgacaaccgggcaaaacaacaatagcaactttgcctggactgctgggaccaaataccatctgaatggaagaaattcattggctaatcctggcatcgctatggcaacacacaaagacgacaaggagcgtttttttcccagtaacgggatcctgatttttggcaaacaaaatgctgccagagacaatgcggattacagcgatgtcatgctcaccagcgaggaagaaatcaaaaccactaaccctgtggctacagaggaatacggtatcgtggcagataacttgcagcagcaaaacacggctcctcaaattggaactgtcaacagccagggggccttacccggtatggtctggcagaaccgggacgtgtacctgcagggtcccatctgggccaagattcctcacacggacggcaacttccacccgtctccgctgatgggcggctttggcctgaaacatcctccgcctcagatcctgatcaagaacacgcctgtacctgcggatcctccgaccaccttcaaccagtcaaagctgaactctttcatcacgcaatacagcaccggacaggtcagcgtggaaattgaatgggagctgcagaaggaaaacagcaagcgctggaaccccgagatccagtacacctccaactactacaaatctacaagtgtggactttgctgttaatacagaaggcgtgtactctgaaccccaccccattggcacccgttacctcacccgtcccctgtaa

SEQ ID NO: 1035 - DNA, 2214 bp, Artificial Sequence
  Description of Artificial Sequence: Synthetic polynucleotide
atggctgccgatggttatcttccagattggctcgaggacaaccttagtgaaggaattcgcgagtggtgggcgctgaaacctggagccccgaagcccaaagccaaccagcaaaagcaggacgacggccggggtctggtgcttcctggctacaagtacctcggacccttcaacggactcgacaagggggagcccgtcaacgcggcggacgcagcggccctcgagcacgacaaggcctacgaccagcagctcaaagcgggtgacaatccgtacctgcggtataaccacgccgacgccgagtttcaggagcgtctgcaagaagatacgtcttttgggggcaacctcgggcgagcagtcttccaggccaagaagcgggttctcgaacctctcggtctggttgaggaaggcgctaagacggctcctggaaagaaacgtccggtagagcagtcgccacaagagccagactcctcctcgggcatcggcaagacaggccagcagcccgctaaaaagagactcaatttcggtcagactggcgacacagagtcagtcccagaccctcaaccaatcggagaacctcccgcagccccctcaggtgtgggatctcttacaatggcttcaggtggtggcgcaccagtggcagacaataacgaaggtgccgatggagtgggtagttcctcgggaaattggcattgcgattcccaatggctgggggacagagtcatcaccaccagcaccagaacctgggccttgcccacctacaataaccacctctacaagcaaatctccaacagcacatctggaggatcttcaaatgacaacgcctacttcggctacagcaccccctgggggtattttgactttaacagattccactgccacttttcaccacgtgactggcagcgactcatcaacaacaactggggattccgacccaagagactcaacttcaagctcttcaacatccaggtcaaggaggtcacgcagaacgaaggcaccaagaccatcgccaataacctcaccagcaccatccaggtgtttacggactcggagtaccagctgccgtacgttctcggctccgcccaccagggctgcctgcctccgttcccggcggacgtgttcatgattccccagtacggctacctaacgctcaacaacggtagtcaggccgtgggacgctcctccttctactgcctggaatactttccttcgcagatgctgagaaccggcaacaacttccagtttacttacaccttcgaggacgtgcctttccacagcagctacgcgcacagccagagcttggaccggctgatgaatcctctgattgaccagtacctgtactacttgtctcggactcaaacaacaggaggcacggcaaatacgcagactctgggcttcagccaaggtgggcctaatacaatggccaatcaggcaaagaactggctgccaggaccctgttaccgccaacaacgcgtctcaacgacaaccgggcaaaacaacaatagcaactttgcctggactgctgggaccaaataccatctgaatggaagaaattcattggctaatcctggcatcgctatggcaacacacaaagacgacaaggagcgtttttttcccagtaacgggatcctgatttttggcaaacaaaatgctgccagagacaatgcggattacagcgatgtcatgctcaccagcgaggaagaaatcaaaaccactaaccctgtggctacagaggaatacggtatcgtggcagataacttgcagcagcaaaacacggctcctcaaattggaactgtcaacagccagggggccttacccggtatggtctggcagaaccgggacgtgtacctgcagggtcccatctgggccaagattcctcacacggacggcaacttccacccgtctccgctgatgggcggctttggcctgaaacatcctccgcctcagatcctgatcaagaacacgcctgtacctgcggatcctccgaccaccttcaaccagtcaaagctgaactctttcatcacgcaatacagcaccggacaggtcagcgtggaaattgaatgggagctgcagaaggaaaacagcaagcgctggaaccccgagatccagtacacctccaactactacaaatctacaagtgtggactttgctgttaatacagaaggcgtgtactctgaaccccaccccattggcacccgttacctcacccgtcccctgtaa

SEQ ID NO: 1036 - DNA, 2214 bp, Artificial Sequence
  Description of Artificial Sequence: Synthetic polynucleotide
atggctgccgatggttatcttccagattggctcgaggacaaccttagtgaaggaattcgcgagtggtgggcgctgaaacctggagccccgaagcccaaagccaaccagcaaaagcaggacgacggccggggtctggtgcttcctggctacaagtacctcggacccttcaacggactcgacaagggggagcccgtcaacgcggcggacgcagcggccctcgagcacgacaaggcctacgaccagcagctcaaagcgggtgacaatccgtacctgcggtataaccacgccgacgcggagtttcaggagcgccttaaagaagatacgtcttttgggggcaacctcgggcgagcagtcttccaggccaagaagagggttctcgaaccttttggtctggttgaggaaggtgctaagacggctcctggaaagaaacgtccggtagagcagtcgccacaagagccagactcctcctcgggcatcggcaagacaggccagcagcccgctaaaaagagactcaattttggtcagactggcgactcagagtcagttccagaccctcaacctctcggagaacctccagcagcgccctctggtgtgggacctaatacaatggctgcaggcggtggcgcaccaatggcagacaataacgaaggtgccgatggagtgggtagttcctcgggaaattggcattgcgattcccaatggctggggaacagagtcatcaccaccagcacccgaacctgggccctgcccacctacaacaatcacctctacaagcaaatctccaacagcacatctggaggatcttcaaatgacaacgcctacttcggctacagcaccccctgggggtattttgacttcaacagattccactgccacttctcaccacgtgactggcagcgactcatcaacaacaactggggattccggcccaagagactcaacttcaagctcttcaacattcaggtcaaagaggttacggacaacaatggagtcaagaccatcgccaataaccttaccagcacggtccaggtcttcacggactcggagtaccagttgccgtacgtcctcggctctgcgcaccagggctgcctccctccgttcccggcggacgtgttcatgattccgcaatacggctacctgacgctcaacaacggtagccaagccgtgggacgttcatccttttactgcctggaatatttcccttctcagatgctgagaaccggcaacaacttccagtttacttacaccttcgaggacgtgcctttccacagcagctacgcgcacagccagagcttggaccggctgatgaatcctctgattgaccagtacctgtactacttgtctcggactcaaacaacaggaggcacggcaaatacgcagactctgggcttcagccaaggtgggcctaatacaatggccaatcaggcaaagaactggctgccaggaccctgttaccgccaacaacgcgtctcaacgacaaccgggcaaaacaacaatagcaactttgcctggactgctgggaccaaataccatctgaatggaagaaattcattggctaatcctggcatcgctatggcaacacacaaagacgacaaggagcgtttttttcccagtaacgggatcctgatttttggcaaacaaaatgctgccagagacaatgcggattacagcgatgtcatgctcaccagcgaggaagaaatcaaaaccactaaccctgtggctacagaggaatacggtatcgtggcagataacttgcagcagcaaaacacggctcctcaaattggaactgtcaacagccagggggccttacccggtatggtctggcagaaccgggacgtgtacctgcagggtcccatctgggccaagattcctcacacggacggcaacttccacccgtctccgctgatgggcggctttggcctgaaacatcctccgcctcagatcctgatcaagaacacgcctgtacctgcggatcctccgaccaccttcaaccagtcaaagctgaactctttcatcacgcaatacagcaccggacaggtcagcgtggaaattgaatgggagctgcagaaggaaaacagcaagcgctggaaccccgagatccagtacacctccaactactacaaatctacaagtgtggactttgctgttaatacagaaggcgtgtactctgaaccccaccccattggcacccgttacctcacccgtcccctgtaa

SEQ ID NO: 1037 - DNA, 2211 bp, Artificial Sequence
  Description of Artificial Sequence: Synthetic polynucleotide
atggctgccgatggttatcttccagattggctcgaggacaacctctctgagggcattcgcgagtggtgggacttgaaacctggagccccgaagcccaaagccaaccagcaaaagcaggacgacggccggggtctggtgcttcctggctacaagtacctcggacccttcaacggactcgacaggggggagcccgtcaacgcggcggacgcagcggccctcgagcacgacaaggcctacgaccagcagctcaaagcgggtgacaatccgtacctgcggtataaccacgccgacgccgagtttcaggagcgtctgcaagaagatacgtcttttgggggcaacctcgggcgagcagtcttccaggccaagaagcgggttctcgaacctctcggtctggttgaggaaggcgctaagacggctcctggaaagaaacgtccggtagagcagtcgccacaagagccagactcctcctcgggcatcggcaagacaggccagcagcccgctaaaaagagactcaattttggtcagactggcgactcagagtcagtccccgacccacaacctctcggagaacctccagcaacccccgctgctgtgggacctactacaatggcttcaggcggtggcgcaccaatggcagacaataacgaaggcgccgacggagtgggtaatgcctcaggaaattggcattgcgattccacatggctgggcgacagagtcatcaccaccagcacccgaacctgggccttgcccacctataacaaccacctctacaagcaaatctccagtgcttcaacgggggccagcaacgacaaccactacttcggctacagcaccccctgggggtattttgacttcaacagattccactgccacttctcaccacgtgactggcagcgactcatcaacaacaactggggattccggcctaagcgactcaacttcaagctcttcaacattcaggtcaaagaggttacggacaacaatggagtcaagaccatcgccaataacctcaccagcaccatccaggtgtttacggactcggagtaccagctgccgtacgttctcggctctgcccaccagggctgcctgcctccgttcccggcggacgtgttcatgattccccagtacggctacctaacactcaacaacggtagtcaggccgtgggacgctcctccttctactgcctggaatactttccttcgcagatgctgagaaccggcaacaacttccagtttacttacaccttcgaggacgtgcctttccacagcagctacgcccacagccagagcttggaccggctgatgaatcctctgattgaccagtacctgtactacttgtctcggactcaaacaacaggaggcacggcaaatacgcagactctgggcttcagccaaggtgggcctaatacaatggccaatcaggcaaagaactggctgccaggaccctgttaccgccaacaacgcgtctcaacgacaaccgggcaaaacaacaatagcaactttgcctggactgctgggaccaaataccatctgaatggaagaaattcattggctaatcctggcatcgctatggcaacacacaaagacgacaaggagcgtttttttcccagtaacgggatcctgatttttggcaaacaaaatgctgccagagacaatgcggattacagcgatgtcatgctcaccagcgaggaagaaatcaaaaccactaaccctgtggctacagaggaatacggtatcgtggcagataacttgcagcagcaaaacacggctcctcaaattggaactgtcaacagccagggggccttacccggtatggtctggcagaaccgggacgtgtacctgcagggtcccatctgggccaagattcctcacacggacggcaacttccacccgtctccgctgatgggcggctttggcctgaaacatcctccgcctcagatcctgatcaagaacacgcctgtacctgcggatcctccgaccaccttcaaccagtcaaagctgaactctttcatcacgcaatacagcaccggacaggtcagcgtggaaattgaatgggagctgcagaaggaaaacagcaagcgctggaaccccgagatccagtacacctccaactactacaaatctacaagtgtggactttgctgttaatacagaaggcgtgtactctgaaccccaccccattggcacccgttacctcacccgtcccctgtaa

SEQ ID NO: 1038 - DNA, 2211 bp, Artificial Sequence
  Description of Artificial Sequence: Synthetic polynucleotide
atggctgccgatggttatcttccagattggctcgaggacaacctctctgagggcattcgcgagtggtgggacttgaaacctggagccccgaagcccaaagccaaccagcaaaagcaggacgacggccggggtctggtgcttcctggctacaagtacctcggacccttcaacggactcgacaagggggagcccgtcaacgcggcggacgcagcggccctcgagcacgacaaggcctacgaccagcagctcaaagcgggtgacaatccgtacctgcggtataaccacgccgacgccgagtttcaggagcgtctgcaagaagatacgtcttttgggggcaacctcgggcgagcagtcttccaggccaagaagcgggttctcgaacctctcggtctggttgaggaaggcgctaagacggctcctggaaagaaacgtccggtagagcagtcgccacaagagccagactcctcctcgggcatcggcaagaaaggccaacagcccgccagaaaaagactcaattttggtcagactggcgactcagagtcagttccagaccctcaacctctcggagaacctcccgcagccccctcaggtgtgggatctcttacaatggcttcaggcggtggcgcaccaatggcagacaataacgaaggcgccgacggagtgggtaatgcctcaggaaattggcattgcgattccacatggctgggcgacagagtcatcaccaccagcacccgaacatgggccttgcccacttacaacaaccatctctacaagcaaatctccagtgcttcaacgggggccagcaacgacaaccactacttcggctacagcaccccctgggggtattttgatttcaacagattccactgccacttttcaccacgtgactggcaaagactcatcaacaacaactggggattccgacccaagagactcaacttcaagctctttaacattcaagtcaaagaggtcacgcagaatgaaggcaccaagaccatcgccaataaccttaccagcacggtccaggtcttcacggactcagactatcagctcccgtacgttctcggctccgcccaccagggctgcctgcctccgttcccggcggacgtgttcatgattccccagtacggctacctaacactcaacaacggtagtcaggccgtgggacgctcctccttctactgcctggaatactttccttcgcagatgctgagaaccggcaacaacttccagtttacttacacctttgaggacgttcctttccacagcagctacgctcacagccagagtctggaccgtctcatgaatcctctgattgaccagtacctgtactacttgtctcggactcaaacaacaggaggcacggcaaatacgcagactctgggcttcagccaaggtgggcctaatacaatggccaatcaggcaaagaactggctgccaggaccctgttaccgccaacaacgcgtctcaacgacaaccgggcaaaacaacaatagcaactttgcctggactgctggaaccaaataccatctgaatggaagaaattcattgtctaatcctggcatcgctatggcgacacacaaagacgacaaggagcgtttttttcccagtaacgggatcctgatttttggcaaacaaaatgctgccagagacaatgcggattacagcgatgtcatgctcaccagcgaggaagaaatcaaaaccactaaccctgtggctacagaggaatacggtatcgtggcagataacttgcagcagcaaaacacggctcctcaaattggaactgtcaacagccagggggccttacccggtatggtctggcagaaccgggacatgtacctgcagggtcccatctgggccaagattcctcacacggacggcaacttccacccgtctccgctgatgggcggctttggcctgaaacatcctccgcctcagatcctgatcaagaacacgcctgtacctgcggatcctccgaccaccttcaaccagtcaaagctgaactctttcatcacgcaatacagcaccggacaggtcagcgtggaaattgaatgggagctgcagaaggaaaacagcaagcgctggaaccccgagatccagtacacctccaactactacaaatctacaagtgtggactttgctgttaatacagaaggcgtgtactctgaaccccaccccattggcacccgttacctcacccgtcccctgtaa

SEQ ID NO: 1039 - DNA, 2211 bp, Artificial Sequence
  Description of Artificial Sequence: Synthetic polynucleotide
atggctgccgatggttatcttccagattggctcgaggacaacctctctgagggcattcgcgagtggtgggcgctgaaacctggagccccgaagcccaaagccaaccagcaaaagcaggacgacggccggggtctggtgcttcctggctacaagtacctcggacccttcaacggactcgacaagggggagcccgtcaacgcggcggatgcagcggccctcgagcacgacaaggcctacgaccagcagctcaaagcgggtgacaatccgtacctgcggtataaccacgccgacgccgagtttcaggagcgtctgcaggaagatacgtcttttgggggcaacctcgggcgagcagtcttccaggccaagaagagggttctcgaaccttttggtctggttgaggaaggcgctaagacggctcctggaaagaaacgtccggtagagcagtcgccacaagagccagactcctcctcgggcatcggcaagacaggccagcagcccgctaaaaagagactcaattttggtcagactggcggctcagagtcagtccccgacccacaacctctcggagaacctccagcaacccccgctgctgtgggacctactacaatggctgcaggcggtggcgcaccaatggcagacaataacgaaggcgccgacggagtgggtagttcctcgggaaattggcattgcgattccacatggctgggcgacagagtcatcaccaccagcaccagaacctgggccttgcccacctataacaaccacctctacaagcaaatctccagtgcttcaacgggggccagcaacgacaaccactacttcggctacagcaccccctgggggtattttgatttcaacagattccactgccatttctcaccacgtgactggcagcgactcatcaacaacaactggggattccggcccaagagactcaacttcaaactcttcaacattcaggtcaaagaggttacggacaacaatggagtcaagaccatcgccaataaccttaccagcacggtccaggtgtttacggactcggagtaccagctgccgtacgttctcggctctgcccaccagggctgcctccctccgttcccggcggacgtgttcatgattccgcagtacggctacctaacgctcaacaatggcagccaggcagtgggacggtcatccttttactgcctggaatatttcccttctcagatgctgagaacgggcaacaactttaccttcagctacacctttgaggaagtgcctttccacagcagctacgcgcacagccagagcctggaccggctgatgaatcctctgattgaccagtacctgtactacttgtctcggactcaaacaacaggaggcacggcaaatacgcagactctgggcttcagccaaggtgggcctaatacaatggccaatcaggcaaagaactggctgccaggaccctgttaccgccaacaacgcgtctcaacgacaaccgggcaaaacaacaatagcaactttgcctggactgctgggaccaaataccatctgaatggaagaaattcattggctaatcctggcatcgctatggcctcacacaaagacgacaaggagcgtttttttcccagtaacgggatcctgatttttggcaaacaaaatgctgccagagacaatgcggattacagcgatgtcatgctcaccagcgaggaagaaatcaaaaccactaaccctgtggctacagaggaatacggtatcgtggcagataacttgcagcagcaaaacacggctcctcaaattggaactgtcaacagccagggggccttacccggtatggtctggcagaaccgggacgtgtacctgcagggtcccatctgggccaagattcctcacacggacggcaacttccacccgtctccgctgatgggcggctttggcctgaaacatcctccgcctcagatcctgatcaagaacacgcctgtacctgcggatcctccgaccaccttcaaccagtcaaagctgaactctttcatcacgcaatacagcaccggacaggtcagcgtggaaattgaatgggagctgcagaaggaaaacagcaagcgctggaaccccgagatccagtacacctccaactactacaaatctacaagtgtggactttgctgttaatacagaaggcgtgtactctgaaccccaccccattggcacccgttacctcacccgtcccctgtaa

SEQ ID NO: 1040 - protein, 736 aa, Artificial Sequence
  Description of Artificial Sequence: Synthetic polypeptide
MAADGYLPDWLEDTLSEGIRQWWKLKPGPPPPKPAERHKDDSRGLVLPGYKYLGPFNGLDKGEPVNEADAAALEHDKAYDQQLKAGDNPYLKYNHADAEFQERLKEDTSFGGNLGRAVFQAKKRVLEPLGLVEEGAKTAPGKKRPVEQSPQEPDSSSGIGKTGQQPAKKRLNFGQTGDSESVPDPQPLGEPPATPAAVGPTTMASGGGAPMADNNEGADGVGSSSGNWHCDSQWLGDRVITTSTRTWALPTYNNHLYKQISSASTGASNDNHYFGYSTPWGYFDFNRFHCHFSPRDWQRLINNNWGFRPKRLNFKLFNIQVKEVTQNEGTKTIANNLTSTIQVFTDSEYQLPYVLGSAHQGCLPPFPADVFMIPQYGYLTLNNGSQAVGRSSFYCLEYFPSQMLRTGNNFQFTYTFEDVPFHSSYAHSQSLDRLMNPLIDQYLYYLSRTQTTGGTANTQTLGFSQGGPNTMANQAKNWLPGPCYRQQRVSTTTGQNNNSNFAWTAGTKYHLNGRNSLANPGIAMATHKDDKERFFPSNGILIFGKQNAARDNADYSDVMLTSEEEIKTTNPVATEEYGIVADNLQQQNTAPQIGTVNSQGALPGMVWQNRDVYLQGPIWAKIPHTDGNFHPSPLMGGFGLKHPPPQILIKNTPVPADPPTTFNQSKLNSFITQYSTGQVSVEIEWELQKENSKRWNPEIQYTSNYYKSTSVDFAVNTEGVYSEPHPIGTRYLTRPL

SEQ ID NO: 1041 - protein, 736 aa, Artificial Sequence
  Description of Artificial Sequence: Synthetic polypeptide
MAADGYLPDWLEDNLSEGIREWWALKPGAPKPKANQQKQDDGRGLVLPGYKYLGPFNGLDKGEPVNAADAAALEHDKAYDQQLKAGDNPYLKYNHADAEFQERLKEDTSFGGNLGRAVFQAKKRLLEPLGLVEEAAKTAPGKKRPVEQSPQEPDSSAGIGKSGAQPAKKRLNFGQTGDSESVPDPQPLGEPPATPAAVGPTTMASGGGAPMADNNEGADGVGNASGNWHCDSTWLGDRVITTSTRTWALPTYNNHLYKQISSASTGASNDNHYFGYSTPWGYFDFNRFHCHFSPRDWQRLINNNWGFRPKRLNFKLFNIQVKEVTQNEGTKTIANNLTSTIQVFTDSEYQLPYVLGSAHQGCLPPFPADVFMIPQYGYLTLNNGSQAVGRSSFYCLEYFPSQMLRTGNNFQFTYTFEDVPFHSSYAHSQSLDRLMNPLIDQYLYYLSRTQTTGGTANTQTLGFSQGGPNTMANQAKNWLPGPCYRQQRVSTTTGQNNNSNFAWTAGTKYHLNGRNSLANPGIAMATHKDDKERFFPSNGILIFGKQNAARDNADYSDVMLTSEEEIKATNPVATEEYGIVADNLQQQNTAPQIGTVNSQGALPGMVWQNRDVYLQGPIWAKIPHTDGNFHPSPLMGGFGLKHPPPQILIKNTPVPADPPTTFNQSKLNSFITQYSTGQVSVEIEWELQKENSKRWNPEIQYTSNYYKSTSVDFAVNTEGVYSEPHPIGTRYLTRPL

SEQ ID NO: 1042 - protein, 737 aa, Artificial Sequence
  Description of Artificial Sequence: Synthetic polypeptide
MAADGYLPDWLEDNLSEGIREWWDLKPGAPKPKANQQKQDDGRGLVLPGYKYLGPFNGLDKGEPVNAADAAALEHDKAYDQQLKAGDNPYLRYNHADAEFQERLQEDTSFGGNLGRAVFQAKKRVLEPLGLVEEGANTAPGKKRPVEQSPQEPDSSAGIGKSGAQPAKKRLNFGQTGDTESVPDPQPIGEPPAAPSGVGSLTMASGGGAPVADNNEGADGVGSSSGNWHCDSQWLGDRVITTSTRTWALPTYNNHLYKQISNSTSGGSSNDNAYFGYSTPWGYFDFNRFHCHFSPRDWQRLINNNWGFRPKRLNFKLFNIQVKEVTDNNGVKTIANNLTSTIQVFTDSEYQLPYVLGSAHQGCLPPFPADVFMIPQYGYLTLNNGSQAVGRSSFYCLEYFPSQMLRTGNNFQFTYTFEDVPFHSSYAHSQSLDRLMNPLIDQYLYYLSRTQTTGGTANTQTLGFSQGGPNTMANQAKNWLPGPCYRQQRVSTTTGQNNNSNFAWTAGTKYHLNGRNSLANPGIAMASHKDDKERFFPSNGILIFGKQNAARDNADYSDVMLTSEEEIKTTNPVATEEYGIVADNLQQQNTAPQIGTVNSQGALPGMVWQNRDVYLQGPIWAKIPHTDGNFHPSPLMGGFGLKHPPPQILIKNTPVPADPPTTFNQSKLNSFITQYSTGQVSVEIEWELQKENSKRWNPEIQYTTNYYKSTSVDFAVNTEGVYSEPHPIGTRYLTRPL

SEQ ID NO: 1043 - protein, 736 aa, Artificial Sequence
  Description of Artificial Sequence: Synthetic polypeptide
MAADGYLPDWLEDNLSEGIREWWALKPGAPKPKANQQKQDDGRGLVLPGYKYLGPFNGLDKGEPVNEADAAALEHDKAYDQQLKAGDNPYLRYNHADAEFQERLQEDTSFGGNLGRAVFQAKKRVLEPLGLVEEGAKTAPGKKRPVEQSPQEPDSSSGIGKTGQQPAKKRLNFGQTGDSESVPDPQPLGEPPATPAAVGPTTMASGGGAPMADNNEGADGVGNASGNWHCDSTWLGDRVITTSTRTWALPTYNNHLYKQISSASTGASNDNHYFGYSTPWGYFDFNRFHCHFSPRDWQRLINNNWGFRPKRLNFKLFNIQVKEVTQNEGTKTIANNLTSTIQVFTDSEYQLPYVLGSAHQGCLPPFPADVFMIPQYGYLTLNNGSQAVGRSSFYCLEYFPSQMLRTGNNFQFTYTFEDVPFHSSYAHSQSLDRLMNPLIDQYLYYLSRTQTTGGTANTQTLGFSQGGPNTMANQAKNWLPGPCYRQQRVSTTTGQNNNSNFAWTAGTKYHLNGRNSLANPGIAMATHKDDKERFFPSNGILIFGKQNAARDNADYSDVMLTSEEEIKTTNPVATEEYGIVADNLQQQNTAPQIGTVNSQGALPGMVWQNRDVYLQGPIWAKIPHTDGNFHPSPLMGGFGLKHPPPQILIKNTPVPADPPTTFNQSKLNSFITQYSTGQVSVEIEWELQKENSKRWNPEIQYTSNYYKSTSVDFAVNTEGVYSEPHPIGTRYLTRPL

SEQ ID NO: 1044 - protein, 736 aa, Artificial Sequence
  Description of Artificial Sequence: Synthetic polypeptide
MAADGYLPDWLEDNLSEGIREWWALKPGAPKPKANQQKQDDGRGLVLPGYKYLGPFNGLDKGEPVNEADAAALEHDKAYDQQLKAGDNPYLRYNHADAEFQERLQEDTSFGGNLGRAVFQAKKRVLEPFGLVEEGAKTAPGKKRPVEQSPQEPDSSSGIGKTGQQPAKKRLNFGQTGDSESVPDPQPLGEPPATPAAVGPTTMASGGGAPMADNNEGADGVGNASGNWHCDSQWLGDRVITTSTRTWALPTYNNHLYKQISSASTGASNDNHYFGYSTPWGYFDFNRFHCHFSPRDWQRLINNNWGFRPKRLNFKLFNIQVKEVTDNNGVKTIANNLTSTVQVFSDSEYQLPYVLGSAHQGCLPPFPADVFMIPQYGYLTLNNGSQAVGRSSFYCLEYFPSQMLRTGNNFQFTYTFEDVPFHSSYAHSQSLDRLMNPLIDQYLYYLSRTQTTGGTANTQTLGFSQGGPNTMANQAKNWLPGPCYRQQRVSTTTGQNNNSNFAWTAGTKYHLNGRNSLANPGIAMATHKDDKERFFPSNGILIFGKQNAARDNADYSDVMLTSEEEIKTTNPVATEEYGIVADNLQQQNTAPQIGTVNSQGALPGMVWQNRDVYLQGPIWAKIPHTDGNFHPSPLMGGFGLKHPPPQILIKNTPVPADPPTTFNQSKLNSFITQYSTGQVSVEIEWELQKENSKRWNPEIQYTSNYYKSTSVDFAVNTEGVYSEPHPIGTRYLTRPL

SEQ ID NO: 1045 - protein, 736 aa, Artificial Sequence
  Description of Artificial Sequence: Synthetic polypeptide
MAADGYLPDWLEDTLSEGIRQWWKLKPGPPPPKPAERHKDDSRGLVLPGYKYLGPFNGLDKGEPVNEADAAALEHDKAYDRQLDSGDNPYLKYNHADAEFQERLKEDTSFGGNLGRAVFQAKKRVLEPFGLVEEGAKTAPGKKRPVEQSPQEPDSSSGIGKTGQQPAKKRLNFGQTGDSESVPDPQPLGEPPATPAAVGPTTMASGGGAPMADNNEGADGVGNASGNWHCDSTWLGDRVITTSTRTWALPTYNNHLYKQISSASTGASNDNHYFGYSTPWGYFDFNRFHCHFSPRDWQRLINNNWGFRPKRLNFKLFNIQVKEVTDNNGVKTIANNLTSTVQVFTDSDYQLPYVLGSAHEGCLPPFPADVFMIPQYGYLTLNNGSQAVGRSSFYCLEYFPSQMLRTGNNFQFTYTFEDVPFHSSYAHSQSLDRLMNPLIDQYLYYLSRTQTTGGTANTQTLGFSQGGPNTMANQAKNWLPGPCYRQQRVSTTTGQNNNSNFAWTAGTKYHLNGRNSLANPGIAMATHKDDKERFFPSNGILIFGKQNAARDNADYSDVMLTSEEEIKTTNPVATEEYGIVADNLQQQNTAPQIGTVNSQGALPGMVWQNRDVYLQGPIWAKIPHTDGNFHPSPLMGGFGLKHPPPQILIKNTPVPADPPTTFNQSKLNSFITQYSTGQVSVEIEWELQKENSKRWNPEIQYTSNYYKSTSVDFAVNTEGVYSEPHPIGTRYLTRNL

SEQ ID NO: 1046 - protein, 738 aa, Artificial Sequence
  Description of Artificial Sequence: Synthetic polypeptide
MAADGYLPDWLEDNLSEGIREWWDLKPGAPKPKANQQKQDDGRGLVLPGYKYLGPFNGLDKGEPVNAADAAALEHDKAYDQQLQAGDNPYLRYNHADAEFQERLQEDTSFGGNLGRAVFQAKKRVLEPLGLVEEGAKTAPGKKRPVEPSPQRSPDSSTGIGKKGQQPARKRLNFGQTGDSESVPDPQPLGEPPAAPSGVGPNTMAAGGGAPMADNNEGADGVGSSSGNWHCDSQWLGDRVITTSTRTWALPTYNNHLYKQISNSTSGGSSNDNAYFGYSTPWGYFDFNRFHCHFSPRDWQRLINNNWGFRPKRLSFKLFNIQVKEVTQNEGTKTIANNLTSTIQVFTDSEYQLPYVLGSAHQGCLPPFPADVFMIPQYGYLTLNNGSQAVGRSSFYCLEYFPSQMLRTGNNFTFSYTFEDVPFHSSYAHSQSLDRLMNPLIDQYLYYLSRTQTTGGTANTQTLGFSQGGPNTMANQAKNWLPGPCYRQQRVSTTTGQNNNSNFAWTAGTKYHLNGRNSLANPGIAMATHKDDKERFFPSNGILIFGKQNAARDNADYSDVMLTSEEEIKTTNPVATEEYGIVADNLQQQNTAPQIGTVNSQGALPGMVWQNRDVYLQGPIWAKIPHTDGNFHPSPLMGGFGLKHPPPQILIKNTPVPADPPTTFNQSKLNSFITQYSTGQVSVEIEWELQKENSKRWNPEIQYTSNYYKSTSVDFAVNTEGVYSEPHPIGTRYLTRPL

SEQ ID NO: 1047 - protein, 737 aa, Artificial Sequence
  Description of Artificial Sequence: Synthetic polypeptide
MAADGYLPDWLEDNLSEGIREWWDLKPGAPKPKANQQKQDDGRGLVLPGYKYLGPFNGLDKGEPVNAADAAALEHDKAYDQQLKAGDNPYLRYNHADAEFQERLQEDTSFGGNLGRAVFQAKKRVLEPFGLVEEGAKTAPGKKRPVEQSPQEPDSSSGIGKTGQQPAKKRLNFGQTGDSESVPDPQPLGEPPATPAAVGPTTMASGGGAPMQDNNEGADGVGSSSGNWHCDSTWLGDRVITTSTRTWALPTYNNHLYKQISNGTSGGATNDNTYFGYSTPWGYFDFNRFHCHFSPRDWQRLINNNWGFRPKRLNFKLFNIQVKEVTQNEGTKTIANNLTSTIQVFTDSEYQLPYVLGSAHQGCLPPFPADVFMIPQYGYLTLNNGSQAVGRSSFYCLEYFPSQMLRTGNNFTFSYTFEDVPFHSSYAHSQSLDRLMNPLIDQYLYYLSRTQTTGGTANTQTLGFSQGGPNTMANQAKNWLPGPCYRQQRVSTTTGQNNNSNFAWTAGTKYHLNGRNSLANPGIAMATHKDDKERFFPSNGILIFGKQNAARDNADYSDVMLTSEEEIKTTNPVATEEYGIVADNLQQQNTAPQIGTVNSQGALPGMVWQNRDVYLQGPIWAKIPHTDGNFHPSPLMGGFGLKHPPPQILIKNTPVPADPPTTFNQSKLNSFITQYSTGQVSVEIEWELQKENSKRWNPEIQYTSNYYKSTSVDFAVNTEGVYSEPHPIGTRYLTRPL

SEQ ID NO: 1048 - protein, 736 aa, Artificial Sequence
  Description of Artificial Sequence: Synthetic polypeptide
MAADGYLPDWLEDNLSEGIREWWALKPGAPKPKANQQKQDDGRGLVLPGYKYLGPFNGLDKGEPVNAADAAALEHDKAYDQQLKAGDNPYLRYNHADAEFQERLQEDTSFGGNLGRAVFQAKKRVLEPLGLVEEGAKTAPGKKRPVEQSPQEPDSSSGIGKTGQQPAKKRLNFGQTGDSESVPDPQPLGEPPATPAAVGPTTMASGGGAPMADNNEGADGVGSSSGNWHCDSTWLGDRVITTSTRTWALPTYNNHLYKQISSASTGASNDNHYFGYSTPWGYFDFNRFHCHFSPRDWQRLINNNWGFRPKRLNFKLFNIQVKEVTDNNGVKTIANNLTSTVQVFTDSDYQLPYVLGSAHEGCLPPFPADVFMIPQYGYLTLNNGSQAVGRSSFYCLEYFPSQMLRTGNNFTFSYTFEDVPFHSSYAHSQSLDRLMNPLIDQYLYYLSRTQTTGGTANTQTLGFSQGGPNTMANQAKNWLPGPCYRQQRVSTTTGQNNNSNFAWTAGTKYHLNGRNSLANPGIAMATHKDDKERFFPSNGILIFGKQNAARDNADYSDVMLTSEEEIKTTNPVATEEYGIVADNLQQQNTAPQIGTVNSQGALPGMVWQNRDVYLQGPIWAKIPHTDGNFHPSPLMGGFGLKHPPPQILIKNTPVPADPPTTFNQSKLNSFITQYSTGQVSVEIEWELQKENSKRWNPEIQYTSNYYKSTSVDFAVNTEGVYSEPHPIGTRYLTRPL

SEQ ID NO: 1049 - protein, 737 aa, Artificial Sequence
  Description of Artificial Sequence: Synthetic polypeptide
MAADGYLPDWLEDNLSEGIREWWDLKPGAPKPKANQQKQDDGRGLVLPGYKYLGPFNGLDKGEPVNAADAAALEHDKAYDQQLKAGDNPYLRYNHADAEFQERLQEDTSFGGNLGRAVFQAKKRVLEPLGLVEEGAKTAPGKKRPVEPSPQRSPDSSTGIGKKGQQPARKRLNFGQTGDSESVPDPQPLGEPPATPAAVGPTTMASGGGAPMADNNEGADGVGNASGNWHCDSTWLGDRVITTSTRTWALPTYNNHLYKQISSASTGASNDNHYFGYSTPWGYFDFNRFHCHFSPRDWQRLINNNLGSRPKRLNFKLFIIQVKEVTTNDGVTTIANNLTSTVQVFSDSEYQLPYVLGSAHQGCLPPFPADVFMIPQYGYLTLNNGSQAVGRSSFYCLEYFPSQMLRTGNNFTFSYTFEDVPFHSSYAHSQSLDRLMNPLIDQYLYYLNRTQNQSGSAQNKDLLFSRGSPAGMSVQPKNWLPGPCYRQQRVSKTKTDNNNSNFTWTGASKYNLNGRESIINPGTAMASHKDDKDKFFPMSGVMIFGKESAGASNTALDNVMITDEEEIKATNPVATERFGTVAVNLQSSSTDPATGDVHVMGALPGMVWQDRDVYLQGPIWAKIPHTDGHFHPSPLMGGFGLKHPPPQILIKNTPVPANPPAEFSATKFASFITQYSTGQVSVEIEWELQKENSKRWNPEVQYTSNYAKSANVDFTVDNNGLYTEPRPIGTRYLTRPL

SEQ ID NO: 1050 - protein, 736 aa, Artificial Sequence
  Description of Artificial Sequence: Synthetic polypeptide
MAADGYLPDWLEDNLSEGIREWWALKPGAPKPKANQQKQDDGRGLVLPGYKYLGPFNGLDKGEPVNAADAAALEHDKAYDQQLKAGDNPYLRYNHADAEFQERLQEDTSFGGNLGRAVFQAKKRLLEPLGLVEEAAKTAPGKKRPVEQSPQEPDSSSGIGKTGQQPAKKRLNFGQTGDSESVPDPQPIGEPPATPAAVGPTTMASGGGAPMADNNEGADGVGNSSGNWHCDSTWLGDRVITTSTRTWALPTYNNHLYKQISSASTGASNDNHYFGYSTPWGYFDFNRFHCHFSPRDWQRLINNNWGFRPKRLNFKLFNIQVKEVTQNEGTKTIANNLTSTIQVFTDSEYQLPYVLGSAHQGCLPPFPADVFMIPQYGYLTLNNGSQAVGRSSFYCLEYFPSQMLRTGNNFTFSYTFEDVPFHSSYAHSQSLDRLMNPLIDQYLYYLSRTQTTGGTANTQTLGFSQGGPNTMANQAKNWLPGPCYRQQRVSTTTGQNNNSNFAWTAGTKYHLNGRNSLANPGIAMATHKDDKERFFPSNGILIFGKQNAARDNADYSDVMLTSEEEIKTTNPVATEEYGIVADNLQQQNTAPQIGTVNSQGALPGMVWQNRDVYLQGPIWAKIPHTDGNFHPSPLMGGFGLKHPPPQILIKNTPVPADPPTTFNQSKLNSFITQYSTGQVSVEIEWELQKENSKRWNPEIQYTSNYYKSTSVDFAVNTEGVYSDPHPIGTRYLTRPL

SEQ ID NO: 1051 - protein, 736 aa, Artificial Sequence
  Description of Artificial Sequence: Synthetic polypeptide
MAADGYLPDWLEDNLSEGIREWWALKPGAPKPKANQQEQDDGRGLVLPGYKYLGPFNGLDKGEPVNAADAAALEHDKAYDQQLKAGDNPYLRYNHADAEFQERLQEDTSFGGNLGRAVFQAKKRVLEPFGLVEEGAKTAPGKKRPVEQSPQEPDSSSGIGKTGQQPAKKRLNFGQTGDSESVPDPQPLGEPPAAPSGVGPNTMAAGGGAPMADNNEGADGVGSSSGNWHCDSTWLGDRVITTSTRTWALPTYNNHLYKQISSASTGASNDNHYFGYSTPWGYFDFNRFHCHFSPRDWQRLINNNWGFRPKRLNFKLFNIQVKEVTQNEGTKTIANNLTSTIQVFTDSEYQLPYVLGSAHQGCLPPFPADVFMIPQYGYLTLNNGSQAVGRSSFFCLEYFPSQMLRTGNNFTFSYTFEDVPFHSSYAHSQSLDRLMNPLIDQYLYYLSRTQTTGGTANTQTLGFSQGGPNTMANQAKNWLPGPCYRQQRVSTTTGQNNNSNFAWTAGTKYHLNGRNSLANPGIAMATHKDDKERFFPSNGILIFGKQNAARDNADYSDVMLTSEEEIKTTNPVATEEYGIVADNLQQQNTAPQIGTVNSQGALPGMVWQNRDVYLQGPIWAKIPHTDGNFHPSPLMGGFGLKHPPPQILIKNTPVPADPPTTFNQSKLNSFITQYSTGQVSVEIEWELQKENSKRWNPEIQYTSNYYKSTSVDFAVNTEGVYSEPHPIGTRYLTRPL

SEQ ID NO: 1052 - protein, 736 aa, Artificial Sequence
  Description of Artificial Sequence: Synthetic polypeptide
MAADGYLPDWLEDNLSEGIREWWDLKPGAPKPKANQQKQDDGRGLVLPGYKYLGPFNGLDKGEPVNAADAAALEHDKAYDQQLKAGDNPYLRYNHADAEFQERLQEDTSFGGNLGRAVFQAKKRVLEPLGLVEEGAKTAPGKKRPVEQSPQEPDSSSGIGKTGQQPAKKRLNFGQTGDSESVPDPQPLGEPPATPAAVGPTTMASGGGAPMADNNEGADGVGNASGNWHCDSTWLGDRVITTSTRTWALPTYNNHLYKQISSASTGASNDNHYFGYSTPWGYFDFNRFHCHFSPRDWQRLINNNWGFRPKRLNFKLFNIQVKEVTTNDGVTTIANNLTSTVQVFSDSEYQLPYVLGSAHQGCLPPFPADVFMIPQYGYLTLNNGSQAVGRSSFYCLEYFPSQMLRTGNNFTFSYTFEDVPFHSSYAHSQSLDRLMNPLIDQYLYYLNRTQNQSGSAQNKDLLFSRGSPAGMSVQPKNWLPGPCYRQQRVSKTKTDNNNSNFTWTGASKYNLNGRESIINPGTAMASHKDDKDKFFPMSGVMIFGKESAGASNTALDNVMITDEEEIKATNPVATERFGTVAVNLQNSSTDPATGDVHVMGALPGMVWQDRDVYLQGPIWAKIPHTDGHFHPSPLMGGFGLKHPPPQILIKNTPVPANPPAEFSATKFASFITQYSTGQVSVEIEWELQKENSKRWNPEVQYTSNYAKSANVDFTVDNNGLYTVPRPIGTRYLTRPL

SEQ ID NO: 1053 - protein, 736 aa, Artificial Sequence
  Description of Artificial Sequence: Synthetic polypeptide
MAADGYLPDWLEDNLSEGIREWWALKPGAPKPKANQQKQDDGRGLVLPGYKYLGPFNGLDKGEPVNAADAAALEHDKAYDQQLKAGDNPYLRYNHADAEFQERLQEDTSFGGNLGRAVFQAKKRLLEPLGLVEEGAKTAPGKKRPVEQSPQEPDSSSGIGKTGEQPAKKRLNFGQTGDSESVPDPQPLGEPPATPAAVGPTTMASGGGAPMADNNEGADGVGSASGNWHCDSTWLGDRVITTSTRTWALPTYNNHLYKQISSASTGASNDNHYFGYSTPWGYFDFNRFHCHFSPRDWQRLINNNWGFRPKRLNFKLFNIQVKEVTDNNGVKTIANNLTSTIQVFTDSEYQLPYVLGSAHQGCLPPFPADVFMIPQYGYLTLNNGSQAVGRSSFYCLEYFPSQMLRTGNNFPFSYTFEDVPFHSSYAHSQSLDRLMNPLIDQYLYYLSRTQTTGGTANTQTLGFSQGGPNTMANQAKNWLPGPCYRQQRVSTTTGQNNNSNFAWTAGTKYHLNGRNSLANPGIAMATHKDDKERFFPSNGILIFGKQNAARDNADYSDVMLTSEEEIKTTNPVATEEYGIVADNLQQQNTAPQIGTVNSQGALPGMVWQNRDVYLQGPIWAKIPHTDGNFHPSPLMGGFGLKHPPPQILIKNTPVPADPPTTFNQSKLNSFITQYSTGQVSVEIEWELQKENSKRWNPEIQYTSNYYKSTSVDFAVNTEGVYSEPHPIGTRYLTRPL

SEQ ID NO: 1054 - protein, 736 aa, Artificial Sequence
  Description of Artificial Sequence: Synthetic polypeptide
MAADGYLPDWLEDNLSEGIREWWALKPGAPKPKANQQKQDDGRGLVLPGYKYLGPFNGLDKGEPVNAADAAALEHDKAYDQQLKAGDNPYLRYNHADAEFQERLQEDTSFGGNLGRAVFQAKKRVLEPLGLVEEGAKTAPGKKRPVEQSPQEPDSSSGIGKTGQQPAKKRLNFGQTGDSESVPDPQPLGEPPATPAAVGPTTMASGGGAPMADNNEGADGVGSSSGNWHCDSQWLGDRVITTSTRTWALPTYNNHLYKQISSASTGASNDNHYFGYSTPWGYFDFNRFHCHFSPRDWQRLINNNWGFRPKRLNFKLFNIQVKEVTDNNGVKTIANNLTSTVQVFTDSEYQLPYVLGSAHQDCLPPFPADVFMIPQYGYLTLNNGSQAVGRSSFYCLEYFPSQMLRTGNNFTFSYTFEDVPFHSSYAHSQSLDRLMNPLIDQYLYYLSRTQTTGGTANTQTLGFSQGGPNTMANQAKNWLPGPCYRQQRVSTTTGQNNNSNFAWTAGTKYHLNGRNSLANPGIAMATHKDDKERFFPSNGILIFGKQNAARDNADYSDVMLTSEEEIKTTNPVATEEYGIVADNLQQQNTAPQIGTVNSQGALPGMVWQNRDVYLQGPIWAKIPHTDGNFHPSPLMGGFGLKHPPPQILIKNTPVPADPPTTFNQSKLNSFITQYSTGQVSVEIEWELQKENSKRWNPEIQYTSNYYKSTSVDFAVNTEGVYSEPHPIGTRYLTRPL

SEQ ID NO: 1055 - protein, 735 aa, Artificial Sequence
  Description of Artificial Sequence: Synthetic polypeptide
MAADGYLPDWLEDNLSEGIREWWDLKPGAPKPKANQQKQDDGRGLVLPGYKYLGPFNGLDKGEPVNAADAAALEHDKAYDQQLKAGDNPYLRYNHADAEFQERLQEDTSFGGNLGRAVFQAKKRVLEPLGLVEEGAKTAPGKKRPVEQSPQEPDSSSGIGKTGQQPAKKRLNFGQTGDSESVPDPQPLGEPPATPAAVGPTTMASGGGAPMADNNEGADGVGNASGNWHCDSTWLGDVITTSTRTWALPTYNNHLYKQISSASTGASNDNHYFGYSTPWGYFDFNRFHCHFSPRDWQRLINNNWGFRPKRLNFKLFNIQVKEVTQNEGTKTIANNLTSTIQVFTDSEYQLPYVLGSAHQGCLPPFPADVFMIPQYGYLTLNNGSQAVGRSSFYCLEYFPSQMLRTGNNFQFTYTFEDVPFHSSYAHSQSLDRLMNPLIDQYLYYLSRTQTTGGTANTQTLGFSQGGPNTMANQAKNWLPGPCYRQQRVSTTTGQNNNSNFAWTAGTKYHLNGRNSLANPGIAMATHKDDKERFFPSNGILIFGKQNAARDNADYSDVILTSEEEIKTTNPVATEEYGIVADNLQQQNTAPQIGTVNSQGALPGMVWQNRDVYLQGPIWAKIPHTDGNFHPSPLMGGFGLKHPPPQILIKNTPVPADPPTTFNQSKLNSFITQYSTGQVSVEIEWELQKENSKRWNPEIQYTSNYYKSTSVDFAVNTEGVYSEPHPIGTRYLTRPL

SEQ ID NO: 1056 - protein, 736 aa, Artificial Sequence
  Description of Artificial Sequence: Synthetic polypeptide
MAADGYLPDWLEDTLSEGIRQWWKLKPGPPPPKPAERHKDDSRGLVLPGYKYLGPFNGLDKGEPVNEADAAALEHDKAYDRQLDSGDNPYLKYNHADAEFQERLKEDTSFGGNLGRAVFQAKKRVLEPFGLVEEGAKTAPGKKRPVEQSPQEPDSSSGIGKTGQQPAKKRLNFGQTGDSESVPDPQPLGEPPATPAAVGPTTMASGGGAPMADNNEGADGVGNASGNWHCDSTWLGDRVITTSTRTWALPTYNNHLYKQISSTSTGASNDNHYFGYSTPWGYFDFNRFHCHFSPRDWQRLINNNWGFRPKRLNFKLFNIQVKEVTDNNGVKTIANNLTSTVQVFTDSEYQLPYVLGSAHQGCLPPFPADVFMIPQYGYLTLNNGSQAVGRSSFYCLEYFPSQMLRTGNNFTFSYTFEDVPFHSSYAHSQSLDRLMNPLIDQYLYYLSRTQTTGGTANTQTLGFSQGGPNTMANQAKNWLPGPCYRQQRVSTTTGQNNNSNFAWTAGTKYHLNGRNSLANPGIAMATHKDDKERFFPSNGILIFGKQNAARDNADYSDVMLTSEEEIKTTNPVATEEYGIVADNLQQQNTAPQIGTVNSQGALPGMVWQNRDVYLQGPIWAKIPHTDGNFHPSPLMGGFGLKHPPPQILIKNTPVPADPPTTFNQSKLNSFITQYSTGQVSVEIEWELQKENSKRWNPEIQYTSNYYKSTSVDFAVNTEGVYSEPHPIGTRYLTRPL

SEQ ID NO: 1057 - protein, 735 aa, Artificial Sequence
  Description of Artificial Sequence: Synthetic polypeptide
MAADGYLPDWLEDNLSEGIREWWDLKPGAPKPKANQQKQDDGRGLVLPGYKYLGPFNGLDKGEPVNAADAAALEHDKAYDRQLDSGDNPYLRYNHADAEFQERLKEDTSFGGNLGRAVFQAKKRVLEPFGLVEEGAKTAPGKKRPVEQSPQEPDSSSGIGKTGQQPAKKRLNFGQTGDSESVPDPQPLGEPPATPAAVGPTTMASGGGAPMADNNEGADGVGNASGNWHCDSTWLGDRVITTSTRTWALPTYNNHLYKQISSASTGASNDNHYFGYSTPWGYFDFNRFHCHFSPRDWQRLINNNWGFRPKRLNFKLFNIQVKEVTQNEGTKTIANNLTSTIQVFTDSEYQLPYVLGSAHQGCLPPFPADVFMIPQYGYLTLNNGSQAVGRSSFYCLEYFPSQMLRTGNNFQFTYTFEDVPFHSSYAHSQSLDRLMNPLIDQYLYYLSRTQTTGGTANTQTLGFSQGGPNTMANQAKNWLPGPCYRQQRVSTTTGQNNNSNFAWTAGTKYHLNGRNSLANPGIAMATHKDDRSVFFQYRDPDFGKQNAARDNADYSDVMLTSEEEIKTTNPVATEEYGIVADNLQQQNTAPQIGTVNSQGALPGMVWQNRDVYLQGPIWAKIPHTDGNFHPSPLMGGFGLKHPPPQILIKNTPVPADPPTTFNQSKLNSFITQYSTGQVSVEIEWELQKENSKRWNPEIQYTSNYYKSTSVDFAVNTEGVYSEPHPIGTRYLTRPL

SEQ ID NO: 1058 - protein, 736 aa, Artificial Sequence
  Description of Artificial Sequence: Synthetic polypeptide
MAADGYLPDWLEDNLSEGIREWWALKPGAPKPKANQQKQDDGRGLVLPGYKYLGPFNGLDKGEPVNAADAAALEHDKAYDQQLKAGDNPYLKYNHADAEFQERLQGDTSFGGNLGRAVFQAKKRVLEPLGLVEEAAKTAPGKKRPVEQSPQEPDSSAGIGKSGAQPAKKRLNFGQTGDTESVPDPQPLGEPPAAPSGVGPNTMAAGGGAPMADNNEGADGVGSSSGNWHCDSQWLGDRVITTSTRTWALPTYNNHLYKQISSASTGASNDNHYFGYSTPWGYFDFNRFHCHFSPRDWQRLINNNWGFRPKRLNFKLFNIQVKEVTDNNGVKTIANNLTSTVQVFTDSDYQLPYVLGSAHEGCLPPFPADVFMIPQYGYLTLNNGSQAVGRSSFYCLEYFPSQMLRTGNNFQFTYTFEDVPFHSSYAHSQSLDRLMNPLIDQYLYYLSRTQTTGGTANTQTLGFSQGGPNTMANQAKNWLPGPCYRQQRVSTTTGQNNNSNFAWTAGTKYHLNGRNSLANPGIAMATHKDDKERFFPSNGILIFGKQNAARDNADYSDVMLTSEEEIKTTNPVATEEYGIVADNLQQQNTAPQIGTVNSQGALPGMVWQNRDVYLQGPIWAKIPHTDGNFHPSPLMGGFGLKHPPPQILIKNTPVPADPPTTFNQSKLNSFITQYSTGQVSVEIEWELQKENSKRWNPEIQYTSNYYKSTSVDFAVNTEGVYSEPHPIGTRYLTRPL

SEQ ID NO: 1059 - protein, 736 aa, Artificial Sequence
  Description of Artificial Sequence: Synthetic polypeptide
MAADGYLPDWLEDTLSEGIRQWWKLKPGPPPPKPAERHKDDSRGLVLPGYKYLGPFNGLDKGEPVNEADAAALEHDKAYDRQLDSGDNPYLKYNHADAEFQERLKEDTSFGGNLGRAVFQAKKRVLEPFGLVEEAAKTAPGKKRPVEQSPQEPDSSSGIGKTGQQPAKKRLNFGQTGDSESVPDPQPLGEPPATPAAVGPTTMASGGGAPMADNNEGADGVGNASGNWHCDSTWLGDRVITTSTRTWALPTYNNHLYKQISSASTGASNDNHYFGYSTPWGYFDFNRFHCHFSPRDWQRLINNNWGFRPKRLNFKLFNIQVKEVTDNNGVKTIANNLTSTVQVFTDSDYQLPYVLGSAHEGCLPPFPADVFMIPQYGYLTLNNGSQAVGRSSFYCLEYFPSQMLRTGNNFTFSYTFEDVPFHSSYAHSQSLDRLMNPLIDQYLYYLSRTQTTGGTANTQTLGFSQGGPNTMANQAKNWLPGPCYRQQRVSTTTGQNNNSNFAWTAGTKYHLNGRNSLANPGIAMATHKDDKERFFPSNGILIFGKQNAARDNADYSDVMLTSEEEIKTTNPVATEEYGIVADNLQQQNTAPQIGTVNSQGALPGMVWQNRDVYLQGPIWAKIPHTDGNFHPSPLMGGFGLKHPPPQILIKNTPVPADPPTTFNQSKLNSFITQYSTGQVSVEIEWELQKENSKRWNPEIQYTSNYYKSTSVDFAVNTEGVYSEPHPIGTRYLTRPL

SEQ ID NO: 1060 - protein, 736 aa, Artificial Sequence
  Description of Artificial Sequence: Synthetic polypeptide
MAADGYLPDWLEDNLSEGIREWWALKPGAPKPKANQQKQDDGRGLVLPGYKYLGPFNGLDKGEPVNAADAAALEHDKAYDQQLKAGDNPYLRYNHADAEFQERLQEDTSFGGNLGRAVFQAKKRVLEPLGLVEEGAKTAPGKKRPVEQSPQEPDSSSGIGKTGQQPAKKRLNFGQTGDSESVPDPQPLGEPPATPAAVGPTTMASGGGAPMADNNEGADGVGSSSGNWHCDSTWLGDRVITTSTRTWALPTYNNHLYKQISSASTGASNDNHYFGYSTPWGYFDFNRFHCHFSPRDWQRLINNNWGFRPKRLNFKLFNIQVKEVTDNNGVKTIANNLTSTVQVFTDSEYQLPYVLGSAHQGCLPPFPADVFMIPQYGYLTLNNGSQAVGRSSFYCLEYFPSQMLRTGNNFTFSYTFEDVPFHSSYAHSQSLDRLMNPLIDQYLYYLSRTQTTGGTANTQTLGFSQGGPNTMANQAKNWLPGPCYRQQRVSTTTGQNNNSNFAWTAGTKYHLNGRNSLANPGIAMATHKDDKERFFPSNGILIFGKQNAARDNADYSDVMLTSEEEIKTTNPVATEEYGIVADNLQQQNTAPQIGTVNSQGALPGMVWQNRDVYLQGPIWAKIPHTDGNFHPSPLMGGFGLKHPPPQILIKNTPVPADPPTTFNQSKLNSFITQYSTGQVSVEIEWELQKENSKRWNPEIQYTSNYYKSTSVDFAVNTEGVYSEPHPIGTRYLTRPL

SEQ ID NO: 1061 - protein, 737 aa, Artificial Sequence
  Description of Artificial Sequence: Synthetic polypeptide
MAADGYLPDWLEDNLSEGIREWWALKPGAPKPKANQQKQDDGRGLVLPGYKYLGPFNGLDKGEPVNAADAAALEHDKAYDQQLKAGDNPYLRYNHADAEFQERLQEDTSFGGNLGRAVFQAKKRVLEPLGLVEEGAKTAPGKKRPVEQSPQEPDSSSGIGKTGQQPAKKRLNFGQTGDTESVPDPQPIGEPPAAPSGVGSLTMASGGGAPVADNNEGADGVGSSSGNWHCDSQWLGDRVITTSTRTWALPTYNNHLYKQISNSTSGGSSNDNAYFGYSTPWGYFDFNRFHCHFSPRDWQRLINNNWGFRPKRLNFKLFNIQVKEVTQNEGTKTIANNLTSTIQVFTDSEYQLPYVLGSAHQGCLPPFPADVFMIPQYGYLTLNNGSQAVGRSSFYCLEYFPSQMLRTGNNFQFTYTFEDVPFHSSYAHSQSLDRLMNPLIDQYLYYLSRTQTTGGTANTQTLGFSQGGPNTMANQAKNWLPGPCYRQQRVSTTTGQNNNSNFAWTAGTKYHLNGRNSLANPGIAMATHKDDKERFFPSNGILIFGKQNAARDNADYSDVMLTSEEEIKTTNPVATEEYGIVADNLQQQNTAPQIGTVNSQGALPGMVWQNRDVYLQGPIWAKIPHTDGNFHPSPLMGGFGLKHPPPQILIKNTPVPADPPTTFNQSKLNSFITQYSTGQVSVEIEWELQKENSKRWNPEIQYTSNYYKSTSVDFAVNTEGVYSEPHPIGTRYLTRPL

SEQ ID NO: 1062 - protein, 736 aa, Artificial Sequence
  Description of Artificial Sequence: Synthetic polypeptide
MAADGYLPDWLEDNLSEGIREWWALKPGAPKPKANQQKQDDGRGLVLPGYKYLGPFNGLDKGEPVNAADAAALEHDKAYDQQLKAGDNPYLKYNHADAEFQERLQGDTSFGGNLGRAVFQAKKRVLEPLGLVEEAAKTAPGKKRPVEQSPQEPDSSAGIGKSGAQPAKKRLNFGQTGDTESVPDPQPLGEPPAAPSGVGPNTMAAGGGAPMADNNEGADGVGSSSGNWHCDSQWLGDRVITTSTRTWALPTYNNHLYKQISSASTGASNDNHYFGYSTPWGYFDFNRFHCHFSPRDWQRLINNNWGFRPKRLNFKLFNIQVKEVTDNNGVKTIANNLTSTVQVFTDSEYQLPYVLGSAHQGCLPPFPADVFMIPQYGYLTLNNGSQAVGRSSFYCLEYFPSQMLRTGNNFTFSYTFEDVPFHSSYAHSQSLDRLMNPLIDQYLYYLSRTQTTGGTANTQTLGFSQGGPNTMANQAKNWLPGPCYRQQRVSTTTGQNNNSNFAWTAGTKYHLNGRNSLANPGIAMATHKDDKERFFPSNGILIFDKQNAARDNADYSDVMLTSEEEIKTTNPVATEEYGIVADNLQQQNTAPQIGTVNSQGALPGMVWQNRDVYLQGPIWAKIPHTDGNFHPSPLMGGFGLKHPPPQILIKNTPVPADPPTTFNQSKLNSFITQYSTGQVSVEIEWELQKENSKRWNPEIQYTSNYYKSTSVDFAVNTEGVYSEPHPIGTRYLTRPL

SEQ ID NO: 1063 - protein, 736 aa, Artificial Sequence
  Description of Artificial Sequence: Synthetic polypeptide
MAADGYLPDWLEDTLSEGIRQWWKLKPGPPPPKPAERHKDDSRGLVLPGYKYLGPFNGLDKGEPVNEADAAALEHDKAYDRQLDSGDNPYLKYNHADAEFQERLKEDTSFGGNLGRAVFQAKKRVLEPLGLVEEPVKTAPGKKRPVEHSPVEPDSSSGTGKAGQQPARKRLNFGQTGDSESVPDPQPLGEPPATPAAVGPNTMATGSGAPMADNNEGADGVGNSSGNWHCDSTWMGDRVITTSTRTWALPTYNNHLYKQISSASTGASNDNHYFGYSTPWGYFDFNRFHCHFSPRDWQRLINNNWGFRPKRLNFKLFNIQVKEVTDNNGVKTIANNLTSTIQVFTDSEYQLPYVLGSAHQGCLPPFPADVFMIPQYGYLTLNNGSQAVGRSSFYCLEYFPSQMLRTGNNFTFSYTFEDVPFHSSYAHSQSLDRLMNPLIDQYLYYLSRTQTTGGKANTQTLGFSQGGPNTMANQAKNWLPGPCYRQQRVSTTTGQNNNSNFAWTAGTKYHLNGRNSLANPGIAMATHKDDKERFFPSNGILIFGKQNAARDNADYSDVMLTSEEEIKTTNPVATEEYGIVADNLQQQNTAPQIGTVNSQGALPGMVWQNRDVYLQGPIWAKIPHTDGNFHPSPLMGGFGLKHPPPQILIKNTPVPADPPTTFNQSKLNSFITQYSTGQVSVEIEWELQKENSKRWNPEIQYTSNYYKSTSVDFAVNTEGVYSEPHPIGTRYLTRPL

SEQ ID NO: 1064 - protein, 736 aa, Artificial Sequence
  Description of Artificial Sequence: Synthetic polypeptide
MAADGYLPDWLEDNLSEGIREWWALKPGAPKPKANQQKQDDGRGLVLPGYKYLGPFNGLDKGEPVNAADAAALEHDKAYDQQLKAGDNPYLRYNHADAEFQERLQEDTSFGGNLGRAVFQAKKRVLEPFGLVEEGAKTAPGKKRPVEQSPQEPDSSSGIGKTGQQPAKKRLNFGQTGDSESVPDPQPLGEPPATPAAVGPTTMASGGGAPMADNNEGADGVGNASGNWHCDSTWLGDRVITTSTRTWALPTYNNHLYKQISSASTGASNDNHYFGYSTPWGYFDFNRFHCHFSPRDWQRLINNNWGFRPKRLNFKLFNIQVKEVTDNNGVKTIANNLTSTVQVFTDSEYQLPYVLGSAHQGCLPPFPADVFMIPQYGYLTLNNGSQAVGRSSFYCLEYFPSQMLRTGNNFTFSYTFEDVPFHSSYAHSQSLDRLMNPLIDQYLYYLSRTQTTGGTGNTQTLGFSQGGPNTMANQAKNWLPGPCYRQQRVSTTTGQNNNSNFAWTAGTKYHLNGRNSLANPGIAMATHKDDKERFFPSNGILIFGKQNAARDNADYSDVMLTSEEEIKTTNPVATEEYGIVADNLQQQNTAPQIGTVNSQGALPGMVWQNRDVYLQGPIWAKIPHTDGNFHPSPLMGGFGLKHPPPQILIKNTPVPADPPTTFNQSKLNSFITQYSTGQVSVEIEWELQKENSKRWNPEIQYTSNYYKSTSVDFAVNTEGVYSEPHPIGTRYLTRPL

SEQ ID NO: 1065 - protein, 736 aa, Artificial Sequence
  Description of Artificial Sequence: Synthetic polypeptide
MAADGYLPDWLEDNLSEGIREWWDLKPGAPKPKANQQKQDDGRGLVLPGYKYLGPFNGLDKGEPVNAADAAALEHDKAYDQQLKAGDNPYLRYNHADAEFQERLQEDTSFGGNLGRAVFQAKKRVLEPLGLVEEGAKTAPGKKRPVEQSPQEPDSSSGIGKTGQQPAKKRLNFGQTGDSESVPDPQPLGEPPATPAAVGPTTMASGGGAPMADNNEGADGVGSSSGNWHCDSTWLGDRVITTSTRTWALPTYNNHLYKQISSASTGASNDNHYFGYSTPWGYFDFNRFHCHFSPRDWQRLINNNWGFRPKRLNFKLFNIQVKEVTQNEGTKTIANNLTSTIQVFTDSEYQLPYVLGSAHQGCLPPFPADVFMIPQYGYLTLNNGSQAVGRSSFYCLEYFPSQMLRTGNNFTFSYTFEDVPFHSSYAHSQSLDRLMNPLIDQYLYYLSRTQTTGGTANTQTLGFSQGGPNTMANQAKNWLPGPCYRQQRVSTTTGQNNNSNFAWTAGTKYHLNGRNSLANPGIAMATHKDDKERFFPSNGILIFGKQNAARDNADYSDVMLTSEEEIKTTNPVATEEYGIVADNLQQQNTAPQIGTVNSQGALPGMVWQNRDVYLQGPIWAKIPHTDGNFHPSPLMGGFGLKHPPPQILIKNTPVPADPPTTFNQSKLNSFITQYSTGQVSVEIEWELQKENSKRWNPEIQYTSNYYKSTSVDFAVNTEGVYSEPHPIGTRYLTRPL

SEQ ID NO: 1066 - protein, 736 aa, Artificial Sequence
  Description of Artificial Sequence: Synthetic polypeptide
MAADGYLPDWLEDNLSEGIREWWALKPGAPKPKANQQKQDDGRGLVLPGYKYLGPFNGLDKGEPVNAADAAALEHDKAYDQQLKAGDNPYLRYNHADAEFQERLQEDTSFGGNLGRAVFQAKKRVLEPLGLVEEGAKTAPGKKRPVEQSPQEPDSSSGIGKTGQQPAKKRLNFGQTGDSESVPDPQPLGEPPATPAAVGPTTMAAGGGAPMADNNEGADGVGSSSGNWHCDSTWMGDRVITTSTRTWALPTYNNHLYKQISSASTGASNDNHYFGYSTPWGYFDFNRFHCHFSPRDWQRLINNNWGFRPKRLSFKLFNIQVKEVTQNEGTKTIANNLTSTIQVFTDSEYQLPYVLGSAHQGCLPPFPADVFMIPQYGYLTLNNGSQAVGRSSFYCLEYFPSQMLRTGNNFTFSYTFEDVPFHSSYAHSQSLDRLMNPLIDQYLYYLSRTQTTGGTANTQTLGFSQGGPNTMANQAKNWLQGPCYRQQRVSTTTGQNNNSNFAWTAGTKYHLNGRNSLANPGIAMATHKDDKERFFPSNGILIFGKQNAARDNADYSDVMLTSEEEIKTTNPVATEEYGIVADNLQQQNTAPQIGTVNSQGALPGMVWQNLDVYLQGPIWAKIPHTDGNFHPSPLMGGFGLKHPPPQILIKNTPVPADPPTTFNQSKLNSFITQYSTGQVSVEIEWELQKENSKRWNPEIQYTSNYYKSTSVDFAVNTEGVYSEPHPIGTRYLTRPL

SEQ ID NO: 1067 - protein, 737 aa, Artificial Sequence
  Description of Artificial Sequence: Synthetic polypeptide
MAADGYLPDWLEDNLSEGIREWWALKPGAPKPKANQQKQDDGRGLVLPGYKYLGPFNGLDKGEPVNAADAAALEHDKAYDQQLKAGDNPYLRYNHADAEFQERLQEDTSFGGNLGRAVFQAKKRVLEPLGLVEEGAKTAPGKKRPVEPSPQRSPDSSSGIGKTGQQPAKKRLNFGQTGDSESVPDPQPLGEPPATPAAVGPTTMASGGGAPMADNNEGADGVGNASGNWHCDSQWLGDRVITTSTRTWALPTYNNHLYKQISSASTGASNDNHYFGYSTPWGYFDFNRFHCHFSPRDWQRLINNNWGFRPKRLNFKLFNIQVKEVTDNNGVKTIANNLTSTVQVFTDSDYQLPYVLGSAHEGCLPPFPADVFMIPQYGYLTLNNGSQAVGRSSFYCLEYFPSQMLRTGNNFQFTYTFEDVPFHSSYAHSQSLDRLMNPLIDQYLYYLSRTQTTGGTANTQTLGFSQGGPNTMANQAKNWVPGPCYRQQRVSTATGQNNNSNFAWTAGTKYHLKGRNSLANPGIAMATHKDDKERFFPSNGILIFGKQNAARDNADYSDVMLTSEEEIKTTNPVATEEYGIVADNLQQQNTAPQIGTVNSQGALPGMVWQNRDVYLQGPIWAKIPHTDGNFHPSPLMGGFGLKHPPPQILIKNTPVPADPPTTFNQSKLNSFITQYSTGQVSVEIEWELQKENSKRWNPEIQYTSNYYKSTSVDFAVNTEGVYSEPHPIGTRYLTRPL

SEQ ID NO: 1068 - protein, 737 aa, Artificial Sequence
  Description of Artificial Sequence: Synthetic polypeptide
  MOD_RES (226)..(226): Any naturally occurring amino acid
  MOD_RES (233)..(233): Any naturally occurring amino acid
  MOD_RES (239)..(239): Any naturally occurring amino acid
  MOD_RES (250)..(250): Any naturally occurring amino acid
  MOD_RES (253)..(253): Any naturally occurring amino acid
  MOD_RES (255)..(255): Any naturally occurring amino acid
MAADGYLPDWLEDTLSEGIRQWWKLKPGPPPPKPAERHKDDSRGLVLPGYKYLGPFNGLDKGEPVNEADAAALEHDKAYDRQLDSGDNPYLKYNHADAEFQERLKEDTSFGGNLGRAVFQAKKRVLEPLGLVEEGAKTAPGKKRPVEQSPQEPDSSSGIGKTGQQPAKKRLNFGQTGDSESVPDPQPLGEPPATPSGVGPNTMAAGGGAPMADNNEGADGVGSSSXNWHCDSXWLGDRXITTSTRTWALXTYXNXLYKQISNSTSGGATNDNTYFGYSTPWGYFDFNRFHCHFSPRDWQRLINNNWGFRPKRLNFKLFNIQVKEVTQNEGTKTIANNLTSTIQVFTDSEYQLPYVLGSAHQGCLPPFPADVFMIPQYGYLTLNNGSQAVGRSSFYCLEYFPSQMLRTGNNFQFTYTFEDVPFHSSYAHSQSLDRLMNPLIDQYLYYLSRTQTTGGTANTQTLGFSQGGPNTMANQAKNWLPGPCYRQQRVSTTTGQNNNSNFAWTAGTKYHLNGRNSLANPGIAMATHKDDKERFFPSNGILIFGKQNAARDNADYSDVMLTSEEEIKTTNPVATEEYGIVADNLQQQNTAPQIGTVNSQGALPGMVWQNRDVYLQGPIWAKIPHTDGNFHPSPLMGGFGLKHPPPQILIKNTPVPADPPTTFSQAKLASFITQYSTGQVSVEIEWELQKENSKRWNPEVQYTSNYAKSANVDFTVDNNGLYTEPRPIGTRYLTRPL

SEQ ID NO: 1069 - protein, 737 aa, Artificial Sequence
  Description of Artificial Sequence: Synthetic polypeptide
MAADGYLPDWLEDNLSEGIREWWDLKPGAPKPKANQQKQDDGRGLVLPGYKYLGPFNGLDKGEPVNAADAAALEHDKAYDQQLKAGDNPYLRYNHADAEFQERLQEDTSFGGNLGRAVFQAKKRVLEPLGLVEEGAKTAPGKKRPVEPSPQRSPDSSTGIGKKGQQPAKKRLNFGQTGDSESVPDPQPIGEPPAGPSGVGSLTMASGGGAPVADNNEGADGVGSSSGNWHCDSQWLGDRVITTSTRTWALPTYNNHLYKQISSASTGASNDNHYFGYSTPWGYFDFNRFHCHFSPRDWQRLINNNWGFRPKRLNFKLFNIQVKEVTDNDGVKTIANNLTSTIQVFTDSEYQLPYVLGSAHQGCLPPFPADVFMIPQYGYLTLNNGSQAVGRSSFYCLEYFPSQMLRTGNNFTFSYTFEDVPFHSSYAHSQSLDRLMNPLIDQYLYYLSRTQTTGGTANTQTLGFSQGGPNTMANHAKNWLPGPCYRQQRVSTTTGQNNNSNFAWTAGTKYHLNGRNSLANPGIAMATHKDDKERFFPSNGILIFGKQNAARDNADYSDVMLTSEEEIKTTNPVATEEYGIVADNLQQQNTAPQIGTVNSQGALPGMVWQNRDVYLQGPIWAKIPHTDGNFHPSPLMGGFGLKHPPPQILIKNTPVPADPPTTFNQSKLNSFITQYSTGQVSVEIEWELQKENSKRWNPEIQYTSNYYKSTSVDFAVNTEGVYSEPHPIGTRYLTRPL

SEQ ID NO: 1070 - protein, 736 aa, Artificial Sequence
  Description of Artificial Sequence: Synthetic polypeptide
MAADGYLPDWLEDTLSEGIRQWWKLKPGPPPPKPAERHKDDSRGLVLPGYKYLGPFNGLDKGEPVNEADAAALEHDKAYDRQLDSGDNPYLKYNHADAEFQERLKEDTSFGGNLGRAVFQAKKRVLEPLGLVEEPVKTAPGKKRPVEHSPVEPDSSSGTGKAGQQPAKKRLNFGQTGDSESVPDPQPLGEPPATPAAVGPTTMASGGGAPMADNNEGADGVGNASGNWHCDSTWLGDRVITTSTRTWALPTYNNHLYKQISSASTGASNDNHYFGYSTPWGYFDFNRFHCHFSPRDWQRLINNNWGFRPKRLNFKLFNIQVKEVTQNEGTKTIANNLTSTIQVFTDSEYQLPYVLGSAHQGCLPPFPADVFMIPQYGYLTLNNGSQAVGRSSFYCLEYFPSQMLRTGNNFQFTYTFEDVPFHSSYAHSQSLDRLMNPLIDQYLYYLSRTQTTGGTANTQTLGFSQGGPNTMANQAKNWLPGPCYRQQRVSTTTGQNNNSNFAWTAGTKYHLNGRNSLANPGIAMATHKDDKERFFPSNGILIFGKQNAARDNADYSDVMLTSEEEIKTTNPVATEEYGIVADNLQQQNTAPQIGTVNSQGALPGMVWQNRDVYLQGPIWAKIPHTDGNFHPSPLMGGFGLKHPPPQILIKNTPVPADPPTTFNQSKLNSFITQYSTGQVSVEIEWELQKENSKRWNPEIQYTSNYYKSTSVDFAVNTEGVYSEPHPIGTRYLTRPL

SEQ ID NO: 1071 - protein, 736 aa, Artificial Sequence
  Description of Artificial Sequence: Synthetic polypeptide
MAADGYLPDWLEDNLSEGIREWWALKPGAPKPKANQQKQDDGRGLVLPGYKYLGPFNGLDKGEPVNAADAAALEHDKAYDQQLQAGDNPYLRYNHADAEFQERLQGDTSFGGNLGRAVFQAKKRVLEPLGLVEEGAKTAPGKKRPVEQSPQEPDSSSGIGKTGQQPAKKRLNFGQTGDSESVPDPQPLGEPPATPAAVGPTTMASGGGAPMADNNEGADGVGNASGNWHCDSTWLGDRVITTSTRTWALPTYNNHLYKQISSASTGASNDNHYFGYSTPWGYFDFNRFHCHFSPRDWQRLINNNWGFRPKRLNFKLFNIQVKEVTDNNGVKTIANNLTSTIQVFTDSEYQLPYVLGSAHQGCLPPFPADVFMIPQYGYLTLNNGSQAVGRSSFYCLEYFPSQMLRTGNNFQFTYTFEDVPFHSSYAHSQSLDRLMNPLIDQYLYYLSRTQTTGGTANTQTLGFSQGGPNTMANQAKNWLPGPCYRQQRVSTTTGQNNNSNFAWTAGTKYHLNGRNSLANPGIAMATHKDDKERFFPSNGILIFGKQNAARDNADYSDVMLTSEEEIKTTNPVATEEYGIVADNLQQQNTAPQIGTVNSQGALPGMVWQNRDVYLQGPIWAKIPHTDGNFHPSPLMGGFGLKHPPPQILIKNTPVPADPPTTFNQSKLNSFITQYSTGQVSVEIEWELQKENSKRWNPEIQYTSNYYKSTSVDFAVNTEGVYSEPHPIGTRYLTRPL

SEQ ID NO: 1072 - protein, 738 aa, Artificial Sequence
  Description of Artificial Sequence: Synthetic polypeptide
MAADGYLPDWLEDTLSEGIRQWWKLKPGPPPPKPAERHKDDSRGLVLPGYKYLGPFNGLDKGEPVNAADAAALEHDKAYDQQLKAGDNPYLRYNHADAEFQERLKEDTSFGGNLGRAVFQAKKRVLEPLGLVEEGAKTAPGKKRPVEPSPQRSPDSSTGIGKKGQQPARKRLNFGQTGDSESVPDPQPLGEPPAAPSGVGPNTMAAGGGAPMADNNEGADGVGSSSGNWHCDSQWLGDRVITTSTRTWALPTYNNHLYKQISNSTSGGSSNDNAYFGYSTPWGYFDFNRFHCHFSPRDWQRLINNNWGFRPKRLNFKLFNIQVKEVTDNNGVKTIANNLTSTVQVFTDSEYQLPYVLGSAHQGCLPPFPADVFMIPQYGYLTLNNGSQAVGRSSFYCLEYFPSQMLRTGNNFTFSYTFEDVPFHSSYAHSQSLDRLMNPLIDQYLYYLSRTQTTGGTANTQTLGFSQGGPNTMANQAKNWLPGPCYRQQRVSTTTGQNNNSNFAWTAGTKYHLNGRNSLANPGIAMATHKDDKERFFPSNGILIFGKQNAARDNADYSDVMLTSEEEIKTTNPVATEEYGIVADNLQQQNTAPQIGTVNSQGALPGMVWQNRDVYLQGPIWAKIPHTDGHFHPSPLMGGFGLKHPPPQILIKNTPVPANPPTTFNQSKLNSFITQYSTGQVSVEIEWELQKENSKRWNPEVQYTSNYAKSANVDFTVDNNGLYTEPRPIGTRYLTRPL

SEQ ID NO: 1073 - protein, 738 aa, Artificial Sequence; identical to SEQ ID NO: 1072
  Description of Artificial Sequence: Synthetic polypeptide

SEQ ID NO: 1074 - protein, 736 aa, Artificial Sequence
  Description of Artificial Sequence: Synthetic polypeptide
MAADGYLPDWLEDNLSEGIREWWALKPGAPKPKANQQKQDDGRGLVLPGYKYLGPFNGLDKGEPVNAADAAALEHDKAYDQQLKAGDNPYLRYNHADAEFQERLQEDTSFGGNLGRAVFQAKKRLLEPLGLVEEGAKTAPGKKRPVEQSPQEPDSSSGIGKTGQQPAKKRLNFGQTGDSESVPDPQPLGEPPATPAAVGPTTMASGGGAPMADNNEGADGVGNSSGNWHCDSTWMGDRVITTSTRTWALPTYNNHLYKQISSASTGASNDNHYFGYSTPWGYFDFNRFHCHFSPRDWQRLINNNWGFRPKRLNFKLFNIQVKEVTQNEGTKTIANNLTSTIQVFTDSEYQLPYVLGSAHQGCLPPFPADVFIIPQYGYLTLNNGSQAVGRSSFYCLEYFPSQMLRTGNNFTFSYTFEDVPFHSSYAHSQSLDRLMNPLIDQYLYYLSRTQTTGGTANTQTLGFSQGGPNTMANQAKNWLPGPCYRQQRVSTTTGQNNNSNFAWTAGTKYHLNGRNSLANPGIAMATHKDDKERFFPSNGILIFGKQNAARDNADYSDVMLTSEEEIKTTNPVATEEYGIVADNLQQQNTAPQIGTVNSQGALPGMVWQNRDVYLQGPIWAKIPHTDGNFHPSPLMGGFGLKHPPPQILIKNTPVPADPPTTFNQSKLNSFITQYSTGQVSVEIEWELQKENSKRWNPEIQYTSNYYKSTSVDFAVNTEGVYSEPHPIGTRYLTRPL

SEQ ID NO: 1075 - protein, 736 aa, Artificial Sequence
  Description of Artificial Sequence: Synthetic polypeptide
MAADGYLPDWLEDNLSEGIREWWALKPGAPKPKANQQKQDDGRGLVLPGYKYLGPFNGLDKGEPVNAADAAALEHDKAYDQQLKAGDNPYLRYNHADAEFQERLQEDTSFGGNLGRAVFQAKKRVLEPFGLVEEAAKTAPGKKRPVEQSPQEPDSSSGIGKTGQQPAKKRLNFGQTGDSESVPDPQPLGEPPATPAAVGPTTMASGGGAPMADNNEGADGVGNASGNWHCDSTWLGDRVITTSTRTWALPTYNNHLYKQISSASTGASNDNHYFGYSTPWGYFDFNRFHCHFSPRDWQRLINNNWGFRPKRLNFKLFNIQVKEVTQNEGTKTIANNLTSTIQVFTDSEYQLPYVLGSAHQGCLPPFPADVFMIPQYGYLTLNNGSQAVGRSSFYCLEYFPSQMLRTGNNFTFSYTFEDVPFHSSYAHSQSLDRLMNPLIDQYLYYLSRTQTTGGTANTQTLGFSQGGPNTMANHAKNWLPGPCYRQQRVSTTTGQNNNSNFAWTAGTKYHLNGRNSLANPGIAMATHKDDKERFFPSNGILIFGKQNAARDNADYSDVMLTSEEEIKTTNPVATEEYGIVADNLQQQNTAPQIGTVNSQGALPGMVWQNRDVYLQGPIWAKIPHTDGNFHPSPLMGGFGLKHPPPQILIKNTPVPADPPTTFNQSKLNSFITQYSTGQVSVEIEWELQKENSKRWNPEIQYTSNYYKSTSVDFAVNTEGVYSEPHPIGTRYLTRPL

SEQ ID NO: 1076 - protein, 736 aa, Artificial Sequence
  Description of Artificial Sequence: Synthetic polypeptide
MAADGYLPDWLEDNLSEGIREWWALKPGAPKPKANQQKQDDGRGLVLPGYKYLGPFNGLDKGEPVNEADAAALEHDKAYDQQLKAGDNPYLRYNHADAEFQERLQEDTSFGGNLGRAVFQAKKRLLEPLGLVEEAAKTAPGKKRPVEQSPQEPDSSAGIGKSGAQPAKKRLNFGQTGDSESVPDPQPLGEPPATPAAVGPTTMASGGGAPMADNNEGADGVGNASGNWHCDSTWLGDRVITTSTRTWALPTYNNHLYKQISSASTGASNDNHYFGYSTPWGYFDFNRFHCHFSPRDWQRLINNNWGFRPKRLNFKLFNIQVKEVTDNDGVKTIANNLTSTIQVFTDSEYQLPYVLGSAHQGCLPPFPADVFMIPQYGYLTLNNGSQAVGRSSFYCLEYFPSQMLRTGNNFQFTYTFEDVPFHSSYAHSQSLDRLMNPLIDQYLYYLSRTQTTGGTANTQTLGFSQGGPNTMANQAKNWLPGPCYRQQRVSTTTGQNNNSNFAWTAGTKYHLNGRNSLANPGIAMATHKDDKERFFPSNGILIFGKQNAARDNADYSDVMLTSEEEIKTTNPVATEEYGIVADNLQQQNTAPQIGTVNSQGALPGMVWQNRDVYLQGPIWAKIPHTDGNFHPSPLMGGFGLKHPPPQILIKNTPVPADPPTTFNQSKLNSFITQYSTGQVSVEIEWELQKENSKRWNPEIQYTSNYYKSTSVDFAVNTEGVYSEPHPIGTRYLTRPL

SEQ ID NO: 1077 - protein, 736 aa, Artificial Sequence
  Description of Artificial Sequence: Synthetic polypeptide
MAADGYLPDWLEDNLSEGIREWWALKPGAPKPKANQQKQDDGRGLVLPGYKYLGPFNGLDKGEPVNAADAAALEHDKAYDQQLKAGDNPYLRYNHADAEFQERLQEDTSFGGNLGRAVFQAKKRVLEPLGLVEEGAKTAPGKKRPVEQSPQEPDSSAGIGKTGAQPAKKRLNFGQTGDSESVPDPQPLGEPPATPAAVGPTTMASGGGAPMADNNEGADGVGSASGNWHCDSTWLGDRVITTSTRTWALPTYNNHLYKQISSASTGASNDNHYFGYSTPWGYFDFNRFHCHFSPRDWQRLINNNWGFRPKRLNFKLFNIQVKEVTDNNGVKTIANNLTSTIQVFTDSEYQLPYVLGSAHQGCLPPFPADVFMIPQYGYLTLNNGSQAVGRSSFYCLEYFPSQMLRTGNNFTFSYTFEDVPFHSSYAHSQSLDRLMNPLIDQYLYYLSRTQTTGGTANTQTLGFSQGGPNTMANQAKNWLPGPCYRQQRVSTTTGQNNNSNFAWTAGTKYHLNGRNSLANPGIAMATHKDDKERFFPSNGILIFGKQNAARDNADYSDVMLTSEEEIKTTNPVATEEYGIVADNLQQQNTAPQIGTVNSQGALPGMVWQNRDVYLQGPIWAKIPHTDGNFHPSPLMGGFGLKHPPPQILIKNTPVPADPPTTFNQSKLNSFITQYSTGQVSVEIEWELQKENSKRWNPEIQYTSNYYKSTSVDFAVNTEGVYSEPHPIGTRYLTRPL

SEQ ID NO: 1078 - protein, 736 aa, Artificial Sequence
  Description of Artificial Sequence: Synthetic polypeptide
MAADGYLPDWLEDNLSEGIREWWDLKPGAPKPKANQQKQDDGRGLVLPGYKYLGPFNGLDKGEPVNAADAAALEHDKAYDQQLKAGDNPYLRYNHADAEFQERLQEDTSFGGNLGRAVFQAKKRLLEPLGLVEEAAKTAPGKKRPVEQSPQEPDSSAGIGKSGAQPAKKRLNFGQTGDTESVPDPQPIGEPPAAPSGVGPNTMAAGGGAPMADNNEGADGVGSSSGNWHCDSQWLGDRVITTSTRTWALPTYNNHLYKQISSASTGASNDNHYFGYSTPWGYFDFNRFHCHFSPRDWQRLINNNWGFRPKRLNFKLFNIQVKEVTQNEGTKTIANNLTSTIQVFTDSEYQLPYVLGSAHQGCLPPFPADVFMIPQYGYLTLNNGSQAVGRSSFYCLEYFPSQMLRTGNNFQFTYTFEDVPFHSSYAHSQSLDRLMNPLIDQYLYYLSRTQTTGGTANTQTLGFSQGGPNTMANHAKNWLPGPCYRQQRVSTTTGQNNNSNFAWTAGTKYHLNGRNSLANPGIAMATHKDDKERFFPSNGILIFGKQNAARDNADYSDVMLTSEEEIKTTNPVATEEYGIVADNLQQQNTAPQIGTVNSQGALPGMVWQNRDVYLQGPIWAKIPHTDGNFHPSPLMGGFGLKHPPPQILIKNTPVPADPPTTFNQSKLNSFITQYSTGQVSVEIEWELQKENSKRWNPEIQYTSNYYKSTSVDFAVNTEGVYSEPHPIGTRYLTRPL

SEQ ID NO: 1079 - protein, 737 aa, Artificial Sequence; identical to SEQ ID NO: 1061
  Description of Artificial Sequence: Synthetic polypeptide

SEQ ID NO: 1080 - protein, 737 aa, Artificial Sequence
  Description of Artificial Sequence: Synthetic polypeptide
MAADGYLPDWLEDNLSEGIREWWALKPGAPKPKANQQKQDDGRGLVLPGYKYLGPFNGLDKGEPVNAADAAALEHDKAYDQQLKAGDNPYLRYNHADAEFQERLKEDTSFGGNLGRAVFQAKKRVLEPFGLVEEGAKTAPGKKRPVEQSPQEPDSSSGIGKTGQQPAKKRLNFGQTGDSESVPDPQPLGEPPAAPSGVGPNTMAAGGGAPMADNNEGADGVGSSSGNWHCDSQWLGNRVITTSTRTWALPTYNNHLYKQISNSTSGGSSNDNAYFGYSTPWGYFDFNRFHCHFSPRDWQRLINNNWGFRPKRLNFKLFNIQVKEVTDNNGVKTIANNLTSTVQVFTDSEYQLPYVLGSAHQGCLPPFPADVFMIPQYGYLTLNNGSQAVGRSSFYCLEYFPSQMLRTGNNFQFTYTFEDVPFHSSYAHSQSLDRLMNPLIDQYLYYLSRTQTTGGTANTQTLGFSQGGPNTMANQAKNWLPGPCYRQQRVSTTTGQNNNSNFAWTAGTKYHLNGRNSLANPGIAMATHKDDKERFFPSNGILIFGKQNAARDNADYSDVMLTSEEEIKTTNPVATEEYGIVADNLQQQNTAPQIGTVNSQGALPGMVWQNRDVYLQGPIWAKIPHTDGNFHPSPLMGGFGLKHPPPQILIKNTPVPADPPTTFNQSKLNSFITQYSTGQVSVEIEWELQKENSKRWNPEIQYTSNYYKSTSVDFAVNTEGVYSEPHPIGTRYLTRPL

SEQ ID NO: 1081 - protein, 736 aa, Artificial Sequence
  Description of Artificial Sequence: Synthetic polypeptide
MAADGYLPDWLEDNLSEGIREWWDLKPGAPKPKANQQKQDDGRGLVLPGYKYLGPFNGLDRGEPVNAADAAALEHDKAYDQQLKAGDNPYLRYNHADAEFQERLQEDTSFGGNLGRAVFQAKKRVLEPLGLVEEGAKTAPGKKRPVEQSPQEPDSSSGIGKTGQQPAKKRLNFGQTGDSESVPDPQPLGEPPATPAAVGPTTMASGGGAPMADNNEGADGVGNASGNWHCDSTWLGDRVITTSTRTWALPTYNNHLYKQISSASTGASNDNHYFGYSTPWGYFDFNRFHCHFSPRDWQRLINNNWGFRPKRLNFKLFNIQVKEVTDNNGVKTIANNLTSTIQVFTDSEYQLPYVLGSAHQGCLPPFPADVFMIPQYGYLTLNNGSQAVGRSSFYCLEYFPSQMLRTGNNFQFTYTFEDVPFHSSYAHSQSLDRLMNPLIDQYLYYLSRTQTTGGTANTQTLGFSQGGPNTMANQAKNWLPGPCYRQQRVSTTTGQNNNSNFAWTAGTKYHLNGRNSLANPGIAMATHKDDKERFFPSNGILIFGKQNAARDNADYSDVMLTSEEEIKTTNPVATEEYGIVADNLQQQNTAPQIGTVNSQGALPGMVWQNRDVYLQGPIWAKIPHTDGNFHPSPLMGGFGLKHPPPQILIKNTPVPADPPTTFNQSKLNSFITQYSTGQVSVEIEWELQKENSKRWNPEIQYTSNYYKSTSVDFAVNTEGVYSEPHPIGTRYLTRPL

SEQ ID NO: 1082 - protein, 736 aa, Artificial Sequence
  Description of Artificial Sequence: Synthetic polypeptide
MAADGYLPDWLEDNLSEGIREWWDLKPGAPKPKANQQKQDDGRGLVLPGYKYLGPFNGLDKGEPVNAADAAALEHDKAYDQQLKAGDNPYLRYNHADAEFQERLQEDTSFGGNLGRAVFQAKKRVLEPLGLVEEGAKTAPGKKRPVEQSPQEPDSSSGIGKKGQQPARKRLNFGQTGDSESVPDPQPLGEPPAAPSGVGSLTMASGGGAPMADNNEGADGVGNASGNWHCDSTWLGDRVITTSTRTWALPTYNNHLYKQISSASTGASNDNHYFGYSTPWGYFDFNRFHCHFSPRDWQRLINNNWGFRPKRLNFKLFNIQVKEVTQNEGTKTIANNLTSTVQVFTDSDYQLPYVLGSAHQGCLPPFPADVFMIPQYGYLTLNNGSQAVGRSSFYCLEYFPSQMLRTGNNFQFTYTFEDVPFHSSYAHSQSLDRLMNPLIDQYLYYLSRTQTTGGTANTQTLGFSQGGPNTMANQAKNWLPGPCYRQQRVSTTTGQNNNSNFAWTAGTKYHLNGRNSLSNPGIAMATHKDDKERFFPSNGILIFGKQNAARDNADYSDVMLTSEEEIKTTNPVATEEYGIVADNLQQQNTAPQIGTVNSQGALPGMVWQNRDMYLQGPIWAKIPHTDGNFHPSPLMGGFGLKHPPPQILIKNTPVPADPPTTFNQSKLNSFITQYSTGQVSVEIEWELQKENSKRWNPEIQYTSNYYKSTSVDFAVNTEGVYSEPHPIGTRYLTRPL

SEQ ID NO: 1083 - protein, 736 aa, Artificial Sequence
  Description of Artificial Sequence: Synthetic polypeptide
MAADGYLPDWLEDNLSEGIREWWALKPGAPKPKANQQKQDDGRGLVLPGYKYLGPFNGLDKGEPVNAADAAALEHDKAYDQQLKAGDNPYLRYNHADAEFQERLQEDTSFGGNLGRAVFQAKKRVLEPFGLVEEGAKTAPGKKRPVEQSPQEPDSSSGIGKTGQQPAKKRLNFGQTGGSESVPDPQPLGEPPATPAAVGPTTMAAGGGAPMADNNEGADGVGSSSGNWHCDSTWLGDRVITTSTRTWALPTYNNHLYKQISSASTGASNDNHYFGYSTPWGYFDFNRFHCHFSPRDWQRLINNNWGFRPKRLNFKLFNIQVKEVTDNNGVKTIANNLTSTVQVFTDSEYQLPYVLGSAHQGCLPPFPADVFMIPQYGYLTLNNGSQAVGRSSFYCLEYFPSQMLRTGNNFTFSYTFEEVPFHSSYAHSQSLDRLMNPLIDQYLYYLSRTQTTGGTANTQTLGFSQGGPNTMANQAKNWLPGPCYRQQRVSTTTGQNNNSNFAWTAGTKYHLNGRNSLANPGIAMASHKDDKERFFPSNGILIFGKQNAARDNADYSDVMLTSEEEIKTTNPVATEEYGIVADNLQQQNTAPQIGTVNSQGALPGMVWQNRDVYLQGPIWAKIPHTDGNFHPSPLMGGFGLKHPPPQILIKNTPVPADPPTTFNQSKLNSFITQYSTGQVSVEIEWELQKENSKRWNPEIQYTSNYYKSTSVDFAVNTEGVYSEPHPIGTRYLTRPL

SEQ ID NO: 1084 - DNA, 2211 bp, Artificial Sequence
  Description of Artificial Sequence: Synthetic polynucleotide
atggctgccgatggttatcttccagattggctcgaggacaacctctctgagggcattcgcgagtggtgggacttgaaacctgcatccccgaaacccaaagccaaccagcaaaagcaggacgacggccggggtctggtgcttcctggctacaagtacctcggacccttcaacggactcgacaagggggagcccgtcaacgcggcggacgcagcggccctcgagcacgacaaggcctacgaccagcagctcaaagcgggtgacaatccgtacctgcggtataaccacgccgacgccgagtttcaggagcgtctgcaagaagatacgtcttttgggggcaacctcgggcgagcagtcttccaggccaaaaagaggcttcttgaacctcttggtctggttgaggaagcggctaagacggctcctggaaagaagaggcctgtagagcagtctcctcaggaaccggactcctccgcgggtattggcaaatcgggtgcacagcccgccaaaaagagactcaatttcggtcagactggcggcacagagtcagttccagaccctcaacctctcggagaacctccagcagcgccctctggtgtgggacctaatacaatggctgcaggcggtggcgcaccaatggcagacaataacgaaggcgccgacggagtgggtagttcctcgggaaattggcattgcgattccacatggctgggcgacagagtcatcaccaccagcaccagaacctgggccctgcccacttacaacaaccatctctacaagcaaatctccagtgcttcaacgggggccagcaacgacaaccactacttcggctacagcaccccctgggggtattttgatttcaacagattccactgccacttctcaccacgtgactggcagcgactcatcaacaacaactggggattccggcccaagagactcagcttcaagctcttcaacatccaggtcaaggaggtcacgcagaatgaaggcaccaagaccatcgccaataacctcaccagcaccatccaggtgtttacggactcggagtaccagctgccgtacgttctcggctctgcccaccagggctgcctgcctccgttcccggcggacgtgttcatgattccccagtacggatacctaacactcaacaacggtagtcaggccgtgggacgctcctccttctactgcctggaatactttccttcgcagatgctgagaaccggcaacaacttccagtttacttacaccttcgaggacgtgcctttccacagcagctacgcccacagccagagcttggaccggctgatgaatcctctgattgaccagtacctgtactacttgtctcggactcaaacaacaggaggcacggcaaatacgcagactctgggcttcagccaaggtgggcctaatacaatggccaatcaggcaaagaactggctgccaggaccctgttaccgccaacaacgcgtctcaacgacaaccgggcaaaacaacaatagcaactttgcctggactgctgggaccaaataccatctgaatggaagaaattcattggctaatcctggcatcgctatggcaacacacaaagacgacaaggagcgtttttttcccagtaacgggatcctgatttttggcaaacaaaatgctgccagagacaatgcggattacagcgatgtcatgctcaccagcgaggaagaaatcaaaaccactaaccctgtggctacagaggaatacggtatcgtggcagataacttgcagcagcaaaacacggctcctcaaattggaactgtcaacagccagggggccttacccggtatggtctggcagaaccgggacgtgtacctgcagggtcccatctgggccaagattcctcacacggacggcaacttccacccgtctccgctgatgggcggctttggcctgaaacatcctccgcctcagatcctgatcaagaacacgcctgtacctgcggatcctccgaccaccttcaaccagtcaaagctgaactctttcatcacgcaatacagcaccggacaggtcagcgtggaaattgaatgggagctgcagaaggaaaacagcaagcgctggaaccccgagatccagtacacctccaactactacaaatctacaagtgtggactttgctgttaatacagaaggcgtgtactctgaaccccaccccattggcacccgttacctcacccgtcccctgtaa

SEQ ID NO: 1085 - DNA, 2211 bp, Artificial Sequence
  Description of Artificial Sequence: Synthetic polynucleotide
atggctgccgatggttatcttccagattggctcgaggacaacctctctgagggcattcgcgagtggtgggacttgaaacctggagccccgaaacccaaagccaaccagcaaaagcaggacgacggccggggtctggtgcttcctggctacaagtacctcggacccttcaacggactcgacaagggggagcccgtcaacgcggcggacgcagcggccctcgagcacgacaaggcctacgaccagcagctcaaagcgggtgacaatccgtacctgcggtataaccacgccgacgccgagtttcaggagcgtctgcaagaagatacgtcttttgggggcaacctcgggcgagcagtcttccaggccaagaagagggttctcgaaccttttggtctggttgaggaaggcgctaagacggctcctggaaagaaacgtccggtagagcagtcgccacaagagccagactcctcctcgggcattggcaagacaggccagcagcccgctaaaaagagactcaattttggtcagactggcgactcagagtcagtccccgacccacaacctctcggagaacctccagcaacccccgctgctgtgggacctactacaatggcttcaggtggtggcgcaccaatggcagacaataacgaaggcgccgacggagtgggtaatgcctcaggaaattggcattgcgattcccaatggctgggggacagagtcatcaccaccagcacccgaacctgggccctgcccacctacaacaatcacctctacaagcaaatctccagtgcttcaacgggggccagcaacgacaaccactacttcggctacagcaccccctgggggtattttgatttcaacagattccactgccatttctcaccacgtgactggcagcgactcatcaacaacaattggggattccggcccaagagactcaacttcaaactcttcaacatccaagtcaaggaggtcacgcagaatgaaggcaccaagaccatcgccaataacctcaccagcaccatccaggtgtttacggactcggagtaccagctgccgtacgttctcggctccgcccaccagggctgcctgcctccgttcccggcggacgtgttcatgattccccagtacggctacctaacactcaacaacggtagtcaggccgtgggacgctcctccttctactgcctggaatactttccttcgcagatgctgagaaccggcaacaacttccagtttacttacaccttcgaggacgtgcctttccacagcagctacgcccacagccagagcttggaccggctgatgaatcctctgattgaccagtacctgtactacttgtctcggactcaaacaacaggaggcacggcaaatacgcagactctgggcttcagccaaggtgggcctaatacaatggccaatcaggcaaagaactggctgccaggaccctgttaccgccaacaacgcgtctcaacgacaaccgggcaaaacaacaatagcaactttgcctggactgctgggaccaaataccatctgaatggaagaaattcattggctaatcctggcatcgctatggcaacacacaaagacgacaaggagcgtttttttcccagtaacgggatcctgatttttggcaaacaaaatgctgccagagacaatgcggattacagcgatgtcatgctcaccagcgaggaagaaatcaaaaccactaaccctgtggctacagaggaatacggtatcgtggcagataacttgcagcagcaaaacacggctcctcaaattggaactgtcaacagccagggggccttacccggtatggtctggcagaaccgggacgtgtacctgcagggtcccatctgggccaagattcctcacacggacggcaacttccacccgtctccgctgatgggcggctttggcctgaaacatcctccgcctcagatcctgatcaagaacacgcctgtacctgcggatcctccgaccaccttcaaccagtcaaagctgaactctttcatcacgcaatacagcaccggacaggtcagcgtggaaattgaatgggagctgcagaaggaaaacagcaagcgctggaaccccgagatccagtacacctccaactactacaaatctacaagtgtggactttgctgttaatacagaaggcgtgtactctgaaccccaccccattggcacccgttacctcacccgtcccctgtaa

SEQ ID NO: 1086 - DNA, 2211 bp, Artificial Sequence
  Description of Artificial Sequence: Synthetic polynucleotide
atggctgccgatggttatcttccagattggctcgaggacaacctctctgagggcattcgcgagtggtgggacttggaacctggagccccgaagcccaaagccaaccagcaaaagcaggacgacggccggggtctggtgcttcctggctacaagtacctcggacccttcaacggactcgacaagggggagcccgtcaacgcggcggacgcagcggccctcgagcacgacaaggcctacgaccagcagctcaaagcgggtgacaatccgtacctgcggtataaccacgccgacgccgagtttcaggagcgtctgcaagaagatacgtcttttgggggcaacctcgggcgagcagtcttccaggccaagaagcgggttctcgaacctctcggtctggttgaggaaggcgctaagacggctcctggaaagaaacgtccggtagagcagtcgccacaagagccagactcctcctcgggcatcggcaagacaggccagcagcccgctaaaaagagactcaattttggtcagactggcgactcagagtcagtccccgatccacaacctctcggagaacctccagcaacccccgctgctgtgggacctactacaatggcttcaggcggtggcgcaccaatggcagacaataacgaaggcgccgacggagtgggtaatgcctcaggaaattggcattgcgattccacatggctgggcgacagagtcatcaccaccagcacccgcacctgggccttgcccacctacaataaccacctctacaagcaaatctccagtgcttcaacaggggccagcaacgacaaccactacttcggctacagcaccccctgggggtattttgacttcaacagattccactgccacttctcaccacgtgactggcagcgactcatcaacaacaactggggattccggcctaagcgactcaacttcaagctcttcaacattcaggtcaaagaggttacggacaacaatggagtcaagaccatcgccaataaccttaccagcacggtccaggtcttcacggactcggagtaccagttgccgtacgtcctcggctctgcgcaccagggctgcctccctccgttcccggcggacgtgttcatgattccgcagtacggctacctaacgctcaacaacggtagtcaggccgtgggacgctcctccttctactgcctggaatactttccttcgcagatgctgagaaccggcaacaacttccagtttacttacaccttcgaggacgtgcctttccacagcagctacgcccacagccagagcttggaccggctgatgaatcctctgattgaccagtacctgtactacttgtctcggactcaaacaacaggaggcacggcaaatacgcagactctgggcttcagccaaggtgggcctaatacaatggccaatcaggcaaagaactggctgccaggaccctgttaccgccaacaacgcgtctcaacgacaaccgggcaaaacaacaatagcaactttgcctggactgctgggaccaaataccatctgaatggaagaaattcattggctaatcctggcatcgctatggcaacacacaaagacgacaaggagcgtttttttcccagtaacgggatcctgatttttggcaaacaaaatgctgccagagacaatgcggattacagcgatgtcatgctcaccagcgaggaagaaatcaaaaccactaaccctgtggctacagaggaatacggtatcgtggcagataacttgcagcagcaaaacacggctcctcaaattggaactgtcaacagccagggggccttacccggtatggtctggcagaaccgggacgtgtacctgcagggtcccatctgggccaagattcctcacacggacggcaacttccacccgtctccgctgatgggcggctttggcctgaaacatcctccgcctcagatcctgatcaagaacacgcctgtacctgcggatcctccgaccaccttcaaccagtcaaagctgaactctttcatcacgcaatacagcaccggacaggtcagcgtggaaattgaatgggagctgcagaaggaaaacagcaagcgctggaaccccgagatccagtacacctccaactactacaaatctacaagtgtggactttgctgttaatacagaaggcgtgtactctgaaccccaccccattggcacccgttacctcacccgtcccctgtaa

SEQ ID NO: 1087 - DNA, 2211 bp, Artificial Sequence
  Description of Artificial Sequence: Synthetic polynucleotide
atggctgccgatggttatcttccagattggctcgaggacactctctctgaaggaataagacagtggtggaagctcaaacctggcccaccaccaccaaagcccgcagagcggcataaggacgacagcaggggtcttgtgcttcctgggtacaagtacctcggacccttcaacggactcgacaagggagagccggtcaacgaggcagacgccgcggccctcgagcacgacaaagcctacgaccggcagctcgacagcggagacaacccgtacctcaagtacaaccacgccgacgcggagtttcaggagcgccttaaagaagatacgtcttttgggggcaacctcgggcgagcagtcttccaggccaagaagagggttctcgaaccttttggtctggttgaggaaggtgctaagacggctcctggaaagaaacgtccggtagagcagtcgccacaagagccagactcctcctcgggcattggcaagacaggccagcagcccgctaaaaagagactcaattttggtcagactggcgactcagagtcagtccccgacccacaacctctcggagaacctccagcaacccccgctgctgtgggacctactacaatggcttcaggcggtggcgcaccaatggcagacaataacgaaggcgccgacggagtgggtaatgcctcaggaaattggcattgcgattccacatggctgggcgacagagtcatcaccaccagcacccgaacatgggccttgcccacctataacaaccacctctacaagcaaatctccagtgcttcaacgggggccagcaacgacaaccactacttcggctacagcaccccctgggggtattttgacttcaacagattccactgccacttctcaccacgtgactggcagcgactcatcaacaacaactggggattccggcctaagcgactcaacttcaagctcttcaacattcaggtcaaagaggttacggacaacaatggagtcaagaccatcgccaataaccttaccagcacggtccaggtcttcacggactcagactatcagctcccgtacgtgctcgggtcggctcacgagggctgcctcccgccgttcccagcggacgttttcatgattcctcagtacggctacctaacactcaacaacggtagtcaggccgtgggacgctcctccttctactgcctggaatactttccttcgcagatgctgagaaccggcaacaacttccagtttacttacaccttcgaggacgtgcctttccacagcagctacgcgcacagccagagtctggaccggctgatgaatcctctgattgaccagtacctgtactacttgtctcggactcaaacaacaggaggcacggcaaatacgcagactctgggcttcagccaaggtgggcctaatacaatggccaatcaggcaaagaactggctgccaggaccctgttaccgccaacaacgcgtctcaacgacaaccgggcaaaacaacaatagcaactttgcctggactgctgggaccaaataccatctgaatggaagaaattcattggctaatcctggcatcgctatggcaacacacaaagacgacaaggagcgtttttttcccagtaacgggatcctgattttcggcaaacaaaatgctgccagagacaatgcggattacagcgatgtcatgctcaccagcgaggaagaaatcaaaaccactaaccctgtggctacagaggaatacggtatcgtggcagataacttgcagcagcaaaacacggctcctcaaattggaactgtcaacagccagggggccttacccggtatggtctggcagaaccgggacgtgtacctgcagggtcccatctgggccaagattcctcacacggacggcaacttccacccgtctccgctgatgggcggctttggcctgaaacatcctccgcctcagatcctgatcaagaacacgcctgtacctgcggatcctccgaccaccttcaaccagtcaaagctgaactctttcatcacgcaatacagcaccggacaggtcagcgtggaaattgaatgggagctgcagaaggaaaacagcaagcgctggaaccccgagatccagtacacctccaactactacaaatctacaagtgtggactttgctgttaatacagaaggcgtgtactctgaaccccaccccattggcaccagatacctgactcgtaatctgtaa

SEQ ID NO: 1088 - DNA, 2208 bp, Artificial Sequence
  Description of Artificial Sequence: Synthetic polynucleotide
atggctgccgatggttatcttccagattggctcgaggacactctctctgaaggaataagacagtggtggaagctcaaacctggcccaccaccaccaaagcccgcagagcggcataaggacgacagcaggggtcttgtgcttcctgggtacaagtacctcggacccttcaacggactcgacaagggagagccggtcaacgaggcagacgccgcggccctcgagcacgacaaagcctacgaccggcagctcgacagcggagacaacccgtacctcaagtacaaccacgccgacgcggagtttcaggagcgccttaaagaagatacgtcttttgggggcaacctcggacgagcagtcttccaggcgaaaaagagggttcttgaacctctgggcctggttgaggaacctgttaagacggctccgggaaaaaagaggccggtagagcagtcgccacaagagccagactcctcctcgggcatcggcaagaaaggccagcagcccgctaaaaagagactcaattttggtcagactggcgactcagagtcagtccccgacccacaacctctcggagaacctccagcaacccccgctgctgtgggacctactacaatggcttcaggcggtggcgcaccaatggcggacaataacgaaggcgccgatggagtgggtaatgcctcaggaaattggcattgcgattccacatggctgggcgacagagtcatcaccaccagcacccgaacatgggccttgcccacctataacaaccacctctacaagcaaatctccagtgcttcaacgggggccagcaacgacaaccactacttcggctacagcaccccctgggggtattttgacttcaacagattccactgccacttctcaccacgtgactggcagcgactcatcaacaacaactggggattccggcctaagcgactcaacttcaagctcttcaacattcaggtcaaagaggttacggacaacaatggagtcaagaccatcgccaataaccttaccagcacggtccaggtcttcacggactcagactatcagctcccgtacgttctcggctctgcccaccagggctgcctgcctccgttcccggcggacgtgttcatgattccccagtacggctacctaacactcaacaacggtagtcaggccgtgggacgctcctccttctactgcctggaatactttccttcgcagatgctgagaaccggcaacaacttccagtttacttacaccttcgaggacgtgcctttccacagcagctacgcccacagccagagcttggaccggctgatgaatcctctgattgaccagtacctgtactacttgtctcggactcaaacaacaggaggcacggcaaatacgcagactctgggcttcagccaaggtgggcctaatacaatggccaatcaggcaaagaactggctgccaggaccctgttaccgccaacaacgcgtctcaacgacaaccgggcaaaacaacaatagcaactttgcctggactgctgggaccaaataccatctgaatggaagaaattcattggctaatcctggcatcgctatggcaacacacaaagacgacaaggagcgtttttttcccagtaacgggatcctgatttttggcaaacaaaatgctgccagagacaatgcggattacagcgatgtcatgctcaccagcgaggaagaaatcaaaaccactaaccctgtggctacagaggaatacggtatcgtggcagataacttgcagcagcaaaacacggctcctcaaattggaactgtcaacagccagggggccttacccggtatggtctggcagaaccgggacgtgtacctgcagggtcccatctgggccaagattcctcacacggacggcaacttccacccgtctccgctgatgggcggctttggcctgaaacatcctccgcctcagatcctgatcaagaacacgcctgtacctgcggatcctccgaccaccttcaaccagtcaaagctgaactctttcatcacgcaatacagcaccggacaggtcagcgtggaaattgaatgggagctgcagaaggaaaacagcaagcgctggaaccccgagatccagtacacctccaactactacaaatctacaagtgtggactttgctgttaatacagaaggcgtgtactctgaaccccaccccattggcacccgttacctcacccgtcccctg

SEQ ID NO: 1089 - DNA, 2211 bp, Artificial Sequence
  Description of Artificial Sequence: Synthetic polynucleotide
atggctgccgatggttatcttccagattggctcgaggacactctctctgaaggaataagacagtggtggaagctcaaacctggcccaccaccaccaaagcccgcagagcggcataaggacgacagcaggggtcttgtgcttcctgggtacaagtacctcggacccttcaacggactcgacaagggagagccggtcaacgaggcagacgccgcggccctcgagcacgacaaagcctacgaccagcagctccaagcgggtgacaatccgtacctgcggtataaccacgccgacgccgagtttcaggagcgtcttcaaggagatacgtcttttgggggcaacctcggacgagcagtcttccaggccaaaaagaggcttcttgaacctcttggtctggttgaggaagcggctaagacggctcctggaaagaagaggcctgtagagcagtctcctcaggaaccggactcctccgcgggtattggcaaatcgggtgcacagcccgctaaaaagagactcaatttcggtcagactggcgacacagagtcagtcccagaccctcaaccaatcggagaacctcccgcagccccctcaggtgtgggatctcttacaatggcttcaggtggtggcgcaccagtggcagacaataacgaaggtgccgatggagtgggtagttcctcgggaaattggcattgcgattcccaatggctgggggacagagtcatcaccaccagcacccgaacatgggccttgcccacctataacaaccacctctacaagcaaatctccagtgcttcaacgggggccagcaacgacaaccactacttcggctacagcaccccctgggggtattttgacttcaaccgcttccactgccacttctcaccacgtgactggcagcgactcatcaacaacaactggggattccggcccaagagactcagcttcaagctcttcaaccatccaggtcaaggaggtcacgcagaatgaaggcaccaagaccatcgccaataacctcaccagcacatccaggtgtttacggactcggagtaccagctgccgtacgttctcggctctgcccaccagggctgcctgcctccgttcccggcggacgtgttcatgattccccagtacggctacctaacactcaacaacggtagtcaggccgtgggacgctcctccttctactgcctggaatactttccttcgcagatgctgagaaccggcaacaacttccagttcacttacaccttcgaggacgtgcctttccacagcagctacgcgcacagccagagcttggaccggctgatgaatcctctgattgaccagtacctgtactacttgtctcggactcaaacaacaggaggcacggcaaatacgcagactctgggcttcagccaaggtgggcctaatacaatggccaatcaggcaaagaactggctgccaggaccctgttaccgccaacaacgcgtctcaacgacaaccgggcaaaacaacaatagcaactttgcctggactgctgggaccaaataccatctgaatggaagaaattcattgggtaatcctggcatcgctatggcaacacacaaagacgacaaggagcgtttttttcccagtaacgggatcctgatttttggcaaacaaaatgctgccagagacaatgcggattacagcgatgtcatgctcaccagcgaggaagaaatcaaaaccactaaccctgtggctacagaggaatacggtatcgtggcagataacttgcagcagcaaaacacggctcctcaaattggaactgtcaacagccagggggccttacccggtatggtctggcagaaccgggacgtgtacctgcagggtcccatctgggccaagattcctcacacggacggcaacttccacccgtctccgctgatgggcggctttggcctgaaacatcctccgcctcagatcctcatcaaaaacacacctgtacctgcggatcctccaacggccttcaaccagtcaaagctgaactctttcatcacgcaatacagcaccggacaggtcagcgtggaaattgaatgggagctgcagaaggaaaacagcaagcgctggaaccccgagatccagtacacctccaactactacaaatctacaagtgtggactttgctgttaatacagaaggcgtgtactctgaaccccaccccattggcacccgttacctcacccgtcccctgtaa

SEQ ID NO: 1090 - DNA, 2214 bp, Artificial Sequence
  Description of Artificial Sequence: Synthetic polynucleotide
atggctgccgatggttatcttccagattggctcgaggacaacctctctgagggcattcgcgagtggtgggacttgaaacatggagccccgaaacccaaagccaaccagcaaaagcaggacgacggccggggtctggtgcttcctggctacaagtacctcggacccttcaacggactcgacaagggggagcccgtcaacgcggcggatgcagcggccctcgagcacgacaaggcctacgaccagcagctcaaagcgggtgacaatccgtacctgcggtataaccacgccgacgccgagtttcaggagcgtctgcaagaagatacgtcttttgggggcaacctcgggcgagcagtcttccaggccaagaagagggttctcgaaccttttggtctggttgaggaaggtgctaagacggctcctggaaagaaacgtccggtagagcagtcgccacaagagccagactcctcctcgggcattggcaagacaggccagcagcccgctaaaaagagactcaattttggtcagactggcgactcagagtcagtccccgacccacaacctctcggagaacctccagcaacccccgctgctgtgggacctactacaatggcttcaggcggtggcgcaccaatggcagacaataacgaaggcgccgacggagtgggtaatgcctcaggaaattggcattgcgattccacatggctgggcgacagagtcatcaccaccagcacccgaacatgggccttgcccacctataacaaccacctctacaagcaaatctccaacgggacttcgggaggaagcaccaacgacaacacctacttcggctacagcaccccctgggggtattttgactttaacagattccactgccacttctcaccacgtgactggcagcgactcatcaacaacaactggggattccggcccaagagactcaacttcaaactcttcaacatccaagtcaaggaggtcacgcagaatgaaggcaccaagaccatcgccaataacctcaccagcaccatccaggtgtttacggactcggagtaccagctgccgtacgttctcggctccgcccaccagggctgcctgcctccgttcccggcggacgtgttcatgattccccagtacggctacctaacactcaacaacggtagtcaggccgtgggacgctcctccttctactgcctggaatactttccttcgcagatgctgagaacgggcaacaactttaccttcagctacacctttgaggacgttcctttccacagcagctacgctcacagccagagtctggaccgtctcatgaatcctctgattgaccagtacctgtactacttgtctcggactcaaacaacaggaggcacggcaaatacgcagactctgggcttcagccaaggtgggcctaatacaatggccaatcaggcaaagaactggctgccaggaccctgttaccgccaacaacgcgtctcaacgacaaccgggcaaaacaacaatagcaactttgcctggactgctgggaccaaataccatctgaatggaagaaattcattggctaatcctggcatcgctatggcaacacacaaagacgacaaggagcgtttttttcccagtaacgggatcctgatttttggcaaacaaaatgctgccagagacaatgcggattacagcgatgtcatgctcaccagcgaggaagaaatcaaaaccactaaccctgtggctacagaggaatacggtatcgtggcagataacttgcagcagcaaaacacggctcctcaaattggaactgtcaacagccagggggccttacccggtatggtctggcagaaccgggacgtgtacctgcagggtcccatctgggccaagattcctcacacggacggcaacttccacccgtctccgctgatgggcggctttggcctgaaacatcctccgcctcagatcctgatcaagaacacgcctgtacctgcggatcctccgaccaccttcaaccagtcaaagctgaactctttcatcacgcaatacagcaccggacaggtcagcgtggaaattgaatgggagctgcagaaggaaaacagcaagcgctggaaccccgagatccagtacacctccaactactacaaatctacaagtgtggactttgctgttaatacagaaggcgtgtactctgatccccaccccattggcacccgttacctcacccgtcccctgtaa

SEQ ID NO: 1091 - DNA, 2214 bp, Artificial Sequence
  Description of Artificial Sequence: Synthetic polynucleotide
atggctgccgatggttatcttccagattggctcgaggacaacctctctgagggcattcgcgagtggtgggcgctgaaacctggagccccgaagcccaaagccaaccagcaaaagcaggacgacggccggggtctggtgcttcctggctacaagtacctcggacccttcaacggactcgacaaaggagagccggtcaacgaggcggacgcggcagccctcgaacacgacaaggcctacgaccagcagctcaaagcgggtgacaatccgtacctgcggtataaccacgccgacgccgagtttcaggagcgtctgcaagaagatacgtcttttgggggcaacctcgggcgagcagtcttccaggccaagaagcgggttctcgaacctctcggtctggttgaggaaggcgctaagacggctcctggaaagaagagaccggtagagccatcaccccagcgttctccagactcctctacgggcatcggcaagaaaggccagcagcccgccagaaaaagactcaattttggtcagactggcgactcagagtcagttccagaccctcaacctctcggagaacctccagcagcgccctctggtgtgggacctaatacaatggcttcaggcggtggcgcaccaatggcagacaataacgagggcgccgacggagtgggtaattcctcgggaaattggcattgcgattccacatggatgggcgacagagtcatcaccaccagcacccgaacctgggccctgcccacctacaacaaccacctctacaagcaaatctccagtgcttcaacgggggccagcaacgacaaccactacttcggctacagcaccccctgggggtattttgactttaacagattccactgccacttttcaccacgtgactggcagcgactcatcaacaacaactggggattccggcccaagagactcaacttcaagctcttcaacatccaagtcaaggaggtcacgcagaatgaaggcaccaagaccatcgccaataacctcaccagcaccatccaggtgtttacggactcggagtaccagctgccgtacgttctcggctctgcccaccagggctgcctgcctccgttcccggcggacgtgttcatgattccccagtacggctacctaacactcaacaacggtagtcaggccgtgggacgctcctccttctactgcctggaatactttccttcgcagatgctgagaaccggcaacaacttccagtttacttacaccttcgaggacgtgcctttccacagcagctacgcgcacagccagagcttggaccggctgatgaatcctctgattgaccagtacctgtactacttgtctcggactcaaacaacaggaggcacggcaaatacgcagactctgggcttcagccaaggtgggcctaatacaatggccaatcaggcaaagaactggctgccaggaccctgttaccgccaacaacgcgtctcaacgacaaccgggcaaaacaacaatagcaactttgcctggactgctgggaccaaataccatctgaatggaagaaattcattggctaatcctggcatcgctatggcaacacacaaagacgacaaggagcgtttttttcccagtaacgggatcctgatttttggcaaacaaaatgctgccagagacaatgcggattacagcgatgtcatgctcaccagcgaggaagaaatcaaaaccactaaccctgtggctacagaggaatacggtatcgtggcagataacttgcagcagcaaaacacggctcctcaaattggaactgtcaacagccagggggccttacccggtatggtctggcagaaccgggacgtgtacctgcagggtcccatctgggccaagattcctcacacggacggcaacttccacccgtctccgctgatgggcggctttggcctgaaacatcctccgcctcagatcctgatcaagaacacgcctgtacctgcggatcctccgaccaccttcaaccagtcaaagctgaactctttcatcacacaatacagcaccggacaggtcagcgtggaaattgaatgggagctgcagaaggaaaacagcaagcgctggaaccccgagatccagtacacctccaactactacaaatctacaagtgtggactttgctgttaatacagaaggcgtgtactctgaaccccaccccattggcacccgttacctcacccgtcccctgtaa

SEQ ID NO: 1092 - DNA, 2211 bp, Artificial Sequence
  Description of Artificial Sequence: Synthetic polynucleotide
  modified_base (676)..(676): a, c, g, or t
atggctgccgatggttatcttccagattggctcgaggacactctctctgaaggaataagacagtggtggaagctcaaacctggcccaccaccaccaaagcccgcagagcggcataaggacgacagcaggggtcttgtgcttcctgggtacaagtacctcggacccttcaacggactcgacaagggagagccggtcaacgaggcagacgccgcggccctcgagcacgacaaagcctacgaccggcagctcgacagcggagacaacccgtacctcaagtacaaccacgccgacgcggagtttcaggagcgccttaaagaagatacgtcttttgggggcaacctcggacgagcagtcttccaggcgaaaaagagggttcttgaacctctgggcctggttgaggaacctgttaagacggctccgggaaaaaagaggccggtagagcagtcgccacaagagccagactcctcctcgggcatcggcaagaaaggccagcagcccgctaaaaagagactcaattttggtcagactggcgactcagagtcagtccccgacccacaacctctcggagaacctccagcaacccccgctgctgtgggacctactacaatggcttcaggcggtggcgcaccaatggcggacaataacgaaggcgccgatggagtgggtaatgcctcangaaattggcattgcgattccacatggctgggcgacagagtcatcaccaccagcacccgaacatgggccttgccacctataacaaccacctctacaagcaaatctccagtgcttcaacgggggcgcagcaacgacaaccactacttcggctacagcaccccctgggggtattttgacttcaacagattccactgccacttctcaccacgtgactggcagcgactcatcaacaacaactggggattccggcctaagcgactcaacttcaagctcttcaacattcaggtcaaagaggttacggacaacaatggagtcaagaccatcgccaataaccttaccagcacggtccaggtcttcacggactcagactatcagctcccgtacgttctcggctctgcccaccagggctgcctgcctccgttcccggcggacgtgttcatgattccccagtacggctacctaacactcaacaacggtagtcaggccgtgggacgctcctccttctactgcctggaatactttccttcgcagatgctgagaaccggcaacaacttccagtttacttacaccttcgaggacgtgcctttccacagcagctacgcccacagccagagcttggaccggctgatgaatcctctgattgaccagtacctgtactacttgtctcggactcaaacaacaggaggcacggcaaatacgcagactctgggcttcagccaaggtgggcctaatacaatggccaatcaggcaaagaactggctgccaggaccctgttaccgccaacaacgcgtctcaacgacaaccgggcaaaacaacaatagcaactttgcctggactgctgggaccaaataccatctgaatggaagaaattcattggctaatcctggcatcgctatggcaacacacaaagacgacaaggagcgtttttttcccagtaacgggatcctgatttttggcaaacaaaatgctgccagagacaatgcggattacagcgatgtcatgctcaccagcgaggaagaaatcaaaaccactaaccctgtggctacagaggaatacggtatcgtggcagataacttgcagcagcaaaacacggctcctcaaattggaactgtcaacagccagggggccttacccggtatggtttggcagaaccgggacgtgtacctgcagggtcccatctgggccaagattcctcacacggacggcaacttccacccgtctccgctgatgggcggctttggcctgaaacatcctccgcctcagatcctgatcaagaacacgcctgtacctgcggatcctccgaccaccttcaaccagtcaaagctgaactctttcatcacacagtactccacgggacaggtcagcgtggaaattgaatgggagctgcagaaggaaaacagcaagcgctggaacccggagatccagtacacttccaactactacaaatctacaaatgtggactttgctgttaacacagaaggcgtgtactctgaaccccaccccattggcacccgttacctcacccgtcccctgtaa

SEQ ID NO: 1093 - DNA, 2211 bp, Artificial Sequence
  Description of Artificial Sequence: Synthetic polynucleotide
  modified_base (715)..(715): a, c, g, or t
atggctgccgatggttatcttccagattggctcgaggacaacctctctgagggcattcgcgagtggtgggacttgaaacctggagccccgaaacccaaagccaaccagcaaaagcaggacgacggccggggtctggtgcttcctggctacaagtacctcggacccttcaacggactcgacaagggggagcccgtcaacgcggcggatgcagcggccctcgagcacgacaaggcctacgaccagcagctccaagcgggtgacaatccgtacctgcggtataaccacgccgacgccgagtttcaggagcgtcttcaaggagatacgtcttttgggggcaacctcggacgagcagtcttccaggccaagaagcgggttctcgaacctctcggtctggttgaggaagcggctaagacggctcctggaaagaagaggcctgtagagcagtctcctcaggaaccggactcctccgcgggtattggcaaatcgggtgcacagcccgctaaaaagagactcaatttcggtcagactggcgacacagagtcagtcccagaccctcaaccaatcggagaacctcccgcagccccctctggtgtgggacctaatacaatggctgcaggcggtggcgcaccaatggcagacaataacgaaggcgccgatggagtgggtagttcctcgggaaattggcattgcgattccacatggctgggcgacagantcatcaccaccagcacccgaacctgggccctgcccacctataacaaccatctctacaagcaaatctccagtgcttcaacgggggccagcaacgacaaccactacttcggctacagcaccccctgggggtattttgacttcaacagattccactgccacttctcaccacgtgactggcagcgactcatcaacaacaactggggattccggcctaagcgactcaacttcaagctcttcaacattcaggtcaaagaggttacggacaacaatggagtcaagaccatcgccaataaccttaccagcacggtccaggtcttcacggactcggagtaccagttgccgtacgtcctcggctctgcgcaccagggctgcctgcctccgttcccggcggacgtgttcatgattccgcagtacggctacctaacgctcaacaatggcagccaggcagtgggacggtcatccttttactgcctggaatatttcccatcgcagatgctgagaacgggcaacaactttaccttcagctacacttttgaggacgttcctttccacagcagctacgctcacagccagagtctggaccgtctcatgaatcctctgattgaccagtacctgtactacttgtctcggactcaaacaacaggaggcacggcaaatacgcagactctgggcttcagccaaggtgggcctaatacaatggccaatcaggcaaagaactggctgccaggaccctgttaccgccaacaacgcgtctcaacgacaaccggacaaaacaacaatagcaactttgcctggactgctgggaccaaataccatctgaatggaagaaattcattggctaatcctggcatcgctatggcaacacacaaagacgacaaggagcgtttttttcccagtaacgggatcctgatttttggcaaacaaaatgctgccagagacaatgcggattacagcgatgtcatgctcaccagcgaggaagaaatcaaaaccactaaccctgtggctacagaggaatacggtatcgtggcagataactttcagcagcaaaacacggctcctcaaattggaactgtcaacagccagggggccttacccggtatggtctggcagaaccgggacgtgtacctgcagggtcccatctgggccaagattcctcacacggacggcaacttccacccgtctccgctgatgggcggctttggcctgaaacatcctccgcctcagatcctgatcaagaacacgcctgtacctgcggatcctccgaccaccttcaaccagtcaaagctgaactctttcatcacgcaatacagcaccggacaggtcagcgtggaaattgaatgggagctgcagaaggaaaacagcaagcgctggaaccccgagatccagtacacctccaactactacaaatctacaagtgtggactttgctgttaatacagaaggcgtgtactctgaaccccaccccattggcacccgttacctcacccgtcccctgtaa

SEQ ID NO: 1094 - DNA, 2211 bp, Artificial Sequence
  Description of Artificial Sequence: Synthetic polynucleotide
atggctgccgatggttatcttccagattggctcgaggacaacctctctgagggcattcgcgagtggtgggcgctgaaacctggagccccgaagcccaaagccaaccagcaaaagcaggacgacggccggggtctggtgcttcctggctacaagtacctcggacccttcaacggactcgacaaaggagagccggtcaacgaggcggacgcggcagccctcgaacacgacaaagcttacgaccagcagctcaaggccggtgacaacccctacctcaagtataaccacgccgacgccgagtttcaggagcgtctgcaagaagatacgtcttttgggggcaacctcgggcgagcagtcttccaggccaaaaagaggcttcttgaacctcttggtctggttgaggaagcggctaagacggctcctggaaagaagaggcctgtagagcagtctcctcaggaaccggactcctccgcgggtattggcaaatcgggtgcacagcccgctaaaaagagactcaatttcggtcagactggcgacacagagtcagtcccagacccacaacctctcggagaacctccagcaacccccgctgctgtgggacctactacaatggcttcaggcggtggcgcaccaatggcggacaataacgaaggcgccgatggagtgggtaatgcctcaggaaattggcattgcgattccacatggctgggcgacagagtcatcaccaccagcacccgaacatgggccttgcccacctataacaaccacctctacaagcaaatctccagtgcttcaacgggggccagcaacgacaaccactacttcggctacagcaccccctgggggtattttgacttcaacagattccactgccacttctcaccacgtgactggcagcgactcatcaacaacaactggggattccggcccaagagactcagcttcaagctcttcaacatccaggtcaaggaggtcacgcagaatgaaggcaccaagaccatcgccaataacctcaccagcaccatccaggtgtttacggactcggagtaccagctgccgtacgttctcggctccgcccaccagggctgcctgcctccgttcccggcggacgtgttcatgattccccagtacggctacctaacactcaacaacggtagtcaggccgtgggacgctcctccttctactgcctggaatactttccttcgcagatgctgagaaccggcaacaacttccagtttacttacaccttcgaggacgtgcctttccacagcagctacgcccacagccagagcttggaccggctgatgaatcctctgattgaccagtacctgtactacttgtctcggactcaaacaacaggaggcacggcaaatacgcagactctgggcttcagccaaggtgggcctaatacaatggccaatcaggcaaagaactggctgccaggaccctgttaccgccaacaacgcgtctcaacgacaaccgggcaaaacaacaatagcaactttgcctggactgctgggaccaaataccatctgaatggaagaaattcattggctaatcctggcatcgctatggcaacacacaaagacgacaaggagcgtttttttcccagtaacgggatcctgatttttggcaaacaaaatgctgccagagacaatgcggattacagcgatgtcatgctcaccagcgaggaagaaatcaaaaccactaaccctgtggctacagaggaatacggtatcgtggcagataacttgcagcagcaaaacacggctcctcaaattggaactgtcaacagccagggggccttacccggtatggtctggcagaaccgggacgtgtacctgcagggtcccatctgggccaagattcctcacacggacggcaacttccacccgtctccgctgatgggcggctttggcctgaaacatcctccgcctcagatcctgatcaagaacacgcctgtacctgcggatcctccgaccaccttcaaccagtcaaagctgaactctttcatcacgcaatacagcaccggacaggtcagcgtggaaattgaatgggagctgcagaaggaaaacagcaagcgctggaaccccgagatccagtacacctccaactactacaaatctacaagtgtggactttgctgttaatacagaaggcgtgtactctgaaccccaccccattggcacccgttacctcacccgtcccctgtaa

SEQ ID NO: 1095 - DNA, 2211 bp, Artificial Sequence
  Description of Artificial Sequence: Synthetic polynucleotide
atggctgccgatggttatcttccagattggctcgaggacactctctctgaaggaataagacagtggtggaagctcaaacctggcccaccaccaccaaagcccgcagagcggcataaggacgacagcaggggtcttgtgcttcctgggtacaagtacctcggacccttcaacggactcgacaagggagagccggtcaacgaggcagacgccgcggccctcgagcacgacaaagcctacgaccagcagctccaagcgggtgacaatccgtacctgcggtataaccacgccgacgccgagtttcaggagcgtcttcaaggagatacgtcttttgggggcaacctcggacgagcagtcttccaggccaaaaagaggcttcttgaacctcttggtctggttgaggaagcggctaagacggctcctggaaagaagaggcctgtagagcagtctcctcaggaaccggactcctccgcgggtattggcaaatcgggtgcacagcccgctaaaaagagactcaatttcggtcagactggcgacacagagtcagtcccagaccctcaaccaatcggagaacctcccgcagccccctcaggtgtgggatctcttacaatggcttcaggtggtggcgcaccagtggcagacaataacgaaggtgccgatggagtgggtagttcctcgggaaattggcattgcgattcccaatggctgggggacagagtcatcaccaccagcacccgaacatgggccttgcccacctataacaaccacctctacaagcaaatctccagtgcttcaacgggggccagcaacgacaaccactacttcggctacagcaccccctgggggtattttgacttcaaccgcttccactgccacttctcaccacgtgactggcagcgactcatcaacaacaactggggattccggcccaagagactcagcttcaagctcttcaacatccaggtcaaggaggtcacgcagaatgaaggcaccaagaccatcgccaataacctcaccagcaccatccaggtgtttacggactcggagtaccagctgccgtacgttctcggctctgcccaccagggctgcctgcctccgttcccggcggacgtgttcatgattccccagtacggctacctaacactcaacaacggtagtcaggccgtgggacgctcctccttctactgcctggaatactttccttcgcagatgctgagaaccggcaacaacttccagtttacttacaccttcgaggacgtgcctttccacagcagctacgcccacagccagagcttggaccggctgatgaatcctctgattgaccagtacctgtactacttgtctcggactcaaacaacaggaggcacggcaaatacgcagactctgggcttcagccaaggtgggcctaatacaatggccaatcaggcaaagaactggctgccaggaccctgttaccgccaacaacgcgtctcaacgacaaccgggcaaaacaacaatagcaactttgcctggactgctgggaccaaataccatctgaatggaagaaattcattggctaatcctggcatcgctatggcaacacacaaagacgacaaggagcgtttttttcccagtaacgggatcctgatttttggcaaacaaaatgctgccagagacaatgcggattacagcgatgtcatgctcaccagcgaggaagaaatcaaaaccactaaccctgtggctacagaggaatacggtatcgtggcagataacttgcagcagcaaaacacggctcctcaaattggaactgtcaacagccagggggccttacccggtatggtctggcagaaccgggacgtgtacctgcagggtcccatctgggccaagattcctcacacggacggcaacttccacccgtctccgctgatgggcggctttggcctgaaacatcctccgcctcagatcctgatcaagaacacgcctgtacctgcggatcctccgaccaccttcaaccagtcaaagctgaactctttcatcacgcaatacagcaccggacaggtcagcgtggaaattgaatgggagctgcagaaggaaaacagcaagcgctggaaccccgagatccagtacacctccaactactacaaatctacaagtgtggactttgctgttaatacagaaggcgtgtactctgaaccccaccccattggcacccgttacctcacccgtcccctgtaa

SEQ ID NO: 1096 - DNA, 2217 bp, Artificial Sequence
  Description of Artificial Sequence: Synthetic polynucleotide
atggctgccgatggttatcttccagattggctcgaggacaacctctctgagggaataagacagtggtggaagctcaaacctggcccaccaccaccaaagcccgcagagcggcataaggacgacagcaggggtcttgtgcttcctgggtacaagtacctcggacccttcaacggactcgacaagggagagccggtcaacgcggcggacgcagcggccctcgagcacgacaaggcctacgaccagcagctcaaagcgggtgacaatccgtacctgcggtataaccacgccgacgccgagtttcaggagcgtctgcaagaagatacgtcttttgggggcaacctcgggcgagcagtcttccaggccaagaagcgggttctcgaacctctcggtctggttgaggaaggcgctaagacggctcctggaaagaagagaccggtagagccatcaccccagcgttctccagactcctctacgggcatcggcaagaaaggccagcagcccgctaaaaagagactcaattttggtcagactggcgactcagagtcagtccccgacccacaacctctcggagaacctccagcaacccccgctgctgtgggacctactacaatggcttcaggcggtggcgcaccaatggcagacaataacgaaggcgccgacggagtgggtaatgcctcaggaaattggcattgcgattccacatggctgggggacagagtcatcaccaccagcacccgaacctgggccctgcccacctacaacaaccacctctacaagcaaatctccaacgggacttcgggaggaagcaccaacgacaacacctacttcggctgcgtcacgccctgggggtattttgactttaacaaattccactgccacttttcaccggatgactggcaacgactcatcaacaacggctggggattccggactaagcgactcaacttcaagctcttcagcatgaaagtcaaaaagggtacggacaacactggaatcaagaccatcgcgaataaccttaccaacacggtccatgtcttcgcggactcggagtaccagttgccgtacgtcctcggctctgcgcaccagggctgcctccctccgttcccggcggacgtgttcatgattccgcagtacggctacctaacgctcaacaatggcagccaggcagtgggacggtcatccttttactgcctggaatatttcccatcgcagatgctgagaacgggcaacaactttaccttcagctacacctttgaggacgttcctttccacagcagctacgctcacagccagagtctggaccgtctcatgaatcctctgattgaccagtacctgtactacttgtctcggactcaaacaacaggaggcacggcaaatacgcagactctgggcttcagccaaggtgggcctaatacaatggccaatcaggcaaagaactggctgccaggaccctgttaccgccaacaacgcgtctcaacgacaaccgggcaaaacaacaatagcaactttgcctggactgctgggaccaaataccatctgaatggaagaaattcattggctaatcctggcatcgctatggcaacacacaaagacgacaaggagcgtttttttcccagtaacgggatcctgatttttggcaaacaaaatgctgccagagacaatgcggattacagcgatgtcatgctcaccagcgaggaagaaatcaaaaccactaaccctgtggctacagaggaatacggtatcgtggcagataacttgcagcagcaaaacacggctcctcaaattggaactgtcaacagccagggggccttacccggtatggtctggcagaaccgggacgtgtacctgcagggtcccatctgggccaagattcctcacacggacggcaacttccacccgtctccgctgatgggcggctttggcctgaaacatcctccgcctcagatcctgatcaagaacacgcctgtacctgcggatcctccgaccaccttcaaccagtcaaagctgaactctttcatcacgcaatacagcaccggacaggtcagcgtggagatcgagtgggagctgcagaaggaaaacagcaagcgctggaacccggagatccagtacacctccaactactacaaatctacaagtgtggactttgctgttaatacagaaggcgtgtactctgaaccccaccccattggcacccgttacctcacccgtcccctgtaa

SEQ ID NO: 1097 - DNA, 2214 bp, Artificial Sequence
  Description of Artificial Sequence: Synthetic polynucleotide
atggctgccgatggttatcttccagattggctcgaggacactctctctgaaggaataagacagtggtggaagctcaaacctggcccaccaccaccaaagcccgcagagcggcataaggacgacagcaggggtcttgtgcttcctgggtacaagtacctcggacccttcaacggactcgacaagggggagcccgtcaacgcggcggacgcagcggccctcgagcacgacaaggcctacgaccagcagctcaaagcgggtgacaatccgtacctgcggtataaccacgccgacgccgagtttcaggagcgtctgcaagaagatacgtcttttgggggcaacctcgggcgagcagtcttccaggccaagaagcgggttctcgaacctctcggtctggttgaggaaggcgctaagacggctcctggaaagaagagaccggtagagccatcaccccagcgttctccagactcctctacgggcatcggcaagaaaggccagcagcccgcgaaaaagagactcaactttgggcagactggcgactcagagtcagtgcccgaccctcaaccaatcggagaaccccccgcaggcccctctggtctgggatctggtacaatggctgcaggcggtggcgctccaatggcagacaataacgaaggcgccgatggagtgggtagttcctcgggaaattggcattgcgattccacatggctgggggacagagtcatcaccaccagcacccgaacctgggccctgcccacctacaacaaccacctctacaaacaaatttccagcgcttcaacgggagcctcgaacgacaatcactactttggctacagcaccccctgggggtattttgacttcaacagattccactgccacttctcaccacgtgactggcagcgactcatcaacaacaactggggattccggcctaagcgactcaacttcaagctcttcaacattcaggtcaaagaggttacggacaacaatggagtcaagaccatcgccaataaccttaccagcacggtccaggtcttcacggactcggagtaccagttgccgtacgtcctcggctctgcgcaccagggctgcctccctccgttcccggcggacgtgttcatgattccgcagtacggctacctaacgctcaacaatggcagccaggcagtgggacggtcatccttttactgcctggaatatttcccatcgcagatgctgagaacgggcaacaactttaccttcagctacacctttgaggacgttcctttccacagcagctacgctcacagccagagtctggaccgtctcatgaatcctctgattgaccagtacctgtactacttgtctcggactcaaacaacaggaggcacggcaaatacgcagactctgggcttcagccaaggtgggcctaatacaatggccaatcaggcaaagaactggctgccaggaccctgttaccgccaacaacgcgtctcaacgacaaccgggcaaaacaacaatagcaactttgcctggactgctgggaccaaataccatctgaatggaagaaattcattggctaatcctggcatcgctatggcaacacacaaagacgacaaggagcgtttttttcccagtaacgggatcctgatttttggcaaacaaaatgctgccagagacaatgcggattacagcgatgtcatgctcaccagcgaggaagaaatcaaaaccactaaccctgtggctacagaggaatacggtatcgtggcagataacctgcagcagcaaaacacggctcctcaaattggaactgtcaacagccagggggccttacccggtatggtctggcagaaccgggacgtgtacctgcagggtcccatctgggccaagattcttcacacggacggcaactttcacccttctccgctgatgggagggtttggaatgaagcacccgcctcctccgatcctgatcaagaacacgcctgtacctgcggatcctccgaccaccttcaaccagtcaaagctgaactctttcatcacgcaatacagcaccggacaggtcagcgtggaaattgaatgggagctgccgaaggaaaacagcaagcgctggaaccccgagatccagtacacctccaactactacaaatctacaagtgtggactttgctgttaatacagaaggtgtgtactatgaaccccaccccattggcacccgttacctcacccctcccctgtaa

SEQ ID NO: 1098 - DNA, 2214 bp, Artificial Sequence
  Description of Artificial Sequence: Synthetic polynucleotide
atggctgccgatggttatcttccagattggctcgaggacaacctctctgagggcattcgcgagtggtgggcgctgaaacctggagccccgaagcccaaagccaaccagcaaaagcaggacgacggccggggtctggtgcttcctggctacaagtacctcggacccttcaacggactcgacaagggggagcccgtcaacgcggcggacgcagcggccctcgagcacgacaaggcctacgaccagcagctcaaagcgggtgacaatccgtacctgcggtataaccacgccgacgccgagtttcaggagcgtctgcaagaagatacgtcttttgggggcaacctcgggcgagcagtcttccaggccaagaagcgggttctcgaacctctcggtctggttgaggaaggcgctaagacggctcctggaaagaagagaccggtagagccatcaccccagcgctctccagactcctctacgggcatcggcaagaaaggccaacagcccgccagaaaaagactcaattttggtcagactggcgactcagagtcagttccagaccctcaacctctcggagaacctccagcagcgccctctggtgtggcacctaatacaatggctgcaggcggtggcgcaccaatggcagacaataacgaaggcgccgacggagtgggtaatgcctcaggaaattggcattgcgattccacatggctgggcgacagagtcatcaccaccagcacccgaacatgggccttgcccacctataacaaccacctctacaagcaaatctccagtgcttcaacgggggccagcaacgacaaccactacttcggctacagcaccccctgggggtattttgatttcaacagattccactgccacttttcaccacgtgactggcagcgactcatcacaacaattgggggattccggcctaagcgactcaacttcaagctcttcaacattcaggtcaaagaggttacggacaacaatggagtcaagaccatcgccaataaccttaccagcacggtccaggtcttcacggactcggagtaccagttgccgtacgtcctcggctctgcgcaccagggctgcctccctccgttcccggcggacgtgttcatgattccgcagtacggctacctaacgctcaacaatggcagccaggcagtgggacggtcatccttttactgcctggaatatttcccatcgcagatgctgagaacgggcaacaactttaccttcagctacacctttgaggacgttcctttccacagcagctacgctcacagccagagtctggaccggctgatgaatcctctgattgaccagtacctgtactacttgtctcggactcaaacaacaggaggcacggcaaatacgcagactctgggcttcagccaaggtgggcctaatacaatggccaatcaggcaaagaactggctgccaggaccctgttaccgccaacaacgcgtctcaacgacaaccgggcaaaacaacaatagcaactttgcctggactgctgggaccaaataccatctgaatggaagaaattcattggctaatcctggcatcgctatggcaacacacaaagacgacaaggagcgtttttttcccagtaacgggatcctgatttttggcaaacaaaatgctgccagagacaatgcggattacagcgatgtcatgctcaccagcgaggaagaaatcaaaaccactaaccctgtggctacagaggaatacggtatcgtggcagataacttgcagcagcaaaacacggctcctcaaattggaactgtcaacagccagggggccttacccggtatggtctggcagaaccgggacgtgtacctgcagggtcccatctgggccaagattcctcacacggacggcaacttccacccgtctccgctgatgggcggctttggcctgaaacatcctccgcctcagatcctgatcaagaacacgcctgtacctgcggatcctccgaccaccttcaaccagtcaaagctgaactctttcatcacgcaatacagcaccggacaggtcagcgtggaaattgaatgggagctgcagaaggaaaacagcaagcgctggaaccccgagatccagtacacctccaactactacaaatctacaagtgtggactttgctgttaatacagaaggcgtgtactctgaaccccaccccattggcacccgttacctcacccgtcccctgtaa

SEQ ID NO: 1099 - DNA, 2211 bp, Artificial Sequence
  Description of Artificial Sequence: Synthetic polynucleotide
atggctgccgatggttatcttccagattggctcgaggacactctctctgaaggaataagacagtggtggaagctcaaacctggcccaccaccaccaaagcccgcagagcggcataaggacgacggccggggtctggtgcttcctggctacaagtacctcggacccttcaacggactcgacaagggggagcccgtcaacgcggcggacgcagcggccctcgagcacgacaaggcctacgaccagcagctcaaagcgggtgacaatccgtacctgcggtataaccacgccgacgccgagtttcaggagcgtctgcaagaagatacgtcttttgggggcaacctcggacgagcagtcttccaggcgaaaaagagggttcttgaacctctgggcctggttgaggaacctgttaagacggctccgggaaaaaagaggccggtagagcagtcgccacaagagccagactcctcctcgggcatcggcaagaaaggccagcagcccgctaaaaagagactcaattttggtcagactggcgactcagagtcagtccccgacccacaacctctcggagaacctccagcaacccccgctgctgtgggacctactacaatggcttcaggcggtggcgcaccaatggcagacaataacgaaggcgccgacggagtgggtaatgcctcaggaaattggcattgcgattccacatggatgggcgacagagtcatcaccaccagcacccgaacatgggccttgcccacctataacaaccacctctacaagcaaatctccagtgcttcaacgggggccagcaacgacaaccactacttcggctacagcaccccctgggggtattttgactttaacagattccactgccacttttcaccacgtgactggcagcgactcatcaacaacaactggggattccggcctaagcgactcaacttcaagctcttcaacattcaggtcaaggaggtcacgcagaatgaaggcaccaagaccatcgccaataacctcaccagcaccatccaggtgtttacggactcggagtaccagctgccgtacgttctcggctccgcccaccagggctgcctgcctccgttcccggcggacgtgttcatgatcccccagtacggctacctaacactcaacaacggtagtcaggccgtgggacgctcctccttctactgcctggaatactttccttcgcagatgctgagaaccggcaacaacttccagtttacttacaccttcgaggacgtgcctttccacagcagctacgcgcacagccagagcttggaccggctgatgaatcctctgattgaccagtacctgtactacttgtctcggactcaaacaacaggaggcacggcaaatacgcagactctgggcttcagccaaggtgggcctaatacaatggccaatcacgcaaagaactggctgccaggaccctgttaccgccaacaacgcgtctcaacgacaaccgggcaaaacaacaatagcaactttgcctggactgctgggaccaaataccatctgaatggaagaaattcattggctaatcctggcatcgctatggcaacacacaaagacgacaaggagcgtttttttcccagtaacgggatcctgatttttggcaaacaaaatgctgccagagacaatgcggattacagcgatgtcatgctcaccagcgaggaagaaatcaaaaccactaaccctgtggctacagaggaatacggtatcgtggcagataacttgcagcagcaaaacacggctcctcaaattggaactgtcaacagccagggggccttacccggtatggtctggcagaaccgggacgtgtacctgcagggtcccatctgggccaagattcctcacacggacggcaacttccacccgtctccgctgatgggcggcttcggcctgaaacatcctccgcctcagatcctgatcaagaacacgcctgtacctgcggatcctccgaccaccttcaaccagtcaaagctgaactctttcatcacgcaatacagcaccggacaggtcagcgtggaaattgaatgggagctgcagaaggaaaacagcaagcgctggaaccccgagatccagtacacctccaactactacaaatctacaagtgtggactttgctgttaatacagaaggcgtgtactctgaaccccaccccattggcacccgttacctcacccgtcccctgtaa

SEQ ID NO: 1100 - DNA, 2214 bp, Artificial Sequence
  Description of Artificial Sequence: Synthetic polynucleotide
atggctgccgatggttatcttccagattggctcgaggacaacctctctcagggcattcgcgagtggtgggacttgaaacctggagccccgaaacccaaagccaaccagcaaaagcaggacgacggccggggtctggtgcttcctggctacaagtacctcggacccttcaacggactcgacaagggggagcccgtcaacgcggcggacgcagcggccctcgagcacgacaaggcctacgaccagcagctcaaagcgggtgacaatccgtacctgcggtataaccacgccgacgccgagtttcaggagcgtctgcaagaagatacgtcttttgggggcaacctcggacgagcagtcttccaggccaagaagcgggttctcgaacctctcggtctggttgaggaaggcgctaagacggctcctggaaagaagagaccggtagagccatcaccccagcgttctccagactcctctacgggcatcggcaagaaaggccaacagcccgccagaaaaagactcaattttggtcagactggcgactcagagtcagttccagaccctcaacctctcggagaacctccagcagcgcccgctgctgtgggacctactacaatggcttcaggcggtggcgcaccaatggcagacaataacgaaggcgccgacggagtgggtagttcctcgggaaattggcattgcgattcccaatggctgggggacagagtcatcaccaccagcacccgaacctgggccctgcccacctacaacaaccacctctacaagcaaatctccagtgcttcaacgggggccagcaacgacaaccactacttcggctacagcaccccctgggggtattttgacttcaacagattccactgccacttttcaccacgtgactggcaaagactcatcaacaacaactggggattccggcccaagagactcagcttcaagctcttcaacatccaggtcaaggaggtcacgcagaatgaaggcaccaagaccatcgccaataacctcaccagcaccatccaggtgtttacggactcggagtaccagctgccgtacgttctcggctctgcccaccagggctgcctgcctccgttcccggcggacgtgttcatgattccccagtacgggtacctgactctgaacaatggcagtcaggccgtgggccgttcctccttctactgcctggagtactttccttctcaaatgctgagaaccggcaacaacttccagtttacttacaccttcgaggacgtgcctttccacagcagctacgcccacagccagagcttggaccggctgatgaatcctctgattgaccagtacctgtactacttgtctcggactcaaacaacaggaggcacgacaaatgcgcagactctgggcttcagccaaggtgggcctaatacaatggccaatcaggcaaagaactggctgccaggaccctgttaccgccaacaacgcgtctcaacgacaaccgggcaaaacaacaatagcaactttgcctggactgctgggaccaaataccatctgaatggaagaaattcattggctaatcctggcatcgctatggcaacacacaaagacgacaaggagcgtttttttcccagtaacgggatcctgatttttggcaaacaaaatgctgccagagacaatgcggattacagcgatgtcatgctcaccagcgaggaagaaatcaaaaccactaaccctgtggctacagaggaatacggtatcgtggcagataacttgcagcagcaaaacacggctcctcaaattggaactgtcaacagccagggggccttacccggtatggtctggcagaaccgggacgtgtacctgcagggtcccatctgggccaagattcctcacacggacggcaacttccacccgtctccgctgatgggcggctttggcctgaaacatcctccgcctcagatcctgatcaagaacacgcctgtacctgcggatcctccgaccaccttcaaccagtcaaagctgaactctttcatcacacagtactccacgggacaggtcagcgtggaaattgaatgggagctgcagaaggaaaacagcaagcgctggaacccggagatccagtacacttccaactactacaaatctacaaatgtggactttgctgttaacacagaaggcgtgtactctgaaccccaccccattggcacccgttacctcacccgtcccctgtaa

SEQ ID NO: 1101 - DNA, 2211 bp, Artificial Sequence
  Description of Artificial Sequence: Synthetic polynucleotide
atggctgccgatggttatcttccagattggctcgaggacaacctctctgagggcattcgcgagtggtgggacttgaaacctggagccccgaaacccaaagccaaccagcaaaagcaggacgacggccggggtctggtgcttcctggctacaagtacctcggacccttcaacggactcgacaagggggagcccgtcaacgcggcggacgcagcggccctcgagcacgacaaggcctacgaccagcagctcaaagcgggtgacaatccgtacctgcggtataaccacgccgacgccgagtttcaggagcgtctgcaagaagatacgtcttttgggggcaacctcgggcgagcagtcttccaggccaagaagagggttctcgaaccttttggtctggttgaggaaggcgctaagacggctcctggaaagaaacgtccggtagagcagtcgccacaagagccagactcctcctcgggcatcggcaagacaggccagcagcccgctaaaaagagactcaatttcggtcagactggcgacacagagtcagtcccagaccctcaaccaatcggagaacctcccgcagccccctcaggtgtgggacctaatacaatggctgcaggcggtggcgcaccaatggcagacaataacgaaggcgccgacggagtgggtagttcctcgggaaattggcattgcgattccacatggatgggtgacagagtcatcaccaccagcacccgaacctgggccctgcccacctacaataaccacctctacaagcaaatctccagtgcttcaacgggggccagcaacgacaaccactacttcggctacagcaccccctgggggtattttgacttcaacagattccactgccacttctcaccacgtgactggcagcgactcatcaacaacaactggggattccggcctaagcgactcaacttcaagctcttcaacattcaggtcaaggaggtcacgcagaatgaaggcaccaagaccatcgccaataacctcaccagcaccatccaggtgtttacggactcggagtaccagctgccgtacgttctcggctctgcccaccagggctgcctgcctccgttcccggcggacgtgttcatgattccccagtacggctacctaacactcaacaacggtagtcaggccgtgggacgctcctccttctactgcctggaatactttccttcgcagatgctgagaaccggcaacaacttccagtttacttacaccttcgaggacgtgcctttccacagcagctacgcccacagccagagcttggaccggctgatgaatcctctgattgaccagtacctgtactacttgtctcggactcaaacaacaggaggcacggcaaatacgcagactctgggcttcagccaaggtgggcctaatacaatggccaatcaggcaaagaactggctgccaggaccctgttaccgccaacaacgcgtctcaacgacaaccgggcaaaacaacaatagcaactttgcctggactgctgggaccaaataccatctgaatggaagaaattcattggctaatcctggcatcgctatggcaacacacaaagacgacaaggagcgtttttttcccagtaacgggatcctgatttttggcaaacaaaatgctgccagagacaatgcggattacagcgatgtcatgctcaccagcgaggaagaaatcaaaaccactaaccctgtggctacagaggaatacggtatcgtggcagataacttgcagcagcaaaacacggctcctcaaattggaactgtcaacagccagggggccttacccggtatggtctggcagaaccgggacgtgtacctgcagggtcccatctgggccaagattcctcacacggacggcaacttccacccgtctccgctgatgggcggctttggcctgaaacatcctccgcctcagatcctgatcaagaacacgcctgtacctgcggatcctccgaccaccttcaaccagtcaaagctgaactctttcatcacacagtactccacgggacaggtcagcgtggaaattgaatgggagctgcagaaggaaaacagcaagcgctggaacccggagatccagtacacttccaactactacaaatctacaaatgtggactttgctgttaacacagaaggcgtgtactctgaaccccaccccattggcacccgttacttcacccgtcccctgtaa

SEQ ID NO: 1102 - DNA, 2211 bp, Artificial Sequence
  Description of Artificial Sequence: Synthetic polynucleotide
atggctgccgatggttatcttccagattggctcgaggacaacctctctgagggcattcgcgagtggtgggacttgaaacctggagccccgaaacccaaagccaaccagcaaaagcaggacgacggccggggtctggtgcttcctggctacaagtacctcggacccttcaacggactcgacaagggggagcccgtcaacgcggcggacgcagcggccctcgagcacgacaaggcctacgaccagcagctcaaagcgggtgacaatccgtacctgcggtataaccacgccgacgccgagtttcaggagcgtctgcaagaagatacgtcttttgggggcaacctcgggcgagcagtcttccaggccaagaagcgggttctcgaacctctcggtctggttgaggaaggcgctaagacggctcctggaaagaaacgtccggtagagcagtcgccacaagagccagactcctcctcgggcatcggcaagacaggccagcagcccgctaaaaaaagactcaattttggtcagactggcgactcagagtcagttccagaccctcaacctctcggagaacctccagcaacccccgctgctgtgggacctactacaatggcttcaggtggtggcgcaccaatggcagacaataacgagggcgccgacggagtgggtaattcctcgggaaattggcattgcgattccacatggatgggcgacagagtcatcaccaccagcacccgaacctgggccctgcccacctacaacaatcacctctacaagcaaatctccagtgcttcaacgggggccagcaacgacaaccactacttcggctacagcaccccctgggggtattttgacttcaacagattccactgccacttctcaccacgtgactggcagcgactcatcaacaacaactggggattccggcctaagcgactcaacttcaagctcttcaacattcaggtcaaagaggttacggacaacaatggagtcaagaccatcgccaataaccttaccagcacggtccaggtcttcacggactcggagtaccagttgccgtacgtcctcggctctgcgcaccagggctgcctccctccgttcccggcggacgtgttcatgattccgcagtacggctacctaacgctcaacaacggtagtcaggccgtgggacgctcctccttctactgcctggaatactttccttcgcagatgctgagaaccggcaacaacttccagtttacttacaccttcgaggacgtgcctttccacagcagctacgcccacagccagagcttggaccggctgatgaatcctctgattgaccagtacctgtactacttgtctcggactcaaacaacaggaggcacggcaaatacgcagactctgggcttcagccaaggtgggcctaatacaatggccaatcaggcaaagaactggctgccaggaccctgttaccgccaacaacgcgtctcgacgacaaccgggcaaaacaacaatagcaactttgcctggactgctgggaccaaataccatctgaatggaagaaattcattggctaatcctggcatcgctatggcaacacacaaagacgacaaggagcgtttttttcccagtaacgggatcctgatttttggcaaacaaaatgctgccagagacaatgcggattacagcgatgtcatgctcaccagcgaggaagaaatcaaaaccactaaccctgtggctacagaggaatacggtatcgtggcagataacttgcagcagcaaaacacggctcctcaaattggaactgtcaacagccagggggccttacccggtatggtttggcagaaccgggacgtgtacctgcagggtcccatctgggccaagattcctcacacggacggcaacttccacccgtctccgctgatgggcggctttggcctgaaacatcctccgcctcagatcctgatcaagaacacgcctgtacctgcggatcctccgaccaccttcaaccagtcaaagctgaactctttcatcacacagtactccacgggacaggtcagcgtggaaattgaatgggagctgcagaaggaaaacagcaagcgctggaacccggagatccagtacacttccaactactacaaatctacaaatgtggactttgctgttaacacagaaggcgtgtactctgaaccccaccccattggcacccgttacctcacccgtcccctgtaa

SEQ ID NO: 1103 - DNA, 2211 bp, Artificial Sequence
  Description of Artificial Sequence: Synthetic polynucleotide
atggctgccgatggttatcttccagattggctcgaggacaacctctctgagggcattcgcgagtggtgggacttgaaacctggagccccgaagcccaaagccaaccagcaaaagcaggacgacggccggggtctggtgcttcctggctacaagtacctcggacccttcaacggactcgacaagggggagcccgtcaacgcggcggacgcagcggccctcgagcacgacaaggcctacgaccagcagctcaaagcgggtgacaatccgtacctgcggtataaccacgccgacgccgagtttcaggagcgtctgcaagaagatacgtcttttgggggcaacctcgggcgagcagtcttccaggccaagaagcgggttctcgaacctctcggtctggttgaggaaggcgctaagacggctcctggaaagaaacgtccggtagagcagtcaccacaagagccagactcctcctcgggcatcggcaagacaggccagcagcccgctaaaaagagactcaattttggtcagactggcgactcagagtcagtccccgacccacaacctctcggagaacctccagcaacccccgctgctgtgggacctactacaatggcttcaggcggtggcgcaccaatggcggacaataacgaaggcgccgatggagtgggtaatgcctcaggaaattggcattgcgattccacatggctgggcgacagagtcatcaccaccagcacccgaacatgggccttgcccacctataacaaccacctctacaagcaaatctccagtgcttcaacgggggccagcaacgacaaccactacttcggctacagcaccccctgggggtattttgactttaacagattccactgccacttctcaccacgtgactggcagcgactcatcaacaacaactggggattccggcccaagagactcaacttcaagctcttcaacatccaggtcaaggaggtcacgcagaatgaaggcaccaagaccatcgccaataacctcaccagcaccatccaggtgtttacggactcggagtaccagctgccgtacgttctcggctctgcccaccagggctgcctgcctccgttcccggcggacgtgttcatgattccccagtacggctacctgactctgaacaatggcagtcaggccgtgggccgttcctccttctactgcctagagtactttccttctcaaatgctgagaacgggcaacaactttgagttcagctaccagtttgaggacgtgccttttcacagcagctacgcgcacagccaaagcctggaccggctgatgaatcctctgattgaccagtacctgtactacttgtctcggactcaaacaacaggaggcacggcaaatacgcagactctgggcttcagccaaggtgggcctaatacaatggccaatcaggcaaagaactggctgccaggaccctgttaccgccaacaacgcgtctcaacgacaaccgggcaaaacaacaatagcaactttgcctggactgctgggaccaaataccatatgaatggaagaaattcattggttaatcctggcatcgctatggcaacacacaaagacgacaaggagcgtttttttcccagtaacgggatcctgatttttggcaaacaaaatgttgccagagacaatgcggattacagcgatgtcatgctcaccagcgaggaagaaatcaaaaccactaaccctgtggctacagaggaatacggtattgtggcagataacttgcagcagcaaaacacggctcctcaaattggaactgtcaacagccagggggccttacccggtatggtctggcagaaccgggacgtgtacctgcagggtcccatctgggccaagattcctcacacggacggcaacttccacccgtcgccgctgatgggcggctttggcctgaaacatcctccgcctcagatcctgatcaagaacacgcctgtacctgcggatcctccgaccaccttcaaccagtcaaagctgaactctttcatcacgcaatacagcaccggacaggtcagcgtggaaattgaatgggagctgcagaaggaaaacagcaagcgctggaaccccgagatccagtacacctccaactactacaaatctacaagtgtggactttgctgttaatacagaaggcgtgtactctgaaccccaccccattggcacccgttacctcacccgtcccctgtaa

SEQ ID NO: 1104 - protein, 736 aa, Artificial Sequence
  Description of Artificial Sequence: Synthetic polypeptide
MAADGYLPDWLEDTLSEGIRQWWKLKPGPPPPKPAERHKDDSRGLVLPGYKYLGPFNGLDKGEPVNEADAAALEHDKAYDRQLDSGDNPYLKYNHADAEFQERLKEDTSFGGNLGRAVFQAKKRVLEPLGLVEEPVKTAPGKKRPVEQSPQEPDSSSGIGKKGQQPAKKRLNFGQTGDSESVPDPQPLGEPPATPAAVGPTTMASGGGAPMADNNEGADGVGNASGNWHCDSTWMGDRVITTSTRTWALPTYNNHLYKQISSASTGASNDNHYFGYSTPWGYFDFNRFHCHFSPRDWQRLINNNWGFRPKRLNFRLFNIQVKEVTDNNGVKTIANNLTSTVQVFTDSEYQLPYVLGSAHQGCLPPFPADVFMIPQYGYLTLNNGSQAVGRSSFYCLEYFPSQMLRTGNNFTFSYTFEEVPFHSSYAHSQSLDRLMNPLIDQYLYYLSRTQTTGGTANTQTLGFSQGGPNTMANQAKNWLPGPCYRQQRVSTTTGQNNNSNFAWTAGTKYHLNGRNSLANPGIAMATHKDDKERFFPSNGILIFGKQNAARDNADYSDVMLTSEEEIKTTNPVATEEYGIVADNLQQQNTAPQIGTVNSQGALPGMVWQNRDVYLQGPIWAKIPHTDGNFHPSPLMGGFGLKHPPPQILIKNTPVPADPPTTFNQSKLNSFITQYSTGQVSVEIEWELQKENSKRWNPEIQYTSNYYKSTSVDFAVNTEGVYSEPHPIGTRYLTRPL

SEQ ID NO: 1105 - protein, 736 aa, Artificial Sequence
  Description of Artificial Sequence: Synthetic polypeptide
MAADGYLPDWLEDNLSEGIREWWDLKPASPKPKANQQKQDDGRGLVLPGYKYLGPFNGLDKGEPVNAADAAALEHDKAYDQQLKAGDNPYLRYNHADAEFQERLQEDTSFGGNLGRAVFQAKKRLLEPLGLVEEAAKTAPGKKRPVEQSPQEPDSSAGIGKSGAQPAKKRLNFGQTGGTESVPDPQPLGEPPAAPSGVGPNTMAAGGGAPMADNNEGADGVGSSSGNWHCDSTWLGDRVITTSTRTWALPTYNNHLYKQISSASTGASNDNHYFGYSTPWGYFDFNRFHCHFSPRDWQRLINNNWGFRPKRLSFKLFNIQVKEVTQNEGTKTIANNLTSTIQVFTDSEYQLPYVLGSAHQGCLPPFPADVFMIPQYGYLTLNNGSQAVGRSSFYCLEYFPSQMLRTGNNFQFTYTFEDVPFHSSYAHSQSLDRLMNPLIDQYLYYLSRTQTTGGTANTQTLGFSQGGPNTMANQAKNWLPGPCYRQQRVSTTTGQNNNSNFAWTAGTKYHLNGRNSLANPGIAMATHKDDKERFFPSNGILIFGKQNAARDNADYSDVMLTSEEEIKTTNPVATEEYGIVADNLQQQNTAPQIGTVNSQGALPGMVWQNRDVYLQGPIWAKIPHTDGNFHPSPLMGGFGLKHPPPQILIKNTPVPADPPTTFNQSKLNSFITQYSTGQVSVEIEWELQKENSKRWNPEIQYTSNYYKSTSVDFAVNTEGVYSEPHPIGTRYLTRPL

SEQ ID NO: 1106 - protein, 736 aa, Artificial Sequence; identical to SEQ ID NO: 1045
  Description of Artificial Sequence: Synthetic polypeptide

SEQ ID NO: 1107 - protein, 736 aa, Artificial Sequence
  Description of Artificial Sequence: Synthetic polypeptide
MAADGYLPDWLEDNLSEGIREWWDLEPGAPKPKANQQKQDDGRGLVLPGYKYLGPFNGLDKGEPVNAADAAALEHDKAYDQQLKAGDNPYLRYNHADAEFQERLQEDTSFGGNLGRAVFQAKKRVLEPLGLVEEGAKTAPGKKRPVEQSPQEPDSSSGIGKTGQQPAKKRLNFGQTGDSESVPDPQPLGEPPATPAAVGPTTMASGGGAPMADNNEGADGVGNASGNWHCDSTWLGDRVITTSTRTWALPTYNNHLYKQISSASTGASNDNHYFGYSTPWGYFDFNRFHCHFSPRDWQRLINNNWGFRPKRLNFKLFNIQVKEVTDNNGVKTIANNLTSTVQVFTDSEYQLPYVLGSAHQGCLPPFPADVFMIPQYGYLTLNNGSQAVGRSSFYCLEYFPSQMLRTGNNFQFTYTFEDVPFHSSYAHSQSLDRLMNPLIDQYLYYLSRTQTTGGTANTQTLGFSQGGPNTMANQAKNWLPGPCYRQQRVSTTTGQNNNSNFAWTAGTKYHLNGRNSLANPGIAMATHKDDKERFFPSNGILIFGKQNAARDNADYSDVMLTSEEEIKTTNPVATEEYGIVADNLQQQNTAPQIGTVNSQGALPGMVWQNRDVYLQGPIWAKIPHTDGNFHPSPLMGGFGLKHPPPQILIKNTPVPADPPTTFNQSKLNSFITQYSTGQVSVEIEWELQKENSKRWNPEIQYTSNYYKSTSVDFAVNTEGVYSEPHPIGTRYLTRPL

SEQ ID NO: 1108 - protein, 736 aa, Artificial Sequence; identical to SEQ ID NO: 1045
  Description of Artificial Sequence: Synthetic polypeptide

SEQ ID NO: 1109 - protein, 736 aa, Artificial Sequence
  Description of Artificial Sequence: Synthetic polypeptide
MAADGYLPDWLEDTLSEGIRQWWKLKPGPPPPKPAERHKDDSRGLVLPGYKYLGPFNGLDKGEPVNEADAAALEHDKAYDRQLDSGDNPYLKYNHADAEFQERLKEDTSFGGNLGRAVFQAKKRVLEPLGLVEEPVKTAPGKKRPVEQSPQEPDSSSGIGKKGQQPAKKRLNFGQTGDSESVPDPQPLGEPPATPAAVGPTTMASGGGAPMADNNEGADGVGNASGNWHCDSTWLGDRVITTSTRTWALPTYNNHLYKQISSASTGASNDNHYFGYSTPWGYFDFNRFHCHFSPRDWQRLINNNWGFRPKRLNFKLFNIQVKEVTDNNGVKTIANNLTSTVQVFTDSDYQLPYVLGSAHQGCLPPFPADVFMIPQYGYLTLNNGSQAVGRSSFYCLEYFPSQMLRTGNNFQFTYTFEDVPFHSSYAHSQSLDRLMNPLIDQYLYYLSRTQTTGGTANTQTLGFSQGGPNTMANQAKNWLPGPCYRQQRVSTTTGQNNNSNFAWTAGTKYHLNGRNSLANPGIAMATHKDDKERFFPSNGILIFGKQNAARDNADYSDVMLTSEEEIKTTNPVATEEYGIVADNLQQQNTAPQIGTVNSQGALPGMVWQNRDVYLQGPIWAKIPHTDGNFHPSPLMGGFGLKHPPPQILIKNTPVPADPPTTFNQSKLNSFITQYSTGQVSVEIEWELQKENSKRWNPEIQYTSNYYKSTSVDFAVNTEGVYSEPHPIGTRYLTRPL

SEQ ID NO: 1110 - protein, 734 aa, Artificial Sequence
  Description of Artificial Sequence: Synthetic polypeptide
MAADGYLPDWLEDTLSEGIRQWWKLKPGPPPPKPAERHKDDSRGLVLPGYKYLGPFNGLDKGEPVNEADAAALEHDKAYDQQLQAGDNPYLRYNHADAEFQERLQGDTSFGGNLGRAVFQAKKRLLEPLGLVEEAAKTAPGKKRPVEQSPQEPDSSAGIGKSGAQPAKKRLNFGQTGDTESVPDPQPIGEPPAAPSGVGSLTMASGGGAPVADNNEGADGVGSSSGNWHCDSQWLGDRVITTSTRTWALPTYNNHLYKQISSASTGASNDNHYFGYSTPWGYFDFNRFHCHFSPRDWQRLINNNWGFRPKRLSFKLFNHPGQGGHAERHQDHRQPHQHIQVFTDSEYQLPYVLGSAHQGCLPPFPADVFMIPQYGYLTLNNGSQAVGRSSFYCLEYFPSQMLRTGNNFQFTYTFEDVPFHSSYAHSQSLDRLMNPLIDQYLYYLSRTQTTGGTANTQTLGFSQGGPNTMANQAKNWLPGPCYRQQRVSTTTGQNNNSNFAWTAGTKYHLNGRNSLGNPGIAMATHKDDKERFFPSNGILIFGKQNAARDNADYSDVMLTSEEEIKTTNPVATEEYGIVADNLQQQNTAPQIGTVNSQGALPGMVWQNRDVYLQGPIWAKIPHTDGNFHPSPLMGGFGLKHPPPQILIKNTPVPADPPTAFNQSKLNSFITQYSTGQVSVEIEWELQKENSKRWNPEIQYTSNYYKSTSVDFAVNTEGVYSEPHPIGTRYLTRPL

SEQ ID NO: 1111 - protein, 737 aa, Artificial Sequence
  Description of Artificial Sequence: Synthetic polypeptide
MAADGYLPDWLEDNLSEGIREWWDLKHGAPKPKANQQKQDDGRGLVLPGYKYLGPFNGLDKGEPVNAADAAALEHDKAYDQQLKAGDNPYLRYNHADAEFQERLQEDTSFGGNLGRAVFQAKKRVLEPFGLVEEGAKTAPGKKRPVEQSPQEPDSSSGIGKTGQQPAKKRLNFGQTGDSESVPDPQPLGEPPATPAAVGPTTMASGGGAPMADNNEGADGVGNASGNWHCDSTWLGDRVITTSTRTWALPTYNNHLYKQISNGTSGGSTNDNTYFGYSTPWGYFDFNRFHCHFSPRDWQRLINNNWGFRPKRLNFKLFNIQVKEVTQNEGTKTIANNLTSTIQVFTDSEYQLPYVLGSAHQGCLPPFPADVFMIPQYGYLTLNNGSQAVGRSSFYCLEYFPSQMLRTGNNFTFSYTFEDVPFHSSYAHSQSLDRLMNPLIDQYLYYLSRTQTTGGTANTQTLGFSQGGPNTMANQAKNWLPGPCYRQQRVSTTTGQNNNSNFAWTAGTKYHLNGRNSLANPGIAMATHKDDKERFFPSNGILIFGKQNAARDNADYSDVMLTSEEEIKTTNPVATEEYGIVADNLQQQNTAPQIGTVNSQGALPGMVWQNRDVYLQGPIWAKIPHTDGNFHPSPLMGGFGLKHPPPQILIKNTPVPADPPTTFNQSKLNSFITQYSTGQVSVEIEWELQKENSKRWNPEIQYTSNYYKSTSVDFAVNTEGVYSDPHPIGTRYLTRPL

SEQ ID NO: 1112 - protein, 737 aa, Artificial Sequence
  Description of Artificial Sequence: Synthetic polypeptide
MAADGYLPDWLEDNLSEGIREWWALKPGAPKPKANQQKQDDGRGLVLPGYKYLGPFNGLDKGEPVNEADAAALEHDKAYDQQLKAGDNPYLRYNHADAEFQERLQEDTSFGGNLGRAVFQAKKRVLEPLGLVEEGAKTAPGKKRPVEPSPQRSPDSSTGIGKKGQQPARKRLNFGQTGDSESVPDPQPLGEPPAAPSGVGPNTMASGGGAPMADNNEGADGVGNSSGNWHCDSTWMGDRVITTSTRTWALPTYNNHLYKQISSASTGASNDNHYFGYSTPWGYFDFNRFHCHFSPRDWQRLINNNWGFRPKRLNFKLFNIQVKEVTQNEGTKTIANNLTSTIQVFTDSEYQLPYVLGSAHQGCLPPFPADVFMIPQYGYLTLNNGSQAVGRSSFYCLEYFPSQMLRTGNNFQFTYTFEDVPFHSSYAHSQSLDRLMNPLIDQYLYYLSRTQTTGGTANTQTLGFSQGGPNTMANQAKNWLPGPCYRQQRVSTTTGQNNNSNFAWTAGTKYHLNGRNSLANPGIAMATHKDDKERFFPSNGILIFGKQNAARDNADYSDVMLTSEEEIKTTNPVATEEYGIVADNLQQQNTAPQIGTVNSQGALPGMVWQNRDVYLQGPIWAKIPHTDGNFHPSPLMGGFGLKHPPPQILIKNTPVPADPPTTFNQSKLNSFITQYSTGQVSVEIEWELQKENSKRWNPEIQYTSNYYKSTSVDFAVNTEGVYSEPHPIGTRYLTRPL

SEQ ID NO: 1113 - protein, 736 aa, Artificial Sequence
  Description of Artificial Sequence: Synthetic polypeptide
  MOD_RES (226)..(226): Any naturally occurring amino acid
MAADGYLPDWLEDTLSEGIRQWWKLKPGPPPPKPAERHKDDSRGLVLPGYKYLGPFNGLDKGEPVNEADAAALEHDKAYDRQLDSGDNPYLKYNHADAEFQERLKEDTSFGGNLGRAVFQAKKRVLEPLGLVEEPVKTAPGKKRPVEQSPQEPDSSSGIGKKGQQPAKKRLNFGQTGDSESVPDPQPLGEPPATPAAVGPTTMASGGGAPMADNNEGADGVGNASXNWHCDSTWLGDRVITTSTRTWALPPITTTSTSKSPVLQRGRSNDNHYFGYSTPWGYFDFNRFHCHFSPRDWQRLINNNWGFRPKRLNFKLFNIQVKEVTDNNGVKTIANNLTSTVQVFTDSDYQLPYVLGSAHQGCLPPFPADVFMIPQYGYLTLNNGSQAVGRSSFYCLEYFPSQMLRTGNNFQFTYTFEDVPFHSSYAHSQSLDRLMNPLIDQYLYYLSRTQTTGGTANTQTLGFSQGGPNTMANQAKNWLPGPCYRQQRVSTTTGQNNNSNFAWTAGTKYHLNGRNSLANPGIAMATHKDDKERFFPSNGILIFGKQNAARDNADYSDVMLTSEEEIKTTNPVATEEYGIVADNLQQQNTAPQIGTVNSQGALPGMVWQNRDVYLQGPIWAKIPHTDGNFHPSPLMGGFGLKHPPPQILIKNTPVPADPPTTFNQSKLNSFITQYSTGQVSVEIEWELQKENSKRWNPEIQYTSNYYKSTNVDFAVNTEGVYSEPHPIGTRYLTRPL

SEQ ID NO: 1114 - protein, 736 aa, Artificial Sequence
  Description of Artificial Sequence: Synthetic polypeptide
  MOD_RES (239)..(239): Any naturally occurring amino acid
MAADGYLPDWLEDNLSEGIREWWDLKPGAPKPKANQQKQDDGRGLVLPGYKYLGPFNGLDKGEPVNAADAAALEHDKAYDQQLQAGDNPYLRYNHADAEFQERLQGDTSFGGNLGRAVFQAKKRVLEPLGLVEEAAKTAPGKKRPVEQSPQEPDSSAGIGKSGAQPAKKRLNFGQTGDTESVPDPQPIGEPPAAPSGVGPNTMAAGGGAPMADNNEGADGVGSSSGNWHCDSTWLGDRXITTSTRTWALPTYNNHLYKQISSASTGASNDNHYFGYSTPWGYFDFNRFHCHFSPRDWQRLINNNWGFRPKRLNFKLFNIQVKEVTDNNGVKTIANNLTSTVQVFTDSEYQLPYVLGSAHQGCLPPFPADVFMIPQYGYLTLNNGSQAVGRSSFYCLEYFPSQMLRTGNNFTFSYTFEDVPFHSSYAHSQSLDRLMNPLIDQYLYYLSRTQTTGGTANTQTLGFSQGGPNTMANQAKNWLPGPCYRQQRVSTTTGQNNNSNFAWTAGTKYHLNGRNSLANPGIAMATHKDDKERFFPSNGILIFGKQNAARDNADYSDVMLTSEEEIKTTNPVATEEYGIVADNFQQQNTAPQIGTVNSQGALPGMVWQNRDVYLQGPIWAKIPHTDGNFHPSPLMGGFGLKHPPPQILIKNTPVPADPPTTFNQSKLNSFITQYSTGQVSVEIEWELQKENSKRWNPEIQYTSNYYKSTSVDFAVNTEGVYSEPHPIGTRYLTRPL

SEQ ID NO: 1115 - protein, 736 aa, Artificial Sequence
  Description of Artificial Sequence: Synthetic polypeptide
MAADGYLPDWLEDNLSEGIREWWALKPGAPKPKANQQKQDDGRGLVLPGYKYLGPFNGLDKGEPVNEADAAALEHDKAYDQQLKAGDNPYLKYNHADAEFQERLQEDTSFGGNLGRAVFQAKKRLLEPLGLVEEAAKTAPGKKRPVEQSPQEPDSSAGIGKSGAQPAKKRLNFGQTGDTESVPDPQPLGEPPATPAAVGPTTMASGGGAPMADNNEGADGVGNASGNWHCDSTWLGDRVITTSTRTWALPTYNNHLYKQISSASTGASNDNHYFGYSTPWGYFDFNRFHCHFSPRDWQRLINNNWGFRPKRLSFKLFNIQVKEVTQNEGTKTIANNLTSTIQVFTDSEYQLPYVLGSAHQGCLPPFPADVFMIPQYGYLTLNNGSQAVGRSSFYCLEYFPSQMLRTGNNFQFTYTFEDVPFHSSYAHSQSLDRLMNPLIDQYLYYLSRTQTTGGTANTQTLGFSQGGPNTMANQAKNWLPGPCYRQQRVSTTTGQNNNSNFAWTAGTKYHLNGRNSLANPGIAMATHKDDKERFFPSNGILIFGKQNAARDNADYSDVMLTSEEEIKTTNPVATEEYGIVADNLQQQNTAPQIGTVNSQGALPGMVWQNRDVYLQGPIWAKIPHTDGNFHPSPLMGGFGLKHPPPQILIKNTPVPADPPTTFNQSKLNSFITQYSTGQVSVEIEWELQKENSKRWNPEIQYTSNYYKSTSVDFAVNTEGVYSEPHPIGTRYLTRPL

SEQ ID NO: 1116 - protein, 736 aa, Artificial Sequence
  Description of Artificial Sequence: Synthetic polypeptide
MAADGYLPDWLEDTLSEGIRQWWKLKPGPPPPKPAERHKDDSRGLVLPGYKYLGPFNGLDKGEPVNEADAAALEHDKAYDQQLQAGDNPYLRYNHADAEFQERLQGDTSFGGNLGRAVFQAKKRLLEPLGLVEEAAKTAPGKKRPVEQSPQEPDSSAGIGKSGAQPAKKRLNFGQTGDTESVPDPQPIGEPPAAPSGVGSLTMASGGGAPVADNNEGADGVGSSSGNWHCDSQWLGDRVITTSTRTWALPTYNNHLYKQISSASTGASNDNHYFGYSTPWGYFDFNRFHCHFSPRDWQRLINNNWGFRPKRLSFKLFNIQVKEVTQNEGTKTIANNLTSTIQVFTDSEYQLPYVLGSAHQGCLPPFPADVFMIPQYGYLTLNNGSQAVGRSSFYCLEYFPSQMLRTGNNFQFTYTFEDVPFHSSYAHSQSLDRLMNPLIDQYLYYLSRTQTTGGTANTQTLGFSQGGPNTMANQAKNWLPGPCYRQQRVSTTTGQNNNSNFAWTAGTKYHLNGRNSLANPGIAMATHKDDKERFFPSNGILIFGKQNAARDNADYSDVMLTSEEEIKTTNPVATEEYGIVADNLQQQNTAPQIGTVNSQGALPGMVWQNRDVYLQGPIWAKIPHTDGNFHPSPLMGGFGLKHPPPQILIKNTPVPADPPTTFNQSKLNSFITQYSTGQVSVEIEWELQKENSKRWNPEIQYTSNYYKSTSVDFAVNTEGVYSEPHPIGTRYLTRPL

SEQ ID NO: 1117 - protein, 738 aa, Artificial Sequence
  Description of Artificial Sequence: Synthetic polypeptide
MAADGYLPDWLEDNLSEGIRQWWKLKPGPPPPKPAERHKDDSRGLVLPGYKYLGPFNGLDKGEPVNAADAAALEHDKAYDQQLKAGDNPYLRYNHADAEFQERLQEDTSFGGNLGRAVFQAKKRVLEPLGLVEEGAKTAPGKKRPVEPSPQRSPDSSTGIGKKGQQPAKKRLNFGQTGDSESVPDPQPLGEPPATPAAVGPTTMASGGGAPMADNNEGADGVGNASGNWHCDSTWLGDRVITTSTRTWALPTYNNHLYKQISNGTSGGSTNDNTYFGCVTPWGYFDFNKFHCHFSPDDWQRLINNGWGFRTKRLNFKLFSMKVKKGTDNTGIKTIANNLTNTVHVFADSEYQLPYVLGSAHQGCLPPFPADVFMIPQYGYLTLNNGSQAVGRSSFYCLEYFPSQMLRTGNNFTFSYTFEDVPFHSSYAHSQSLDRLMNPLIDQYLYYLSRTQTTGGTANTQTLGFSQGGPNTMANQAKNWLPGPCYRQQRVSTTTGQNNNSNFAWTAGTKYHLNGRNSLANPGIAMATHKDDKERFFPSNGILIFGKQNAARDNADYSDVMLTSEEEIKTTNPVATEEYGIVADNLQQQNTAPQIGTVNSQGALPGMVWQNRDVYLQGPIWAKIPHTDGNFHPSPLMGGFGLKHPPPQILIKNTPVPADPPTTFNQSKLNSFITQYSTGQVSVEIEWELQKENSKRWNPEIQYTSNYYKSTSVDFAVNTEGVYSEPHPIGTRYLTRPL

SEQ ID NO: 1118 - protein, 737 aa, Artificial Sequence
  Description of Artificial Sequence: Synthetic polypeptide
MAADGYLPDWLEDTLSEGIRQWWKLKPGPPPPKPAERHKDDSRGLVLPGYKYLGPFNGLDKGEPVNAADAAALEHDKAYDQQLKAGDNPYLRYNHADAEFQERLQEDTSFGGNLGRAVFQAKKRVLEPLGLVEEGAKTAPGKKRPVEPSPQRSPDSSTGIGKKGQQPAKKRLNFGQTGDSESVPDPQPIGEPPAGPSGLGSGTMAAGGGAPMADNNEGADGVGSSSGNWHCDSTWLGDRVITTSTRTWALPTYNNHLYKQISSASTGASNDNHYFGYSTPWGYFDFNRFHCHFSPRDWQRLINNNWGFRPKRLNFKLFNIQVKEVTDNNGVKTIANNLTSTVQVFTDSEYQLPYVLGSAHQGCLPPFPADVFMIPQYGYLTLNNGSQAVGRSSFYCLEYFPSQMLRTGNNFTFSYTFEDVPFHSSYAHSQSLDRLMNPLIDQYLYYLSRTQTTGGTANTQTLGFSQGGPNTMANQAKNWLPGPCYRQQRVSTTTGQNNNSNFAWTAGTKYHLNGRNSLANPGIAMATHKDDKERFFPSNGILIFGKQNAARDNADYSDVMLTSEEEIKTTNPVATEEYGIVADNLQQQNTAPQIGTVNSQGALPGMVWQNRDVYLQGPIWAKILHTDGNFHPSPLMGGFGMKHPPPPILIKNTPVPADPPTTFNQSKLNSFITQYSTGQVSVEIEWELPKENSKRWNPEIQYTSNYYKSTSVDFAVNTEGVYYEPHPIGTRYLTPPL

SEQ ID NO: 1119 - protein, 737 aa, Artificial Sequence
  Description of Artificial Sequence: Synthetic polypeptide
MAADGYLPDWLEDNLSEGIREWWALKPGAPKPKANQQKQDDGRGLVLPGYKYLGPFNGLDKGEPVNAADAAALEHDKAYDQQLKAGDNPYLRYNHADAEFQERLQEDTSFGGNLGRAVFQAKKRVLEPLGLVEEGAKTAPGKKRPVEPSPQRSPDSSTGIGKKGQQPARKRLNFGQTGDSESVPDPQPLGEPPAAPSGVAPNTMAAGGGAPMADNNEGADGVGNASGNWHCDSTWLGDRVITTSTRTWALPTYNNHLYKQISSASTGASNDNHYFGYSTPWGYFDFNRFHCHFSPRDWQRLITTIGGFRPKRLNFKLFNIQVKEVTDNNGVKTIANNLTSTVQVFTDSEYQLPYVLGSAHQGCLPPFPADVFMIPQYGYLTLNNGSQAVGRSSFYCLEYFPSQMLRTGNNFTFSYTFEDVPFHSSYAHSQSLDRLMNPLIDQYLYYLSRTQTTGGTANTQTLGFSQGGPNTMANQAKNWLPGPCYRQQRVSTTTGQNNNSNFAWTAGTKYHLNGRNSLANPGIAMATHKDDKERFFPSNGILIFGKQNAARDNADYSDVMLTSEEEIKTTNPVATEEYGIVADNLQQQNTAPQIGTVNSQGALPGMVWQNRDVYLQGPIWAKIPHTDGNFHPSPLMGGFGLKHPPPQILIKNTPVPADPPTTFNQSKLNSFITQYSTGQVSVEIEWELQKENSKRWNPEIQYTSNYYKSTSVDFAVNTEGVYSEPHPIGTRYLTRPL

SEQ ID NO: 1120 - protein, 736 aa, Artificial Sequence
  Description of Artificial Sequence: Synthetic polypeptide
MAADGYLPDWLEDTLSEGIRQWWKLKPGPPPPKPAERHKDDGRGLVLPGYKYLGPFNGLDKGEPVNAADAAALEHDKAYDQQLKAGDNPYLRYNHADAEFQERLQEDTSFGGNLGRAVFQAKKRVLEPLGLVEEPVKTAPGKKRPVEQSPQEPDSSSGIGKKGQQPAKKRLNFGQTGDSESVPDPQPLGEPPATPAAVGPTTMASGGGAPMADNNEGADGVGNASGNWHCDSTWMGDRVITTSTRTWALPTYNNHLYKQISSASTGASNDNHYFGYSTPWGYFDFNRFHCHFSPRDWQRLINNNWGFRPKRLNFKLFNIQVKEVTQNEGTKTIANNLTSTIQVFTDSEYQLPYVLGSAHQGCLPPFPADVFMIPQYGYLTLNNGSQAVGRSSFYCLEYFPSQMLRTGNNFQFTYTFEDVPFHSSYAHSQSLDRLMNPLIDQYLYYLSRTQTTGGTANTQTLGFSQGGPNTMANHAKNWLPGPCYRQQRVSTTTGQNNNSNFAWTAGTKYHLNGRNSLANPGIAMATHKDDKERFFPSNGILIFGKQNAARDNADYSDVMLTSEEEIKTTNPVATEEYGIVADNLQQQNTAPQIGTVNSQGALPGMVWQNRDVYLQGPIWAKIPHTDGNFHPSPLMGGFGLKHPPPQILIKNTPVPADPPTTFNQSKLNSFITQYSTGQVSVEIEWELQKENSKRWNPEIQYTSNYYKSTSVDFAVNTEGVYSEPHPIGTRYLTRPL

SEQ ID NO: 1121 - protein, 737 aa, Artificial Sequence
  Description of Artificial Sequence: Synthetic polypeptide
MAADGYLPDWLEDNLSQGIREWWDLKPGAPKPKANQQKQDDGRGLVLPGYKYLGPFNGLDKGEPVNAADAAALEHDKAYDQQLKAGDNPYLRYNHADAEFQERLQEDTSFGGNLGRAVFQAKKRVLEPLGLVEEGAKTAPGKKRPVEPSPQRSPDSSTGIGKKGQQPARKRLNFGQTGDSESVPDPQPLGEPPAAPAAVGPTTMASGGGAPMADNNEGADGVGSSSGNWHCDSQWLGDRVITTSTRTWALPTYNNHLYKQISSASTGASNDNHYFGYSTPWGYFDFNRFHCHFSPRDWQRLINNNWGFRPKRLSFKLFNIQVKEVTQNEGTKTIANNLTSTIQVFTDSEYQLPYVLGSAHQGCLPPFPADVFMIPQYGYLTLNNGSQAVGRSSFYCLEYFPSQMLRTGNNFQFTYTFEDVPFHSSYAHSQSLDRLMNPLIDQYLYYLSRTQTTGGTTNAQTLGFSQGGPNTMANQAKNWLPGPCYRQQRVSTTTGQNNNSNFAWTAGTKYHLNGRNSLANPGIAMATHKDDKERFFPSNGILIFGKQNAARDNADYSDVMLTSEEEIKTTNPVATEEYGIVADNLQQQNTAPQIGTVNSQGALPGMVWQNRDVYLQGPIWAKIPHTDGNFHPSPLMGGFGLKHPPPQILIKNTPVPADPPTTFNQSKLNSFITQYSTGQVSVEIEWELQKENSKRWNPEIQYTSNYYKSTNVDFAVNTEGVYSEPHPIGTRYLTRPL

SEQ ID NO: 1122 - protein, 736 aa, Artificial Sequence
  Description of Artificial Sequence: Synthetic polypeptide
MAADGYLPDWLEDNLSEGIREWWDLKPGAPKPKANQQKQDDGRGLVLPGYKYLGPFNGLDKGEPVNAADAAALEHDKAYDQQLKAGDNPYLRYNHADAEFQERLQEDTSFGGNLGRAVFQAKKRVLEPFGLVEEGAKTAPGKKRPVEQSPQEPDSSSGIGKTGQQPAKKRLNFGQTGDTESVPDPQPIGEPPAAPSGVGPNTMAAGGGAPMADNNEGADGVGSSSGNWHCDSTWMGDRVITTSTRTWALPTYNNHLYKQISSASTGASNDNHYFGYSTPWGYFDFNRFHCHFSPRDWQRLINNNWGFRPKRLNFKLFNIQVKEVTQNEGTKTIANNLTSTIQVFTDSEYQLPYVLGSAHQGCLPPFPADVFMIPQYGYLTLNNGSQAVGRSSFYCLEYFPSQMLRTGNNFQFTYTFEDVPFHSSYAHSQSLDRLMNPLIDQYLYYLSRTQTTGGTANTQTLGFSQGGPNTMANQAKNWLPGPCYRQQRVSTTTGQNNNSNFAWTAGTKYHLNGRNSLANPGIAMATHKDDKERFFPSNGILIFGKQNAARDNADYSDVMLTSEEEIKTTNPVATEEYGIVADNLQQQNTAPQIGTVNSQGALPGMVWQNRDVYLQGPIWAKIPHTDGNFHPSPLMGGFGLKHPPPQILIKNTPVPADPPTTFNQSKLNSFITQYSTGQVSVEIEWELQKENSKRWNPEIQYTSNYYKSTNVDFAVNTEGVYSEPHPIGTRYFTRPL

SEQ ID NO: 1123 - protein, 736 aa, Artificial Sequence
  Description of Artificial Sequence: Synthetic polypeptide
MAADGYLPDWLEDNLSEGIREWWDLKPGAPKPKANQQKQDDGRGLVLPGYKYLGPFNGLDKGEPVNAADAAALEHDKAYDQQLKAGDNPYLRYNHADAEFQERLQEDTSFGGNLGRAVFQAKKRVLEPLGLVEEGAKTAPGKKRPVEQSPQEPDSSSGIGKTGQQPAKKRLNFGQTGDSESVPDPQPLGEPPATPAAVGPTTMASGGGAPMADNNEGADGVGNSSGNWHCDSTWMGDRVITTSTRTWALPTYNNHLYKQISSASTGASNDNHYFGYSTPWGYFDFNRFHCHFSPRDWQRLINNNWGFRPKRLNFKLFNIQVKEVTDNNGVKTIANNLTSTVQVFTDSEYQLPYVLGSAHQGCLPPFPADVFMIPQYGYLTLNNGSQAVGRSSFYCLEYFPSQMLRTGNNFQFTYTFEDVPFHSSYAHSQSLDRLMNPLIDQYLYYLSRTQTTGGTANTQTLGFSQGGPNTMANQAKNWLPGPCYRQQRVSTTTGQNNNSNFAWTAGTKYHLNGRNSLANPGIAMATHKDDKERFFPSNGILIFGKQNAARDNADYSDVMLTSEEEIKTTNPVATEEYGIVADNLQQQNTAPQIGTVNSQGALPGMVWQNRDVYLQGPIWAKIPHTDGNFHPSPLMGGFGLKHPPPQILIKNTPVPADPPTTFNQSKLNSFITQYSTGQVSVEIEWELQKENSKRWNPEIQYTSNYYKSTNVDFAVNTEGVYSEPHPIGTRYLTRPL

SEQ ID NO: 1124 - protein, 736 aa, Artificial Sequence
  Description of Artificial Sequence: Synthetic polypeptide
MAADGYLPDWLEDNLSEGIREWWDLKPGAPKPKANQQKQDDGRGLVLPGYKYLGPFNGLDKGEPVNAADAAALEHDKAYDQQLKAGDNPYLRYNHADAEFQERLQEDTSFGGNLGRAVFQAKKRVLEPLGLVEEGAKTAPGKKRPVEQSPQEPDSSSGIGKTGQQPAKKRLNFGQTGDSESVPDPQPLGEPPATPAAVGPTTMASGGGAPMADNNEGADGVGNASGNWHCDSTWLGDRVITTSTRTWALPTYNNHLYKQISSASTGASNDNHYFGYSTPWGYFDFNRFHCHFSPRDWQRLINNNWGFRPKRLNFKLFNIQVKEVTQNEGTKTIANNLTSTIQVFTDSEYQLPYVLGSAHQGCLPPFPADVFMIPQYGYLTLNNGSQAVGRSSFYCLEYFPSQMLRTGNNFEFSYQFEDVPFHSSYAHSQSLDRLMNPLIDQYLYYLSRTQTTGGTANTQTLGFSQGGPNTMANQAKNWLPGPCYRQQRVSTTTGQNNNSNFAWTAGTKYHMNGRNSLVNPGIAMATHKDDKERFFPSNGILIFGKQNVARDNADYSDVMLTSEEEIKTTNPVATEEYGIVADNLQQQNTAPQIGTVNSQGALPGMVWQNRDVYLQGPIWAKIPHTDGNFHPSPLMGGFGLKHPPPQILIKNTPVPADPPTTFNQSKLNSFITQYSTGQVSVEIEWELQKENSKRWNPEIQYTSNYYKSTSVDFAVNTEGVYSEPHPIGTRYLTRPL

SEQ ID NO: 1125 - DNA, 2217 bp, Artificial Sequence
  Description of Artificial Sequence: Synthetic polynucleotide
atggctgccgatggttatcttccagattggctcgaggacaacctctctgagggcattcgcgagtggtgggcgctgaaacctggagccccgaagcccaaagccaaccagcaaaagcaggacgacggccggggtctggtgcttcctggctacaagtacctcggacccttcaacggactcgacaagggggagcccgtcaacgcggcggacgcagcggccctcgagcacgacaaggcctacgaccagcagctgcaggcgggtgacaatccgtacctgcggtataaccacgccgacgccgagtttcaggagcgtctgcaagaagatacgtcttttgggggcaacctcgggcgagcagtcttccaggccaagaagcgggttctcgaacctctcggtctggttgaggaaggcgctaagacggctcctggaaagaagagaccggtagagccatcaccccagcgttctccagactcctctacgggcatcggcaagaaaggccaacagcccgccagaaaaagactcaattttggtcagactggcgactcagagtcagttccagaccctcaacctctcggagaacctccagcagcgccctctggtgtgggacctaatacaatggctgcaggcggtggcgcaccaatggcagacaataacgaaggcgccgacggagtgggtagttcctcgggaaattggcattgcgattccacatggctgggcgacagagtcatcaccaccagcacccgaacctgggccctgcccacctacaacaaccacctctacaagcaaatctccaacgggacatcgggaggagccaccaacgacaacacctacttcggctacagcaccccctgggggtattttgactttaacagattccactgccacttttcaccacgtgactggcagcgactcatcaacaacaactggggattccggcccaagagactcagcttcaagctcttcaacatccaggtcaaggaggtcacgcagaatgaaggcaccaagaccatcgccaataacctcaccagcaccatccaggtgtttacggactcggagtaccagctgccgtacgttctcggctctgcccaccagggctgcctgcctccgttcccggcggacgtgttcatgattccccagtacggctacctaacactcaacaacggtagtcaggccgtgggacgctcctccttctactgcctggaatactttccttcgcagatgctgagaaccggcaacaacttccagtttacttacaccttcgaggacgtgcctttccacagcagctacgcccacagccagagcttggaccggctgatgaatcctctgattgaccagtacctgtactacttgtctcggactcaaacaacaggaggcacggcaaatacgcagactctgggcttcagccaaggtgggcctaatacaatggccaatcaggcaaagaactggctgccaggaccctgttaccgccaacaacgcgtctcaacgacaaccgggcaaaacaacaatagcaactttgcctggactgctgggaccaaataccatctgaatggaagaaattcattggctaatcctggcatcgctatggcaacacacaaagacgacgaggagcgtttttttcccagtaacgggatcctgatttttggcaaacaaaatgctgccagagacaatgcggattacagcgatgtcatgctcaccagcgaggaagaaatcaaaaccactaaccctgtggctacagaggaatacggtatcgtggcagataacttgcagcagcaaaacacggctcctcaaattggaactgtcaacagccagggggccttacccggtatggtttggcagaaccgggacgtgtacctgcagggtcccatctgggccaagattcctcacacggacggcaacttccacccgtctccgctgatgggcggctttggcctgaaacatcctccgcctcagatcctgatcaagaacacgcctgtacctgcggatcctccgaccaccttcaaccagtcaaagctgaactctttcatcacgcaatacagcaccggacaggtcagcgtggaaattgaatgggagctgcagaaggaaaacagcaagcgctggaaccccgagatccagtacacctccaactactacaaatctacaagtgtggactttgctgttaatacagaaggcgtgtactctgaaccccgccccattggcacccgttacctcacccgtaatctgtaa

SEQ ID NO: 1126 - protein, 738 aa, Artificial Sequence; identical to SEQ ID NO: 116
  Description of Artificial Sequence: Synthetic polypeptide

SEQ ID NO: 1127 - protein, 735 aa, Artificial Sequence
  Description of Artificial Sequence: Synthetic polypeptide
MAADGYLPDWLEDNLSEGVREWWALQPGAPKPKANQQHQDNARGLVLPGYKYLGPGNGLDKGEPVNAADAAALEHDKAYDQQLKAGDNPYLKYNHADAEFQQRLQGDTSFGGNLGRAVFQAKKRVLEPLGLVEQAGETAPGKKRPLIESPQQPDSSTGIGKKGKQPAKKKLVFEDETGAGDGPPEGSTSGAMSDDSEMRAAAGGAAVEGGQGADGVGNASGDWHCDSTWSEGHVTTTSTRTWVLPTYNNHLYKRLGESLQSNTYNGFSTPWGYFDFNRFHCHFSPRDWQRLINNNWGMRPKAMRVKIFNIQVKEVTTSNGETTVANNLTSTVQIFADSSYELPYVMDAGQEGSLPPFPNDVFMVPQYGYCGLVTGNTSQQQTDRNAFYCLEYFPSQMLRTGNNFEITYSFEKVPFHSMYAHSQSLDRLMNPLIDQYLWGLQSTTTGTTLNAGTATTNFTKLRPTNFSNFKKNWLPGPSIKQQGFSKTANQNYKIPATGSDSLIKYETHSTLDGRWSALTPGPPMATAGPADSKFSNSQLIFAGPKQNGNTATVPGTLIFTSEEELAATNATDTDMWGNLPGGDQSNSNLPTVDRLTALGAVPGMVWQNRDIYYQGPIWAKIPHTDGHFHPSPLIGGFGLKHPPPQIFIKNTPVPANPATTFSSTPVNSFITQYSTGQVSVQIDWEIQKERSKRWNPEVQFTSNYGQQNSLLWAPDAAGKYTEPRAIGTRYLTHHL

SEQ ID NO: 1128 - protein, 735 aa, Artificial Sequence
  Description of Artificial Sequence: Synthetic polypeptide
MAADGYLPDWLEDNLSEGVREWWALQPGAPKPKANQQHQDNARGLVLPGYKYLGPGNGLDKGEPVNAADAAALEHDKAYDQQLKAGDNPYLKYNHADAEFQQRLQGDTSFGGNLGRAVFQAKKRVLEPLGLVEQAGETAPGKKRPLIESPQQPDSSTGIGKKGKQPAKKKLVFEDETGAGDGPPEGSTSGAMSDDSEMRAAAGGAAVEGGQGADGVGNASGDWHCDSTWSEGHVTTTSTRTWVLPTYNNHLYKRLGESLQSNTYNGFSTPWGYFDFNRFHCHFSPRDWQRLINNNWGMRPKAMRVKIFNIQVKEVTTSNGETTVANNLTSTVQIFADSSYELPYVMDAGQEGSLPPFPNDVFMVPQYGYCGLVTGNTSQQQTDRNAFYCLEYFPSQMLRTGNNFEITYSFEKVPFHSMYAHSQSLDRLMNPLIDQYLWGLQSTTTGTTLNAGTATTNFTKLRPTNFSNFKKNWLPGPSIKQQGFSKTANQNYLIPATGSDSLIRYETHSTLDGRWSALTPGPPMATAGPADSKFSNSQLIFAGPKQNGNTATVPGTLIFTSEEELAATNATDTDMWGNLPFRDLSSSNLPTVDRSTPLGAVPGMVWQNRDIYYQGPIWAKIPHTDGHFHPSPLIGGFGLKHPPPQIFIKNTPVPANPATTFSSTPVNSFITQYSTGQVSVQIDWEIQKERSKRWNPEVQFTSNYGQQNSLLWAPDAAGKYTEPRAIGTRYLTHHL

SEQ ID NO: 1129 - protein, 735 aa, Artificial Sequence
  Description of Artificial Sequence: Synthetic polypeptide
MAADGYLPDWLEDNLSEGVREWWALQPGAPKPKANQQHQDNARGLVLPGYKYLGPGNGLDKGEPVNAADAAALEHDKAYDQQLKAGDNPYLKYNHADAEFQQRLQGDTSFGGNLGRAVFQAKKRVLEPLGLVEQAGETAPGKKRPLIESPQQPDSSTGIGKKGKQPAKKKLVFEDETGAGDGPPEGSTSGAMSDDSEMRAAAGGAAVEGGQGADGVGNASGDWHCDSTWSEGHVTTTSTRTWVLPTYNNHLYKRLGESLQSNTYNGFSTPWGYFDFNRFHCHFSPRDWQRLINNNWGMRPKAMRVKIFNIQVKEVTTSNGETTVANNLTSTVQIFADSSYELPYVMDAGQEGSLPPFPNDVFMVPQYGYCGLVTGNTSQQQTDRNAFYCLEYFPSQMLRTGNNFEITYSFEKVPFHSMYAHSQSLDRLMNPLIDQYLWGLQSTTTGTTLNAGTATTNFTKLRPTNFSNFKKNWLPGPSIKQQGFSKTANQNYYIPATGSDSLILYETHSTLDGRWSALTPGPPMATAGPADSKFSNSQLIFAGPKQNGNTATVPGTLIFTSEEELAATNATDTDMWGNLPGGDQSNSNLPTVDRLTALGAVPGMVWQNRDIYYQGPIWAKIPHTDGHFHPSPLIGGFGLKHPPPQIFIKNTPVPANPATTFSSTPVNSFITQYSTGQVSVQIDWEIQKERSKRWNPEVQFTSNYGQQNSLLWAPDAAGKYTEPRAIGTRYLTHHL

SEQ ID NO: 1130 - protein, 735 aa, Artificial Sequence
  Description of Artificial Sequence: Synthetic polypeptide
MAADGYLPDWLEDNLSEGVREWWALQPGAPKPKANQQHQDNARGLVLPGYKYLGPGNGLDKGEPVNAADAAALEHDKAYDQQLKAGDNPYLKYNHADAEFQQRLQGDTSFGGNLGRAVFQAKKRVLEPLGLVEQAGETAPGKKRPLIESPQQPDSSTGIGKKGKQPAKKKLVFEDETGAGDGPPEGSTSGAMSDDSEMRAAAGGAAVEGGQGADGVGNASGDWHCDSTWSEGHVTTTSTRTWVLPTYNNHLYKRLGESLQSNTYNGFSTPWGYFDFNRFHCHFSPRDWQRLINNNWGMRPKAMRVKIFNIQVKEVTTSNGETTVANNLTSTVQIFADSSYELPYVMDAGQEGSLPPFPNDVFMVPQYGYCGLVTGNTSQQQTDRNAFYCLEYFPSQMLRTGNNFEITYSFEKVPFHSMYAHSQSLDRLMNPLIDQYLWGLQSTTTGTTLNAGTATTNFTKLRPTNFSNFKKNWLPGPSIKQQGFSKTANQNYGIPATGSDSLIKYETHSTLDGRWSALTPGPPIATAGPADSKFSNSQLIFAGPKQNGNTATVPGTLIFTSEEELAATNATDTDMWGNLPLYDASSSNLPTVDRLTLLGAVPGMVWQNRDIYYQGPIWAKIPHTDGHFHPSPLIGGFGLKHPPPQIFIKNTPVPANPATTFSSTPVNSFITQYSTGQVSVQIDWEIQKERSKRWNPEVQFTSNYGQQNSLLWAPDAAGKYTEPRAIGTRYLTHHL

SEQ ID NO: 1131 - protein, 735 aa, Artificial Sequence
  Description of Artificial Sequence: Synthetic polypeptide
MAADGYLPDWLEDNLSEGVREWWALQPGAPKPKANQQHQDNARGLVLPGYKYLGPGNGLDKGEPVNAADAAALEHDKAYDQQLKAGDNPYLKYNHADAEFQQRLQGDTSFGGNLGRAVFQAKKRVLEPLGLVEQAGETAPGKKRPLIESPQQPDSSTGIGKKGKQPAKKKLVFEDETGAGDGPPEGSTSGAMSDDSEMRAAAGGAAVEGGQGADGVGNASGDWHCDSTWSEGHVTTTSTRTWVLPTYNNHLYKRLGESLQSNTYNGFSTPWGYFDFNRFHCHFSPRDWQRLINNNWGMRPKAMRVKIFNIQVKEVTTSNGETTVANNLTSTVQIFADSSYELPYVMDAGQEGSLPPFPNDVFMVPQYGYCGLVTGNTSQQQTDRNAFYCLEYFPSQMLRTGNNFEITYSFEKVPFHSMYAHSQSLDRLMNPLIDQYLWGLQSTTTGTTLNAGTATTNFTKLRPTNFSNFKKNWLPGPSIKQQGFSKTANQNYTIPATGSDSLITYETHSTLDGRWSALTPGPPGATAGPADSKFSNSQLIFAGPKQNGNTATVPGTLIFTSEEELAATNATDTDMWGNLPRVDTSASNLPTVDRYTNLGAVPGMVWQNRDIYYQGPIWAKIPHTDGHFHPSPLIGGFGLKHPPPQIFIKNTPVPANPATTFSSTPVNSFITQYSTGQVSVQIDWEIQKERSKRWNPEVQFTSNYGQQNSLLWAPDAAGKYTEPRAIGTRYLTHHL

SEQ ID NO: 1132 - protein, 735 aa, Artificial Sequence
  Description of Artificial Sequence: Synthetic polypeptide
MAADGYLPDWLEDNLSEGVREWWALQPGAPKPKANQQHQDNARGLVLPGYKYLGPGNGLDKGEPVNAADAAALEHDKAYDQQLKAGDNPYLKYNHADAEFQQRLQGDTSFGGNLGRAVFQAKKRVLEPLGLVEQAGETAPGKKRPLIESPQQPDSSTGIGKKGKQPAKKKLVFEDETGAGDGPPEGSTSGAMSDDSEMRAAAGGAAVEGGQGADGVGNASGDWHCDSTWSEGHVTTTSTRTWVLPTYNNHLYKRLGESLQSNTYNGFSTPWGYFDFNRFHCHFSPRDWQRLINNNWGMRPKAMRVKIFNIQVKEVTTSNGETTVANNLTSTVQIFADSSYELPYVMDAGQEGSLPPFPNDVFMVPQYGYCGLVTGNTSQQQTDRNAFYCLEYFPSQMLRTGNNFEITYSFEKVPFHSMYAHSQSLDRLMNPLIDQYLWGLQSTTTGTTLNAGTATTNFTKLRPTNFSNFKKNWLPGPSIKQQGFSKTANQNYSIPATGSDSLIKYETHSTLDGRWSALTPGPPFATAGPADSKFSNSQLIFAGPKQNGNTATVPGTLIFTSEEELAATNATDTDMWGNLPDYDSSLSNLPTVDRDTTLGAVPGMVWQNRDIYYQGPIWAKIPHTDGHFHPSPLIGGFGLKHPPPQIFIKNTPVPANPATTFSSTPVNSFITQYSTGQVSVQIDWEIQKERSKRWNPEVQFTSNYGQQNSLLWAPDAAGKYTEPRAIGTRYLTHHL

SEQ ID NO: 1133 - protein, 735 aa, Artificial Sequence
  Description of Artificial Sequence: Synthetic polypeptide
MAADGYLPDWLEDNLSEGVREWWALQPGAPKPKANQQHQDNARGLVLPGYKYLGPGNGLDKGEPVNAADAAALEHDKAYDQQLKAGDNPYLKYNHADAEFQQRLQGDTSFGGNLGRAVFQAKKRVLEPLGLVEQAGETAPGKKRPLIESPQQPDSSTGIGKKGKQPAKKKLVFEDETGAGDGPPEGSTSGAMSDDSEMRAAAGGAAVEGGQGADGVGNASGDWHCDSTWSEGHVTTTSTRTWVLPTYNNHLYKRLGESLQSNTYNGFSTPWGYFDFNRFHCHFSPRDWQRLINNNWGMRPKAMRVKIFNIQVKEVTTSNGETTVANNLTSTVQIFADSSYELPYVMDAGQEGSLPPFPNDVFMVPQYGYCGLVTGNTSQQQTDRNAFYCLEYFPSQMLRTGNNFEITYSFEKVPFHSMYAHSQSLDRLMNPLIDQYLWGLQSTTTGTTLNAGTATTNFTKLRPTNFSNFKKNWLPGPSIKQQGFSKTANQNYSIPATGSDSLIWYETHSTLDGRWSALTPGPPCATAGPADSKFSNSQLIFAGPKQNGNTATVPGTLIFTSEEELAATNATDTDMWGNLPQGDSSLSNLPTVDRMTVLGAVPGMVWQNRDIYYQGPIWAKIPHTDGHFHPSPLIGGFGLKHPPPQIFIKNTPVPANPATTFSSTPVNSFITQYSTGQVSVQIDWEIQKERSKRWNPEVQFTSNYGQQNSLLWAPDAAGKYTEPRAIGTRYLTHHL

SEQ ID NO: 1134 - protein, 735 aa, Artificial Sequence
  Description of Artificial Sequence: Synthetic polypeptide
MAADGYLPDWLEDNLSEGVREWWALQPGAPKPKANQQHQDNARGLVLPGYKYLGPGNGLDKGEPVNAADAAALEHDKAYDQQLKAGDNPYLKYNHADAEFQQRLQGDTSFGGNLGRAVFQAKKRVLEPLGLVEQAGETAPGKKRPLIESPQQPDSSTGIGKKGKQPAKKKLVFEDETGAGDGPPEGSTSGAMSDDSEMRAAAGGAAVEGGQGADGVGNASGDWHCDSTWSEGHVTTTSTRTWVLPTYNNHLYKRLGESLQSNTYNGFSTPWGYFDFNRFHCHFSPRDWQRLINNNWGMRPKAMRVKIFNIQVKEVTTSNGETTVANNLTSTVQIFADSSYELPYVMDAGQEGSLPPFPNDVFMVPQYGYCGLVTGNTSQQQTDRNAFYCLEYFPSQMLRTGNNFEITYSFEKVPFHSMYAHSQSLDRLMNPLIDQYLWGLQSTTTGTTLNAGTATTNFTKLRPTNFSNFKKNWLPGPSIKQQGFSKTANQNYCIPATGSDSLIRYETHSTLDGRWSALTPGPPLATAGPADSKFSNSQLIFAGPKQNGNTATVPGTLIFTSEEELAATNATDTDMWGNLPYKDSSRSNLPTVDRETSLGAVPGMVWQNRDIYYQGPIWAKIPHTDGHFHPSPLIGGFGLKHPPPQIFIKNTPVPANPATTFSSTPVNSFITQYSTGQVSVQIDWEIQKERSKRWNPEVQFTSNYGQQNSLLWAPDAAGKYTEPRAIGTRYLTHHL

SEQ ID NO: 1135 - protein, 735 aa, Artificial Sequence
  Description of Artificial Sequence: Synthetic polypeptide
MAADGYLPDWLEDNLSEGVREWWALQPGAPKPKANQQHQDNARGLVLPGYKYLGPGNGLDKGEPVNAADAAALEHDKAYDQQLKAGDNPYLKYNHADAEFQQRLQGDTSFGGNLGRAVFQAKKRVLEPLGLVEQAGETAPGKKRPLIESPQQPDSSTGIGKKGKQPAKKKLVFEDETGAGDGPPEGSTSGAMSDDSEMRAAAGGAAVEGGQGADGVGNASGDWHCDSTWSEGHVTTTSTRTWVLPTYNNHLYKRLGESLQSNTYNGFSTPWGYFDFNRFHCHFSPRDWQRLINNNWGMRPKAMRVKIFNIQVKEVTTSNGETTVANNLTSTVQIFADSSYELPYVMDAGQEGSLPPFPNDVFMVPQYGYCGLVTGNTSQQQTDRNAFYCLEYFPSQMLRTGNNFEITYSFEKVPFHSMYAHSQSLDRLMNPLIDQYLWGLQSTTTGTTLNAGTATTNFTKLRPTNFSNFKKNWLPGPSIKQQGFSKTANQNYIIPATGSDSLIYYETHSTLDGRWSALTPGPPRATAGPADSKFSNSQLIFAGPKQNGNTATVPGTLIFTSEEELAATNATDTDMWGNLPWIDNSRSNLPTVDRPTSLGAVPGMVWQNKNIYYQGPIWAKIPHTDGHFHPSPLIGGFGLKHPPPQIFIKNTPVPANPATTFTSTPVNSFITQYSTGQVSVQIDWEIQKERSKRWNPEVQFTSNYGQQNSLLWAPDAAGKYTEPRAIGTRYLTHHL

SEQ ID NO: 1136 - protein, 735 aa, Artificial Sequence
  Description of Artificial Sequence: Synthetic polypeptide
MAADGYLPDWLEDNLSEGVREWWALQPGAPKPKANQQHQDNARGLVLPGYKYLGPGNGLDKGEPVNAADAAALEHDKAYDQQLKAGDNPYLKYNHADAEFQQRLQGDTSFGGNLGRAVFQAKKRVLEPLGLVEQAGETAPGKKRPLIESPQQPDSSTGIGKKGKQPAKKKLVFEDETGAGDGPPEGSTSGAMSDDSEMRAAAGGAAVEGGQGADGVGNASGDWHCDSTWSEGHVTTTSTRTWVLPTYNNHLYKRLGESLQSNTYNGFSTPWGYFDFNRFHCHFSPRDWQRLINNNWGMRPKAMRVKIFNIQVKEVTTSNGETTVANNLTSTVQIFADSSYELPYVMDAGQEGSLPPFPNDVFMVPQYGYCGLVTGNTSQQQTDRNAFYCLEYFPSQMLRTGNNFEITYSFEKVPFHSMYAHSQSLDRLMNPLIDQYLWGLQSTTTGTTLNAGTATTNFTKLRPTNFSNFKKNWLPGPSIKQQGFSKTANQNYGIPATGSDSLIIYETHSTLDGRWSALTPGPPRATAGPADSKFSNSQLIFAGPKQNGNTATVPGTLIFTSEEELAATNATDTDMWGNLPGGDQSNSNLPTVDRLTALGAVPGMVWQNRDIYYQGPIWAKIPHTDGHFHPSPLIGGFGLKHPPPQIFIKNTPVPANPATTFSSTPVNSFITQYSTGQVSVQIDWEIQKERSKRWNPEVQFTSNYGQQNSLLWAPDAAGKYTEPRAIGTRYLTHHL

SEQ ID NO: 1137 - protein, 735 aa, Artificial Sequence
  Description of Artificial Sequence: Synthetic polypeptide
MAADGYLPDWLEDNLSEGVREWWALQPGAPKPKANQQHQDNARGLVLPGYKYLGPGNGLDKGEPVNAADAAALEHDKAYDQQLKAGDNPYLKYNHADAEFQQRLQGDTSFGGNLGRAVFQAKKRVLEPLGLVEQAGETAPGKKRPLIESPQQPDSSTGIGKKGKQPAKKKLVFEDETGAGDGPPEGSTSGAMSDDSEMRAAAGGAAVEGGQGADGVGNASGDWHCDSTWSEGHVTTTSTRTWVLPTYNNHLYKRLGESLQSNTYNGFSTPWGYFDFNRFHCHFSPRDWQRLINNNWGMRPKAMRVKIFNIQVKEVTTSNGETTVANNLTSTVQIFADSSYELPYVMDAGQEGSLPPFPNDVFMVPQYGYCGLVTGNTSQQQTDRNAFYCLEYFPSQMLRTGNNFEITYSFEKVPFHSMYAHSQSLDRLMNPLIDQYLWGLQSTTTGTTLNAGTATTNFTKLRPTNFSNFKKNWLPGPSIKQQGFSKTANQNYVIPATESDSLIYYETHSTLDGRWSALTPGPPYATAGPADSKFSNSQLIFAGPKQNGNTATVPGTLIFTSEEELAATNATDTDMWGNLPPRDDSTSNLPTVDRKTYLGAVPGMVWQNRDIYYQGPIWAKIPHTDGHFHPSPLIGGFGLKHPPPQIFIKNTPVPANPATTFSSTPVNSFITQYSTGQVSVQIDWEIQKERSKRWNPEVQFTSNYGQQNSLLWAPDAAGKYTEPRAIGTRYLTHHL

SEQ ID NO: 1138 - protein, 735 aa, Artificial Sequence
  Description of Artificial Sequence: Synthetic polypeptide
MAADGYLPDWLEDNLSEGVREWWALQPGAPKPKANQQHQDNARGLVLPGYKYLGPGNGLDKGEPVNAADAAALEHDKAYDQQLKAGDNPYLKYNHADAEFQQRLQGDTSFGGNLGRAVFQAKKRVLEPLGLVEQAGETAPGKKRPLIESPQQPDSSTGIGKKGKQPAKKKLVFEDETGAGDGPPEGSTSGAMSDDSEMRAAAGGAAVEGGQGADGVGNASGDWHCDSTWSEGHVTTTSTRTWVLPTYNNHLYKRLGESLQSNTYNGFSTPWGYFDFNRFHCHFSPRDWQRLINNNWGMRPKAMRVKIFNIQVKEVTTSNGETTVANNLTSTVQIFADSSYELPYVMDAGQEGSLPPFPNDVFMVPQYGYCGLVTGNTSQQQTDRNAFYCLEYFPSQMLRTGNNFEITYSFEKVPFHSMYAHSQSLDRLMNPLIDQYLWGLQSTTTGTTLNAGTATTNFTKLRPTNFSNFKKNWLPGPSIKQQGFSKTANQNYYIPATGSDSLIIYETHSTLDGRWSALTPGPPIATAGPADSKFSNSQLIFAGPKQNGNTATVPGTLIFTSEEELAATNSTDTDMWGNLPTDDDSRSNLPTVDRMTLLGAVPGMVWQNRDIYYQGPIWAKIPHTDGHFHPSPLIGGFGLKHPPPQIFIKNTPVPANPATTFSSTPVNSFITQYSTGQVSVQIDWEIQKERSKRWNPEVQFTSNYGQQNSLLWAPDAAGKYTEPRAIGTRYLTHHL

SEQ ID NO: 1139 - protein, 735 aa, Artificial Sequence
  Description of Artificial Sequence: Synthetic polypeptide
MAADGYLPDWLEDNLSEGVREWWALQPGAPKPKANQQHQDNARGLVLPGYKYLGPGNGLDKGEPVNAADAAALEHDKAYDQQLKAGDNPYLKYNHADAEFQQRLQGDTSFGGNLGRAVFQAKKRVLEPLGLVEQAGETAPGKKRPLIESPQQPDSSTGIGKKGKQPAKKKLVFEDETGAGDGPPEGSTSGAMSDDSEMRAAAGGAAVEGGQGADGVGNASGDWHCDSTWSEGHVTTTSTRTWVLPTYNNHLYKRLGESLQSNTYNGFSTPWGYFDFNRFHCHFSPRDWQRLINNNWGMRPKAMRVKIFNIQVKEVTTSNGETTVANNLTSTVQIFADSSYELPYVMDAGQEGSLPPFPNDVFMVPQYGYCGLVTGNTSQQQTDRNAFYCLEYFPSQMLRTGNNFEITYSFEKVPFHSMYAHSQSLDRLMNPLIDQYLWGLQSTTTGTTLNAGTATTNFTKLRPTNFSNFKKNWLPGPSIKQQGFSKTANQNYHIPATGSDSLIYYETHSTLDGRWSALTPGPPSATAGPADSKFSNSQLIFAGPKQNGNTATVPGTLIFTSEEELAATNATDTDMWGNLPRRDSSVSNLPTVDRYTDLGAVPGMVWQNRDIYYQGPIWAKIPHTDGHFHPSPLIGGFGLKHPPPQIFIKNTPVPANPATTFSSTPVNSFITQYSTGQVSVQIDWEIQKERSKRWNPEVQFTSNYGQQNSLLWAPDAAGKYTEPRAIGTRYLTHHL

SEQ ID NO: 1140 - protein, 735 aa, Artificial Sequence
  Description of Artificial Sequence: Synthetic polypeptide
MAADGYLPDWLEDNLSEGVREWWALQPGAPKPKANQQHQDNARGLVLPGYKYLGPGNGLDKGEPVNAADAAALEHDKAYDQQLKAGDNPYLKYNHADAEFQQRLQGDTSFGGNLGRAVFQAKKRVLEPLGLVEQAGETAPGKKRPLIESPQQPDSSTGIGKKGKQPAKKKLVFEDETGAGDGPPEGSTSGAMSDDSEMRAAAGGAAVEGGQGADGVGNASGDWHCDSTWSEGHVTTTSTRTWVLPTYNNHLYKRLGESLQSNTYNGFSTPWGYFDFNRFHCHFSPRDWQRLINNNWGMRPKAMRVKIFNIQVKEVTTSNGETTVANNLTSTVQIFADSSYELPYVMDAGQEGSLPPFPNDVFMVPQYGYCGLVTGNTSQQQTDRNAFYCLEYFPSQMLRTGNNFEITYSFEKVPFHSMYAHSQSLDRLMNPLIDQYLWGLQSTTTGTTLNAGTATTNFTKLRPTNFSNFKKNWLPGPSIKQQGFSKTANQNYSIPATGSDSLISYETHSTLDGRWSALTPGPPRATAGPADSKFSNSQLIFAGPKQNGNTATVPGTLIFTSEEELAATNATDTDMWGNLPRHDSSLSNLPTVDRNTGLGAVPGMVWQNRDIYYQGPIWAKIPHTDGHFHPSPLIGGFGLKHPPPQIFIKNTPVPANPATTFSSTPVNSFITQYSTGQVSVQIDWEIQKERSKRWNPEVQFTSNYGQQNSLLWAPDAAGKYTEPRAIGTRYLTHHL

SEQ ID NO: 1141 - protein, 735 aa, Artificial Sequence
  Description of Artificial Sequence: Synthetic polypeptide
MAADGYLPDWLEDNLSEGVREWWALQPGAPKPKANQQHQDNARGLVLPGYKYLGPGNGLDKGEPVNAADAAALEHDKAYDQQLKAGDNPYLKYNHADAEFQQRLQGDTSFGGNLGRAVFQAKKRVLEPLGLVEQAGETAPGKKRPLIESPQQPDSSTGIGKKGKQPAKKKLVFEDETGAGDGPPEGSTSGAMSDDSEMRAAAGGAAVEGGQGADGVGNASGDWHCDSTWSEGHVTTTSTRTWVLPTYNNHLYKRLGESLQSNTYNGFSTPWGYFDFNRFHCHFSPRDWQRLINNNWGMRPKAMRVKIFNIQVKEVTTSNGETTVANNLTSTVQIFADSSYELPYVMDAGQEGSLPPFPNDVFMVPQYGYCGLVTGNTSQQQTDRNAFYCLEYFPSQMLRTGNNFEITYSFEKVPFHSMYAHSQSLDRLMNPLIDQYLWGLQSTTTGTTLNAGTATTNFTKLRPTNFSNFKKNWLPGPSIKQQGFSKTANQNYFIPATGSDSLIRYETHSTLDGRWSALTPGPPLATAGPADSKFSNSQLIFAGPKQNGNTATVPGTLIFTSEEELAATNATDTDMWGNLPVIDFSKSNLPTVDRLTHLGAVPGMVWQNRDIYYQGPIWAKIPHTDGHFHPSPLIGGFGLKHPPPQIFIKNTPVPANPATTFSSTPVNSFITQYSTGQVSVQIDWEIQKERSKRWNPEVQFTSNYGQQNSLLWAPDAAGKYTEPRAIGTRYLTHHL

SEQ ID NO: 1142 - protein, 735 aa, Artificial Sequence
  Description of Artificial Sequence: Synthetic polypeptide
MAADGYLPDWLEDNLSEGVREWWALQPGAPKPKANQQHQDNARGLVLPGYKYLGPGNGLDKGEPVNAADAAALEHDKAYDQQLKAGDNPYLKYNHADAEFQQRLQGDTSFGGNLGRAVFQAKKRVLEPLGLVEQAGETAPGKKRPLIESPQQPDSSTGIGKKGKQPAKKKLVFEDETGAGDGPPEGSTSGAMSDDSEMRAAAGGAAVEGGQGADGVGNASGDWHCDSTWSEGHVTTTSTRTWVLPTYNNHLYKRLGESLQSNTYNGFSTPWGYFDFNRFHCHFSPRDWQRLINNNWGMRPKAMRVKIFNIQVKEVTTSNGETTVANNLTSTVQIFADSSYELPYVMDAGQEGSLPPFPNDVFMVPQYGYCGLVTGNTSQQQTDRNAFYCLEYFPSQMLRTGNNFEITYSFEKVPFHSMYAHSQSLDRLMNPLIDQYLWGLQSTTTGTTLNAGTATTNFTKLRPTNFSNFKKNWLPGPSIKQQGFSKTANQNYKIPATGSDSLIKYETHSTLDGRWSALTPGPPMATAGPADSKFSNSQLIFAGPKQNGNTATVPGTLIFTSEEELAATNATDTDMWGNLPVRDFSLSNLPTVDRTTKLGAVPGMVWQNRDIYYQGPIWAKIPHTDGHFHPSPLIGGFGLKHPPPQIFIKNTPVPANPATTFSSTPVNSFITQYSTGQVSVQIDWEIQKERSKRWNPEVQFTSNYGQQNSLLWAPDAAGKYTEPRAIGTRYLTHHL

SEQ ID NO: 1143 - protein, 735 aa, Artificial Sequence
  Description of Artificial Sequence: Synthetic polypeptide
MAADGYLPDWLEDNLSEGVREWWALQPGAPKPKANQQHQDNARGLVLPGYKYLGPGNGLDKGEPVNAADAAALEHDKAYDQQLKAGDNPYLKYNHADAEFQQRLQGDTSFGGNLGRAVFQAKKRVLEPLGLVEQAGETAPGKKRPLIESPQQPDSSTGIGKKGKQPAKKKLVFEDETGAGDGPPEGSTSGAMSDDSEMRAAAGGAAVEGGQGADGVGNASGDWHCDSTWSEGHVTTTSTRTWVLPTYNNHLYKRLGESLQSNTYNGFSTPWGYFDFNRFHCHFSPRDWQRLINNNWGMRPKAMRVKIFNIQVKEVTTSNGETTVANNLTSTVQIFADSSYELPYVMDAGQEGSLPPFPNDVFMVPQYGYCGLVTGNTSQQQTDRNAFYCLEYFPSQMLRTGNNFEITYSFEKVPFHSMYAHSQSLDRLMNPLIDQYLWGLQSTTTGTTLNAGTATTNFTKLRPTNFSNFKKNWLPGPSIKQQGFSKTANQNYFIPATGSDSLIQYETHSTLDGRWSALTPGPPMATAGPADSKFSNSQLIFAGPKQNGNTATVPGTLIFTSEEELAATNATDTDMWGNLPGGDQSNSNLPTVDRLTALGAVPGMVWQNRDIYYQGPIWAKIPHTDGHFHPSPLIGGFGLKHPPPQIFIKNTPVPANPATTFSSTPVNSFITQYSTGQVSVQIDWEIQKERSKRWNPEVQFTSNYGQQNSLLWAPDAAGKYTEPRAIGTRYLTHHL

SEQ ID NO: 1144 - protein, 735 aa, Artificial Sequence
  Description of Artificial Sequence: Synthetic polypeptide
MAADGYLPDWLEDNLSEGVREWWALQPGAPKPKANQQHQDNARGLVLPGYKYLGPGNGLDKGEPVNAADAAALEHDKAYDQQLKAGDNPYLKYNHADAEFQQRLQGDTSFGGNLGRAVFQAKKRVLEPLGLVEQAGETAPGKKRPLIESPQQPDSSTGIGKKGKQPAKKKLVFEDETGAGDGPPEGSTSGAMSDDSEMRAAAGGAAVEGGQGADGVGNASGDWHCDSTWSEGHVTTTSTRTWVLPTYNNHLYKRLGESLQSNTYNGFSTPWGYFDFNRFHCHFSPRDWQRLINNNWGMRPKAMRVKIFNIQVKEVTTSNGETTVANNLTSTVQIFADSSYELPYVMDAGQEGSLPPFPNDVFMVPQYGYCGLVTGNTSQQQTDRNAFYCLEYFPSQMLRTGNNFEITYSFEKVPFHSMYAHSQSLDRLMNPLIDQYLWGLQSTTTGTTLNAGTATTNFTKLRPTNFSNFKKNWLPGPSIKQQGFSKTANQNYEMPATGSDSLIIYETHSTLDGRWSALTPGPPFATAGPADSKFSNSQLIFAGPKQNGNTATVPGTLIFTSEEELAATNATDTDVWGNLPSGDHSQSNLPTVDRPTMLGAVPGMVWQNRDIYYQGPIWAKIPHTDGHFHPSPLIGGFGLKHPPPQIFIKNTPVPANPATTFISTPVNSFITQYSTGQVSVHIDWEIQKERSKRWNPEVQFTSDYGQHSSLLWAPDAAGKYTEPTAIGTRYLTHHL

SEQ ID NO: 1145 - protein, 734 aa, Artificial Sequence
  Description of Artificial Sequence: Synthetic polypeptide
MAADGYLPDWLEDNLSEGVREWWALQPGAPKPKANQQHQDNARGLVLPGYKYLGPGNGLDKGEPVNAADAAALEHDKAYDQQLKAGDNPYLKYNHADAEFQQRLQGDTSFGGNLGRAVFQAKKRVLEPLGLVEQAGETAPGKKRPLIESPQQPDSSTGIGKKGKQPAKKKLVFEDETGAGDGPPEGSTSGAMSDDSEMRAAAGGAAVEGGQGADGVGNASGDWHCDSTWSEGHVTTTSTRTWVLPTYNNHLYKRLGESLQSNTYNGFSTPWGYFDFNRFHCHFSPRDWQRLINNNWGMRPKAMRVKIFNIQVKEVTTSNGETTVANNLTSTVQIFADSSYELPYVMDAGQEGSLPPFPNDVFMVPQYGYCGLVTGNTSQQQTDRNAFYCLEYFPSQMLRTGNNFEITYSFEKVPFHSMYAHSQSLDRLMNPLIDQYLWGLQSTTTGTTLNAGTATTNFTKLRPTNFSNFKKNWLPGPSIKQQGFSKTANQNDIPATGSDSLIKYETHSTLDGRWSALTPGPPMATAGPADSKFSNSQLIFAGPKQNGNTATVPGTLIFTSEEELAATNATDTDMWGNLPGGDQSNSNLPTVDRLTALGAVPGMVWQNRDIYYQGPIWAKIPHTDGHFHPSPLIGGFGLKHPPPQIFIKNTPVPANPATTFSSTPVNSFITQYSTGQVSVQIDWEIQKERSKRWNPEVQFTSNYGQQNSLLWAPDAAGKYTEPRAIGTRYLTHHL

SEQ ID NO: 1146 - protein, 735 aa, Artificial Sequence
  Description of Artificial Sequence: Synthetic polypeptide
MAADGYLPDWLEDNLSEGVREWWALQPGAPKPKANQQHQDNARGLVLPGYKYLGPGNGLDKGEPVNAADAAALEHDKAYDQQLKAGDNPYLKYNHADAEFQQRLQGDTSFGGNLGRAVFQAKKRVLEPLGLVEQAGETAPGKKRPLIESPQQPDSSTGIGKKGKQPAKKKLVFEDETGAGDGPPEGSTSGAMSDDSEMRAAAGGAAVEGGQGADGVGNASGDWHCDSTWSEGHVTTTSTRTWVLPTYNNHLYKRLGESLQSNTYNGFSTPWGYFDFNRFHCHFSPRDWQRLINNNWGMRPKAMRVKIFNIQVKEVTTSNGETTVANNLTSTVQIFADSSYELPYVMDAGQEGSLPPFPNDVFMVPQYGYCGLVTGNTSQQQTDRNAFYCLEYFPSQMLRTGNNFEITYSFEKVPFHSMYAHSQSLDRLMNPLIDQYLWGLQSTTTGTTLNAGTATTNFTKLRPTNFSNFKKNWLPGPSIKQQGFSKTANQNYIIPATGSDSLITYETHSTLDGRWSALTPGPPVATAGPADSKFSNSQLIFAGPKQNGNTATVPGTLIFTSEEELAATNATDTDMWGNLPFNDDSSSNLPTVDRSTFLGAVPGMVWQNRDIYYQGPIWAKIPHTDGHFHPSPLIGGFGLKHPPPQIFIKNTPVPANPATTFSSTPVNSFITQYSTGQVSVQIDWEIQKERSKRWNPEVQFTSNYGQQNSLLWAPDAAGKYTEPRAIGTRYLTHHL

SEQ ID NO: 1147 - protein, 733 aa, Artificial Sequence
  Description of Artificial Sequence: Synthetic polypeptide
MAADGYLPDWLEDNLSEGIREWWDLKPGAPKPKANQQKQDDGRGLVLPGYKYLGPFNGLDKGEPVNAADAAALEHDKAYDQQLKAGDNPYLRYNHADAEFQERLQEDTSFGGNLGRAVFQAKKRVLEPLGLVEEGAKTAPGKKRPLESPQEPDSSSGIGKKGKQPARKRLNFEEDTGAGDGPPEGSDTSAMSSDIEMRAAPGGNAVDAGQGSDGVGNASGDWHCDSTWSEGKVTTTSTRTWVLPTYNNHLYLRLGTTSSSNTYNGFSTPWGYFDFNRFHCHFSPRDWQRLINNNWGLRPKAMRVKIFNIQVKEVTTSNGETTVANNLTSTVQIFADSSYELPYVMDAGQEGSLPPFPNDVFMVPQYGYCGIVTGENQNQTDRNAFYCLEYFPSQMLRTGNNFEMAYNFEKVPFHSMYAHSQSLDRLMNPLLDQYLWHLQSTTSGETLNQGNAATTFGKIRSGDFAFYRKNWLPGPCVKQQRFSKTASQNYKIPASGGNALLKYDTHYTLNNRWSNIAPGPPMATAGPSDGDFSNAQLIFPGPSVTGNTTTSANNLLFTSEEEIAATNPRDTDMFGQIADNNQNATTAPITGNVTAMGVLPGMVWQNRDIYYQGPIWAKIPHADGHFHPSPLIGGFGLKHPPPQIFIKNTPVPANPATTFTAARVDSFITQYSTGQVAVQIEWEIEKERSKRWNPEVQFTSNYGNQSSMLWAPDTTGKYTEPRVIGSRYLTNHL

SEQ ID NO: 1148 - protein, 742 aa, Artificial Sequence; identical to SEQ ID NO: 959
  Description of Artificial Sequence: Synthetic polypeptide

SEQ ID NO: 1149 - protein, 733 aa, Artificial Sequence; identical to SEQ ID NO: 432
  Description of Artificial Sequence: Synthetic polypeptide

SEQ ID NO: 1150 - protein, 733 aa, Artificial Sequence; identical to SEQ ID NO: 149
  Description of Artificial Sequence: Synthetic polypeptide

SEQ ID NO: 1151 - protein, 733 aa, Artificial Sequence; identical to SEQ ID NO: 436
  Description of Artificial Sequence: Synthetic polypeptide

SEQ ID NO: 1152 - protein, 735 aa, Artificial Sequence
  Description of Artificial Sequence: Synthetic polypeptide
MAADGYLPDWLEDNLSEGVREWWALQPGAPKPKANQQHQDNARGLVLPGYKYLGPGNGLDKGEPVNAADAAALEHDKAYDQQLKAGDNPYLKYNHADAEFQQRLQGDTSFGGNLGRAVFQAKKRVLEPLGLVEQAGETAPGKKRPLIESPQQPDSSTGIGKKGKQPAKKKLVFEDETGAGDGPPEGSTSGAMSDDSEMRAAAGGAAVEGGQGADGVGNASGDWHCDSTWSEGHVTTTSTRTWVLPTYNNHLYKRLGESLQSNTYNGFSTPWGYFDFNRFHCHFSPRDWQRLINNNWGMRPKAMRVKIFNIQVKEVTTSNGETTVANNLTSTVQIFADSSYELPYVMDAGQEGSLPPFPNDVFMVPQYGYCGLVTGNTSQQQTDRNAFYCLEYFPSQMLRTGNNFEITYSFEKVPFHSMYAHSQSLDRLMNPLIDQYLWGLQSTTTGTTLNAGTATTNFTKLRPTNFSNFKKNWLPGPSIKQQGFSKTANQNYEIPATGSDSLIEYETHSTLDGRWSALTPGPPMATAGPADSKFSNSQLIFAGPKQNGNTATVPGTLIFTSEEELAATNATDTDMWGNLPGGDQSSSNLPTVDRLTALGAVPGMVWQNRDIYYQGPIWAKIPHTDGHFHPSPLIGGFGLKHPPPQIFIKNTPVPANPATTFSSTPVNSFITQYSTGQVSVQIDWEIQKERSKRWNPEVQFTSNYGQQNSLLWAPDAAGKYTEPRAIGTRYLTHHL

SEQ ID NO: 1153 - protein, 735 aa, Artificial Sequence
  Description of Artificial Sequence: Synthetic polypeptide
MAADGYLPDWLEDNLSEGVREWWALQPGAPKPKANQQHQDNARGLVLPGYKYLGPGNGLDKGEPVNAADAAALEHDKAYDQQLKAGDNPYLKYNHADAEFQQRLQGDTSFGGNLGRAVFQAKKRVLEPLGLVEQAGETAPGKKRPLIESPQQPDSSTGIGKKGKQPAKKKLVFEDETGAGDGPPEGSTSGAMSDDSEMRAAAGGAAVEGGQGADGVGNASGDWHCDSTWSEGHVTTTSTRTWVLPTYNNHLYKRLGESLQSNTYNGFSTPWGYFDFNRFHCHFSPRDWQRLINNNWGMRPKAMRVKIFNIQVKEVTTSNGETTVANNLTSTVQIFADSSYELPYVMDAGQEGSLPPFPNDVFMVPQYGYCGLVTGNTSQQQTDRNAFYCLEYFPSQMLRTGNNFEITYSFEKVPFHSMYAHSQSLDRLMNPLIDQYLWGLQSTTTGTTLNAGTATTNFTKLRPTNFSNFKKNWLPGPSIKQQGFSKTANQNYEIPATGSDSLIEYETHSTLDGRWSALTPGPPMATAGPADSKFSNSQLIFAGPKQNGNTATVPGTLIFTSEEELAATNATDTDMWGNLPGGDQSSSNLPVVRGLRALGAVPGMVWQNRDIYYQGPIWAKIPHTDGHFHPSPLIGGFGLKHPPPQIFIKNTPVPANPATTFSSTPVNSFITQYSTGQVSVQIDWEIQKERSKRWNPEVQFTSNYGQQNSLLWAPDAAGKYTEPRAIGTRYLTHHL

SEQ ID NO: 1154 - protein, 735 aa, Artificial Sequence
  Description of Artificial Sequence: Synthetic polypeptide
MAADGYLPDWLEDNLSEGVREWWALQPGAPKPKANQQHQDNARGLVLPGYKYLGPGNGLDKGEPVNAADAAALEHDKAYDQQLKAGDNPYLKYNHADAEFQQRLQGDTSFGGNLGRAVFQAKKRVLEPLGLVEQAGETAPGKKRPLIESPQQPDSSTGIGKKGKQPAKKKLVFEDETGAGDGPPEGSTSGAMSDDSEMRAAAGGAAVEGGQGADGVGNASGDWHCDSTWSEGHVTTTSTRTWVLPTYNNHLYKRLGESLQSNTYNGFSTPWGYFDFNRFHCHFSPRDWQRLINNNWGMRPKAMRVKIFNIQVKEVTTSNGETTVANNLTSTVQIFADSSYELPYVMDAGQEGSLPPFPNDVFMVPQYGYCGLVTGNTSQQQTDRNAFYCLEYFPSQMLRTGNNFEITYSFEKVPFHSMYAHSQSLDRLMNPLIDQYLWGLQSTTTGTTLNAGTATTNFTKLRPTNFSNFKKNWLPGPSIKQQGFSKTANQNYEIPATGSDSLIEYETHSTLDGRWSALTPGPPMATAGPADSKFSNSQLIFAGPKQNGNTATVPGTLIFTSEEELAATNATDTDMWGNLPGGDQSSSNLPVVNRLSALGAVPGMVWQNRDIYYQGPIWAKIPHTDGHFHPSPLIGGFGLKHPPPQIFIKNTPVPANPATTFSSTPVNSFITQYSTGQVSVQIDWEIQKERSKRWNPEVQFTSNYGQQNSLLWAPDAAGKYTEPRAIGTRYLTHHL

SEQ ID NO: 1155 - protein, 735 aa, Artificial Sequence
  Description of Artificial Sequence: Synthetic polypeptide
MAADGYLPDWLEDNLSEGVREWWALQPGAPKPKANQQHQDNARGLVLPGYKYLGPGNGLDKGEPVNAADAAALEHDKAYDQQLKAGDNPYLKYNHADAEFQQRLQGDTSFGGNLGRAVFQAKKRVLEPLGLVEQAGETAPGKKRPLIESPQQPDSSTGIGKKGKQPAKKKLVFEDETGAGDGPPEGSTSGAMSDDSEMRAAAGGAAVEGGQGADGVGNASGDWHCDSTWSEGHVTTTSTRTWVLPTYNNHLYKRLGESLQSNTYNGFSTPWGYFDFNRFHCHFSPRDWQRLINNNWGMRPKAMRVKIFNIQVKEVTTSNGETTVANNLTSTVQIFADSSYELPYVMDAGQEGSLPPFPNDVFMVPQYGYCGLVTGNTSQQQTDRNAFYCLEYFPSQMLRTGNNFEITYSFEKVPFHSMYAHSQSLDRLMNPLIDQYLWGLQSTTTGTTLNAGTATTNFTKLRPTNFSNFKKNWLPGPSIKQQGFSKTANQNYEIPATGSDSLIEYETHSTLDGRWSALTPGPPMATAGPADSKFSNSQLIFAGPKQNGNTATVPGTLIFTSEEELAATNATDTDMWGNLPGGDQSSSNLPPVMGLGALGAVPGMVWQNRDIYYQGPIWAKIPHTDGHFHPSPLIGGFGLKHPPPQIFIKNTPVPANPATTFSSTPVNSFITQYSTGQVSVQIDWEIQKERSKRWNPEVQFTSNYGQQNSLLWAPDAAGKYTEPRAIGTRYLTHHL

SEQ ID NO: 1156 - protein, 736 aa, Artificial Sequence
  Description of Artificial Sequence: Synthetic polypeptide
MAADGYLPDWLEDNLSEGVREWWALQPGAPKPKANQQHQDNARGLVLPGYKYLGPGNGLDKGEPVNAADAAALEHDKAYDQQLKAGDNPYLKYNHADAEFQQRLQGDTSFGGNLGRAVFQAKKRVLEPLGLVEQAGETAPGKKRPLIESPQQPDSSTGIGKKGKQPAKKKLVFEDETGAGDGPPEGSTSGAMSDDSEMRAAAGGAAVEGGQGADGVGNASGDWHCDSTWSEGHVTTTSTRTWVLPTYNNHLYKRLGESLQSNTYNGFSTPWGYFDFNRFHCHFSPRDWQRLINNNWGMRPKAMRVKIFNIQVKEVTTSNGETTVANNLTSTVQIFADSSYELPYVMDAGQEGSLPPFPNDVFMVPQYGYCGLVTGNTSQQQTDRNAFYCLEYFPSQMLRTGNNFEITYSFEKVPFHSMYAHSQSLDRLMNPLIDQYLWGLQSTTTGTTLNAGTATTNFTKLRPTNFSNFKKNWLPGPSIKQQGFSKTANQNYEIPATGSDSLIEYETHSTLDGRWSALTPGPPMATAGPADSKFSNSQLIFAGPKQNGNTATVPGTLIFTSEEELAATNATDTDMWGNLPGGDQSRVDRLPTVDRLTALGAVPGMVWQNRDIYYQGPIWAKIPHTDGHFHPSPLIGGFGLKHPPPQIFIKNTPVPANPATTFSSTPVNSFITQYSTGQVSVQIDWEIQKERSKRWNPEVQFTSNYGQQNSLLWAPDAAGKYTEPRAIGTRYLTHHL

SEQ ID NO: 1157 - protein, 736 aa, Artificial Sequence
  Description of Artificial Sequence: Synthetic polypeptide
MAADGYLPDWLEDNLSEGVREWWALQPGAPKPKANQQHQDNARGLVLPGYKYLGPGNGLDKGEPVNAADAAALEHDKAYDQQLKAGDNPYLKYNHADAEFQQRLQGDTSFGGNLGRAVFQAKKRVLEPLGLVEQAGETAPGKKRPLIESPQQPDSSTGIGKKGKQPAKKKLVFEDETGAGDGPPEGSTSGAMSDDSEMRAAAGGAAVEGGQGADGVGNASGDWHCDSTWSEGHVTTTSTRTWVLPTYNNHLYKRLGESLQSNTYNGFSTPWGYFDFNRFHCHFSPRDWQRLINNNWGMRPKAMRVKIFNIQVKEVTTSNGETTVANNLTSTVQIFADSSYELPYVMDAGQEGSLPPFPNDVFMVPQYGYCGLVTGNTSQQQTDRNAFYCLEYFPSQMLRTGNNFEITYSFEKVPFHSMYAHSQSLDRLMNPLIDQYLWGLQSTTTGTTLNAGTATTNFTKLRPTNFSNFKKNWLPGPSIKQQGFSKTANQNYEIPATGSDSLIEYETHSTLDGRWSALTPGPPMATAGPADSKFSNSQLIFAGPKQNGNTATVPGTLIFTSEEELAATNATDTDMWGNLPGGDQSRALRLPTVDRLTALGAVPGMVWQNRDIYYQGPIWAKIPHTDGHFHPSPLIGGFGLKHPPPQIFIKNTPVPANPATTFSSTPVNSFITQYSTGQVSVQIDWEIQKERSKRWNPEVQFTSNYGQQNSLLWAPDAAGKYTEPRAIGTRYLTHHL

SEQ ID NO: 1158 - DNA, 1172 bp, Artificial Sequence
  Description of Artificial Sequence: Synthetic polynucleotide
cttaattaggctgcgcgctcgctcgctcactgaggccgcccgggcaaagcccgggcgtcgggcgacctttggtcgcccggcctcagtgagcgagcgagcgcgcagagagggagtggccaactccatcactaggggttccttgtagttaatgattaacccgccatgctacttatctaccagggtaatggggatcctctagaactatagctagtcgacattgattattgactagttattaatagtaatcaattacggggtcattagttcatagcccatatatggagttccgcgttacataacttacggtaaatggcccgcctggctgaccgcccaacgacccccgcccattgacgtcaataatgacgtatgttcccatagtaacgccaatagggactttccattgacgtcaatgggtggactatttacggtaaactgcccacttggcagtacatcaagtgtatcatatgccaagtacgccccctattgacgtcaatgacggtaaatggcccgcctggcattatgcccagtacatgaccttatgggactttcctacttggcagtacatctacgtattagtcatcgctattaccatgtcgaggccacgttctgcttcactctccccatctcccccccctccccacccccaattttgtatttatttattttttaattattttgtgcagcgatgggggcggggggggggggcgcgcgccaggcggggcggggcggggcgaggggcggggcggggcgaggcggagaggtgcggcggcagccaatcagagcggcgcgctccgaaagtttccttttatggcgaggcggcggcggcggcggccctataaaaagcgaagcgcgcggcgggcgggagcaagctttattgcggtagtttatcacagttaaattgctaacgcagtcagtgcttctgacacaacagtctcgaacttaagctgcagaagttggtcgtgaggcactgggcaggtaagtatcaaggttacaagacaggtttaaggagaccaatagaaactgggcttgtcgagacagagaagactcttgcgtttctgataggcacctattggtcttactgacatccactttgcctttctctccacaggtgtccactcccagttcaattacagctcttaaggctagagtacttaatacgactcsactatagg

SEQ ID NO: 1159 - DNA, 3231 bp, Artificial Sequence
  Description of Artificial Sequence: Synthetic polynucleotide
taagaattcacgcgtggtacctctagagtcgacccgggcggcctcgaggacggggtgaactacgcctgaggatccgatctttttccctctgccaaaaattatggggacatcatgaagccccttgagcatctgacttctggctaataaaggaaatttattttcattgcaatagtgtgttggaattttttgtgtctctcactcggaagcaattcgttgatctgaatttcgaccacccataatacccattaccctggtagataagtagcatggcgggttaatcattaactacaaggaacccctagtgatggagttggccactccctctctgcgcgctcgctcgctcactgaggccgggcgaccaaaggtcgcccgacgcccgggctttgcccgggcggcctcagtgagcgagcgagcgcgcagccttaattaacctaattcactggccgtcgttttacaacgtcgtgactgggaaaaccctggcgttacccaacttaatcgccttgcagcacatccccctttcgccagctggcgtaatagcgaagaggcccgcaccgatcgcccttcccaacagttgcgcagcctgaatggcgaatgggacgcgccctgtagcggcgcattaagcgcggcgggtgtggtggttacgcgcagcgtgaccgctacacttgccagcgccctagcgcccgctcctttcgctttcttcccttcctttctcgccacgttcgccggctttccccgtcaagctctaaatcgggggctccctttagggttccgatttagtgctttacggcacctcgaccccaaaaaacttgattagggtgatggttcacgtagtgggccatcgccctgatagacggtttttcgccctttgacgttggagtccacgttctttaatagtggactcttgttccaaactggaacaacactcaaccctatctcggtctattcttttgatttataagggattttgccgatttcggcctattggttaaaaaatgagctgatttaacaaaaatttaacgcgaattttaacaaaatattaacgcttacaatttaggtggcacttttcggggaaatgtgcgcggaacccctatttgtttatttttctaaatacattcaaatatgtatccgctcatgagacaataaccctgataaatgcttcaataatattgaaaaaggaagagtatgagtattcaacatttccgtgtcgcccttattcccttttttgcggcattttgccttcctgtttttgctcacccagaaacgctggtgaaagtaaaagatgctgaagatcagttgggtgcacgagtgggttacatcgaactggatctcaacagcggtaagatccttgagagttttcgccccgaagaacgttttccaatgatgagcacttttaaagttctgctatgtggcgcggtattatcccgtattgacgccgggcaagagcaactcggtcgccgcatacactattctcagaatgacttggttgagtactcaccagtcacagaaaagcatcttacggatggcatgacagtaagagaattatgcagtgctgccataaccatgagtgataacactgcggccaacttacttctgacaacgatcggaggaccgaaggagctaaccgcttttttgcacaacatgggggatcatgtaactcgccttgatcgttgggaaccggagctgaatgaagccataccaaacgacgagcgtgacaccacgatgcctgtagcaatggcaacaacgttgcgcaaactattaactggcgaactacttactctagcttcccggcaacaattaatagactggatggaggcggataaagttgcaggaccacttctgcgctcggcccttccggctggctggtttattgctgataaatctggagccggtgagcgtgggtctcgcggtatcattgcagcactggggccagatggtaagccctcccgtatcgtagttatctacacgacggggagtcaggcaactatggatgaacgaaatagacagatcgctgagataggtgcctcactgattaagcattggtaactgtcagaccaagtttactcatatatactttagattgatttaaaacttcatttttaatttaaaaggatctaggtgaagatcctttttgataatctcatgaccaaaatcccttaacgtgagttttcgttccactgagcgtcagaccccgtagaaaagatcaaaggatcttcttgagatcctttttttctgcgcgtaatctgctgcttgcaaacaaaaaaaccaccgctaccagcggtggtttgtttgccggatcaagagctaccaactctttttccgaaggtaactggcttcagcagagcgcagataccaaatactgttcttctagtgtagccgtagttaggccaccacttcaagaactctgtagcaccgcctacatacctcgctctgctaatcctgttaccagtggctgctgccagtggcgataagtcgtgtcttaccgggttggactcaagacgatagttaccggataaggcgcagcggtcgggctgaacggggggttcgtgcacacagcccagcttggagcgaacgacctacaccgaactgagatacctacagcgtgagctatgagaaagcgccacgcttcccgaagggagaaaggcggacaggtatccggtaagcggcagggtcggaacaggagagcgcacgagggagcttccagggggaaacgcctggtatctttatagtcctgtcgggtttcgccacctctgacttgagcgtcgatttttgtgatgctcgtcaggggggcggagcctatggaaaaacgccagcaacgcggcctttttacggttcctggccttttgctggccttttgctcacatgttctttcctgcgttatcccctgattctgtggataaccgtattaccgcctttgagtgagctgataccgctcgccgcagccgaacgaccgagcgcagcgagtcagtgagcgaggaagcggaagagcgcccaatacgcaaaccgcctctccccgcgcgttggccgattcattaatgcagctggcacgacaggtttcccgactggaaagcgggcagtgagcgcaacgcaattaatgtgagttagctcactcattaggcaccccaggctttacactttatgcttccggctcgtatgttgtgtggaattgtgagcggataacaatttcacacaggaaacagctatgaccatgattacgccagatttaattaaggc

SEQ ID NO: 1160 - protein, 737 aa, Artificial Sequence
  Description of Artificial Sequence: Synthetic polypeptide
  MOD_RES (264)..(264): Any amino acid
  MOD_RES (266)..(266): Any amino acid
  MOD_RES (268)..(268): Any amino acid
  MOD_RES (448)..(448): Any amino acid
  MOD_RES (459)..(460): Any amino acid
  MOD_RES (467)..(467): Any amino acid
  MOD_RES (470)..(471): Any amino acid
  MOD_RES (474)..(474): Any amino acid
  MOD_RES (495)..(495): Any amino acid
  MOD_RES (516)..(516): Any amino acid
  MOD_RES (533)..(533): Any amino acid
  MOD_RES (547)..(547): Any amino acid
  MOD_RES (551)..(551): Any amino acid
  MOD_RES (555)..(555): Any amino acid
  MOD_RES (557)..(557): Any amino acid
  MOD_RES (561)..(561): Any amino acid
  MOD_RES (563)..(563): Any amino acid
  MOD_RES (577)..(577): Any amino acid
  MOD_RES (583)..(583): Any amino acid
  MOD_RES (593)..(593): Any amino acid
  MOD_RES (596)..(596): Any amino acid
  MOD_RES (661)..(662): Any amino acid
  MOD_RES (664)..(665): Any amino acid
  MOD_RES (710)..(710): Any amino acid
  MOD_RES (717)..(719): Any amino acid
  MOD_RES (723)..(723): Any amino acid
MAADGYLPDWLEDNLSEGIREWWDLKPGAPKPKANQQKQDDGRGLVLPGYKYLGPFNGLDKGEPVNAADAAALEHDKAYDQQLKAGDNPYLRYNHADAEFQERLQEDTSFGGNLGRAVFQAKKRVLEPLGLVEEGAKTAPGKKRPVEPSPQRSPDSSTGIGKKGQQPAKKRLNFGQTGDSESVPDPQPLGEPPAGPSGLGSGTMAAGGGAPMADNNEGADGVGNASGNWHCDSTWLGDRVITTSTRTWALPTYNNHLYKQISSXSXGXTNDNHYFGYSTPWGYFDFNRFHCHFSPRDWQRLINNNWGFRPKRLNFKLFNIQVKEVTTNDGVTTIANNLTSTVQVFSDSEYQLPYVLGSAHQGCLPPFPADVFMIPQYGYLTLNNGSQAVGRSSFYCLEYFPSQMLRTGNNFTFSYTFEDVPFHSSYAHSQSLDRLMNPLIDQYLYYLXRTQSTGGTAGXXELLFSQXGPXXMSXQAKNWLPGPCYRQQRVSKTLXQNNNSNFAWTGATKYHLNGRXSLVNPGVAMATHKDDEXRFFPSSGVLIFGKXGAGXNNTXLXNVMXTXEEEIKTTNPVATEXYGVVAXNLQSSNTAPXTGXVNSQGALPGMVWQNRDVYLQGPIWAKIPHTDGNFHPSPLMGGFGLKHPPPQILIKNTPVPANPPXXFXXAKFASFITQYSTGQVSVEIEWELQKENSKRWNPEIQYTSNYAKSXNVDFAVXXXGVYXEPRPIGTRYLTRNL

SEQ ID NO: 1161 - protein, 737 aa, Artificial Sequence
  Description of Artificial Sequence: Synthetic polypeptide
MAADGYLPDWLEDNLSEGIREWWDLKPGAPKPKANQQKQDDGRGLVLPGYKYLGPFNGLDKGEPVNAADAAALEHDKAYDQQLKAGDNPYLRYNHADAEFQERLQEDTSFGGNLGRAVFQAKKRVLEPLGLVEEGAKTAPGKKRPVEPSPQRSPDSSTGIGKKGQQPAKKRLNFGQTGDSESVPDPQPLGEPPAGPSGLGSGTMAAGGGAPMADNNEGADGVGNASGNWHCDSTWLGDRVITTSTRTWALPTYNNHLYKQISSASSGSTNDNHYFGYSTPWGYFDFNRFHCHFSPRDWQRLINNNWGFRPKRLNFKLFNIQVKEVTTNDGVTTIANNLTSTVQVFSDSEYQLPYVLGSAHQGCLPPFPADVFMIPQYGYLTLNNGSQAVGRSSFYCLEYFPSQMLRTGNNFTFSYTFEDVPFHSSYAHSQSLDRLMNPLIDQYLYYLARTQSTGGTAGNRELLFSQGGPSNMSAQAKNWLPGPCYRQQRVSKTLAQNNNSNFAWTGATKYHLNGRDSLVNPGVAMATHKDDEDRFFPSSGVLIFGKEGAGANNTALENVMLTNEEEIKTTNPVATEQYGVVASNLQSSNTAPATGAVNSQGALPGMVWQNRDVYLQGPIWAKIPHTDGNFHPSPLMGGFGLKHPPPQILIKNTPVPANPPATFTPAKFASFITQYSTGQVSVEIEWELQKENSKRWNPEIQYTSNYAKSTNVDFAVNNEGVYSEPRPIGTRYLTRNL

SEQ ID NO: 1162 - protein, 737 aa, Artificial Sequence
  Description of Artificial Sequence: Synthetic polypeptide
MAADGYLPDWLEDNLSEGIREWWDLKPGAPKPKANQQKQDDGRGLVLPGYKYLGPFNGLDKGEPVNAADAAALEHDKAYDQQLKAGDNPYLRYNHADAEFQERLQEDTSFGGNLGRAVFQAKKRVLEPLGLVEEGAKTAPGKKRPVEPSPQRSPDSSTGIGKKGQQPAKKRLNFGQTGDSESVPDPQPLGEPPAGPSGLGSGTMAAGGGAPMADNNEGADGVGNASGNWHCDSTWLGDRVITTSTRTWALPTYNNHLYKQISSQSSGSTNDNHYFGYSTPWGYFDFNRFHCHFSPRDWQRLINNNWGFRPKRLNFKLFNIQVKEVTTNDGVTTIANNLTSTVQVFSDSEYQLPYVLGSAHQGCLPPFPADVFMIPQYGYLTLNNGSQAVGRSSFYCLEYFPSQMLRTGNNFTFSYTFEDVPFHSSYAHSQSLDRLMNPLIDQYLYYLSRTQSTGGTAGNRELLFSQGGPANMSAQAKNWLPGPCYRQQRVSKTLSQNNNSNFAWTGATKYHLNGRDSLVNPGVAMATHKDDEERFFPSSGVLIFGKQGAGANNTTLDNVMMTSEEEIKTTNPVATEQYGVVASNLQSSNTAPQTGTVNSQGALPGMVWQNRDVYLQGPIWAKIPHTDGNFHPSPLMGGFGLKHPPPQILIKNTPVPANPPAVFSPAKFASFITQYSTGQVSVEIEWELQKENSKRWNPEIQYTSNYAKSTNVDFAVNSEGVYSEPRPIGTRYLTRNL

SEQ ID NO: 1163 - protein, 737 aa, Artificial Sequence
  Description of Artificial Sequence: Synthetic polypeptide
MAADGYLPDWLEDNLSEGIREWWDLKPGAPKPKANQQKQDDGRGLVLPGYKYLGPFNGLDKGEPVNAADAAALEHDKAYDQQLKAGDNPYLRYNHADAEFQERLQEDTSFGGNLGRAVFQAKKRVLEPLGLVEEGAKTAPGKKRPVEPSPQRSPDSSTGIGKKGQQPAKKRLNFGQTGDSESVPDPQPLGEPPAGPSGLGSGTMAAGGGAPMADNNEGADGVGNASGNWHCDSTWLGDRVITTSTRTWALPTYNNHLYKQISSASSGSTNDNHYFGYSTPWGYFDFNRFHCHFSPRDWQRLINNNWGFRPKRLNFKLFNIQVKEVTTNDGVTTIANNLTSTVQVFSDSEYQLPYVLGSAHQGCLPPFPADVFMIPQYGYLTLNNGSQAVGRSSFYCLEYFPSQMLRTGNNFTFSYTFEDVPFHSSYAHSQSLDRLMNPLIDQYLYYLARTQSTGGTAGTRELLFSQGGPSNMSAQAKNWLPGPCYRQQRVSKTLTQNNNSNFAWTGATKYHLNGRDSLVNPGVAMATHKDDEDRFFPSSGVLIFGKQGAGANNTALDNVMITNEEEIKTTNPVATEQYGVVASNLQSSNTAPATGTVNSQGALPGMVWQNRDVYLQGPIWAKIPHTDGNFHPSPLMGGFGLKHPPPQILIKNTPVPANPPTVFSPAKFASFITQYSTGQVSVEIEWELQKENSKRWNPEIQYTSNYAKSTNVDFAVNSEGVYTEPRPIGTRYLTRNL

SEQ ID NO: 1164 - protein, 737 aa, Artificial Sequence
  Description of Artificial Sequence: Synthetic polypeptide
  MOD_RES (264)..(264): Any amino acid
  MOD_RES (448)..(448): Any amino acid
  MOD_RES (459)..(459): Any amino acid
  MOD_RES (470)..(470): Any amino acid
  MOD_RES (495)..(495): Any amino acid
  MOD_RES (533)..(533): Any amino acid
  MOD_RES (547)..(547): Any amino acid
  MOD_RES (555)..(555): Any amino acid
  MOD_RES (557)..(557): Any amino acid
  MOD_RES (561)..(561): Any amino acid
  MOD_RES (563)..(563): Any amino acid
  MOD_RES (593)..(593): Any amino acid
  MOD_RES (596)..(596): Any amino acid
  MOD_RES (661)..(662): Any amino acid
  MOD_RES (664)..(664): Any amino acid
  MOD_RES (718)..(718): Any amino acid
  MOD_RES (723)..(723): Any amino acid
MAADGYLPDWLEDNLSEGIREWWDLKPGAPKPKANQQKQDDGRGLVLPGYKYLGPFNGLDKGEPVNAADAAALEHDKAYDQQLKAGDNPYLRYNHADAEFQERLQEDTSFGGNLGRAVFQAKKRVLEPLGLVEEGAKTAPGKKRPVEPSPQRSPDSSTGIGKKGQQPAKKRLNFGQTGDSESVPDPQPLGEPPAGPSGLGSGTMAAGGGAPMADNNEGADGVGNASGNWHCDSTWLGDRVITTSTRTWALPTYNNHLYKQISSXSSGSTNDNHYFGYSTPWGYFDFNRFHCHFSPRDWQRLINNNWGFRPKRLNFKLFNIQVKEVTTNDGVTTIANNLTSTVQVFSDSEYQLPYVLGSAHQGCLPPFPADVFMIPQYGYLTLNNGSQAVGRSSFYCLEYFPSQMLRTGNNFTFSYTFEDVPFHSSYAHSQSLDRLMNPLIDQYLYYLXRTQSTGGTAGXRELLFSQGGPXNMSAQAKNWLPGPCYRQQRVSKTLXQNNNSNFAWTGATKYHLNGRDSLVNPGVAMATHKDDEXRFFPSSGVLIFGKXGAGANNTXLXNVMXTXEEEIKTTNPVATEQYGVVASNLQSSNTAPXTGXVNSQGALPGMVWQNRDVYLQGPIWAKIPHTDGNFHPSPLMGGFGLKHPPPQILIKNTPVPANPPXXFXPAKFASFITQYSTGQVSVEIEWELQKENSKRWNPEIQYTSNYAKSTNVDFAVNXEGVYXEPRPIGTRYLTRNL

SEQ ID NO: 1165 - protein, 737 aa, Artificial Sequence
  Description of Artificial Sequence: Synthetic polypeptide
  MOD_RES (264)..(264): Any amino acid
  MOD_RES (448)..(448): Any amino acid
  MOD_RES (470)..(470): Any amino acid
  MOD_RES (533)..(533): Any amino acid
  MOD_RES (547)..(547): Any amino acid
  MOD_RES (555)..(555): Any amino acid
  MOD_RES (557)..(557): Any amino acid
  MOD_RES (561)..(561): Any amino acid
  MOD_RES (563)..(563): Any amino acid
  MOD_RES (593)..(593): Any amino acid
  MOD_RES (596)..(596): Any amino acid
  MOD_RES (662)..(662): Any amino acid
  MOD_RES (664)..(664): Any amino acid
  MOD_RES (718)..(718): Any amino acid
MAADGYLPDWLEDNLSEGIREWWDLKPGAPKPKANQQKQDDGRGLVLPGYKYLGPFNGLDKGEPVNAADAAALEHDKAYDQQLKAGDNPYLRYNHADAEFQERLQEDTSFGGNLGRAVFQAKKRVLEPLGLVEEGAKTAPGKKRPVEPSPQRSPDSSTGIGKKGQQPAKKRLNFGQTGDSESVPDPQPLGEPPAGPSGLGSGTMAAGGGAPMADNNEGADGVGNASGNWHCDSTWLGDRVITTSTRTWALPTYNNHLYKQISSXSSGSTNDNHYFGYSTPWGYFDFNRFHCHFSPRDWQRLINNNWGFRPKRLNFKLFNIQVKEVTTNDGVTTIANNLTSTVQVFSDSEYQLPYVLGSAHQGCLPPFPADVFMIPQYGYLTLNNGSQAVGRSSFYCLEYFPSQMLRTGNNFTFSYTFEDVPFHSSYAHSQSLDRLMNPLIDQYLYYLXRTQSTGGTAGNRELLFSQGGPXNMSAQAKNWLPGPCYRQQRVSKTLSQNNNSNFAWTGATKYHLNGRDSLVNPGVAMATHKDDEXRFFPSSGVLIFGKXGAGANNTXLXNVMXTXEEEIKTTNPVATEQYGVVASNLQSSNTAPXTGXVNSQGALPGMVWQNRDVYLQGPIWAKIPHTDGNFHPSPLMGGFGLKHPPPQILIKNTPVPANPPAXFXPAKFASFITQYSTGQVSVEIEWELQKENSKRWNPEIQYTSNYAKSTNVDFAVNXEGVYSEPRPIGTRYLTRNL

SEQ ID NO: 1166 - DNA, 2217 bp, Artificial Sequence
  Description of Artificial Sequence: Synthetic polynucleotide
atggctgccgatggttatcttccagattggctcgaggacactctctctgaaggaataagacagtggtggaagctcaaacctggcccaccaccaccaaagcccgcagagcggcataaggacgacagcaggggtcttgtgcttcctgggtacaagtacctcggacccttcaacggactcgacaagggagagccggtcaacgaggcagacgccgcggccctcgagcacgacaaagcctacgaccggcagctcgacagcggagacaacccgtacctcaagtacaaccacgccgacgcggagtttcaggagcgccttaaagaagatacgtcttttgggggcaacctcggacgagcagtcttccaggcgaaaaagagggttcttgaacctctgggcctggttgaggaacctgttaagacggctccgggaaagaagagaccggtagagccatcaccccagcgttctccagactcctctacgggcatcggcaagaaaggccaacagcccgccagaaaaagactcaattttggtcagactggcgactcagagtcagttccagaccctcaacctctcggagaacctccagcagcgccctctggtgtgggacctaatacaatggctgcaggcggtggcgcaccaatggcagacaataacgaaggcgccgacggagtgggtagttcctcgggaaattggcattgcgattccacatggctgggcgacagagtcatcaccaccagcacccgaacctgggccctgcccacctacaacaaccacctctacaagcaaatctccaacgggacatcgggaggagccaccaacgacaacacctacttcggctacagcaccccctgggggtattttgactttaacagattccactgccacttttcaccacgtgactggcagcgactcatcaacaacaactggggattccggcccaagagactcagcttcaagctcttcaacatccaggtcaaggaggtcacgcagaatgaaggcaccaagaccatcgccaataacctcaccagcaccatccaggtgtttacggactcggagtaccagctgccgtacgttctcggctctgcccaccagggctgcctgcctccgttcccggcggacgtgttcatgattccccagtacggctacctaacactcaacaacggtagtcaggccgtgggacgctcctccttctactgcctggaatactttccttcgcagatgctgagaaccggcaacaacttccagtttacttacaccttcgaggacgtgcctttccacagcagctacgcccacagccagagcttggaccggctgatgaatcctctgattgaccagtacctgtactacttgtctcggactcaaacaacaggaggcacggcaaatacgcagactctgggcttcagccaaggtgggcctaatacaatggccaatcaggcaaagaactggctgccaggaccctgttaccgccaacaacgcgtctcaacgacaaccgggcaaaacaacaatagcaactttgcctggactgctgggaccaaataccatctgaatggaagaaattcattggctaatcctggcatcgctatggcaacacacaaagacgacgaggagcgtttttttcccagtaacgggatcctgatttttggcaaacaaaatgctgccagagacaatgcggattacagcgatgtcatgctcaccagcgaggaagaaatcaaaaccactaaccctgtggctacagaggaatacggtatcgtggcagataacttgcagcagcaaaacacggctcctcaaattggaactgtcaacagccagggggccttacccggtatggtctggcagaaccgggacgtgtacctgcagggtcccatctgggccaagattcctcacacggacggcaacttccacccgtctccgctgatgggcggctttggcctgaaacatcctccgcctcagatcctgatcaagaacacgcctgtacctgcggatcctccgaccaccttcaaccagtcaaagctgaactctttcatcacgcaatacagcaccggacaggtcagcgtggaaattgaatgggagctgcagaaggaaaacagcaagcgctggaaccccgagatccagtacacctccaactactacaaatctacaagtgtggactttgctgttaatacagaaggcgtgtactctgaaccccgccccattggcacccgttacctcacccgtaatctgtaa

SEQ ID NO: 1167 - protein, 733 aa, Artificial Sequence; identical to SEQ ID NO: 952
  Description of Artificial Sequence: Synthetic polypeptide

SEQ ID NO: 1168 - DNA, 2203 bp, Artificial Sequence
  Description of Artificial Sequence: Synthetic polynucleotide
atgtcttttgttgatcaccctccagattggttggaagaagttggtgaaggtcttcgcgagtttttgggccttgaagcgggcccaccgaaaccaaaacccaatcagcagcatcaagatcaagcccgtggtcttgtgctgcctggttataactatctcggacccggaaacggtctcgatcgaggagagcctgtcaacagggcagacgaggtcgcgcgagagcacgacatctcgtacaacgagcagcttgaggcgggagacaacccctacctcaagtacaaccacgcggacgccgagtttcaggagaagctcgccgacgacacatccttcgggggaaacctcggaaaggcagtctttcaggccaagaaaagggttctcgaaccttttggcctggttgaagagggtgctaagacggcccctaccggaaagcggatagacgaccactttccaaaaagaaagaaggctcggaccgaagaggactccaagccttccacctcgtcagacgccgaagctggacccagcggatcccagcagctgcaaatcccagcccaaccagcctcaagtttgggagctgatacaatgtctgcgggaggtggcggcccattgggcgacaataaccaaggtgccgatggagtgggcaatgcctcgggagattggcattgcgattccacgtggatgggggacagagtcgtcaccaagtccacccgaacctgggtgctgcccagctacaacaaccaccagtaccgagagatcaaaagcggctccgtcgacggaagcaacgccaacgcctactttggatacagcaccccctgggggtactttgactttaaccgcttccacagccactggagcccccgagactggcaaagactcatcaacaactactggggcttcagaccccggtccctcagagtcaaaatcttcaacattcaagtcaaagaggtcacggtgcaggactccaccaccaccatcgccaacaacctcacctccaccgtccaagtgtttacggacgacgactaccagctgccctacgtcgtcggcaacgggaccgagggatgcctgccggccttccctccgcaggtctttacgctgccgcagtacggttacgcgacgctgaaccgcgacaacacagaaaatcccaccgagaggagcagcttcttctgcctagagtactttcccagcaagatgctgagaacgggcaacaactttgagtttacctacaactttgaggaggtgcccttccactccagcttcgctcccagtcagaacctgttcaagctggccaacccgctggtggaccagtacttgtaccgcttcgtgagcacaaataacactggcggagtccagttcaacaagaacctggccgggagatacgccaacacctacaaaaactggttcccggggcccatgggccgaacccagggctggaacctgggctccggggtcaaccgcgccagtgtcagcgccttcgccacgaccaataggatggagctcgagggcgcgagttaccaggtgcccccgcagccgaacggcatgaccaacaacctccagggcagcaacacctatgccctggagaacactatgatcttcaacagccagccggcgaacccgggcaccaccgccacgtacctcgagggcaacatgctcatcaccagcgagagcgagacgcagccggtgaaccgcgtggcgtacaacgtcggcgggcaggtggccaccaacaaccagagctccaccactgcccccgcgaccggcacgtacaacctccaggaaatcgtgcccggcagcgtgtggatggagagggacgtgtacctccaaggacccatctgggccaagatcccagagacgggggcgcactttcacccctctccggccatgggcggattcggactcaaacacccaccgcccatgatgctcatcaagaacacgcctgtgcccggaaatatcaccagcttctcggacgtgcccgtcagcagcttcatcacccagtacagcaccgggcaggtcaccgtggagatggagtgggagctcaagaaggaaaactccaagaggtggaacccagagatccagtacacaaacaactacaacgacccccagtttgtggactttgccccggacagcaccggggaatacagaaccaccagacctatcggaacccgataccttacccgacccctttaacccattcatgtcgcataccctcaataaa

SEQ ID NO: 1169 - protein, 724 aa, Artificial Sequence
  Description of Artificial Sequence: Synthetic polypeptide
MSFVDHPPDWLEEVGEGLREFLGLEAGPPKPKPNQQHQDQARGLVLPGYNYLGPGNGLDRGEPVNRADEVAREHDISYNEQLEAGDNPYLKYNHADAEFQEKLADDTSFGGNLGKAVFQAKKRVLEPFGLVEEGAKTAPTGKRIDDHFPKRKKARTEEDSKPSTSSDAEAGPSGSQQLQIPAQPASSLGADTMSAGGGGPLGDNNQGADGVGNASGDWHCDSTWMGDRVVTKSTRTWVLPSYNNHQYREIKSGSVDGSNANAYFGYSTPWGYFDFNRFHSHWSPRDWQRLINNYWGFRPRSLRVKIFNIQVKEVTVQDSTTTIANNLTSTVQVFTDDDYQLPYVVGNGTEGCLPAFPPQVFTLPQYGYATLNRDNTENPTERSSFFCLEYFPSKMLRTGNNFEFTYNFEEVPFHSSFAPSQNLFKLANPLVDQYLYRFVSTNNTGGVQFNKNLAGRYANTYKNWFPGPMGRTQGWNLGSGVNRASVSAFATTNRMELEGASYQVPPQPNGMTNNLQGSNTYALENTMIFNSQPANPGTTATYLEGNMLITSESETQPVNRVAYNVGGQVATNNQSSTTAPATGTYNLQEIVPGSVWMERDVYLQGPIWAKIPETGAHFHPSPAMGGFGLKHPPPMMLIKNTPVPGNITSFSDVPVSSFITQYSTGQVTVEMEWELKKENSKRWNPEIQYTNNYNDPQFVDFAPDSTGEYRTTRPIGTRYLTRPL

SEQ ID NO: 1170 - DNA, 2203 bp, Artificial Sequence
  Description of Artificial Sequence: Synthetic polynucleotide
atgtcttttgttgatcaccctccagattggttggaagaagttggtgaaggtcttcgcgagtttttgggccttgaagcgggcccaccgaaaccaaaacccaatcagcagcatcaagatcaagcccgtggtcttgtgctgcctggttataactatctcggacccggaaacggtctcgatcgaggagagcctgtcaacagggcagacgaggtcgcgcgagagcacgacatctcgtacaacgagcagcttgaggcgggagacaacccctacctcaagtacaaccacgcggacgccgagtttcaggagaagctcgccgacgacacatccttcgggggaaacctcggaaaggcagtctttcaggccaagaaaagggttctcgaaccttttggcctggttgaagagggtgctaagacggcccctaccggaaagcggatagacgaccactttccaaaaagaaagaaggctcggaccgaagaggactccaagccttccacctcgtcagacgccgaagctggacccagcggatcccagcagctgcaaatcccagcccaaccagcctcaagtttgggagctgatacaatgtctgcgggaggtggcggcccattgggcgacaataaccaaggtgccgatggagtgggcaatgcctcgggagattggcattgcgattccacgtggatgggggacagagtcgtcaccaagtccacccgaacctgggtgctgcccagctacaacaaccaccagtaccgagagatcaaaagcggctccgtcgacggaagcaacgccaacgcctactttggatacagcaccccctgggggtactttgactttaaccgcttccacagccactggagcccccgagactggcaaagactcatcaacaactactggggcttcagaccccggtccctcagagtcaaaatcttcaacattcaagtcaaagaggtcacggtgcaggactccaccaccaccatcgccaacaacctcacctccaccgtccaagtgtttacggacgacgactaccagctgccctacgtcgtcggcaacgggaccgagggatgcctgccggccttccctccgcaggtctttacgctgccgcagtacggttacgcgacgctgaaccgcgacaacacagaaaatcccaccgagaggagcagcttcttctgcctagagtactttcccagcaagatgctgagaacgggcaacaactttgagtttacctacaactttgaggaggtgcccttccactccagcttcgctcccagtcagaacctgttcaagctggccaacccgctggtggaccagtacttgtaccgcttcgtgagcacaaataacactggcggagtccagttcaacaagaacctggccgggagatacgccaacacctacaaaaactggttcccggggcccatgggccgaacccagggctggaacctgggctccggggtcaaccgcgccagtgtcagcgccttcgccacgaccaataggatggagctcgagggcgcgagttaccaggtgcccccgcagccgaacggcatgaccaacaacctccagggcagcaacacctatgccctggagaacactatgatcttcaacagccagccggcgaacccgggcaccaccgccacgtacctcgagggcaacatgctcatcaccagcgagagcgagacgcagccggtgaaccgcgtggcgtacaacgtcggcgggcagatggccaccaacaaccagagctccaccactgcccccgcgaccggcacggtcaacctccaggaaatcgtgcccggcagcgtgtggatggagagggacgtgtacctccaaggacccatctgggccaagatcccagagacgggggcgcactttcacccctctccggccatgggcggattcggactcaaacacccaccgcccatgatgctcatcaagaacacgcctgtgcccggaaatatcaccagcttctcggacgtgcccgtcagcagcttcatcacccagtacagcaccgggcaggtcaccgtggagatggagtgggagctcaagaaggaaaactccaagaggtggaacccagagatccagtacacaaacaactacaacgacccccagtttgtggactttgccccggacagcaccggggaatacagaaccaccagacctatcggaacccgataccttacccgacccctttaacccattcatgtcgcataccctcaataaa

SEQ ID NO: 1171 - protein, 724 aa, Artificial Sequence
  Description of Artificial Sequence: Synthetic polypeptide
MSFVDHPPDWLEEVGEGLREFLGLEAGPPKPKPNQQHQDQARGLVLPGYNYLGPGNGLDRGEPVNRADEVAREHDISYNEQLEAGDNPYLKYNHADAEFQEKLADDTSFGGNLGKAVFQAKKRVLEPFGLVEEGAKTAPTGKRIDDHFPKRKKARTEEDSKPSTSSDAEAGPSGSQQLQIPAQPASSLGADTMSAGGGGPLGDNNQGADGVGNASGDWHCDSTWMGDRVVTKSTRTWVLPSYNNHQYREIKSGSVDGSNANAYFGYSTPWGYFDFNRFHSHWSPRDWQRLINNYWGFRPRSLRVKIFNIQVKEVTVQDSTTTIANNLTSTVQVFTDDDYQLPYVVGNGTEGCLPAFPPQVFTLPQYGYATLNRDNTENPTERSSFFCLEYFPSKMLRTGNNFEFTYNFEEVPFHSSFAPSQNLFKLANPLVDQYLYRFVSTNNTGGVQFNKNLAGRYANTYKNWFPGPMGRTQGWNLGSGVNRASVSAFATTNRMELEGASYQVPPQPNGMTNNLQGSNTYALENTMIFNSQPANPGTTATYLEGNMLITSESETQPVNRVAYNVGGQMATNNQSSTTAPATGTVNLQEIVPGSVWMERDVYLQGPIWAKIPETGAHFHPSPAMGGFGLKHPPPMMLIKNTPVPGNITSFSDVPVSSFITQYSTGQVTVEMEWELKKENSKRWNPEIQYTNNYNDPQFVDFAPDSTGEYRTTRPIGTRYLTRPL

SEQ ID NO: 1172 - DNA, 2203 bp, Artificial Sequence
  Description of Artificial Sequence: Synthetic polynucleotide
atgtcttttgttgatcaccctccagattggttggaagaagttggtgaaggtcttcgcgagtttttgggccttgaagcgggcccaccgaaaccaaaacccaatcagcagcatcaagatcaagcccgtggtcttgtgctgcctggttataactatctcggacccggaaacggtctcgatcgaggagagcctgtcaacagggcagacgaggtcgcgcgagagcacgacatctcgtacaacgagcagcttgaggcgggagacaacccctacctcaagtacaaccacgcggacgccgagtttcaggagaagctcgccgacgacacatccttcgggggaaacctcggaaaggcagtctttcaggccaagaaaagggttctcgaaccttttggcctggttgaagagggtgctaagacggcccctaccggaaagcggatagacgaccactttccaaaaagaaagaaggctcggaccgaagaggactccaagccttccacctcgtcagacgccgaagctggacccagcggatcccagcagctgcaaatcccagcccaaccagcctcaagtttgggagctgatacaatgtctgcgggaggtggcggcccattgggcgacaataaccaaggtgccgatggagtgggcaatgcctcgggagattggcattgcgattccacgtggatgggggacagagtcgtcaccaagtccacccgaacctgggtgctgcccagctacaacaaccaccagtaccgagagatcaaaagcggctccgtcgacggaagcaacgccaacgcctactttggatacagcaccccctgggggtactttgactttaaccgcttccacagccactggagcccccgagactggcaaagactcatcaacaactactggggcttcagaccccggtccctcagagtcaaaatcttcaacattcaagtcaaagaggtcacggtgcaggactccaccaccaccatcgccaacaacctcacctccaccgtccaagtgtttacggacgacgactaccagctgccctacgtcgtcggcaacgggaccgagggatgcctgccggccttccctccgcaggtctttacgctgccgcagtacggttacgcgacgctgaaccgcgacaacacagaaaatcccaccgagaggagcagcttcttctgcctagagtactttcccagcaagatgctgagaacgggcaacaactttgagtttacctacaactttgaggaggtgcccttccactccagcttcgctcccagtcagaacctgttcaagctggccaacccgctggtggaccagtacttgtaccgcttcgtgagcacaaataacactggcggagtccagttcaacaagaacctggccgggagatacgccaacacctacaaaaactggttcccggggcccatgggccgaacccagggctggaacctgggctccggggtcaaccgcgccagtgtcagcgccttcgccacgaccaataggatggagctcgagggcgcgagttaccaggtgcccccgcagccgaacggcatgaccaacaacctccagggcagcaacacctatgccctggagaacactatgatcttcaacagccagccggcgaacccgggcaccaccgccacgtacctcgagggcaacatgctcatcaccagcgagagcgagacgcagccggtgaaccgcgtggcgtacaacgtcggcgggcagatggccaccaacaaccagagctccaccactgcccccgcgaccggcacgtacaacacccaggaaatcgtgcccggcagcgtgtggatggagagggacgtgtacctccaaggacccatctgggccaagatcccagagacgggggcgcactttcacccctctccggccatgggcggattcggactcaaacacccaccgcccatgatgctcatcaagaacacgcctgtgcccggaaatatcaccagcttctcggacgtgcccgtcagcagcttcatcacccagtacagcaccgggcaggtcaccgtggagatggagtgggagctcaagaaggaaaactccaagaggtggaacccagagatccagtacacaaacaactacaacgacccccagtttgtggactttgccccggacagcaccggggaatacagaaccaccagacctatcggaacccgataccttacccgacccctttaacccattcatgtcgcataccctcaataaa

SEQ ID NO: 1173 - protein, 724 aa, Artificial Sequence
  Description of Artificial Sequence: Synthetic polypeptide
MSFVDHPPDWLEEVGEGLREFLGLEAGPPKPKPNQQHQDQARGLVLPGYNYLGPGNGLDRGEPVNRADEVAREHDISYNEQLEAGDNPYLKYNHADAEFQEKLADDTSFGGNLGKAVFQAKKRVLEPFGLVEEGAKTAPTGKRIDDHFPKRKKARTEEDSKPSTSSDAEAGPSGSQQLQIPAQPASSLGADTMSAGGGGPLGDNNQGADGVGNASGDWHCDSTWMGDRVVTKSTRTWVLPSYNNHQYREIKSGSVDGSNANAYFGYSTPWGYFDFNRFHSHWSPRDWQRLINNYWGFRPRSLRVKIFNIQVKEVTVQDSTTTIANNLTSTVQVFTDDDYQLPYVVGNGTEGCLPAFPPQVFTLPQYGYATLNRDNTENPTERSSFFCLEYFPSKMLRTGNNFEFTYNFEEVPFHSSFAPSQNLFKLANPLVDQYLYRFVSTNNTGGVQFNKNLAGRYANTYKNWFPGPMGRTQGWNLGSGVNRASVSAFATTNRMELEGASYQVPPQPNGMTNNLQGSNTYALENTMIFNSQPANPGTTATYLEGNMLITSESETQPVNRVAYNVGGQMATNNQSSTTAPATGTYNTQEIVPGSVWMERDVYLQGPIWAKIPETGAHFHPSPAMGGFGLKHPPPMMLIKNTPVPGNITSFSDVPVSSFITQYSTGQVTVEMEWELKKENSKRWNPEIQYTNNYNDPQFVDFAPDSTGEYRTTRPIGTRYLTRPL

SEQ ID NO: 1174 - DNA, 2203 bp, Artificial Sequence
  Description of Artificial Sequence: Synthetic polynucleotide
atgtcttttgttgatcaccctccagattggttggaagaagttggtgaaggtcttcgcgagtttttgggccttgaagcgggcccaccgaaaccaaaacccaatcagcagcatcaagatcaagcccgtggtcttgtgctgcctggttataactatctcggacccggaaacggtctcgatcgaggagagcctgtcaacagggcagacgaggtcgcgcgagagcacgacatctcgtacaacgagcagcttgaggcgggagacaacccctacctcaagtacaaccacgcggacgccgagtttcaggagaagctcgccgacgacacatccttcgggggaaacctcggaaaggcagtctttcaggccaagaaaagggttctcgaaccttttggcctggttgaagagggtgctaagacggcccctaccggaaagcggatagacgaccactttccaaaaagaaagaaggctcggaccgaagaggactccaagccttccacctcgtcagacgccgaagctggacccagcggatcccagcagctgcaaatcccagcccaaccagcctcaagtttgggagctgatacaatgtctgcgggaggtggcggcccattgggcgacaataaccaaggtgccgatggagtgggcaatgcctcgggagattggcattgcgattccacgtggatgggggacagagtcgtcaccaagtccacccgaacctgggtgctgcccagctacaacaaccaccagtaccgagagatcaaaagcggctccgtcgacggaagcaacgccaacgcctactttggatacagcaccccctgggggtactttgactttaaccgcttccacagccactggagcccccgagactggcaaagactcatcaacaactactggggcttcagaccccggtccctcagagtcaaaatcttcaacattcaagtcaaagaggtcacggtgcaggactccaccaccaccatcgccaacaacctcacctccaccgtccaagtgtttacggacgacgactaccagctgccctacgtcgtcggcaacgggaccgagggatgcctgccggccttccctccgcaggtctttacgctgccgcagtacggttacgcgacgctgaaccgcgacaacacagaaaatcccaccgagaggagcagcttcttctgcctagagtactttcccagcaagatgctgagaacgggcaacaactttgagtttacctacaactttgaggaggtgcccttccactccagcttcgctcccagtcagaacctgttcaagctggccaacccgctggtggaccagtacttgtaccgcttcgtgagcacaaataacactggcggagtccagttcaacaagaacctggccgggagatacgccaacacctacaaaaactggttcccggggcccatgggccgaacccagggctggaacctgggctccggggtcaaccgcgccagtgtcagcgccttcgccacgaccaataggatggagctcgagggcgcgagttaccaggtgcccccgcagccgaacggcatgaccaacaacctccagggcagcaacacctatgccctggagaacactatgatcttcaacagccagccggcgaacccgggcaccaccgccacgtacctcgagggcaacatgctcatcaccagcgagagcgagacgcagccggtgaaccgcgtggcgtacaacgtcggcgggcagatggccaccaacaaccagagctccaccactgcccccgcgaccggcacggtcaacacccaggaaatcgtgcccggcagcgtgtggatggagagggacgtgtacctccaaggacccatctgggccaagatcccagagacgggggcgcactttcacccctctccggccatgggcggattcggactcaaacacccaccgcccatgatgctcatcaagaacacgcctgtgcccggaaatatcaccagcttctcggacgtgcccgtcagcagcttcatcacccagtacagcaccgggcaggtcaccgtggagatggagtgggagctcaagaaggaaaactccaagaggtggaacccagagatccagtacacaaacaactacaacgacccccagtttgtggactttgccccggacagcaccggggaatacagaaccaccagacctatcggaacccgataccttacccgacccctttaacccattcatgtcgcataccctcaataaa

SEQ ID NO: 1175 - protein, 724 aa, Artificial Sequence
  Description of Artificial Sequence: Synthetic polypeptide
MSFVDHPPDWLEEVGEGLREFLGLEAGPPKPKPNQQHQDQARGLVLPGYNYLGPGNGLDRGEPVNRADEVAREHDISYNEQLEAGDNPYLKYNHADAEFQEKLADDTSFGGNLGKAVFQAKKRVLEPFGLVEEGAKTAPTGKRIDDHFPKRKKARTEEDSKPSTSSDAEAGPSGSQQLQIPAQPASSLGADTMSAGGGGPLGDNNQGADGVGNASGDWHCDSTWMGDRVVTKSTRTWVLPSYNNHQYREIKSGSVDGSNANAYFGYSTPWGYFDFNRFHSHWSPRDWQRLINNYWGFRPRSLRVKIFNIQVKEVTVQDSTTTIANNLTSTVQVFTDDDYQLPYVVGNGTEGCLPAFPPQVFTLPQYGYATLNRDNTENPTERSSFFCLEYFPSKMLRTGNNFEFTYNFEEVPFHSSFAPSQNLFKLANPLVDQYLYRFVSTNNTGGVQFNKNLAGRYANTYKNWFPGPMGRTQGWNLGSGVNRASVSAFATTNRMELEGASYQVPPQPNGMTNNLQGSNTYALENTMIFNSQPANPGTTATYLEGNMLITSESETQPVNRVAYNVGGQMATNNQSSTTAPATGTVNTQEIVPGSVWMERDVYLQGPIWAKIPETGAHFHPSPAMGGFGLKHPPPMMLIKNTPVPGNITSFSDVPVSSFITQYSTGQVTVEMEWELKKENSKRWNPEIQYTNNYNDPQFVDFAPDSTGEYRTTRPIGTRYLTRPL

SEQ ID NO: 1176 - DNA, 2203 bp, Artificial Sequence
  Description of Artificial Sequence: Synthetic polynucleotide
atgtcttttgttgatcaccctccagattggttggaagaagttggtgaaggtcttcgcgagtttttgggccttgaagcgggcccaccgaaaccaaaacccaatcagcagcatcaagatcaagcccgtggtcttgtgctgcctggttataactatctcggacccggaaacggtctcgatcgaggagagcctgtcaacagggcagacgaggtcgcgcgagagcacgacatctcgtacaacgagcagcttgaggcgggagacaacccctacctcaagtacaaccacgcggacgccgagtttcaggagaagctcgccgacgacacatccttcgggggaaacctcggaaaggcagtctttcaggccaagaaaagggttctcgaaccttttggcctggttgaagagggtgctaagacggcccctaccggaaagcggatagacgaccactttccaaaaagaaagaaggctcggaccgaagaggactccaagccttccacctcgtcagacgccgaagctggacccagcggatcccagcagctgcaaatcccagcccaaccagcctcaagtttgggagctgatacaatgtctgcgggaggtggcggcccattgggcgacaataaccaaggtgccgatggagtgggcaatgcctcgggagattggcattgcgattccacgtggatgggggacagagtcgtcaccaagtccacccgaacctgggtgctgcccagctacaacaaccaccagtaccgagagatcaaaagcggctccgtcgacggaagcaacgccaacgcctactttggatacagcaccccctgggggtactttgactttaaccgcttccacagccactggagcccccgagactggcaaagactcatcaacaactactggggcttcagaccccggtccctcagagtcaaaatcttcaacattcaagtcaaagaggtcacggtgcaggactccaccaccaccatcgccaacaacctcacctccaccgtccaagtgtttacggacgacgactaccagctgccctacgtcgtcggcaacgggaccgagggatgcctgccggccttccctccgcaggtctttacgctgccgcagtacggttacgcgacgctgaaccgcgacaacacagaaaatcccaccgagaggagcagcttcttctgcctagagtactttcccagcaagatgctgagaacgggcaacaactttgagtttacctacaactttgaggaggtgcccttccactccagcttcgctcccagtcagaacctgttcaagctggccaacccgctggtggaccagtacttgtaccgcttcgtgagcacaaataacactggcggagtccagttcaacaagaacctggccgggagatacgccaacacctacaaaaactggttcccggggcccatgggccgaacccagggctggaacctgggctccggggtcaaccgcgccagtgtcagcgccttcgccacgaccaataggatggagctcgagggcgcgagttaccaggtgcccccgcagccgaacggcatgaccaacaacctccagggcagcaacacctatgccctggagaacactatgatcttcaacagccagccggcgaacccgggcaccaccgccacgtacctcgagggcaacatgctcatcaccagcgagagcgagacgcagccggtgaaccgcgtggcgtacaacgtcggcgggcagatggccaccaacaaccagagctccaccactgcccccgcgaccggcacgtacaacctccaggaaatcgtgcccggcagcgtgtggatggagagggacgtgtacctccaaggacccatctgggccaagatcccagagacgggggcgcactttcacccctctccggccatgggcggattcggactcaaacacccaccgcccatgatgctcatcaagaacacgcctgtgcccggaaatatcaccagcttctcggccgtgcccgtcagcagcttcatcacccagtacagcaccgggcaggtcaccgtggagatggagtgggagctcaagaaggaaaactccaagaggtggaacccagagatccagtacacaaacaactacaacgacccccagtttgtggactttgccccggacagcaccggggaatacagaaccaccagacctatcggaacccgataccttacccgacccctttaacccattcatgtcgcataccctcaataaa

SEQ ID NO: 1177 - protein, 724 aa, Artificial Sequence
  Description of Artificial Sequence: Synthetic polypeptide
MSFVDHPPDWLEEVGEGLREFLGLEAGPPKPKPNQQHQDQARGLVLPGYNYLGPGNGLDRGEPVNRADEVAREHDISYNEQLEAGDNPYLKYNHADAEFQEKLADDTSFGGNLGKAVFQAKKRVLEPFGLVEEGAKTAPTGKRIDDHFPKRKKARTEEDSKPSTSSDAEAGPSGSQQLQIPAQPASSLGADTMSAGGGGPLGDNNQGADGVGNASGDWHCDSTWMGDRVVTKSTRTWVLPSYNNHQYREIKSGSVDGSNANAYFGYSTPWGYFDFNRFHSHWSPRDWQRLINNYWGFRPRSLRVKIFNIQVKEVTVQDSTTTIANNLTSTVQVFTDDDYQLPYVVGNGTEGCLPAFPPQVFTLPQYGYATLNRDNTENPTERSSFFCLEYFPSKMLRTGNNFEFTYNFEEVPFHSSFAPSQNLFKLANPLVDQYLYRFVSTNNTGGVQFNKNLAGRYANTYKNWFPGPMGRTQGWNLGSGVNRASVSAFATTNRMELEGASYQVPPQPNGMTNNLQGSNTYALENTMIFNSQPANPGTTATYLEGNMLITSESETQPVNRVAYNVGGQMATNNQSSTTAPATGTYNLQEIVPGSVWMERDVYLQGPIWAKIPETGAHFHPSPAMGGFGLKHPPPMMLIKNTPVPGNITSFSAVPVSSFITQYSTGQVTVEMEWELKKENSKRWNPEIQYTNNYNDPQFVDFAPDSTGEYRTTRPIGTRYLTRPL

SEQ ID NO: 1178 - DNA, 2203 bp, Artificial Sequence
  Description of Artificial Sequence: Synthetic polynucleotide
atgtcttttgttgatcaccctccagattggttggaagaagttggtgaaggtcttcgcgagtttttgggccttgaagcgggcccaccgaaaccaaaacccaatcagcagcatcaagatcaagcccgtggtcttgtgctgcctggttataactatctcggacccggaaacggtctcgatcgaggagagcctgtcaacagggcagacgaggtcgcgcgagagcacgacatctcgtacaacgagcagcttgaggcgggagacaacccctacctcaagtacaaccacgcggacgccgagtttcaggagaagctcgccgacgacacatccttcgggggaaacctcggaaaggcagtctttcaggccaagaaaagggttctcgaaccttttggcctggttgaagagggtgctaagacggcccctaccggaaagcggatagacgaccactttccaaaaagaaagaaggctcggaccgaagaggactccaagccttccacctcgtcagacgccgaagctggacccagcggatcccagcagctgcaaatcccagcccaaccagcctcaagtttgggagctgatacaatgtctgcgggaggtggcggcccattgggcgacaataaccaaggtgccgatggagtgggcaatgcctcgggagattggcattgcgattccacgtggatgggggacagagtcgtcaccaagtccacccgaacctgggtgctgcccagctacaacaaccaccagtaccgagagatcaaaagcggctccgtcgacggaagcaacgccaacgcctactttggatacagcaccccctgggggtactttgactttaaccgcttccacagccactggagcccccgagactggcaaagactcatcaacaactactggggcttcagaccccggtccctcagagtcaaaatcttcaacattcaagtcaaagaggtcacggtgcaggactccaccaccaccatcgccaacaacctcacctccaccgtccaagtgtttatggacgacgactaccagctgccctacgtcgtcggcaacgggaccgagggatgcctgccggccttccctccgcaggtctttacgctgccgcagtacggttacgcgacgctgaaccgcgacaacacagaaaatcccaccgagaggagcagcttcttctgcctagagtactttcccagcaagatgctgagaacgggcaacaactttgagtttacctacaactttgaggaggtgcccttccactccagcttcgctcccagtcagaacctgttcaagctggccaacccgctggtggaccagtacttgtaccgcttcgtgagcacaaataacactggcggagtccagttcaacaagaacctggccgggagatacgccaacacctacaaaaactggttcccggggcccatgggccgaacccagggctggaacctgggctccggggtcaaccgcgccagtgtcagcgccttcgccacgaccaataggatggagctcgagggcgcgagttaccaggtgcccccgcagccgaacggcatgaccaacaacctccagggcagcaacacctatgccctggagaacactatgatcttcaacagccagccggcgaacccgggcaccaccgccacgtacctcgagggcaacatgctcatcaccagcgagagcgagacgcagccggtgaaccgcgtggcgtacaacgtcggcgggcagatggccaccaacaaccagagctccaccactgcccccgcgaccggcacgtacaacctccaggaaatcgtgcccggcagcgtgtggatggagagggacgtgtacctccaaggacccatctgggccaagatcccagagacgggggcgcactttcacccctctccggccatgggcggattcggactcaaacacccaccgcccatgatgctcatcaagaacacgcctgtgcccggaaatatcaccagcttctcggacgtgcccgtcagcagcttcatcacccagtacagcaccgggcaggtcaccgtggagatggagtgggagctcaagaaggaaaactccaagaggtggaacccagagatccagtacacaaacaactacaacgacccccagtttgtggactttgccccggacagcaccggggaatacagaaccaccagacctatcggaacccgataccttacccgacccctttaacccattcatgtcgcataccctcaataaa

SEQ ID NO: 1179 - protein, 724 aa, Artificial Sequence
  Description of Artificial Sequence: Synthetic polypeptide
MSFVDHPPDWLEEVGEGLREFLGLEAGPPKPKPNQQHQDQARGLVLPGYNYLGPGNGLDRGEPVNRADEVAREHDISYNEQLEAGDNPYLKYNHADAEFQEKLADDTSFGGNLGKAVFQAKKRVLEPFGLVEEGAKTAPTGKRIDDHFPKRKKARTEEDSKPSTSSDAEAGPSGSQQLQIPAQPASSLGADTMSAGGGGPLGDNNQGADGVGNASGDWHCDSTWMGDRVVTKSTRTWVLPSYNNHQYREIKSGSVDGSNANAYFGYSTPWGYFDFNRFHSHWSPRDWQRLINNYWGFRPRSLRVKIFNIQVKEVTVQDSTTTIANNLTSTVQVFMDDDYQLPYVVGNGTEGCLPAFPPQVFTLPQYGYATLNRDNTENPTERSSFFCLEYFPSKMLRTGNNFEFTYNFEEVPFHSSFAPSQNLFKLANPLVDQYLYRFVSTNNTGGVQFNKNLAGRYANTYKNWFPGPMGRTQGWNLGSGVNRASVSAFATTNRMELEGASYQVPPQPNGMTNNLQGSNTYALENTMIFNSQPANPGTTATYLEGNMLITSESETQPVNRVAYNVGGQMATNNQSSTTAPATGTYNLQEIVPGSVWMERDVYLQGPIWAKIPETGAHFHPSPAMGGFGLKHPPPMMLIKNTPVPGNITSFSDVPVSSFITQYSTGQVTVEMEWELKKENSKRWNPEIQYTNNYNDPQFVDFAPDSTGEYRTTRPIGTRYLTRPL

SEQ ID NO: 1180 - DNA, 2203 bp, Artificial Sequence
  Description of Artificial Sequence: Synthetic polynucleotide
atgtcttttgttgatcaccctccagattggttggaagaagttggtgaaggtcttcgcgagtttttgggccttgaagcgggcccaccgaaaccaaaacccaatcagcagcatcaagatcaagcccgtggtcttgtgctgcctggttataactatctcggacccggaaacggtctcgatcgaggagagcctgtcaacagggcagacgaggtcgcgcgagagcacgacatctcgtacaacgagcagcttgaggcgggagacaacccctacctcaagtacaaccacgcggacgccgagtttcaggagaagctcgccgacgacacatccttcgggggaaacctcggaaaggcagtctttcaggccaagaaaagggttctcgaaccttttggcctggttgaagagggtgctaagacggcccctaccggaaagcggatagacgaccactttccaaaaagaaagaaggctcggaccgaagaggactccaagccttccacctcgtcagacgccgaagctggacccagcggatcccagcagctgcaaatcccagcccaaccagcctcaagtttgggagctgatacaatgtctgcgggaggtggcggcccattgggcgacaataaccaaggtgccgatggagtgggcaatgcctcgggagattggcattgcgattccacgtggatgggggacagagtcgtcaccaagtccacccgaacctgggtgctgcccagctacaacaaccaccagtaccgagagatcaaaagcggctccgtcgacggaagcaacgccaacgcctactttggatacagcaccccctgggggtactttgactttaaccgcttccacagccactggagcccccgagactggcaaagactcatcaacaactactggggcttcagaccccggtccctcagagtcaaaatcttcaacattcaagtcaaagaggtcacggtgcaggactccaccaccaccatcgccaacaacctcacctccaccgtcgatgtgtttacggacgacgactaccagctgccctacgtcgtcggcaacgggaccgagggatgcctgccggccttccctccgcaggtctttacgctgccgcagtacggttacgcgacgctgaaccgcgacaacacagaaaatcccaccgagaggagcagcttcttctgcctagagtactttcccagcaagatgctgagaacgggcaacaactttgagtttacctacaactttgaggaggtgcccttccactccagcttcgctcccagtcagaacctgttcaagctggccaacccgctggtggaccagtacttgtaccgcttcgtgagcacaaataacactggcggagtccagttcaacaagaacctggccgggagatacgccaacacctacaaaaactggttcccggggcccatgggccgaacccagggctggaacctgggctccggggtcaaccgcgccagtgtcagcgccttcgccacgaccaataggatggagctcgagggcgcgagttaccaggtgcccccgcagccgaacggcatgaccaacaacctccagggcagcaacacctatgccctggagaacactatgatcttcaacagccagccggcgaacccgggcaccaccgccacgtacctcgagggcaacatgctcatcaccagcgagagcgagacgcagccggtgaaccgcgtggcgtacaacgtcggcgggcagatggccaccaacaaccagagctccaccactgcccccgcgaccggcacgtacaacctccaggaaatcgtgcccggcagcgtgtggatggagagggacgtgtacctccaaggacccatctgggccaagatcccagagacgggggcgcactttcacccctctccggccatgggcggattcggactcaaacacccaccgcccatgatgctcatcaagaacacgcctgtgcccggaaatatcaccagcttctcggacgtgcccgtcagcagcttcatcacccagtacagcaccgggcaggtcaccgtggagatggagtgggagctcaagaaggaaaactccaagaggtggaacccagagatccagtacacaaacaactacaacgacccccagtttgtggactttgccccggacagcaccggggaatacagaaccaccagacctatcggaacccgataccttacccgacccctttaacccattcatgtcgcataccctcaataaa

SEQ ID NO: 1181 - protein, 724 aa, Artificial Sequence
  Description of Artificial Sequence: Synthetic polypeptide
MSFVDHPPDWLEEVGEGLREFLGLEAGPPKPKPNQQHQDQARGLVLPGYNYLGPGNGLDRGEPVNRADEVAREHDISYNEQLEAGDNPYLKYNHADAEFQEKLADDTSFGGNLGKAVFQAKKRVLEPFGLVEEGAKTAPTGKRIDDHFPKRKKARTEEDSKPSTSSDAEAGPSGSQQLQIPAQPASSLGADTMSAGGGGPLGDNNQGADGVGNASGDWHCDSTWMGDRVVTKSTRTWVLPSYNNHQYREIKSGSVDGSNANAYFGYSTPWGYFDFNRFHSHWSPRDWQRLINNYWGFRPRSLRVKIFNIQVKEVTVQDSTTTIANNLTSTVDVFTDDDYQLPYVVGNGTEGCLPAFPPQVFTLPQYGYATLNRDNTENPTERSSFFCLEYFPSKMLRTGNNFEFTYNFEEVPFHSSFAPSQNLFKLANPLVDQYLYRFVSTNNTGGVQFNKNLAGRYANTYKNWFPGPMGRTQGWNLGSGVNRASVSAFATTNRMELEGASYQVPPQPNGMTNNLQGSNTYALENTMIFNSQPANPGTTATYLEGNMLITSESETQPVNRVAYNVGGQMATNNQSSTTAPATGTYNLQEIVPGSVWMERDVYLQGPIWAKIPETGAHFHPSPAMGGFGLKHPPPMMLIKNTPVPGNITSFSDVPVSSFITQYSTGQVTVEMEWELKKENSKRWNPEIQYTNNYNDPQFVDFAPDSTGEYRTTRPIGTRYLTRPL

SEQ ID NO: 1182 - DNA, 2203 bp, Artificial Sequence
  Description of Artificial Sequence: Synthetic polynucleotide
atgtcttttgttgatcaccctccagattggttggaagaagttggtgaaggtcttcgcgagtttttgggccttgaagcgggcccaccgaaaccaaaacccaatcagcagcatcaagatcaagcccgtggtcttgtgctgcctggttataactatctcggacccggaaacggtctcgatcgaggagagcctgtcaacagggcagacgaggtcgcgcgagagcacgacatctcgtacaacgagcagcttgaggcgggagacaacccctacctcaagtacaaccacgcggacgccgagtttcaggagaagctcgccgacgacacatccttcgggggaaacctcggaaaggcagtctttcaggccaagaaaagggttctcgaaccttttggcctggttgaagagggtgctaagacggcccctaccggaaagcggatagacgaccactttccaaaaagaaagaaggctcggaccgaagaggactccaagccttccacctcgtcagacgccgaagctggacccagcggatcccagcagctgcaaatcccagcccaaccagcctcaagtttgggagctgatacaatgtctgcgggaggtggcggcccattgggcgacaataaccaaggtgccgatggagtgggcaatgcctcgggagattggcattgcgattccacgtggatgggggacagagtcgtcaccaagtccacccgaacctgggtgctgcccagctacaacaaccaccagtaccgagagatcaaaagcggctccgtcgacggaagcaacgccaacgcctactttggatacagcaccccctgggggtactttgactttaaccgcttccacagccactggagcccccgagactggcaaagactcatcaacaactactggggcttcagaccccggtccctcagagtcaaaatcttcaacattcaagtcaaagaggtcacggtgcaggactccaccaccaccatcgccaacaacctcacctccaccgtccaagtgtttacggacgacgactaccagctgccctacgtcgtcggcaacgggacccagggatgcctgccggccttccctccgcaggtctttacgctgccgcagtacggttacgcgacgctgaaccgcgacaacacagaaaatcccaccgagaggagcagcttcttctgcctagagtactttcccagcaagatgctgagaacgggcaacaactttgagtttacctacaactttgaggaggtgcccttccactccagcttcgctcccagtcagaacctgttcaagctggccaacccgctggtggaccagtacttgtaccgcttcgtgagcacaaataacactggcggagtccagttcaacaagaacctggccgggagatacgccaacacctacaaaaactggttcccggggcccatgggccgaacccagggctggaacctgggctccggggtcaaccgcgccagtgtcagcgccttcgccacgaccaataggatggagctcgagggcgcgagttaccaggtgcccccgcagccgaacggcatgaccaacaacctccagggcagcaacacctatgccctggagaacactatgatcttcaacagccagccggcgaacccgggcaccaccgccacgtacctcgagggcaacatgctcatcaccagcgagagcgagacgcagccggtgaaccgcgtggcgtacaacgtcggcgggcagatggccaccaacaaccagagctccaccactgcccccgcgaccggcacgtacaacctccaggaaatcgtgcccggcagcgtgtggatggagagggacgtgtacctccaaggacccatctgggccaagatcccagagacgggggcgcactttcacccctctccggccatgggcggattcggactcaaacacccaccgcccatgatgctcatcaagaacacgcctgtgcccggaaatatcaccagcttctcggacgtgcccgtcagcagcttcatcacccagtacagcaccgggcaggtcaccgtggagatggagtgggagctcaagaaggaaaactccaagaggtggaacccagagatccagtacacaaacaactacaacgacccccagtttgtggactttgccccggacagcaccggggaatacagaaccaccagacctatcggaacccgataccttacccgacccctttaacccattcatgtcgcataccctcaataaa

SEQ ID NO: 1183 - protein, 724 aa, Artificial Sequence
  Description of Artificial Sequence: Synthetic polypeptide
MSFVDHPPDWLEEVGEGLREFLGLEAGPPKPKPNQQHQDQARGLVLPGYNYLGPGNGLDRGEPVNRADEVAREHDISYNEQLEAGDNPYLKYNHADAEFQEKLADDTSFGGNLGKAVFQAKKRVLEPFGLVEEGAKTAPTGKRIDDHFPKRKKARTEEDSKPSTSSDAEAGPSGSQQLQIPAQPASSLGADTMSAGGGGPLGDNNQGADGVGNASGDWHCDSTWMGDRVVTKSTRTWVLPSYNNHQYREIKSGSVDGSNANAYFGYSTPWGYFDFNRFHSHWSPRDWQRLINNYWGFRPRSLRVKIFNIQVKEVTVQDSTTTIANNLTSTVQVFTDDDYQLPYVVGNGTQGCLPAFPPQVFTLPQYGYATLNRDNTENPTERSSFFCLEYFPSKMLRTGNNFEFTYNFEEVPFHSSFAPSQNLFKLANPLVDQYLYRFVSTNNTGGVQFNKNLAGRYANTYKNWFPGPMGRTQGWNLGSGVNRASVSAFATTNRMELEGASYQVPPQPNGMTNNLQGSNTYALENTMIFNSQPANPGTTATYLEGNMLITSESETQPVNRVAYNVGGQMATNNQSSTTAPATGTYNLQEIVPGSVWMERDVYLQGPIWAKIPETGAHFHPSPAMGGFGLKHPPPMMLIKNTPVPGNITSFSDVPVSSFITQYSTGQVTVEMEWELKKENSKRWNPEIQYTNNYNDPQFVDFAPDSTGEYRTTRPIGTRYLTRPL

SEQ ID NO: 1184 - DNA, 2203 bp, Artificial Sequence
  Description of Artificial Sequence: Synthetic polynucleotide
atgtcttttgttgatcaccctccagattggttggaagaagttggtgaaggtcttcgcgagtttttgggccttgaagcgggcccaccgaaaccaaaacccaatcagcagcatcaagatcaagcccgtggtcttgtgctgcctggttataactatctcggacccggaaacggtctcgatcgaggagagcctgtcaacagggcagacgaggtcgcgcgagagcacgacatctcgtacaacgagcagcttgaggcgggagacaacccctacctcaagtacaaccacgcggacgccgagtttcaggagaagctcgccgacgacacatccttcgggggaaacctcggaaaggcagtctttcaggccaagaaaagggttctcgaaccttttggcctggttgaagagggtgctaagacggcccctaccggaaagcggatagacgaccactttccaaaaagaaagaaggctcggaccgaagaggactccaagccttccacctcgtcagacgccgaagctggacccagcggatcccagcagctgcaaatcccagcccaaccagcctcaagtttgggagctgatacaatgtctgcgggaggtggcggcccattgggcgacaataaccaaggtgccgatggagtgggcaatgcctcgggagattggcattgcgattccacgtggatgggggacagagtcgtcaccaagtccacccgaacctgggtgctgcccagctacaacaaccaccagtaccgagagatcaaaagcggctccgtcgacggaagcaacgccaacgcctactttggatacagcaccccctgggggtactttgactttaaccgcttccacagccactggagcccccgagactggcaaagactcatcaacaactactggggcttcagaccccggtccctcagagtcaaaatcttcaacattcaagtcaaagaggtcacggtgcaggactccaccaccaccatcgccaacaacctcacctccaccgtccaagtgtttacggacgacgactaccagctgccctacgtcgtcggcaacgggaccgagggatgcctgccggccttccctccgcaggtctttacgctgccgcagtacggttacgcgacgctgaaccgcgacaacacagaaaatcccaccgagaggagcagcttcttctgcctagagtactttcccagcaagatgctgagaacgggcaacaactttgagtttacctacaactttgaggaggtgcccttccactccagcttcgctcccagtcagaacctgttcaagctggccaacccgctggtggaccagtacttgtaccgcttcgtgagcacaaataacactggcggagtccagttcaacaagaacctggccgggagatacgccaacacctacaaaaactggttcccggggcccatgggccgaacccagggctggaacctgggctccggggtcaaccgcgccagtgtcagcgccttcgccacgaccaataggatggagctcgagggcgcgagttaccaggtgcccccgcagccgaacggcatgaccaacaacctccagggcagcaacacctatgccctggagaacactatgatcttcaacagccagtcggcgaacccgggcaccaccgccacgtacctcgagggcaacatgctcatcaccagcgagagcgagacgcagccggtgaaccgcgtggcgtacaacgtcggcgggcagatggccaccaacaaccagagctccaccactgcccccgcgaccggcacgtacaacctccaggaaatcgtgcccggcagcgtgtggatggagagggacgtgtacctccaaggacccatctgggccaagatcccagagacgggggcgcactttcacccctctccggccatgggcggattcggactcaaacacccaccgcccatgatgctcatcaagaacacgcctgtgcccggaaatatcaccagcttctcggacgtgcccgtcagcagcttcatcacccagtacagcaccgggcaggtcaccgtggagatggagtgggagctcaagaaggaaaactccaagaggtggaacccagagatccagtacacaaacaactacaacgacccccagtttgtggactttgccccggacagcaccggggaatacagaaccaccagacctatcggaacccgataccttacccgacccctttaacccattcatgtcgcataccctcaataaa

SEQ ID NO: 1185 - protein, 724 aa, Artificial Sequence
  Description of Artificial Sequence: Synthetic polypeptide
MSFVDHPPDWLEEVGEGLREFLGLEAGPPKPKPNQQHQDQARGLVLPGYNYLGPGNGLDRGEPVNRADEVAREHDISYNEQLEAGDNPYLKYNHADAEFQEKLADDTSFGGNLGKAVFQAKKRVLEPFGLVEEGAKTAPTGKRIDDHFPKRKKARTEEDSKPSTSSDAEAGPSGSQQLQIPAQPASSLGADTMSAGGGGPLGDNNQGADGVGNASGDWHCDSTWMGDRVVTKSTRTWVLPSYNNHQYREIKSGSVDGSNANAYFGYSTPWGYFDFNRFHSHWSPRDWQRLINNYWGFRPRSLRVKIFNIQVKEVTVQDSTTTIANNLTSTVQVFTDDDYQLPYVVGNGTEGCLPAFPPQVFTLPQYGYATLNRDNTENPTERSSFFCLEYFPSKMLRTGNNFEFTYNFEEVPFHSSFAPSQNLFKLANPLVDQYLYRFVSTNNTGGVQFNKNLAGRYANTYKNWFPGPMGRTQGWNLGSGVNRASVSAFATTNRMELEGASYQVPPQPNGMTNNLQGSNTYALENTMIFNSQSANPGTTATYLEGNMLITSESETQPVNRVAYNVGGQMATNNQSSTTAPATGTYNLQEIVPGSVWMERDVYLQGPIWAKIPETGAHFHPSPAMGGFGLKHPPPMMLIKNTPVPGNITSFSDVPVSSFITQYSTGQVTVEMEWELKKENSKRWNPEIQYTNNYNDPQFVDFAPDSTGEYRTTRPIGTRYLTRPL

SEQ ID NO: 1186 - DNA, 2203 bp, Artificial Sequence
  Description of Artificial Sequence: Synthetic polynucleotide
atgtcttttgttgatcaccctccagattggttggaagaagttggtgaaggtcttcgcgagtttttgggccttgaagcgggcccaccgaaaccaaaacccaatcagcagcatcaagatcaagcccgtggtcttgtgctgcctggttataactatctcggacccggaaacggtctcgatcgaggagagcctgtcaacagggcagacgaggtcgcgcgagagcacgacatctcgtacaacgagcagcttgaggcgggagacaacccctacctcaagtacaaccacgcggacgccgagtttcaggagaagctcgccgacgacacatccttcgggggaaacctcggaaaggcagtctttcaggccaagaaaagggttctcgaaccttttggcctggttgaagagggtgctaagacggcccctaccggaaagcggatagacgaccactttccaaaaagaaagaaggctcggaccgaagaggactccaagccttccacctcgtcagacgccgaagctggacccagcggatcccagcagctgcaaatcccagcccaaccagcctcaagtttgggagctgatacaatgtctgcgggaggtggcggcccattgggcgacaataaccaaggtgccgatggagtgggcaatgcctcgggagattggcattgcgattccacgtggatgggggacagagtcgtcaccaagtccacccgaacctgggtgctgcccagctacaacaaccaccagtaccgagagatcaaaagcggctccgtcgacggaagcaacgccaacgcctactttggatacagcaccccctgggggtactttgactttaaccgcttccacagccactggagcccccgagactggcaaagactcatcaacaactactggggcttcagaccccggtccctcagagtcaaaatcttcaacattcaagtcaaagaggtcacggtgcaggactccaccaccaccatcgccaacaacctcacctccaccgtccaagtgtttacggacgacgactaccagctgccctacgtcgtcggcaacgggaccgagggatgcctgccggccttccctccgcaggtctttacgctgccgcagtacggttacgcgacgctgaaccgcgacaacacagaaaatcccaccgagaggagcagcttcttctgcctagagtactttcccagcaagatgctgagaacgggcaacaactttgagtttacctacaactttgaggaggtgcccttccactccagcttcgctcccagtcagaacctgttcaagctggccaacccgctggtggaccagtacttgtaccgcttcgtgagcacaaataacactggcggagtccagttcaacaagaacctggccgggagatacgccaacacctacaaaaactggttcccggggcccatgggccgaacccagggctggaacctgggctccggggtcaaccgcgccagtgtcagcgccttcgccacgaccaataggatggagctcgagggcgcgagttaccaggtgcccccgcagccgaacggcatgaccaacaacctccagggcagcaacacctatgccctggagaacactatgatcttcaacagccagggggcgaacccgggcaccaccgccacgtacctcgagggcaacatgctcatcaccagcgagagcgagacgcagccggtgaaccgcgtggcgtacaacgtcggcgggcagatggccaccaacaaccagagctccaccactgcccccgcgaccggcacgtacaacctccaggaaatcgtgcccggcagcgtgtggatggagagggacgtgtacctccaaggacccatctgggccaagatcccagagacgggggcgcactttcacccctctccggccatgggcggattcggactcaaacacccaccgcccatgatgctcatcaagaacacgcctgtgcccggaaatatcaccagcttctcggacgtgcccgtcagcagcttcatcacccagtacagcaccgggcaggtcaccgtggagatggagtgggagctcaagaaggaaaactccaagaggtggaacccagagatccagtacacaaacaactacaacgacccccagtttgtggactttgccccggacagcaccggggaatacagaaccaccagacctatcggaacccgataccttacccgacccctttaacccattcatgtcgcataccctcaataaa

SEQ ID NO: 1187 - protein, 724 aa, Artificial Sequence
  Description of Artificial Sequence: Synthetic polypeptide
MSFVDHPPDWLEEVGEGLREFLGLEAGPPKPKPNQQHQDQARGLVLPGYNYLGPGNGLDRGEPVNRADEVAREHDISYNEQLEAGDNPYLKYNHADAEFQEKLADDTSFGGNLGKAVFQAKKRVLEPFGLVEEGAKTAPTGKRIDDHFPKRKKARTEEDSKPSTSSDAEAGPSGSQQLQIPAQPASSLGADTMSAGGGGPLGDNNQGADGVGNASGDWHCDSTWMGDRVVTKSTRTWVLPSYNNHQYREIKSGSVDGSNANAYFGYSTPWGYFDFNRFHSHWSPRDWQRLINNYWGFRPRSLRVKIFNIQVKEVTVQDSTTTIANNLTSTVQVFTDDDYQLPYVVGNGTEGCLPAFPPQVFTLPQYGYATLNRDNTENPTERSSFFCLEYFPSKMLRTGNNFEFTYNFEEVPFHSSFAPSQNLFKLANPLVDQYLYRFVSTNNTGGVQFNKNLAGRYANTYKNWFPGPMGRTQGWNLGSGVNRASVSAFATTNRMELEGASYQVPPQPNGMTNNLQGSNTYALENTMIFNSQGANPGTTATYLEGNMLITSESETQPVNRVAYNVGGQMATNNQSSTTAPATGTYNLQEIVPGSVWMERDVYLQGPIWAKIPETGAHFHPSPAMGGFGLKHPPPMMLIKNTPVPGNITSFSDVPVSSFITQYSTGQVTVEMEWELKKENSKRWNPEIQYTNNYNDPQFVDFAPDSTGEYRTTRPIGTRYLTRPL

SEQ ID NO: 1188 - DNA, 2194 bp, Artificial Sequence
  Description of Artificial Sequence: Synthetic polynucleotide
atgtcttttgttgatcaccctccagattggttggaagaagttggtgaaggtcttcgcgagtttttgggccttgaagcgggcccaccgaaaccaaaacccaatcagcagcatcaagatcaagcccgtggtcttgtgctgcctggttataactatctcggacccggaaacggtctcgatcgaggagagcctgtcaacagggcagacgaggtcgcgcgagagcacgacatctcgtacaacgagcagcttgaggcgggagacaacccctacctcaagtacaaccacgcggacgccgagtttcaggagaagctcgccgacgacacatccttcgggggaaacctcggaaaggcagtctttcaggccaagaaaagggttctcgaaccttttggcctggttgaagagggtgctaagacggcccctaccggaaagcggatagacgaccactttccaaaaagaaagaaggctcggaccgaagaggactccaagccttccacctcgtcagacgccgaagctggacccagcggatcccagcagctgcaaatcccagcccaaccagcctcaagtttgggagctgatacaatgtctgcgggaggtggcggcccattgggcgacaataaccaaggtgccgatggagtgggcaatgcctcgggagattggcattgcgattccacgtggatgggggacagagtcgtcaccaagtccacccgaacctgggtgctgcccagctacaacaaccaccagtaccgagagatcaaaagcggctccgtcgacggaagcaacgccaacgcctactttggatacagcaccccctgggggtactttgactttaaccgcttccacagccactggagcccccgagactggcaaagactcatcaacaactactggggcttcagaccccggtccctcagagtcaaaatcttcaacattcaagtcaaagaggtcacggtgcaggactccaccaccaccatcgccaacaacctcacctccaccgtccaagtgtttacggacgacgactaccagctgccctacgtcgtcggcaacgggaccgagggatgcctgccggccttccctccgcaggtctttacgctgccgcagtacggttacgcgacgctgaaccgcgacaacacagaaaatcccaccgagaggagcagcttcttctgcctagagtactttcccagcaagatgctgagaacgggcaacaactttgagtttacctacaactttgaggaggtgcccttccactccagcttcgctcccagtcagaacctgttcaagctggccaacccgctggtggaccagtacttgtaccgcttcgtgagcacaaataacactggcggagtccagttcaacaagaacctggccgggagatacgccaacacctacaaaaactggttcccggggcccatgggccgaacccagggctggaacctgggctccggggtcaaccgcgccagtgtcagcgccttcgccacgaccaataggatggagctcgagggcgcgagttaccaggtgcccccgcagccgaacggcatgaccaacaacctccagggcagcaacacctatgccctggagaacactatgatcttcgggaagcaaggctcagagaaaacaaatgtggacattgaaaaggtcatgatcaccagcgagagcgagacgcagccggtgaaccgcgtggcgtacaacgtcggcgggcagatggccaccaacaaccagagctccaccactgcccccgcgaccggcacgtacaacctccaggaaatcgtgcccggcagcgtgtggatggagagggacgtgtacctccaaggacccatctgggccaagatcccagagacgggggcgcactttcacccctctccggccatgggcggattcggactcaaacacccaccgcccatgatgctcatcaagaacacgcctgtgcccggaaatatcaccagcttctcggacgtgcccgtcagcagcttcatcacccagtacagcaccgggcaggtcaccgtggagatggagtgggagctcaagaaggaaaactccaagaggtggaacccagagatccagtacacaaacaactacaacgacccccagtttgtggactttgccccggacagcaccggggaatacagaaccaccagacctatcggaacccgataccttacccgacccctttaacccattcatgtcgcataccctcaataaa

SEQ ID NO: 1189 - protein, 721 aa, Artificial Sequence
  Description of Artificial Sequence: Synthetic polypeptide
MSFVDHPPDWLEEVGEGLREFLGLEAGPPKPKPNQQHQDQARGLVLPGYNYLGPGNGLDRGEPVNRADEVAREHDISYNEQLEAGDNPYLKYNHADAEFQEKLADDTSFGGNLGKAVFQAKKRVLEPFGLVEEGAKTAPTGKRIDDHFPKRKKARTEEDSKPSTSSDAEAGPSGSQQLQIPAQPASSLGADTMSAGGGGPLGDNNQGADGVGNASGDWHCDSTWMGDRVVTKSTRTWVLPSYNNHQYREIKSGSVDGSNANAYFGYSTPWGYFDFNRFHSHWSPRDWQRLINNYWGFRPRSLRVKIFNIQVKEVTVQDSTTTIANNLTSTVQVFTDDDYQLPYVVGNGTEGCLPAFPPQVFTLPQYGYATLNRDNTENPTERSSFFCLEYFPSKMLRTGNNFEFTYNFEEVPFHSSFAPSQNLFKLANPLVDQYLYRFVSTNNTGGVQFNKNLAGRYANTYKNWFPGPMGRTQGWNLGSGVNRASVSAFATTNRMELEGASYQVPPQPNGMTNNLQGSNTYALENTMIFGKQGSEKTNVDIEKVMITSESETQPVNRVAYNVGGQMATNNQSSTTAPATGTYNLQEIVPGSVWMERDVYLQGPIWAKIPETGAHFHPSPAMGGFGLKHPPPMMLIKNTPVPGNITSFSDVPVSSFITQYSTGQVTVEMEWELKKENSKRWNPEIQYTNNYNDPQFVDFAPDSTGEYRTTRPIGTRYLTRPL

SEQ ID NO: 1190 - protein, 519 aa, Artificial Sequence
  Description of Artificial Sequence: Synthetic polypeptide
DGVGSSSGNWHCDSTWLGDRVITTSTRTWALPTYNNHLYKQISNGTSGGATNDNTYFGYSTPWGYFDFNRFHCHFSPRDWQRLINNNWGFRPKRLSFKLFNIQVKEVTQNEGTKTIANNLTSTIQVFTDSEYQLPYVLGSAHQGCLPPFPADVFMIPQYGYLTLNNGSQAVGRSSFYCLEYFPSQMLRTGNNFQFTYTFEDVPFHSSYAHSQSLDRLMNPLIDQYLYYLSRTQTTGGTANTQTLGFSQGGPNTMANQAKNWLPGPCYRQQRVSTTTGQNNNSNFAWTAGTKYHLNGRNSLANPGIAMATHKDDEERFFPSNGILIFGKQNAARDNADYSDVMLTSEEEIKTTNPVATEEYGIVADNLQQQNTAPQIGTVNSQGALPGMVWQNRDVYLQGPIWAKIPHTDGNFHPSPLMGGFGLKHPPPQILIKNTPVPADPPTTFNQSKLNSFITQYSTGQVSVEIEWELQKENSKRWNPEIQYTSNYYKSTSVDFAVNTEGVYSEPRPIGTRYLTRNL

SEQ ID NO: 1191 - protein, 738 aa, Artificial Sequence
  Description of Artificial Sequence: Synthetic polypeptide
MAADGYLPDWLEDNLSEGIREWWALQPGAPKPKANQQHQDNARGLVLPGYKYLGPGNGLDKGEPVNAADAAALEHDKAYDQQLKAGDNPYLKYNHADAEFQERLKEDTSFGGNLGRAVFQAKKRLLEPLGLVEEAAKTAPGKKRPVEPSPQRSPDSSTGIGKKGQQPARKRLNFGQTGDSESVPDPQPLGEPPAAPSGVGPNTMAAGGGAPMADNNEGADGVGSSSGNWHCDSTWLGDRVITTSTRTWALPTYNNHLYKQISNGTSGGATNDNTYFGYSTPWGYFDFNRFHCHFSPRDWQRLINNNWGFRPKRLSFKLFNIQVKEVTQNEGTKTIANNLTSTIQVFTDSEYQLPYVLGSAHQGCLPPFPADVFMIPQYGYLTLNNGSQAVGRSSFYCLEYFPSQMLRTGNNFQFTYTFEDVPFHSSYAHSQSLDRLMNPLIDQYLYYLSRTQTTGGTANTQTLGFSQGGPNTMANQAKNWLPGPCYRQQRVSTTTGQNNNSNFAWTAGTKYHLNGRNSLANPGIAMATHKDDEERFFPSNGILIFGKQNAARDNADYSDVMLTSEEEIKTTNPVATEEYGIVADNLQQQNTAPQIGTVNSQGALPGMVWQNRDVYLQGPIWAKIPHTDGNFHPSPLMGGFGLKHPPPQILIKNTPVPADPPTTFNQSKLNSFITQYSTGQVSVEIEWELQKENSKRWNPEIQYTSNYYKSTSVDFAVNTEGVYSEPRPIGTRYLTRNL

SEQ ID NO: 1192 - protein, 725 aa, Artificial Sequence
  Description of Artificial Sequence: Synthetic polypeptide
MAADGYLPDWLEDNLSEGIREWWALQPGAPKPKANQQHQDNARGLVLPGYKYLGPGNGLDKGEPVNAADAAALEHDKAYDQQLKAGDNPYLKYNHADAEFQERLKEDTSFGGNLGRAVFQAKKRLLEPLGLVEEAAKTAPTGKRIDDHFPKRKKARTEEDSKPSTSSDAEAGPSGSQQLQIPAQPASSLGADTMSAGGGGPLGDNNQGADGVGNASGDWHCDSTWMGDRVVTKSTRTWVLPSYNNHQYREIKSGSVDGSNANAYFGYSTPWGYFDFNRFHSHWSPRDWQRLINNYWGFRPRSLRVKIFNIQVKEVTVQDSTTTIANNLTSTVQVFTDDDYQLPYVVGNGTEGCLPAFPPQVFTLPQYGYATLNRDNTENPTERSSFFCLEYFPSKMLRTGNNFEFTYNFEEVPFHSSFAPSQNLFKLANPLVDQYLYRFVSTNNTGGVQFNKNLAGRYANTYKNWFPGPMGRTQGWNLGSGVNRASVSAFATTNRMELEGASYQVPPQPNGMTNNLQGSNTYALENTMIFNSQPANPGTTATYLEGNMLITSESETQPVNRVAYNVGGQMATNNQSSTTAPATGTYNLQEIVPGSVWMERDVYLQGPIWAKIPETGAHFHPSPAMGGFGLKHPPPMMLIKNTPVPGNITSFSDVPVSSFITQYSTGQVTVEMEWELKKENSKRWNPEIQYTNNYNDPQFVDFAPDSTGEYRTTRPIGTRYLTRPL

SEQ ID NO: 1193 - protein, 736 aa, Artificial Sequence
  Description of Artificial Sequence: Synthetic polypeptide
MAADGYLPDWLEDNLSEGIREWWALKPGAPKPKANQQKQDDGRGLVLPGYKYLGPFNGLDKGEPVNAADAAALEHDKAYDQQLQAGDNPYLRYNHADAEFQERLQEDTSFGGNLGRAVFQAKKRVLEPLGLVEEGAKTAPGKKRPVDQSPQEPDSSSGVGKSGKQPARKRLNFGQTGDSESVPDPQPLGEPPAAPTSLGSNTMASGGGAPMADNNEGADGVGNSSGNWHCDSQWLGDRVITTSTRTWALPTYNNHLYKQISSQSGASNDNHYFGYSTPWGYFDFNRFHCHFSPRDWQRLINNNWGFRPKKLSFKLFNIQVKEVTQNDGTTTIANNLTSTVQVFTDSEYQLPYVLGSAHQGCLPPFPADVFMVPQYGYLTLNNGSQAVGRSSFYCLEYFPSQMLRTGNNFQFSYTFEDVPFHSSYAHSQSLDRLMNPLIDQYLYYLNRTQGTTSGTTNQSRLLFSQAGPQSMSLQARNWLPGPCYRQQRLSKTANDNNNSNFPWTAASKYHLNGRDSLVNPGPAMASHKDDEEKFFPMHGNLIFGKEGTTASNAELDNVMITDEEEIRTTNPVATEQYGTVANNLQSSNTAPTTRTVNDQGALPGMVWQDRDVYLQGPIWAKIPHTDGHFHPSPLMGGFGLKHPPPQIMIKNTPVPANPPTTFSPAKFASFITQYSTGQVSVEIEWELQKENSKRWNPEIQYTSNYNKSVNVDFTVDTNGVYSEPRPIGTRYLTRNL

SEQ ID NO: 1194 - protein, 735 aa, Artificial Sequence
  Description of Artificial Sequence: Synthetic polypeptide
MSFVDHPPDWLEEVGEGLREFLGLEAGPPKPKPNQQHQDQARGLVLPGYNYLGPGNGLDRGEPVNRADEVAREHDISYNEQLEAGDNPYLKYNHADAEFQEKLADDTSFGGNLGKAVFQAKKRVLEPFGLVEEGAKTAPGKKRPVDQSPQEPDSSSGVGKSGKQPARKRLNFGQTGDSESVPDPQPLGEPPAAPTSLGSNTMASGGGAPMADNNEGADGVGNSSGNWHCDSQWLGDRVITTSTRTWALPTYNNHLYKQISSQSGASNDNHYFGYSTPWGYFDFNRFHCHFSPRDWQRLINNNWGFRPKKLSFKLFNIQVKEVTQNDGTTTIANNLTSTVQVFTDSEYQLPYVLGSAHQGCLPPFPADVFMVPQYGYLTLNNGSQAVGRSSFYCLEYFPSQMLRTGNNFQFSYTFEDVPFHSSYAHSQSLDRLMNPLIDQYLYYLNRTQGTTSGTTNQSRLLFSQAGPQSMSLQARNWLPGPCYRQQRLSKTANDNNNSNFPWTAASKYHLNGRDSLVNPGPAMASHKDDEEKFFPMHGNLIFGKEGTTASNAELDNVMITDEEEIRTTNPVATEQYGTVANNLQSSNTAPTTRTVNDQGALPGMVWQDRDVYLQGPIWAKIPHTDGHFHPSPLMGGFGLKHPPPQIMIKNTPVPANPPTTFSPAKFASFITQYSTGQVSVEIEWELQKENSKRWNPEIQYTSNYNKSVNVDFTVDTNGVYSEPRPIGTRYLTRPL

SEQ ID NO: 1195 - protein, 736 aa, Artificial Sequence
  Description of Artificial Sequence: Synthetic polypeptide
MAADGYLPDWLEDNLSEGIREWWALKPGAPKPKANQQKQDDGRGLVLPGYKYLGPFNGLDKGEPVNAADAAALEHDKAYDQQLQAGDNPYLRYNHADAEFQERLQEDTSFGGNLGRAVFQAKKRVLEPLGLVEEGAKTAPGKKRPVEPSPQRSPDSSTGIGKKGQQPARKRLNFGQTGDSESVPDPQPLGEPPAAPSGVGPNTMAAGGGAPMADNNEGADGVGSSSGNWHCDSTWLGDRVITTSTRTWALPTYNNHLYKQISSQSGASNDNHYFGYSTPWGYFDFNRFHCHFSPRDWQRLINNNWGFRPKRLSFKLFNIQVKEVTQNEGTKTIANNLTSTIQVFTDSEYQLPYVLGSAHQGCLPPFPADVFMIPQYGYLTLNNGSQAVGRSSFYCLEYFPSQMLRTGNNFQFTYTFEDVPFHSSYAHSQSLDRLMNPLIDQYLYYLSRTQTTGGTANTQTLGFSQGGPNTMANQAKNWLPGPCYRQQRVSTTTGQNNNSNFAWTAGTKYHLNGRNSLANPGIAMATHKDDEERFFPSNGILIFGKQGTTASNAELDNVMITDEEEIKTTNPVATEEYGIVADNLQQQNTAPQIGTVNSQGALPGMVWQNRDVYLQGPIWAKIPHTDGNFHPSPLMGGFGLKHPPPQILIKNTPVPADPPTTFNQSKLNSFITQYSTGQVSVEIEWELQKENSKRWNPEIQYTSNYNKSVNVDFTVDTNGVYSEPRPIGTRYLTRNL

SEQ ID NO: 1196 - protein, 736 aa, Artificial Sequence
  Description of Artificial Sequence: Synthetic polypeptide
MAADGYLPDWLEDNLSEGIREWWALKPGAPKPKANQQKQDDGRGLVLPGYKYLGPFNGLDKGEPVNAADAAALEHDKAYDQQLQAGDNPYLRYNHADAEFQERLQEDTSFGGNLGRAVFQAKKRVLEPLGLVEEGAKTAPGKKRPVEPSPQRSPDSSTGIGKKGQQPARKRLNFGQTGDSESVPDPQPLGEPPAAPSGVGPNTMAAGGGAPMADNNEGADGVGSSSGNWHCDSTWLGDRVITTSTRTWALPTYNNHLYKQISSQSGASNDNHYFGYSTPWGYFDFNRFHCHFSPRDWQRLINNNWGFRPKRLSFKLFNIQVKEVTQNEGTKTIANNLTSTIQVFTDSEYQLPYVLGSAHQGCLPPFPADVFMIPQYGYLTLNNGSQAVGRSSFYCLEYFPSQMLRTGNNFQFTYTFEDVPFHSSYAHSQSLDRLMNPLIDQYLYYLSRTQTTGGTANTQTLGFSQGGPNTMANQAKNWLPGPCYRQQRVSTTTGQNNNSNFAWTAGTKYHLNGRNSLANPGIAMATHKDDEERFFPSNGILIFGKQNAARDNADYSDVMLTSEEEIKTTNPVATEEYGIVADNLQQQNTAPQIGTVNSQGALPGMVWQNRDVYLQGPIWAKIPHTDGNFHPSPLMGGFGLKHPPPQILIKNTPVPADPPTTFNQSKLNSFITQYSTGQVSVEIEWELQKENSKRWNPEIQYTSNYYKSTSVDFAVNTEGVYSEPRPIGTRYLTRNL

SEQ ID NO: 1197 - protein, 736 aa, Artificial Sequence
  Description of Artificial Sequence: Synthetic polypeptide
MAADGYLPDWLEDNLSEGIREWWDLKPGAPKPKANQQKQDDGRGLVLPGYKYLGPFNGLDKGEPVNAADAAALEHDKAYDQQLKAGDNPYLRYNHADAEFQERLQEDTSFGGNLGRAVFQAKKRVLEPLGLVEEGAKTAPGKKRPVEQSPQEPDSSSGIGKTGQQPAKKRLNFGQTGDTESVPDPQPLGEPPAAPSGLGPNTMASGGGAPMADNNEGADGVGNSSGNWHCDSTWLGDRVITTSTRTWALPTYNNHLYKQISNGTSGGSTNDNTYFGYSTPWGYFDFNRFHCHFSPRDWQRLINNNWGFRPKRLNFKLFNIQVKEVTTNEGTKTIANNLTSTVQVFTDSEYQLPYVLGSAHQGCLPPFPADVFMVPQYGYLTLNNGSQALGRSSFYCLEYFPSQMLRTGNNFQFSYTFEDVPFHSSYAHSQSLDRLMNPLIDQYLYYLVRTQTTGTGGTQTLAFSQAGPSSMASQARNWVPGPSYRQQRVSTTTNQNNNSNFAWTGAAKFKLNGRDSLMNPGVAMASHKDDEDRFFPSSGVLIFGKQGAGNDGVDYSQVLITDEEEIKATNPVATEEYGAVAINNQAANTQAQTGLVHNQGVIPGMVWQNRDVYLQGPIWAKIPHTDGNFHPSPLMGGFGLKHPPPQILIKNTPVPADPPLTFNQAKLNSFITQYSTGQVSVEIEWELQKENSKRWNPEIQYTSNYYKSTNVDFAVNTEGVYSEPRPIGTRYLTRNL

SEQ ID NO: 1198 - DNA, 3695 bp, Artificial Sequence
  Description of Artificial Sequence: Synthetic polynucleotide
ctctttgcgcttgcgttttcccttgtccagatagcccagtagctgacattcatccggggtcagcaccgtttctgcggactggctttctacgtgaaaaggatctaggtgaagatcctttttgataatctcatgcctgacatttatattccccagaacatcaggttaatggcgtttttgatgtcattttcgcggtggctgagatcagccacttcttccccgataacggagaccggcacactggccatatcggtggtcatcatgcgccagctttcatccccgatatgcaccaccgggtaaagttcacgggagactttatctgacagcagacgtgcactggccagggggatcaccatccgtcgccccggcgtgtcaataatatcactctgtacatccacaaacagacgataacggctctctcttttataggtgtaaaccttaaactgccgtacgtataggctgcgcaactgttgggaagggcgatcggtgcgggcctcttcgctattacgccagctggcgaaagggggatgtgctgcaaggcgattaagttgggtaacgccagggttttcccagtcacgacgttgtaaaacgacggccagtgaattgtaatacgactcactatagggcgaattgaatttagcggccgcgaattcgcccttatgatatctggtgggaggagggcaagatgacggccaaggtcgtggagtccgccaaggccattctcggcggcagcaaagtgcgcgtggaccaaaagtgcaagtcgtccgcccagatcgatcccactcccgtcattgtcacctccaacaccaacatgtgcgccgtgattgacgggaacagcaccaccttcgagcaccagcagccgttgcaggaccggatgttcaaatttgaacttacccgccgtctggagcatgactttggcaaggtgacaaagcaggaagtcaaagagttcttccgctgggcgcaggatcacgtgaccgaggtggcgcatgagttccacgtcagaaagggtggagccaacaagagacccgcccccgatgacgctgataaaagcgagcccaagcgggcctgcccctcagtcgcagatccatcgacgtcagacgcggaaggagctccggtggactttgccgacaggtaccaaaacaaatgttctcgtcacgcgggcatgcttcagatgctgtttccctgcaagacatgcgagagaatgaatcagaatttcaacatttgcttcacgcacgggaccagggactgttcggagtgcttccccggcgtgtcagaatctcaaccggtcgtcagaaaaaggacgtatcggaaactctgtgccattcatcatctgctggggagggctcccgagattgcttgctcggcctgcgatctggtcaacgtggacctggatgactgtgtctctgagcaataaatgacttaaaccaggtatggctgccgatggttatcttccagattggctcgaggacaacctctctgagggcattcgcgagtggtgggacttgaaacctggagccccgaaacccaaagccaaccagcaaaagcaggacgacggccggggtctggtgcttcctggctacaagtacctcggacccttcaacggactcgacaagggggagcccgtcaacgcggcggacgcagcggccctcgagcacgacaaggcctacgaccagcagctcaaagcgggtgacaatccgtacctgcggtataaccacgccgacgccgagtttcaggagcgtctgcaagaagatacgtcttttgggggcaacctcgggcgagcagtcttccaggccaagaagcgggttctcgaacctctcggtctggttgaggaaggcgctaagacggctcctggaaagaagagaccggtagagcagtcaccccaagaaccagactcctcatcgggcatcggcaagacaggccagcagcccgctaaaaagagactcaattttggtcagactggcgacacagagtcagtccccgacccacaacctctcggagaacctccagcagccccctcaggtctgggacctaatacaatggcttcaggcggtggcgctccaatggcagacaataacgaaggcgccgacggagtgggtaattcctcgggaaattggcattgcgattccacatggctgggggacagagtcatcaccaccagcacccgaacctgggccctgcccacctacaacaaccacctctacaagcaaatctccaacggcacctcgggaggaagcaccaacgacaacacctactttggctacagcaccccctgggggtattttgacttcaacagattccactgccacttttcaccacgtgactggcagcgactcatcaacaacaattggggattccggcccaagagactcaacttcaagctcttcaacatccaggtcaaggaagtcacgacgaacgaaggcaccaagaccatcgccaataatctcaccagcaccgtgcaggtctttacggactcggagtaccagctaccgtacgtgctaggatcagctcaccagggatgtctgcctccgttcccggcggacgtcttcatggttcctcagtacggttatctaactctgaacaatggcagccaggccctgggacgttcctccttctactgcctggagtatttcccatcgcagatgctgagaaccggcaacaactttcagttcagctacaccttcgaggacgtgcctttccacagcagctacgcgcacagccaaagcctggacaggctgatgaatcccctcatcgaccagtacctgtattacctggtcagaacgcagacaaccgggactggagggacgcagactctggcattcagccaagcaggccctagctcaatggccagccaggctagaaactgggtgcccggaccgagctaccggcagcagcgcgtctccacgacaaccaaccagaacaacaacagcaactttgcctggacgggagctgccaaatttaaactgaacggccgagactctctaatgaaccccggcgtggccatggcttcacacaaggatgacgaggaccgcttcttcccttctagcggggtcctgattttcggcaagcaaggagccgggaatgatggagtggattacagccaagtgctgattacagatgaggaagaaatcaaggctaccaaccccgtggcaacagaggaatatggagcagtggccatcaacaaccaggccgctaatacgcaggcgcagaccggactcgtgcacaaccagggggtgattcccggcatggtgtggcagaacagagacgtgtacctgcagggtcccatctgggccaaaattcctcacacggacggcaactttcacccgtctcccctgatgggcggctttggactgaagcacccgcctcctcaaattctcatcaagaacacaccggttccagcggacccgccgcttaccttcaaccaggccaagctgaactctttcatcacgcagtacagcaccggacaggtcagcgtggaaatcgagtgggagctgcagaaagaaaacagcaaacgctggaatccagagattcagtacacttccaactactacaaatctacaaatgtggactttgctgtcaacacggaaggagtgtatagcgagcctcgccccattggcacccgttacctcacccgcaacctgtaattgcctgttaatcaataaaccggttaattcgtttcagtaaggaagaattcgtttaaa

SEQ ID NO: 1199 - protein, 736 aa, Artificial Sequence; identical to SEQ ID NO: 518
  Description of Artificial Sequence: Synthetic polypeptide

SEQ ID NO: 1200 - protein, 736 aa, Artificial Sequence
  Description of Artificial Sequence: Synthetic polypeptide
MAADGYLPDWLEDNLSEGIREWWDLKPGAPKPKANQQKQDDGRGLVLPGYKYLGPFNGLDKGEPVNAADAAALEHDKAYDQQLKAGDNPYLRYNHADAEFQERLQEDTSFGGNLGRAVFQAKKRVLEPLGLVEEGAKTAPGKKRPVEQSPQEPDSSSGIGKTGQQPAKKRLNFGQTGDTESVPDPQPLGEPPAAPSGLGPNTMASGGGAPMADNNEGADGVGNSSGNWHCDSTWLGDRVITTSTRTWALPTYNNHLYKQISNGTSGGSTNDNTYFGYSTPWGYFDFNRFHCHFSPRDWQRLINNNWGFRPKRLNFKLFNIQVKEVTTNEGTKTIANNLTSTVQVFTDSEYQLPYVLGSAHQGCLPPFPADVFMVPQYGYLTLNNGSQALGRSSFYCLEYFPSQMLRTGNNFQFSYTFEDVPFHSSYAHSQSLDRLMNPLIDQYLYYLVRTQTTGTGGTQTLAFSQAGPSNMASQARNWVPGPSYRQQRVSTTTNQNNNSNFAWTGAAKFKLNGRDSLMNPGVAMASHKDDEDRFFPSSGVLIFGKQGAGNDGVDYSQVLITDEEEIKATNPVATEEYGAVAINNQAANTQAQTGLVHNQGVIPGMVWQNRDVYLQGPIWAKIPHTDGNFHPSPLMGGFGLKHPPPQILIKNTPVPADPPLTFNQAKLNSFITQYSTGQVSVEIEWELQKENSKRWNPEIQYTSNYYKSTNVDFAVNTEGVYSEPRPIGTRYLTRNL

SEQ ID NO: 1201 - protein, 738 aa, Artificial Sequence; identical to SEQ ID NO: 895
  Description of Artificial Sequence: Synthetic polypeptide

SEQ ID NO: 1202 - protein, 736 aa, Artificial Sequence
  Description of Artificial Sequence: Synthetic polypeptide
MAADGYLPDWLEDNLSEGIREWWALQPGAPKPKANQQHQDNARGLVLPGYKYLGPGNGLDKGEPVNAADAAALEHDKAYDQQLKAGDNPYLKYNHADAEFQERLKEDTSFGGNLGRAVFQAKKRILEPLGLVEEAAKTAPGKKRPVDQSPQEPDSSSGVGKSGKQPARKRLNFGQTGDSESVPDPQPLGEPPAAPTSLGSNTMASGGGAPMADNNEGADGVGNSSGNWHCDSQWLGDRVITTSTRTWALPTYNNHLYKQISSQSGASNDNHYFGYSTPWGYFDFNRFHCHFSPRDWQRLINNNWGFRPKKLSFKLFNIQVKEVTQNDGTTTIANNLTSTVQVFTDSEYQLPYVLGSAHQGCLPPFPADVFMVPQYGYLTLNNGSQAVGRSSFYCLEYFPSQMLRTGNNFQFSYTFEDVPFHSSYAHSQSLDRLMNPLIDQYLYYLNRTQGTTSGTTNQSRLLFSQAGPQSMSLQARNWLPGPCYRQQRLSKTANDNNNSNFPWTAASKYHLNGRDSLVNPGPAMASHKDDEEKFFPMHGNLIFGKEGTTASNAELDNVMITDEEEIRTTNPVATEQYGTVANNLQSSNTAPTTRTVNDQGALPGMVWQDRDVYLQGPIWAKIPHTDGHFHPSPLMGGFGLKHPPPQIMIKNTPVPANPPTTFSPAKFASFITQYSTGQVSVEIEWELQKENSKRWNPEIQYTSNYNKSVNVDFTVDTNGVYSEPRPIGTRYLTRPL

SEQ ID NO: 1203 - protein, 736 aa, Artificial Sequence
  Description of Artificial Sequence: Synthetic polypeptide
MAADGYLPDWLEDNLSEGIREWWALQPGAPKPKANQQHQDNARGLVLPGYKYLGPGNGLDKGEPVNAADAAALEHDKAYDQQLKAGDNPYLKYNHADAEFQERLKEDTSFGGNLGRAVFQAKKRLLEPLGLVEEAAKTAPGKKRPVDQSPQEPDSSSGVGKSGKQPARKRLNFGQTGDSESVPDPQPLGEPPAAPTSLGSNTMASGGGAPMADNNEGADGVGNSSGNWHCDSQWLGDRVITTSTRTWALPTYNNHLYKQISSQSGASNDNHYFGYSTPWGYFDFNRFHCHFSPRDWQRLINNNWGFRPKKLSFKLFNIQVKEVTQNDGTTTIANNLTSTVQVFTDSEYQLPYVLGSAHQGCLPPFPADVFMVPQYGYLTLNNGSQAVGRSSFYCLEYFPSQMLRTGNNFQFSYTFEDVPFHSSYAHSQSLDRLMNPLIDQYLYYLNRTQGTTSGTTNQSRLLFSQAGPQSMSLQARNWLPGPCYRQQRLSKVANDNNNSNFPWTAASKYHLNGRDSLVNPGPAMASHKDDEEKFFPMHGNLIFGKEGTTASNAELDNVMITDEEEIRTTNPVATEQYGTVANNLQSSNTAPTTRTVNDQGALPGMVWQDRDVYLQGPIWAKIPHTDGHFHPSPLMGGFGLKHPPPQIMIKNTPVPANPPTTFVPAKFASFITQYSTGQVSVEIEWELQKENSKRWNPEIQYTSNYNKSVNVDFTVDTNGVYSEPRPIGTRYLTRPL

SEQ ID NO: 1204 - protein, 736 aa, Artificial Sequence; identical to SEQ ID NO: 912
  Description of Artificial Sequence: Synthetic polypeptide
  MOD_RES (168)..(168): Lys or Arg
  MOD_RES (204)..(204): Ala or Ser
  MOD_RES (266)..(266): Ala or Gly
  MOD_RES (311)..(311): Arg or Lys
  MOD_RES (411)..(411): Glu or Gln
  MOD_RES (460)..(460): Thr or Glu
  MOD_RES (493)..(493): Ala or Thr
  MOD_RES (562)..(562): Ser or Asn
  MOD_RES (576)..(576): Gln or Glu
  MOD_RES (587)..(587): Ser or Ala
  MOD_RES (609)..(609): Asn or Asp

SEQ ID NO: 1205 - DNA, 2208 bp, Artificial Sequence; identical to SEQ ID NO: 913
  Description of Artificial Sequence: Synthetic polynucleotide
  misc_feature (502)..(504): This region may encompass "aag" or "aaa"
  misc_feature (610)..(612): This region may encompass "gca" or "agc"
  misc_feature (796)..(798): This region may encompass "gca" or "ggc"
  misc_feature (931)..(933): This region may encompass "aga" or "aag"
  misc_feature (1231)..(1233): This region may encompass "gag" or "cag"
  misc_feature (1378)..(1380): This region may encompass "acg" or "gag"
  misc_feature (1477)..(1479): This region may encompass "gcg" or "acc"
  misc_feature (1684)..(1686): This region may encompass "agt" or "aac"
  misc_feature (1726)..(1728): This region may encompass "cag" or "gag"
  misc_feature (1759)..(1761): This region may encompass "tca" or "gcc"
  misc_feature (1825)..(1827): This region may encompass "aac" or "gac"

SEQ ID NO: 1206 - protein, 737 aa, Artificial Sequence; identical to SEQ ID NO: 914
  Description of Artificial Sequence: Synthetic polypeptide
  MOD_RES (157)..(157): Thr or Ser
  MOD_RES (168)..(168): Lys or Arg
  MOD_RES (262)..(262): Asn or Ser
  MOD_RES (263)..(263): Ser or His
  MOD_RES (312)..(312): Arg or Lys
  MOD_RES (412)..(412): Glu or Gln
  MOD_RES (460)..(460): Arg or Gln
  MOD_RES (461)..(461): Thr or Glu
  MOD_RES (552)..(552): Asp or Ser
  MOD_RES (556)..(556): Leu or Tyr
  MOD_RES (557)..(557): Asp or Ser
  MOD_RES (563)..(563): Ser or Asn
  MOD_RES (580)..(580): Val or Ile
  MOD_RES (588)..(588): Asn or Ser
  MOD_RES (664)..(664): Ser or Thr

SEQ ID NO: 1207 - DNA, 2211 bp, Artificial Sequence; identical to SEQ ID NO: 915
  Description of Artificial Sequence: Synthetic polynucleotide
  misc_feature (469)..(471): This region may encompass "acg" or "agc"
  misc_feature (502)..(504): This region may encompass "aaa" or "aag"
  misc_feature (784)..(786): This region may encompass "aac" or "agt"
  misc_feature (787)..(789): This region may encompass "agc" or "cac"
  misc_feature (934)..(936): This region may encompass "aga" or "aag"
  misc_feature (1234)..(1236): This region may encompass "gag" or "cag"
  misc_feature (1378)..(1380): This region may encompass "cgg" or "cag"
  misc_feature (1381)..(1383): This region may encompass "acg" or "gag"
  misc_feature (1654)..(1656): This region may encompass "gac" or "agc"
  misc_feature (1666)..(1668): This region may encompass "ctt" or "tac"
  misc_feature (1669)..(1671): This region may encompass "gac" or "agc"
  misc_feature (1687)..(1689): This region may encompass "agt" or "aac"
  misc_feature (1738)..(1740): This region may encompass "gtg" or "atc"
  misc_feature (1762)..(1764): This region may encompass "gca" or "agc"
  misc_feature (1990)..(1992): This region may encompass "agt" or "acc"

SEQ ID NO: 1208 - protein, 738 aa, Artificial Sequence; identical to SEQ ID NO: 916
  Description of Artificial Sequence: Synthetic polypeptide
  MOD_RES (158)..(158): Thr or Ser
  MOD_RES (169)..(169): Lys or Arg
  MOD_RES (564)..(564): Ser or Asn

SEQ ID NO: 1209 - DNA, 2214 bp, Artificial Sequence; identical to SEQ ID NO: 917
  Description of Artificial Sequence: Synthetic polynucleotide
  misc_feature (472)..(474): This region may encompass "acg" or "agc"
  misc_feature (505)..(507): This region may encompass "aaa" or "aga"
  misc_feature (1690)..(1692): This region may encompass "agc" or "aac"

SEQ ID NO: 1210 - protein, 738 aa, Artificial Sequence; identical to SEQ ID NO: 918
  Description of Artificial Sequence: Synthetic polypeptide
  MOD_RES (158)..(158): Thr or Ser
  MOD_RES (169)..(169): Arg or Lys
  MOD_RES (315)..(315): Asn or Ser
  MOD_RES (413)..(413): Gln or Glu
  MOD_RES (472)..(472): Asn, Thr or Ser
  MOD_RES (534)..(534): Asp or Glu
  MOD_RES (542)..(542): Ile or Val
  MOD_RES (595)..(595): Ile or Val

SEQ ID NO: 1211 - DNA, 2214 bp, Artificial Sequence; identical to SEQ ID NO: 919
  Description of Artificial Sequence: Synthetic polynucleotide
  misc_feature (472)..(474): This region may encompass "acg" or "agc"
  misc_feature (505)..(507): This region may encompass "aga" or "aag"
  misc_feature (943)..(945): This region may encompass "aac" or "agc"
  misc_feature (1237)..(1239): This region may encompass "caa" or "gaa"
  misc_feature (1414)..(1416): This region may encompass "aac" or "acc" or "agc"
  misc_feature (1600)..(1602): This region may encompass "gac" or "gag"
  misc_feature (1624)..(1626): This region may encompass "atc" or "gtc"
  misc_feature (1783)..(1785): This region may encompass "ata" or "gta"

SEQ ID NO: 1212 - protein, 738 aa, Artificial Sequence; identical to SEQ ID NO: 920
  Description of Artificial Sequence: Synthetic polypeptide
  MOD_RES (169)..(169): Arg or Lys
  MOD_RES (315)..(315): Asn or Ser
  MOD_RES (534)..(534): Asp or Glu
  MOD_RES (542)..(542): Ile or Val

SEQ ID NO: 1213 - DNA, 2214 bp, Artificial Sequence; identical to SEQ ID NO: 921
  Description of Artificial Sequence: Synthetic polynucleotide
  misc_feature (505)..(507): This region may encompass "aga" or "aaa"
  misc_feature (943)..(945): This region may encompass "aac" or "agc"
  misc_feature (1600)..(1602): This region may encompass "gac" or "gag"
  misc_feature (1624)..(1626): This region may encompass "atc" or "gtc"

SEQ ID NO: 1214 - protein, 738 aa, Artificial Sequence; identical to SEQ ID NO: 922
  Description of Artificial Sequence: Synthetic polypeptide
  MOD_RES (471)..(471): Ser or Asn

SEQ ID NO: 1215 - DNA, 2214 bp, Artificial Sequence; identical to SEQ ID NO: 923
  Description of Artificial Sequence: Synthetic polynucleotide
  misc_feature (1411)..(1413): This region may encompass "agt" or "aat"

SEQ ID NO: 1216 - protein, 737 aa, Artificial Sequence; identical to SEQ ID NO: 924
  Description of Artificial Sequence: Synthetic polypeptide
  MOD_RES (148)..(148): Pro or Gln
  MOD_RES (169)..(169): Lys or Arg
  MOD_RES (314)..(314): Arg or Asn
  MOD_RES (466)..(466): Tyr or His
  MOD_RES (563)..(563): Asn or Ser
  MOD_RES (580)..(580): Val or Ile
  MOD_RES (588)..(588): Ala or Ser

SEQ ID NO: 1217 - DNA, 2211 bp, Artificial Sequence; identical to SEQ ID NO: 925
  Description of Artificial Sequence: Synthetic polynucleotide
  misc_feature (442)..(444): This region may encompass "ccg" or "cag"
  misc_feature (505)..(507): This region may encompass "aaa" or "aga"
  misc_feature (940)..(942): This region may encompass "cgg" or "aac"
  misc_feature (1396)..(1398): This region may encompass "tac" or "cac"
  misc_feature (1687)..(1689): This region may encompass "aat" or "agt"
  misc_feature (1738)..(1740): This region may encompass "gta" or "ata"
  misc_feature (1762)..(1764): This region may encompass "gct" or "tct"

SEQ ID NO: 1218 - protein, 735 aa, Artificial Sequence; identical to SEQ ID NO: 926
  Description of Artificial Sequence: Synthetic polypeptide
  MOD_RES (162)..(162): Ser or Thr
  MOD_RES (168)..(168): Lys or Arg
  MOD_RES (224)..(224): Ala or Ser
  MOD_RES (310)..(310): Arg or Lys
  MOD_RES (410)..(410): Thr or Gln
  MOD_RES (446)..(446): Ser or Asn
  MOD_RES (461)..(461): Gln or Leu
  MOD_RES (471)..(471): Ala or Ser
  MOD_RES (708)..(708): Ala or Thr

SEQ ID NO: 1219 - DNA, 2205 bp, Artificial Sequence; identical to SEQ ID NO: 927
  Description of Artificial Sequence: Synthetic polynucleotide
  misc_feature (484)..(486): This region may encompass "tca" or "aca"
  misc_feature (502)..(504): This region may encompass "aaa" or "aga"
  misc_feature (670)..(672): This region may encompass "gcc" or "tcc"
  misc_feature (928)..(930): This region may encompass "aga" or "aaa"
  misc_feature (1228)..(1230): This region may encompass "acc" or "cag"
  misc_feature (1336)..(1338): This region may encompass "agc" or "aac"
  misc_feature (1381)..(1383): This region may encompass "cag" or "ctg"
  misc_feature (1411)..(1413): This region may encompass "gct" or "tct"
  misc_feature (2122)..(2124): This region may encompass "gcc" or "acc"

SEQ ID NO: 1220 - protein, 735 aa, Artificial Sequence; identical to SEQ ID NO: 928
  Description of Artificial Sequence: Synthetic polypeptide
  MOD_RES (42)..(42): Gly or Ser
  MOD_RES (168)..(168): Arg or Lys
  MOD_RES (310)..(310): Lys or Arg
  MOD_RES (410)..(410): Thr or Gln
  MOD_RES (446)..(446): Ser or Arg
  MOD_RES (461)..(461): Gln or Leu
  MOD_RES (471)..(471): Ala or Ser
  MOD_RES (475)..(475): Lys or Arg
  MOD_RES (504)..(504): Gly or Ala
  MOD_RES (539)..(539): Val or Asn

SEQ ID NO: 1221 - DNA, 2205 bp, Artificial Sequence; identical to SEQ ID NO: 929
  Description of Artificial Sequence: Synthetic polynucleotide
  misc_feature (124)..(126): This region may encompass "ggt" or "agt"
  misc_feature (502)..(504): This region may encompass "aga" or "aaa"
  misc_feature (928)..(930): This region may encompass "aaa" or "aga"
  misc_feature (1228)..(1230): This region may encompass "aca" or "cag"
  misc_feature (1336)..(1338): This region may encompass "agc" or "aga"
  misc_feature (1381)..(1383): This region may encompass "caa" or "ctc"
  misc_feature (1411)..(1413): This region may encompass "gct" or "tct"
  misc_feature (1423)..(1425): This region may encompass "aaa" or "aga"
  misc_feature (1510)..(1512): This region may encompass "ggg" or "gcg"
  misc_feature (1615)..(1617): This region may encompass "gtt" or "gac"

SEQ ID NO: 1222 - protein, 736 aa, Artificial Sequence; identical to SEQ ID NO: 930
  Description of Artificial Sequence: Synthetic polypeptide

SEQ ID NO: 1223 - protein, 736 aa, Artificial Sequence; identical to SEQ ID NO: 931
  Description of Artificial Sequence: Synthetic polypeptide

SEQ ID NO: 1224 - protein, 736 aa, Artificial Sequence; identical to SEQ ID NO: 932
  Description of Artificial Sequence: Synthetic polypeptide

SEQ ID NO: 1225 - protein, 736 aa, Artificial Sequence; identical to SEQ ID NO: 933
  Description of Artificial Sequence: Synthetic polypeptide

SEQ ID NO: 1226 - protein, 736 aa, Artificial Sequence; identical to SEQ ID NO: 934
  Description of Artificial Sequence: Synthetic polypeptide

SEQ ID NO: 1227 - protein, 736 aa, Artificial Sequence; identical to SEQ ID NO: 935
  Description of Artificial Sequence: Synthetic polypeptide

SEQ ID NO: 1228 - protein, 736 aa, Artificial Sequence; identical to SEQ ID NO: 936
  Description of Artificial Sequence: Synthetic polypeptide

SEQ ID NO: 1229 - protein, 736 aa, Artificial Sequence; identical to SEQ ID NO: 937
  Description of Artificial Sequence: Synthetic polypeptide

SEQ ID NO: 1230 - DNA, 2211 bp, Artificial Sequence; identical to SEQ ID NO: 938
  Description of Artificial Sequence: Synthetic polynucleotide

SEQ ID NO: 1231 - protein, 738 aa, Artificial Sequence; identical to SEQ ID NO: 18
  Description of Artificial Sequence: Synthetic polypeptide

SEQ ID NO: 1232 - protein, 738 aa, Artificial Sequence; identical to SEQ ID NO: 18
  Description of Artificial Sequence: Synthetic polypeptide

SEQ ID NO: 1233 - protein, 738 aa, Artificial Sequence
  Description of Artificial Sequence: Synthetic polypeptide
  MOD_RES (157)..(157): Ser or Thr
  MOD_RES (169)..(169): Lys or Arg
  MOD_RES (457)..(457): Ala or Gly
  MOD_RES (463)..(463): Gln or Ala
  MOD_RES (508)..(508): Thr or Ala
  MOD_RES (510)..(510): Tyr or Phe
  MOD_RES (511)..(511): His or Lys
  MOD_RES (558)..(558): Gln or Asn
  MOD_RES (585)..(585): Asn or His
  MOD_RES (587)..(587): Ser or Ala
MAADGYLPDWLEDNLSEGIREWWDLKPGAPKPKANQQKQDDGRGLVLPGYKYLGPFNGLDKGEPVNAADAAALEHDKAYDQQLKAGDNPYLRYNHADAEFQERLQEDTSFGGNLGRAVFQAKKRVLEPLGLVEEGAKTAPGKKRPVEQSPQEPDSSXLGIGKTGQQPAXKRLNFGQTGDSESVPDPQPLGEPPAAPSGVGSNTMASGGGAPMADNNEGADGVGNSSGNWHCDSTWLGDRVITTSTRTWALPTYNNHLYKQISNGTSGGSTNDNTYFGYSTPWGYFDFNRFHCHFSPRDWQRLINNNWGFRPKRLNFKLFNIQVKEVTTNEGTKTIANNLTSTVQVFTDSEYQLPYVLGSAHQGCLPPFPADVFMIPQYGYLTLNNGSQAVGRSSFYCLEYFPSQMLRTGNNFQFSYTFEDVPFHSSYAHSQSLDRLMNPLIDQYLYYLSRTQTTGTXGTQTLXFSQAGPSSMANQARNWVPGPCYRQQRVSTTTNQNNNSNFAWTGAXKXXLNGRDSLMNPGVAMASHKDDEDRFFPSSGVLIFGKQGAGNDNVDYSXVMITNEEEIKTTNPVATEEYGAVATNXQXLANTQAQTGLVHNQGVLPGMVWQNRDVYLQGPIWAKIPHTDGNFHPSPLMGGFGLKHPPPQILIKNTPVPADPPTTFNQAKLNSFITQYSTGQVSVEIEWELQKENSKRWNPEIQYTSNYYKSTNVDFAVNTEGVYSEPRPIGTRYLTRNL

SEQ ID NO: 1234 - DNA, 2211 bp, Artificial Sequence
  Description of Artificial Sequence: Synthetic polynucleotide
  misc_feature (469)..(471): This region may encompass "tcg" or "acg"
  misc_feature (502)..(504): This region may encompass "aaa" or "aga"
  misc_feature (1366)..(1368): This region may encompass "gca" or "gga"
  misc_feature (1384)..(1386): This region may encompass "caa" or "gca"
  misc_feature (1519)..(1521): This region may encompass "acc" or "gcc"
  misc_feature (1525)..(1527): This region may encompass "tat" or "ttt"
  misc_feature (1528)..(1530): This region may encompass "cac" or "aaa"
  misc_feature (1669)..(1671): This region may encompass "caa" or "aac"
  misc_feature (1750)..(1752): This region may encompass "aac" or "cac"
  misc_feature (1756)..(1758): This region may encompass "tcc" or "gcc"
atggctgccgatggttatcttccagattggctcgaggacaacctctctgagggcattcgcgagtggtgggacttgaaacctggagccccgaaacccaaagccaaccagcaaaagcaggacgacggccggggtctggtgcttcctggctacaagtacctcggacccttcaacggactcgacaagggggagcccgtcaacgcggcggacgcagcggccctcgagcacgacaaagcctacgaccagcagctcaaagcgggtgacaatccgtacctgcggtataatcacgccgacgccgagtttcaggagcgtctgcaagaagatacgtcttttgggggcaacctcgggcgagcagtcttccaggccaagaagcgggttctcgaacctctcggtctggttgaggaaggcgctaagacggctcctggaaagaagaggccggtagagcagtcgccacaagagccagactcctccnnnggcatcggcaagacaggccagcagcccgctnnnaagagactcaattttggtcagactggcgactcagagtcagtccccgacccacaacctctcggagaacctccagcagccccctcaggtgtgggatctaatacaatggcttcaggcggtggcgctccaatggcagacaataacgaaggcgccgacggagtgggtaattcctcgggaaattggcattgcgattccacatggctgggggacagagtcatcaccaccagcacccgaacctgggccctgcccacctacaacaaccacctctacaagcaaatctccaacggcacctcgggaggaagcaccaacgacaacacctattttggctacagcaccccctgggggtattttgacttcaacagattccactgtcacttttcaccacgtgactggcaacgactcatcaacaacaattggggattccggcccaaaagactcaacttcaagctgttcaacatccaggtcaaggaagtcacgacgaacgaaggcaccaagaccatcgccaataatctcaccagcaccgtgcaggtctttacggactcggagtaccagttaccgtacgtgctaggatccgctcaccagggatgtctgcctccgttcccggcggacgtcttcatgattcctcagtacggctatttaactttaaacaatggaagccaagccgtgggacgttcctccttctactgtctggagtatttcccatcgcagatgctgagaaccggcaacaactttcagttcagctacaccttcgaggacgtgcctttccacagcagctacgcgcacagccagagcctggacaggctgatgaatcccctcatcgaccagtacctgtactacctgtccagaacgcaaacgactggaactnnngggacgcagactctgnnnttcagccaagcgggtcctagctcaatggccaaccaggctagaaattgggtgcccggaccttgctaccggcagcagcgcgtctccacgacaaccaaccagaacaacaacagcaactttgcctggacgggagctnnnaagnnnnnnctgaacggccgagactctctaatgaatccgggcgtggcaatggcttcccacaaggatgacgaggaccgcttcttcccttcgagcggggtcctgatttttggcaagcaaggagccgggaacgataatgtggattacagcnnngtgatgattacaaatgaggaagaaatcaagactaccaaccccgtggccacagaagaatatggagcagtggccaccaacnnncagnnngccaatacgcaggcgcagaccggactcgtgcacaaccagggggtgcttcccggcatggtgtggcagaatagagacgtgtacctgcagggtcccatctgggccaaaattcctcacacggacggcaactttcacccgtctcccctgatgggcggctttggactgaagcacccgcctcctcaaattctcatcaagaacacaccggttccagcggacccgccgactaccttcaaccaggccaagctgaactctttcatcacgcagtacagcaccggacaggtcagcgtggaaatcgagtgggagctgcagaaagaaaacagcaaacgctggaatccagagattcaatacacttccaactactacaaatctacaaatgtggactttgctgtcaacacggagggggtttatagcgagcctcgccccattggcacccgttacctcacccgcaacctgtaa

SEQ ID NO: 1235 - protein, 733 aa, Artificial Sequence; identical to SEQ ID NO: 434
  Description of Artificial Sequence: Synthetic polypeptide

SEQ ID NO: 1236 - DNA, 4472 bp, Artificial Sequence
  Description of Artificial Sequence: Synthetic polynucleotide
ctccatcactaggggtaaccgcgaagcgcctcccacgctgccgcgtcagcgctgacgtaaattacgtcataggggagtggtcctgtattagctgtcacgtgagtgcttttgcgacattttgcgacaccacgtggccattcatggtatatatggccgagtgagcgagcaggatctccattttgaccgcgaaatttgaacgagcagcagccatgccgggcttctacgagatcgtgcttaaggtgccgagcgacctggacgagcacctgccgggcatttctgactcgtttgtgaactgggtggcagagaaggaatgggagctgcccccggattctgacatggatcggaatctgattgagcaggcacccctgaccgtggccgagaagctacagcgcgacttcctggtccaatggcgccgcgtgagtaaggccccggaggccctcttctttgttcagttcgagaagggcgagtcctacttccacctccatattctggtagagaccacgggggtcaaatccatggtgctgggccgcttcctgagtcagattcgggacaagctggtgcagaccatctaccgcgggatcgagccgaccctgcccaactggttcgcggtgacaaagacgcgtaatggcgccggaggggggaacaaggtggtggacgagtgctacatccccaactacctgctgcccaagactcagcccgagctgcagtgggcgtggactaacatggaggagtatataagcgcgtgcttgaacctggccgagcgcaaacggctcgtggcgcagcacctgacccacgtcagccagacccaggagcagaacaaggagaatctgaacccgaattctgacgcgcctgtcatccggtcaaaaacctccgcgcgctacatggagctggtcgggtggctggtggaccggggcatcacctccgagaagcagtggatccaggaggaccaggcctcgtacatctccttcaacgccgcctccaactcgcggtctcagatcaaggccgcgctggacaatgccggcaagatcatggcgctgaccaaatccgcgcccgactacctggtaggccccgctctgcccgcggacattaaatccaaccgcatctaccgcatcctggagctgaatggctacgaccctgcctacgccggttccgtctttctcggctgggcccagaaaaagtttggcaaaaggaacaccatctggctgtttgggccggccaccacgggcaagaccaacatcgcggaagccatcgcccacgccgtgcccttctacggctgcgtcaactggaccaatgagaactttcccttcaacgattgcgtcgacaagatggtgatctggtgggaggagggcaagatgacggccaaggtcgtggagtccgccaaggccattctcggcggcagcaaggtgcgcgtggaccaaaagtgcaagtcgtccgcccagatcgatcccacccccgtgatcgtcacctccaacaccaacatgtgcgccgtgattgacgggaacagcaccaccttcgagcaccagcagccgttgcaggaccggatgttcaaatttgaacttacccgccgtctggagcacgactttggcaaggtgacaaagcaggaagtcaaagagttcttccgctgggcgcaggatcacgtgaccgaggtggcgcatgagttctacgtcagaaagggtggagctaacaaaagacccgcccccgatgacgcggatataagcgagcccaagcgggcctgcccctcagtcgcggatccatcgacgtcagacgcggaaggagctccggtggactttgccgacaggtaccaaaacaaatgttctcgtcacgcgggcatgcttcagatgctgtttccctgcaaaacatgcgagagaatgaatcagaatttcaacatttgcttcacgcacgggaccagagactgttcagaatgtttccctggcgtgtcagaatctcaaccggtcgtcagaaaaaagacgtatcggaaactctgtgcgattcatcatctgctggggcgggcacccgagattgcttgctcggcctgcgacctggtcaacgtggacctggatgactgtgtttctgagcaataaatgacttaaaccaggtatggctgccgatggttatcttccagattggctcgaggacaacctctctgagggcattcgcgagtggtgggacctgaaacctggagccccgaaacccaaagccaaccagcaaaagcaggacaacggccggggtctggtgcttcctggctacaagtacctcggacccttcaacggactcgacaagggggagcccgtcaacgcggcggacgcagcggccctcgagcacgacaaggcctacgaccagcagctccaagcgggtgacaatccgtacctgcggtataatcacgccgacgccgagtttcaggagcgtctgcaagaagatacgtcttttgggggcaacctcgggcgcgcagtcttccaggccaaaaagcgggttctcgaacctctgggcctggttgaatcgccggttaagacggctcctggaaagaagagaccggtagagccatcaccccagcgctctccagactcctctacgggcatcggcaagaaaggccagcagcccgcaaaaaagagactcaattttgggcagactggcgactcagagtcagtccccgaccctcaaccaatcggagaaccaccagcaggcccctctggtctgggatctggtacaatggctgcaggcggtggcgctccaatggcagacaataacgaaggcgccgacggagtgggtagttcctcaggaaattggcattgcgattccacatggctgggcgacagagtcatcaccaccagcacccgcacctgggccctgcccacctacaacaaccacctctacaagcaaatctccaacgggacctcgggaggaagcaccaacgacaacacctacttcggctacagcaccccctgggggtattttgacttcaacagattccactgccacttttcaccacgtgactggcagcgactcatcaacaacaactggggattccggcccaagaggctcaacttcaagctcttcaacatccaagtcaaggaggtcacgcagaatgaaggcaccaagaccatcgccaataaccttaccagcacgattcaggtctttacggactcggaataccagctcccgtacgtgctcggctcggcgcaccagggctgcctgcctccgttcccggcggacgtcttcatgattcctcagtacgggtacctgactctgaacaatggcagtcaggctgtgggccggtcgtccttctactgcctggagtactttccttctcaaatgctgagaacgggcaacaactttgaattcagctacaacttcgaggacgtgcccttccacagcagctacgcgcacagccagagcctggaccggctgatgaaccctctcatcgaccagtacttgtactacctgtcccggactcaaagcacgggcggtactgcaggaactcagcagttgctattttctcaggccgggcctaacaacatgtcggctcaggccaagaactggctacccggtccctgctaccggcagcaacgcgtctccacgacactgtcgcagaacaacaacagcaactttgcctggacgggtgccaccaagtatcatctgaatggcagagactctctggtgaatcctggcgttgccatggctacccacaaggacgacgaagagcgattttttccatccagcggagtcttaatgtttgggaaacagggagctggaaaagacaacgtggactatagcagcgtgatgctaaccagcgaggaagaaataaagaccaccaacccagtggccacagaacagtacggcgtggtggccgataacctgcaacagcaaaacgccgctcctattgtaggggccgtcaatagtcaaggagccttacctggcatggtgtggcagaaccgggacgtgtacctgcagggtcccatctgggccaagattcctcatacggacggcaactttcatccctcgccgctgatgggaggctttggactgaagcatccgcctcctcagatcctgattaaaaacacacctgttcccgcggatcctccgaccaccttcactaaggccaagctggcttctttcatcacgcagtacagtaccggccaggtcagcgtggagatcgagtgggagctgcagaaggagaacagcaaacgctggaacccagagattcagtacacttccaactactacaaatctacaaatgtggactttgctgtcaatactgagggtacttattccgagcctcgccccattggcacccgttacctcacccgtaatctgtaattacatgttaatcaataaaccggttaattcgtttcagttgaactttggtctcctgtccttcttatcttatcggttaccatagaaactggttacttattaactgcttggtgcgcttcgcgataaaagacttacgtcatcgggttacccctagtgatgga

SEQ ID NO: 1237 - DNA, 2208 bp, Artificial Sequence
  Description of Artificial Sequence: Synthetic polynucleotide
atggctgccgatggttatcttccagattggctcgaggacactctctctgaaggaataagacagtggtggaagctcaaacctggcccaccaccaccaaagcccgcagagcggcataaggacgacagcaggggtcttgtgcttcctgggtacaagtacctcggacccttcaacggactcgacaagggagagccggtcaacgaggcagacgccgcggccctcgagcacgacaaagcctacgaccggcagctcgacagcggagacaacccgtacctcaagtacaaccacgccgacgcggagtttcaggagcgccttaaagaagatacgtcttttgggggcaacctcggacgagcagtcttccaggcgaaaaagagggttcttgaacctctgggcctggttgaggaacctgttaagaaggctccgggaaaaaagaggccggtagagcactctcctgtggagccagactcctcctcgggaaccggaaaggcgggccagcagcctgcaagaaaaagattgaattttggtcagactggagacgcagactcagtacctgacccccagcctctcggacagccaccagcagccccctctggtctgggaactaataccatggctacaggcagtggcgcaccaatggcagacaataacgagggtgccgacggagtgggtaattcctcgggaaattggcattgcgattccacatggatgggcgacagagtcatcaccaccagcacccgaacctgggccctgcccacctacaacaaccacctctacaaacaaatttccagccaatcaggagcctcgaacgacaatcactactttggctacagcaccccttgggggtattttgacttcaacagattccactgccacttttcaccacgtgactggcaaagactcatcaacaacaactggggattccgacccaagagactcaacttcaagctctttaacattcaagtcaaagaggtcacgcagaatgacggtacgacgacgattgccaataaccttaccagcacggttcaggtgtttactgactcggagtaccagctcccgtacgtcctcggctcggcgcatcaaggatgcctcccgccgttcccagcagacgtcttcatggtgccacagtatggatacctcaccctgaacaacgggagtcaggcagtaggacgctcttcattttactgcctggagtactttccttctcagatgctgcgtaccggaaacaactttaccttcagctacacttttgaggacgttcctttccacagcagctacgctcacagccagagtctggaccgtctcatgaatcctctcatcgaccagtacctgtattacttgagcagaacaaacactccaagtggaaccaccacgcagtcaaggcttcagttttctcaggccggagcgagtgacattcgggaccagtctaggaactggcttcctggaccctgttaccgccagcagcgagtatcaaagacatctgcggataacaacaacagtgaatactcgtggactggagctaccaagtaccacctcaatggcagagactctctggtgaatccgggcccggctatggcaagccacaaggacgatgaagaaaagttttttcctcagagcggggttctcatctttgggaagcaaggctcagagaaaacaaatgtggacattgaaaaggtcatgattacagacgaagaggaaatcaggacaaccaatcccgtggctacggagcagtatggttctgtatctaccaacctccagagaggcaacagacaagcagctaccgcagatgtcaacacacaaggcgttcttccaggcatggtctggcaggacagagatgtgtaccttcaggggcccatctgggcaaagattccacacacggacggacattttcacccctctcccctcatgggtggattcggacttaaacaccctcctccacagattctcatcaagaacaccccggtgcctgcgaatccttcgaccaccttcagtgcggcaaagtttgcttccttcatcacacagtactccacgggacaggtcagcgtggagatcgagtgggagctgcagaaggaaaacagcaaacgctggaatcccgaaattcagtacacttccaactacaacaagtctgttaatgtggactttactgtggacactaatggcgtgtattcagagcctcgccccattggcaccagatacctgactcgtaatctgtaa

SEQ ID NO: 1238 - protein, 735 aa, Artificial Sequence
  Description of Artificial Sequence: Synthetic polypeptide
MAADGYLPDWLEDTLSEGIRQWWKLKPGPPPPKPAERHKDDSRGLVLPGYKYLGPFNGLDKGEPVNEADAAALEHDKAYDRQLDSGDNPYLKYNHADAEFQERLKEDTSFGGNLGRAVFQAKKRVLEPLGLVEEPVKKAPGKKRPVEHSPVEPDSSSGTGKAGQQPARKRLNFGQTGDADSVPDPQPLGQPPAAPSGLGTNTMATGSGAPMADNNEGADGVGNSSGNWHCDSTWMGDRVITTSTRTWALPTYNNHLYKQISSQSGASNDNHYFGYSTPWGYFDFNRFHCHFSPRDWQRLINNNWGFRPKRLNFKLFNIQVKEVTQNDGTTTIANNLTSTVQVFTDSEYQLPYVLGSAHQGCLPPFPADVFMVPQYGYLTLNNGSQAVGRSSFYCLEYFPSQMLRTGNNFTFSYTFEDVPFHSSYAHSQSLDRLMNPLIDQYLYYLSRTNTPSGTTTQSRLQFSQAGASDIRDQSRNWLPGPCYRQQRVSKTSADNNNSEYSWTGATKYHLNGRDSLVNPGPAMASHKDDEEKFFPQSGVLIFGKQGSEKTNVDIEKVMITDEEEIRTTNPVATEQYGSVSTNLQRGNRQAATADVNTQGVLPGMVWQDRDVYLQGPIWAKIPHTDGHFHPSPLMGGFGLKHPPPQILIKNTPVPANPSTTFSAAKFASFITQYSTGQVSVEIEWELQKENSKRWNPEIQYTSNYNKSVNVDFTVDTNGVYSEPRPIGTRYLTRNL

SEQ ID NO: 1239 - DNA, 8376 bp, Artificial Sequence
  Description of Artificial Sequence: Synthetic polynucleotide
aattcccatcatcaataatataccttattttggattgaagccaatatgataatgagggggtggagtttgtgacgtggcgcggggcgtgggaacggggcgggtgacgtagtagtctctagagtcctgtattagaggtcacgtgagtgttttgcgacattttgcgacaccatgtggtcacgctgggtatttaagcccgagtgagcacgcagggtctccattttgaagcgggaggtttgaacgcgcagccaccacgccggggttttacgagattgtgattaaggtccccagcgaccttgacgggcatctgcccggcatttctgacagctttgtgaactgggtggccgagaaggaatgggagttgccgccagattctgacatggatctgaatctgattgagcaggcacccctgaccgtggccgagaagctgcagcgcgactttctgacggaatggcgccgtgtgagtaaggccccggaggcccttttctttgtgcaatttgagaagggagagagctacttccacatgcacgtgctcgtggaaaccaccggggtgaaatccatggttttgggacgtttcctgagtcagattcgcgaaaaactgattcagagaatttaccgcgggatcgagccgactttgccaaactggttcgcggtcacaaagaccagaaatggcgccggaggcgggaacaaggtggtggatgagtgctacatccccaattacttgctccccaaaacccagcctgagctccagtgggcgtggactaatatggaacagtatttaagcgcctgtttgaatctcacggagcgtaaacggttggtggcgcagcatctgacgcacgtgtcgcagacgcaggagcagaacaaagagaatcagaatcccaattctgatgcgccggtgatcagatcaaaaacttcagccaggtacatggagctggtcgggtggctcgtggacaaggggattacctcggagaagcagtggatccaggaggaccaggcctcatacatctccttcaatgcggcctccaactcgcggtcccaaatcaaggctgccttggacaatgcgggaaagattatgagcctgactaaaaccgcccccgactacctggtgggccagcagcccgtggaggacatttccagcaatcggatttataaaattttggaactaaacgggtacgatccccaatatgcggcttccgtctttctgggatgggccacgaaaaagttcggcaagaggaacaccatctggctgtttgggcctgcaactaccgggaagaccaacatcgcggaggccatagcccacactgtgcccttctacgggtgcgtaaactggaccaatgagaactttcccttcaacgactgtgtcgacaagatggtgatctggtgggaggaggggaagatgaccgccaaggtcgtggagtcggccaaagccattctcggaggaagcaaggtgcgcgtggaccagaaatgcaagtcctcggcccagatagacccgactcccgtgatcgtcacctccaacaccaacatgtgcgccgtgattgacgggaactcaacgaccttcgaacaccagcagccgttgcaagaccggatgttcaaatttgaactcacccgccgtctggatcatgactttgggaaggtcaccaagcaggaagtcaaagactttttccggtgggcaaaggatcacgtggttgaggtggagcatgaattctacgtcaaaaagggtggagccaagaaaagacccgcccccagtgacgcagatataagtgagcccaaacgggtgcgcgagtcagttgcgcagccatcgacgtcagacgcggaagcttcgatcaactacgcagacaggtaccaaaacaaatgttctcgtcacgtgggcatgaatctgatgctgtttccctgcagacaatgcgagagaatgaatcagaattcaaatatctgcttcactcacggacagaaagactgtttagagtgctttcccgtgtcagaatctcaacccgtttctgtcgtcaaaaaggcgtatcagaaactgtgctacattcatcatatcatgggaaaggtgccagacgcttgcactgcctgcgatctggtcaatgtggatttggatgactgcatctttgaacaataaatgatttaaatcaggtatggctgccgatggttatcttccagattggctcgaggacactctctctgaaggaataagacagtggtggaagctcaaacctggcccaccaccaccaaagcccgcagagcggcataaggacgacagcaggggtcttgtgcttcctgggtacaagtacctcggacccttcaacggactcgacaagggagagccggtcaacgaggcagacgccgcggccctcgagcacgacaaagcctacgaccggcagctcgacagcggagacaacccgtacctcaagtacaaccacgccgacgcggagtttcaggagcgccttaaagaagatacgtcttttgggggcaacctcggacgagcagtcttccaggcgaaaaagagggttcttgaacctctgggcctggttgaggaacctgttaagacggctccgggaaaaaagaggccggtagagcactctcctgtggagccagactcctcctcgggaaccggaaaggcgggccagcagcctgcaagaaaaagattgaattttggtcagactggagacgcagactcagtacctgacccccagcctctcggacagccaccagcagccccctctggtctgggaactaatacgatggctacaggcagtggcgcaccaatggcagacaataacgagggcgccgacggagtgggtaattcctcgggaaattggcattgcgattccacatggatgggcgacagagtcatcaccaccagcacccgaacctgggccctgcccacctacaacaaccacctctacaaacaaatttccagccaatcaggagcctcgaacgacaatcactactttggctacagcaccccttgggggtattttgacttcaacagattccactgccacttttcaccacgtgactggcaaagactcatcaacaacaactggggattccgacccaagagactcaacttcaagctctttaacattcaagtcaaagaggtcacgcagaatgacggtacgacgacgattgccaataaccttaccagcacggttcaggtgtttactgactcggagtaccagctcccgtacgtcctcggctcggcgcatcaaggatgcctcccgccgttcccagcagacgtcttcatggtgccacagtatggatacctcaccctgaacaacgggagtcaggcagtaggacgctcttcattttactgcctggagtactttccttctcagatgctgcgtaccggaaacaactttaccttcagctacacttttgaggacgttcctttccacagcagctacgctcacagccagagtctggaccgtctcatgaatcctctcatcgaccagtacctgtattacttgagcagaacaaacactccaagtggaaccaccacgcagtcaaggcttcagttttctcaggccggagcgagtgacattcgggaccagtctaggaactggcttcctggaccctgttaccgccagcagcgagtatcaaagacatctgcggataacaacaacagtgaatactcgtggactggagctaccaagtaccacctcaatggcagagactctctggtgaatccgggcccggccatggcaagccacaaggacgatgaagaaaagttttttcctcagagcggggttctcatctttgggaagcaaggctcagagaaaacaaatgtggacattgaaaaggtcatgattacagacgaagaggaaatcaggacaaccaatcccgtggctacggagcagtatggttctgtatctaccaacctccagagaggcaacagacaagcagctaccgcagatgtcaacacacaaggcgttcttccaggcatggtctggcaggacagagatgtgtaccttcaggggcccatctgggcaaagattccacacacggacggacattttcacccctctcccctcatgggtggattcggacttaaacaccctcctccacagattctcatcaagaacaccccggtacctgcgaatccttcgaccaccttcagtgcggcaaagtttgcttccttcatcacacagtactccacgggacaggtcagcgtggagatcgagtgggagctgcagaaggaaaacagcaaacgctggaatcccgaaattcagtacacttccaactacaacaagtctgttaatgtggactttactgtggacactaatggcgtgtattcagagcctcgccccattggcaccagatacctgactcgtaatctgtaattgcttgttaatcaataaaccgtttaattcgtttcagttgaactttggtctctgcgtatttctttcttatctagtttccatgctctagagtcctgtattagaggtcacgtgagtgttttgcgacattttgcgacaccatgtggtcacgctgggtatttaagcccgagtgagcacgcagggtctccattttgaagcgggaggtttgaacgcgcagccaccacggcggggttttacgagattgtgattaaggtccccagcgaccttgacgggcatctgcccggcatttctgacagctttgtgaactgggtggccgagaaggaatgggagttgccgccagattctgacatggatctgaatctgattgagcaggcacccctgaccgtggccgagaagctgcatcgctggcgtaatagcgaagaggcccgcaccgatcgcccttcccaacagttgcgcagcctgaatggcgaatggaattccagacgattgagcgtcaaaatgtaggtatttccatgagcgtttttcctgttgcaatggctggcggtaatattgttctggatattaccagcaaggccgatagtttgagttcttctactcaggcaagtgatgttattactaatcaaagaagtattgcgacaacggttaatttgcgtgatggacagactcttttactcggtggcctcactgattataaaaacacttctcaggattctggcgtaccgttcctgtctaaaatccctttaatcggcctcctgtttagctcccgctctgattctaacgaggaaagcacgttatacgtgctcgtcaaagcaaccatagtacgcgccctgtagcggcgcattaagcgcggcgggtgtggtggttacgcgcagcgtgaccgctacacttgccagcgccctagcgcccgctcctttcgctttcttcccttcctttctcgccacgttcgccggctttccccgtcaagctctaaatcgggggctccctttagggttccgatttagtgctttacggcacctcgaccccaaaaaacttgattagggtgatggttcacgtagtgggccatcgccctgatagacggtttttcgccctttgacgttggagtccacgttctttaatagtggactcttgttccaaactggaacaacactcaaccctatctcggtctattcttttgatttataagggattttgccgatttcggcctattggttaaaaaatgagctgatttaacaaaaatttaacgcgaattttaacaaaatattaacgtttacaatttaaatatttgcttatacaatcttcctgtttttggggcttttctgattatcaaccggggtacatatgattgacatgctagttttacgattaccgttcatcgattctcttgtttgctccagactctcaggcaatgacctgatagcctttgtagagacctctcaaaaatagctaccctctccggcatgaatttatcagctagaacggttgaatatcatattgatggtgatttgactgtctccggcctttctcacccgtttgaatctttacctacacattactcaggcattgcatttaaaatatatgagggttctaaaaatttttatccttgcgttgaaataaaggcttctcccgcaaaagtattacagggtcataatgtttttggtacaaccgatttagctttatgctctgaggctttattgcttaattttgctaattctttgccttgcctgtatgatttattggatgttggaattcctgatgcggtattttctccttacgcatctgtgcggtatttcacaccgcatatggtgcactctcagtacaatctgctctgatgccgcatagttaagccagccccgacacccgccaacacccgctgacgcgccctgacgggcttgtctgctcccggcatccgcttacagacaagctgtgaccgtctccgggagctgcatgtgtcagaggttttcaccgtcatcaccgaaacgcgcgagacgaaagggcctcgtgatacgcctatttttataggttaatgtcatgataataatggtttcttagacgtcaggtggcacttttcggggaaatgtgcgcggaacccctatttgtttatttttctaaatacattcaaatatgtatccgctcatgagacaataaccctgataaatgcttcaataatattgaaaaaggaagagtatgagtattcaacatttccgtgtcgcccttattcccttttttgcggcattttgccttcctgtttttgctcacccagaaacgctggtgaaagtaaaagatgctgaagatcagttgggtgcacgagtgggttacatcgaactggatctcaacagcggtaagatccttgagagttttcgccccgaagaacgttttccaatgatgagcacttttaaagttctgctatgtggcgcggtattatcccgtattgacgccgggcaagagcaactcggtcgccgcatacactattctcagaatgacttggttgagtactcaccagtcacagaaaagcatcttacggatggcatgacagtaagagaattatgcagtgctgccataaccatgagtgataacactgcggccaacttacttctgacaacgatcggaggaccgaaggagctaaccgcttttttgcacaacatgggggatcatgtaactcgccttgatcgttgggaaccggagctgaatgaagccataccaaacgacgagcgtgacaccacgatgcctgtagcaatggcaacaacgttgcgcaaactattaactggcgaactacttactctagcttcccggcaacaattaatagactggatggaggcggataaagttgcaggaccacttctgcgctcggcccttccggctggctggtttattgctgataaatctggagccggtgagcgtgggtctcgcggtatcattgcagcactggggccagatggtaagccctcccgtatcgtagttatctacacgacggggagtcaggcaactatggatgaacgaaatagacagatcgctgagataggtgcctcactgattaagcattggtaactgtcagaccaagtttactcatatatactttagattgatttaaaacttcatttttaatttaaaaggatctaggtgaagatcctttttgataatctcatgaccaaaatcccttaacgtgagttttcgttccactgagcgtcagaccccgtagaaaagatcaaaggatcttcttgagatcctttttttctgcgcgtaatctgctgcttgcaaacaaaaaaaccaccgctaccagcggtggtttgtttgccggatcaagagctaccaactctttttccgaaggtaactggcttcagcagagcgcagataccaaatactgtccttctagtgtagccgtagttaggccaccacttcaagaactctgtagcaccgcctacatacctcgctctgctaatcctgttaccagtggctgctgccagtggcgataagtcgtgtcttaccgggttggactcaagacgatagttaccggataaggcgcagcggtcgggctgaacggggggttcgtgcacacagcccagcttggagcgaacgacctacaccgaactgagatacctacagcgtgagctatgagaaagcgccacgcttcccgaagggagaaaggcggacaggtatccggtaagcggcagggtcggaacaggagagcgcacgagggagcttccagggggaaacgcctggtatctttatagtcctgtcgggtttcgccacctctgacttgagcgtcgatttttgtgatgctcgtcaggggggcggagcctatggaaaaacgccagcaacgcggcctttttacggttcctggccttttgctggccttttgctcacatgttctttcctgcgttatcccctgattctgtggataaccgtattaccgcctttgagtgagctgataccgctcgccgcagccgaacgaccgagcgcagcgagtcagtgagcgaggaagcggaagagcgcccaatacgcaaaccgcctctccccgcgcgttggccgattcattaatgca

SEQ ID NO: 1240 - DNA, 1085 bp, Artificial Sequence
  Description of Artificial Sequence: Synthetic polynucleotide
  modified_base (611)..(611): a, c, g, or t
  modified_base (640)..(640): a, c, g, or t
  modified_base (1039)..(1039): a, c, g, or t
tgcccacttacaacaaccatctctacaagcaaatctccagcvvmdcaggagctascaacgacaaccactactttggctacagcaccccttgggggtattttgactttaacagattccactgccacttctcaccacgtgactggcagcgactcattaacaacaactggggattccggcccaagaaactcagcttcaagctcttcaacatccaagttagaggggtcacgcagaacgatggcacgacgactattgccaataaccttaccagcacggttcaagtgtttacggactcggagtatcagctcccgtacgtgctcgggtcggcgcaccaaggctgtctcccgccgtttccagcggacgtcttcatggtccctcagtatggatacctcaccctgaacaacggaagtcaagcggtgggacgctcatccttttactgcctggagtacttcccttcgcagatgctaaggactggaaataacttccaattcagctataccttcgaggatgtaccttttcacagcagctacgctcacagccagagtttggatcgcttgatgaatcctcttattgatcagtatctgtactacctgaacagaacgcaargcamcvcnrgcggaacarccrvcmhsmrsvvsctgvngtttagccaggctgggcctcagtctatgtctttgcaggccagaaattggctacctgggccctgctaccggcaacagagactttcaamarycbmcrvcsrsaacaacaacagtrastttccttggmcagcggccagcamatatcatctcaatggccgcgactcgctggtgaatccaggaccagctatggccagtcacrrggacgatrmsgrsaratttttccctatgcacggcaatctaatatttggcaaasaarrcrscrvsrvarvcratrycgmsdwcgrsvrsgtaatgattacggatgaagaagagattcgtaccaccaatcctgtggcaacagagcagtatggaactgtggcaaataacttgcagrvsvvsmrsrvcvvscccacgdhtvvsrnsgtcvmscatcagggggccttacctggcatggtgtggcaagatcgt

SEQ ID NO: 1241 - protein, 620 aa, Artificial Sequence
  Description of Artificial Sequence: Synthetic polypeptide
  MOD_RES (263)..(264): Any naturally occurring amino acid
  MOD_RES (267)..(267): Any naturally occurring amino acid
  MOD_RES (450)..(453): Any naturally occurring amino acid
  MOD_RES (456)..(460): Any naturally occurring amino acid
  MOD_RES (462)..(462): Any naturally occurring amino acid
  MOD_RES (491)..(495): Any naturally occurring amino acid
  MOD_RES (500)..(500): Any naturally occurring amino acid
  MOD_RES (504)..(504): Any naturally occurring amino acid
  MOD_RES (508)..(508): Any naturally occurring amino acid
  MOD_RES (528)..(528): Any naturally occurring amino acid
  MOD_RES (531)..(533): Any naturally occurring amino acid
  MOD_RES (546)..(557): Any naturally occurring amino acid
  MOD_RES (586)..(590): Any naturally occurring amino acid
  MOD_RES (593)..(595): Any naturally occurring amino acid
  MOD_RES (597)..(597): Any naturally occurring amino acid
MAADGYLPDWLEDNLSEGIREWWALKPGVPQPKANQQHQDNRRGLVLPGYKYLGPGNGLDKGEPVNEADAAALEHDKAYDQQLKAGDNPYLKYNHADAEFQERLQEDTSFGGNLGRAVFQAKKRILEPLGLVEEAAKTAPGKKGAVDQSPQEPDSSSGVGKSGKQPARKRLNFGQTGDSESVPDPQPLGEPPAAPTSLGSNTMASGGGAPMADNNEGADGVGNSSGNWHCDSQWLGDRVITTSTRTWALPTYNNHLYKQISSXXGAXNDNHYFGYSTPWGYFDFNRFHCHFSPRDWQRLINNNWGFRPKKLSFKLFNIQVRGVTQNDGTTTIANNLTSTVQVFTDSEYQLPYVLGSAHQGCLPPFPADVFMVPQYGYLTLNNGSQAVGRSSFYCLEYFPSQMLRTGNNFQFSYTFEDVPFHSSYAHSQSLDRLMNPLIDQYLYYLNRTQXXXXGTXXXXXLXFSQAGPQSMSLQARNWLPGPCYRQQRLSXXXXXNNNSXFPWXAASXYHLNGRDSLVNPGPAMASHXDDXXXFFPMHGNLIFGKXXXXXXXXXXXXVMITDEEEIRTTNPVATEQYGTVANNLQXXXXXPTXXXVXHQGALPGMVWQDRDVYLQGPIWA

SEQ ID NO: 1242 - DNA, 1491 bp, Artificial Sequence
  Description of Artificial Sequence: Synthetic polynucleotide
accaccagcaccagaacctgggccctgcccacttacaacaaccatctctacaagcaaatctccagccaatcaggagcttcaaacgacaaccactactttggctacagcaccccttgggggtattttgactttaacagattccactgccacttctcaccacgtgactggcagcgactcattaacaacaactggggattccggcccaagaaactcagcttcaagctcttcaacatccaagttagaggggtcacgcagaacgatggcacgacgactattgccaataaccttaccagcacggttcaagtgtttacggactcggagtatcagctcccgtacgtgctcgggtcggcgcaccaaggctgtctcccgccgtttccagcggacgtcttcatggtccctcagtatggatacctcaccctgaacaacggaagtcaagcggtgggacgctcatccttttactgcctggagtacttcccttcgcagatgctaaggactggaaataacttccaattcagctataccttcgaggatgtaccttttcacagcagctacgctcacagccagagtttggatcgcttgatgaatcctcttattgatcagtatctgtactacctgaacagaacgcaaggaacaacctctggaacaaccaaccaatcacggctgctttttagccaggctgggcctcagtctatgtctttgcaggccagaaattggctacctgggccctgctaccggcaacagagactttcaaagactgctaacgacaacaacaacagtaactttccttggacagcggccagcaaatatcatctcaatggccgcgactcgctggtgaatccaggaccagctatggccagtcacaaggacgatgaagaaaaatttttccctatgcacggcaatctaatatttggcaaagaagggacaacggcaagtaacgcagaattagataatgtaatgattacggatgaagaagagattcgtaccaccaatcctgtggcaacagagcagtatggaactgtggcaaataacttgcagagctcaaatacagctcccacgactggaactgtcaatcatcagggggccttacctggcatggtgtggcaagatcgtgacgtctaccttcaaggacctatctgggcaaagattcctcacacggatggacactttcatccttctcctctgatgggaggctttggactgaaacatccgcctcctcaaatcatgatcaaaaatactccggtaccggcaaatcctccgacgactttcagcccggccaagtttgcttcatttatcactcagtactccactggacaggtcagcgtggaaattgagtgggagctacagaaagaaaacagcaaacgttggaatccagagattcagtacacttccaactacaacaagtctgttaatgtggactttactgtagacactaatggtgtttatagtgaacctcgccctattggaacccggtatctcacacgaaacttgtga

SEQ ID NO: 1243 - protein, 482 aa, Artificial Sequence
  Description of Artificial Sequence: Synthetic polypeptide
TTSTRTWALPTYNNHLYKQISSQSGASNDNHYFGYSTPWYFDFNRFHCHFSPRDWQRLNNNWGFRPKKLSFKLFNIQRGVTQNDGTTTIANNLTSTQVFTDSEYQLPYVLGSAHQCLPPFPADVFMVPQYGYLTNNGSQAVGRSSFYCLEYFPQMLRTGNNFQFSYTFEDVPHSSYAHSQSLDRLMNPLIDYLYYLNRTQGTTSGTTNQSLLFSQAGPQSMSLQARNWLGPCYRQQRLSKTANDNNNSFPWTAASKYHLNGRDSLVNGPAMASHKDDEEKFFPMHGLIFGKEGTTASNAELDNVMITDEEEIRTTNPVATEQYGTVANNLQSSNTAPTTGTVNHQGALPGMVWQDRDVYLQGPIWAKIPHTDGHFHPSPLMGGFGLKHPPPQIMIKNTPVPANPPTTFSPAKFASFITQYSTGQVSVEIEWELQKENSKRWNPEIQYTSNYNKSVNVDFTVDTNGVYSEPRPIGTRYLTRNL

SEQ ID NO: 1244 - DNA, 1140 bp, Artificial Sequence
  Description of Artificial Sequence: Synthetic polynucleotide
  modified_base (636)..(636): a, c, g, or t
  modified_base (665)..(665): a, c, g, or t
  modified_base (1064)..(1064): a, c, g, or t
accaccagcaccagaacctgggccctgcccacttacaacaaccatctctacaagcaaatctccagcvvmdcaggagctascaacgacaaccactactttggctacagcaccccttgggggtattttgactttaacagattccactgccacttctcaccacgtgactggcagcgactcattaacaacaactggggattccggcccaagaaactcagcttcaagctcttcaacatccaagttagaggggtcacgcagaacgatggcacgacgactattgccaataaccttaccagcacggttcaagtgtttacggactcggagtatcagctcccgtacgtgctcgggtcggcgcaccaaggctgtctcccgccgtttccagcggacgtcttcatggtccctcagtatggatacctcaccctgaacaacggaagtcaagcggtgggacgctcatccttttactgcctggagtacttcccttcgcagatgctaaggactggaaataacttccaattcagctataccttcgaggatgtaccttttcacagcagctacgctcacagccagagtttggatcgcttgatgaatcctcttattgatcagtatctgtactacctgaacagaacgcaargcamcvcnrgcggaacarccrvcmhsmrsvvsctgvngtttagccaggctgggcctcagtctatgtctttgcaggccagaaattggctacctgggccctgctaccggcaacagagactttcaamarycbmcrvcsrsaacaacaacagtrastttccttggmcagcggccagcamatatcatctcaatggccgcgactcgctggtgaatccaggaccagctatggccagtcacrrggacgatrmsgrsaratttttccctatgcacggcaatctaatatttggcaaasaarrcrscrvsrvarvcratrycgmsdwcgrsvrsgtaatgattacggatgaagaagagattcgtaccaccaatcctgtggcaacagagcagtatggaactgtggcaaataacttgcagrvsvvsmrsrvcvvscccacgdhtvvsrnsgtcvmscatcagggggccttacctggcatggtgtggcaagatcgtgacgtctaccttcaaggacctatctgggca

SEQ ID NO: 1245 - protein, 620 aa, Artificial Sequence; identical to SEQ ID NO: 1241
  Description of Artificial Sequence: Synthetic polypeptide
  MOD_RES (263)..(264): Any naturally occurring amino acid
  MOD_RES (267)..(267): Any naturally occurring amino acid
  MOD_RES (450)..(453): Any naturally occurring amino acid
  MOD_RES (456)..(460): Any naturally occurring amino acid
  MOD_RES (462)..(462): Any naturally occurring amino acid
  MOD_RES (491)..(495): Any naturally occurring amino acid
  MOD_RES (500)..(500): Any naturally occurring amino acid
  MOD_RES (504)..(504): Any naturally occurring amino acid
  MOD_RES (508)..(508): Any naturally occurring amino acid
  MOD_RES (528)..(528): Any naturally occurring amino acid
  MOD_RES (531)..(533): Any naturally occurring amino acid
  MOD_RES (546)..(557): Any naturally occurring amino acid
  MOD_RES (586)..(590): Any naturally occurring amino acid
  MOD_RES (593)..(595): Any naturally occurring amino acid
  MOD_RES (597)..(597): Any naturally occurring amino acid

SEQ ID NO: 1246 - protein, 738 aa, Artificial Sequence; identical to SEQ ID NO: 18
  Description of Artificial Sequence: Synthetic polypeptide

SEQ ID NO: 1247 - DNA, 2258 bp, Artificial Sequence
  Description of Artificial Sequence: Synthetic polynucleotide
tcgaggacaacctctctgagggcattcgcgagtggtgggacttgaaacctggagccccgaaacccaaagccaaccagcaaaagcaggacgacggccggggtctggtgcttcctggctacaagtacctcggacccttcaacggactcgacaagggggagcccgtcaacgcggcggacgcagcggccctcgagcacgacaaggcctacgaccagcagctcaaagcgggtgacaatccgtacctgcggtataaccacgccgacgccgagtttcaggagcgtctgcaagaagatacgtcttttgggggcaacctcgggcgagcagtcttccaggccaagaagcgggttctcgaacctctcggtctggttgaggaaggcgctaagacggctcctggaaagaagagaccggtagagccatcaccccagcgttctccagactcctctacgggcatcggcaagaaaggccagcagcccgcgaaaaagagactcaactttgggcagactggcgactcagagtcagtgcccgaccctcaaccaatcggagaaccccccgcaggcccctctggtctgggatctggtacaatggctgcaggcggtggcgctccaatggcagacaataacgaaggcgccgacggagtgggtagttcctcaggaaattggcattgcgattccacatggctgggcgacagagtcatcaccaccagcacccgaacctgggccctccccacctacaacaaccacctctacaagcaaatctccaacgggacttcgggaggaagcaccaacgacaacacctacttcggctacagcaccccctgggggtattttgactttaacagattccactgccacttctcaccacgtgactggcagcgactcatcaacaacaactggggattccggcccaagagactcaacttcaagctcttcaacatccaggtcaaggaggtcacgcagaatgaaggcaccaagaccatcgccaataaccttaccagcacgattcaggtctttacggactcggaataccagctcccgtacgtcctcggctctgcgcaccagggctgcctgcctccgttcccggcggacgtcttcatgattcctcagtacgggtacctgactctgaacaatggcagtcaggccgtgggccgttcctccttctactgcctggagtactttccttctcaaatgctgagaacgggcaacaactttgagttcagctaccagtttgaggacgtgccttttcacagcagctacgcgcacagccaaagcctggaccggctgatgaaccccctcatcgaccagtacctgtactacctgtctcggactcagtccacgggaggtaccgcaggaactcagcagttgctattttctcaggccgggcctaataacatgtcggctcaggccaaaaactggctacccgggccctgctaccggcagcaacgcgtctccacgacactgtcgcaaaataacaacagcaactttgcctggaccggtgccaccaagtatcatctgaatggcagagactctctggtaaatcccggtgtcgctatggcaacccacaaggacgacgaagagcgattttttccgtccagcggagtcttaatgtttgggaaacagggagctggaaaagacaacgtggactatagcagcgttatgctaaccagtgaggaagaaattaaaaccaccaacccagtggccacagaacagtacggcgtggtggccgataacctgcaacagcaaaacgccgctcctattgtaggggccgtcaacagtcaaggagccttacctggcatggtctggcagaaccgggacgtgtacctgcagggtcctatctgggccaagattcctcacacggacggaaactttcatccctcgccgctgatgggaggctttggactgaaacacccgcctcctcagatcctgattaagaatacacctgttcccgcggatcctccaactaccttcagtcaagctaagctggcgtcgttcatcacgcagtacagcaccggacaggtcagcgtggaaattgaatgggagctgcagaaagaaaacagcaaacgctggaacccagagattcaatacacttccaactactacaaatctacaaatgtggactttgctgttaacacagatggcacttattctgagcctcgccccatcggcacccgttacctcacccgtaatctgtaattgcttgttaatcaataaaccggttgattcgtttcagttgaactttggtctctgcgaagggcgaattcgttt

SEQ ID NO: 1248 - DNA, 2208 bp, Artificial Sequence
  Description of Artificial Sequence: Synthetic polynucleotide
atggctgccgatggttatcttccagattggctcgaggacactctctctgaaggaataagacagtggtggaagctcaaacctggcccaccaccaccaaagcccgcagagcggcataaggacgacagcaggggtcttgtgcttcctgggtacaagtacctcggacccttcaacggactcgacaagggagagccggtcaacgaggcagacgccgcggccctcgagcacgacaaagcctacgaccggcagctcgacagcggagacaacccgtacctcaagtacaaccacgccgacgcggagtttcaggagcgccttaaagaagatacgtcttttgggggcaacctcggacgagcagtcttccaggcgaaaaagagggttcttgaacctctgggcctggttgaggaacctgttaagacggctccgggaaaaaagaggccggtagagcactctcctgtggagccagactcctcctcgggaaccggaaaggcgggccagcagcctgcaagaaaaagattgaattttggtcagactggagacgcagactcagtacctgacccccagcctctcggacagccaccagcagccccctctggtctgggaactaatacgatggctacaggcagtggcgcaccaatggcagacaataacgagggcgccgacggagtgggtaattcctcgggaaattggcattgcgattccacatggatgggcgacagagtcatcaccaccagcacccgaacctgggccctgcccacctacaacaaccacctctacaaacaaatttccagccaatcaggagcctcgaacgacaatcactactttggctacagcaccccttgggggtattttgacttcaacagattccactgccacttttcaccacgtgactggcaaagactcatcaacaacaactggggattccgacccaagagactcaacttcaagctctttaacattcaagtcaaagaggtcacgcagaatgacggtacgacgacgattgccaataaccttaccagcacggttcaggtgtttactgactcggagtaccagctcccgtacgtcctcggctcggcgcatcaaggatgcctcccgccgttcccagcagacgtcttcatggtgccacagtatggatacctcaccctgaacaacgggagtcaggcagtaggacgctcttcattttactgcctggagtactttccttctcagatgctgcgtaccggaaacaactttaccttcagctacacttttgaggacgttcctttccacagcagctacgctcacagccagagtctggaccgtctcatgaatcctctcatcgaccagtacctgtatttcttaagcagaacaaacactccaagtggaaccaccacgcagtcaaggcttcagttttctcaggccggagcgagtgacattcgggaccagtctaggaactggcttcctggaccctgttaccgccagcagcgagtatcaaagacatctgcggataacaacaacagtgaattctcgtggaccggtgctaccaagtaccacctcaatggcagagactctctggtgaatccgggcccggccatggcaagccacaaggacgatgaagaaaagttttttcctcagagcggggttctcatctttgggaagcaaggctcagagaaaacaaatgtggacattgaaaaggtcatgattacagacgaagaggaaatcaggacaaccaatcccgtggctacggagcagtatggttctgtatctaccaacctccagagaggcaacagacaagcagctaccgcagatgtcaacacacaaggcgttcttccaggcatggtctggcaggacagagatgtgtaccttcaggggcccatctgggcaaagattccacacacggacggacattttcacccctctcccctcatgggtggattcggacttaaacaccctcctccacagattctcatcaagaacaccccggtacctgcgaatccttcgaccaccttcagtgcggcaaagtttgcttccttcatcacacagtactccacgggacaggtcagcgtggagatcgagtgggagctgcagaaggaaaacagcaaacgctggaatcccgaaattcagtacacttccaactacaacaagtctgttaatgtggactttactgtggacactaatggcgtgtattcagagcctcgccccattggtaccagattcctgactcgtaatctgtaa

SEQ ID NO: 1249 - protein, 737 aa, Artificial Sequence
  Description of Artificial Sequence: Synthetic polypeptide
MAADGYLPDWLEDNLSEGIREWWDLKPGAPKPKANQQKQDNGRGLVLPGYKYLGPFNGLDKGEPVNAADAAALEHDKAYDQQLQAGDNPYLRYNHADAEFQERLQEDTSFGGNLGRAVFQAKKRVLEPLGLVESPVKTAPGKKRPVEPSPQRSPDSSTGIGKKGQQPAKKRLNFGQTGDSESVPDPQPIGEPPAAPSGVGPNTMAAGGGAPMADNNEGADGVGSSSGNWHCDSTWLGDRVITTSTRTWALPTYNNHLYKQISNGTSGGSTNDNTYFGYSTPWGYFDFNRFHCHFSPRDWQRLINNNWGFRPKRLNFKLFNIQVKEVTQNEGTKTIANNLTSTIQVFTDSEYQLPYVLGSAHQGCLPPFPADVFMIPQYGYLTLNNGSQAVGRSSFYCLEYFPSQMLRTGNNFEFSYNFEDVPFHSSYAHSQSLDRLMNPLIDQYLYYLSRTQSTGGTAGTQQLLFSQAGPNNMSAQAKNWLPGPCYRQQRVSTTLSQNNNSNFAWTGATKYHLNGRDSLVNPGVAMATHKDDEERFFPSSGVLMFGKQGAGKDNVDYSSVMLTSEEEIKTTNPVATEQYGWADNLQQQNAAPIVGAVNSQGALPGMVWQNRDVYLQGPIWAKIPHTDGNFHPSPLMGGFGLKHPPPQILIKNTPVPADPPTTFNQAKLASFITQYSTGQVSVEIEWELQKENSKRWNPEIQYTSNYYKSTNVDFAVNTEGTYSEPRPIGTRYLTRNL

SEQ ID NO: 1250 - DNA, 2211 bp, Artificial Sequence
  Description of Artificial Sequence: Synthetic polynucleotide
atggctgccgatggttatcttccagattggctcgaggacactctctctgaaggaataagacagtggtggaagctcaaacctggcccaccaccaccaaagcccgcagagcggcataaggacgacagcaggggtcttgtgcttcctgggtacaagtacctcggacccttcaacggactcgacaagggagagccggtcaacgaggcagacgccgcggccctcgagcacgacaaagcctacgaccggcagctcgacagcggagacaacccgtacctcaagtacaaccacgccgacgcggagtttcaggagcgccttaaagaagatacgtcttttgggggcaacctcggacgagcagtcttccaggcgaaaaagagggttcttgaacctctgggcctggttgaggaacctgttaagacggctccgggaaaaaagaggccggtagagcactctcctgtggagccagactcctcctcgggaaccggaaaggcgggccagcagcctgcaagaaaaagattgaattttggtcagactggagacgcagactcagtacctgacccccagcctctcggacagccaccagcagccccctctggtctgggaactaatacgatggctacaggcagtggcgcaccaatggcagacaataacgagggcgccgacggagtgggtaattcctcgggaaattggcattgcgattccacatggatgggcgacagagtcatcaccaccagcacccgaacctgggccctgcccacctacaacaaccacctctacaaacaaatttccagcgcttcaacgggagcctcgaacgacaatcactactttggctacagcaccccttgggggtattttgacttcaacagattccactgccacttttcaccacgtgactggcaaagactcatcaacaacaactggggattccgacccaagagactcaacttcaagctctttaacattcaagtcaaagaggtcacgcagaatgacggtacgacgacgattgccaataaccttaccagcacggttcaggtgtttactgactcggagtaccagctcccgtacgtcctcggctcggcgcatcaaggatgcctcccgccgttcccagcagacgtcttcatggtgccacagtatggatacctcaccctgaacaacgggagtcaggcagtaggacgctcttcattttactgcctggagtactttccttctcagatgctgcgtaccggaaacaactttaccttcagctacacttttgaggacgttcctttccacagcagctacgctcacagccagagtctggaccgtctcatgaatcctctcatcgaccagtacctgtattacttgagcagaacaaacactccaagtggaaccaccacgcagtcaaggcttcagttttctcaggccggagcgagtgacattcgggaccagtctaggaactggcttcctggaccctgttaccgccagcagcgagtatcaaagacatctgcggataacaacaacagtgaatactcgtggactggagctaccaagtaccacctcaatggcagagactctctggtgaatccgggcccggccatggcaagccacaaggacgatgaagaaaagttttttcctcagagcggggttctcatctttgggaagcaaggctcagagaaaacaaatgtggacattgaaaaggtcatgattacagacgaagaggaaatcaggacaaccaatcccgtggctacggagcagtatggttctgtatctaccaacctccagagaggcaacagacaagcagctaccgcagatgtcaacacacaaggcgttcttccaggcatggtctggcaggacagagatgtgtaccttcaggggcccatctgggcaaagattccacacacggacggacattttcacccctctcccctcatgggtggattcggacttaaacaccctcctccacagattctcatcaagaacaccccggtacctgcgaatccttcgaccaccttcagtgcggcaaagtttgcttccttcatcacacagtactccacgggacaggtcagcgtggagatcgagtgggagctgcagaaggaaaacagcaaacgctggaatcccgaaattcagtacacttccaactacgccaagtctgtcaatgtggactttactgtggacaataatggcgtgtattcagagcctcgccccattggcaccagatacctgactcgtaatctgtaa

SEQ ID NO: 1251 - DNA, 2208 bp, Artificial Sequence
  Description of Artificial Sequence: Synthetic polynucleotide
atggctgccgatggttatcttccagattggctcgaggacaacctctctgagggcattcgcgagtggtgggacttgaaacctggagccccgaagcccaaagccaaccagcaaaagcaggacgacggccggggtctggtgcttcctggctacaagtacctcggacccttcaacggactcgacaagggggagcccgtcaacgcggcggacgcagcggccctcgagcacgacaaggcctacgaccagcagctcaaagcgggtgacaatccgtacctgcggtataaccacgccgacgccgagtttcaggagcgtctgcaagaagatacgtcttttgggggcaacctcgggcgagcagtcttccaggccaagaagcgggttctcgaacctctcggtctggttgaggaaggcgctaagacggctcctggaaagaaacgtccggtagagcagtcgccacaagagccagactcctcctcgggcatcggcaagacaggccagcagcccgctaaaaagagactcaattttggtcagactggcgactcagagtcagtccccgatccacaacctctcggagaacctccagcaacccccgctgctgtgggacctactacaatggcttcaggcggtggcgcaccaatggcagacaataacgaaggcgccgacggagtgggtaatgcctcaggaaattggcattgcgattccacatggctgggcgacagagtcatcaccaccagcacccgcacctgggccttgcccacctacaataaccacctctacaagcaaatctccagtgcttcaggggccagcaacgacaaccactacttcggctacagcaccccctgggggtattttgatttcaacagattccactgccacttttcaccacgtgactggcagcgactcatcaacaacaattggggattccggcccaagagactcaacttcaaactcttcaacatccaagtcaaggaggtcacgacgaatgatggcgtcacaaccatcgctaataaccttaccagcacggttcaagtcttctcggactcggagtaccagcttccgtacgtcctcggctctgcgcaccagggctgcctccctccgttcccggcggacgtgttcatgattccgcaatacggctacctgacgctcaacaatggcagccaagccgtgggacgttcatccttttactgcctggaatatttcccttctcagatgctgagaacgggcaacaactttaccttcagctacacctttgaggaagtgcctttccacagcagctacgcgcacagccagagcctggaccggctgatgaatcctctcatcgaccaatacctgtattacctgaacagaactcaaaatcagtccggaagtgcccaaaacaaggacttgctgtttagccgtgggtctccagctggcatgtctgttcagcccaaaaactggctacctggaccctgttatcggcagcagcgcgtttctaaaacaaaaacagacaacaacaacagcaattttacctggactggtgcttcaaaatataacctcaatgggcgtgaatccatcatcaaccctggcactgctatggcctcacacaaagacgacgaagacaagttctttcccatgagcggtgtcatgatttttggaaaagagagcgccggagcttcaaacactgcattggacaatgtcatgattacagacgaagaggaaattaaagccactaaccctgtggccaccgaaagatttgggaccgtggcagtcaatttccagagcagcagcacagaccctgcgaccggagatgtgcatgctatgggagcattacctggcatggtgtggcaagatagagacgtgtacctgcagggtcccatttgggccaaaattcctcacacagatggacactttcacccgtctcctcttatgggcggctttggactcaagaacccgcctcctcagatcctcatcaaaaacacgcctgttcctgcgaatcctccggcggagttttcagctacaaagtttgcttcattcatcacccaatactccacaggacaagtgagtgtggaaattgaatgggagctgcagaaagaaaacagcaagcgctggaatcccgaagtgcagtacacatccaattatgcaaaatctgccaacgttgattttactgtggacaacaatggactttatactgagcctcgccccattggcacccgttaccttacccgtcccctgtaa

SEQ ID NO: 1252 - DNA, 2205 bp, Artificial Sequence
  Description of Artificial Sequence: Synthetic polynucleotide
atggctgccgatggttatcttccagattggctcgaggacaacctctdgagggcattcgcgagtggtgggacttgaaacctggagccccgaaacccaaagccaaccagcaaaagcaggacgacggccggggtdggtgcttcctggctacaagtacctcggacccttcaacggactcgacaagggggagcccgtcaacgcggcggatgcagcggccctcgagcacgacaaggcctacgaccagcagctcaaagcgggtgacaatccgtacctgcggtataaccacgccgacgccgagtttcaggagcgtctgcaagaagatacgtcttttgggggcaacctcgggcgagcagtcttccaggccaagaagagggttctcgaaccttttggtdggttgaggaaggtgctaagacggctcctggaaagaaacgtccggtagagcagtcgccacaagagccagactcctcctcgggcattggcaagacaggccagcagcccgctaaaaagagactcaattttggtcagactggcgactcagagtcagtccccgacccacaacctctcggagaacctccagcaacccccgctgctgtgggacctactacaatggcttcaggcggtggcgcaccaatggcagacaataacgaaggcgccgacggagtgggtaatgcctcaggaaattggcattgcgattccacatggctgggcgacagagtcatcaccaccagcacccgaacatgggccttgcccacctataacaaccacctctacaagcaaatctccagtgcttcaggggccagcaacgacaaccactacttcggctacagcaccccctgggggtattttgatttcaacagattccactgccatttctcaccacgtgactggcagcgactcatcaacaacaattggggattccggcccaagagactcaacttcaagctcttcaacatccaagtcaaggaggtcacgacgaatgatggcgtcacgaccatcgctaataaccttaccagcacggttcaagtcttctcggactcggagtaccagttgccgtacgtcctcggctctgcgcaccagggctgcctccctccgttcccggcggacgtgttcatgattccgcagtacggctacctaacgctcaacaatggcagccaggcagtgggacggtcatccttttactgcctggaatatttcccatcgcagatgctgagaacgggcaataactttaccttcagctacaccttcgaggacgtgcctttccacagcagctacgcgcacagccagagcctggaccggctgatgaatcctctcatcgaccagtacctgtattacctgaacagaactcagaatcagtccggaagtgcccaaaacaaggacttgctgtttagccgggggtctccagctggcatgtctgttcagcccaaaaactggctacctggaccctgttaccggcagcagcgcgtttctaaaacaaaaacagacaacaacaacagcaactttacctggactggtgcttcaaaatataaccttaatgggcgtgaatctataatcaaccctggcactgctatggcctcacacaaagacgacaaagacaagttctttcccatgagcggtgtcatgatttttggaaaggagagcgccggagcttcaaacactgcattggacaatgtcatgatcacagacgaagaggaaatcaaagccactaaccccgtggccaccgaaagatttgggactgtggcagtcaatctccagagcagcagcacagaccctgcgaccggagatgtgcatgttatgggagccttacctggaatggtgtggcaagacagagacgtatacctgcagggtcctatttgggccaaaattcctcacacggatggacactttcacccgtctcctctcatgggcggctttggacttaagcacccgcctcctcagatcctcatcaaaaacacgcctgttcctgcgaatcctccggcagagttttcggctacaaagtttgcttcattcatcacccagtattccacaggacaagtgagcgtggagattgaatgggagctgcagaaagaaaacagcaaacgctggaatcccgaagtgcagtatacatctaactatgcaaaatctgccaacgttgatttcactgtggacaacaatggactttatactgagcctcgccccattggcacccgttacctcacccgtcccctgtaa

SEQ ID NO: 1253 - DNA, 2208 bp, Artificial Sequence
  Description of Artificial Sequence: Synthetic polynucleotide
atggctgccgatggttatcttccagattggctcgaggacaacctctctgagggcattcgcgagtggtgggacttgaaacctggagccccgaaacccaaagccaaccagcaaaagcaggacgacggccggggtctggtgcttcctggctacaagtacctcggacccttcaacggactcgacaagggggagcccgtcaacgcggcggatgcagcggccctcgagcacgacaaggcctacgaccagcagctcaaagcgggtgacaatccgtacctgcggtataaccacgccgacgccgagtttcaggagcgtctgcaagaagatacgtcttttgggggcaacctcgggcgagcagtcttccaggccaagaagagggttctcgaaccttttggtctggttgaggaaggtgctaagacggctcctggaaagaaacgtccggtagagcagtcgccacaagagccagactcctcctcgggcattggcaagacaggccagcagcccgctaaaaagagactcaattttggtcagactggcgactcagagtcagtccccgacccacaacctctcggagaacctccagcaacccccgctgctgtgggacctactacaatggcttcaggcggtggcgcaccaatggcagacaataacgaaggcgccgacggagtgggtaatgcctcaggaaattggcattgcgattccacatggctgggcgacagagtcatcaccaccagcacccgaacatgggccttgcccacctataacaaccacctctacaagcaaatctccagtgcttcaggggccagcaacgacaaccactacttcggctacagcaccccctgggggtattttgatttcaacagattccactgccatttctcaccacgtgactggcagcgactcatcaacaacaattggggattccggcccaagagactcaacttcaagctcttcaacatccaagtcaaggaggtcacgacgaatgatggcgtcacgaccatcgctaataaccttaccagcacggttcaagtcttctcggactcggagtaccagttgccgtacgtcctcggctctgcgcaccagggctgcctccctccgttcccggcggacgtgttcatgattccgcagtacggctacctaacgctcaacaatggcagccaggcagtgggacggtcatccttttactgcctggaatatttcccatcgcagatgctgagaacgggcaataactttaccttcagctacaccttcgaggacgtgcctttccacagcagctacgcgcacagccagagcctggaccggctgatgaatcctctcatcgaccagtacctgtattacctgaacagaactcagaatcagtccggaagtgcccaaaacaaggacttgctgtttagccgggggtctccagctggcatgtctgttcagcccaaaaactggctacctggaccctgttaccggcagcagcgcgtttctaaaacaaaaacagacaacaacaacagcaactttacctggactggtgcttcaaaatataaccttaatgggcgtgaatctataatcaaccctggcactgctatggcctcacacaaagacgacgaagacaagttctttcccatgagcggtgtcatgatttttggaaaggagagcgccggagcttcaaacactgcattggacaatgtcatgatcacagacgaagaggaaatcaaagccactaaccccgtggccaccgaaagatttgggactgtggcagtcaatctccagagcagcagcacagaccctgcgaccggagatgtgcatgttatgggagccttacctggaatggtgtggcaagacagagacgtatacctgcagggtcctatttgggccaaaattcctcacacggatggacactttcacccgtctcctctcatgggcggctttggacttaagcacccgcctcctcagatcctcatcaaaaacacgcctgttcctgcgaatcctccggcagagttttcggctacaaagtttgcttcattcatcacccagtattccacaggacaagtgagcgtggagattgaatgggagctgcagaaagaaaacagcaaacgctggaatcccgaagtgcagtatacatctaactatgcaaaatctgccaacgttgatttcactgtggacaacaatggactttatactgagcctcgccccattggcacccgttacctcacccgtcccctgtaa

SEQ ID NO: 1254 - DNA, 2208 bp, Artificial Sequence
  Description of Artificial Sequence: Synthetic polynucleotide
atggctgccgatggttatcttccagattggctcgaggacactctctctgaaggaataagacagtggtggaagctcaaacctggcccaccaccaccaaagcccgcagagcggcataaggacgacagcaggggtcttgtgcttcctgggtacaagtacctcggacccttcaacggactcgacaagggagagccggtcaacgaggcagacgccgcggccctcgagcacgacaaagcctacgaccggcagctcgacagcggagacaacccgtacctcaagtacaaccacgccgacgcggagtttcaggagcgccttaaagaagatacgtcttttgggggcaacctcggacgagcagtcttccaggcgaaaaagagggttcttgaacctctgggcctggttgaggaacctgttaagacggctccgggaaaaaagaggccggtagagcactctcctgtggagccagactcctcctcgggaaccggaaaggcgggccagcagcctgcaagaaaaagattgaattttggtcagactggagacgcagactcagtacctgacccccagcctctcggacagccaccagcagccccctctggtctgggaactaatacgatggctacaggcagtggcgcaccaatggcagacaataacgagggcgccgacggagtgggtaattcctcgggaaattggcattgcgattccacatggatgggcgacagagtcatcaccaccagcacccgaacctgggccctgcccacctacaacaaccacctctacaaacaaatttccagccaatcaggagcctcgaacgacaatcactactttggctacagcaccccttgggggtattttgacttcaacagattccactgccacttttcaccacgtgactggcaaagactcatcaacaacaactggggattccgacccaagagactcaacttcaagctctttaacattcaagtcaaagaggtcacgcagaatgacggtacgacgacgattgccaataaccttaccagcacggttcaggtgtttactgactcggagtaccagctcccgtacgtcctcggctcggcgcatcaaggatgcctcccgccgttcccagcagacgtcttcatggtgccacagtatggatacctcaccctgaacaacgggagtcaggcagtaggacgctcttcattttactgcctggagtactttccttctcagatgctgcgtaccggaaacaactttaccttcagctacacttttgaggacgttcctttccacagcagctacgctcacagccagagtctggaccgtctcatgaatcctctcatcgaccagtacctgtattacttgagcagaacaaacactccaagtggaaccaccacgcagtcaaggcttcagttttctgtggccggacccagtaacatggctgtccagggaaggaactggcttcctggaccctgttaccgccagcagcgagtatcaaagacatctgcggataacaacaacagtgaatttgcttggactggagctaccaagtaccacctcaatggcagagactctctggtgaatccgggcccggccatggcaagccacaaggacgatgaagaaaagttttttcctcagagcggggttctcatctttgggaagcaaggctcagagaaaacaaatgtggacattgaaaaggtcatgattacagacgaagaggaaatcaggacaaccaatcccgtggctacggagcagtatggttctgtatctaccaacctccagcaacagaacacagcaccagctaccgcagatgtcaacacacaaggcgttcttccaggcatggtctggcaggacagagatgtgtaccttcaggggcccatctgggcaaagattccacacacggacggacattttcacccctctcccctcatgggtggattcggacttaaacaccctcctccacagattctcatcaagaacaccccggtacctgcgaatccttcgaccaccttcagtgcggcaaagtttgcttccttcatcacacagtactccacgggacaggtcagcgtggagatcgagtgggagctgcagaaggaaaacagcaaacgctggaatcccgaaattcagtacacttccaactacaacaagtctgttaatgtggactttactgtggacactaatggcgtgtattcagagcctcgccccattggcaccagatacctgactcgtaatctgtaa

SEQ ID NO: 1255 - protein, 735 aa, Artificial Sequence
  Description of Artificial Sequence: Synthetic polypeptide
MAADGYLPDWLEDTLSEGIRQWWKLKPGPPPPKPAERHKDDSRGLVLPGYKYLGPFNGLDKGEPVNEADAAALEHDKAYDRQLDSGDNPYLKYNHADAEFQERLKEDTSFGGNLGRAVFQAKKRVLEPLGLVEEPVKTAPGKKRPVEHSPVEPDSSSGTGKAGQQPARKRLNFGQTGDADSVPDPQPLGQPPAAPSGLGTNTMATGSGAPMADNNEGADGVGNSSGNWHCDSTWMGDRVITTSTRTWALPTYNNHLYKQISSQSGASNDNHYFGYSTPWGYFDFNRFHCHFSPRDWQRLINNNWGFRPKRLNFKLFNIQVKEVTQNDGTTTIANNLTSTVQVFTDSEYQLPYVLGSAHQGCLPPFPADVFMVPQYGYLTLNNGSQAVGRSSFYCLEYFPSQMLRTGNNFTFSYTFEDVPFHSSYAHSQSLDRLMNPLIDQYLYYLSRTNTPSGTTTQSRLQFSVAGPSNMAVQGRNWLPGPCYRQQRVSKTSADNNNSEFAWTGATKYHLNGRDSLVNPGPAMASHKDDEEKFFPQSGVLIFGKQGSEKTNVDIEKVMITDEEEIRTTNPVATEQYGSVSTNLQQQNTAPATADVNTQGVLPGMVWQDRDVYLQGPIWAKIPHTDGHFHPSPLMGGFGLKHPPPQILIKNTPVPANPSTTFSAAKFASFITQYSTGQVSVEIEWELQKENSKRWNPEIQYTSNYNKSVNVDFTVDTNGVYSEPRPIGTRYLTRNL

SEQ ID NO: 1256 - DNA, 2208 bp, Artificial Sequence
  Description of Artificial Sequence: Synthetic polynucleotide
atggctgccgatggttatcttccagattggctcgaggacactctctctgaaggaataagacagtggtggaagctcaaacctggcccaccaccaccaaagcccgcagagcggcataaggacgacagcaggggtcttgtgcttcctgggtacaagtacctcggacccttcaacggactcgacaagggagagccggtcaacgaggcagacgccgcggccctcgagcacgacaaagcctacgaccggcagctcgacagcggagacaacccgtacctcaagtacaaccacgccgacgcggagtttcaggagcgccttaaagaagatacgtcttttgggggcaacctcggacgagcagtcttccaggcgaaaaagaggattcttgaacctctgggcctggttgaggaacctgttaagacggctccgggaaaaaagaggccggtagagcactctcctgcggagccagactcctcctcgggaaccggaaagtcgggccagcagcctgcaagaaaaagattgaattttggtcagactggagacgcagactcagtacctgacccccagcctctcggacagccaccagcagccccctctggtctgggaactaatacgatggcttcaggcagtggcgcaccaatggcagacaataacgagggcgccgacggagtgggtaattcctcgggaaattggcattgcgattccacatggatgggcgacagagtcatcaccaccagcacccgaacctgggccctgcccacctacaacaaccacctctacaaacaaatttccagccaatcaggagcctcgaacgacaatcactactttggctacagcaccccttgggggtattttgacttcaacagattccactgccacttttcaccacgtgactggcaaagactcatcaacaacaactggggattccgacccaagagactcagcttcaagctctttaacattcaagtcaaagaggtcacgcagaatgacggtacgacgacgattgccaataaccttaccagcacggttcaggtgtttactgactcggagtaccagctcccgtacgtcctcggctcggcgcatcaaggatgcctcccgccgttcccagcagacgtcttcatggtgccacagtatggatacctcaccctgaacaacgggagtcaggcagtaggacgctcttcattttactgcctggagtactttccttctcagatgctgcgtaccggaaacaactttaccttcagctacacttttgaggacgttcctttccacagcagctacgctcacagccagagtctggaccgtctcatgaatcctctcatcgaccagtacctgtattacttgagcagaacaaacactccaagtggaaccaccacgatgtcaaggcttcagttttctcaggccggagcgagtgacattcgggaccagtctaggaactggcttcctggaccctgttaccgccagcagcgagtatcaaagacagctgcggataacaacaacagtgattactcgtggactggagctaccaagtaccacctcaatggcagagactctctggtgaatccgggcccggccatggcaagccacaaggacgatgaagaaaagtattttcctcagagcggggttctcatctttgggaagcaagactcaggaaaaacaaatgtggacattgaaaaggtcatgattacagacgaagaggaaatcaggacaaccaatcccgtggctacggagcagtatggttctgtatctaccaacctccagagcggcaacacacaagcagctacctcagatgtcaacacacaaggcgttcttccaggcatggtctggcaggacagagatgtgtaccttcaggggcccatctgggcaaagattccacacacggacggacattttcacccctctcccctcatgggtggattcggacttaaacaccctcctccacagattctcatcaagaacaccccggtacctgcgaatccttcgaccaccttcagtgcggcaaagtttgcttccttcatcacacagtactccacgggacaggtcagcgtggagatcgagtgggagctgcagaaggaaaacagcaaacgctggaatcccgaaattcagtacacttccaactacaacaagtctgttaatgtggactttactgtggacactaatggcgtgtattcagagcctcgccccattggcaccagatacctgactcgtaatctgtaa

SEQ ID NO: 1257 - DNA, 2208 bp, Artificial Sequence
  Description of Artificial Sequence: Synthetic polynucleotide
atggctgccgatggttatcttccagattggctcgaggacactctctctgaaggaataagacagtggtggaagctcaaacctggcccaccaccaccaaagcccgcagagcggcataaggacgacagcaggggtcttgtgcttcctgggtacaagtacctcggacccttcaacggactcgacaagggagagccggtcaacgaggcagacgccgcggccctcgagcacgacaaagcctacgaccggcagctcgacagcggagacaacccgtacctcaagtacaaccacgccgacgcggagtttcaggagcgccttaaagaagatacgtcttttgggggcaacctcggacgagcagtcttccaggcgaaaaagaggattcttgaacctctgggcctggttgaggaacctgttaagacggctccgggaaaaaagaggccggtagagcactctcctgcggagccagactcctcctcgggaaccggaaagtcgggccagcagcctgcaagaaaaagattgaattttggtcagactggagacgcagactcagtacctgacccccagcctctcggacagccaccagcagccccctctggtctgggaactaatacgatggcttcaggcagtggcgcaccaatggcagacaataacgagggcgccgacggagtgggtaattcctcgggaaattggcattgcgattccacatggatgggcgacagagtcatcaccaccagcacccgaacctgggccctgcccacctacaacaaccacctctacaaacaaatttccagccaatcaggagcctcgaacgacaatcactactttggctacagcaccccttgggggtattttgacttcaacagattccactgccacttttcaccacgtgactggcaaagactcatcaacaacaactggggattccgacccaagagactcaacttcaagctctttaacattcaagtcaaagaggtcacgcagaatgacggtacgacgacgattgccaataaccttaccagcacggttcaggtgtttactgactcggagtaccagctcccgtacgtcctcggctcggcgcatcaaggatgcctcccgccgttcccagcagacgtcttcatggtgccacagtatggatacctcaccctgaacaacgggagtcaggcagtaggacgctcttcattttactgcctggagtactttccttctcagatgctgcgtaccggaaacaactttaccttcagctacacttttgaggacgttcctttccacagcagctacgctcacagccagagtctggaccgtctcatgaatcctctcatcgaccagtacctgtattacttgagcagaacaaacactccaagtggaaccaccacgatgtcaaggcttcagttttctcaggccggagcgagtgacattcgggaccagtctaggaactggcttcctggaccctgttaccgccagcagcgagtatcaaagacagctgcggataacaacaacagtgattactcgtggactggagctaccaagtaccacctcaatggcagagactctctggtgaatccgggcccggccatggcaagccacaaggacgatgaagaaaagtattttcctcagagcggggttctcatctttgggaagcaagactcaggaaaaacaaatgtggacattgaaaaggtcatgattacagacgaagaggaaatcaggacaaccaatcccgtggctacggagcagtatggttctgtatctaccaacctccagagcggcaacacacaagcagctacctcagatgtcaacacacaaggcgttcttccaggcatggtctggcaggacagagatgtgtaccttcaggggcccatctgggcaaagattccacacacggacggacattttcacccctctcccctcatgggtggattcggacttaaacaccctcctccacagattctcatcaagaacaccccggtacctgcgaatccttcgaccaccttcagtgcggcaaagtttgcttccttcatcacacagtactccacgggacaggtcagcgtggagatcgagtgggagctgcagaaggaaaacagcaaacgctggaatcccgaaattcagtacacttccaactacaacaagtctgttaatgtggactttactgtggacactaatggcgtgtattcagagcctcgccccattggcaccagatacctgactcgtaatctgtaa

SEQ ID NO: 1258 - protein, 735 aa, Artificial Sequence
  Description of Artificial Sequence: Synthetic polypeptide
MAADGYLPDWLEDTLSEGIRQWWKLKPGPPPPKPAERHKDDSRGLVLPGYKYLGPFNGLDKGEPVNEADAAALEHDKAYDRQLDSGDNPYLKYNHADAEFQERLKEDTSFGGNLGRAVFQAKKRILEPLGLVEEPVKTAPGKKRPVEHSPAEPDSSSGTGKSGQQPARKRLNFGQTGDADSVPDPQPLGQPPAAPSGLGTNTMASGSGAPMADNNEGADGVGNSSGNWHCDSTWMGDRVITTSTRTWALPTYNNHLYKQISSQSGASNDNHYFGYSTPWGYFDFNRFHCHFSPRDWQRLINNNWGFRPKRLNFKLFNIQVKEVTQNDGTTTIANNLTSTVQVFTDSEYQLPYVLGSAHQGCLPPFPADVFMVPQYGYLTLNNGSQAVGRSSFYCLEYFPSQMLRTGNNFTFSYTFEDVPFHSSYAHSQSLDRLMNPLIDQYLYYLSRTNTPSGTTTMSRLQFSQAGASDIRDQSRNWLPGPCYRQQRVSKTAADNNNSDYSWTGATKYHLNGRDSLVNPGPAMASHKDDEEKYFPQSGVLIFGKQDSGKTNVDIEKVMITDEEEIRTTNPVATEQYGSVSTNLQSGNTQAATSDVNTQGVLPGMVWQDRDVYLQGPIWAKIPHTDGHFHPSPLMGGFGLKHPPPQILIKNTPVPANPSTTFSAAKFASFITQYSTGQVSVEIEWELQKENSKRWNPEIQYTSNYNKSVNVDFTVDTNGVYSEPRPIGTRYLTRNL

SEQ ID NO: 1259 - protein, 736 aa, Artificial Sequence
  Description of Artificial Sequence: Synthetic polypeptide
MAADGYLPDWLEDNLSEGIREWWDLKPGAPKPKANQQKQDDGRGLVLPGYKYLGPFNGLDKGEPVNAADAAALEHDKAYDQQLKAGDNPYLRYNHADAEFQERLQEDTSFGGNLGRAVFQAKKRVLEPFGLVEEGAKTAPGKKRPVEQSPQEPDSSSGIGKTGQQPAKKRLNFGQTGDSESVPDPQPLGEPPATPAAVGPTTMASGGGAPMADNNEGADGVGNASGNWHCDSTWLGDRVITTSTRTWALPTYNNHLYKQISSASTGASNDNHYFGYSTPWGYFDFNRFHCHFSPRDWQRLINNNWGFRPKRLNFKLFNIQVKEVTTNDGVTTIANNLTSTVQVFSDSEYQLPYVLGSAHQGCLPPFPADVFMIPQYGYLTLNNGSQAVGRSSFYCLEYFPSQMLRTGNNFTFSYTFEDVPFHSSYAHSQSLDRLMNPLIDQYLYFLNRTQNQSGSAQNKDLLFSRGSPAGMSVQPKNWLPGPCYRQQRVSKTKTDNNNSNFTWTGASKYNLNGRESIINPGTAMASHKDDKDKFFPMSGVMIFGKESAGASNTALDNVMITDEEEIKATNPVATERFGTVAVNLQSSSTDPATGDVHVMGALPGMVWQDRDVYLQGPIWAKIPHTDGHFHPSPLMGGFGLKHPPPQILIKNTPVPANPPAEFSATKFASFITQYSTGQVSVEIEWELQKENSKRWNPEVQYTSNYAKSANVDFTVDNNGLYTEPRPIGTRYLTRPL

SEQ ID NO: 1260 - protein, 747 aa, Artificial Sequence
  Description of Artificial Sequence: Synthetic polypeptide
MAADGYLPDWLEDTLSEGIRQWWKLKPGPPPPKPAERHKDDSRGLVLPGYKYLGPFNGLDKGEPVNEADAAALEHDKAYDRQLDSGDNPYLKYNHADAEFQERLKEDTSFGGNLGRAVFQAKKRVLEPLGLVEEPVKTAPGKKRPVEHSPVEPDSSSGTGKAGQQPARKRLNFGQTGDADSVPDPQPLGQPPAAPSGLGTNTMATGSGAPMADNNEGADGVGNSSGNWHCDSTWMGDRVITTSTRTWALPTYNNHLYKQISSQSGASNDNHYFGYSTPWGYFDFNRFHCHFSPRDWQRLINNNWGFRPKRLNFKLFNIQVKEVTQNDGTTTIANNLTSTVQVFTDSEYQLPYVLGSAHQGCLPPFPADVFMVPQYGYLTLNNGSQAVGRSSFYCLEYFPSQMLRTGNNFTFSYTFEDVPFHSSYAHSQSLDRLMNPLIDQYLYYLSRTNTPSGTTTQSRLQFSQAGASDIRDQSRNWLPGPCYRQQRVSKTSADNNNSEYSWTGATKYHLNGRDSLVNPGPAMASHKDDEEKFFPQSGVLIFGKQGSEKTNVDIEKVMITDEEEIRTTNPVATEQYGSVSTNLQRGNAAAGSTPPPMAARQAATADVNTQGVLPGMVWQDRDVYLQGPIWAKIPHTDGHFHPSPLMGGFGLKHPPPQILIKNTPVPANPSTTFSAAKFASFITQYSTGQVSVEIEWELQKENSKRWNPEIQYTSNYNKSVNVDFTVDTNGVYSEPRPIGTRYLTRNL

SEQ ID NO: 1261 - protein, 747 aa, Artificial Sequence
  Description of Artificial Sequence: Synthetic polypeptide
MAADGYLPDWLEDTLSEGIRQWWKLKPGPPPPKPAERHKDDSRGLVLPGYKYLGPFNGLDKGEPVNEADAAALEHDKAYDRQLDSGDNPYLKYNHADAEFQERLKEDTSFGGNLGRAVFQAKKRVLEPLGLVEEPVKTAPGKKRPVEHSPVEPDSSSGTGKAGQQPARKRLNFGQTGDADSVPDPQPLGQPPAAPSGLGTNTMATGSGAPMADNNEGADGVGNSSGNWHCDSTWMGDRVITTSTRTWALPTYNNHLYKQISSQSGASNDNHYFGYSTPWGYFDFNRFHCHFSPRDWQRLINNNWGFRPKRLNFKLFNIQVKEVTQNDGTTTIANNLTSTVQVFTDSEYQLPYVLGSAHQGCLPPFPADVFMVPQYGYLTLNNGSQAVGRSSFYCLEYFPSQMLRTGNNFTFSYTFEDVPFHSSYAHSQSLDRLMNPLIDQYLYYLSRTNTPSGTTTQSRLQFSQAGASDIRDQSRNWLPGPCYRQQRVSKTSADNNNSEYSWTGATKYHLNGRDSLVNPGPAMASHKDDEEKFFPQSGVLIFGKQGSEKTNVDIEKVMITDEEEIRTTNPVATEQYGSVSTNLQRGNAAAGETRAPLAARQAATADVNTQGVLPGMVWQDRDVYLQGPIWAKIPHTDGHFHPSPLMGGFGLKHPPPQILIKNTPVPANPSTTFSAAKFASFITQYSTGQVSVEIEWELQKENSKRWNPEIQYTSNYNKSVNVDFTVDTNGVYSEPRPIGTRYLTRNL

SEQ ID NO: 1262 - protein, 7 aa, Artificial Sequence
  Description of Artificial Sequence: Synthetic peptide
TLAVPFK

SEQ ID NO: 1263 - protein, 7 aa, Artificial Sequence
  Description of Artificial Sequence: Synthetic peptide
KFPVALT

SEQ ID NO: 1264 - protein, 6 aa, Artificial Sequence
  Description of Artificial Sequence: Synthetic peptide
LAVPFK

SEQ ID NO: 1265 - protein, 5 aa, Artificial Sequence
  Description of Artificial Sequence: Synthetic peptide
AVPFK

SEQ ID NO: 1266 - protein, 4 aa, Artificial Sequence
  Description of Artificial Sequence: Synthetic peptide
VPFK

SEQ ID NO: 1267 - protein, 6 aa, Artificial Sequence
  Description of Artificial Sequence: Synthetic peptide
TLAVPF

SEQ ID NO: 1268 - protein, 5 aa, Artificial Sequence
  Description of Artificial Sequence: Synthetic peptide
TLAVP

SEQ ID NO: 1269 - protein, 4 aa, Artificial Sequence
  Description of Artificial Sequence: Synthetic peptide
TLAV

SEQ ID NO: 1270 - protein, 7 aa, Artificial Sequence
  Description of Artificial Sequence: Synthetic peptide
SVSKPFL

SEQ ID NO: 1271 - protein, 7 aa, Artificial Sequence
  Description of Artificial Sequence: Synthetic peptide
FTLTTPK

SEQ ID NO: 1272 - protein, 7 aa, Artificial Sequence
  Description of Artificial Sequence: Synthetic peptide
MNATKNV

SEQ ID NO: 1273 - protein, 7 aa, Artificial Sequence
  Description of Artificial Sequence: Synthetic peptide
QSSQTPR

SEQ ID NO: 1274 - protein, 7 aa, Artificial Sequence
  Description of Artificial Sequence: Synthetic peptide
ILGTGTS

SEQ ID NO: 1275 - protein, 7 aa, Artificial Sequence
  Description of Artificial Sequence: Synthetic peptide
TRTNPEA

SEQ ID NO: 1276 - protein, 7 aa, Artificial Sequence
  Description of Artificial Sequence: Synthetic peptide
NGGTSSS

SEQ ID NO: 1277 - protein, 7 aa, Artificial Sequence
  Description of Artificial Sequence: Synthetic peptide
YTLSQGW

SEQ ID NO: 1278 - DNA, 21 bp, Artificial Sequence
  Description of Artificial Sequence: Synthetic oligonucleotide
aagtttcctgtggcgttgact

SEQ ID NO: 1279 - DNA, 21 bp, Artificial Sequence
  Description of Artificial Sequence: Synthetic oligonucleotide
actttggcggtgccttttaag

SEQ ID NO: 1280 - DNA, 21 bp, Artificial Sequence
  Description of Artificial Sequence: Synthetic oligonucleotide
agtgtgagtaagccttttttg

SEQ ID NO: 1281 - DNA, 21 bp, Artificial Sequence
  Description of Artificial Sequence: Synthetic oligonucleotide
tttacgttgacgacgcctaag

SEQ ID NO: 1282 - DNA, 21 bp, Artificial Sequence
  Description of Artificial Sequence: Synthetic oligonucleotide
atgaatgctacgaagaatgtg

SEQ ID NO: 1283 - DNA, 21 bp, Artificial Sequence
  Description of Artificial Sequence: Synthetic oligonucleotide
cagtcgtcgcagacgcctagg

SEQ ID NO: 1284 - DNA, 21 bp, Artificial Sequence
  Description of Artificial Sequence: Synthetic oligonucleotide
attctggggactggtacttcg

SEQ ID NO: 1285 - DNA, 21 bp, Artificial Sequence
  Description of Artificial Sequence: Synthetic oligonucleotide
acgcggactaatcctgaggct

SEQ ID NO: 1286 - DNA, 21 bp, Artificial Sequence
  Description of Artificial Sequence: Synthetic oligonucleotide
aatggggggactagtagttct

SEQ ID NO: 1287 - DNA, 21 bp, Artificial Sequence
  Description of Artificial Sequence: Synthetic oligonucleotide
tatactttgtcgcagggttgg

SEQ ID NO: 1288 - protein, 11 aa, Artificial Sequence
  Description of Artificial Sequence: Synthetic peptide
AQTLAVPFKAQ

SEQ ID NO: 1289 - protein, 11 aa, Artificial Sequence
  Description of Artificial Sequence: Synthetic peptide
AQSVSKPFLAQ

SEQ ID NO: 1290 - protein, 11 aa, Artificial Sequence
  Description of Artificial Sequence: Synthetic peptide
AQFTLTTPKAQ

SEQ ID NO: 1291 - protein, 11 aa, Artificial Sequence
  Description of Artificial Sequence: Synthetic peptide
DGTLAVPFKAQ

SEQ ID NO: 1292 - protein, 11 aa, Artificial Sequence
  Description of Artificial Sequence: Synthetic peptide
ESTLAVPFKAQ

SEQ ID NO: 1293 - protein, 11 aa, Artificial Sequence
  Description of Artificial Sequence: Synthetic peptide
GGTLAVPFKAQ

SEQ ID NO: 1294 - protein, 11 aa, Artificial Sequence
  Description of Artificial Sequence: Synthetic peptide
AQTLATPFKAQ

SEQ ID NO: 1295 - protein, 11 aa, Artificial Sequence
  Description of Artificial Sequence: Synthetic peptide
ATTLATPFKAQ

SEQ ID NO: 1296 - protein, 11 aa, Artificial Sequence
  Description of Artificial Sequence: Synthetic peptide
DGTLATPFKAQ

SEQ ID NO: 1297 - protein, 11 aa, Artificial Sequence
  Description of Artificial Sequence: Synthetic peptide
GGTLATPFKAQ

SEQ ID NO: 1298 - protein, 11 aa, Artificial Sequence
  Description of Artificial Sequence: Synthetic peptide
SGSLAVPFKAQ

SEQ ID NO: 1299 - protein, 11 aa, Artificial Sequence
  Description of Artificial Sequence: Synthetic peptide
AQTLAQPFKAQ

SEQ ID NO: 1300 - protein, 11 aa, Artificial Sequence
  Description of Artificial Sequence: Synthetic peptide
AQTLQQPFKAQ

SEQ ID NO: 1301 - protein, 11 aa, Artificial Sequence
  Description of Artificial Sequence: Synthetic peptide
AQTLSNPFKAQ

SEQ ID NO: 1302 - protein, 11 aa, Artificial Sequence
  Description of Artificial Sequence: Synthetic peptide
AQTLAVPFSNP

SEQ ID NO: 1303 - protein, 11 aa, Artificial Sequence
  Description of Artificial Sequence: Synthetic peptide
QGTLAVPFKAQ

SEQ ID NO: 1304 - protein, 11 aa, Artificial Sequence
  Description of Artificial Sequence: Synthetic peptide
NQTLAVPFKAQ

SEQ ID NO: 1305 - protein, 11 aa, Artificial Sequence
  Description of Artificial Sequence: Synthetic peptide
EGSLAVPFKAQ

SEQ ID NO: 1306 - protein, 11 aa, Artificial Sequence
  Description of Artificial Sequence: Synthetic peptide
SGNLAVPFKAQ

SEQ ID NO: 1307 - protein, 11 aa, Artificial Sequence
  Description of Artificial Sequence: Synthetic peptide
EGTLAVPFKAQ

SEQ ID NO: 1308 - protein, 11 aa, Artificial Sequence
  Description of Artificial Sequence: Synthetic peptide
DSTLAVPFKAQ

SEQ ID NO: 1309 - protein, 11 aa, Artificial Sequence
  Description of Artificial Sequence: Synthetic peptide
AVTLAVPFKAQ

SEQ ID NO: 1310 - protein, 11 aa, Artificial Sequence
  Description of Artificial Sequence: Synthetic peptide
AQTLSTPFKAQ

SEQ ID NO: 1311 - protein, 11 aa, Artificial Sequence
  Description of Artificial Sequence: Synthetic peptide
AQTLPQPFKAQ

SEQ ID NO: 1312 - protein, 11 aa, Artificial Sequence
  Description of Artificial Sequence: Synthetic peptide
AQTLSQPFKAQ

SEQ ID NO: 1313 - protein, 11 aa, Artificial Sequence
  Description of Artificial Sequence: Synthetic peptide
AQTLQLPFKAQ

SEQ ID NO: 1314 - protein, 11 aa, Artificial Sequence
  Description of Artificial Sequence: Synthetic peptide
AQTLTMPFKAQ

SEQ ID NO: 1315 - protein, 11 aa, Artificial Sequence
  Description of Artificial Sequence: Synthetic peptide
AQTLTTPFKAQ

SEQ ID NO: 1316 - protein, 11 aa, Artificial Sequence
  Description of Artificial Sequence: Synthetic peptide
AQYTLSQGWAQ

SEQ ID NO: 1317 - protein, 11 aa, Artificial Sequence
  Description of Artificial Sequence: Synthetic peptide
AQMNATKNVAQ

SEQ ID NO: 1318 - protein, 11 aa, Artificial Sequence
  Description of Artificial Sequence: Synthetic peptide
AQVSGGHHSAQ

SEQ ID NO: 1319 - protein, 11 aa, Artificial Sequence
  Description of Artificial Sequence: Synthetic peptide
AQTLTAPFKAQ

SEQ ID NO: 1320 - protein, 11 aa, Artificial Sequence
  Description of Artificial Sequence: Synthetic peptide
AQTLSKPFKAQ

SEQ ID NO: 1321 - protein, 7 aa, Artificial Sequence
  Description of Artificial Sequence: Synthetic peptide
QAVRTSL

SEQ ID NO: 1322 - protein, 7 aa, Artificial Sequence
  Description of Artificial Sequence: Synthetic peptide
LAKERLS

SEQ ID NO: 1323 - protein, 7 aa, Artificial Sequence
  Description of Artificial Sequence: Synthetic peptide
MNSTKNV

SEQ ID NO: 1324 - protein, 7 aa, Artificial Sequence
  Description of Artificial Sequence: Synthetic peptide
VSGGHHS

SEQ ID NO: 1325 - protein, 14 aa, Artificial Sequence
  Description of Artificial Sequence: Synthetic peptide
SAQTLAVPFKAQAQ

SEQ ID NO: 1326 - protein, 14 aa, Artificial Sequence
  Description of Artificial Sequence: Synthetic peptide
  MOD_RES (2)..(4): Any amino acid
SXXXLAVPFKAQAQ

SEQ ID NO: 1327 - protein, 14 aa, Artificial Sequence
  Description of Artificial Sequence: Synthetic peptide
  MOD_RES (4)..(6): Any amino acid
SAQXXXVPFKAQAQ

SEQ ID NO: 1328 - protein, 14 aa, Artificial Sequence
  Description of Artificial Sequence: Synthetic peptide
  MOD_RES (6)..(8): Any amino acid
SAQTLXXXFKAQAQ

SEQ ID NO: 1329 - protein, 14 aa, Artificial Sequence
  Description of Artificial Sequence: Synthetic peptide
  MOD_RES (8)..(10): Any amino acid
SAQTLAVXXXAQAQ

SEQ ID NO: 1330 - protein, 14 aa, Artificial Sequence
  Description of Artificial Sequence: Synthetic peptide
  MOD_RES (10)..(12): Any amino acid
SAQTLAVPFXXXAQ

SEQ ID NO: 1331 - protein, 7 aa, Artificial Sequence
  Description of Artificial Sequence: Synthetic peptide
TNHQSAQ

SEQ ID NO: 1332 - protein, 7 aa, Artificial Sequence
  Description of Artificial Sequence: Synthetic peptide
AQAQTGW

SEQ ID NO: 1333 - protein, 9 aa, Artificial Sequence
  Description of Artificial Sequence: Synthetic peptide
DGTLATPFK

SEQ ID NO: 1334 - protein, 11 aa, Artificial Sequence
  Description of Artificial Sequence: Synthetic peptide
  MOD_RES (10)..(11): Any amino acid
DGTLATPFKXX

SEQ ID NO: 1335 - protein, 8 aa, Artificial Sequence
  Description of Artificial Sequence: Synthetic peptide
LAVPFKAQ

SEQ ID NO: 1336 - protein, 6 aa, Artificial Sequence
  Description of Artificial Sequence: Synthetic peptide
VPFKAQ

SEQ ID NO: 1337 - protein, 4 aa, Artificial Sequence
  Description of Artificial Sequence: Synthetic peptide
FKAQ

SEQ ID NO: 1338 - protein, 6 aa, Artificial Sequence
  Description of Artificial Sequence: Synthetic peptide
AQTLAV

SEQ ID NO: 1339 - protein, 8 aa, Artificial Sequence
  Description of Artificial Sequence: Synthetic peptide
AQTLAVPF

SEQ ID NO: 1340 - protein, 4 aa, Artificial Sequence
  Description of Artificial Sequence: Synthetic peptide
QAVR

SEQ ID NO: 1341 - protein, 4 aa, Artificial Sequence
  Description of Artificial Sequence: Synthetic peptide
AVRT

SEQ ID NO: 1342 - protein, 4 aa, Artificial Sequence
  Description of Artificial Sequence: Synthetic peptide
VRTS

SEQ ID NO: 1343 - protein, 4 aa, Artificial Sequence
  Description of Artificial Sequence: Synthetic peptide
RTSL

SEQ ID NO: 1344 - protein, 5 aa, Artificial Sequence
  Description of Artificial Sequence: Synthetic peptide
QAVRT

SEQ ID NO: 1345 - protein, 5 aa, Artificial Sequence
  Description of Artificial Sequence: Synthetic peptide
AVRTS

SEQ ID NO: 1346 - protein, 5 aa, Artificial Sequence
  Description of Artificial Sequence: Synthetic peptide
VRTSL

SEQ ID NO: 1347 - protein, 6 aa, Artificial Sequence
  Description of Artificial Sequence: Synthetic peptide
QAVRTS

SEQ ID NO: 1348 - protein, 6 aa, Artificial Sequence
  Description of Artificial Sequence: Synthetic peptide
AVRTSL

SEQ ID NO: 1349 - DNA, 33 bp, Artificial Sequence
  Description of Artificial Sequence: Synthetic oligonucleotide
gatgggactttggcggtgccttttaaggcacag

SEQ ID NO: 1350 - DNA, 33 bp, Artificial Sequence
  Description of Artificial Sequence: Synthetic oligonucleotide
gatgggacgttggcggtgccttttaaggcacag

SEQ ID NO: 1351 - DNA, 21 bp, Artificial Sequence
  Description of Artificial Sequence: Synthetic oligonucleotide
caggcggttaggacgtctttg

SEQ ID NO: 1352 - DNA, 27 bp, Artificial Sequence
  Description of Artificial Sequence: Synthetic oligonucleotide
caggtcttcacggactcagactatcag

SEQ ID NO: 1353 - DNA, 32 bp, Artificial Sequence
  Description of Artificial Sequence: Synthetic oligonucleotide
caagtaaaacctctacaaatgtggtaaaatcg

SEQ ID NO: 1354 - DNA, 36 bp, Artificial Sequence
  Description of Artificial Sequence: Synthetic oligonucleotide
actcatcgaccaatacttgtactatctctctagaac

SEQ ID NO: 1355 - DNA, 26 bp, Artificial Sequence
  Description of Artificial Sequence: Synthetic oligonucleotide
ggaagtattccttggttttgaaccca

SEQ ID NO: 1356 - DNA, 23 bp, Artificial Sequence
  Description of Artificial Sequence: Synthetic oligonucleotide
ggtcgcggttcttgtttgtggat

SEQ ID NO: 1357 - DNA, 24 bp, Artificial Sequence
  Description of Artificial Sequence: Synthetic oligonucleotide
cgaccttgaagcgcatgaactcct

SEQ ID NO: 1358 - DNA, 83 bp, Artificial Sequence
  Description of Artificial Sequence: Synthetic oligonucleotide
  modified_base (42)..(43): a, c, t, or g
  modified_base (45)..(46): a, c, t, or g
  modified_base (48)..(49): a, c, t, or g
  modified_base (51)..(52): a, c, t, or g
  modified_base (54)..(55): a, c, t, or g
  modified_base (57)..(58): a, c, t, or g
  modified_base (60)..(61): a, c, t, or g
gtattccttggttttgaacccaaccggtctgcgcctgtgcmnnmnnmnnmnnmnnmnnmnnttgggcactctggtggtttgtc

SEQ ID NO: 1359 - DNA, 64 bp, Artificial Sequence
  Description of Artificial Sequence: Synthetic oligonucleotide
  modified_base (36)..(37): a, c, t, or g
  modified_base (39)..(40): a, c, t, or g
  modified_base (42)..(43): a, c, t, or g
gtattccttggttttgaacccaaccggtctgcgcmnnmnnmnnaaaaggcaccgccaaagtttg

SEQ ID NO: 1360 - DNA, 70 bp, Artificial Sequence
  Description of Artificial Sequence: Synthetic oligonucleotide
  modified_base (42)..(43): a, c, t, or g
  modified_base (45)..(46): a, c, t, or g
  modified_base (48)..(49): a, c, t, or g
gtattccttggttttgaacccaaccggtctgcgcctgtgcmnnmnnmnncaccgccaaagtttgggcact

SEQ ID NO: 1361 - DNA, 77 bp, Artificial Sequence
  Description of Artificial Sequence: Synthetic oligonucleotide
  modified_base (48)..(49): a, c, t, or g
  modified_base (51)..(52): a, c, t, or g
  modified_base (54)..(55): a, c, t, or g
gtattccttggttttgaacccaaccggtctgcgcctgtgccttaaamnnmnnmnncaaagtttgggcactctggtgg

SEQ ID NO: 1362 - DNA, 83 bp, Artificial Sequence
  Description of Artificial Sequence: Synthetic oligonucleotide
  modified_base (54)..(55): a, c, t, or g
  modified_base (57)..(58): a, c, t, or g
  modified_base (60)..(61): a, c, t, or g
gtattccttggttttgaacccaaccggtctgcgcctgtgccttaaaaggcacmnnmnnmnnttgggcactctggtggtttgtg

SEQ ID NO: 1363 - DNA, 21 bp, Artificial Sequence
  Description of Artificial Sequence: Synthetic oligonucleotide
cttgcgaaggagcggctttcg

SEQ ID NO: 1364 - protein, 10 aa, Artificial Sequence
  Description of Artificial Sequence: Synthetic peptide
VNLTWSRASG

SEQ ID NO: 1365 - protein, 14 aa, Artificial Sequence
  Description of Artificial Sequence: Synthetic peptide
EFCINHRGYWVCGD

SEQ ID NO: 1366 - protein, 11 aa, Artificial Sequence
  Description of Artificial Sequence: Synthetic peptide
EDGQVMDVDLS

SEQ ID NO: 1367 - protein, 9 aa, Artificial Sequence
  Description of Artificial Sequence: Synthetic peptide
EKQRNGTLT

SEQ ID NO: 1368 - protein, 17 aa, Artificial Sequence
  Description of Artificial Sequence: Synthetic peptide
TYQCRVTHPHLPRALMR

SEQ ID NO: 1369 - protein, 14 aa, Artificial Sequence
  Description of Artificial Sequence: Synthetic peptide
RHSTTQPRKTKGSG

SEQ ID NO: 1370 - protein, 13 aa, Artificial Sequence
  Description of Artificial Sequence: Synthetic peptide
DSNPRGVSAYLSR

SEQ ID NO: 1371 - protein, 12 aa, Artificial Sequence
  Description of Artificial Sequence: Synthetic peptide
TITCLWDLAPSK

SEQ ID NO: 1372 - protein, 10 aa, Artificial Sequence
  Description of Artificial Sequence: Synthetic peptide
KTKGSGFFVF

SEQ ID NO: 1373 - protein, 12 aa, Artificial Sequence
  Description of Artificial Sequence: Synthetic peptide
THPHLPRALMRS

SEQ ID NO: 1374 - protein, 23 aa, Artificial Sequence
  Description of Artificial Sequence: Synthetic peptide
GETYQCRVTHPHLPRALMRSTTK

SEQ ID NO: 1375 - protein, 8 aa, Artificial Sequence
  Description of Artificial Sequence: Synthetic peptide
LPRALMRS

SEQ ID NO: 1376 - protein, 8 aa, Artificial Sequence
  Description of Artificial Sequence: Synthetic peptide
INHRGYWV

SEQ ID NO: 1377 - protein, 12 aa, Artificial Sequence
  Description of Artificial Sequence: Synthetic peptide
CDAGSVRTNAPD

SEQ ID NO: 1378 - protein, 17 aa, Artificial Sequence
  Description of Artificial Sequence: Synthetic peptide
AKAVSNLTESRSESLQS

SEQ ID NO: 1379 - protein, 13 aa, Artificial Sequence
  Description of Artificial Sequence: Synthetic peptide
SLTGDEFKKVLET

SEQ ID NO: 1380 - protein, 11 aa, Artificial Sequence
  Description of Artificial Sequence: Synthetic peptide
REAVAYRFEED

SEQ ID NO: 1381 - protein, 10 aa, Artificial Sequence
  Description of Artificial Sequence: Synthetic peptide
INPEIITLDG

SEQ ID NO: 1382 - protein, 15 aa, Artificial Sequence
  Description of Artificial Sequence: Synthetic peptide
DISVTGAPVITATYL

SEQ ID NO: 1383 - protein, 12 aa, Artificial Sequence
  Description of Artificial Sequence: Synthetic peptide
DISVTGAPVITA

SEQ ID NO: 1384 - protein, 17 aa, Artificial Sequence
  Description of Artificial Sequence: Synthetic peptide
PKTVSNLTESSSESVQS

SEQ ID NO: 1385 - protein, 13 aa, Artificial Sequence
  Description of Artificial Sequence: Synthetic peptide
SLMGDEFKAVLET

SEQ ID NO: 1386 - protein, 11 aa, Artificial Sequence
  Description of Artificial Sequence: Synthetic peptide
QHSVAYTFEED

SEQ ID NO: 1387 - protein, 10 aa, Artificial Sequence
  Description of Artificial Sequence: Synthetic peptide
INPEIITRDG

SEQ ID NO: 1388 - protein, 15 aa, Artificial Sequence
  Description of Artificial Sequence: Synthetic peptide
DISLTGDPVITASYL

SEQ ID NO: 1389 - protein, 12 aa, Artificial Sequence
  Description of Artificial Sequence: Synthetic peptide
DISLTGDPVITA

SEQ ID NO: 1390 - protein, 11 aa, Artificial Sequence
  Description of Artificial Sequence: Synthetic peptide
DQSIDFEIDSA

SEQ ID NO: 1391 - protein, 20 aa, Artificial Sequence
  Description of Artificial Sequence: Synthetic peptide
KNVSEDLPLPTFSPTLLGDS

SEQ ID NO: 1392 - protein, 11 aa, Artificial Sequence
  Description of Artificial Sequence: Synthetic peptide
KNVSEDLPLPT

SEQ ID NO: 1393 - protein, 12 aa, Artificial Sequence
  Description of Artificial Sequence: Synthetic peptide
CDSGRVRTDAPD

SEQ ID NO: 1394 - protein, 14 aa, Artificial Sequence
  Description of Artificial Sequence: Synthetic peptide
FPEHLLVDFLQSLS

SEQ ID NO: 1395 - protein, 9 aa, Artificial Sequence
  Description of Artificial Sequence: Synthetic peptide
DAEFRHDSG

SEQ ID NO: 1396 - protein, 16 aa, Artificial Sequence
  Description of Artificial Sequence: Synthetic peptide
HYAAAQWDFGNTMCQL

SEQ ID NO: 1397 - protein, 13 aa, Artificial Sequence
  Description of Artificial Sequence: Synthetic peptide
YAAQWDFGNTMCQ

SEQ ID NO: 1398 - protein, 10 aa, Artificial Sequence
  Description of Artificial Sequence: Synthetic peptide
RSQKEGLHYT

SEQ ID NO: 1399 - protein, 19 aa, Artificial Sequence
  Description of Artificial Sequence: Synthetic peptide
SSRTPSDKPVAHWANPQAE

SEQ ID NO: 1400 - protein, 15 aa, Artificial Sequence
  Description of Artificial Sequence: Synthetic peptide
SRTPSDKPVAHWANP

SEQ ID NO: 1401 - protein, 9 aa, Artificial Sequence
  Description of Artificial Sequence: Synthetic peptide
SSRTPSDKP

SEQ ID NO: 1402 - protein, 14 aa, Artificial Sequence
  Description of Artificial Sequence: Synthetic peptide
NADGNVDYHMNSVP

SEQ ID NO: 1403 - protein, 11 aa, Artificial Sequence
  Description of Artificial Sequence: Synthetic peptide
DGNVDYHMNSV

SEQ ID NO: 1404 - protein, 16 aa, Artificial Sequence
  Description of Artificial Sequence: Synthetic peptide
RSFKEFLQSSLRALRQ

SEQ ID NO: 1405 - protein, 11 aa, Artificial Sequence
  Description of Artificial Sequence: Synthetic peptide
FKEFLQSSLRA

SEQ ID NO: 1406 - protein, 10 aa, Artificial Sequence
  Description of Artificial Sequence: Synthetic peptide
QMWAPQWGPD

SEQ ID NO: 1407 - protein, 6 aa, Artificial Sequence
  Description of Artificial Sequence: Synthetic peptide
RGNRQA

SEQ ID NO: 1408 - protein, 6 aa, Artificial Sequence
  Description of Artificial Sequence: Synthetic peptide
SSSTDP

SEQ ID NO: 1409 - protein, 6 aa, Artificial Sequence
  Description of Artificial Sequence: Synthetic peptide
SSNTAP

SEQ ID NO: 1410 - protein, 6 aa, Artificial Sequence
  Description of Artificial Sequence: Synthetic peptide
SNSNLP

SEQ ID NO: 1411 - protein, 6 aa, Artificial Sequence
  Description of Artificial Sequence: Synthetic peptide
SSTTAP

SEQ ID NO: 1412 - protein, 6 aa, Artificial Sequence
  Description of Artificial Sequence: Synthetic peptide
AANTAA

SEQ ID NO: 1413 - protein, 6 aa, Artificial Sequence
  Description of Artificial Sequence: Synthetic peptide
QQNTAP

SEQ ID NO: 1414 - protein, 6 aa, Artificial Sequence
  Description of Artificial Sequence: Synthetic peptide
SAQAQA

SEQ ID NO: 1415 - protein, 6 aa, Artificial Sequence
  Description of Artificial Sequence: Synthetic peptide
QANTGP

SEQ ID NO: 1416 - protein, 6 aa, Artificial Sequence
  Description of Artificial Sequence: Synthetic peptide
NATTAP

SEQ ID NO: 1417 - protein, 6 aa, Artificial Sequence
  Description of Artificial Sequence: Synthetic peptide
SSTAGP

SEQ ID NO: 1418 - protein, 6 aa, Artificial Sequence
  Description of Artificial Sequence: Synthetic peptide
QQNTAA

SEQ ID NO: 1419 - protein, 6 aa, Artificial Sequence
  Description of Artificial Sequence: Synthetic peptide
PSTAGP

SEQ ID NO: 1420 - protein, 6 aa, Artificial Sequence
  Description of Artificial Sequence: Synthetic peptide
NQNTAP

SEQ ID NO: 1421 - protein, 6 aa, Artificial Sequence
  Description of Artificial Sequence: Synthetic peptide
QAANAP

SEQ ID NO: 1422 - protein, 6 aa, Artificial Sequence
  Description of Artificial Sequence: Synthetic peptide
SIVGLP

SEQ ID NO: 1423 - protein, 6 aa, Artificial Sequence
  Description of Artificial Sequence: Synthetic peptide
AASTAA

SEQ ID NO: 1424 - protein, 6 aa, Artificial Sequence
  Description of Artificial Sequence: Synthetic peptide
SQNTTA

SEQ ID NO: 1425 - protein, 6 aa, Artificial Sequence
  Description of Artificial Sequence: Synthetic peptide
QQDTAP

SEQ ID NO: 1426 - protein, 6 aa, Artificial Sequence
  Description of Artificial Sequence: Synthetic peptide
QTNTGP

SEQ ID NO: 1427 - protein, 6 aa, Artificial Sequence
  Description of Artificial Sequence: Synthetic peptide
QTNGAP

SEQ ID NO: 1428 - protein, 6 aa, Artificial Sequence
  Description of Artificial Sequence: Synthetic peptide
QQNAAP

SEQ ID NO: 1429 - protein, 6 aa, Artificial Sequence
  Description of Artificial Sequence: Synthetic peptide
AANTQA

SEQ ID NO: 1430 - protein, 6 aa, Artificial Sequence
  Description of Artificial Sequence: Synthetic peptide
NGRAHA

SEQ ID NO: 1431 - protein, 7 aa, Artificial Sequence
  Description of Artificial Sequence: Synthetic peptide
QPEHSST

SEQ ID NO: 1432 - protein, 7 aa, Artificial Sequence
  Description of Artificial Sequence: Synthetic peptide
VNTANST

SEQ ID NO: 1433 - protein, 7 aa, Artificial Sequence
  Description of Artificial Sequence: Synthetic peptide
HGPMQKS

SEQ ID NO: 1434 - protein, 7 aa, Artificial Sequence
  Description of Artificial Sequence: Synthetic peptide
PHKPPLA

SEQ ID NO: 1435 - protein, 7 aa, Artificial Sequence
  Description of Artificial Sequence: Synthetic peptide
IKNNEMW

SEQ ID NO: 1436 - protein, 7 aa, Artificial Sequence
  Description of Artificial Sequence: Synthetic peptide
RNLDTPM

SEQ ID NO: 1437 - protein, 7 aa, Artificial Sequence
  Description of Artificial Sequence: Synthetic peptide
VDSHRQS

SEQ ID NO: 1438 - protein, 7 aa, Artificial Sequence
  Description of Artificial Sequence: Synthetic peptide
YDSKTKT

SEQ ID NO: 1439 - protein, 7 aa, Artificial Sequence
  Description of Artificial Sequence: Synthetic peptide
SQLPHQK

SEQ ID NO: 1440 - protein, 7 aa, Artificial Sequence
  Description of Artificial Sequence: Synthetic peptide
STMQQNT

SEQ ID NO: 1441 - protein, 7 aa, Artificial Sequence
  Description of Artificial Sequence: Synthetic peptide
TERYMTQ

SEQ ID NO: 1442 - protein, 7 aa, Artificial Sequence
  Description of Artificial Sequence: Synthetic peptide
DASLSTS

SEQ ID NO: 1443 - protein, 7 aa, Artificial Sequence
  Description of Artificial Sequence: Synthetic peptide
DLPNKKT

SEQ ID NO: 1444 - protein, 7 aa, Artificial Sequence
  Description of Artificial Sequence: Synthetic peptide
DLTAARL

SEQ ID NO: 1445 - protein, 7 aa, Artificial Sequence
  Description of Artificial Sequence: Synthetic peptide
EPHQFNY

SEQ ID NO: 1446 - protein, 7 aa, Artificial Sequence
  Description of Artificial Sequence: Synthetic peptide
EPQSNHT

SEQ ID NO: 1447 - protein, 7 aa, Artificial Sequence
  Description of Artificial Sequence: Synthetic peptide
MSSWPSQ

SEQ ID NO: 1448 - protein, 7 aa, Artificial Sequence
  Description of Artificial Sequence: Synthetic peptide
NPKHNAT

SEQ ID NO: 1449 - protein, 7 aa, Artificial Sequence
  Description of Artificial Sequence: Synthetic peptide
PDGMRTT

SEQ ID NO: 1450 - protein, 7 aa, Artificial Sequence
  Description of Artificial Sequence: Synthetic peptide
PNNNKTT

SEQ ID NO: 1451 - protein, 7 aa, Artificial Sequence
  Description of Artificial Sequence: Synthetic peptide
QSTTHDS

SEQ ID NO: 1452 - protein, 7 aa, Artificial Sequence
  Description of Artificial Sequence: Synthetic peptide
TGSKQKQ

SEQ ID NO: 1453 - protein, 7 aa, Artificial Sequence
  Description of Artificial Sequence: Synthetic peptide
SLKHQAL

SEQ ID NO: 1454 - protein, 7 aa, Artificial Sequence
  Description of Artificial Sequence: Synthetic peptide
SPIDGEQ

SEQ ID NO: 1455 - protein, 8 aa, Artificial Sequence
  Description of Artificial Sequence: Synthetic peptide
WIFPWIQL

SEQ ID NO: 1456 - protein, 9 aa, Artificial Sequence
  Description of Artificial Sequence: Synthetic peptide
CDCRGDCFC

SEQ ID NO: 1457 - protein, 5 aa, Artificial Sequence
  Description of Artificial Sequence: Synthetic peptide
CNGRC

SEQ ID NO: 1458 - protein, 7 aa, Artificial Sequence
  Description of Artificial Sequence: Synthetic peptide
CPRECES

SEQ ID NO: 1459 - protein, 10 aa, Artificial Sequence
  Description of Artificial Sequence: Synthetic peptide
CTTHWGFTLC

SEQ ID NO: 1460 - protein, 9 aa, Artificial Sequence
  Description of Artificial Sequence: Synthetic peptide
CGRRAGGSC

SEQ ID NO: 1461 - protein, 9 aa, Artificial Sequence
  Description of Artificial Sequence: Synthetic peptide
CKGGRAKDC

SEQ ID NO: 1462 - protein, 9 aa, Artificial Sequence
  Description of Artificial Sequence: Synthetic peptide
CVPELGHEC

SEQ ID NO: 1463 - protein, 9 aa, Artificial Sequence
  Description of Artificial Sequence: Synthetic peptide
CRRETAWAK

SEQ ID NO: 1464 - protein, 14 aa, Artificial Sequence
  Description of Artificial Sequence: Synthetic peptide
VSWFSHRYSPFAVS

SEQ ID NO: 1465 - protein, 13 aa, Artificial Sequence
  Description of Artificial Sequence: Synthetic peptide
GYRDGYAGPILYN

SEQ ID NO: 1466 - protein, 7 aa, Artificial Sequence
  Description of Artificial Sequence: Synthetic peptide
  MOD_RES (1)..(3): Any amino acid
  MOD_RES (5)..(7): Any amino acid
XXXYXXX

SEQ ID NO: 1467 - protein, 4 aa, Artificial Sequence
  Description of Artificial Sequence: Synthetic peptide
  MOD_RES (2)..(2): Glu or Met
YXNW

SEQ ID NO: 1468 - protein, 7 aa, Artificial Sequence
  Description of Artificial Sequence: Synthetic peptide
RPLPPLP

SEQ ID NO: 1469 - protein, 7 aa, Artificial Sequence
  Description of Artificial Sequence: Synthetic peptide
APPLPPR

SEQ ID NO: 1470 - protein, 12 aa, Artificial Sequence
  Description of Artificial Sequence: Synthetic peptide
DVFYPYPYASGS

SEQ ID NO: 1471 - protein, 6 aa, Artificial Sequence
  Description of Artificial Sequence: Synthetic peptide
MYWYPY

SEQ ID NO: 1472 - protein, 12 aa, Artificial Sequence
  Description of Artificial Sequence: Synthetic peptide
DITWDQLWDLMK

SEQ ID NO: 1473 - protein, 8 aa, Artificial Sequence
  Description of Artificial Sequence: Synthetic peptide
  MOD_RES (5)..(5): Gly or Leu
CWDDXWLC

SEQ ID NO: 1474 - protein, 14 aa, Artificial Sequence
  Description of Artificial Sequence: Synthetic peptide
EWCEYLGGYLRCYA

SEQ ID NO: 1475 - protein, 14 aa, Artificial Sequence
  Description of Artificial Sequence: Synthetic peptide
  MOD_RES (2)..(2): Any amino acid
  MOD_RES (4)..(5): Any amino acid
  MOD_RES (8)..(8): Any amino acid
  MOD_RES (11)..(11): Any amino acid
  MOD_RES (13)..(13): Any amino acid
YXCXXGPXTWXCXP

SEQ ID NO: 1476 - protein, 14 aa, Artificial Sequence
  Description of Artificial Sequence: Synthetic peptide
IEGPTLRQWLAARA

SEQ ID NO: 1477 - protein, 5 aa, Artificial Sequence
  Description of Artificial Sequence: Synthetic peptide
  MOD_RES (3)..(4): Any amino acid
  MOD_RES (5)..(5): Tyr, Trp, Phe, or His
LWXXX

SEQ ID NO: 1478 - protein, 7 aa, Artificial Sequence
  Description of Artificial Sequence: Synthetic peptide
  MOD_RES (1)..(1): Any amino acid
  MOD_RES (3)..(4): Any amino acid
XFXXYLW

SEQ ID NO: 1479 - protein, 13 aa, Artificial Sequence
  Description of Artificial Sequence: Synthetic peptide
SSIISHFRWGLCD

SEQ ID NO: 1480 - protein, 13 aa, Artificial Sequence
  Description of Artificial Sequence: Synthetic peptide
MSRPACPPNDKYE

SEQ ID NO: 1481 - protein, 8 aa, Artificial Sequence
  Description of Artificial Sequence: Synthetic peptide
CLRSGRGC

SEQ ID NO: 1482 - protein, 9 aa, Artificial Sequence
  Description of Artificial Sequence: Synthetic peptide
CHWMFSPWC

SEQ ID NO: 1483 - protein, 4 aa, Artificial Sequence
  Description of Artificial Sequence: Synthetic peptide
  MOD_RES (2)..(3): Any amino acid
WXXF

SEQ ID NO: 1484 - protein, 8 aa, Artificial Sequence
  Description of Artificial Sequence: Synthetic peptide
CSSRLDAC

SEQ ID NO: 1485 - protein, 7 aa, Artificial Sequence
  Description of Artificial Sequence: Synthetic peptide
CLPVASC

SEQ ID NO: 1486 - protein, 13 aa, Artificial Sequence
  Description of Artificial Sequence: Synthetic peptide
CGFECVRQCPERC

SEQ ID NO: 1487 - protein, 13 aa, Artificial Sequence
  Description of Artificial Sequence: Synthetic peptide
CVALCREACGEGC

SEQ ID NO: 1488 - protein, 9 aa, Artificial Sequence
  Description of Artificial Sequence: Synthetic peptide
SWCEPGWCR

SEQ ID NO: 1489 - protein, 7 aa, Artificial Sequence
  Description of Artificial Sequence: Synthetic peptide
YSGKWGW

SEQ ID NO: 1490 - protein, 7 aa, Artificial Sequence
  Description of Artificial Sequence: Synthetic peptide
GLSGGRS

SEQ ID NO: 1491 - protein, 7 aa, Artificial Sequence
  Description of Artificial Sequence: Synthetic peptide
LMLPRAD

SEQ ID NO: 1492 - protein, 9 aa, Artificial Sequence
  Description of Artificial Sequence: Synthetic peptide
CSCFRDVCC

SEQ ID NO: 1493 - protein, 9 aa, Artificial Sequence
  Description of Artificial Sequence: Synthetic peptide
CRDVVSVIC

SEQ ID NO: 1494 - protein, 6 aa, Artificial Sequence
  Description of Artificial Sequence: Synthetic peptide
MARSGL

SEQ ID NO: 1495 - protein, 6 aa, Artificial Sequence
  Description of Artificial Sequence: Synthetic peptide
MARAKE

SEQ ID NO: 1496 - protein, 6 aa, Artificial Sequence
  Description of Artificial Sequence: Synthetic peptide
MSRTMS

SEQ ID NO: 1497 - protein, 6 aa, Artificial Sequence
  Description of Artificial Sequence: Synthetic peptide
KCCYSL

SEQ ID NO: 1498 - protein, 14 aa, Artificial Sequence
  Description of Artificial Sequence: Synthetic peptide
MYWGDSHWLQYWYE

SEQ ID NO: 1499 - protein, 7 aa, Artificial Sequence
  Description of Artificial Sequence: Synthetic peptide
MQLPLAT

SEQ ID NO: 1500 - protein, 4 aa, Artificial Sequence
  Description of Artificial Sequence: Synthetic peptide
EWLS

SEQ ID NO: 1501 - protein, 4 aa, Artificial Sequence
  Description of Artificial Sequence: Synthetic peptide
SNEW

SEQ ID NO: 1502 - protein, 4 aa, Artificial Sequence
  Description of Artificial Sequence: Synthetic peptide
TNYL

SEQ ID NO: 1503 - protein, 12 aa, Artificial Sequence
  Description of Artificial Sequence: Synthetic peptide
WDLAWMFRLPVG

SEQ ID NO: 1504 - protein, 13 aa, Artificial Sequence
  Description of Artificial Sequence: Synthetic peptide
CTVALPGGYVRVC

SEQ ID NO: 1505 - protein, 13 aa, Artificial Sequence
  Description of Artificial Sequence: Synthetic peptide
CVAYCIEHHCWTC

SEQ ID NO: 1506 - protein, 12 aa, Artificial Sequence
  Description of Artificial Sequence: Synthetic peptide
CVFAHNYDYLVC

SEQ ID NO: 1507 - protein, 10 aa, Artificial Sequence
  Description of Artificial Sequence: Synthetic peptide
CVFTSNYAFC

SEQ ID NO: 1508 - protein, 7 aa, Artificial Sequence
  Description of Artificial Sequence: Synthetic peptide
VHSPNKK

SEQ ID NO: 1509 - protein, 7 aa, Artificial Sequence
  Description of Artificial Sequence: Synthetic peptide
CRGDGWC

SEQ ID NO: 1510 - protein, 6 aa, Artificial Sequence
  Description of Artificial Sequence: Synthetic peptide
  MOD_RES (1)..(1): Any amino acid
  MOD_RES (6)..(6): Any amino acid
XRGCDX

SEQ ID NO: 1511 - protein, 4 aa, Artificial Sequence
  Description of Artificial Sequence: Synthetic peptide
  MOD_RES (2)..(3): Any amino acid
  MOD_RES (4)..(4): Ser or Thr
PXXX

SEQ ID NO: 1512 - protein, 11 aa, Artificial Sequence
  Description of Artificial Sequence: Synthetic peptide
SGKGPRQITAL

SEQ ID NO: 1513 - protein, 14 aa, Artificial Sequence
  Description of Artificial Sequence: Synthetic peptide
  MOD_RES (10)..(10): Ala or Gln
  MOD_RES (11)..(11): Asn or Ala
  MOD_RES (12)..(12): Leu or Tyr
  MOD_RES (13)..(13): Thr, Val, Met, or Arg
  MOD_RES (14)..(14): Arg or Lys
AAAAAAAAAXXXXX

SEQ ID NO: 1514 - protein, 6 aa, Artificial Sequence
  Description of Artificial Sequence: Synthetic peptide
VYMSPF

SEQ ID NO: 1515 - protein, 7 aa, Artificial Sequence
  Description of Artificial Sequence: Synthetic peptide
ATWLPPR

SEQ ID NO: 1516 - protein, 12 aa, Artificial Sequence
  Description of Artificial Sequence: Synthetic peptide
HTMYYHHYQHHL

SEQ ID NO: 1517 - protein, 19 aa, Artificial Sequence
  Description of Artificial Sequence: Synthetic peptide
SEVGCRAGPLQWLCEKYFG

SEQ ID NO: 1518 - protein, 18 aa, Artificial Sequence
  Description of Artificial Sequence: Synthetic peptide
CGLLPVGRPDRNVWRWLC

SEQ ID NO: 1519 - protein, 15 aa, Artificial Sequence
  Description of Artificial Sequence: Synthetic peptide
CKGQCDRFKGLPWEC

SEQ ID NO: 1520 - protein, 5 aa, Artificial Sequence
  Description of Artificial Sequence: Synthetic peptide
SGRSA

SEQ ID NO: 1521 - protein, 4 aa, Artificial Sequence
  Description of Artificial Sequence: Synthetic peptide
WGFP

SEQ ID NO: 1522 - protein, 17 aa, Artificial Sequence
  Description of Artificial Sequence: Synthetic peptide
AEPMPHSLNFSQYLWYT

SEQ ID NO: 1523 - protein, 6 aa, Artificial Sequence
  Description of Artificial Sequence: Synthetic peptide
  MOD_RES (4)..(4): Trp or Phe
WAYXSP

SEQ ID NO: 1524 - protein, 7 aa, Artificial Sequence
  Description of Artificial Sequence: Synthetic peptide
IELLQAR

SEQ ID NO: 1525 - protein, 16 aa, Artificial Sequence
  Description of Artificial Sequence: Synthetic peptide
AYTKCSRQWRTCMTTH

SEQ ID NO: 1526 - protein, 15 aa, Artificial Sequence
  Description of Artificial Sequence: Synthetic peptide
PQNSKIPGPTFLDPH

SEQ ID NO: 1527 - protein, 15 aa, Artificial Sequence
  Description of Artificial Sequence: Synthetic peptide
SMEPALPDWWWKMFK

SEQ ID NO: 1528 - protein, 16 aa, Artificial Sequence
  Description of Artificial Sequence: Synthetic peptide
ANTPCGPYTHDCPVKR

SEQ ID NO: 1529 - protein, 12 aa, Artificial Sequence
  Description of Artificial Sequence: Synthetic peptide
TACHQHVRMVRP

SEQ ID NO: 1530 - protein, 12 aa, Artificial Sequence
  Description of Artificial Sequence: Synthetic peptide
VPWMEPAYQRFL

SEQ ID NO: 1531 - protein, 8 aa, Artificial Sequence
  Description of Artificial Sequence: Synthetic peptide
DPRATPGS

SEQ ID NO: 1532 - protein, 12 aa, Artificial Sequence
  Description of Artificial Sequence: Synthetic peptide
FRPNRAQDYNTN

SEQ ID NO: 1533 - protein, 9 aa, Artificial Sequence
  Description of Artificial Sequence: Synthetic peptide
CTKNSYLMC

SEQ ID NO: 1534 - protein, 11 aa, Artificial Sequence
  Description of Artificial Sequence: Synthetic peptide
  MOD_RES (2)..(2): Gln or Arg
  MOD_RES (3)..(3): Leu or Arg
  MOD_RES (5)..(5): Gly or Asn
  MOD_RES (6)..(7): Any amino acid
  MOD_RES (9)..(9): Ala or Val
CXXTXXXGXGC

SEQ ID NO: 1535 - protein, 9 aa, Artificial Sequence
  Description of Artificial Sequence: Synthetic peptide
CPIEDRPMC

SEQ ID NO: 1536 - protein, 12 aa, Artificial Sequence
  Description of Artificial Sequence: Synthetic peptide
HEWSYLAPYPWF

SEQ ID NO: 1537 - protein, 9 aa, Artificial Sequence
  Description of Artificial Sequence: Synthetic peptide
MCPKHPLGC

SEQ ID NO: 1538 - protein, 15 aa, Artificial Sequence
  Description of Artificial Sequence: Synthetic peptide
RMWPSSTVNLSAGRR

SEQ ID NO: 1539 - protein, 20 aa, Artificial Sequence
  Description of Artificial Sequence: Synthetic peptide
SAKTAVSQRVWLPSHRGGEP

SEQ ID NO: 1540 - protein, 20 aa, Artificial Sequence
  Description of Artificial Sequence: Synthetic peptide
KSREHVNNSACPSKRITAAL

SEQ ID NO: 1541 - protein, 4 aa, Artificial Sequence
  Description of Artificial Sequence: Synthetic peptide
EGFR

SEQ ID NO: 1542 - protein, 6 aa, Artificial Sequence
  Description of Artificial Sequence: Synthetic peptide
AGLGVR

SEQ ID NO: 1543 - protein, 15 aa, Artificial Sequence
  Description of Artificial Sequence: Synthetic peptide
GTRQGHTMRLGVSDG

SEQ ID NO: 1544 - protein, 15 aa, Artificial Sequence
  Description of Artificial Sequence: Synthetic peptide
IAGLATPGWSHWLAL

SEQ ID NO: 1545 - protein, 7 aa, Artificial Sequence
  Description of Artificial Sequence: Synthetic peptide
SMSIARL

SEQ ID NO: 1546 - protein, 7 aa, Artificial Sequence
  Description of Artificial Sequence: Synthetic peptide
HTFEPGV

SEQ ID NO: 1547 - protein, 15 aa, Artificial Sequence
  Description of Artificial Sequence: Synthetic peptide
NTSLKRISNKRIRRK

SEQ ID NO: 1548 - protein, 15 aa, Artificial Sequence
  Description of Artificial Sequence: Synthetic peptide
LRIKRKRRKRKKTRK

SEQ ID NO: 1549 - DNA, 21 bp, Adeno-associated virus 2
agcvvmdcaggarscascaac

SEQ ID NO: 1550 - protein, 7 aa, Artificial Sequence
  Description of Artificial Sequence: Synthetic peptide
SDSGASN

SEQ ID NO: 1551 - protein, 7 aa, Artificial Sequence
  Description of Artificial Sequence: Synthetic peptide
SPSGASN

SEQ ID NO: 1552 - protein, 7 aa, Artificial Sequence
  Description of Artificial Sequence: Synthetic peptide
SHSGASN

SEQ ID NO: 1553 - protein, 7 aa, Artificial Sequence
  Description of Artificial Sequence: Synthetic peptide
SRSGASN

SEQ ID NO: 1554 - protein, 7 aa, Artificial Sequence
  Description of Artificial Sequence: Synthetic peptide
SKSGASN

SEQ ID NO: 1555 - protein, 7 aa, Artificial Sequence
  Description of Artificial Sequence: Synthetic peptide
SNSGASN

SEQ ID NO: 1556 - protein, 7 aa, Artificial Sequence
  Description of Artificial Sequence: Synthetic peptide
SGSGASN

SEQ ID NO: 1557 - protein, 7 aa, Artificial Sequence
  Description of Artificial Sequence: Synthetic peptide
SASGASN

SEQ ID NO: 1558 - protein, 7 aa, Artificial Sequence
  Description of Artificial Sequence: Synthetic peptide
SESGTSN

SEQ ID NO: 1559 - protein, 7 aa, Artificial Sequence
  Description of Artificial Sequence: Synthetic peptide
STTGGSN

SEQ ID NO: 1560 - protein, 7 aa, Artificial Sequence
  Description of Artificial Sequence: Synthetic peptide
SSAGSTN

SEQ ID NO: 1561 - protein, 6 aa, Artificial Sequence
  Description of Artificial Sequence: Synthetic peptide
NNDSQA

SEQ ID NO: 1562 - protein, 6 aa, Artificial Sequence
  Description of Artificial Sequence: Synthetic peptide
NNRNQA

SEQ ID NO: 1563 - protein, 6 aa, Artificial Sequence
  Description of Artificial Sequence: Synthetic peptide
NNNKQA

SEQ ID NO: 1564 - protein, 6 aa, Artificial Sequence
  Description of Artificial Sequence: Synthetic peptide
NAKRQA

SEQ ID NO: 1565 - protein, 6 aa, Artificial Sequence
  Description of Artificial Sequence: Synthetic peptide
NDEHQA

SEQ ID NO: 1566 - protein, 6 aa, Artificial Sequence
  Description of Artificial Sequence: Synthetic peptide
NTSQKA

SEQ ID NO: 1567 - protein, 25 aa, Artificial Sequence
  Description of Artificial Sequence: Synthetic peptide
YYLSRTNTPSGTDTQSRLVFSQAGA

SEQ ID NO: 1568 - protein, 25 aa, Artificial Sequence
  Description of Artificial Sequence: Synthetic peptide
YYLSRTNTDSGTETQSGLDFSQAGA

SEQ ID NO: 1569 - protein, 25 aa, Artificial Sequence
  Description of Artificial Sequence: Synthetic peptide
YYLSRTNTESGTPTQSALEFSQAGA

SEQ ID NO: 1570 - protein, 25 aa, Artificial Sequence
  Description of Artificial Sequence: Synthetic peptide
YYLSRTNTHSGTHTQSPLHFSQAGA

SEQ ID NO: 1571 - protein, 25 aa, Artificial Sequence
  Description of Artificial Sequence: Synthetic peptide
YYLSRTNTSSGTITISHLIFSQAGA

SEQ ID NO: 1572 - protein, 25 aa, Artificial Sequence
  Description of Artificial Sequence: Synthetic peptide
YYLSRTNTRSGIMTKSSLMFSQAGA

SEQ ID NO: 1573 - protein, 25 aa, Artificial Sequence
  Description of Artificial Sequence: Synthetic peptide
YYLSRTNTKSGRKTLSNLSFSQAGA

SEQ ID NO: 1574 - protein, 25 aa, Artificial Sequence
  Description of Artificial Sequence: Synthetic peptide
YYLSRTNDGSGPVTPSKLRFSQRGA

SEQ ID NO: 1575 - protein, 25 aa, Artificial Sequence
  Description of Artificial Sequence: Synthetic peptide
YYLSRTNAASGHATHSDLKFSQPGA

SEQ ID NO: 1576 - protein, 25 aa, Artificial Sequence
  Description of Artificial Sequence: Synthetic peptide
YYLSRTNGQAGSLTMSELGFSQVGA

SEQ ID NO: 1577 - protein, 25 aa, Artificial Sequence
  Description of Artificial Sequence: Synthetic peptide
YYLSRTNSTGGNQTTSQLLFSQLSA

SEQ ID NO: 1578 - protein, 25 aa, Artificial Sequence
  Description of Artificial Sequence: Synthetic peptide
YFLSRTNNNTGLNTNSTLNFSQGRA

SEQ ID NO: 1579 - protein, 16 aa, Artificial Sequence
  Description of Artificial Sequence: Synthetic peptide
SKTGADNNNSEYSWTG

SEQ ID NO: 1580 - protein, 16 aa, Artificial Sequence
  Description of Artificial Sequence: Synthetic peptide
SKTDADNNNSEYSWTG

SEQ ID NO: 1581 - protein, 16 aa, Artificial Sequence
  Description of Artificial Sequence: Synthetic peptide
SKTEADNNNSEYSWTG

SEQ ID NO: 1582 - protein, 16 aa, Artificial Sequence
  Description of Artificial Sequence: Synthetic peptide
SKTPADNNNSEYSWTG

SEQ ID NO: 1583 - protein, 16 aa, Artificial Sequence
  Description of Artificial Sequence: Synthetic peptide
SKTHADNNNSEYSWTG

SEQ ID NO: 1584 - protein, 16 aa, Artificial Sequence
  Description of Artificial Sequence: Synthetic peptide
SKTQADNNNSEYSWTG

SEQ ID NO: 1585 - protein, 16 aa, Artificial Sequence
  Description of Artificial Sequence: Synthetic peptide
SKTIADNNNSEYSWTG

SEQ ID NO: 1586 - protein, 16 aa, Artificial Sequence
  Description of Artificial Sequence: Synthetic peptide
SKTMADNNNSEYSWTG

SEQ ID NO: 1587 - protein, 16 aa, Artificial Sequence
  Description of Artificial Sequence: Synthetic peptide
SKTRADNNNSEYSWTG

SEQ ID NO: 1588 - protein, 16 aa, Artificial Sequence
  Description of Artificial Sequence: Synthetic peptide
SKTNADNNNSEYSWTG

SEQ ID NO: 1589 - protein, 16 aa, Artificial Sequence
  Description of Artificial Sequence: Synthetic peptide
SKTVGRNNNSEYSWTG

SEQ ID NO: 1590 - protein, 16 aa, Artificial Sequence
  Description of Artificial Sequence: Synthetic peptide
SKTADRNNNSEYSWTG

SEQ ID NO: 1591 - protein, 16 aa, Artificial Sequence
  Description of Artificial Sequence: Synthetic peptide
SKKLSQNNNSKYSWQG

SEQ ID NO: 1592 - protein, 16 aa, Artificial Sequence
  Description of Artificial Sequence: Synthetic peptide
SKPTTGNNNSDYSWPG

SEQ ID NO: 1593 - protein, 16 aa, Artificial Sequence
  Description of Artificial Sequence: Synthetic peptide
STQKNENNNSNYSWPG

SEQ ID NO: 1594 - protein, 8 aa, Artificial Sequence
  Description of Artificial Sequence: Synthetic peptide
HKDDEGKF

SEQ ID NO: 1595 - protein, 8 aa, Artificial Sequence
  Description of Artificial Sequence: Synthetic peptide
HKDDNRKF

SEQ ID NO: 1596 - protein, 8 aa, Artificial Sequence
  Description of Artificial Sequence: Synthetic peptide
HKDDTNKF

SEQ ID NO: 1597 - protein, 8 aa, Artificial Sequence
  Description of Artificial Sequence: Synthetic peptide
HEDSDKNF

SEQ ID NO: 1598 - protein, 8 aa, Artificial Sequence
  Description of Artificial Sequence: Synthetic peptide
HRDGADSF

SEQ ID NO: 1599 - protein, 8 aa, Artificial Sequence
  Description of Artificial Sequence: Synthetic peptide
HGDNKSRF

SEQ ID NO: 1600 - protein, 14 aa, Artificial Sequence
  Description of Artificial Sequence: Synthetic peptide
KQGSEKTNVDFEEV

SEQ ID NO: 1601 - protein, 14 aa, Artificial Sequence
  Description of Artificial Sequence: Synthetic peptide
KQGSEKTNVDSEEV

SEQ ID NO: 1602 - protein, 14 aa, Artificial Sequence
  Description of Artificial Sequence: Synthetic peptide
KQGSEKTNVDVEEV

SEQ ID NO: 1603 - protein, 14 aa, Artificial Sequence
  Description of Artificial Sequence: Synthetic peptide
KQGSDKTNVDDAGV

SEQ ID NO: 1604 - protein, 14 aa, Artificial Sequence
  Description of Artificial Sequence: Synthetic peptide
KQGSSKTNVDPREV

SEQ ID NO: 1605 - protein, 14 aa, Artificial Sequence
  Description of Artificial Sequence: Synthetic peptide
KQGSRKTNVDHKQV

SEQ ID NO: 1606 - protein, 14 aa, Artificial Sequence
  Description of Artificial Sequence: Synthetic peptide
KQGSKGGNVDTNRV

SEQ ID NO: 1607 - protein, 14 aa, Artificial Sequence
  Description of Artificial Sequence: Synthetic peptide
KQGSGEANVDNGDV

SEQ ID NO: 1608 - protein, 14 aa, Artificial Sequence
  Description of Artificial Sequence: Synthetic peptide
KQDAAADNIDYDHV

SEQ ID NO: 1609 - protein, 14 aa, Artificial Sequence
  Description of Artificial Sequence: Synthetic peptide
KQSGTRSNAAASSV

SEQ ID NO: 1610 - protein, 14 aa, Artificial Sequence
  Description of Artificial Sequence: Synthetic peptide
KENTNTNDTELTNV

SEQ ID NO: 1611 - protein, 14 aa, Artificial Sequence
  Description of Artificial Sequence: Synthetic peptide
QRGNNVAATADVNT

SEQ ID NO: 1612 - protein, 14 aa, Artificial Sequence
  Description of Artificial Sequence: Synthetic peptide
QRGNNEAATADVNT

SEQ ID NO: 1613 - protein, 14 aa, Artificial Sequence
  Description of Artificial Sequence: Synthetic peptide
QRGNNPAATADVNT

SEQ ID NO: 1614 - protein, 14 aa, Artificial Sequence
  Description of Artificial Sequence: Synthetic peptide
QRGNNHAATADVNT

SEQ ID NO: 1615 - protein, 14 aa, Artificial Sequence
  Description of Artificial Sequence: Synthetic peptide
QEENNIAATPGVNT

SEQ ID NO: 1616 - protein, 14 aa, Artificial Sequence
  Description of Artificial Sequence: Synthetic peptide
QPPNNMAATHEVNT

SEQ ID NO: 1617 - protein, 14 aa, Artificial Sequence
  Description of Artificial Sequence: Synthetic peptide
QHHNNSAATTIVNT

SEQ ID NO: 1618 - protein, 14 aa, Artificial Sequence
  Description of Artificial Sequence: Synthetic peptide
QTTNNRAAFNMVET

SEQ ID NO: 1619 - protein, 14 aa, Artificial Sequence
  Description of Artificial Sequence: Synthetic peptide
QKKNNNAASKKVAT

SEQ ID NO: 1620 - protein, 14 aa, Artificial Sequence
  Description of Artificial Sequence: Synthetic peptide
QGGNNKAADDAVKT

SEQ ID NO: 1621 - protein, 14 aa, Artificial Sequence
  Description of Artificial Sequence: Synthetic peptide
QAAKGGAADDAVKT

SEQ ID NO: 1622 - protein, 14 aa, Artificial Sequence
  Description of Artificial Sequence: Synthetic peptide
QDDRAAAANESVDT

SEQ ID NO: 1623 - protein, 14 aa, Artificial Sequence
  Description of Artificial Sequence: Synthetic peptide
QQQHDDAAYQRVHT

SEQ ID NO: 1624 - protein, 14 aa, Artificial Sequence
  Description of Artificial Sequence: Synthetic peptide
QSSSSLAAVSTVQT

SEQ ID NO: 1625 - protein, 14 aa, Artificial Sequence
  Description of Artificial Sequence: Synthetic peptide
QNNQTTAAIRNVTT

SEQ ID NO: 1626 - protein, 12 aa, Artificial Sequence
  Description of Artificial Sequence: Synthetic peptide
NYNKKSDNVDFT

SEQ ID NO: 1627 - protein, 12 aa, Artificial Sequence
  Description of Artificial Sequence: Synthetic peptide
NYNKKSENVDFT

SEQ ID NO: 1628 - protein, 12 aa, Artificial Sequence
  Description of Artificial Sequence: Synthetic peptide
NYNKKSLNVDFT

SEQ ID NO: 1629 - protein, 12 aa, Artificial Sequence
  Description of Artificial Sequence: Synthetic peptide
NYNKKSPNVDFT

SEQ ID NO: 1630 - protein, 12 aa, Artificial Sequence
  Description of Artificial Sequence: Synthetic peptide
NYSKKSHCVDFT

SEQ ID NO: 1631 - protein, 11 aa, Artificial Sequence
  Description of Artificial Sequence: Synthetic peptide
NYRKTIYVDFT

SEQ ID NO: 1632 - protein, 11 aa, Artificial Sequence
  Description of Artificial Sequence: Synthetic peptide
NYKEKKDVHFT

SEQ ID NO: 1633 - protein, 11 aa, Artificial Sequence
  Description of Artificial Sequence: Synthetic peptide
NYGHRAIVQFT

SEQ ID NO: 1634 - protein, 11 aa, Artificial Sequence
  Description of Artificial Sequence: Synthetic peptide
NYANHQFVVCT

SEQ ID NO: 1635 - protein, 12 aa, Artificial Sequence
  Description of Artificial Sequence: Synthetic peptide
NYDDDPTGVLLT

SEQ ID NO: 1636 - protein, 11 aa, Artificial Sequence
  Description of Artificial Sequence: Synthetic peptide
NYDDPTGVLLT

SEQ ID NO: 1637 - protein, 11 aa, Artificial Sequence
  Description of Artificial Sequence: Synthetic peptide
NFEQQNSVEWT

SEQ ID NO: 1638 - protein, 7 aa, Artificial Sequence
  Description of Artificial Sequence: Synthetic peptide
SQSGASN

SEQ ID NO: 1639 - protein, 6 aa, Artificial Sequence
  Description of Artificial Sequence: Synthetic peptide
NNGSQA

SEQ ID NO: 1640 - protein, 25 aa, Artificial Sequence
  Description of Artificial Sequence: Synthetic peptide
YYLSRTNTPSGTTTWSRLQFSQAGA

SEQ ID NO: 1641 - protein, 16 aa, Artificial Sequence
  Description of Artificial Sequence: Synthetic peptide
SKTSADNNNSEYSWTG

SEQ ID NO: 1642 - protein, 8 aa, Artificial Sequence
  Description of Artificial Sequence: Synthetic peptide
HKDDEEKF

SEQ ID NO: 1643 - protein, 14 aa, Artificial Sequence
  Description of Artificial Sequence: Synthetic peptide
KQGSEKTNVDIEEV

SEQ ID NO: 1644 - protein, 14 aa, Artificial Sequence
  Description of Artificial Sequence: Synthetic peptide
QRGNNQAATADVNT

SEQ ID NO: 1645 - protein, 12 aa, Artificial Sequence
  Description of Artificial Sequence: Synthetic peptide
NYNKKSVNVDFT

SEQ ID NO: 1646 - protein, 42 aa, Artificial Sequence
  Description of Artificial Sequence: Synthetic polypeptide
SQSGASNYNTPSGTTTQSRLQFSTSADNNNSEYSWTGATKYH

SEQ ID NO: 1647 - protein, 42 aa, Artificial Sequence
  Description of Artificial Sequence: Synthetic polypeptide
SASGASNFNSEGGSLTQSSLGFSTDGENNNSDFSWTGATKYH

SEQ ID NO: 1648 - protein, 42 aa, Artificial Sequence
  Description of Artificial Sequence: Synthetic polypeptide
SQSGASNYNTPSGTTTQSRLQFSTDGENNNSDFSWTGATKYH

SEQ ID NO: 1649 - protein, 42 aa, Artificial Sequence
  Description of Artificial Sequence: Synthetic polypeptide
SASGASNYNTPSGTTTQSRLQFSTSADNNNSEFSWPGATTYH

SEQ ID NO: 1650 - protein, 42 aa, Artificial Sequence
  Description of Artificial Sequence: Synthetic polypeptide
SQSGASNFNSEGGSLTQSSLGFSTDGENNNSDFSWTGATKYH

SEQ ID NO: 1651 - protein, 42 aa, Artificial Sequence
  Description of Artificial Sequence: Synthetic polypeptide
SASGASNYNTPSGSLTQSSLGFSTDGENNNSDFSWTGATKYH

SEQ ID NO: 1652 - protein, 42 aa, Artificial Sequence
  Description of Artificial Sequence: Synthetic polypeptide
SQSGASNYNTPSGTTTQSRLQFSTSADNNNSDFSWTGATKYH

SEQ ID NO: 1653 - protein, 42 aa, Artificial Sequence
  Description of Artificial Sequence: Synthetic polypeptide
SGAGASNFNSEGGSLTQSSLGFSTDGENNNSDFSWTGATKYH

SEQ ID NO: 1654 - protein, 7 aa, Artificial Sequence
  Description of Artificial Sequence: Synthetic peptide
SGAGASN

SEQ ID NO: 1655 - protein, 15 aa, Artificial Sequence
  Description of Artificial Sequence: Synthetic peptide
NSEGGSLTQSSLGFS

SEQ ID NO: 1656 - protein, 11 aa, Artificial Sequence
  Description of Artificial Sequence: Synthetic peptide
TDGENNNSDFS

SEQ ID NO: 1657 - protein, 10 aa, Artificial Sequence
  Description of Artificial Sequence: Synthetic peptide
SEFSWPGATT

SEQ ID NO: 1658 - protein, 13 aa, Artificial Sequence
  Description of Artificial Sequence: Synthetic peptide
TSADNNNSDFSWT

SEQ ID NO: 1659 - protein, 8 aa, Artificial Sequence
  Description of Artificial Sequence: Synthetic peptide
SQSGASNY

SEQ ID NO: 1660 - protein, 15 aa, Artificial Sequence
  Description of Artificial Sequence: Synthetic peptide
NTPSGTTTQSRLQFS

SEQ ID NO: 1661 - protein, 19 aa, Artificial Sequence
  Description of Artificial Sequence: Synthetic peptide
TSADNNNSEYSWTGATKYH

SEQ ID NO: 1662 - protein, 8 aa, Artificial Sequence
  Description of Artificial Sequence: Synthetic peptide
SASGASNF

SEQ ID NO: 1663 - protein, 19 aa, Artificial Sequence
  Description of Artificial Sequence: Synthetic peptide
TDGENNNSDFSWTGATKYH

SEQ ID NO: 1664 - protein, 8 aa, Artificial Sequence
  Description of Artificial Sequence: Synthetic peptide
SASGASNY

SEQ ID NO: 1665 - protein, 19 aa, Artificial Sequence
  Description of Artificial Sequence: Synthetic peptide
TSADNNNSEFSWPGATTYH

SEQ ID NO: 1666 - protein, 15 aa, Artificial Sequence
  Description of Artificial Sequence: Synthetic peptide
NTPSGSLTQSSLGFS

SEQ ID NO: 1667 - protein, 19 aa, Artificial Sequence
  Description of Artificial Sequence: Synthetic peptide
TSADNNNSDFSWTGATKYH

SEQ ID NO: 1668 - protein, 8 aa, Artificial Sequence
  Description of Artificial Sequence: Synthetic peptide
SGAGASNF

SEQ ID NO: 1669 - DNA, 48 bp, Artificial Sequence
  Description of Artificial Sequence: Synthetic oligonucleotide
  modified_base (20)..(20): a, c, t, g, unknown or other
  modified_base (35)..(35): a, c, t, g, unknown or other
ctccagvvsvvsmrsrvcvnsgcagctdhcvvsrnsgtcvmsacacaa

SEQ ID NO: 1670 - DNA, 48 bp, Artificial Sequence
  Description of Artificial Sequence: Synthetic oligonucleotide
ctccagagaggcaacagacaagcagctaccgcagatgtcaacacacaa

SEQ ID NO: 1671 - protein, 7 aa, Artificial Sequence
  Description of Artificial Sequence: Synthetic peptide
SAAGASN

SEQ ID NO: 1672 - protein, 24 aa, Artificial Sequence
  Description of Artificial Sequence: Synthetic peptide
YFLSRTNTESGSTTQSTLRFSQAG

SEQ ID NO: 1673 - protein, 13 aa, Artificial Sequence
  Description of Artificial Sequence: Synthetic peptide
SKTSADNNNSDFS

SEQ ID NO: 1674 - protein, 14 aa, Artificial Sequence
  Description of Artificial Sequence: Synthetic peptide
KQGSEKTDVDIDKV

SEQ ID NO: 1675 - protein, 7 aa, Artificial Sequence
  Description of Artificial Sequence: Synthetic peptide
STAGASN

SEQ ID NO: 1676 - protein, 24 aa, Artificial Sequence
  Description of Artificial Sequence: Synthetic peptide
YFLSRTNTTSGIETQSTLRFSQAG

SEQ ID NO: 1677 - protein, 13 aa, Artificial Sequence
  Description of Artificial Sequence: Synthetic peptide
SKTDGENNNSDFS

SEQ ID NO: 1678 - protein, 14 aa, Artificial Sequence
  Description of Artificial Sequence: Synthetic peptide
KQGAAADDVEIDGV

SEQ ID NO: 1679 - protein, 7 aa, Artificial Sequence
  Description of Artificial Sequence: Synthetic peptide
SEAGASN

SEQ ID NO: 1680 - protein, 24 aa, Artificial Sequence
  Description of Artificial Sequence: Synthetic peptide
YYLSRTNTPSGTTTQSRLQFSQAG

SEQ ID NO: 1681 - protein, 13 aa, Artificial Sequence
  Description of Artificial Sequence: Synthetic peptide
SKTSADNNNSEYS

SEQ ID NO: 1682 - protein, 14 aa, Artificial Sequence
  Description of Artificial Sequence: Synthetic peptide
KQGSEKTNVDIEKV

SEQ ID NO: 1683 - protein, 24 aa, Artificial Sequence
  Description of Artificial Sequence: Synthetic peptide
YFLSRTNDASGSDTKSTLLFSQAG

SEQ ID NO: 1684 - protein, 13 aa, Artificial Sequence
  Description of Artificial Sequence: Synthetic peptide
STTPSENNNSEYS

SEQ ID NO: 1685 - protein, 7 aa, Artificial Sequence
  Description of Artificial Sequence: Synthetic peptide
SAAGATN

SEQ ID NO: 1686 - protein, 24 aa, Artificial Sequence
  Description of Artificial Sequence: Synthetic peptide
YFLSRTNGEAGSATLSELRFSQAG

SEQ ID NO: 1687 - protein, 8 aa, Artificial Sequence
  Description of Artificial Sequence: Synthetic peptide
HGDDADRF

SEQ ID NO: 1688 - protein, 14 aa, Artificial Sequence
  Description of Artificial Sequence: Synthetic peptide
KQGAEKSDVEVDRV

SEQ ID NO: 1689 - protein, 14 aa, Artificial Sequence
  Description of Artificial Sequence: Synthetic peptide
KQDSGGDNIDIDQV

SEQ ID NO: 1690 - protein, 7 aa, Artificial Sequence
  Description of Artificial Sequence: Synthetic peptide
SDAGASN

SEQ ID NO: 1691 - protein, 24 aa, Artificial Sequence
  Description of Artificial Sequence: Synthetic peptide
YFLSRTNTEGGHDTQSTLRFSQAG

SEQ ID NO: 1692 - protein, 14 aa, Artificial Sequence
  Description of Artificial Sequence: Synthetic peptide
KEDGGGSDVAIDEV

SEQ ID NO: 1693 - protein, 7 aa, Artificial Sequence
  Description of Artificial Sequence: Synthetic peptide
SNAGASN

SEQ ID NO: 1694 - protein, 24 aa, Artificial Sequence
  Description of Artificial Sequence: Synthetic peptide
YFLSRTNGEAGSATLSELRFSQPG

SEQ ID NO: 1695 - DNA, 21 bp, Artificial Sequence
  Description of Artificial Sequence: Synthetic oligonucleotide
agcvvmdcaggarscascaac

SEQ ID NO: 1696 - DNA, 18 bp, Artificial Sequence
  Description of Artificial Sequence: Synthetic oligonucleotide
aacracrrsmrsmaggca

SEQ ID NO: 1697 - DNA, 24 bp, Artificial Sequence
  Description of Artificial Sequence: Synthetic oligonucleotide
cacrrggacrrcrmsrrsarsttt

SEQ ID NO: 1698 - DNA, 75 bp, Artificial Sequence
  Description of Artificial Sequence: Synthetic oligonucleotide
  modified_base (35)..(35): a, c, t, g, unknown or other
tatttcttgagcagaacaaacrvcvvsrscggamncvhsacgmhstcavvscttvdsttttctcagsbcrgsgcg

SEQ ID NO: 1699 - DNA, 48 bp, Artificial Sequence
  Description of Artificial Sequence: Synthetic oligonucleotide
  modified_base (11)..(11): a, c, t, g, unknown or other
tcaamammavnsrvcsrsaacaacaacagtrasttctcgtggmmagga

SEQ ID NO: 1700 - DNA, 42 bp, Artificial Sequence
  Description of Artificial Sequence: Synthetic oligonucleotide
  modified_base (31)..(31): a, c, t, g, unknown or other
aagsaarrcrscrvsrvarvcratrycgmsnhcrvmvrsgtc

SEQ ID NO: 1701 - DNA, 42 bp, Artificial Sequence
  Description of Artificial Sequence: Synthetic oligonucleotide
  modified_base (17)..(17): a, c, t, g, unknown or other
  modified_base (32)..(32): a, c, t, g, unknown or other
cagvvsvvsmrsrvcvnsgcagctdhcvvsrnsgtcvmsaca

SEQ ID NO: 1702 - DNA, 33 bp, Artificial Sequence
  Description of Artificial Sequence: Synthetic oligonucleotide
aactwcrvsvasmvsvhsddtgtgswstksact

SEQ ID NO: 1703 - DNA, 30 bp, Artificial Sequence
  Description of Artificial Sequence: Synthetic oligonucleotide
ttgttgaacatcaccacgtgacgcacgttc

SEQ ID NO: 1704 - DNA, 30 bp, Artificial Sequence
  Description of Artificial Sequence: Synthetic oligonucleotide
tccccgtggttctactacataatgtggccg

SEQ ID NO: 1705 - DNA, 30 bp, Artificial Sequence
  Description of Artificial Sequence: Synthetic oligonucleotide
ttccacactccgttttggataatgttgaac

SEQ ID NO: 1706 - DNA, 30 bp, Artificial Sequence
  Description of Artificial Sequence: Synthetic oligonucleotide
agggacatccccagctccatgctgtggtcg

SEQ ID NO: 1707 - DNA, 30 bp, Artificial Sequence
  Description of Artificial Sequence: Synthetic oligonucleotide
agggacaacccctccgactcgccctaatcc

SEQ ID NO: 1708 - DNA, 30 bp, Artificial Sequence
  Description of Artificial Sequence: Synthetic oligonucleotide
tcctagtagaagacaccctctcactgcccg

SEQ ID NO: 1709 - DNA, 30 bp, Artificial Sequence
  Description of Artificial Sequence: Synthetic oligonucleotide
agtaccatgtacacccactctcccagtgcc

SEQ ID NO: 1710 - DNA, 30 bp, Artificial Sequence
  Description of Artificial Sequence: Synthetic oligonucleotide
atatggacgttcatgctgatcaccataccg

SEQ ID NO: 1711 - DNA, 30 bp, Artificial Sequence
  Description of Artificial Sequence: Synthetic oligonucleotide
agcaggagctccttggcctcagcgtgcgag

SEQ ID NO: 1712 - DNA, 30 bp, Artificial Sequence
  Description of Artificial Sequence: Synthetic oligonucleotide
acaagcagcttcactatgacaaccactgac

SEQ ID NO: 1713 - DNA, 284 bp, Artificial Sequence
  Description of Artificial Sequence: Synthetic polynucleotide
  modified_base (59)..(59): a, c, t, g, unknown or other
  modified_base (244)..(244): a, c, t, g, unknown or other
cagcctaggaactggcttcctggaccctgttaccgccagcagagagtctcaamammavnsrvcsrsaacaacaacagtrasttctcctggmmaggagctaccaagtaccacctcaatggcagagactctctggtgaatcccggaccagctatggcaagccacrrggacrrcrmsrrsarsttttttcctcagagcggggttctcatctttgggaagsaarrcrscrvsrvarvcratrycgmsnhcrvmvrsgtcatgattacagacgaagaggagatctggac

SEQ ID NO: 1714 - DNA, 34 bp, Artificial Sequence
  Description of Artificial Sequence: Synthetic oligonucleotide
tgggacaatggcggtcgtctctcagagttktkkt

SEQ ID NO: 1715 - DNA, 35 bp, Artificial Sequence
  Description of Artificial Sequence: Synthetic oligonucleotide
agaggacckktcctcgatggttcatggtggagtta

SEQ ID NO: 1716 - DNA, 31 bp, Artificial Sequence
  Description of Artificial Sequence: Synthetic oligonucleotide
ccacttagggcctggtcgataccgttcggtg

SEQ ID NO: 1717 - DNA, 32 bp, Artificial Sequence
  Description of Artificial Sequence: Synthetic oligonucleotide
tctcgccccaagagtagaaacccttcsttyyg

SEQ ID NO: 1718 - protein, 735 aa, Adeno-associated virus 2 [sequence omitted]

SEQ ID NO: 1719 - protein, 736 aa, Adeno-associated virus 9; identical to SEQ ID NO: 134

SEQ ID NO: 1720 - protein, 7 aa, Artificial Sequence
  Description of Artificial Sequence: Synthetic peptide
GSTPPPM

SEQ ID NO: 1721 - protein, 7 aa, Artificial Sequence
  Description of Artificial Sequence: Synthetic peptide
GETRAPL

SEQ ID NO: 1722 - protein, 6 aa, Artificial Sequence
  Description of Artificial Sequence: Synthetic peptide
SPAKFA

SEQ ID NO: 1723 - protein, 6 aa, Artificial Sequence
  Description of Artificial Sequence: Synthetic peptide
NKDKLN

SEQ ID NO: 1724 - DNA, 12 bp, Artificial Sequence
  Description of Artificial Sequence: Synthetic oligonucleotide
agaaagaggcga

SEQ ID NO: 1725 - DNA, 12 bp, Artificial Sequence
  Description of Artificial Sequence: Synthetic oligonucleotide
cgggccaagcgg

SEQ ID NO: 1726 - DNA, 54 bp, Artificial Sequence
  Description of Artificial Sequence: Synthetic oligonucleotide
gagggcagaggaagtcttctaacatgcggtgacgtggaggagaatcccggccct

SEQ ID NO: 1727 - DNA, 75 bp, Artificial Sequence
  Description of Artificial Sequence: Synthetic oligonucleotide
ggaagcggagtgaaacagactttgaattttgaccttctcaagttggcgggagacgtggagtccaaccctggacct

SEQ ID NO: 1728 - DNA, 66 bp, Artificial Sequence
  Description of Artificial Sequence: Synthetic oligonucleotide
ggaagcggagctactaacttcagcctgctgaagcaggctggagacgtggaggagaaccctggacct

SEQ ID NO: 1729 - DNA, 18 bp, Artificial Sequence
  Description of Artificial Sequence: Synthetic oligonucleotide
tccggaggcggcggcagc

SEQ ID NO: 1730 - DNA, 45 bp, Artificial Sequence
  Description of Artificial Sequence: Synthetic oligonucleotide
ggtggtggtggtagcggcggcggcggctctggtggtggtggatcc

SEQ ID NO: 1731 - DNA, 75 bp, Artificial Sequence
  Description of Artificial Sequence: Synthetic oligonucleotide
ggcggaggtggctccggaggcggaggcagcggcggaggtgggtctggcggaggcgggtgcggcggaggtggctcc

SEQ ID NO: 1732 - DNA, 609 bp, Artificial Sequence
  Description of Artificial Sequence: Synthetic polynucleotide
aattccgcccctctcccccccccccctctccctcccccccccctaacgttactggccgaagccgcttggaataaggccggtgtgcgtttgtctatatgttattttccaccatattgccgtcttttggcaatgtgagggcccggaaacctggccctgtcttcttgacgagcattcctaggggtctttcccctctcgccaaaggaatgcaaggtctgttgaatgtcgtgaaggaagcagttcctctggaagcttcttgaagacaaacaacgtctgtagcgaccctttgcaggcagcggaaccccccacctggcgacaggtgcctctgcggccaaaagccacgtgtataagatacacctgcaaaggcggcacaaccccagtgccacgttgtgagttggatagttgtggaaagagtcaaatggctctcctcaagcgtattcaacaaggggctgaaggatgcccagaaggtaccccattgtatgggatctgatctggggcctcggtgcacatgctttacatgtgtttagtcgaggttaaaaaaacgtctaggccccccgaaccacggggacgtggttttcctttgaaaaacacgatgataatatggccacaacc

SEQ ID NO: 1733 - DNA, 623 bp, Artificial Sequence
  Description of Artificial Sequence: Synthetic polynucleotide
taacgaattccgcccctctcccccccccccctctccctcccccccccctaacgttactggccgaagccgcttggaataaggccggtgtgcgtttgtctatatgttattttccaccatattgccgtcttttggcaatgtgagggcccggaaacctggccctgtcttcttgacgagcattcctaggggtctttcccctctcgccaaaggaatgcaaggtctgttgaatgtcgtgaaggaagcagttcctctggaagcttcttgaagacaaacaacgtctgtagcgaccctttgcaggcagcggaaccccccacctggcgacaggtgcctctgcggccaaaagccacgtgtataagatacacctgcaaaggcggcacaaccccagtgccacgttgtgagttggatagttgtggaaagagtcaaatggctctcctcaagcgtattcaacaaggggctgaaggatgcccagaaggtaccccattgtatgggatctgatctggggcctcggtgcacatgctttacatgtgtttagtcgaggttaaaaaaacgtctaggccccccgaaccacggggacgtggttttcctttgaaaaacacgatgataatatggccacaaccgccgccacc

SEQ ID NO: 1734 - DNA, 54 bp, Artificial Sequence
  Description of Artificial Sequence: Synthetic oligonucleotide
gtggagaggaagtgctgcgtggagtgcccaccatgccctgcccctcctgtggcc

SEQ ID NO: 1735 - DNA, 108 bp, Artificial Sequence
  Description of Artificial Sequence: Synthetic polynucleotide
gagctcaaaaccccacttggtgacacaactcacacatgcccacggtgcccagagcccaaatcttgtgacacacctcccccgtgcccacggtgcccagcacctgaactc

SEQ ID NO: 1736 - DNA, 153 bp, Artificial Sequence
  Description of Artificial Sequence: Synthetic polynucleotide
gagctcaaaaccccacttggtgacacaactcacacatgcccacggtgcccagagcccaaatcttgtgacacacctcccccgtgcccacggtgcccagagcccaaatcttgtgacacacctcccccatgcccacggtgcccagcacctgaactc

SEQ ID NO: 1737 - DNA, 198 bp, Artificial Sequence
  Description of Artificial Sequence: Synthetic polynucleotide
gagctcaaaaccccacttggtgacacaactcacacatgcccacggtgcccagagcccaaatcttgtgacacacctcccccgtgcccacggtgcccagagcccaaatcttgtgacacacctcccccatgcccacggtgcccagagcccaaatcttgtgacacacctcccccgtgcccaaggtgcccagcacctgaactc

SEQ ID NO: 1738 - DNA, 45 bp, Artificial Sequence
  Description of Artificial Sequence: Synthetic oligonucleotide
gtgcccagggattgtggttgtaagccttgcatatgtacagtccca

SEQ ID NO: 1739 - DNA, 18 bp, Artificial Sequence
  Description of Artificial Sequence: Synthetic oligonucleotide
gtgcccagggattgtggt

SEQ ID NO: 1740 - DNA, 57 bp, Artificial Sequence
  Description of Artificial Sequence: Synthetic oligonucleotide
atgaacttcgggctcagcttgattttccttgtccttgttttaaaaggtgtccagtgt

SEQ ID NO: 1741 - DNA, 57 bp, Artificial Sequence
  Description of Artificial Sequence: Synthetic oligonucleotide
atgggatggagctggatctttctctttctcctgtcaggaactacaggtgtcctctct

SEQ ID NO: 1742 - DNA, 969 bp, Artificial Sequence
  Description of Artificial Sequence: Synthetic polynucleotide
gccaaaacgacacccccatctgtctatccactggcccctggatctgctgcccaaactaactccatggtgaccctgggatgcctggtcaagggctatttccctgagccagtgacagtgacctggaactctggatccctgtccagcggtgtgcacaccttcccagctgtcctgcagtctgacctctacactctgagcagctcagtgactgtcccctccagcacctggcccagcgagaccgtcacctgcaacgttgcccacccggccagcagcaccaaggtggacaagaaaattgtgcccagggattgtggttgtaagccttgcatatgtacagtcccagaagtatcatctgtcttcatcttccccccaaagcccaaggatgtgctcaccattactctgactcctaaggtcacgtgtgttgtggtagacatcagcaaggatgatcccgaggtccagttcagctggtttgtagatgatgtggaggtgcacacagctcagacgcaaccccgggaggagcagttcaacagcactttccgctcagtcagtgaacttcccatcatgcaccaggactggctcaatggcaaggagttcaaatgcagggtcaacagtgcagctttccctgcccccatcgagaaaaccatctccaaaaccaaaggcagaccgaaggctccacaggtgtacaccattccacctcccaaggagcagatggccaaggataaagtcagtctgacctgcatgataacagacttcttccctgaagacattactgtggagtggcagtggaatgggcagccagcggagaactacaagaacactcagcccatcatggacacagatggctcttacttcgtctacagcaagctcaatgtgcagaagagcaactgggaggcaggaaatactttcacctgctctgtgttacatgagggcctgcacaaccaccatactgagaagagcctctcccactctcctggt

SEQ ID NO: 1743 - DNA, 972 bp, Artificial Sequence
  Description of Artificial Sequence: Synthetic polynucleotide
gccaaaacgacacccccatctgtctatccactggcccctggatctgctgcccaaactaactccatggtgaccctgggatgcctggtcaagggctatttccctgagccagtgacagtgacctggaactctggatccctgtccagcggtgtgcacaccttcccagctgtcctgcagtctgacctctacactctgagcagctcagtgactgtcccctccagcacctggcccagcgagaccgtcacctgcaacgttgcccacccggccagcagcaccaaggtggacaagaaaattgtgcccagggattgtggttgtaagccttgcatatgtacagtcccagaagtatcatctgtcttcatcttccccccaaagcccaaggatgtgctcaccattactctgactcctaaggtcacgtgtgttgtggtagacatcagcaaggatgatcccgaggtccagttcagctggtttgtagatgatgtggaggtgcacacagctcagacgcaaccccgggaggagcagttcaacagcactttccgctcagtcagtgaacttcccatcatgcaccaggactggctcaatggcaaggagttcaaatgcagggtcaacagtgcagctttccctgcccccatcgagaaaaccatctccaaaaccaaaggcagaccgaaggctccacaggtgtacaccattccacctcccaaggagcagatggccaaggataaagtcagtctgacctgcatgataacagacttcttccctgaagacattactgtggagtggcagtggaatgggcagccagcggagaactacaagaacactcagcccatcatggacacagatggctcttacttcgtctacagcaagctcaatgtgcagaagagcaactgggaggcaggaaatactttcacctgctctgtgttacatgagggcctgcacaaccaccatactgagaagagcctctcccactctcctggtaag

SEQ ID NO: 1744 - protein, 10 aa, Artificial Sequence
  Description of Artificial Sequence: Synthetic peptide
GFNIKDYYIH

SEQ ID NO: 1745 - protein, 16 aa, Artificial Sequence
  Description of Artificial Sequence: Synthetic peptide
WIDPENGDTEYAPKFQ

SEQ ID NO: 1746 - protein, 4 aa, Artificial Sequence
  Description of Artificial Sequence: Synthetic peptide
APGY

SEQ ID NO: 1747 - protein, 16 aa, Artificial Sequence
  Description of Artificial Sequence: Synthetic peptide
NIDPSDSETHYNQKFK

SEQ ID NO: 1748 - protein, 11 aa, Artificial Sequence
  Description of Artificial Sequence: Synthetic peptide
SGFTFTDYYMS

SEQ ID NO: 1749 - protein, 16 aa, Artificial Sequence
  Description of Artificial Sequence: Synthetic peptide
NRNKTKGYTTEYSASV

SEQ ID NO: 1750 - protein, 4 aa, Artificial Sequence
  Description of Artificial Sequence: Synthetic peptide
GMDY

SEQ ID NO: 1751 - protein, 10 aa, Artificial Sequence
  Description of Artificial Sequence: Synthetic peptide
GFTFSTYPMS

SEQ ID NO: 1752 - protein, 14 aa, Artificial Sequence
  Description of Artificial Sequence: Synthetic peptide
SISNGGSTYYPDTV

SEQ ID NO: 1753 - protein, 8 aa, Artificial Sequence
  Description of Artificial Sequence: Synthetic peptide
GRDYHFDF

SEQ ID NO: 1754 - protein, 10 aa, Artificial Sequence
  Description of Artificial Sequence: Synthetic peptide
GYTFTNYWIN

SEQ ID NO: 1755 - protein, 16 aa, Artificial Sequence
  Description of Artificial Sequence: Synthetic peptide
IYPGSTRANYNEKFKS

SEQ ID NO: 1756 - protein, 4 aa, Artificial Sequence
  Description of Artificial Sequence: Synthetic peptide
THSI

SEQ ID NO: 1757 - protein, 10 aa, Artificial Sequence
  Description of Artificial Sequence: Synthetic peptide
GYTFISNWMH

SEQ ID NO: 1758 - protein, 16 aa, Artificial Sequence
  Description of Artificial Sequence: Synthetic peptide
IDPSDSETHYNQKFKD

SEQ ID NO: 1759 - protein, 10 aa, Artificial Sequence
  Description of Artificial Sequence: Synthetic peptide
RDRDGYYFDY

SEQ ID NO: 1760 - protein, 15 aa, Artificial Sequence
  Description of Artificial Sequence: Synthetic peptide
IYPGSTRANYNEKFK

SEQ ID NO: 1761 - protein, 13 aa, Artificial Sequence
  Description of Artificial Sequence: Synthetic peptide
KASGYTFTDRTIH

SEQ ID NO: 1762 - protein, 16 aa, Artificial Sequence
  Description of Artificial Sequence: Synthetic peptide
YIYPGDGSTKYNENFK

SEQ ID NO: 1763 - protein, 6 aa, Artificial Sequence
  Description of Artificial Sequence: Synthetic peptide
RGAMDY

SEQ ID NO: 1764 - protein, 16 aa, Artificial Sequence
  Description of Artificial Sequence: Synthetic peptide
YIYPGDDSTKYNDNFK

SEQ ID NO: 1765 - protein, 6 aa, Artificial Sequence
  Description of Artificial Sequence: Synthetic peptide
RGTMDY

SEQ ID NO: 1766 - protein, 13 aa, Artificial Sequence
  Description of Artificial Sequence: Synthetic peptide
KASGNTFTDYEIH

SEQ ID NO: 1767 - protein, 16 aa, Artificial Sequence
  Description of Artificial Sequence: Synthetic peptide
AIDPETGNTAYNQKFK

SEQ ID NO: 1768 - protein, 6 aa, Artificial Sequence
  Description of Artificial Sequence: Synthetic peptide
SRGFDY

SEQ ID NO: 1769 - protein, 5 aa, Artificial Sequence
  Description of Artificial Sequence: Synthetic peptide
SYGMS

SEQ ID NO: 1770 - protein, 5 aa, Artificial Sequence
  Description of Artificial Sequence: Synthetic peptide
KYGMS

SEQ ID NO: 1771 - protein, 17 aa, Artificial Sequence
  Description of Artificial Sequence: Synthetic peptide
TISSSGSRTYFPDSVKG

SEQ ID NO: 1772 - protein, 17 aa, Artificial Sequence
  Description of Artificial Sequence: Synthetic peptide
TISSSGSRTYYPDSVKG

SEQ ID NO: 1773 - protein, 32 aa, Artificial Sequence
  Description of Artificial Sequence: Synthetic polypeptide
  MOD_RES (18)..(18): Ser or Asn
  MOD_RES (20)..(20): Ser or Leu
  MOD_RES (21)..(21): Lys or Arg
  MOD_RES (22)..(22): Ser or Ala
  MOD_RES (31)..(31): Ser or Ala
RFTISRDNAKNTLYLQMXSXXXEDTAMYYCXI

SEQ ID NO: 1774 - protein, 8 aa, Artificial Sequence
  Description of Artificial Sequence: Synthetic peptide
TWDGAMDY

SEQ ID NO: 1775 - protein, 8 aa, Artificial Sequence
  Description of Artificial Sequence: Synthetic peptide
SWDGAMDY

SEQ ID NO: 1776 - protein, 11 aa, Artificial Sequence
  Description of Artificial Sequence: Synthetic peptide
  MOD_RES (6)..(6): Ser or Thr
WGQGTXVTVSS

SEQ ID NO: 1777 - protein, 14 aa, Artificial Sequence
  Description of Artificial Sequence: Synthetic peptide
WVRQAPGKGLEWVA

SEQ ID NO: 1778 - protein, 32 aa, Artificial Sequence; identical to SEQ ID NO: 1773
  Description of Artificial Sequence: Synthetic polypeptide
  MOD_RES (18)..(18): Ser or Asn
  MOD_RES (20)..(20): Ser or Leu
  MOD_RES (21)..(21): Lys or Arg
  MOD_RES (22)..(22): Ser or Ala
  MOD_RES (31)..(31): Ser or Ala

SEQ ID NO: 1779 - protein, 11 aa, Artificial Sequence
  Description of Artificial Sequence: Synthetic peptide
  MOD_RES (6)..(6): Ser or Thr
WGQGTXVTVSS

SEQ ID NO: 1780 - protein, 13 aa, Artificial Sequence
  Description of Artificial Sequence: Synthetic peptide
KGSGYTFSNYWIE

SEQ ID NO: 1781 - protein, 17 aa, Artificial Sequence
  Description of Artificial Sequence: Synthetic peptide
EILPGSDSIKYEKNFKG

SEQ ID NO: 1782 - protein, 9 aa, Artificial Sequence
  Description of Artificial Sequence: Synthetic peptide
ARRGNYVDD

SEQ ID NO: 1783 - protein, 7 aa, Mus musculus
GYTFSSS

SEQ ID NO: 1784 - protein, 5 aa, Mus musculus
SSWMG

SEQ ID NO: 1785 - protein, 6 aa, Mus musculus
LPGSGG

SEQ ID NO: 1786 - protein, 17 aa, Mus musculus
DILPGSGGTNYNERFKG

SEQ ID NO: 1787 - protein, 9 aa, Mus musculus
SYYDYDRFA

SEQ ID NO: 1788 - protein, 10 aa, Mus musculus
SYYDYDRFAN

SEQ ID NO: 1789 - protein, 7 aa, Mus musculus
GFTFSSY

SEQ ID NO: 1790 - protein, 5 aa, Mus musculus
SYAMS

SEQ ID NO: 1791 - protein, 5 aa, Mus musculus
SKGGN

SEQ ID NO: 1792 - protein, 16 aa, Mus musculus
SISKGGNTYYPNSVKG

SEQ ID NO: 1793 - protein, 9 aa, Mus musculus
GWGDYGWFA

SEQ ID NO: 1794 - protein, 10 aa, Mus musculus
GWGDYGWFAY

SEQ ID NO: 1795 - protein, 125 aa, Artificial Sequence
  Description of Artificial Sequence: Synthetic polypeptide
LPEVQLEESGAELVRSGASVTLSCTASGFNIKDYYIHWVKQRPEQGLEWIGWIDPENGDTEYAPKFQGKATMTADTSSNTAYLQLSSLTSEDTAVYYCNGAPGYWGPGTTLTVSSAKTTPPSVYS

SEQ ID NO: 1796 - protein, 131 aa, Artificial Sequence
  Description of Artificial Sequence: Synthetic polypeptide
LPEVQLEQSGAELVKPGASVKLSCKASGYTFISNWMHWVKQRPGQGLEWIGNIDPSDSETHYNQKFKDKATLTVDKSSSTAYMQLSSLTSEDSAVYYCARRDRDGYYFDYWGQGTTLTVSSAKTTPPSVYS

SEQ ID NO: 1797 - protein, 127 aa, Artificial Sequence
  Description of Artificial Sequence: Synthetic polypeptide
LPEVQLEESGGGLVQPGGSLSLSCAASGFTFTDYYMSWVRQPPGKALEWVALNRNKTKGYTTEYSASVKGRFTISRDNSQSILYLQMNALRAEDSATYYCARGMDYWGQGTSVTVSSAKTTPPSVYS

SEQ ID NO: 1798 - protein, 128 aa, Artificial Sequence
  Description of Artificial Sequence: Synthetic polypeptide
LPEVQLEESGGGLVKPGGSLKLSCAASGFTFSTYPMSWVRQTPEKRLEWVASISNGGSTYYPDTVKGRFTISRDNARNILYLQMSSLRSEDTAMYYCARGRDYHFDFWGQGTTLTVSSAKTTPPSVYS

SEQ ID NO: 1799 - protein, 125 aa, Artificial Sequence
  Description of Artificial Sequence: Synthetic polypeptide
LPQVQLEESGAELVKPGASVKLSCKASGYTFTNYWINWVKQRPGQGLEWIGNIYPGSTRANYNEKFKSKATLTVDTSSSTAYMQVSSLTSDDSAVYYCTRTHSIWGQGTQVTVSAAKTTPPSVYS

SEQ ID NO: 1800 - protein, 131 aa, Artificial Sequence
  Description of Artificial Sequence: Synthetic polypeptide
LPEVKLEESGAELVKPGASVKLSCKASGYTFISNWMHWVKQRPGQGLEWIGNIDPSDSETHYNQKFKDKATLTVDKSSSTAYMQLSSLTSEDSAVYYCARRDRDGYYFDYWGQGTTLTVSSAKTTPPSVYS

SEQ ID NO: 1801 - protein, 125 aa, Artificial Sequence
  Description of Artificial Sequence: Synthetic polypeptide
LPEVKLEQSGAELVKPGASVKLSCKASGYTFTNYWINWVKQRPGQGLEWIGNIYPGSTRANYNEKFKSKATLTVDTSSSTAYMQVSSLTSDDSAVYYCTRTHSIWGQGTQVTVSAAKTTPPSVYS

SEQ ID NO: 1802 - protein, 439 aa, Artificial Sequence
  Description of Artificial Sequence: Synthetic polypeptide
QVQLQQSDAELVKPGASVKISCKASGYTFTDRTIHWVKQRPEQGLEWIGYIYPGDGSTKYNENFKGKATLTADKSSSTAYMQLNSLTSEDSAVYFCARRGAMDYWGQGTSVTVSSAKTTPPSVYPLAPGSAAQTNSMVTLGCLVKGYFPEPVTVTWNSGSLSSGVHTFPAVLQSDLYTLSSSVTVPSSTWPSETVTCNVAHPASSTKVDKKIVPRDCGCKPCICTVPEVSSVFIFPPKPKDVLTITLTPKVTCVVVDISKDDPEVQFSWFVDDVEVHTAQTQPREEQFNSTFRSVSELPIMHQDWLNGKEFKCRVNSAAFPAPIEKTISKTKGRPKAPQVYTIPPPKEQMAKDKVSLTCMITDFFPEDITVEWQWNGQPAENYKNTQPIMDTDGSYFVYSKLNVQKSNWEAGNTFTCSVLHEGLHNHHTEKSLSHSPGK

SEQ ID NO: 1803 - protein, 115 aa, Artificial Sequence
  Description of Artificial Sequence: Synthetic polypeptide
QVQLQQSDAELVKPGASVKISCKASGYTFTDRTIHWVKQRPEQGLEWIGYIYPGDGSTKYNENFKGKATLTADKSSSTAYMQLNSLTSEDSAVYFCARRGAMDYWGQGTSVTVSS

SEQ ID NO: 1804 - DNA, 345 bp, Artificial Sequence
  Description of Artificial Sequence: Synthetic polynucleotide
caggtgcagctgcagcagagcgacgccgagctggtgaagcccggcgccagcgtgaagatcagctgcaaggccagcggctacaccttcaccgacaggaccatccactgggtgaagcagaggcccgagcagggcctggagtggatcggctacatctaccccggcgacggcagcaccaagtacaacgagaacttcaagggcaaggccaccctgaccgccgacaagagcagcagcaccgcctacatgcagctgaacagcctgaccagcgaggacagcgccgtgtacttctgcgccaggaggggcgcgatggactactggggccagggcaccagcgtgaccgtgagcagc

SEQ ID NO: 1805 - DNA, 345 bp, Artificial Sequence
  Description of Artificial Sequence: Synthetic polynucleotide
caggtgcagctgcagcagagcgacgccgagctggtgaagcccggcgccagcgtgaagatcagctgcaaggccagcggctacaccttcaccgaccggaccatccactgggtgaagcagcggcccgagcagggcctggagtggatcggctacatctaccccggcgacggcagcaccaagtacaacgagaacttcaagggcaaggccaccctgaccgccgacaagagcagcagcaccgcctacatgcagctgaacagcctgaccagcgaggacagcgccgtgtacttctgcgcccggcggggcgctatggactactggggccagggcaccagcgtgaccgtgagcagc

SEQ ID NO: 1806 - DNA, 345 bp, Artificial Sequence
  Description of Artificial Sequence: Synthetic polynucleotide
caggtgcagctgcagcagagcgacgccgagctggtgaagcccggcgccagcgtgaagatcagctgcaaggccagcggctacaccttcaccgaccgaaccatccactgggtgaagcagcgacccgagcagggcctggagtggatcggctacatctaccccggcgacggcagcaccaagtacaacgagaacttcaagggcaaggccaccctgaccgccgacaagagcagcagcaccgcctacatgcagctgaacagcctgaccagcgaggacagcgccgtgtacttctgcgcccgacgaggcgctatggactactggggccagggcaccagcgtgaccgtgagcagc

SEQ ID NO: 1807 - DNA, 345 bp, Artificial Sequence
  Description of Artificial Sequence: Synthetic polynucleotide
caggtgcagctgcagcagagcgatgccgagctggtgaaacctggggccagcgtcaagatcagctgcaaggcctccgggtacaccttcaccgaccgcaccatccactgggtgaagcagcggcccgagcaggggctggagtggatcggctacatctaccccggggacggcagcaccaagtacaacgagaacttcaagggcaaggccaccctgaccgccgacaagtccagcagcacggcctacatgcagctcaacagcctcaccagcgaggacagcgccgtgtacttctgcgcccggcggggcgcaatggactactggggccagggcacctccgtgaccgtgtcctcc

SEQ ID NO: 1808 - DNA, 345 bp, Artificial Sequence
  Description of Artificial Sequence: Synthetic polynucleotide
caggtgcagctgcagcagagcgatgccgagctggtgaaacccggggcctccgtcaagatcagctgcaaggccagcgggtacaccttcaccgaccgcaccatccactgggtgaagcagcggcccgagcagggcctggagtggatcggctacatctaccccggggacggcagcaccaagtacaacgagaacttcaagggcaaggccaccctgaccgccgacaagtccagcagcacagcctacatgcagctcaacagcctcacctctgaggacagcgccgtgtacttctgcgcccggcggggcgcgatggactactggggccaggggaccagcgtgaccgtgtcctcc

SEQ ID NO: 1809 - DNA, 345 bp, Artificial Sequence
  Description of Artificial Sequence: Synthetic polynucleotide
caggtgcagctgcagcagagcgacgccgagctggtgaaacctggggccagcgtcaagatcagctgcaaggcctccggctacaccttcaccgaccgcaccatccactgggtgaagcagcggcccgagcaggggctggagtggatcgggtacatctaccccggggacggctccaccaagtacaacgagaacttcaagggcaaagccaccctgacggccgacaagtccagcagcaccgcctacatgcagctgaacagcctgaccagcgaggacagcgccgtgtacttctgcgcccggcggggggctatggactactggggccagggcacctccgtgaccgtgtcctcc

SEQ ID NO: 1810 - DNA, 345 bp, Artificial Sequence
  Description of Artificial Sequence: Synthetic polynucleotide
caggtgcagctgcagcagtccgacgccgagctggtgaagcccggcgcctccgtgaagatctcctgcaaggcctccggctacaccttcaccgaccggaccatccactgggtgaagcagcggcccgagcagggcctggagtggatcggctacatctaccccggcgacggctccaccaagtacaacgagaacttcaagggcaaggccaccctgaccgccgacaagtcctcctccaccgcctacatgcagctgaactccctgacctccgaggactccgccgtgtacttctgcgcccggcggggcgctatggactactggggccagggcacctccgtgaccgtgtcctcc

SEQ ID NO: 1811 - DNA, 345 bp, Artificial Sequence
  Description of Artificial Sequence: Synthetic polynucleotide
caggtgcagctgcagcagtccgatgccgagctggtgaaaccgggggccagcgtcaagatctcatgcaaagcttccggctacaccttcaccgacagaaccatccactgggtgaagcagcggcccgagcaggggctggagtggatcgggtacatctaccccggggacggcagcaccaagtacaacgagaacttcaagggcaaggccaccctgacagccgacaagtccagctccaccgcctacatgcagctcaacagcctgacctccgaggacagcgccgtgtacttctgcgcccggcggggcgcaatggactactggggccagggcaccagcgtgaccgtgagcagc

SEQ ID NO: 1812 - DNA, 345 bp, Artificial Sequence
  Description of Artificial Sequence: Synthetic polynucleotide
caggtgcagctgcagcagagcgacgccgagctggtgaagcctggcgccagcgtgaagatcagctgcaaggccagcggctacaccttcaccgaccgtaccatccactgggtgaagcagcgacctgagcagggcctggagtggatcggctacatctaccctggcgacggcagcaccaagtacaacgagaacttcaagggcaaggccaccctgaccgccgacaagagcagcagcaccgcctacatgcagctgaacagcctgaccagcgaggacagcgccgtgtacttctgcgcccgtcgaggcgctatggactactggggccagggcaccagcgtgaccgtgagcagc

SEQ ID NO: 1813 - DNA, 345 bp, Artificial Sequence
  Description of Artificial Sequence: Synthetic polynucleotide
caggtgcagctgcagcagagcgacgccgagctggtgaagcctggcgccagcgtgaagatcagctgcaaggccagcggctacaccttcaccgaccgtaccatccactgggtgaagcagcgacctgagcagggcctggagtggatcggctacatctaccccggcgacggcagcaccaagtacaacgagaacttcaagggcaaggccaccctgaccgccgacaagagcagcagcaccgcctacatgcagctgaacagcctgaccagcgaggacagcgccgtgtacttctgcgcccggcggggcgctatggactactggggccagggcaccagcgtgaccgtgagcagc

SEQ ID NO: 1814 - protein, 439 aa, Artificial Sequence
  Description of Artificial Sequence: Synthetic polypeptide
QVQLQQSDAELVKPGASVKISCKASGYTFTDRTIHWVKQRPEQGLEWIGYIYPGDDSTKYNDMFKAKATLTADKSSNTAYMQLNSLTSDDSAVYFCARRGTMDYWGQGTSVTVSSAKTTPPSVYPLAPGSAAQTNSMVTLGCLVKGYFPEPVTVTWNSGSLSSGVHTFPAVLQSDLYTLSSSVTVPSSTWPSETVTCNVAHPASSTKVDKKIVPRDCGCKPCICTVPEVSSVFIFPPKPKDVLTITLTPKVTCVVVDISKDDPEVQFSWFVDDVEVHTAQTQPREEQFNSTFRSVSELPIMHQDWLNGKEFKCRVNSAAFPAPIEKTISKTKGRPKAPQVYTIPPPKEQMAKDKVSLTCMITDFFPEDITVEWQWNGQPAENYKNTQPIMDTDGSYFVYSKLNVQKSNWEAGNTFTCSVLHEGLHNHHTEKSLSHSPGK

SEQ ID NO: 1815 - protein, 439 aa, Artificial Sequence
  Description of Artificial Sequence: Synthetic polypeptide
QVQLQQSDAELVNPGASVKISCKASGYTFTDRTIHWVKQRPEQGLEWIGYIYPGDGSTKYNENFKGKATLTADKSSSTAYMQLNSLASEDSAVYFCARRGAMDYWGQGTSVTVSSAKTTPPSVYPLAPGSAAQTNSMVTLGCLVKGYFPEPVTVTWNSGSLSSGVHTFPAVLQSDLYTLSSSVTVPSSTWPSETVTCNVAHPASSTKVDKKIVPRDCGCKPCICTVPEVSSVFIFPPKPKDVLTITLTPKVTCVVVDISKDDPEVQFSWFVDDVEVHTAQTQPREEQFNSTFRSVSELPIMHQDWLNGKEFKCRVNSAAFPAPIEKTISKTKGRPKAPQVYTIPPPKEQMAKDKVSLTCMITDFFPEDITVEWQWNGQPAENYKNTQPIMDTDGSYFVYSKLNVQKSNWEAGNTFTCSVLHEGLHNHHTEKSLSHSPGK

SEQ ID NO: 1816 - protein, 451 aa, Artificial Sequence
  Description of Artificial Sequence: Synthetic polypeptide
QVQLQQSGAELVRPGASVTLSCKASGNTFTDYEIHWVKQTPVHGLEWIGAIDPETGNTAYNQKFKGKARLTADKSSSTAYMELRSLTSEDSAVYYCTRSRGFDYWGQGTTLTVSSAKTTPPSVYPLAPGCGDTTGSSVTLGCLVKGYFPESVTVTWNSGSLSSSVHTFPALLQSGLYTMSSSVTVPSSTWPSQTVTCSVAHPASSTTVDKKLEPSGPISTINPCPPCKECHKCPAPNLEGGPSVFIFPPNIKDVLMISLTPKVTCVVVDVSEDDPDVRISWFVNNVEVHTAQTQTHREDYNSTIRVVSALPIQHQDWMSGKEFKCKVNNKDLPSPIERTISKIKGLVRAPQVYILPPPAEQLSRKDVSLTCLVVGFNPGDISVEWTSNGHTEENYKDTAPVLDSDGSYFIYSKLDIKTSKWEKTDSFSCNVRHEGLKNYYLKKTISRSPGK

SEQ ID NO: 1817 - protein, 444 aa, Artificial Sequence
  Description of Artificial Sequence: Synthetic polypeptide
QVQLVQSGAEVVKPGASVKISCKASGYTFTDRTIHWVRQAPGQGLEWIGYIYPGDGSTKYSQKFQGRATLTADTSASTAYMELSSLRSEDTAVYYCARRGAMDYWGQGTSVTVSSASTKGPSVFPLAPSSKSTSGGTAALGCLVKDYFPEPVTVSWNSGALTSGVHTFPAVLQSSGLYSLSSVVTVPSSSLGTQTYICNVNHKPSNTKVDKRVEPKSCDKTHTCPPCPAPELLGGPSVFLFPPKPKDTLMISRTPEVTCVVVDVSHEDPEVKFNWYVDGVEVHNAKTKPREEQYNSTYRVVSVLTVLHQDWLNGKEYKCKVSNKALPAPIEKTISKAKGQPREPQVYTLPPSREEMTKNQVSLTCLVKGFYPSDIAVEWESNGQPENNYKTTPPVLDSDGSFFLYSKLTVDKSRWQQGNVFSCSVMHEALHNHYTQKSLSLSPG

SEQ ID NO: 1818 - DNA, 351 bp, Artificial Sequence
  Description of Artificial Sequence: Synthetic polynucleotide
gaggtgcagttggtggagtctggggaagacttagtgaagcctggagggtccctgaaactctcctgtgtcgcttctggattcgctttcagtagctatggcatgtcttgggttcgccagactccagacatgaggctggagtgggtcgcaacaattagtagcagtggtagtcgcacctactttccagacagtgtgaaggggcgactcaccatctccagagacaatgacaagaacatcctatacctacaaatgagcagtctgaggtctgaggacacagccatgtactattgtacgattacctgggacggtgctatggactactggggtcgtggaatatcagtcaccgtctcctca

SEQ ID NO: 1819 - protein, 117 aa, Artificial Sequence
  Description of Artificial Sequence: Synthetic polypeptide
EVQLVESGEDLVKPGGSLKLSCVASGFAFSSYGMSWVRQTPDMRLEWVATISSSGSRTYFPDSVKGRLTISRDNDKNILYLQMSSLRSEDTAMYYCTITWDGAMDYWGRGISVTVSS

SEQ ID NO: 1820 - DNA, 1377 bp, Artificial Sequence
  Description of Artificial Sequence: Synthetic polynucleotide
atgaacttcgggctcagcttgattttccttgtccttgttttaaaaggtgtccagtgtgaggttcatctggtggagtctgggggagccttagtgaagcctggagggtccctgaaactctcctgtgcagcctctggattcagtttcagtaaatatggcatgtcttgggttcgccagactccagacaagaggctggagtgggtcgcaaccattagtagtagtgggagtcgcacctactatccagacagtgtgaagggccaattcaccatctccagagacaatgccaagaacaccctgtacctgcaaatgagcagtctgaagtctgaggacacagccatgtattactgttcaattagctgggacggtgctatggactactggggtcaagggacctcagtcaccgtctcctcagccaaaacgacacccccatctgtctatccactggcccctggatctgctgcccaaactaactccatggtgaccctgggatgcctggtcaagggctatttccctgagccagtgacagtgacctggaactctggatccctgtccagcggtgtgcacaccttcccagctgtcctgcagtctgacctctacactctgagcagctcagtgactgtcccctccagcacctggcccagcgagaccgtcacctgcaacgttgcccacccggccagcagcaccaaggtggacaagaaaattgtgcccagggattgtggttgtaagccttgcatatgtacagtcccagaagtatcatctgtcttcatcttccccccaaagcccaaggatgtgctcaccattactctgactcctaaggtcacgtgtgttgtggtagacatcagcaaggatgatcccgaggtccagttcagctggtttgtagatgatgtggaggtgcacacagctcagacgcaaccccgggaggagcagttcaacagcactttccgctcagtcagtgaacttcccatcatgcaccaggactggctcaatggcaaggagttcaaatgcagggtcaacagtgcagctttccctgcccccatcgagaaaaccatctccaaaaccaaaggcagaccgaaggctccacaggtgtacaccattccacctcccaaggagcagatggccaaggataaagtcagtctgacctgcatgataacagacttcttccctgaagacattactgtggagtggcagtggaatgggcagccagcggagaactacaagaacactcagcccatcatggacacagatggctcttacttcgtctacagcaagctcaatgtgcagaagagcaactgggaggcaggaaatactttcacctgctctgtgttacatgagggcctgcacaaccaccatactgagaagagcctctcccactctcctggt

SEQ ID NO: 1821 - DNA, 351 bp, Artificial Sequence
  Description of Artificial Sequence: Synthetic polynucleotide
gaggttcatctggtggagtctgggggagccttagtgaagcctggagggtccctgaaactctcctgtgcagcctctggattcagtttcagtaaatatggcatgtcttgggttcgccagactccagacaagaggctggagtgggtcgcaaccattagtagtagtgggagtcgcacctactatccagacagtgtgaagggccaattcaccatctccagagacaatgccaagaacaccctgtacctgcaaatgagcagtctgaagtctgaggacacagccatgtattactgttcaattagctgggacggtgctatggactactggggtcaagggacctcagtcaccgtctcctca

SEQ ID NO: 1822 - protein, 117 aa, Artificial Sequence
  Description of Artificial Sequence: Synthetic polypeptide
EVHLVESGGALVKPGGSLKLSCAASGFSFSKYGMSWVRQTPDKRLEWVATISSSGSRTYYPDSVKGQFTISRDNAKNTLYLQMSSLKSEDTAMYYCSISWDGAMDYWGQGTSVTVSS

SEQ ID NO: 1823 - protein, 30 aa, Artificial Sequence
  Description of Artificial Sequence: Synthetic polypeptide
  MOD_RES (3)..(3): His or Gln
EVXLVESGGALVKPGGSLRLSCAASGFSFS

SEQ ID NO: 1824 - DNA, 351 bp, Artificial Sequence
  Description of Artificial Sequence: Synthetic polynucleotide
gaggttcatctggtggagtctgggggagccttagtgaagcctggagggtccctgagactctcctgtgcagcctctggattcagtttcagtaaatatggcatgtcttgggttcgccaggccccaggcaagggcctggagtgggtcgcaaccattagtagtagtgggagtcgcacctactatccagacagtgtgaagggcagattcaccatctccagagacaatgccaagaacaccctgtacctgcaaatgagcagtctgaagtctgaggacacagccatgtattactgttcaattagctgggacggtgctatggactactggggtcaagggacctcagtcaccgtctcctca

SEQ ID NO: 1825 - protein, 117 aa, Artificial Sequence
  Description of Artificial Sequence: Synthetic polypeptide
EVHLVESGGALVKPGGSLRLSCAASGFSFSKYGMSWVRQAPGKGLEWVATISSSGSRTYYPDSVKGRFTISRDNAKNTLYLQMSSLKSEDTAMYYCSISWDGAMDYWGQGTSVTVSS

SEQ ID NO: 1826 - DNA, 351 bp, Artificial Sequence
  Description of Artificial Sequence: Synthetic polynucleotide
gaggttcatctggtggagtctgggggagccttagtgaagcctggagggtccctgagactctcctgtgcagcctctggattcagtttcagtaaatatggcatgtcttgggttcgccaggccccaggcaagggcctggagtgggtcgcaaccattagtagtagtgggagtcgcacctactatccagacagtgtgaagggcagattcaccatctccagagacaatgccaagaacaccctgtacctgcaaatgaacagtctgagagccgaggacacagccatgtattactgttcaattagctgggacggtgctatggactactggggtcaagggaccaccgtcaccgtctcctca

SEQ ID NO: 1827 - protein, 117 aa, Artificial Sequence
  Description of Artificial Sequence: Synthetic polypeptide
EVHLVESGGALVKPGGSLRLSCAASGFSFSKYGMSWVRQAPGKGLEWVATISSSGSRTYYPDSVKGRFTISRDNAKNTLYLQMNSLRAEDTAMYYCSISWDGAMDYWGQGTTVTVSS

SEQ ID NO: 1828 - DNA, 351 bp, Artificial Sequence
  Description of Artificial Sequence: Synthetic polynucleotide
gaggttcagctggtggagtctgggggagccttagtgaagcctggagggtccctgagactctcctgtgcagcctctggattcagtttcagtaaatatggcatgtcttgggttcgccaggccccaggcaagggcctggagtgggtcgcaaccattagtagtagtgggagtcgcacctactatccagacagtgtgaagggcagattcaccatctccagagacaatgccaagaacaccctgtacctgcaaatgaacagtctgagagccgaggacacagccatgtattactgttcaattagctgggacggtgctatggactactggggtcaagggaccaccgtcaccgtctcctca

SEQ ID NO: 1829 - protein, 117 aa, Artificial Sequence
  Description of Artificial Sequence: Synthetic polypeptide
EVQLVESGGALVKPGGSLRLSCAASGFSFSKYGMSWVRQAPGKGLEWVATISSSGSRTYYPDSVKGRFTISRDNAKNTLYLQMNSLRAEDTAMYYCSISWDGAMDYWGQGTTVTVSS

SEQ ID NO: 1830 - DNA, 351 bp, Artificial Sequence
  Description of Artificial Sequence: Synthetic polynucleotide
gaggttcagctggtggagtctgggggagccttagtgaagcctggagggtccctgagactctcctgtgcagcctctggattcagtttcagtaaatatggcatgtcttgggttcgccaggccccaggcaagggcctggagtgggtcgcaaccattagtagtagtgggagtcgcacctactatccagacagtgtgaagggcagattcaccatctccagagacaatgccaagaacaccctgtacctgcaaatgaacagtctgagagccgaggacacagccatgtattactgtgccattagctgggacggtgctatggactactggggtcaagggaccaccgtcaccgtctcctca

SEQ ID NO: 1831 - protein, 117 aa, Artificial Sequence
  Description of Artificial Sequence: Synthetic polypeptide
EVQLVESGGALVKPGGSLRLSCAASGFSFSKYGMSWVRQAPGKGLEWVATISSSGSRTYYPDSVKGRFTISRDNAKNTLYLQMNSLRAEDTAMYYCAISWDGAMDYWGQGTTVTVSS

SEQ ID NO: 1832 - DNA, 1374 bp, Artificial Sequence
  Description of Artificial Sequence: Synthetic polynucleotide
atggaatggacctgggtctttctcttcctcctgtcagtaactgcaggtgtccactcccaggttcagctgcagcagtctggagctgagctgatgaagcctggggcctcagtgaagatatcctgcaaggctactggctacacattcagtaactactggatagagtgggtaaagcagaggcctggacatggccttgagtggattggagagattttacctggaagtgatagtattaagtacaatgagaatttcaagggcaaggccacattcactgcagatacatcctccaacacagcctacatgcaactcagcagcctgacatctgaggactctgccgtctattactgtgcaagaagggggaactacccagactactggggccaaggcaccactctcacagtctcctcagccaaaacgacacccccatctgtctatccactggcccctggatctgctgcccaaactaactccatggtgaccctgggatgcctggtcaagggctatttccctgagccagtgacagtgacctggaactctggatccctgtccagcggtgtgcacaccttcccagctgtcctgcagtctgacctctacactctgagcagctcagtgactgtcccctccagcacctggcccagcgagaccgtcacctgcaacgttgcccacccggccagcagcaccaaggtggacaagaaaattgtgcccagggattgtggttgtaagccttgcatatgtacagtcccagaagtatcatctgtcttcatcttccccccaaagcccaaggatgtgctcaccattactctgactcctaaggtcacgtgtgttgtggtagacatcagcaaggatgatcccgaggtccagttcagctggtttgtagatgatgtggaggtgcacacagctcagacgcaaccccgggaggagcagttcaacagcactttccgctcagtcagtgaacttcccatcatgcaccaggactggctcaatggcaaggagttcaaatgcagggtcaacagtgcagctttccctgcccccatcgagaaaaccatctccaaaaccaaaggcagaccgaaggctccacaggtgtacaccattccacctcccaaggagcagatggccaaggataaagtcagtctgacctgcatgataacagacttcttccctgaagacattactgtggagtggcagtggaatgggcagccagcggagaactacaagaacactcagcccatcatggacacagatggctcttacttcgtctacagcaagctcaatgtgcagaagagcaactgggaggcaggaaatactttcacctgctctgtgttacatgagggcctgcacaaccaccatactgagaagagcctctcccactctcctggt

SEQ ID NO: 1833 - DNA, 1326 bp, Artificial Sequence
  Description of Artificial Sequence: Synthetic polynucleotide
gaggtgcagctggtgcagtctggagcagaggtgaaaaagcccggggagtctctgaagatctcctgtaagggttctggctacacattcagtaactactggatagagtgggtgcgccagatgcccgggaaaggcctggagtggatgggggagattttacctggaagtgatagtattaagtacgaaaagaatttcaagggccaggtcaccatctcagccgacaagtccatcagcaccgcctacctgcagtggagcagcctgaaggcctcggacaccgccatgtattactgtgcgagaagggggaactacgtggacgactggggccagggcaccctggtcaccgtctcctcagcttctaccaagggcccatcggtcttcccgctagcgccctgctccaggagcacctccgagagcacagccgccctgggctgcctggtcaaggactacttccccgaaccggtgacggtgtcgtggaactcaggcgccctgaccagcggcgtgcacaccttcccggctgtcctacagtcctcaggactctactccctcagcagcgtggtgaccgtgccctccagcagcttgggcacgaagacctacacctgcaacgtagatcacaagcccagcaacaccaaggtggacaagagagttgagtccaaatatggtcccccatgcccaccctgcccagcacctgaggccgccgggggaccatcagtcttcctgttccccccaaaacccaaggacactctcatgatctcccggacccctgaggtcacgtgcgtggtggtggacgtgagccaggaagaccccgaggtccagttcaactggtacgtggatggcgtggaggtgcataatgccaagacaaagccgcgggaggagcagttcaacagcacgtaccgtgtggtcagcgtcctcaccgtcctgcaccaggactggctgaacggcaaggagtacaagtgcaaggtctccaacaaaggcctcccgtcctccatcgagaaaaccatctccaaagccaaagggcagccccgagagccacaggtgtacaccctgcccccatcccaggaggagatgaccaagaaccaggtcagcctgacctgcctggtcaaaggcttctaccccagcgacatcgccgtggagtgggaaagcaatgggcagccggagaacaactacaagaccacgcctcccgtgctggactccgacggctccttcttcctctacagcaggctaaccgtggacaagagcaggtggcaggaggggaatgtcttctcatgctccgtgatgcatgaggctctgcacaaccactacacacagaagagcctctccctgtctctgggt

SEQ ID NO: 1834 - protein, 458 aa, Artificial Sequence
  Description of Artificial Sequence: Synthetic polypeptide
MEWTWVFLFLLSVTAGVHSQVQLQQSGAELMKPGASVKISCKATGYTFSNYWIEWVKQRPGHGLEWIGEILPGSDSIKYNENFKGKATFTADTSSNTAYMQLSSLTSEDSAVYYCARRGNYPDYWGQGTTLTVSSAKTTPPSVYPLAPGSAAQTNSMVTLGCLVKGYFPEPVTVTWNSGSLSSGVHTFPAVLQSDLYTLSSSVTVPSSTWPSETVTCNVAHPASSTKVDKKIVPRDCGCKPCICTVPEVSSVFIFPPKPKDVLTITLTPKVTCVVVDISKDDPEVQFSWFVDDVEVHTAQTQPREEQFNSTFRSVSELPIMHQDWLNGKEFKCRVNSAAFPAPIEKTISKTKGRPKAPQVYTIPPPKEQMAKDKVSLTCMITDFFPEDITVEWQWNGQPAENYKNTQPIMDTDGSYFVYSKLNVQKSNWEAGNTFTCSVLHEGLHNHHTEKSLSHSPG

SEQ ID NO: 1835 - protein, 442 aa, Artificial Sequence
  Description of Artificial Sequence: Synthetic polypeptide
EVQLVQSGAEVKKPGESLKISCKGSGYTFSNYWIEWVRQMPGKGLEWMGEILPGSDSIKYEKNFKGQVTISADKSISTAYLQWSSLKASDTAMYYCARRGNYVDDWGQGTLVTVSSASTKGPSVFPLAPCSRSTSESTAALGCLVKDYFPEPVTVSWNSGALTSGVHTFPAVLQSSGLYSLSSVVTVPSSSLGTKTYTCNVDHKPSNTKVDKRVESKYGPPCPPCPAPEAAGGPSVFLFPPKPKDTLMISRTPEVTCVVVDVSQEDPEVQFNWYVDGVEVHNAKTKPREEQFNSTYRVVSVLTVLHQDWLNGKEYKCKVSNKGLPSSIEKTISKAKGQPREPQVYTLPPSQEEMTKNQVSLTCLVKGFYPSDIAVEWESNGQPENNYKTTPPVLDSDGSFFLYSRLTVDKSRWQEGNVFSCSVMHEALHNHYTQKSLSLSLG

SEQ ID NO: 1836 - protein, 116 aa, Artificial Sequence
  Description of Artificial Sequence: Synthetic polypeptide
EVQLVQSGAEVKKPGESLKISCKGSGYTFSNYWIEWVRQMPGKGLEWMGEILPGSDSIKYEKNFKGQVTISADKSISTAYLQWSSLKASDTAMYYCARRGNYVDDWGQGTLVTVSS

SEQ ID NO: 1837 - DNA, 1320 bp, Artificial Sequence
  Description of Artificial Sequence: Synthetic polynucleotide
gaggtccagctgcaacagtctggacctgagctggtgaagcctggggcttcagtgaagatatcctgcaagacttctggatacacattcactgaatacaccatacactgggtgaagcagagccatggagagagccttgagtggattggaggtattaatccaaacgatggtggtactatttacaaccagaagttcaagggcaaggccacattgactgtagacaagtcctccaaaacagcctacatggagctccgcagcctgacatctgaggattctgcagtcttttactgtgcaagagggccctccgccaggtttccttactggggccaagggactctggtcactgtctctgcagccaaaacgacacccccatctgtctatccactggcccctggatctgctgcccaaactaactccatggtgaccctgggatgcctggtcaagggctatttccctgagccagtgacagtgacctggaactctggatccctgtccagcggtgtgcacaccttcccagctgtcctgcagtctgacctctacactctgagcagctcagtgactgtcccctccagcacctggcccagcgagaccgtcacctgcaacgttgcccacccggccagcagcaccaaggtggacaagaaaattgtgcccagggattgtggttgtaagccttgcatatgtacagtcccagaagtatcatctgtcttcatcttccccccaaagcccaaggatgtgctcaccattactctgactcctaaggtcacgtgtgttgtggtagacatcagcaaggatgatcccgaggtccagttcagctggtttgtagatgatgtggaggtgcacacagctcagacgcaaccccgggaggagcagttcaacagcactttccgctcagtcagtgaacttcccatcatgcaccaggactggctcaatggcaaggagttcaaatgcagggtcaacagtgcagctttccctgcccccatcgagaaaaccatctccaaaaccaaaggcagaccgaaggctccacaggtgtacaccattccacctcccaaggagcagatggccaaggataaagtcagtctgacctgcatgataacagacttcttccctgaagacattactgtggagtggcagtggaatgggcagccagcggagaactacaagaacactcagcccatcatggacacagatggctcttacttcgtctacagcaagctcaatgtgcagaagagcaactgggaggcaggaaatactttcacctgctctgtgttacatgagggcctgcacaaccaccatactgagaagagcctctcccactctcctggt

SEQ ID NO: 1838 - DNA, 1377 bp, Artificial Sequence
  Description of Artificial Sequence: Synthetic polynucleotide
atgggatggagctggatctttctctttctcctgtcaggaactacaggtgtcctctctgaggtccagctgcaacagtctggacctgagctggtgaagcctggggcttcagtgaagatatcctgcaagacttctggatacacattcactgaatacaccatacactgggtgaagcagagccatggagagagccttgagtggattggaggtattaatccaaacgatggtggtactatttacaaccagaagttcaagggcaaggccacattgactgtagacaagtcctccaaaacagcctacatggagctccgcagcctgacatctgaggattctgcagtcttttactgtgcaagagggccctccgccaggtttccttactggggccaagggactctggtcactgtctctgcagccaaaacgacacccccatctgtctatccactggcccctggatctgctgcccaaactaactccatggtgaccctgggatgcctggtcaagggctatttccctgagccagtgacagtgacctggaactctggatccctgtccagcggtgtgcacaccttcccagctgtcctgcagtctgacctctacactctgagcagctcagtgactgtcccctccagcacctggcccagcgagaccgtcacctgcaacgttgcccacccggccagcagcaccaaggtggacaagaaaattgtgcccagggattgtggttgtaagccttgcatatgtacagtcccagaagtatcatctgtcttcatcttccccccaaagcccaaggatgtgctcaccattactctgactcctaaggtcacgtgtgttgtggtagacatcagcaaggatgatcccgaggtccagttcagctggtttgtagatgatgtggaggtgcacacagctcagacgcaaccccgggaggagcagttcaacagcactttccgctcagtcagtgaacttcccatcatgcaccaggactggctcaatggcaaggagttcaaatgcagggtcaacagtgcagctttccctgcccccatcgagaaaaccatctccaaaaccaaaggcagaccgaaggctccacaggtgtacaccattccacctcccaaggagcagatggccaaggataaagtcagtctgacctgcatgataacagacttcttccctgaagacattactgtggagtggcagtggaatgggcagccagcggagaactacaagaacactcagcccatcatggacacagatggctcttacttcgtctacagcaagctcaatgtgcagaagagcaactgggaggcaggaaatactttcacctgctctgtgttacatgagggcctgcacaaccaccatactgagaagagcctctcccactctcctggt

SEQ ID NO: 1839 - DNA, 351 bp, Artificial Sequence
  Description of Artificial Sequence: Synthetic polynucleotide
gaggtccagctgcaacagtctggacctgagctggtgaagcctggggcttcagtgaagatatcctgcaagacttctggatacacattcactgaatacaccatacactgggtgaagcagagccatggagagagccttgagtggattggaggtattaatccaaacgatggtggtactatttacaaccagaagttcaagggcaaggccacattgactgtagacaagtcctccaaaacagcctacatggagctccgcagcctgacatctgaggattctgcagtcttttactgtgcaagagggccctccgccaggtttccttactggggccaagggactctggtcactgtctctgca

SEQ ID NO: 1840 - DNA, 699 bp, Artificial Sequence
  Description of Artificial Sequence: Synthetic polynucleotide
atgggatggagctggatctttctctttctcctgtcaggaactacaggtgtcctctctgaggtccagctgcaacagtctggacctgagctggtgaagcctggggcttcagtgaagatatcctgcaagacttctggatacacattcactgaatacaccatacactgggtgaagcagagccatggagagagccttgagtggattggaggtattaatccaaacgatggtggtactatttacaaccagaagttcaagggcaaggccacattgactgtagacaagtcctccaaaacagcctacatggagctccgcagcctgacatctgaggattctgcagtcttttactgtgcaagagggccctccgccaggtttccttactggggccaagggactctggtcactgtctctgcagccaaaacgacacccccatctgtctatccactggcccctggatctgctgcccaaactaactccatggtgaccctgggatgcctggtcaagggctatttccctgagccagtgacagtgacctggaactctggatccctgtccagcggtgtgcacaccttcccagctgtcctgcagtctgacctctacactctgagcagctcagtgactgtcccctccagcacctggcccagcgagaccgtcacctgcaacgttgcccacccggccagcagcaccaaggtggacaagaaaatt

SEQ ID NO: 1841 - DNA, 717 bp, Artificial Sequence
  Description of Artificial Sequence: Synthetic polynucleotide
atgggatggagctggatctttctctttctcctgtcaggaactacaggtgtcctctctgaggtccagctgcaacagtctggacctgagctggtgaagcctggggcttcagtgaagatatcctgcaagacttctggatacacattcactgaatacaccatacactgggtgaagcagagccatggagagagccttgagtggattggaggtattaatccaaacgatggtggtactatttacaaccagaagttcaagggcaaggccacattgactgtagacaagtcctccaaaacagcctacatggagctccgcagcctgacatctgaggattctgcagtcttttactgtgcaagagggccctccgccaggtttccttactggggccaagggactctggtcactgtctctgcagccaaaacgacacccccatctgtctatccactggcccctggatctgctgcccaaactaactccatggtgaccctgggatgcctggtcaagggctatttccctgagccagtgacagtgacctggaactctggatccctgtccagcggtgtgcacaccttcccagctgtcctgcagtctgacctctacactctgagcagctcagtgactgtcccctccagcacctggcccagcgagaccgtcacctgcaacgttgcccacccggccagcagcaccaaggtggacaagaaaattgtgcccagggattgtggt

SEQ ID NO: 1842 - DNA, 744 bp, Artificial Sequence
  Description of Artificial Sequence: Synthetic polynucleotide
atgggatggagctggatctttctctttctcctgtcaggaactacaggtgtcctctctgaggtccagctgcaacagtctggacctgagctggtgaagcctggggcttcagtgaagatatcctgcaagacttctggatacacattcactgaatacaccatacactgggtgaagcagagccatggagagagccttgagtggattggaggtattaatccaaacgatggtggtactatttacaaccagaagttcaagggcaaggccacattgactgtagacaagtcctccaaaacagcctacatggagctccgcagcctgacatctgaggattctgcagtcttttactgtgcaagagggccctccgccaggtttccttactggggccaagggactctggtcactgtctctgcagccaaaacgacacccccatctgtctatccactggcccctggatctgctgcccaaactaactccatggtgaccctgggatgcctggtcaagggctatttccctgagccagtgacagtgacctggaactctggatccctgtccagcggtgtgcacaccttcccagctgtcctgcagtctgacctctacactctgagcagctcagtgactgtcccctccagcacctggcccagcgagaccgtcacctgcaacgttgcccacccggccagcagcaccaaggtggacaagaaaattgtgcccagggattgtggttgtaagccttgcatatgtacagtccca

SEQ ID NO: 1843 - DNA, 753 bp, Artificial Sequence
  Description of Artificial Sequence: Synthetic polynucleotide
atgggatggagctggatctttctctttctcctgtcaggaactacaggtgtcctctctgaggtccagctgcaacagtctggacctgagctggtgaagcctggggcttcagtgaagatatcctgcaagacttctggatacacattcactgaatacaccatacactgggtgaagcagagccatggagagagccttgagtggattggaggtattaatccaaacgatggtggtactatttacaaccagaagttcaagggcaaggccacattgactgtagacaagtcctccaaaacagcctacatggagctccgcagcctgacatctgaggattctgcagtcttttactgtgcaagagggccctccgccaggtttccttactggggccaagggactctggtcactgtctctgcagccaaaacgacacccccatctgtctatccactggcccctggatctgctgcccaaactaactccatggtgaccctgggatgcctggtcaagggctatttccctgagccagtgacagtgacctggaactctggatccctgtccagcggtgtgcacaccttcccagctgtcctgcagtctgacctctacactctgagcagctcagtgactgtcccctccagcacctggcccagcgagaccgtcacctgcaacgttgcccacccggccagcagcaccaaggtggacaagaaaattgtgcccagggattgtggttgtaagccttgcatatgtacagtcccagaagtatca

SEQ ID NO: 1844 - protein, 459 aa, Artificial Sequence
  Description of Artificial Sequence: Synthetic polypeptide
MGWSWIFLFLLSGTTGVLSEVQLQQSGPELVKPGASVKISCKTSGYTFTEYTIHWVKQSHGESLEWIGGINPNDGGTIYNQKFKGKATLTVDKSSKTAYMELRSLTSEDSAVFYCARGPSARFPYWGQGTLVTVSAAKTTPPSVYPLAPGSAAQTNSMVTLGCLVKGYFPEPVTVTWNSGSLSSGVHTFPAVLQSDLYTLSSSVTVPSSTWPSETVTCNVAHPASSTKVDKKIVPRDCGCKPCICTVPEVSSVFIFPPKPKDVLTITLTPKVTCVVVDISKDDPEVQFSWFVDDVEVHTAQTQPREEQFNSTFRSVSELPIMHQDWLNGKEFKCRVNSAAFPAPIEKTISKTKGRPKAPQVYTIPPPKEQMAKDKVSLTCMITDFFPEDITVEWQWNGQPAENYKNTQPIMDTDGSYFVYSKLNVQKSNWEAGNTFTCSVLHEGLHNHHTEKSLSHSPG

SEQ ID NO: 1845 - DNA, 1383 bp, Artificial Sequence
  Description of Artificial Sequence: Synthetic polynucleotide
atgggatggagctggatctttctctttctcctgtcaggaactacaggtgtcctctctgctgccgaggtccagctgcaacagtctggacctgagctggtgaagcctggggcttcagtgaagatatcctgcaagacttctggatacacattcactgaatacaccatacactgggtgaagcagagccatggagagagccttgagtggattggaggtattaatccaaacgatggtggtactatttacaaccagaagttcaagggcaaggccacattgactgtagacaagtcctccaaaacagcctacatggagctccgcagcctgacatctgaggattctgcagtcttttactgtgcaagagggccctccgccaggtttccttactggggccaagggactctggtcactgtctctgcagccaaaacgacacccccatctgtctatccactggcccctggatctgctgcccaaactaactccatggtgaccctgggatgcctggtcaagggctatttccctgagccagtgacagtgacctggaactctggatccctgtccagcggtgtgcacaccttcccagctgtcctgcagtctgacctctacactctgagcagctcagtgactgtcccctccagcacctggcccagcgagaccgtcacctgcaacgttgcccacccggccagcagcaccaaggtggacaagaaaattgtgcccagggattgtggttgtaagccttgcatatgtacagtcccagaagtatcatctgtcttcatcttccccccaaagcccaaggatgtgctcaccattactctgactcctaaggtcacgtgtgttgtggtagacatcagcaaggatgatcccgaggtccagttcagctggtttgtagatgatgtggaggtgcacacagctcagacgcaaccccgggaggagcagttcaacagcactttccgctcagtcagtgaacttcccatcatgcaccaggactggctcaatggcaaggagttcaaatgcagggtcaacagtgcagctttccctgcccccatcgagaaaaccatctccaaaaccaaaggcagaccgaaggctccacaggtgtacaccattccacctcccaaggagcagatggccaaggataaagtcagtctgacctgcatgataacagacttcttccctgaagacattactgtggagtggcagtggaatgggcagccagcggagaactacaagaacactcagcccatcatggacacagatggctcttacttcgtctacagcaagctcaatgtgcagaagagcaactgggaggcaggaaatactttcacctgctctgtgttacatgagggcctgcacaaccaccatactgagaagagcctctcccactctcctggt

SEQ ID NO: 1846 - DNA, 357 bp, Mus musculus
caggttcagctgcagcagtctggaactgagctgatgaagcctggggcctcagtgaagatatcctgcaaggctactggctacacattcagtagctcctggatggggtgggttaagcagaggcctggacatggccttgagtggattggagacattttacctggaagtggtggtactaactacaatgagaggttcaagggcaaggcctcattcactgcagaaacatcctccaacacagcctacatgcaactcagcagcctgacatctgaggactctgccgtctattactgtgtaagaagctactatgattacgaccgctttgctaactggggccaagggactctggtcactgtctctgca

SEQ ID NO: 1847 - protein, 119 aa, Mus musculus
QVQLQQSGTELMKPGASVKISCKATGYTFSSSWMGWVKQRPGHGLEWIGDILPGSGGTNYNERFKGKASFTAETSSNTAYMQLSSLTSEDSAVYYCVRSYYDYDRFANWGQGTLVTVSA

SEQ ID NO: 1848 - DNA, 354 bp, Mus musculus
gaagtgaagctggtggagtctgggggagacttagtgaagcctggagggtccctgaaactctcctgtgcagcctctggattcactttcagtagctatgccatgtcttgggttcgccagaatccagagaagaggctggagtgggtcgcatccattagtaagggtggtaacacctactatccaaacagcgtgaagggccgattcaccatctccagagataatgccaggaacatcctgtacctgcaaatgagcagtctgaggtctgaggacacggccctttattactgtgcaagaggctggggtgattacgggtggtttgcttactggggccaagtgactctggtcactgtctctgca

SEQ ID NO: 1849 - protein, 118 aa, Mus musculus
EVKLVESGGDLVKPGGSLKLSCAASGFTFSSYAMSWVRQNPEKRLEWVASISKGGNTYYPNSVKGRFTISRDNARNILYLQMSSLRSEDTALYYCARGWGDYGWFAYWGQVTLVTVSA

SEQ ID NO: 1850 - DNA, 354 bp, Artificial Sequence
  Description of Artificial Sequence: Synthetic polynucleotide
gaagtgaaactggtggaaagcggcggcgatctggtgaaaccgggcggcagcctgaaactgagctgcgcggcgagcggctttacctttagcagctatgcgatgagctgggtgcgccagaacccggaaaaacgcctggaatgggtggcgagcattagcaaaggcggcaacacctattatccgaacagcgtgaaaggccgctttaccattagccgcgataacgcgcgcaacattctgtatctgcagatgagcagcctgcgcagcgaagataccgcgctgtattattgcgcgcgcggctggggcgattatggctggtttgcgtattggggccaggtgaccctggtgaccgtgagcgcg

SEQ ID NO: 1851 - DNA, 354 bp, Artificial Sequence
  Description of Artificial Sequence: Synthetic polynucleotide
gaggtgaagctggtggagagcggaggagacctggtcaagcccgggggctccctgaagctcagctgtgccgccagcggcttcaccttctcctcctatgccatgtcctgggtccggcagaaccctgagaagaggctggagtgggtggcctccatctccaagggcggcaacacctactatcccaacagcgtgaaaggaagatttaccatcagccgggacaatgccaggaacatcctctacctgcagatgagcagcctgcggtctgaggacacagccctgtactactgcgcccggggctggggggactatggatggtttgcctactggggccaggtgaccctggttactgtgtctgcc

SEQ ID NO: 1852 - DNA, 354 bp, Artificial Sequence
  Description of Artificial Sequence: Synthetic polynucleotide
gaggtgaagctggtggagagcggcggcgacctggtgaagcccggcggcagcctgaagctgagctgcgccgccagcggcttcaccttcagcagctacgccatgagctgggtgaggcagaaccccgagaagaggctggagtgggtggccagcatcagcaagggcggcaacacctactaccccaacagcgtgaagggcaggttcaccatcagcagggacaacgccaggaacatcctgtacctgcagatgagcagcctgaggagcgaggacaccgccctgtactactgcgccaggggctggggcgactacggctggttcgcctactggggccaggtgaccctggtgaccgtgagcgcc

SEQ ID NO: 1853 - DNA, 354 bp, Artificial Sequence
  Description of Artificial Sequence: Synthetic polynucleotide
gaggtgaaacttgtggagagcggcggggacctggtcaagccaggcggcagcctgaagctgagctgtgccgcctccggcttcaccttcagcagctatgccatgtcctgggtccggcagaaccctgagaagaggctggagtgggtggccagcatcagcaaaggaggcaacacctactatcccaacagcgtgaagggccgcttcaccatctcccgggacaatgccaggaacatcctctacctgcagatgagctccctgcggtctgaggacacagccctgtactactgcgcccggggctggggagactatggatggtttgcctactggggccaggtgaccctggtgacagtgtctgcc

SEQ ID NO: 1854 - DNA, 354 bp, Artificial Sequence
  Description of Artificial Sequence: Synthetic polynucleotide
gaggtgaagctggtggagtctggcggagacctggtgaagccaggcggaagcctgaagctgtcctgcgccgcttctggcttcacctttagctcctacgccatgagctgggtgcggcagaacccagagaagcgcctggagtgggtggcttccatctctaagggcggaaacacctactaccctaacagcgtgaagggaaggttcacaatctccagggataacgccagaaacatcctgtacctgcagatgtctagcctgaggtccgaggacacagccctgtactactgtgctcggggctggggagattacggctggtttgcctactggggacaggtgaccctggtgacagtgtctgct

SEQ ID NO: 1855 - DNA, 354 bp, Artificial Sequence
  Description of Artificial Sequence: Synthetic polynucleotide
gaggtgaaacttgtggagagcggcggggacctggtgaagccaggcggcagcctgaagctgagctgtgccgcctccggcttcaccttcagcagctatgccatgtcctgggtccggcagaaccctgagaagaggctggagtgggtggccagcatcagcaaaggaggcaacacctactaccccaacagcgtcaagggccgcttcaccatctcccgggacaatgccaggaacatcctgtacctgcagatgagctccctgcggtctgaggacacagccctgtattactgcgcccggggctggggagactatggatggtttgcctactggggccaggtgaccctggtcaccgtgtctgcc

SEQ ID NO: 1856 - DNA, 354 bp, Artificial Sequence
  Description of Artificial Sequence: Synthetic polynucleotide
gaggtgaaacttgtggagtctggaggagacctggtgaagccaggaggcagcctgaagctgagctgtgctgccagtggcttcaccttcagcagctatgccatgtcctgggtccggcagaaccctgagaagaggctggagtgggtggccagcatctccaagggcggcaacacctactatcccaacagcgtcaaaggaagatttaccatcagccgggacaatgccaggaacatcctctacctgcagatgagctccctgcggtctgaggacacagccctgtactactgtgcccggggctggggagattatggatggtttgcctactggggccaggtgaccctggtcactgtgtctgct

SEQ ID NO: 1857 - DNA, 354 bp, Artificial Sequence
  Description of Artificial Sequence: Synthetic polynucleotide
gaggtgaaattagtggagtctggaggagacctggtgaagccaggaggcagcctgaagctgagctgtgctgcttctggcttcaccttcagcagctatgccatgtcctgggtcagacagaatcctgagaagagactggagtgggtggccagcatctccaaaggtggcaacacctactatcccaacagtgttaaaggaagatttaccatcagcagagataatgcaagaaacatcctctacctgcagatgtcttctttaagaagtgaagatacagccctgtactactgtgccagaggctggggagattatggatggtttgcctactggggccaggtgacattagttactgtgtctgct

SEQ ID NO: 1858 - DNA, 354 bp, Artificial Sequence
  Description of Artificial Sequence: Synthetic polynucleotide
gaggtgaagctggtggagagcggcggggacctggtcaagcccgggggcagcctgaagctcagctgtgccgcctccggcttcaccttcagcagctatgccatgtcctgggtccggcagaaccctgagaagaggctggagtgggtggccagcatcagcaagggcggcaacacctactatcccaacagcgtgaaaggccgcttcaccatctcccgggacaatgccaggaacatcctgtacctgcagatgagctccctgcgcagcgaggacacagccctctactactgcgcccggggctggggagactatggatggtttgcctactggggccaggtgaccctggttactgtgtctgcc

SEQ ID NO: 1859 - DNA, 354 bp, Artificial Sequence
  Description of Artificial Sequence: Synthetic polynucleotide
gaggtgaagctggtggagagcggcggcgacctggtgaagcctggcggcagcctgaagctgagctgcgccgccagcggcttcaccttcagcagctacgccatgagctgggtgagacagaaccctgagaagagactggagtgggtggccagcatcagcaagggcggcaacacctactaccctaacagcgtgaagggcagattcaccatcagcagagacaacgccagaaacatcctgtacctgcagatgagcagcctgagaagcgaggacaccgccctgtactactgcgccagaggctggggcgactacggctggttcgcctactggggccaggtgaccctggtgaccgtgagcgcc

SEQ ID NO: 1860 - protein, 30 aa, Artificial Sequence; identical to SEQ ID NO: 1823
  Description of Artificial Sequence: Synthetic polypeptide
  MOD_RES (3)..(3): His or Gln

SEQ ID NO: 1861 - DNA, 57 bp, Artificial Sequence
  Description of Artificial Sequence: Synthetic oligonucleotide
atgaagttgcctgttaggctgttggtgctgatgttctggattcctgcttccagcagt

SEQ ID NO: 1862 - DNA, 57 bp, Artificial Sequence
  Description of Artificial Sequence: Synthetic oligonucleotide
atgagtcctgcccagttcctgtttctgttagtgctctggattcgggaaaccaacggt

SEQ ID NO: 1863 - DNA, 72 bp, Artificial Sequence
  Description of Artificial Sequence: Synthetic oligonucleotide
gccgccaccatgagtcctgcccagttcctgtttctgttagtgctctggattcgggaaaccaacggtgctgcc

SEQ ID NO: 1864 - DNA, 321 bp, Artificial Sequence
  Description of Artificial Sequence: Synthetic polynucleotide
cgggctgatgctgcaccaactgtatccatcttcccaccatccagtgagcagttaacatctggaggtgcctcagtcgtgtgcttcttgaacaacttctaccccaaagacatcaatgtcaagtggaagattgatggcagtgaacgacaaaatggcgtcctgaacagttggactgatcaggacagcaaagacagcacctacagcatgagcagcaccctcacgttgaccaaggacgagtatgaacgacataacagctatacctgtgaggccactcacaagacatcaacttcacccattgtcaagagcttcaacaggaatgagtgt

SEQ ID NO: 1865 - protein, 16 aa, Artificial Sequence
  Description of Artificial Sequence: Synthetic peptide
RSSQTIVHSNGNTYLE

SEQ ID NO: 1866 - protein, 9 aa, Artificial Sequence
  Description of Artificial Sequence: Synthetic peptide
FQGSHVPFT

SEQ ID NO: 1867 - protein, 11 aa, Artificial Sequence
  Description of Artificial Sequence: Synthetic peptide
KASQDINKYIA

SEQ ID NO: 1868 - protein, 7 aa, Artificial Sequence
  Description of Artificial Sequence: Synthetic peptide
YTSTLQS

SEQ ID NO: 1869 - protein, 8 aa, Artificial Sequence
  Description of Artificial Sequence: Synthetic peptide
LQYDHLLT

SEQ ID NO: 1870 - protein, 15 aa, Artificial Sequence
  Description of Artificial Sequence: Synthetic peptide
RASKSVSTSDYSYMH

SEQ ID NO: 1871 - protein, 7 aa, Artificial Sequence
  Description of Artificial Sequence: Synthetic peptide
LASNLES

SEQ ID NO: 1872 - protein, 9 aa, Artificial Sequence
  Description of Artificial Sequence: Synthetic peptide
QHSRELPFT

SEQ ID NO: 1873 - protein, 16 aa, Artificial Sequence
  Description of Artificial Sequence: Synthetic peptide
KSSQSLLYSDGKTFLN

SEQ ID NO: 1874 - protein, 7 aa, Artificial Sequence
  Description of Artificial Sequence: Synthetic peptide
LVSKLQS

SEQ ID NO: 1875 - protein, 9 aa, Artificial Sequence
  Description of Artificial Sequence: Synthetic peptide
VQGTHFPYT

SEQ ID NO: 1876 - protein, 16 aa, Artificial Sequence
  Description of Artificial Sequence: Synthetic peptide
KSSQSLLYSDGKTYLN

SEQ ID NO: 1877 - protein, 7 aa, Artificial Sequence
  Description of Artificial Sequence: Synthetic peptide
QVSKLDP

SEQ ID NO: 1878 - protein, 9 aa, Artificial Sequence
  Description of Artificial Sequence: Synthetic peptide
LQGTYYPHT

SEQ ID NO: 1879 - protein, 8 aa, Artificial Sequence
  Description of Artificial Sequence: Synthetic peptide
LQGTYYPH

SEQ ID NO: 1880 - protein, 11 aa, Artificial Sequence
  Description of Artificial Sequence: Synthetic peptide
QASQGTSINLN

SEQ ID NO: 1881 - protein, 7 aa, Artificial Sequence
  Description of Artificial Sequence: Synthetic peptide
GASNLED

SEQ ID NO: 1882 - protein, 7 aa, Artificial Sequence
  Description of Artificial Sequence: Synthetic peptide
LQHTYLP

SEQ ID NO: 1883 - protein, 11 aa, Artificial Sequence
  Description of Artificial Sequence: Synthetic peptide
QASQDTSINLN

SEQ ID NO: 1884 - protein, 7 aa, Artificial Sequence
  Description of Artificial Sequence: Synthetic peptide
GSSNLED

SEQ ID NO: 1885 - protein, 7 aa, Artificial Sequence
  Description of Artificial Sequence: Synthetic peptide
LQHSYLP

SEQ ID NO: 1886 - protein, 16 aa, Artificial Sequence
  Description of Artificial Sequence: Synthetic peptide
RSSQSLVHSNGNTYLH

SEQ ID NO: 1887 - protein, 7 aa, Artificial Sequence
  Description of Artificial Sequence: Synthetic peptide
KVSNRFS

SEQ ID NO: 1888 - protein, 7 aa, Artificial Sequence
  Description of Artificial Sequence: Synthetic peptide
SQSTHVP

SEQ ID NO: 1889 - protein, 15 aa, Artificial Sequence
  Description of Artificial Sequence: Synthetic peptide
  MOD_RES (14)..(14): Val or Ile
WYLQKPGQSPQLLXY

SEQ ID NO: 1890 - protein, 32 aa, Artificial Sequence
  Description of Artificial Sequence: Synthetic polypeptide
  MOD_RES (29)..(29): Thr or Val
GVPDRFSGSGSGTDFTLKISRVEAEDVGXYYC

SEQ ID NO: 1891 - protein, 10 aa, Artificial Sequence
  Description of Artificial Sequence: Synthetic peptide
FGGGTKVEIK

SEQ ID NO: 1892 - protein, 16 aa, Artificial Sequence
  Description of Artificial Sequence: Synthetic peptide
RSSQTILHSNGNTYLE

SEQ ID NO: 1893 - protein, 16 aa, Artificial Sequence
  Description of Artificial Sequence: Synthetic peptide
KSSQSIVHSNGNTYLE

SEQ ID NO: 1894 - protein, 15 aa, Artificial Sequence
  Description of Artificial Sequence: Synthetic peptide
  MOD_RES (14)..(14): Val or Ile
WYLQKPGQSPQLLXY

SEQ ID NO: 1895 - protein, 7 aa, Artificial Sequence
  Description of Artificial Sequence: Synthetic peptide
KVSKRFS

SEQ ID NO: 1896 - protein, 32 aa, Artificial Sequence; identical to SEQ ID NO: 1890
  Description of Artificial Sequence: Synthetic polypeptide
  MOD_RES (29)..(29): Thr or Val

SEQ ID NO: 1897 - protein, 9 aa, Artificial Sequence
  Description of Artificial Sequence: Synthetic peptide
FQGSLVPWA

SEQ ID NO: 1898 - protein, 16 aa, Artificial Sequence
  Description of Artificial Sequence: Synthetic peptide
RSSQSLVHSNQNTYLH

SEQ ID NO: 1899 - protein, 8 aa, Artificial Sequence
  Description of Artificial Sequence: Synthetic peptide
YKVDNRFS

SEQ ID NO: 1900 - protein, 9 aa, Artificial Sequence
  Description of Artificial Sequence: Synthetic peptide
SQSTLVPLT

SEQ ID NO: 1901 - protein, 12 aa, Mus musculus
SESLLHSNGNTY

SEQ ID NO: 1902 - protein, 16 aa, Mus musculus
RSSESLLHSNGNTYLY

SEQ ID NO: 1903 - protein, 3 aa, Mus musculus
RMS

SEQ ID NO: 1904 - protein, 7 aa, Mus musculus
RMSNLAS

SEQ ID NO: 1905 - protein, 6 aa, Mus musculus
YLEYPL

SEQ ID NO: 1906 - protein, 9 aa, Mus musculus
MQYLEYPLT

SEQ ID NO: 1907 - protein, 7 aa, Mus musculus
SQDINRY

SEQ ID NO: 1908 - protein, 11 aa, Mus musculus
KASQDINRYLN

SEQ ID NO: 1909 - protein, 3 aa, Mus musculus
RAN

SEQ ID NO: 1910 - protein, 7 aa, Mus musculus
RANRLLD

SEQ ID NO: 1911 - protein, 6 aa, Mus musculus
YDEFPL

SEQ ID NO: 1912 - protein, 9 aa, Mus musculus
LQYDEFPLT

SEQ ID NO: 1913 - protein, 122 aa, Artificial Sequence
  Description of Artificial Sequence: Synthetic polypeptide
DIVLTQTPLSLPVSLGDPASISCRSSQTIVHSNGNTYLEWYLQKPGQSPKLLIYKVSNRFSGVPDRFSGSGSGTDFTLKISRVEAEDLGVYYCFQGSHVPFTFGSGTKLEIKRADAAPTVST

SEQ ID NO: 1914 - protein, 116 aa, Artificial Sequence
  Description of Artificial Sequence: Synthetic polypeptide
DIVLTQTPSSLSASLGGKVTITCKASQDINKYIAWYQHKPGKGPRLLIHYTSTLQSGIPSRFSGSGSGRDYSFSISNLEPEDIATYYCLQYDHLLTFGAGTKLELKRADAAPTVST

SEQ ID NO: 1915 - protein, 121 aa, Artificial Sequence
  Description of Artificial Sequence: Synthetic polypeptide
DIVLTQSPTSLAVSLGQRATISCRASKSVSTSDYSYMHWYQQKPGQPPKLLIYLASNLESGVPARFSGSGSGTDFTLNIHPVEEEDAATYYCQHSRELPFTFGGGTKLEIKRADAAPTVST

SEQ ID NO: 1916 - protein, 122 aa, Artificial Sequence
  Description of Artificial Sequence: Synthetic polypeptide
DIVLTQTPLTLSVTIGQPASISCKSSQSLLYSDGKTFLNWLLQSPGQSPRLLIYLVSKLQSGVPDRFSGSGSGTDFTLKISRVEAEDLGVYYCVQGTHFPYTFGGGTKLEIKRADAAPTVST

SEQ ID NO: 1917 - protein, 122 aa, Artificial Sequence
  Description of Artificial Sequence: Synthetic polypeptide
DIVMTQSPLSLSVTIGQPASISCKSSQSLLYSDGKTYLNWLQQRPGQSPKRLVYQVSKLDPGIPDRFSGSGSETDFTLKLSRVEAEDLGVYYCLQGTYYPHTFGGGTKLEIKRADAAPTVST

SEQ ID NO: 1918 - protein, 122 aa, Artificial Sequence
  Description of Artificial Sequence: Synthetic polypeptide
DIVITQSPLSLSVTIGQPASISCKSSQSLLYSDGKTYLNWLQQRPGQSPKRLVYQVSKLDPGIPDRFSGSGSETDFTLKLSRVEAEDLGVYYCLQGTYYPHTFGGGTKLEIKRADAAPTVST

SEQ ID NO: 1919 - protein, 107 aa, Artificial Sequence
  Description of Artificial Sequence: Synthetic polypeptide
DVQMIQSPSSLSASLGDIVTMTCQASQGTSINLNWFQQKPGKAPKLLIYGASNLEDGVPSRFSGSRYGTDFTLTISSLEDEDMATYFCLQHTYLPFTFGSGTKLEIK

SEQ ID NO: 1920 - protein, 214 aa, Artificial Sequence
  Description of Artificial Sequence: Synthetic polypeptide
DVQMIQSPSSLSASLGDIVTMTCQASQGTSINLNWFQQKPGKAPKLLIYGASNLEDGVPSRFSGSRYGTDFTLTISSLEDEDMATYFCLQHTYLPFTFGSGTKLEIKRADAAPTVSIFPPSSEQLTSGGASVVCFLNNFYPKDINVKWKIDGSERQNGVLNSWTDQDSKDSTYSMSSTLTLTKDEYERHNSYTCEATHKTSTSPIVKSFNRNEC

SEQ ID NO: 1921 - DNA, 321 bp, Artificial Sequence
  Description of Artificial Sequence: Synthetic polynucleotide
gacgtgcagatgatccagagccccagcagcctgagcgccagcctgggcgacatcgtgaccatgacctgccaggccagccagggcaccagcatcaacctgaactggttccagcagaagcccggcaaggcccccaagctgctgatctacggcgccagcaacctggaggacggcgtgcccagcaggttcagcggcagcaggtacggcaccgacttcaccctgaccatcagcagcctggaggacgaggacatggccacctacttctgcctgcagcacacctacctgcccttcaccttcggcagcggcaccaagctggagatcaag

SEQ ID NO: 1922 - DNA, 321 bp, Artificial Sequence
  Description of Artificial Sequence: Synthetic polynucleotide
gacgttcagatgatccagagccccagcagcctgagcgccagcctgggcgacatcgtgaccatgacctgccaggccagccagggcaccagcatcaacctgaactggttccagcagaagcccggcaaggcccccaagctgctgatctacggcgccagcaacctggaggacggcgtgcccagccggttcagcggcagccggtacggcaccgacttcaccctgaccatcagcagcctggaggacgaggacatggccacctacttctgcctgcagcacacctacctgcccttcaccttcggcagcggcaccaagctggagatcaag

SEQ ID NO: 1923 - DNA, 321 bp, Artificial Sequence
  Description of Artificial Sequence: Synthetic polynucleotide
gatgtgcagatgatccagagcccttcttccctctccgcctccctgggcgacatcgtgaccatgacctgccaggccagccagggcaccagcatcaacctgaactggttccagcagaagcccgggaaggcccccaagctcctcatctacggcgcctcaaatttggaagatggagtgcccagccgcttctccgggtcccgctatggaacagacttcacactgaccatcagcagcctggaggatgaggacatggccacctacttctgcctgcagcacacatacctgcccttcaccttcggcagcgggaccaagctggagatcaag

SEQ ID NO: 1924 - DNA, 321 bp, Artificial Sequence
  Description of Artificial Sequence: Synthetic polynucleotide
gacgtgcagatgatccagagcccctccagcctgagcgcctcgctgggggacatcgtgaccatgacctgccaggcctcccagggcaccagcatcaacctcaactggttccagcagaagcccggcaaggcccccaagctgctgatctacggggccagcaacctggaggacggcgtgcccagccgcttcagcggctcccgctacggcacggacttcacgctgaccatctcctccctggaggacgaggacatggccacctacttctgcctgcagcacacctacctgcccttcaccttcggcagcgggaccaagctggagatcaag

SEQ ID NO: 1925 - DNA, 321 bp, Artificial Sequence
  Description of Artificial Sequence: Synthetic polynucleotide
gacgtgcagatgatccagagccccagctccctcagcgcctccctgggggacatcgtgaccatgacctgccaggccagccagggcaccagcatcaacctcaactggttccagcagaagcccggcaaggcccccaagctgctgatctacggggcctccaacctggaggacggcgtgccctcccgcttcagcggcagccgctacggcacggacttcacgctgaccatcagcagcctggaggacgaggacatggccacctacttctgcctgcagcacacctacctgcccttcaccttcgggagcgggaccaagttggagatcaag

SEQ ID NO: 1926 - DNA, 321 bp, Artificial Sequence
  Description of Artificial Sequence: Synthetic polynucleotide
gacgtgcagatgatccagagccccagcagcctgagcgcctcgctgggggacatcgtgaccatgacctgccaggcctcccagggcaccagcatcaacctcaactggttccagcagaagcccggcaaggcccccaagctcctcatctacggggccagcaacctggaggacggcgtgccctcccgcttcagcggctcccgctacggcacggacttcacgctgaccatctcctccctggaggacgaggacatggccacctacttctgcctgcagcacacctacctgcccttcaccttcggcagcgggaccaagctggagatcaag

SEQ ID NO: 1927 - DNA, 321 bp, Artificial Sequence
  Description of Artificial Sequence: Synthetic polynucleotide
gacgttcagatgatccagtccccctcctccctgtccgcctccctgggcgacatcgtgaccatgacctgccaggcctcccagggcacctccatcaacctgaactggttccagcagaagcccggcaaggcccccaagctgctgatctacggcgcctccaacctggaggacggcgtgccctcccggttctccggctcccggtacggcaccgacttcaccctgaccatctcctccctggaggacgaggacatggccacctacttctgcctgcagcacacctacctgcccttcaccttcggctccggcaccaagctggagatcaag

SEQ ID NO: 1928 - DNA, 321 bp, Artificial Sequence
  Description of Artificial Sequence: Synthetic polynucleotide
gacgtgcagatgatccagagcccctcctccctgagcgccagcctgggggacatcgtgaccatgacctgccaggcctcccagggcaccagcatcaacctcaactggttccagcagaagcccggcaaggcccccaagctcctcatctacggggccagcaacctggaggacggcgtgcccagccgcttcagcggctcccgctacggcacggacttcacgctgaccatcagcagcctggaggacgaggacatggccacctacttctgcctgcagcacacctacctgcccttcaccttcggcagcgggaccaagctggagatcaag

SEQ ID NO: 1929 - DNA, 321 bp, Artificial Sequence
  Description of Artificial Sequence: Synthetic polynucleotide
gacgttcagatgatccagagccctagcagcctgagcgccagcctgggcgacatcgtgaccatgacctgccaggccagccagggcaccagcatcaacctgaactggttccagcagaagcctggcaaggcccctaagctgctgatctacggcgccagcaacctggaggacggcgtgcctagccgtttcagcggcagccgttacggcaccgacttcaccctgaccatcagcagcctggaggacgaggacatggccacctacttctgcctgcagcacacctacctgcctttcaccttcggcagcggcaccaagctggagatcaag

SEQ ID NO: 1930 - DNA, 321 bp, Artificial Sequence
  Description of Artificial Sequence: Synthetic polynucleotide
gacgttcagatgatccagagccctagcagcctgagcgccagcctgggcgacatcgtgaccatgacctgccaggccagccagggcaccagcatcaacctgaactggttccagcagaagcctggcaaggcccctaagctgctgatctacggcgccagcaacctggaggacggcgtgcccagccggttcagcggcagccggtacggcaccgacttcaccctgaccatcagcagcctggaggacgaggacatggccacctacttctgcctgcagcacacctacctgcccttcaccttcggcagcggcaccaagctggagatcaag

SEQ ID NO: 1931 - protein, 214 aa, Artificial Sequence
  Description of Artificial Sequence: Synthetic polypeptide
DVQMIQSPSSLSASLGDIVTMTCQASQDTSINLNWFQQKPGKAPKLLIYGASNLEDGVPSRFSGSRYGTDFTLTISSLEDEDMATYFCLQHTYLPFTFGSGTKLEIKRADAAPTVSIFPPSSEQLTSGGASVVCFLNNFYPKDINVKWKIDGSERQNGVLNSWTDQDSKDSTYSMSSTLTLTKDEYERHNSYTCEATHKTSTSPIVKSFNRNEC

SEQ ID NO: 1932 - protein, 214 aa, Artificial Sequence
  Description of Artificial Sequence: Synthetic polypeptide
DVQMIQSPSSLSASLGDIVTMTCQASQGTSINLNWFQQKPGKAPKLLIYGSSNLEDGVPSRFSGSRYGTDFTLTISSLEDEDMATYFCLQHSYLPFTFGSGTKLEIKRADAAPTVSIFPPSSEQLTSGGASVVCFLNNFYPKDINVKWKIDGSERQNGVLNSWTDQDSKDSTYSMSSTLTLTKDEYERHNSYTCEATHKTSTSPIVKSFNRNEC

SEQ ID NO: 1933 - protein, 219 aa, Artificial Sequence
  Description of Artificial Sequence: Synthetic polypeptide
DVMMTQTPLSLPVSLGDQASISCRSSQSLVHSNGNTYLHWHLQKPGQSPKFLIYKVSNRFSGVPDRFSGSGSGTDFTLKISRVEAEDLGVYFCSQSTHVPFTFGSGTKLEIKRADAAPTVSIFPPSSEQLTSGGASVVCFLNNFYPKDINVKWKIDGSERQNGVLNSWTDQDSKDSTYSMSSTLTLTKDEYERHNSYTCEATHKTSTSPIVKSFNRNEC

SEQ ID NO: 1934 - protein, 219 aa, Artificial Sequence
  Description of Artificial Sequence: Synthetic polypeptide
DVVMTQTPLSLPVSLGDQASISCRSSQSLVHSNGNTYLHWHLQKPGQSPKFLIYKVSNRFSGVPDRFSGSGSGTDFTLKISRVEAEDLGVYFCSQSTHVPFTFGSGTKLEIKRADAAPTVSIFPPSSEQLTSGGASVVCFLNNFYPKDINVKWKIDGSERQNGVLNSWTDQDSKDSTYSMSSTLTLTKDEYERHNSYTCEATHKTSTSPIVKSFNRNEC

SEQ ID NO: 1935 - protein, 214 aa, Artificial Sequence
  Description of Artificial Sequence: Synthetic polypeptide
DVQMTQSPSSLSASVGDRVTMTCQASQDTSINLNWFQQKPGKAPKLLIYGASNLETGVPSRFSGSRSGTDFTLTISSLQPEDMATYYCLQHTYLPFTFGSGTKLEIKRTVAAPSVFIFPPSDEQLKSGTASVVCLLNNFYPREAKVQWKVDNALQSGNSQESVTEQDSKDSTYSLSSTLTLSKADYEKHKVYACEVTHQGLSSPVTKSFNRGEC

SEQ ID NO: 1936 - DNA, 336 bp, Artificial Sequence
  Description of Artificial Sequence: Synthetic polynucleotide
gatgttttgatgacccaaactccgctctccctggcagtcaatcttggagatcaagcctccctctcttgcagatcgagtcagactattttacatagtaatggaaatacctatttagaatggtatttgcagaaaccaggccagtctccaagactcctgatctacaaagtttctaaacgattttctggggtcccagacaggttcagtggcagtggatcagggacagatttcacactcaagatcagcagagtggaggctgacgatctgggaatttattactgctttcaaggttcacttgttccttgggcgttcggtggaggcaccaagctggaaatcaaa

SEQ ID NO: 1937 - protein, 112 aa, Artificial Sequence
  Description of Artificial Sequence: Synthetic polypeptide
DVLMTQTPLSLAVNLGDQASLSCRSSQTILHSNGNTYLEWYLQKPGQSPRLLIYKVSKRFSGVPDRFSGSGSGTDFTLKISRVEADDLGIYYCFQGSLVPWAFGGGTKLEIK

SEQ ID NO: 1938 - protein, 23 aa, Artificial Sequence
  Description of Artificial Sequence: Synthetic peptide
  MOD_RES (3)..(3): Leu or Val
DVXMTQSPLSLPVTLGQPASISC

SEQ ID NO: 1939 - DNA, 336 bp, Artificial Sequence
  Description of Artificial Sequence: Synthetic polynucleotide
gatgttttgatgacccaaactccactctccctgcctgtcagtcttggagatcaagcctccatctcttgcaaatctagtcagagcattgtacatagtaatggaaacacctatttagaatggtacctgcagaaaccaggccagtctccaaagctcctggtctacaaagtttccaatcgattttctggggtcccagacaggttcagtggcagtggatcagggacagatttcacactcaagatcagcagagtggaggctgaggatctgggaacttattactgctttcaaggttcacttgttccttgggcgttcggtggaggcaccaagctggaaatcaaa

SEQ ID NO: 1940 - DNA, 714 bp, Artificial Sequence
  Description of Artificial Sequence: Synthetic polynucleotide
atgaagttgcctgttaggctgttggtgctgatgttctggattcctgcttccagcagtgatgttttgatgacccaaactccactctccctgcctgtcagtcttggagatcaagcctccatctcttgcaaatctagtcagagcattgtacatagtaatggaaacacctatttagaatggtacctgcagaaaccaggccagtctccaaagctcctggtctacaaagtttccaatcgattttctggggtcccagacaggttcagtggcagtggatcagggacagatttcacactcaagatcagcagagtggaggctgaggatctgggaacttattactgctttcaaggttcacttgttccttgggcgttcggtggaggcaccaagctggaaatcaaacgggctgatgctgcaccaactgtatccatcttcccaccatccagtgagcagttaacatctggaggtgcctcagtcgtgtgcttcttgaacaacttctaccccaaagacatcaatgtcaagtggaagattgatggcagtgaacgacaaaatggcgtcctgaacagttggactgatcaggacagcaaagacagcacctacagcatgagcagcaccctcacgttgaccaaggacgagtatgaacgacataacagctatacctgtgaggccactcacaagacatcaacttcacccattgtcaagagcttcaacaggaatgagtgt

SEQ ID NO: 1941 - protein, 112 aa, Artificial Sequence
  Description of Artificial Sequence: Synthetic polypeptide
DVLMTQTPLSLPVSLGDQASISCKSSQSIVHSNGNTYLEWYLQKPGQSPKLLVYKVSNRFSGVPDRFSGSGSGTDFTLKISRVEAEDLGTYYCFQGSLVPWAFGGGTKLEIK

SEQ ID NO: 1942 - DNA, 336 bp, Artificial Sequence
  Description of Artificial Sequence: Synthetic polynucleotide
gatgttttgatgacccaaagcccactctccctgcctgtcacccttggacagcccgcctccatctcttgcaaatctagtcagagcattgtacatagtaatggaaacacctatttagaatggtacctgcagaaaccaggccagtctccacagctcctggtctacaaagtttccaatcgattttctggggtcccagacagattcagtggcagtggatcagggacagatttcacactcaagatcagcagagtggaggctgaggatgtgggaacttattactgctttcaaggctcacttgttccttgggcgttcggtggaggcaccaaggtggaaatcaaa

SEQ ID NO: 1943 - protein, 112 aa, Artificial Sequence
  Description of Artificial Sequence: Synthetic polypeptide
DVLMTQSPLSLPVTLGQPASISCKSSQSIVHSNGNTYLEWYLQKPGQSPQLLVYKVSNRFSGVPDRFSGSGSGTDFTLKISRVEAEDVGTYYCFQGSLVPWAFGGGTKVEIK

SEQ ID NO: 1944 - DNA, 336 bp, Artificial Sequence
  Description of Artificial Sequence: Synthetic polynucleotide
gatgttgtgatgacccaaagcccactctccctgcctgtcacccttggacagcccgcctccatctcttgcaaatctagtcagagcattgtacatagtaatggaaacacctatttagaatggtacctgcagaaaccaggccagtctccacagctcctggtctacaaagtttccaatcgattttctggggtcccagacagattcagtggcagtggatcagggacagatttcacactcaagatcagcagagtggaggctgaggatgtgggaacttattactgctttcaaggctcacttgttccttgggcgttcggtggaggcaccaaggtggaaatcaaa

SEQ ID NO: 1945 - protein, 112 aa, Artificial Sequence
  Description of Artificial Sequence: Synthetic polypeptide
DVVMTQSPLSLPVTLGQPASISCKSSQSIVHSNGNTYLEWYLQKPGQSPQLLVYKVSNRFSGVPDRFSGSGSGTDFTLKISRVEAEDVGTYYCFQGSLVPWAFGGGTKVEIK

SEQ ID NO: 1946 - DNA, 336 bp, Artificial Sequence
  Description of Artificial Sequence: Synthetic polynucleotide
gatgttgtgatgacccaaagcccactctccctgcctgtcacccttggacagcccgcctccatctcttgcaaatctagtcagagcattgtacatagtaatggaaacacctatttagaatggtacctgcagaaaccaggccagtctccacagctcctggtctacaaagtttccaatcgattttctggggtcccagacagattcagtggcagtggatcagggacagatttcacactcaagatcagcagagtggaggctgaggatgtgggagtgtattactgctttcaaggctcacttgttccttgggcgttcggtggaggcaccaaggtggaaatcaaa

SEQ ID NO: 1947 - protein, 112 aa, Artificial Sequence
  Description of Artificial Sequence: Synthetic polypeptide
DVVMTQSPLSLPVTLGQPASISCKSSQSIVHSNGNTYLEWYLQKPGQSPQLLVYKVSNRFSGVPDRFSGSGSGTDFTLKISRVEAEDVGVYYCFQGSLVPWAFGGGTKVEIK

SEQ ID NO: 1948 - DNA, 336 bp, Artificial Sequence
  Description of Artificial Sequence: Synthetic polynucleotide
gatgttgtgatgacccaaagcccactctccctgcctgtcacccttggacagcccgcctccatctcttgcaaatctagtcagagcattgtacatagtaatggaaacacctatttagaatggtacctgcagaaaccaggccagtctccacagctcctgatctacaaagtttccaatcgattttctggggtcccagacagattcagtggcagtggatcagggacagatttcacactcaagatcagcagagtggaggctgaggatgtgggagtgtattactgctttcaaggctcacttgttccttgggcgttcggtggaggcaccaaggtggaaatcaaa

SEQ ID NO: 1949 - protein, 112 aa, Artificial Sequence
  Description of Artificial Sequence: Synthetic polypeptide
DVVMTQSPLSLPVTLGQPASISCKSSQSIVHSNGNTYLEWYLQKPGQSPQLLIYKVSNRFSGVPDRFSGSGSGTDFTLKISRVEAEDVGVYYCFQGSLVPWAFGGGTKVEIK

SEQ ID NO: 1950 - DNA, 714 bp, Artificial Sequence
  Description of Artificial Sequence: Synthetic polynucleotide
atgaagttgcctgttaggctgttggtgctgatgttctggattcctgcttccagcagtgatgttgtgatgacccaaactccactctccctgcctgtcagtcttggagatcaagcctccatctcttgcagatctagtcagagccttgtacacagtaatggaaacacctatttacattggtacctgcagaagccaggccagtctccaaagctcctgatctacaaagtttccaaccgattttctggggtcccagacaggttcagtggcagtggatcagggacagatttcacactcaagatcagcagagtggaggctgaggatctgggagtttatttctgctctcaaagtacacatgttccgctcacgttcggtgctgggaccaagctggagctgaaacgggctgatgctgcaccaactgtatccatcttcccaccatccagtgagcagttaacatctggaggtgcctcagtcgtgtgcttcttgaacaacttctaccccaaagacatcaatgtcaagtggaagattgatggcagtgaacgacaaaatggcgtcctgaacagttggactgatcaggacagcaaagacagcacctacagcatgagcagcaccctcacgttgaccaaggacgagtatgaacgacataacagctatacctgtgaggccactcacaagacatcaacttcacccattgtcaagagcttcaacaggaatgagtgt

SEQ ID NO: 1951 - DNA, 717 bp, Artificial Sequence
  Description of Artificial Sequence: Synthetic polynucleotide
atgaagttgcctgttaggctgttggtgctgatgttctggattcctgcttccagcagtgatgttgtgatgacccaaactccactctccctgcctgtcagtcttggagatcaagcctccatctcttgcagatctagtcagagccttgtacacagtaatggaaacacctatttacattggtacctgcagaagccaggccagtctccaaagctcctgatctacaaagtttccaaccgattttctggggtcccagacaggttcagtggcagtggatcagggacagatttcacactcaagatcagcagagtggaggctgaggatctgggagtttatttctgctctcaaagtacacatgttccgctcacgttcggtgctgggaccaagctggagctgaaacgggctgatgctgcaccaactgtatccatcttcccaccatccagtgagcagttaacatctggaggtgcctcagtcgtgtgcttcttgaacaacttctaccccaaagacatcaatgtcaagtggaagattgatggcagtgaacgacaaaatggcgtcctgaacagttggactgatcaggacagcaaagacagcacctacagcatgagcagcaccctcacgttgaccaaggacgagtatgaacgacataacagctatacctgtgaggccactcacaagacatcaacttcacccattgtcaagagcttcaacaggaatgagtgttag

SEQ ID NO: 1952 - DNA, 657 bp, Artificial Sequence
  Description of Artificial Sequence: Synthetic polynucleotide
gaaattgtgttgacgcagtctccaggcaccctgtctttgtctccaggggaaagagccaccctctcctgcagatctagtcagagccttgtacacagtaatcagaacacctatttacattggtaccagcagaaacctggccaggctcccaggctcctcatctataaagttgacaaccgattttctggcatcccagacaggttcagtggcagtgggtctgggacagacttcactctcaccatcagcagactggagcctgaagattttgcagtgtattactgttctcaaagtacactggttccgctcacgttcggcggagggaccaaggtggagatcaaacggaccgtggctgcaccatctgtcttcatcttcccgccatctgatgagcagttgaaatctggaactgcctctgttgtgtgcctgctgaataacttctatcccagagaggccaaagtacagtggaaggtggataacgccctccaatcgggtaactcccaggagagtgtcacagagcaggacagcaaggacagcacctacagcctcagcagcaccctgacgctgagcaaagcagactacgagaaacacaaagtctacgcctgcgaagtcacccatcagggcctgagctcgcccgtcacaaagagcttcaacaggggagagtgc

SEQ ID NO: 1953 - protein, 238 aa, Artificial Sequence
  Description of Artificial Sequence: Synthetic polypeptide
MKLPVRLLVLMFWIPASSSDVVMTQTPLSLPVSLGDQASISCRSSQSLVHSNGNTYLHWYLQKPGQSPKLLIYKVSNRFSGVPDRFSGSGSGTDFTLKISRVEAEDLGVYFCSQSTHVPLTFGAGTKLELKRADAAPTVSIFPPSSEQLTSGGASVVCFLNNFYPKDINVKWKIDGSERQNGVLNSWTDQDSKDSTYSMSSTLTLTKDEYERHNSYTCEATHKTSTSPIVKSFNRNEC

SEQ ID NO: 1954 - protein, 219 aa, Artificial Sequence
  Description of Artificial Sequence: Synthetic polypeptide
EIVLTQSPGTLSLSPGERATLSCRSSQSLVHSNQNTYLHWYQQKPGQAPRLLIYKVDNRFSGIPDRFSGSGSGTDFTLTISRLEPEDFAVYYCSQSTLVPLTFGGGTKVEIKRTVAAPSVFIFPPSDEQLKSGTASVVCLLNNFYPREAKVQWKVDNALQSGNSQESVTEQDSKDSTYSLSSTLTLSKADYEKHKVYACEVTHQGLSSPVTKSFNRGEC

SEQ ID NO: 1955 - protein, 112 aa, Artificial Sequence
  Description of Artificial Sequence: Synthetic polypeptide
EIVLTQSPGTLSLSPGERATLSCRSSQSLVHSNQNTYLHWYQQKPGQAPRLLIYKVDNRFSGIPDRFSGSGSGTDFTLTISRLEPEDFAVYYCSQSTLVPLTFGGGTKVEIK

SEQ ID NO: 1956 - DNA, 339 bp, Artificial Sequence
  Description of Artificial Sequence: Synthetic polynucleotide
gatgttgtgatgacccagactccactcactttgtcggttaccattggacaaccagcctccatctcttgcaagtcaagtcagagcctcttagatagtgatggaaagacatatttgaattggttgttacagaggccaggccagtctccaaagcgcctaatctatctggtgtctaaactggactctggagtccccgacagattcactggcagtggatcagggacagatttcacactgaaaattagcagagtggaggctgaggatttgggagtttattattgctggcaaggtacacattttcctcggacgttcggtggaggcaccaagctggaaatcaaacgg

SEQ ID NO: 1957 - DNA, 339 bp, Artificial Sequence
  Description of Artificial Sequence: Synthetic polynucleotide
gatgttgtgatgacccagactccactcactttgtcggttaccattggacaaccagcctccatctcttgcaagtcaagtcagagcctcttagatagtgatggaaagacatatttgaattggttgttacagaggccaggccagtctccaaagcgcctaatctatctggtgtctaaactggactctggagtccctgacagattcactggcagtggatcagggacagatttcacactgaaaattagcagagtggaggctgaggatttgggagtttattattgctggcaaggtacacattttcctcggacgttcggtggaggcaccaagctggaaatcaaacgg

SEQ ID NO: 1958 - DNA, 396 bp, Artificial Sequence
  Description of Artificial Sequence: Synthetic polynucleotide
atgagtcctgcccagttcctgtttctgttagtgctctggattcgggaaaccaacggtgatgttgtgatgacccagactccactcactttgtcggttaccattggacaaccagcctccatctcttgcaagtcaagtcagagcctcttagatagtgatggaaagacatatttgaattggttgttacagaggccaggccagtctccaaagcgcctaatctatctggtgtctaaactggactctggagtccccgacagattcactggcagtggatcagggacagatttcacactgaaaattagcagagtggaggctgaggatttgggagtttattattgctggcaaggtacacattttcctcggacgttcggtggaggcaccaagctggaaatcaaacgg

SEQ ID NO: 1959 - DNA, 657 bp, Artificial Sequence
  Description of Artificial Sequence: Synthetic polynucleotide
gatgttgtgatgacccagactccactcactttgtcggttaccattggacaaccagcctccatctcttgcaagtcaagtcagagcctcttagatagtgatggaaagacatatttgaattggttgttacagaggccaggccagtctccaaagcgcctaatctatctggtgtctaaactggactctggagtccctgacagattcactggcagtggatcagggacagatttcacactgaaaattagcagagtggaggctgaggatttgggagtttattattgctggcaaggtacacattttcctcggacgttcggtggaggcaccaagctggaaatcaaacgggctgatgctgcaccaactgtatccatcttcccaccatccagtgagcagttaacatctggaggtgcctcagtcgtgtgcttcttgaacaacttctaccccaaagacatcaatgtcaagtggaagattgatggcagtgaacgacaaaatggcgtcctgaacagttggactgatcaggacagcaaagacagcacctacagcatgagcagcaccctcacgttgaccaaggacgagtatgaacgacataacagctatacctgtgaggccactcacaagacatcaacttcacccattgtcaagagcttcaacaggaatgagtgt

SEQ ID NO: 1960 - DNA, 660 bp, Artificial Sequence
  Description of Artificial Sequence: Synthetic polynucleotide
gatgttgtgatgacccagactccactcactttgtcggttaccattggacaaccagcctccatctcttgcaagtcaagtcagagcctcttagatagtgatggaaagacatatttgaattggttgttacagaggccaggccagtctccaaagcgcctaatctatctggtgtctaaactggactctggagtccctgacagattcactggcagtggatcagggacagatttcacactgaaaattagcagagtggaggctgaggatttgggagtttattattgctggcaaggtacacattttcctcggacgttcggtggaggcaccaagctggaaatcaaacgggctgatgctgcaccaactgtatccatcttcccaccatccagtgagcagttaacatctggaggtgcctcagtcgtgtgcttcttgaacaacttctaccccaaagacatcaatgtcaagtggaagattgatggcagtgaacgacaaaatggcgtcctgaacagttggactgatcaggacagcaaagacagcacctacagcatgagcagcaccctcacgttgaccaaggacgagtatgaacgacataacagctatacctgtgaggccactcacaagacatcaacttcacccattgtcaagagcttcaacaggaatgagtgttag

SEQ ID NO: 1961 - DNA, 678 bp, Artificial Sequence
  Description of Artificial Sequence: Synthetic polynucleotide
gatgttgtgatgacccagactccactcactttgtcggttaccattggacaaccagcctccatctcttgcaagtcaagtcagagcctcttagatagtgatggaaagacatatttgaattggttgttacagaggccaggccagtctccaaagcgcctaatctatctggtgtctaaactggactctggagtccctgacagattcactggcagtggatcagggacagatttcacactgaaaattagcagagtggaggctgaggatttgggagtttattattgctggcaaggtacacattttcctcggacgttcggtggaggcaccaagctggaaatcaaacgggctgatgctgcaccaactgtatccatcttcccaccatccagtgagcagttaacatctggaggtgcctcagtcgtgtgcttcttgaacaacttctaccccaaagacatcaatgtcaagtggaagattgatggcagtgaacgacaaaatggcgtcctgaacagttggactgatcaggacagcaaagacagcacctacagcatgagcagcaccctcacgttgaccaaggacgagtatgaacgacataacagctatacctgtgaggccactcacaagacatcaacttcacccattgtcaagagcttcaacaggaatgagtgtagcgagaaggacgagctgtag

SEQ ID NO: 1962 - DNA, 714 bp, Artificial Sequence
  Description of Artificial Sequence: Synthetic polynucleotide
atgagtcctgcccagttcctgtttctgttagtgctctggattcgggaaaccaacggtgatgttgtgatgacccagactccactcactttgtcggttaccattggacaaccagcctccatctcttgcaagtcaagtcagagcctcttagatagtgatggaaagacatatttgaattggttgttacagaggccaggccagtctccaaagcgcctaatctatctggtgtctaaactggactctggagtccctgacagattcactggcagtggatcagggacagatttcacactgaaaattagcagagtggaggctgaggatttgggagtttattattgctggcaaggtacacattttcctcggacgttcggtggaggcaccaagctggaaatcaaacgggctgatgctgcaccaactgtatccatcttcccaccatccagtgagcagttaacatctggaggtgcctcagtcgtgtgcttcttgaacaacttctaccccaaagacatcaatgtcaagtggaagattgatggcagtgaacgacaaaatggcgtcctgaacagttggactgatcaggacagcaaagacagcacctacagcatgagcagcaccctcacgttgaccaaggacgagtatgaacgacataacagctatacctgtgaggccactcacaagacatcaacttcacccattgtcaagagcttcaacaggaatgagtgt

SEQ ID NO: 1963 - DNA, 720 bp, Artificial Sequence
  Description of Artificial Sequence: Synthetic polynucleotide
atgatgagtcctgcccagttcctgtttctgttagtgctctggattcgggaaaccaacggtgatgttgtgatgacccagactccactcactttgtcggttaccattggacaaccagcctccatctcttgcaagtcaagtcagagcctcttagatagtgatggaaagacatatttgaattggttgttacagaggccaggccagtctccaaagcgcctaatctatctggtgtctaaactggactctggagtccctgacagattcactggcagtggatcagggacagatttcacactgaaaattagcagagtggaggctgaggatttgggagtttattattgctggcaaggtacacattttcctcggacgttcggtggaggcaccaagctggaaatcaaacgggctgatgctgcaccaactgtatccatcttcccaccatccagtgagcagttaacatctggaggtgcctcagtcgtgtgcttcttgaacaacttctaccccaaagacatcaatgtcaagtggaagattgatggcagtgaacgacaaaatggcgtcctgaacagttggactgatcaggacagcaaagacagcacctacagcatgagcagcaccctcacgttgaccaaggacgagtatgaacgacataacagctatacctgtgaggccactcacaagacatcaacttcacccattgtcaagagcttcaacaggaatgagtgttag

SEQ ID NO: 1964 - protein, 239 aa, Artificial Sequence
  Description of Artificial Sequence: Synthetic polypeptide
MMSPAQFLFLLVLWIRETNGDVVMTQTPLTLSVTIGQPASISCKSSQSLLDSDGKTYLNWLLQRPGQSPKRLIYLVSKLDSGVPDRFTGSGSGTDFTLKISRVEAEDLGVYYCWQGTHFPRTFGGGTKLEIKRADAAPTVSIFPPSSEQLTSGGASVVCFLNNFYPKDINVKWKIDGSERQNGVLNSWTDQDSKDSTYSMSSTLTLTKDEYERHNSYTCEATHKTSTSPIVKSFNRNEC

SEQ ID NO: 1965 - DNA, 732 bp, Artificial Sequence
  Description of Artificial Sequence: Synthetic polynucleotide
gccgccaccatgggatggagctggatctttctctttctcctgtcaggaactacaggtgtcctctctgctgccgatgttgtgatgacccagactccactcactttgtcggttaccattggacaaccagcctccatctcttgcaagtcaagtcagagcctcttagatagtgatggaaagacatatttgaattggttgttacagaggccaggccagtctccaaagcgcctaatctatctggtgtctaaactggactctggagtccctgacagattcactggcagtggatcagggacagatttcacactgaaaattagcagagtggaggctgaggatttgggagtttattattgctggcaaggtacacattttcctcggacgttcggtggaggcaccaagctggaaatcaaacgggctgatgctgcaccaactgtatccatcttcccaccatccagtgagcagttaacatctggaggtgcctcagtcgtgtgcttcttgaacaacttctaccccaaagacatcaatgtcaagtggaagattgatggcagtgaacgacaaaatggcgtcctgaacagttggactgatcaggacagcaaagacagcacctacagcatgagcagcaccctcacgttgaccaaggacgagtatgaacgacataacagctatacctgtgaggccactcacaagacatcaacttcacccattgtcaagagcttcaacaggaatgagtgttag

SEQ ID NO: 1966 - DNA, 747 bp, Artificial Sequence
  Description of Artificial Sequence: Synthetic polynucleotide
atgatgagtcctgcccagttcctgtttctgttagtgctctggattcgggaaaccaacggtgatgttgtgatgacccagactccactcactttgtcggttaccattggacaaccagcctccatctcttgcaagtcaagtcagagcctcttagatagtgatggaaagacatatttgaattggttgttacagaggccaggccagtctccaaagcgcctaatctatctggtgtctaaactggactctggagtccctgacagattcactggcagtggatcagggacagatttcacactgaaaattagcagagtggaggctgaggatttgggagtttattattgctggcaaggtacacattttcctcggacgttcggtggaggcaccaagctggaaatcaaacgggctgatgctgcaccaactgtatccatcttcccaccatccagtgagcagttaacatctggaggtgcctcagtcgtgtgcttcttgaacaacttctaccccaaagacatcaatgtcaagtggaagattgatggcagtgaacgacaaaatggcgtcctgaacagttggactgatcaggacagcaaagacagcacctacagcatgagcagcaccctcacgttgaccaaggacgagtatgaacgacataacagctatacctgtgaggccactcacaagacatcaacttcacccattgtcaagagcttcaacaggaatgagtgttacccatacgatgttccagattacgcttag

SEQ ID NO: 1967 - DNA, 336 bp, Mus musculus
gatattgtgatgactcaggctgcaccctctgtacctgtcactcctggagagtcagtttccatctcctgcaggtctagtgagagtctcctgcatagtaatggcaacacttacttgtattggttcctgcagaggccaggccagtctcctcagctcctgatatatcggatgtccaaccttgcctcaggagtcccagacaggttcagtggcagtgggtcaggaactgctttcacactgagaatcagtagagtggaggctgaggatgtgggtgtttattactgtatgcaatatctagaatatccgctcacgttcggtgctgggaccaagctggagctgaaa

SEQ ID NO: 1968 - protein, 112 aa, Mus musculus
DIVMTQAAPSVPVTPGESVSISCRSSESLLHSNGNTYLYWFLQRPGQSPQLLIYRMSNLASGVPDRFSGSGSGTAFTLRISRVEAEDVGVYYCMQYLEYPLTFGAGTKLELK

SEQ ID NO: 1969 - DNA, 321 bp, Mus musculus
gacatcaagatgacccagtctccatcttccatgtatgcatctctaggagagagagtcactatcacttgcaaggcgagtcaggacattaataggtatttaaactggttccagcagaaaccagggaaatctcctaagaccctgatctatcgtgcaaacagattgctagatggggtcccatcaaggttcagtggcagtggatctgggcaagattactctctcaccatcagcagcctggattatgaagatatgggaatttattattgtctacagtatgatgagtttccgctcacgttcggtgatgggaccaagctggagctgaaa

SEQ ID NO: 1970 - protein, 107 aa, Mus musculus
DIKMTQSPSSMYASLGERVTITCKASQDINRYLNWFQQKPGKSPKTLIYRANRLLDGVPSRFSGSGSGQDYSLTISSLDYEDMGIYYCLQYDEFPLTFGDGTKLELK

SEQ ID NO: 1971 - DNA, 321 bp, Artificial Sequence
  Description of Artificial Sequence: Synthetic polynucleotide
gatattaaaatgacccagagcccgagcagcatgtatgcgagcctgggcgaacgcgtgaccattacctgcaaagcgagccaggatattaaccgctatctgaactggtttcagcagaaaccgggcaaaagcccgaaaaccctgatttatcgcgcgaaccgcctgctggatggcgtgccgagccgctttagcggcagcggcagcggccaggattatagcctgaccattagcagcctggattatgaagatatgggcatttattattgcctgcagtatgatgaatttccgctgacctttggcgatggcaccaaactggaactgaaa

SEQ ID NO: 1972 - DNA, 321 bp, Artificial Sequence
  Description of Artificial Sequence: Synthetic polynucleotide
gatatcaagatgacccagagccccagctccatgtatgccagcctgggggagcgggtgaccatcacctgcaaggcctcccaggacatcaaccgctacctgaactggttccagcagaagccaggcaagtcccccaagaccctcatctatcgggccaaccggctgctggatggagtgccctcccgcttctccggcagtggcagcggccaggattacagcctcaccatttcttccctggactatgaggacatgggcatctactactgcctgcagtatgatgagttccccctgacctttggagatggcaccaagctggagctgaag

SEQ ID NO: 1973 - DNA, 321 bp, Artificial Sequence
  Description of Artificial Sequence: Synthetic polynucleotide
gacatcaagatgacccagagccccagcagcatgtacgccagcctgggcgagagggtgaccatcacctgcaaggccagccaggacatcaacaggtacctgaactggttccagcagaagcccggcaagagccccaagaccctgatctacagggccaacaggctgctggacggcgtgcccagcaggttcagcggcagcggcagcggccaggactacagcctgaccatcagcagcctggactacgaggacatgggcatctactactgcctgcagtacgacgagttccccctgaccttcggcgacggcaccaagctggagctgaag

SEQ ID NO: 1974 - DNA, 321 bp, Artificial Sequence
  Description of Artificial Sequence: Synthetic polynucleotide
gacatcaagatgacccagagcccttcctccatgtatgcctccctgggggagcgggtgaccatcacctgcaaggccagccaggatatcaaccgctacctgaactggttccagcagaagccaggcaagagccccaagaccctcatctatcgggccaaccggctgctggatggagtgcccagccgcttctccggcagcggcagtggccaggactacagcctcaccatttccagcctggactatgaggacatgggcatctactactgcctgcagtatgatgagttccccctgacctttggagatggcaccaagctggagctgaag

SEQ ID NO: 1975 - DNA, 321 bp, Artificial Sequence
  Description of Artificial Sequence: Synthetic polynucleotide
gacatcaagatgacccagtcccccagctccatgtacgcctctctgggagagcgggtgaccatcacatgcaaggcttctcaggatatcaaccgctacctgaactggttccagcagaagcccggaaagagccctaagaccctgatctacagggccaacagactgctggacggcgtgccaagcaggttttccggctctggaagcggccaggattactccctgacaatctctagcctggactacgaggatatgggcatctactactgtctgcagtacgacgagttccccctgacctttggagatggcacaaagctggagctgaag

SEQ ID NO: 1976 - DNA, 321 bp, Artificial Sequence
  Description of Artificial Sequence: Synthetic polynucleotide
gacatcaagatgacccagagcccttcctccatgtatgcctccctgggggagcgggtgaccatcacctgcaaggccagccaggatatcaaccgctacctgaactggttccagcagaagcccggcaagagccccaagaccctcatctatcgggccaaccggctgctggatggagtgcccagccgcttctccggcagcggcagtggccaggactacagcctgaccatttcttctctggactatgaggacatgggcatctactactgcctgcagtatgatgagttccccctgacatttggagatggcaccaagctggagctgaag

SEQ ID NO: 1977 - DNA, 321 bp, Artificial Sequence
  Description of Artificial Sequence: Synthetic polynucleotide
cgggctgatgctgcaccaactgtatccatcttcccaccatccagtgagcagttaacatctggaggtgcctcagtcgtgtgcttcttgaacaacttctaccccaaagacatcaatgtcaagtggaagattgatggcagtgaacgacaaaatgacatcaagatgacccagagcccttcctccatgtatgcctccctgggggagcgggtgacaatcacctgcaaggccagccaggatatcaaccgctacctgaactggttccagcagaagccaggcaagagccccaagaccctcatctatagagccaaccggctgctggacggc

SEQ ID NO: 1978 - DNA, 321 bp, Artificial Sequence
  Description of Artificial Sequence: Synthetic polynucleotide
gacatcaagatgacccagagcccttcttccatgtatgcttctttaggagaaagagtgacaatcacctgcaaggccagccaggatatcaaccgctacctgaactggttccagcagaagccaggaaaatctcccaagaccctgatttatagagccaacagactgctggacggcgtgcccagccgcttcagtggatctggaagtggccaggactacagcctgaccatctcttctctggattatgaagacatgggcatctactactgcctgcagtatgatgaatttcctttaacatttggagatggcaccaagctggagctgaag

SEQ ID NO: 1979 - DNA, 321 bp, Artificial Sequence
  Description of Artificial Sequence: Synthetic polynucleotide
gatatcaagatgacccagagcccttcctccatgtatgcctccctgggggagcgggtgaccatcacctgcaaggccagccaggacatcaaccgctacctgaactggttccagcagaagcccggcaagagccccaagaccctcatctatcgggccaaccggctgctggatggagtgcccagccgcttctccggcagcggcagtggccaggattacagcctcaccatttccagcctggactatgaggacatgggcatctactactgcctgcagtatgatgagttccccctgacctttggagatggcaccaagctggagctgaag

SEQ ID NO: 1980 - DNA, 321 bp, Artificial Sequence
  Description of Artificial Sequence: Synthetic polynucleotide
gacatcaagatgacccagagccctagcagcatgtacgccagcctgggcgagagagtgaccatcacctgcaaggccagccaggacatcaacagatacctgaactggttccagcagaagcctggcaagagccctaagaccctgatctacagagccaacagactgctggacggcgtgcctagcagattcagcggcagcggcagcggccaggactacagcctgaccatcagcagcctggactacgaggacatgggcatctactactgcctgcagtacgacgagttccctctgaccttcggcgacggcaccaagctggagctgaag

SEQ ID NO: 1981 - protein, 23 aa, Artificial Sequence
  Description of Artificial Sequence: Synthetic peptide
  MOD_RES (3)..(3): Leu or Val
DVXMTQSPLSLPVTLGQPASISC

SEQ ID NO: 1982 - protein, 18 aa, Artificial Sequence
  Description of Artificial Sequence: Synthetic peptide
  MOD_RES (9)..(9): Any amino acid
  MOD_RES (12)..(12): Any amino acid
RSGYSSPGXPGXPGSRSR

SEQ ID NO: 1983 - protein, 18 aa, Artificial Sequence
  Description of Artificial Sequence: Synthetic peptide
  MOD_RES (9)..(9): Any amino acid
  MOD_RES (12)..(12): Any amino acid
  MOD_RES (15)..(15): Any amino acid
RSGYSSPGXPGXPGXRSR

SEQ ID NO: 1984 - DNA, 2168 bp, Artificial Sequence
  Description of Artificial Sequence: Synthetic polynucleotide
gaggagccaccatggaatggacctgggtctttctcttcctcctgtcagtaactgcaggtgtccactcccaggttcagctgcagcagtctggagctgagctgatgaagcctggggcctcagtgaagatatcctgcaaggctactggctacacattcagtaactactggatagagtgggtaaagcagaggcctggacatggccttgagtggattggagagattttacctggaagtgatagtattaagtacaatgagaatttcaagggcaaggccacattcactgcagatacatcctccaacacagcctacatgcaactcagcagcctgacatctgaggactctgccgtctattactgtgcaagaagggggaactacccagactactggggccaaggcaccactctcacagtctcctcagccaaaacgacacccccatctgtctatccactggcccctggatctgctgcccaaactaactccatggtgaccctgggatgcctggtcaagggctatttccctgagccagtgacagtgacctggaactctggatccctgtccagcggtgtgcacaccttcccagctgtcctgcagtctgacctctacactctgagcagctcagtgactgtcccctccagcacctggcccagcgagaccgtcacctgcaacgttgcccacccggccagcagcaccaaggtggacaagaaaattgtgcccagggattgtggttgtaagccttgcatatgtacagtcccagaagtatcatctgtcttcatcttccccccaaagcccaaggatgtgctcaccattactctgactcctaaggtcacgtgtgttgtggtagacatcagcaaggatgatcccgaggtccagttcagctggtttgtagatgatgtggaggtgcacacagctcagacgcaaccccgggaggagcagttcaacagcactttccgctcagtcagtgaacttcccatcatgcaccaggactggctcaatggcaaggagttcaaatgcagggtcaacagtgcagctttccctgcccccatcgagaaaaccatctccaaaaccaaaggcagaccgaaggctccacaggtgtacaccattccacctcccaaggagcagatggccaaggataaagtcagtctgacctgcatgataacagacttcttccctgaagacattactgtggagtggcagtggaatgggcagccagcggagaactacaagaacactcagcccatcatggacacagatggctcttacttcgtctacagcaagctcaatgtgcagaagagcaactgggaggcaggaaatactttcacctgctctgtgttacatgagggcctgcacaaccaccatactgagaagagcctctcccactctcctggtagaaagaggcgagagggcagaggaagtcttctaacatgcggtgacgtggaggagaatcccggccctatgaagttgcctgttaggctgttggtgctgatgttctggattcctgcttccagcagtgatgttgtgatgacccaaactccactctccctgcctgtcagtcttggagatcaagcctccatctcttgcagatctagtcagagccttgtacacagtaatggaaacacctatttacattggtacctgcagaagccaggccagtctccaaagctcctgatctacaaagtttccaaccgattttctggggtcccagacaggttcagtggcagtggatcagggacagatttcacactcaagatcagcagagtggaggctgaggatctgggagtttatttctgctctcaaagtacacatgttccgctcacgttcggtgctgggaccaagctggagctgaaacgggctgatgctgcaccaactgtatccatcttcccaccatccagtgagcagttaacatctggaggtgcctcagtcgtgtgcttcttgaacaacttctaccccaaagacatcaatgtcaagtggaagattgatggcagtgaacgacaaaatggcgtcctgaacagttggactgatcaggacagcaaagacagcacctacagcatgagcagcaccctcacgttgaccaaggacgagtatgaacgacataacagctatacctgtgaggccactcacaagacatcaacttcacccattgtcaagagcttcaacaggaatgagtgttag

SEQ ID NO: 1985 - protein, 718 aa, Artificial Sequence
  Description of Artificial Sequence: Synthetic polypeptide
MEWTWVFLFLLSVTAGVHSQVQLQQSGAELMKPGASVKISCKATGYTFSNYWIEWVKQRPGHGLEWIGEILPGSDSIKYNENFKGKATFTADTSSNTAYMQLSSLTSEDSAVYYCARRGNYPDYWGQGTTLTVSSAKTTPPSVYPLAPGSAAQTNSMVTLGCLVKGYFPEPVTVTWNSGSLSSGVHTFPAVLQSDLYTLSSSVTVPSSTWPSETVTCNVAHPASSTKVDKKIVPRDCGCKPCICTVPEVSSVFIFPPKPKDVLTITLTPKVTCVVVDISKDDPEVQFSWFVDDVEVHTAQTQPREEQFNSTFRSVSELPIMHQDWLNGKEFKCRVNSAAFPAPIEKTISKTKGRPKAPQVYTIPPPKEQMAKDKVSLTCMITDFFPEDITVEWQWNGQPAENYKNTQPIMDTDGSYFVYSKLNVQKSNWEAGNTFTCSVLHEGLHNHHTEKSLSHSPGRKRREGRGSLLTCGDVEENPGPMKLPVRLLVLMFWIPASSSDVVMTQTPLSLPVSLGDQASISCRSSQSLVHSNGNTYLHWYLQKPGQSPKLLIYKVSNRFSGVPDRFSGSGSGTDFTLKISRVEAEDLGVYFCSQSTHVPLTFGAGTKLELKRADAAPTVSIFPPSSEQLTSGGASVVCFLNNFYPKDINVKWKIDGSERQNGVLNSWTDQDSKDSTYSMSSTLTLTKDEYERHNSYTCEATHKTSTSPIVKSFNRNEC

SEQ ID NO: 1986 - DNA, 2168 bp, Artificial Sequence
  Description of Artificial Sequence: Synthetic polynucleotide
gaggagccaccatggagtggacctgggtgttcctgttcctgctgagcgtgaccgccggcgtgcactcccaagtccagctgcagcagagcggcgccgagctgatgaagcccggcgccagcgtgaagatcagctgcaaggccaccggctacaccttcagcaactactggatcgagtgggtgaagcagcggcccggccacggcctggagtggatcggcgagatcctgcccggcagcgacagcatcaagtacaacgagaacttcaagggcaaggccaccttcaccgccgacaccagcagcaacaccgcctacatgcagctgagcagcctgaccagcgaggacagcgccgtgtactactgcgcccggcggggcaactaccccgactactggggccagggcaccaccctgaccgtctccagcgccaagaccacaccacccagcgtgtacccactggctccaggcagcgctgcccagaccaacagcatggtgaccctgggctgcctggtgaagggctacttccccgagcccgtgaccgtgacctggaacagcggcagcctgagcagcggcgtgcacaccttcccagccgtgctccaaagcgacctgtacacactgagcagcagcgtgaccgtgcccagcagcacctggcccagcgagaccgtgacctgcaacgtggcccaccccgccagcagcaccaaggtggacaagaagatcgtgccccgggactgcggctgcaagccctgcatctgcaccgtgcccgaagtcagcagcgtgttcatcttcccacccaagcccaaggacgtgctgaccatcaccctgacacccaaagtcacctgcgtggtggtggacatcagcaaggacgaccccgaggtgcagttcagctggttcgtggacgacgtggaggtgcacaccgcccagacccagccccgggaggagcagttcaacagcaccttccggagcgtgagcgagctgcccatcatgcaccaggactggctgaacggcaaggagttcaagtgccgggtgaacagcgccgccttccccgcccccatcgagaagaccatcagcaagaccaagggacggcccaaggctccccaggtgtacaccatcccaccacccaaggagcagatggccaaggacaaagtcagcctgacctgcatgatcaccgacttcttccccgaggacatcaccgtggagtggcagtggaacggccagcccgccgagaactacaagaacacccagcccatcatggacaccgacggcagctacttcgtgtacagcaagctgaacgtgcagaagagcaactgggaggccggcaacaccttcacctgcagcgtgctgcacgagggcctgcacaaccatcacaccgagaagagcctgagccacagcccaggacggaagcgccgcgagggcaggggcagcctgctgacctgcggcgacgtggaggagaacccaggccccatgaagctgcccgtgcggctgctggtgctgatgttctggatccccgccagcagcagcgacgtggtgatgacccagaccccactgagcctgcccgtgagcctgggcgaccaggccagcatcagctgccggagcagccagagcctggtgcacagcaacggcaacacctacctgcactggtacctgcagaagcccggccagagccccaagctgctgatctacaaagtcagcaaccggttcagcggcgtgcccgaccggttcagcggcagcggcagcggcaccgacttcaccctgaagatcagccgggtggaggccgaggacctgggcgtgtacttctgcagccagagcacccacgtgcccctgaccttcggcgccggcaccaagctggagctgaagcgggccgacgccgctcccaccgtcagcatcttcccaccctcctccgagcagctgaccagcggaggcgccagcgtggtgtgcttcctgaacaacttctaccccaaggacatcaacgtgaagtggaagatcgacggcagcgagcggcagaacggcgtgctgaacagctggaccgaccaggacagcaaggacagcacctacagcatgagcagcaccctgaccctgaccaaggacgagtacgagcggcacaacagctacacctgcgaggccacccacaagaccagcaccagccccatcgtgaagagcttcaaccggaacgagtgctga

SEQ ID NO: 1987 - DNA, 2174 bp, Artificial Sequence
  Description of Artificial Sequence: Synthetic polynucleotide
gaggagccaccatgggatggagctggatctttctctttctcctgtcaggaactacaggtgtcctctctgaggtccagctgcaacagtctggacctgagctggtgaagcctggggcttcagtgaagatatcctgcaagacttctggatacacattcactgaatacaccatacactgggtgaagcagagccatggagagagccttgagtggattggaggtattaatccaaacgatggtggtactatttacaaccagaagttcaagggcaaggccacattgactgtagacaagtcctccaaaacagcctacatggagctccgcagcctgacatctgaggattctgcagtcttttactgtgcaagagggccctccgccaggtttccttactggggccaagggactctggtcactgtctctgcagccaaaacgacacccccatctgtctatccactggcccctggatctgctgcccaaactaactccatggtgaccctgggatgcctggtcaagggctatttccctgagccagtgacagtgacctggaactctggatccctgtccagcggtgtgcacaccttcccagctgtcctgcagtctgacctctacactctgagcagctcagtgactgtcccctccagcacctggcccagcgagaccgtcacctgcaacgttgcccacccggccagcagcaccaaggtggacaagaaaattgtgcccagggattgtggttgtaagccttgcatatgtacagtcccagaagtatcatctgtcttcatcttccccccaaagcccaaggatgtgctcaccattactctgactcctaaggtcacgtgtgttgtggtagacatcagcaaggatgatcccgaggtccagttcagctggtttgtagatgatgtggaggtgcacacagctcagacgcaaccccgggaggagcagttcaacagcactttccgctcagtcagtgaacttcccatcatgcaccaggactggctcaatggcaaggagttcaaatgcagggtcaacagtgcagctttccctgcccccatcgagaaaaccatctccaaaaccaaaggcagaccgaaggctccacaggtgtacaccattccacctcccaaggagcagatggccaaggataaagtcagtctgacctgcatgataacagacttcttccctgaagacattactgtggagtggcagtggaatgggcagccagcggagaactacaagaacactcagcccatcatggacacagatggctcttacttcgtctacagcaagctcaatgtgcagaagagcaactgggaggcaggaaatactttcacctgctctgtgttacatgagggcctgcacaaccaccatactgagaagagcctctcccactctcctggtagaaagaggcgagagggcagaggaagtcttctaacatgcggtgacgtggaggagaatcccggccctatgatgagtcctgcccagttcctgtttctgttagtgctctggattcgggaaaccaacggtgatgttgtgatgacccagactccactcactttgtcggttaccattggacaaccagcctccatctcttgcaagtcaagtcagagcctcttagatagtgatggaaagacatatttgaattggttgttacagaggccaggccagtctccaaagcgcctaatctatctggtgtctaaactggactctggagtccctgacagattcactggcagtggatcagggacagatttcacactgaaaattagcagagtggaggctgaggatttgggagtttattattgctggcaaggtacacattttcctcggacgttcggtggaggcaccaagctggaaatcaaacgggctgatgctgcaccaactgtatccatcttcccaccatccagtgagcagttaacatctggaggtgcctcagtcgtgtgcttcttgaacaacttctaccccaaagacatcaatgtcaagtggaagattgatggcagtgaacgacaaaatggcgtcctgaacagttggactgatcaggacagcaaagacagcacctacagcatgagcagcaccctcacgttgaccaaggacgagtatgaacgacataacagctatacctgtgaggccactcacaagacatcaacttcacccattgtcaagagcttcaacaggaatgagtgttag

SEQ ID NO: 1988 - protein, 720 aa, Artificial Sequence
  Description of Artificial Sequence: Synthetic polypeptide
MGWSWIFLFLLSGTTGVLSEVQLQQSGPELVKPGASVKISCKTSGYTFTEYTIHWVKQSHGESLEWIGGINPNDGGTIYNQKFKGKATLTVDKSSKTAYMELRSLTSEDSAVFYCARGPSARFPYWGQGTLVTVSAAKTTPPSVYPLAPGSAAQTNSMVTLGCLVKGYFPEPVTVTWNSGSLSSGVHTFPAVLQSDLYTLSSSVTVPSSTWPSETVTCNVAHPASSTKVDKKIVPRDCGCKPCICTVPEVSSVFIFPPKPKDVLTITLTPKVTCVVVDISKDDPEVQFSWFVDDVEVHTAQTQPREEQFNSTFRSVSELPIMHQDWLNGKEFKCRVNSAAFPAPIEKTISKTKGRPKAPQVYTIPPPKEQMAKDKVSLTCMITDFFPEDITVEWQWNGQPAENYKNTQPIMDTDGSYFVYSKLNVQKSNWEAGNTFTCSVLHEGLHNHHTEKSLSHSPGRKRREGRGSLLTCGDVEENPGPMMSPAQFLFLLVLWIRETNGDVVMTQTPLTLSVTIGQPASISCKSSQSLLDSDGKTYLNWLLQRPGQSPKRLIYLVSKLDSGVPDRFTGSGSGTDFTLKISRVEAEDLGVYYCWQGTHFPRTFGGGTKLEIKRADAAPTVSIFPPSSEQLTSGGASVVCFLNNFYPKDINVKWKIDGSERQNGVLNSWTDQDSKDSTYSMSSTLTLTKDEYERHNSYTCEATHKTSTSPIVKSFNRNEC

SEQ ID NO: 1989 - DNA, 2174 bp, Artificial Sequence
  Description of Artificial Sequence: Synthetic polynucleotide
gaggagccaccatgggctggagctggatcttcctgttcctgctgagcggcaccaccggcgtgctgagcgaggtgcagctgcagcagagcggccccgagctggtgaagcccggcgccagcgtgaagatcagctgcaagaccagcggctacaccttcaccgagtacaccatccactgggtgaagcagagccacggcgagagcctggagtggatcggcggcatcaaccccaacgacggcggcaccatctacaaccagaagttcaagggcaaggccaccctgaccgtggacaagagcagcaagaccgcctacatggagctgcggagcctgaccagcgaggacagcgccgtgttctactgcgctcggggccccagcgcccggttcccctactggggccagggcaccctggtgaccgtgagcgccgccaagaccacaccacccagcgtgtacccactggctccaggcagcgctgcccaaaccaacagcatggtgaccctgggctgcctggtgaagggctacttccccgagcccgtgaccgtgacctggaacagcggcagcctgagcagcggcgtgcacaccttcccagctgtgctccagtccgacctgtacaccctgagcagcagcgtgaccgtgcccagcagcacctggcccagcgagaccgtgacctgcaacgtggcccaccccgccagcagcaccaaggtggacaagaagatcgtgccccgggactgcggctgcaagccctgcatctgcaccgtgcctgaggtctccagcgtgttcatcttcccccccaagcccaaggacgtgctgaccatcaccctgacccctaaagtcacctgcgtggtggtggacatcagcaaggacgaccccgaggtgcagttcagctggttcgtggacgacgtggaggtgcacaccgcccagacccagccccgggaggagcagttcaacagcaccttccggagcgtgagcgagctgcccatcatgcaccaggactggctgaacggcaaggagttcaagtgccgggtgaacagcgccgccttccccgcccccatcgagaagaccatcagcaagaccaagggccgacccaaggccccacaggtgtacaccatcccaccacccaaggagcagatggccaaggacaaagtcagcctgacctgcatgatcaccgacttcttccccgaggacatcaccgtggagtggcagtggaacggccagccagccgagaactacaagaacacccagcccatcatggacaccgacggcagctacttcgtgtacagcaagctgaacgtgcagaagagcaactgggaggccggcaacaccttcacctgcagcgtgctgcacgagggcctgcacaaccaccacaccgagaagagcctgagccacagccccggacggaagcggcgcgagggacggggcagcctgctgacctgcggcgacgtggaggagaacccaggccccatgatgagcccagcccagttcctgttcctgctggtgctgtggatccgggagaccaacggcgacgtggtgatgacccagaccccactgaccctgagcgtgaccatcggccagcccgccagcatcagctgcaagagcagccagagcctgctggacagcgacggcaagacctacctgaactggctgctgcagcggccaggccagagccccaagcggctgatctatctcgtcagcaagctggacagcggcgtgcccgaccggttcaccggcagcggcagcggcaccgacttcaccctgaagatcagccgggtggaggccgaggacctgggcgtgtactactgctggcagggcacccactttccccggaccttcggcggcggcaccaagctggagatcaagcgggccgacgccgccccaacagtcagcatctttccaccatcctccgagcagctcaccagcggcggcgccagcgtggtgtgcttcctgaacaacttctaccccaaggacatcaacgtgaagtggaagatcgacggcagcgagcggcagaacggcgtgctgaacagctggaccgaccaggacagcaaggacagcacctacagcatgagcagcaccctgaccctgaccaaggacgagtacgagcggcacaacagctacacctgcgaggccacccacaagaccagcaccagccccatcgtgaagagcttcaaccggaacgagtgctga

SEQ ID NO: 1990 - DNA, 4450 bp, Artificial Sequence
  Description of Artificial Sequence: Synthetic polynucleotide
ctgcgcgctcgctcgctcactgaggccgcccgggcaaagcccgggcgtcgggcgacctttggtcgcccggcctcagtgagcgagcgagcgcgcagagagggagtggccaactccatcactaggggttccttgtagttaatgattaacccgccatgctacttatctaccagggtaatggggatcctctagaactatagctagtcgacataacgcgtctagttattaatagtaatcaattacggggtcattagttcatagcccatatatggagttccgcgttacataacttacggtaaatggcccgcctggctgaccgcccaacgacccccgcccattgacgtcaataatgacgtatgttcccatagtaacgccaatagggactttccattgacgtcaatgggtggagtatttacggtaaactgcccacttggcagtacatcaagtgtatcatatgccaagtacgccccctattgacgtcaatgacggtaaatggcccgcctggcattatgcccagtacatgaccttatgggactttcctacttggcagtacatctacgtattagtcatcgctattaccatggtcgaggtgagccccacgttctgcttcactctccccatctcccccccctccccacccccaattttgtatttatttattttttaattattttgtgcagcgatgggggcggggggggggggggggcgcgcgccaggcggggcggggcggggcgaggggcggggcggggcgaggcggagaggtgcggcggcagccaatcagagcggcgcgctccgaaagtttccttttatggcgaggcggcggcggcggcggccctataaaaagcgaagcgcgcggcgggcgggagtcgctgcgcgctgccttcgccccgtgccccgctccgccgccgcctcgcgccgcccgccccggctctgactgaccgcgttactcccacaggtgagcgggcgggacggcccttctcctccgggctgtaattagcgcttggtttaatgacggcttgtttcttttctgtggctgcgtgaaagccttgaggggctccgggagggccctttgtgcggggggagcggctcggggggtgcgtgcgtgtgtgtgtgcgtggggagcgccgcgtgcggctccgcgctgcccggcggctgtgagcgctgcgggcgcggcgcggggctttgtgcgctccgcagtgtgcgcgaggggagcgcggccgggggcggtgccccgcggtgcggggggggctgcgaggggaacaaaggctgcgtgcggggtgtgtgcgtgggggggtgagcagggggtgtgggcgcgtcggtcgggctgcaaccccccctgcacccccctccccgagttgctgagcacggcccggcttcgggtgcggggctccgtacggggcgtggcgcggggctcgccgtgccgggcggggggtggcggcaggtgggggtgccgggcggggcggggccgcctcgggccggggagggctcgggggaggggcgcggcggcccccggagcgccggcggctgtcgaggcgcggcgagccgcagccattgccttttatggtaatcgtgcgagagggcgcagggacttcctttgtcccaaatctgtgcggagccgaaatctgggaggcgccgccgcaccccctctagcgggcgcggggcgaagcggtgcggcgccggcaggaaggaaatgggcggggagggccttcgtgcgtcgccgcgccgccgtccccttctccctctccagcctcggggctgtccgcggggggacggctgccttcgggggggacggggcagggcggggttcggcttctggcgtgtgaccggcggctctagagcctctgctaaccatgttcatgccttcttctttttcctacagctcctgggcaacgtgctggttattgtgctgtctcatcattttggcaaagaattcgggattcgaaccggtgccgccaccatgaacttcgggctcagcttgattttccttgtccttgttttaaaaggtgtccagtgtgaggttcatctggtggagtctgggggagccttagtgaagcctggagggtccctgaaactctcctgtgcagcctctggattcagtttcagtaaatatggcatgtcttgggttcgccagactccagacaagaggctggagtgggtcgcaaccattagtagtagtgggagtcgcacctactatccagacagtgtgaagggccaattcaccatctccagagacaatgccaagaacaccctgtacctgcaaatgagcagtctgaagtctgaggacacagccatgtattactgttcaattagctgggacggtgctatggactactggggtcaagggacctcagtcaccgtctcctcagccaaaacgacacccccatctgtctatccactggcccctggatctgctgcccaaactaactccatggtgaccctgggatgcctggtcaagggctatttccctgagccagtgacagtgacctggaactctggatccctgtccagcggtgtgcacaccttcccagctgtcctgcagtctgacctctacactctgagcagctcagtgactgtcccctccagcacctggcccagcgagaccgtcacctgcaacgttgcccacccggccagcagcaccaaggtggacaagaaaattgtgcccagggattgtggttgtaagccttgcatatgtacagtcccagaagtatcatctgtcttcatcttccccccaaagcccaaggatgtgctcaccattactctgactcctaaggtcacgtgtgttgtggtagacatcagcaaggatgatcccgaggtccagttcagctggtttgtagatgatgtggaggtgcacacagctcagacgcaaccccgggaggagcagttcaacagcactttccgctcagtcagtgaacttcccatcatgcaccaggactggctcaatggcaaggagttcaaatgcagggtcaacagtgcagctttccctgcccccatcgagaaaaccatctccaaaaccaaaggcagaccgaaggctccacaggtgtacaccattccacctcccaaggagcagatggccaaggataaagtcagtctgacctgcatgataacagacttcttccctgaagacattactgtggagtggcagtggaatgggcagccagcggagaactacaagaacactcagcccatcatggacacagatggctcttacttcgtctacagcaagctcaatgtgcagaagagcaactgggaggcaggaaatactttcacctgctctgtgttacatgagggcctgcacaaccaccatactgagaagagcctctcccactctcctggtagaaagaggcgagagggcagaggaagtcttctaacatgcggtgacgtggaggagaatcccggccctatgaagttgcctgttaggctgttggtgctgatgttctggattcctgcttccagcagtgatgttttgatgacccaaactccactctccctgcctgtcagtcttggagatcaagcctccatctcttgcaaatctagtcagagcattgtacatagtaatggaaacacctatttagaatggtacctgcagaaaccaggccagtctccaaagctcctggtctacaaagtttccaatcgattttctggggtcccagacaggttcagtggcagtggatcagggacagatttcacactcaagatcagcagagtggaggctgaggatctgggaacttattactgctttcaaggttcacttgttccttgggcgttcggtggaggcaccaagctggaaatcaaacgggctgatgctgcaccaactgtatccatcttcccaccatccagtgagcagttaacatctggaggtgcctcagtcgtgtgcttcttgaacaacttctaccccaaagacatcaatgtcaagtggaagattgatggcagtgaacgacaaaatggcgtcctgaacagttggactgatcaggacagcaaagacagcacctacagcatgagcagcaccctcacgttgaccaaggacgagtatgaacgacataacagctatacctgtgaggccactcacaagacatcaacttcacccattgtcaagagcttcaacaggaatgagtgttagtaactcgaggacggggtgaactacgcctgaggatccgatctttttccctctgccaaaaattatggggacatcatgaagccccttgagcatctgacttctggctaataaaggaaatttattttcattgcaatagtgtgttggaattttttgtgtctctcactcggcctaggtagataagtagcatggcgggttaatcattaactacaaggaacccctagtgatggagttggccactccctctctgcgcgctcgctcgctcactgaggccgggcgaccaaaggtcgcccgacgcccgggctttgcccgggcggcctcagtgagcgagcgagcgcgcag

SEQ ID NO: 1991 - DNA, 4471 bp, Artificial Sequence
  Description of Artificial Sequence: Synthetic polynucleotide
ctgcgcgctcgctcgctcactgaggccgcccgggcaaagcccgggcgtcgggcgacctttggtcgcccggcctcagtgagcgagcgagcgcgcagagagggagtggccaactccatcactaggggttccttgtagttaatgattaacccgccatgctacttatctaccagggtaatggggatcctctagaactatagctagtcgacataacgcgtctagttattaatagtaatcaattacggggtcattagttcatagcccatatatggagttccgcgttacataacttacggtaaatggcccgcctggctgaccgcccaacgacccccgcccattgacgtcaataatgacgtatgttcccatagtaacgccaatagggactttccattgacgtcaatgggtggagtatttacggtaaactgcccacttggcagtacatcaagtgtatcatatgccaagtacgccccctattgacgtcaatgacggtaaatggcccgcctggcattatgcccagtacatgaccttatgggactttcctacttggcagtacatctacgtattagtcatcgctattaccatggtcgaggtgagccccacgttctgcttcactctccccatctcccccccctccccacccccaattttgtatttatttattttttaattattttgtgcagcgatgggggcggggggggggggggggcgcgcgccaggcggggcggggcggggcgaggggcggggcggggcgaggcggagaggtgcggcggcagccaatcagagcggcgcgctccgaaagtttccttttatggcgaggcggcggcggcggcggccctataaaaagcgaagcgcgcggcgggcgggagtcgctgcgcgctgccttcgccccgtgccccgctccgccgccgcctcgcgccgcccgccccggctctgactgaccgcgttactcccacaggtgagcgggcgggacggcccttctcctccgggctgtaattagcgcttggtttaatgacggcttgtttcttttctgtggctgcgtgaaagccttgaggggctccgggagggccctttgtgcggggggagcggctcggggggtgcgtgcgtgtgtgtgtgcgtggggagcgccgcgtgcggctccgcgctgcccggcggctgtgagcgctgcgggcgcggcgcggggctttgtgcgctccgcagtgtgcgcgaggggagcgcggccgggggcggtgccccgcggtgcggggggggctgcgaggggaacaaaggctgcgtgcggggtgtgtgcgtgggggggtgagcagggggtgtgggcgcgtcggtcgggctgcaaccccccctgcacccccctccccgagttgctgagcacggcccggcttcgggtgcggggctccgtacggggcgtggcgcggggctcgccgtgccgggcggggggtggcggcaggtgggggtgccgggcggggcggggccgcctcgggccggggagggctcgggggaggggcgcggcggcccccggagcgccggcggctgtcgaggcgcggcgagccgcagccattgccttttatggtaatcgtgcgagagggcgcagggacttcctttgtcccaaatctgtgcggagccgaaatctgggaggcgccgccgcaccccctctagcgggcgcggggcgaagcggtgcggcgccggcaggaaggaaatgggcggggagggccttcgtgcgtcgccgcgccgccgtccccttctccctctccagcctcggggctgtccgcggggggacggctgccttcgggggggacggggcagggcggggttcggcttctggcgtgtgaccggcggctctagagcctctgctaaccatgttcatgccttcttctttttcctacagctcctgggcaacgtgctggttattgtgctgtctcatcattttggcaaagaattcgggattcgaaccggtgccgccaccatgaacttcgggctcagcttgattttccttgtccttgttttaaaaggtgtccagtgtgaggttcatctggtggagtctgggggagccttagtgaagcctggagggtccctgaaactctcctgtgcagcctctggattcagtttcagtaaatatggcatgtcttgggttcgccagactccagacaagaggctggagtgggtcgcaaccattagtagtagtgggagtcgcacctactatccagacagtgtgaagggccaattcaccatctccagagacaatgccaagaacaccctgtacctgcaaatgagcagtctgaagtctgaggacacagccatgtattactgttcaattagctgggacggtgctatggactactggggtcaagggacctcagtcaccgtctcctcagccaaaacgacacccccatctgtctatccactggcccctggatctgctgcccaaactaactccatggtgaccctgggatgcctggtcaagggctatttccctgagccagtgacagtgacctggaactctggatccctgtccagcggtgtgcacaccttcccagctgtcctgcagtctgacctctacactctgagcagctcagtgactgtcccctccagcacctggcccagcgagaccgtcacctgcaacgttgcccacccggccagcagcaccaaggtggacaagaaaattgtgcccagggattgtggttgtaagccttgcatatgtacagtcccagaagtatcatctgtcttcatcttccccccaaagcccaaggatgtgctcaccattactctgactcctaaggtcacgtgtgttgtggtagacatcagcaaggatgatcccgaggtccagttcagctggtttgtagatgatgtggaggtgcacacagctcagacgcaaccccgggaggagcagttcaacagcactttccgctcagtcagtgaacttcccatcatgcaccaggactggctcaatggcaaggagttcaaatgcagggtcaacagtgcagctttccctgcccccatcgagaaaaccatctccaaaaccaaaggcagaccgaaggctccacaggtgtacaccattccacctcccaaggagcagatggccaaggataaagtcagtctgacctgcatgataacagacttcttccctgaagacattactgtggagtggcagtggaatgggcagccagcggagaactacaagaacactcagcccatcatggacacagatggctcttacttcgtctacagcaagctcaatgtgcagaagagcaactgggaggcaggaaatactttcacctgctctgtgttacatgagggcctgcacaaccaccatactgagaagagcctctcccactctcctggtcgggccaagcggggaagcggagtgaaacagactttgaattttgaccttctcaagttggcgggagacgtggagtccaaccctggacctatgaagttgcctgttaggctgttggtgctgatgttctggattcctgcttccagcagtgatgttttgatgacccaaactccactctccctgcctgtcagtcttggagatcaagcctccatctcttgcaaatctagtcagagcattgtacatagtaatggaaacacctatttagaatggtacctgcagaaaccaggccagtctccaaagctcctggtctacaaagtttccaatcgattttctggggtcccagacaggttcagtggcagtggatcagggacagatttcacactcaagatcagcagagtggaggctgaggatctgggaacttattactgctttcaaggttcacttgttccttgggcgttcggtggaggcaccaagctggaaatcaaacgggctgatgctgcaccaactgtatccatcttcccaccatccagtgagcagttaacatctggaggtgcctcagtcgtgtgcttcttgaacaacttctaccccaaagacatcaatgtcaagtggaagattgatggcagtgaacgacaaaatggcgtcctgaacagttggactgatcaggacagcaaagacagcacctacagcatgagcagcaccctcacgttgaccaaggacgagtatgaacgacataacagctatacctgtgaggccactcacaagacatcaacttcacccattgtcaagagcttcaacaggaatgagtgttagtaactcgaggacggggtgaactacgcctgaggatccgatctttttccctctgccaaaaattatggggacatcatgaagccccttgagcatctgacttctggctaataaaggaaatttattttcattgcaatagtgtgttggaattttttgtgtctctcactcggcctaggtagataagtagcatggcgggttaatcattaactacaaggaacccctagtgatggagttggccactccctctctgcgcgctcgctcgctcactgaggccgggcgaccaaaggtcgcccgacgcccgggctttgcccgggcggcctcagtgagcgagcgagcgcgcag

SEQ ID NO: 1992 - DNA, 3983 bp, Artificial Sequence
  Description of Artificial Sequence: Synthetic polynucleotide
ctgcgcgctcgctcgctcactgaggccgcccgggcaaagcccgggcgtcgggcgacctttggtcgcccggcctcagtgagcgagcgagcgcgcagagagggagtggccaactccatcactaggggttccttgtagttaatgattaacccgccatgctacttatctaccagggtaatggggatcctctagaactatagctagtcgacattgattattgactagttattaatagtaatcaattacggggtcattagttcatagcccatatatggagttccgcgttacataacttacggtaaatggcccgcctggctgaccgcccaacgacccccgcccattgacgtcaataatgacgtatgttcccatagtaacgccaatagggactttccattgacgtcaatgggtggagtatttacggtaaactgcccacttggcagtacatcaagtgtatcatatgccaagtacgccccctattgacgtcaatgacggtaaatggcccgcctggcattatgcccagtacatgaccttatgggactttcctacttggcagtacatctacgtattagtcatcgctattaccatgtcgaggccacgttctgcttcactctccccatctcccccccctccccacccccaattttgtatttatttattttttaattattttgtgcagcgatgggggcggggggggggggcgcgcgccaggcggggcggggcggggcgaggggcggggcggggcgaggcggagaggtgcggcggcagccaatcagagcggcgcgctccgaaagtttccttttatggcgaggcggcggcggcggcggccctataaaaagcgaagcgcgcggcgggcgggagcaagcttcgtttagtgaaccgtcagatcgcctggagacgccatccacgctgttttgacctccatagaagacaccgggaccgatccagcctccgcggattcgaatcccggccgggaacggtgcattggaacgcggattccccgtgccaagagtgacgtaagtaccgcctatagagtctataggcccacaaaaaatgctttcttcttttaatatacttttttgtttatcttatttctaatactttccctaatctctttctttcagggcaataatgatacaatgtatcatgcctctttgcaccattctaaagaataacagtgataatttctgggttaaggcaatagcaatatttctgcatataaatatttctgcatataaattgtaactgatgtaagaggtttcatattgctaatagcagctacaatccagctaccattctgcttttattttatggttgggataaggctggattattctgagtccaagctaggcccttttgctaatcatgttcatacctcttatcttcctcccacagctcctgggcaacgtgctggtctgtgtgctggcccatcactttggcaaagaattgggattcgaaccggtgccgccaccatgaacttcgggctcagcttgattttccttgtccttgttttaaaaggtgtccagtgtgaggttcatctggtggagtctgggggagccttagtgaagcctggagggtccctgaaactctcctgtgcagcctctggattcagtttcagtaaatatggcatgtcttgggttcgccagactccagacaagaggctggagtgggtcgcaaccattagtagtagtgggagtcgcacctactatccagacagtgtgaagggccaattcaccatctccagagacaatgccaagaacaccctgtacctgcaaatgagcagtctgaagtctgaggacacagccatgtattactgttcaattagctgggacggtgctatggactactggggtcaagggacctcagtcaccgtctcctcagccaaaacgacacccccatctgtctatccactggcccctggatctgctgcccaaactaactccatggtgaccctgggatgcctggtcaagggctatttccctgagccagtgacagtgacctggaactctggatccctgtccagcggtgtgcacaccttcccagctgtcctgcagtctgacctctacactctgagcagctcagtgactgtcccctccagcacctggcccagcgagaccgtcacctgcaacgttgcccacccggccagcagcaccaaggtggacaagaaaattgtgcccagggattgtggttgtaagccttgcatatgtacagtcccagaagtatcatctgtcttcatcttccccccaaagcccaaggatgtgctcaccattactctgactcctaaggtcacgtgtgttgtggtagacatcagcaaggatgatcccgaggtccagttcagctggtttgtagatgatgtggaggtgcacacagctcagacgcaaccccgggaggagcagttcaacagcactttccgctcagtcagtgaacttcccatcatgcaccaggactggctcaatggcaaggagttcaaatgcagggtcaacagtgcagctttccctgcccccatcgagaaaaccatctccaaaaccaaaggcagaccgaaggctccacaggtgtacaccattccacctcccaaggagcagatggccaaggataaagtcagtctgacctgcatgataacagacttcttccctgaagacattactgtggagtggcagtggaatgggcagccagcggagaactacaagaacactcagcccatcatggacacagatggctcttacttcgtctacagcaagctcaatgtgcagaagagcaactgggaggcaggaaatactttcacctgctctgtgttacatgagggcctgcacaaccaccatactgagaagagcctctcccactctcctggtcgggccaagcggggaagcggagtgaaacagactttgaattttgaccttctcaagttggcgggagacgtggagtccaaccctggacctatgaagttgcctgttaggctgttggtgctgatgttctggattcctgcttccagcagtgatgttttgatgacccaaactccactctccctgcctgtcagtcttggagatcaagcctccatctcttgcaaatctagtcagagcattgtacatagtaatggaaacacctatttagaatggtacctgcagaaaccaggccagtctccaaagctcctggtctacaaagtttccaatcgattttctggggtcccagacaggttcagtggcagtggatcagggacagatttcacactcaagatcagcagagtggaggctgaggatctgggaacttattactgctttcaaggttcacttgttccttgggcgttcggtggaggcaccaagctggaaatcaaacgggctgatgctgcaccaactgtatccatcttcccaccatccagtgagcagttaacatctggaggtgcctcagtcgtgtgcttcttgaacaacttctaccccaaagacatcaatgtcaagtggaagattgatggcagtgaacgacaaaatggcgtcctgaacagttggactgatcaggacagcaaagacagcacctacagcatgagcagcaccctcacgttgaccaaggacgagtatgaacgacataacagctatacctgtgaggccactcacaagacatcaacttcacccattgtcaagagcttcaacaggaatgagtgttagtaactcgaggacggggtgaactacgcctgaggatccgatctttttccctctgccaaaaattatggggacatcatgaagccccttgagcatctgacttctggctaataaaggaaatttattttcattgcaatagtgtgttggaattttttgtgtctctcactcggcctaggtagataagtagcatggcgggttaatcattaactacaaggaacccctagtgatggagttggccactccctctctgcgcgctcgctcgctcactgaggccgggcgaccaaaggtcgcccgacgcccgggctttgcccgggcggcctcagtgagcgagcgagcgcgcag

SEQ ID NO: 1993 - DNA, 3962 bp, Artificial Sequence
  Description of Artificial Sequence: Synthetic polynucleotide
ctgcgcgctcgctcgctcactgaggccgcccgggcaaagcccgggcgtcgggcgacctttggtcgcccggcctcagtgagcgagcgagcgcgcagagagggagtggccaactccatcactaggggttccttgtagttaatgattaacccgccatgctacttatctaccagggtaatggggatcctctagaactatagctagtcgacattgattattgactagttattaatagtaatcaattacggggtcattagttcatagcccatatatggagttccgcgttacataacttacggtaaatggcccgcctggctgaccgcccaacgacccccgcccattgacgtcaataatgacgtatgttcccatagtaacgccaatagggactttccattgacgtcaatgggtggagtatttacggtaaactgcccacttggcagtacatcaagtgtatcatatgccaagtacgccccctattgacgtcaatgacggtaaatggcccgcctggcattatgcccagtacatgaccttatgggactttcctacttggcagtacatctacgtattagtcatcgctattaccatgtcgaggccacgttctgcttcactctccccatctcccccccctccccacccccaattttgtatttatttattttttaattattttgtgcagcgatgggggcggggggggggggcgcgcgccaggcggggcggggcggggcgaggggcggggcggggcgaggcggagaggtgcggcggcagccaatcagagcggcgcgctccgaaagtttccttttatggcgaggcggcggcggcggcggccctataaaaagcgaagcgcgcggcgggcgggagcaagcttcgtttagtgaaccgtcagatcgcctggagacgccatccacgctgttttgacctccatagaagacaccgggaccgatccagcctccgcggattcgaatcccggccgggaacggtgcattggaacgcggattccccgtgccaagagtgacgtaagtaccgcctatagagtctataggcccacaaaaaatgctttcttcttttaatatacttttttgtttatcttatttctaatactttccctaatctctttctttcagggcaataatgatacaatgtatcatgcctctttgcaccattctaaagaataacagtgataatttctgggttaaggcaatagcaatatttctgcatataaatatttctgcatataaattgtaactgatgtaagaggtttcatattgctaatagcagctacaatccagctaccattctgcttttattttatggttgggataaggctggattattctgagtccaagctaggcccttttgctaatcatgttcatacctcttatcttcctcccacagctcctgggcaacgtgctggtctgtgtgctggcccatcactttggcaaagaattgggattcgaaccggtgccgccaccatgaacttcgggctcagcttgattttccttgtccttgttttaaaaggtgtccagtgtgaggttcatctggtggagtctgggggagccttagtgaagcctggagggtccctgaaactctcctgtgcagcctctggattcagtttcagtaaatatggcatgtcttgggttcgccagactccagacaagaggctggagtgggtcgcaaccattagtagtagtgggagtcgcacctactatccagacagtgtgaagggccaattcaccatctccagagacaatgccaagaacaccctgtacctgcaaatgagcagtctgaagtctgaggacacagccatgtattactgttcaattagctgggacggtgctatggactactggggtcaagggacctcagtcaccgtctcctcagccaaaacgacacccccatctgtctatccactggcccctggatctgctgcccaaactaactccatggtgaccctgggatgcctggtcaagggctatttccctgagccagtgacagtgacctggaactctggatccctgtccagcggtgtgcacaccttcccagctgtcctgcagtctgacctctacactctgagcagctcagtgactgtcccctccagcacctggcccagcgagaccgtcacctgcaacgttgcccacccggccagcagcaccaaggtggacaagaaaattgtgcccagggattgtggttgtaagccttgcatatgtacagtcccagaagtatcatctgtcttcatcttccccccaaagcccaaggatgtgctcaccattactctgactcctaaggtcacgtgtgttgtggtagacatcagcaaggatgatcccgaggtccagttcagctggtttgtagatgatgtggaggtgcacacagctcagacgcaaccccgggaggagcagttcaacagcactttccgctcagtcagtgaacttcccatcatgcaccaggactggctcaatggcaaggagttcaaatgcagggtcaacagtgcagctttccctgcccccatcgagaaaaccatctccaaaaccaaaggcagaccgaaggctccacaggtgtacaccattccacctcccaaggagcagatggccaaggataaagtcagtctgacctgcatgataacagacttcttccctgaagacattactgtggagtggcagtggaatgggcagccagcggagaactacaagaacactcagcccatcatggacacagatggctcttacttcgtctacagcaagctcaatgtgcagaagagcaactgggaggcaggaaatactttcacctgctctgtgttacatgagggcctgcacaaccaccatactgagaagagcctctcccactctcctggtagaaagaggcgagagggcagaggaagtcttctaacatgcggtgacgtggaggagaatcccggccctatgaagttgcctgttaggctgttggtgctgatgttctggattcctgcttccagcagtgatgttttgatgacccaaactccactctccctgcctgtcagtcttggagatcaagcctccatctcttgcaaatctagtcagagcattgtacatagtaatggaaacacctatttagaatggtacctgcagaaaccaggccagtctccaaagctcctggtctacaaagtttccaatcgattttctggggtcccagacaggttcagtggcagtggatcagggacagatttcacactcaagatcagcagagtggaggctgaggatctgggaacttattactgctttcaaggttcacttgttccttgggcgttcggtggaggcaccaagctggaaatcaaacgggctgatgctgcaccaactgtatccatcttcccaccatccagtgagcagttaacatctggaggtgcctcagtcgtgtgcttcttgaacaacttctaccccaaagacatcaatgtcaagtggaagattgatggcagtgaacgacaaaatggcgtcctgaacagttggactgatcaggacagcaaagacagcacctacagcatgagcagcaccctcacgttgaccaaggacgagtatgaacgacataacagctatacctgtgaggccactcacaagacatcaacttcacccattgtcaagagcttcaacaggaatgagtgttagtaactcgaggacggggtgaactacgcctgaggatccgatctttttccctctgccaaaaattatggggacatcatgaagccccttgagcatctgacttctggctaataaaggaaatttattttcattgcaatagtgtgttggaattttttgtgtctctcactcggcctaggtagataagtagcatggcgggttaatcattaactacaaggaacccctagtgatggagttggccactccctctctgcgcgctcgctcgctcactgaggccgggcgaccaaaggtcgcccgacgcccgggctttgcccgggcggcctcagtgagcgagcgagcgcgcag

SEQ ID NO: 1994 - DNA, 4041 bp, Artificial Sequence
  Description of Artificial Sequence: Synthetic polynucleotide
ctgcgcgctcgctcgctcactgaggccgcccgggcaaagcccgggcgtcgggcgacctttggtcgcccggcctcagtgagcgagcgagcgcgcagagagggagtggccaactccatcactaggggttccttgtagttaatgattaacccgccatgctacttatctaccagggtaatggggatcctctagaactatagctagtcgacataacgcgtgatctaacatatcctggtgtggagtagcggacgctgctatgacagaggctcgggggcctgagctggctctgtgagctggggaggaggcagacagccaggccttgtctgcaagcagacctggcagcattgggctggccgccccccagggcctcctcttcatgcccagtgaatgactcaccttggcacagacacaatgttcggggtgggcacagtgcctgcttcccgccgcaccccagcccccctcaaatgccttccgagaagcccattgagcagggggcttgcattgcaccccagcctgacagcctggcatcttgggataaaagcagcacagccccctaggggctgcccttgctgtgtggcgccaccggcggtggagaacaaggctctattcagcctgtgcccaggaaaggggatcaggggatgcccaggcatggacagtgggtggcagggggggagaggagggctgtctgcttcccagaagtccaaggacacaaatgggtgaggggagagctctccccatagctgggctgcggcccaaccccaccccctcaggctatgccagggggtgttgccaggggcacccgggcatcgccagtctagcccactccttcataaagccctcgcatcccaggagcgagcagagccagagcaggttggagaggagacgcatcacctccgctgctcgcggggatcctctagaagcttcgtttagtgaaccgtcagatcgcctggagacgccatccacgctgttttgacctccatagaagacaccgggaccgatccagcctccgcggattcgaatcccggccgggaacggtgcattggaacgcggattccccgtgccaagagtgacgtaagtaccgcctatagagtctataggcccacaaaaaatgctttcttcttttaatatacttttttgtttatcttatttctaatactttccctaatctctttctttcagggcaataatgatacaatgtatcatgcctctttgcaccattctaaagaataacagtgataatttctgggttaaggcaatagcaatatttctgcatataaatatttctgcatataaattgtaactgatgtaagaggtttcatattgctaatagcagctacaatccagctaccattctgcttttattttatggttgggataaggctggattattctgagtccaagctaggcccttttgctaatcatgttcatacctcttatcttcctcccacagctcctgggcaacgtgctggtctgtgtgctggcccatcactttggcaaagaattgggattcgaaccggtgccgccaccatgaacttcgggctcagcttgattttccttgtccttgttttaaaaggtgtccagtgtgaggttcatctggtggagtctgggggagccttagtgaagcctggagggtccctgaaactctcctgtgcagcctctggattcagtttcagtaaatatggcatgtcttgggttcgccagactccagacaagaggctggagtgggtcgcaaccattagtagtagtgggagtcgcacctactatccagacagtgtgaagggccaattcaccatctccagagacaatgccaagaacaccctgtacctgcaaatgagcagtctgaagtctgaggacacagccatgtattactgttcaattagctgggacggtgctatggactactggggtcaagggacctcagtcaccgtctcctcagccaaaacgacacccccatctgtctatccactggcccctggatctgctgcccaaactaactccatggtgaccctgggatgcctggtcaagggctatttccctgagccagtgacagtgacctggaactctggatccctgtccagcggtgtgcacaccttcccagctgtcctgcagtctgacctctacactctgagcagctcagtgactgtcccctccagcacctggcccagcgagaccgtcacctgcaacgttgcccacccggccagcagcaccaaggtggacaagaaaattgtgcccagggattgtggttgtaagccttgcatatgtacagtcccagaagtatcatctgtcttcatcttccccccaaagcccaaggatgtgctcaccattactctgactcctaaggtcacgtgtgttgtggtagacatcagcaaggatgatcccgaggtccagttcagctggtttgtagatgatgtggaggtgcacacagctcagacgcaaccccgggaggagcagttcaacagcactttccgctcagtcagtgaacttcccatcatgcaccaggactggctcaatggcaaggagttcaaatgcagggtcaacagtgcagctttccctgcccccatcgagaaaaccatctccaaaaccaaaggcagaccgaaggctccacaggtgtacaccattccacctcccaaggagcagatggccaaggataaagtcagtctgacctgcatgataacagacttcttccctgaagacattactgtggagtggcagtggaatgggcagccagcggagaactacaagaacactcagcccatcatggacacagatggctcttacttcgtctacagcaagctcaatgtgcagaagagcaactgggaggcaggaaatactttcacctgctctgtgttacatgagggcctgcacaaccaccatactgagaagagcctctcccactctcctggtcgggccaagcggggaagcggagtgaaacagactttgaattttgaccttctcaagttggcgggagacgtggagtccaaccctggacctatgaagttgcctgttaggctgttggtgctgatgttctggattcctgcttccagcagtgatgttttgatgacccaaactccactctccctgcctgtcagtcttggagatcaagcctccatctcttgcaaatctagtcagagcattgtacatagtaatggaaacacctatttagaatggtacctgcagaaaccaggccagtctccaaagctcctggtctacaaagtttccaatcgattttctggggtcccagacaggttcagtggcagtggatcagggacagatttcacactcaagatcagcagagtggaggctgaggatctgggaacttattactgctttcaaggttcacttgttccttgggcgttcggtggaggcaccaagctggaaatcaaacgggctgatgctgcaccaactgtatccatcttcccaccatccagtgagcagttaacatctggaggtgcctcagtcgtgtgcttcttgaacaacttctaccccaaagacatcaatgtcaagtggaagattgatggcagtgaacgacaaaatggcgtcctgaacagttggactgatcaggacagcaaagacagcacctacagcatgagcagcaccctcacgttgaccaaggacgagtatgaacgacataacagctatacctgtgaggccactcacaagacatcaacttcacccattgtcaagagcttcaacaggaatgagtgttagtaactcgaggacggggtgaactacgcctgaggatccgatctttttccctctgccaaaaattatggggacatcatgaagccccttgagcatctgacttctggctaataaaggaaatttattttcattgcaatagtgtgttggaattttttgtgtctctcactcggcctaggtagataagtagcatggcgggttaatcattaactacaaggaacccctagtgatggagttggccactccctctctgcgcgctcgctcgctcactgaggccgggcgaccaaaggtcgcccgacgcccgggctttgcccgggcggcctcagtgagcgagcgagcgcgcag

SEQ ID NO: 1995 - DNA, 4020 bp, Artificial Sequence
  Description of Artificial Sequence: Synthetic polynucleotide
ctgcgcgctcgctcgctcactgaggccgcccgggcaaagcccgggcgtcgggcgacctttggtcgcccggcctcagtgagcgagcgagcgcgcagagagggagtggccaactccatcactaggggttccttgtagttaatgattaacccgccatgctacttatctaccagggtaatggggatcctctagaactatagctagtcgacataacgcgtgatctaacatatcctggtgtggagtagcggacgctgctatgacagaggctcgggggcctgagctggctctgtgagctggggaggaggcagacagccaggccttgtctgcaagcagacctggcagcattgggctggccgccccccagggcctcctcttcatgcccagtgaatgactcaccttggcacagacacaatgttcggggtgggcacagtgcctgcttcccgccgcaccccagcccccctcaaatgccttccgagaagcccattgagcagggggcttgcattgcaccccagcctgacagcctggcatcttgggataaaagcagcacagccccctaggggctgcccttgctgtgtggcgccaccggcggtggagaacaaggctctattcagcctgtgcccaggaaaggggatcaggggatgcccaggcatggacagtgggtggcagggggggagaggagggctgtctgcttcccagaagtccaaggacacaaatgggtgaggggagagctctccccatagctgggctgcggcccaaccccaccccctcaggctatgccagggggtgttgccaggggcacccgggcatcgccagtctagcccactccttcataaagccctcgcatcccaggagcgagcagagccagagcaggttggagaggagacgcatcacctccgctgctcgcggggatcctctagaagcttcgtttagtgaaccgtcagatcgcctggagacgccatccacgctgttttgacctccatagaagacaccgggaccgatccagcctccgcggattcgaatcccggccgggaacggtgcattggaacgcggattccccgtgccaagagtgacgtaagtaccgcctatagagtctataggcccacaaaaaatgctttcttcttttaatatacttttttgtttatcttatttctaatactttccctaatctctttctttcagggcaataatgatacaatgtatcatgcctctttgcaccattctaaagaataacagtgataatttctgggttaaggcaatagcaatatttctgcatataaatatttctgcatataaattgtaactgatgtaagaggtttcatattgctaatagcagctacaatccagctaccattctgcttttattttatggttgggataaggctggattattctgagtccaagctaggcccttttgctaatcatgttcatacctcttatcttcctcccacagctcctgggcaacgtgctggtctgtgtgctggcccatcactttggcaaagaattgggattcgaaccggtgccgccaccatgaacttcgggctcagcttgattttccttgtccttgttttaaaaggtgtccagtgtgaggttcatctggtggagtctgggggagccttagtgaagcctggagggtccctgaaactctcctgtgcagcctctggattcagtttcagtaaatatggcatgtcttgggttcgccagactccagacaagaggctggagtgggtcgcaaccattagtagtagtgggagtcgcacctactatccagacagtgtgaagggccaattcaccatctccagagacaatgccaagaacaccctgtacctgcaaatgagcagtctgaagtctgaggacacagccatgtattactgttcaattagctgggacggtgctatggactactggggtcaagggacctcagtcaccgtctcctcagccaaaacgacacccccatctgtctatccactggcccctggatctgctgcccaaactaactccatggtgaccctgggatgcctggtcaagggctatttccctgagccagtgacagtgacctggaactctggatccctgtccagcggtgtgcacaccttcccagctgtcctgcagtctgacctctacactctgagcagctcagtgactgtcccctccagcacctggcccagcgagaccgtcacctgcaacgttgcccacccggccagcagcaccaaggtggacaagaaaattgtgcccagggattgtggttgtaagccttgcatatgtacagtcccagaagtatcatctgtcttcatcttccccccaaagcccaaggatgtgctcaccattactctgactcctaaggtcacgtgtgttgtggtagacatcagcaaggatgatcccgaggtccagttcagctggtttgtagatgatgtggaggtgcacacagctcagacgcaaccccgggaggagcagttcaacagcactttccgctcagtcagtgaacttcccatcatgcaccaggactggctcaatggcaaggagttcaaatgcagggtcaacagtgcagctttccctgcccccatcgagaaaaccatctccaaaaccaaaggcagaccgaaggctccacaggtgtacaccattccacctcccaaggagcagatggccaaggataaagtcagtctgacctgcatgataacagacttcttccctgaagacattactgtggagtggcagtggaatgggcagccagcggagaactacaagaacactcagcccatcatggacacagatggctcttacttcgtctacagcaagctcaatgtgcagaagagcaactgggaggcaggaaatactttcacctgctctgtgttacatgagggcctgcacaaccaccatactgagaagagcctctcccactctcctggtagaaagaggcgagagggcagaggaagtcttctaacatgcggtgacgtggaggagaatcccggccctatgaagttgcctgttaggctgttggtgctgatgttctggattcctgcttccagcagtgatgttttgatgacccaaactccactctccctgcctgtcagtcttggagatcaagcctccatctcttgcaaatctagtcagagcattgtacatagtaatggaaacacctatttagaatggtacctgcagaaaccaggccagtctccaaagctcctggtctacaaagtttccaatcgattttctggggtcccagacaggttcagtggcagtggatcagggacagatttcacactcaagatcagcagagtggaggctgaggatctgggaacttattactgctttcaaggttcacttgttccttgggcgttcggtggaggcaccaagctggaaatcaaacgggctgatgctgcaccaactgtatccatcttcccaccatccagtgagcagttaacatctggaggtgcctcagtcgtgtgcttcttgaacaacttctaccccaaagacatcaatgtcaagtggaagattgatggcagtgaacgacaaaatggcgtcctgaacagttggactgatcaggacagcaaagacagcacctacagcatgagcagcaccctcacgttgaccaaggacgagtatgaacgacataacagctatacctgtgaggccactcacaagacatcaacttcacccattgtcaagagcttcaacaggaatgagtgttagtaactcgaggacggggtgaactacgcctgaggatccgatctttttccctctgccaaaaattatggggacatcatgaagccccttgagcatctgacttctggctaataaaggaaatttattttcattgcaatagtgtgttggaattttttgtgtctctcactcggcctaggtagataagtagcatggcgggttaatcattaactacaaggaacccctagtgatggagttggccactccctctctgcgcgctcgctcgctcactgaggccgggcgaccaaaggtcgcccgacgcccgggctttgcccgggcggcctcagtgagcgagcgagcgcgcag

SEQ ID NO: 1996 - DNA, 3899 bp, Artificial Sequence
  Description of Artificial Sequence: Synthetic polynucleotide
ctgcgcgctcgctcgctcactgaggccgcccgggcaaagcccgggcgtcgggcgacctttggtcgcccggcctcagtgagcgagcgagcgcgcagagagggagtggccaactccatcactaggggttccttgtagttaatgattaacccgccatgctacttatctaccagggtaatggggatcctctagaactatagctagtcgacataacgcgttagtatctgcagagggccctgcgtatgagtgcaagtgggttttaggaccaggatgaggcggggtgggggtgcctacctgacgaccgaccccgacccactggacaagcacccaacccccattccccaaattgcgcatcccctatcagagagggggaggggaaacaggatgcggcgaggcgcgtgcgcactgccagcttcagcaccgcggacagtgccttcgcccccgcctggcggcgcgcgccaccgccgcctcagcactgaaggcgcgctgacgtcactcgccggtcccccgcaaactccccttcccggccaccttggtcgcgtccgcgccgccgccggcccagccggaccgcaccacgcgaggcgcgagataggggggcacgggcgcgaccatctgcgctgcggcgccggcgactcagcgctgcctcagtctgcggtgggcagcggaggagtcgtgtcgtgcctgagagcgcagctgtgctcctgggcaccgcgcagtccgcccccgcggctcctggccagaccacccctaggaccccctgccccaagtcgcagccaagcttcgtttagtgaaccgtcagatcgcctggagacgccatccacgctgttttgacctccatagaagacaccgggaccgatccagcctccgcggattcgaatcccggccgggaacggtgcattggaacgcggattccccgtgccaagagtgacgtaagtaccgcctatagagtctataggcccacaaaaaatgctttcttcttttaatatacttttttgtttatcttatttctaatactttccctaatctctttctttcagggcaataatgatacaatgtatcatgcctctttgcaccattctaaagaataacagtgataatttctgggttaaggcaatagcaatatttctgcatataaatatttctgcatataaattgtaactgatgtaagaggtttcatattgctaatagcagctacaatccagctaccattctgcttttattttatggttgggataaggctggattattctgagtccaagctaggcccttttgctaatcatgttcatacctcttatcttcctcccacagctcctgggcaacgtgctggtctgtgtgctggcccatcactttggcaaagaattgggattcgaaccggtgccgccaccatgaacttcgggctcagcttgattttccttgtccttgttttaaaaggtgtccagtgtgaggttcatctggtggagtctgggggagccttagtgaagcctggagggtccctgaaactctcctgtgcagcctctggattcagtttcagtaaatatggcatgtcttgggttcgccagactccagacaagaggctggagtgggtcgcaaccattagtagtagtgggagtcgcacctactatccagacagtgtgaagggccaattcaccatctccagagacaatgccaagaacaccctgtacctgcaaatgagcagtctgaagtctgaggacacagccatgtattactgttcaattagctgggacggtgctatggactactggggtcaagggacctcagtcaccgtctcctcagccaaaacgacacccccatctgtctatccactggcccctggatctgctgcccaaactaactccatggtgaccctgggatgcctggtcaagggctatttccctgagccagtgacagtgacctggaactctggatccctgtccagcggtgtgcacaccttcccagctgtcctgcagtctgacctctacactctgagcagctcagtgactgtcccctccagcacctggcccagcgagaccgtcacctgcaacgttgcccacccggccagcagcaccaaggtggacaagaaaattgtgcccagggattgtggttgtaagccttgcatatgtacagtcccagaagtatcatctgtcttcatcttccccccaaagcccaaggatgtgctcaccattactctgactcctaaggtcacgtgtgttgtggtagacatcagcaaggatgatcccgaggtccagttcagctggtttgtagatgatgtggaggtgcacacagctcagacgcaaccccgggaggagcagttcaacagcactttccgctcagtcagtgaacttcccatcatgcaccaggactggctcaatggcaaggagttcaaatgcagggtcaacagtgcagctttccctgcccccatcgagaaaaccatctccaaaaccaaaggcagaccgaaggctccacaggtgtacaccattccacctcccaaggagcagatggccaaggataaagtcagtctgacctgcatgataacagacttcttccctgaagacattactgtggagtggcagtggaatgggcagccagcggagaactacaagaacactcagcccatcatggacacagatggctcttacttcgtctacagcaagctcaatgtgcagaagagcaactgggaggcaggaaatactttcacctgctctgtgttacatgagggcctgcacaaccaccatactgagaagagcctctcccactctcctggtcgggccaagcggggaagcggagtgaaacagactttgaattttgaccttctcaagttggcgggagacgtggagtccaaccctggacctatgaagttgcctgttaggctgttggtgctgatgttctggattcctgcttccagcagtgatgttttgatgacccaaactccactctccctgcctgtcagtcttggagatcaagcctccatctcttgcaaatctagtcagagcattgtacatagtaatggaaacacctatttagaatggtacctgcagaaaccaggccagtctccaaagctcctggtctacaaagtttccaatcgattttctggggtcccagacaggttcagtggcagtggatcagggacagatttcacactcaagatcagcagagtggaggctgaggatctgggaacttattactgctttcaaggttcacttgttccttgggcgttcggtggaggcaccaagctggaaatcaaacgggctgatgctgcaccaactgtatccatcttcccaccatccagtgagcagttaacatctggaggtgcctcagtcgtgtgcttcttgaacaacttctaccccaaagacatcaatgtcaagtggaagattgatggcagtgaacgacaaaatggcgtcctgaacagttggactgatcaggacagcaaagacagcacctacagcatgagcagcaccctcacgttgaccaaggacgagtatgaacgacataacagctatacctgtgaggccactcacaagacatcaacttcacccattgtcaagagcttcaacaggaatgagtgttagtaactcgaggacggggtgaactacgcctgaggatccgatctttttccctctgccaaaaattatggggacatcatgaagccccttgagcatctgacttctggctaataaaggaaatttattttcattgcaatagtgtgttggaattttttgtgtctctcactcggcctaggtagataagtagcatggcgggttaatcattaactacaaggaacccctagtgatggagttggccactccctctctgcgcgctcgctcgctcactgaggccgggcgaccaaaggtcgcccgacgcccgggctttgcccgggcggcctcagtgagcgagcgagcgcgcag

SEQ ID NO: 1997 - DNA, 3878 bp, Artificial Sequence
  Description of Artificial Sequence: Synthetic polynucleotide
ctgcgcgctcgctcgctcactgaggccgcccgggcaaagcccgggcgtcgggcgacctttggtcgcccggcctcagtgagcgagcgagcgcgcagagagggagtggccaactccatcactaggggttccttgtagttaatgattaacccgccatgctacttatctaccagggtaatggggatcctctagaactatagctagtcgacataacgcgttagtatctgcagagggccctgcgtatgagtgcaagtgggttttaggaccaggatgaggcggggtgggggtgcctacctgacgaccgaccccgacccactggacaagcacccaacccccattccccaaattgcgcatcccctatcagagagggggaggggaaacaggatgcggcgaggcgcgtgcgcactgccagcttcagcaccgcggacagtgccttcgcccccgcctggcggcgcgcgccaccgccgcctcagcactgaaggcgcgctgacgtcactcgccggtcccccgcaaactccccttcccggccaccttggtcgcgtccgcgccgccgccggcccagccggaccgcaccacgcgaggcgcgagataggggggcacgggcgcgaccatctgcgctgcggcgccggcgactcagcgctgcctcagtctgcggtgggcagcggaggagtcgtgtcgtgcctgagagcgcagctgtgctcctgggcaccgcgcagtccgcccccgcggctcctggccagaccacccctaggaccccctgccccaagtcgcagccaagcttcgtttagtgaaccgtcagatcgcctggagacgccatccacgctgttttgacctccatagaagacaccgggaccgatccagcctccgcggattcgaatcccggccgggaacggtgcattggaacgcggattccccgtgccaagagtgacgtaagtaccgcctatagagtctataggcccacaaaaaatgctttcttcttttaatatacttttttgtttatcttatttctaatactttccctaatctctttctttcagggcaataatgatacaatgtatcatgcctctttgcaccattctaaagaataacagtgataatttctgggttaaggcaatagcaatatttctgcatataaatatttctgcatataaattgtaactgatgtaagaggtttcatattgctaatagcagctacaatccagctaccattctgcttttattttatggttgggataaggctggattattctgagtccaagctaggcccttttgctaatcatgttcatacctcttatcttcctcccacagctcctgggcaacgtgctggtctgtgtgctggcccatcactttggcaaagaattgggattcgaaccggtgccgccaccatgaacttcgggctcagcttgattttccttgtccttgttttaaaaggtgtccagtgtgaggttcatctggtggagtctgggggagccttagtgaagcctggagggtccctgaaactctcctgtgcagcctctggattcagtttcagtaaatatggcatgtcttgggttcgccagactccagacaagaggctggagtgggtcgcaaccattagtagtagtgggagtcgcacctactatccagacagtgtgaagggccaattcaccatctccagagacaatgccaagaacaccctgtacctgcaaatgagcagtctgaagtctgaggacacagccatgtattactgttcaattagctgggacggtgctatggactactggggtcaagggacctcagtcaccgtctcctcagccaaaacgacacccccatctgtctatccactggcccctggatctgctgcccaaactaactccatggtgaccctgggatgcctggtcaagggctatttccctgagccagtgacagtgacctggaactctggatccctgtccagcggtgtgcacaccttcccagctgtcctgcagtctgacctctacactctgagcagctcagtgactgtcccctccagcacctggcccagcgagaccgtcacctgcaacgttgcccacccggccagcagcaccaaggtggacaagaaaattgtgcccagggattgtggttgtaagccttgcatatgtacagtcccagaagtatcatctgtcttcatcttccccccaaagcccaaggatgtgctcaccattactctgactcctaaggtcacgtgtgttgtggtagacatcagcaaggatgatcccgaggtccagttcagctggtttgtagatgatgtggaggtgcacacagctcagacgcaaccccgggaggagcagttcaacagcactttccgctcagtcagtgaacttcccatcatgcaccaggactggctcaatggcaaggagttcaaatgcagggtcaacagtgcagctttccctgcccccatcgagaaaaccatctccaaaaccaaaggcagaccgaaggctccacaggtgtacaccattccacctcccaaggagcagatggccaaggataaagtcagtctgacctgcatgataacagacttcttccctgaagacattactgtggagtggcagtggaatgggcagccagcggagaactacaagaacactcagcccatcatggacacagatggctcttacttcgtctacagcaagctcaatgtgcagaagagcaactgggaggcaggaaatactttcacctgctctgtgttacatgagggcctgcacaaccaccatactgagaagagcctctcccactctcctggtagaaagaggcgagagggcagaggaagtcttctaacatgcggtgacgtggaggagaatcccggccctatgaagttgcctgttaggctgttggtgctgatgttctggattcctgcttccagcagtgatgttttgatgacccaaactccactctccctgcctgtcagtcttggagatcaagcctccatctcttgcaaatctagtcagagcattgtacatagtaatggaaacacctatttagaatggtacctgcagaaaccaggccagtctccaaagctcctggtctacaaagtttccaatcgattttctggggtcccagacaggttcagtggcagtggatcagggacagatttcacactcaagatcagcagagtggaggctgaggatctgggaacttattactgctttcaaggttcacttgttccttgggcgttcggtggaggcaccaagctggaaatcaaacgggctgatgctgcaccaactgtatccatcttcccaccatccagtgagcagttaacatctggaggtgcctcagtcgtgtgcttcttgaacaacttctaccccaaagacatcaatgtcaagtggaagattgatggcagtgaacgacaaaatggcgtcctgaacagttggactgatcaggacagcaaagacagcacctacagcatgagcagcaccctcacgttgaccaaggacgagtatgaacgacataacagctatacctgtgaggccactcacaagacatcaacttcacccattgtcaagagcttcaacaggaatgagtgttagtaactcgaggacggggtgaactacgcctgaggatccgatctttttccctctgccaaaaattatggggacatcatgaagccccttgagcatctgacttctggctaataaaggaaatttattttcattgcaatagtgtgttggaattttttgtgtctctcactcggcctaggtagataagtagcatggcgggttaatcattaactacaaggaacccctagtgatggagttggccactccctctctgcgcgctcgctcgctcactgaggccgggcgaccaaaggtcgcccgacgcccgggctttgcccgggcggcctcagtgagcgagcgagcgcgcag

SEQ ID NO: 1998 - DNA, 4459 bp, Artificial Sequence
  Description of Artificial Sequence: Synthetic polynucleotide
ctgcgcgctcgctcgctcactgaggccgcccgggcaaagcccgggcgtcgggcgacctttggtcgcccggcctcagtgagcgagcgagcgcgcagagagggagtggccaactccatcactaggggttccttgtagttaatgattaacccgccatgctacttatctaccagggtaatggggatcctctagaactatagctagtcgacataacgcgtctagttattaatagtaatcaattacggggtcattagttcatagcccatatatggagttccgcgttacataacttacggtaaatggcccgcctggctgaccgcccaacgacccccgcccattgacgtcaataatgacgtatgttcccatagtaacgccaatagggactttccattgacgtcaatgggtggagtatttacggtaaactgcccacttggcagtacatcaagtgtatcatatgccaagtacgccccctattgacgtcaatgacggtaaatggcccgcctggcattatgcccagtacatgaccttatgggactttcctacttggcagtacatctacgtattagtcatcgctattaccatggtcgaggtgagccccacgttctgcttcactctccccatctcccccccctccccacccccaattttgtatttatttattttttaattattttgtgcagcgatgggggcggggggggggggggggcgcgcgccaggcggggcggggcggggcgaggggcggggcggggcgaggcggagaggtgcggcggcagccaatcagagcggcgcgctccgaaagtttccttttatggcgaggcggcggcggcggcggccctataaaaagcgaagcgcgcggcgggcgggagtcgctgcgcgctgccttcgccccgtgccccgctccgccgccgcctcgcgccgcccgccccggctctgactgaccgcgttactcccacaggtgagcgggcgggacggcccttctcctccgggctgtaattagcgcttggtttaatgacggcttgtttcttttctgtggctgcgtgaaagccttgaggggctccgggagggccctttgtgcggggggagcggctcggggggtgcgtgcgtgtgtgtgtgcgtggggagcgccgcgtgcggctccgcgctgcccggcggctgtgagcgctgcgggcgcggcgcggggctttgtgcgctccgcagtgtgcgcgaggggagcgcggccgggggcggtgccccgcggtgcggggggggctgcgaggggaacaaaggctgcgtgcggggtgtgtgcgtgggggggtgagcagggggtgtgggcgcgtcggtcgggctgcaaccccccctgcacccccctccccgagttgctgagcacggcccggcttcgggtgcggggctccgtacggggcgtggcgcggggctcgccgtgccgggcggggggtggcggcaggtgggggtgccgggcggggcggggccgcctcgggccggggagggctcgggggaggggcgcggcggcccccggagcgccggcggctgtcgaggcgcggcgagccgcagccattgccttttatggtaatcgtgcgagagggcgcagggacttcctttgtcccaaatctgtgcggagccgaaatctgggaggcgccgccgcaccccctctagcgggcgcggggcgaagcggtgcggcgccggcaggaaggaaatgggcggggagggccttcgtgcgtcgccgcgccgccgtccccttctccctctccagcctcggggctgtccgcggggggacggctgccttcgggggggacggggcagggcggggttcggcttctggcgtgtgaccggcggctctagagcctctgctaaccatgttcatgccttcttctttttcctacagctcctgggcaacgtgctggttattgtgctgtctcatcattttggcaaagaattcgggattcgaaccggtgccgccaccatgaagttgcctgttaggctgttggtgctgatgttctggattcctgcttccagcagtgatgttttgatgacccaaactccactctccctgcctgtcagtcttggagatcaagcctccatctcttgcaaatctagtcagagcattgtacatagtaatggaaacacctatttagaatggtacctgcagaaaccaggccagtctccaaagctcctggtctacaaagtttccaatcgattttctggggtcccagacaggttcagtggcagtggatcagggacagatttcacactcaagatcagcagagtggaggctgaggatctgggaacttattactgctttcaaggttcacttgttccttgggcgttcggtggaggcaccaagctggaaatcaaacgggctgatgctgcaccaactgtatccatcttcccaccatccagtgagcagttaacatctggaggtgcctcagtcgtgtgcttcttgaacaacttctaccccaaagacatcaatgtcaagtggaagattgatggcagtgaacgacaaaatggcgtcctgaacagttggactgatcaggacagcaaagacagcacctacagcatgagcagcaccctcacgttgaccaaggacgagtatgaacgacataacagctatacctgtgaggccactcacaagacatcaacttcacccattgtcaagagcttcaacaggaatgagtgtggaagcggagtgaaacagactttgaattttgaccttctcaagttggcgggagacgtggagtccaaccctggacctatgaacttcgggctcagcttgattttccttgtccttgttttaaaaggtgtccagtgtgaggttcatctggtggagtctgggggagccttagtgaagcctggagggtccctgaaactctcctgtgcagcctctggattcagtttcagtaaatatggcatgtcttgggttcgccagactccagacaagaggctggagtgggtcgcaaccattagtagtagtgggagtcgcacctactatccagacagtgtgaagggccaattcaccatctccagagacaatgccaagaacaccctgtacctgcaaatgagcagtctgaagtctgaggacacagccatgtattactgttcaattagctgggacggtgctatggactactggggtcaagggacctcagtcaccgtctcctcagccaaaacgacacccccatctgtctatccactggcccctggatctgctgcccaaactaactccatggtgaccctgggatgcctggtcaagggctatttccctgagccagtgacagtgacctggaactctggatccctgtccagcggtgtgcacaccttcccagctgtcctgcagtctgacctctacactctgagcagctcagtgactgtcccctccagcacctggcccagcgagaccgtcacctgcaacgttgcccacccggccagcagcaccaaggtggacaagaaaattgtgcccagggattgtggttgtaagccttgcatatgtacagtcccagaagtatcatctgtcttcatcttccccccaaagcccaaggatgtgctcaccattactctgactcctaaggtcacgtgtgttgtggtagacatcagcaaggatgatcccgaggtccagttcagctggtttgtagatgatgtggaggtgcacacagctcagacgcaaccccgggaggagcagttcaacagcactttccgctcagtcagtgaacttcccatcatgcaccaggactggctcaatggcaaggagttcaaatgcagggtcaacagtgcagctttccctgcccccatcgagaaaaccatctccaaaaccaaaggcagaccgaaggctccacaggtgtacaccattccacctcccaaggagcagatggccaaggataaagtcagtctgacctgcatgataacagacttcttccctgaagacattactgtggagtggcagtggaatgggcagccagcggagaactacaagaacactcagcccatcatggacacagatggctcttacttcgtctacagcaagctcaatgtgcagaagagcaactgggaggcaggaaatactttcacctgctctgtgttacatgagggcctgcacaaccaccatactgagaagagcctctcccactctcctggttagtaactcgaggacggggtgaactacgcctgaggatccgatctttttccctctgccaaaaattatggggacatcatgaagccccttgagcatctgacttctggctaataaaggaaatttattttcattgcaatagtgtgttggaattttttgtgtctctcactcggcctaggtagataagtagcatggcgggttaatcattaactacaaggaacccctagtgatggagttggccactccctctctgcgcgctcgctcgctcactgaggccgggcgaccaaaggtcgcccgacgcccgggctttgcccgggcggcctcagtgagcgagcgagcgcgcag

SEQ ID NO: 1999 - DNA, 4438 bp, Artificial Sequence
  Description of Artificial Sequence: Synthetic polynucleotide
ctgcgcgctcgctcgctcactgaggccgcccgggcaaagcccgggcgtcgggcgacctttggtcgcccggcctcagtgagcgagcgagcgcgcagagagggagtggccaactccatcactaggggttccttgtagttaatgattaacccgccatgctacttatctaccagggtaatggggatcctctagaactatagctagtcgacataacgcgtctagttattaatagtaatcaattacggggtcattagttcatagcccatatatggagttccgcgttacataacttacggtaaatggcccgcctggctgaccgcccaacgacccccgcccattgacgtcaataatgacgtatgttcccatagtaacgccaatagggactttccattgacgtcaatgggtggagtatttacggtaaactgcccacttggcagtacatcaagtgtatcatatgccaagtacgccccctattgacgtcaatgacggtaaatggcccgcctggcattatgcccagtacatgaccttatgggactttcctacttggcagtacatctacgtattagtcatcgctattaccatggtcgaggtgagccccacgttctgcttcactctccccatctcccccccctccccacccccaattttgtatttatttattttttaattattttgtgcagcgatgggggcggggggggggggggggcgcgcgccaggcggggcggggcggggcgaggggcggggcggggcgaggcggagaggtgcggcggcagccaatcagagcggcgcgctccgaaagtttccttttatggcgaggcggcggcggcggcggccctataaaaagcgaagcgcgcggcgggcgggagtcgctgcgcgctgccttcgccccgtgccccgctccgccgccgcctcgcgccgcccgccccggctctgactgaccgcgttactcccacaggtgagcgggcgggacggcccttctcctccgggctgtaattagcgcttggtttaatgacggcttgtttcttttctgtggctgcgtgaaagccttgaggggctccgggagggccctttgtgcggggggagcggctcggggggtgcgtgcgtgtgtgtgtgcgtggggagcgccgcgtgcggctccgcgctgcccggcggctgtgagcgctgcgggcgcggcgcggggctttgtgcgctccgcagtgtgcgcgaggggagcgcggccgggggcggtgccccgcggtgcggggggggctgcgaggggaacaaaggctgcgtgcggggtgtgtgcgtgggggggtgagcagggggtgtgggcgcgtcggtcgggctgcaaccccccctgcacccccctccccgagttgctgagcacggcccggcttcgggtgcggggctccgtacggggcgtggcgcggggctcgccgtgccgggcggggggtggcggcaggtgggggtgccgggcggggcggggccgcctcgggccggggagggctcgggggaggggcgcggcggcccccggagcgccggcggctgtcgaggcgcggcgagccgcagccattgccttttatggtaatcgtgcgagagggcgcagggacttcctttgtcccaaatctgtgcggagccgaaatctgggaggcgccgccgcaccccctctagcgggcgcggggcgaagcggtgcggcgccggcaggaaggaaatgggcggggagggccttcgtgcgtcgccgcgccgccgtccccttctccctctccagcctcggggctgtccgcggggggacggctgccttcgggggggacggggcagggcggggttcggcttctggcgtgtgaccggcggctctagagcctctgctaaccatgttcatgccttcttctttttcctacagctcctgggcaacgtgctggttattgtgctgtctcatcattttggcaaagaattcgggattcgaaccggtgccgccaccatgaagttgcctgttaggctgttggtgctgatgttctggattcctgcttccagcagtgatgttttgatgacccaaactccactctccctgcctgtcagtcttggagatcaagcctccatctcttgcaaatctagtcagagcattgtacatagtaatggaaacacctatttagaatggtacctgcagaaaccaggccagtctccaaagctcctggtctacaaagtttccaatcgattttctggggtcccagacaggttcagtggcagtggatcagggacagatttcacactcaagatcagcagagtggaggctgaggatctgggaacttattactgctttcaaggttcacttgttccttgggcgttcggtggaggcaccaagctggaaatcaaacgggctgatgctgcaccaactgtatccatcttcccaccatccagtgagcagttaacatctggaggtgcctcagtcgtgtgcttcttgaacaacttctaccccaaagacatcaatgtcaagtggaagattgatggcagtgaacgacaaaatggcgtcctgaacagttggactgatcaggacagcaaagacagcacctacagcatgagcagcaccctcacgttgaccaaggacgagtatgaacgacataacagctatacctgtgaggccactcacaagacatcaacttcacccattgtcaagagcttcaacaggaatgagtgtgagggcagaggaagtcttctaacatgcggtgacgtggaggagaatcccggccctatgaacttcgggctcagcttgattttccttgtccttgttttaaaaggtgtccagtgtgaggttcatctggtggagtctgggggagccttagtgaagcctggagggtccctgaaactctcctgtgcagcctctggattcagtttcagtaaatatggcatgtcttgggttcgccagactccagacaagaggctggagtgggtcgcaaccattagtagtagtgggagtcgcacctactatccagacagtgtgaagggccaattcaccatctccagagacaatgccaagaacaccctgtacctgcaaatgagcagtctgaagtctgaggacacagccatgtattactgttcaattagctgggacggtgctatggactactggggtcaagggacctcagtcaccgtctcctcagccaaaacgacacccccatctgtctatccactggcccctggatctgctgcccaaactaactccatggtgaccctgggatgcctggtcaagggctatttccctgagccagtgacagtgacctggaactctggatccctgtccagcggtgtgcacaccttcccagctgtcctgcagtctgacctctacactctgagcagctcagtgactgtcccctccagcacctggcccagcgagaccgtcacctgcaacgttgcccacccggccagcagcaccaaggtggacaagaaaattgtgcccagggattgtggttgtaagccttgcatatgtacagtcccagaagtatcatctgtcttcatcttccccccaaagcccaaggatgtgctcaccattactctgactcctaaggtcacgtgtgttgtggtagacatcagcaaggatgatcccgaggtccagttcagctggtttgtagatgatgtggaggtgcacacagctcagacgcaaccccgggaggagcagttcaacagcactttccgctcagtcagtgaacttcccatcatgcaccaggactggctcaatggcaaggagttcaaatgcagggtcaacagtgcagctttccctgcccccatcgagaaaaccatctccaaaaccaaaggcagaccgaaggctccacaggtgtacaccattccacctcccaaggagcagatggccaaggataaagtcagtctgacctgcatgataacagacttcttccctgaagacattactgtggagtggcagtggaatgggcagccagcggagaactacaagaacactcagcccatcatggacacagatggctcttacttcgtctacagcaagctcaatgtgcagaagagcaactgggaggcaggaaatactttcacctgctctgtgttacatgagggcctgcacaaccaccatactgagaagagcctctcccactctcctggttagtaactcgaggacggggtgaactacgcctgaggatccgatctttttccctctgccaaaaattatggggacatcatgaagccccttgagcatctgacttctggctaataaaggaaatttattttcattgcaatagtgtgttggaattttttgtgtctctcactcggcctaggtagataagtagcatggcgggttaatcattaactacaaggaacccctagtgatggagttggccactccctctctgcgcgctcgctcgctcactgaggccgggcgaccaaaggtcgcccgacgcccgggctttgcccgggcggcctcagtgagcgagcgagcgcgcag

SEQ ID NO: 2000 - DNA, 3971 bp, Artificial Sequence
  Description of Artificial Sequence: Synthetic polynucleotide
ctgcgcgctcgctcgctcactgaggccgcccgggcaaagcccgggcgtcgggcgacctttggtcgcccggcctcagtgagcgagcgagcgcgcagagagggagtggccaactccatcactaggggttccttgtagttaatgattaacccgccatgctacttatctaccagggtaatggggatcctctagaactatagctagtcgacattgattattgactagttattaatagtaatcaattacggggtcattagttcatagcccatatatggagttccgcgttacataacttacggtaaatggcccgcctggctgaccgcccaacgacccccgcccattgacgtcaataatgacgtatgttcccatagtaacgccaatagggactttccattgacgtcaatgggtggagtatttacggtaaactgcccacttggcagtacatcaagtgtatcatatgccaagtacgccccctattgacgtcaatgacggtaaatggcccgcctggcattatgcccagtacatgaccttatgggactttcctacttggcagtacatctacgtattagtcatcgctattaccatgtcgaggccacgttctgcttcactctccccatctcccccccctccccacccccaattttgtatttatttattttttaattattttgtgcagcgatgggggcggggggggggggcgcgcgccaggcggggcggggcggggcgaggggcggggcggggcgaggcggagaggtgcggcggcagccaatcagagcggcgcgctccgaaagtttccttttatggcgaggcggcggcggcggcggccctataaaaagcgaagcgcgcggcgggcgggagcaagcttcgtttagtgaaccgtcagatcgcctggagacgccatccacgctgttttgacctccatagaagacaccgggaccgatccagcctccgcggattcgaatcccggccgggaacggtgcattggaacgcggattccccgtgccaagagtgacgtaagtaccgcctatagagtctataggcccacaaaaaatgctttcttcttttaatatacttttttgtttatcttatttctaatactttccctaatctctttctttcagggcaataatgatacaatgtatcatgcctctttgcaccattctaaagaataacagtgataatttctgggttaaggcaatagcaatatttctgcatataaatatttctgcatataaattgtaactgatgtaagaggtttcatattgctaatagcagctacaatccagctaccattctgcttttattttatggttgggataaggctggattattctgagtccaagctaggcccttttgctaatcatgttcatacctcttatcttcctcccacagctcctgggcaacgtgctggtctgtgtgctggcccatcactttggcaaagaattgggattcgaaccggtgccgccaccatgaagttgcctgttaggctgttggtgctgatgttctggattcctgcttccagcagtgatgttttgatgacccaaactccactctccctgcctgtcagtcttggagatcaagcctccatctcttgcaaatctagtcagagcattgtacatagtaatggaaacacctatttagaatggtacctgcagaaaccaggccagtctccaaagctcctggtctacaaagtttccaatcgattttctggggtcccagacaggttcagtggcagtggatcagggacagatttcacactcaagatcagcagagtggaggctgaggatctgggaacttattactgctttcaaggttcacttgttccttgggcgttcggtggaggcaccaagctggaaatcaaacgggctgatgctgcaccaactgtatccatcttcccaccatccagtgagcagttaacatctggaggtgcctcagtcgtgtgcttcttgaacaacttctaccccaaagacatcaatgtcaagtggaagattgatggcagtgaacgacaaaatggcgtcctgaacagttggactgatcaggacagcaaagacagcacctacagcatgagcagcaccctcacgttgaccaaggacgagtatgaacgacataacagctatacctgtgaggccactcacaagacatcaacttcacccattgtcaagagcttcaacaggaatgagtgtggaagcggagtgaaacagactttgaattttgaccttctcaagttggcgggagacgtggagtccaaccctggacctatgaacttcgggctcagcttgattttccttgtccttgttttaaaaggtgtccagtgtgaggttcatctggtggagtctgggggagccttagtgaagcctggagggtccctgaaactctcctgtgcagcctctggattcagtttcagtaaatatggcatgtcttgggttcgccagactccagacaagaggctggagtgggtcgcaaccattagtagtagtgggagtcgcacctactatccagacagtgtgaagggccaattcaccatctccagagacaatgccaagaacaccctgtacctgcaaatgagcagtctgaagtctgaggacacagccatgtattactgttcaattagctgggacggtgctatggactactggggtcaagggacctcagtcaccgtctcctcagccaaaacgacacccccatctgtctatccactggcccctggatctgctgcccaaactaactccatggtgaccctgggatgcctggtcaagggctatttccctgagccagtgacagtgacctggaactctggatccctgtccagcggtgtgcacaccttcccagctgtcctgcagtctgacctctacactctgagcagctcagtgactgtcccctccagcacctggcccagcgagaccgtcacctgcaacgttgcccacccggccagcagcaccaaggtggacaagaaaattgtgcccagggattgtggttgtaagccttgcatatgtacagtcccagaagtatcatctgtcttcatcttccccccaaagcccaaggatgtgctcaccattactctgactcctaaggtcacgtgtgttgtggtagacatcagcaaggatgatcccgaggtccagttcagctggtttgtagatgatgtggaggtgcacacagctcagacgcaaccccgggaggagcagttcaacagcactttccgctcagtcagtgaacttcccatcatgcaccaggactggctcaatggcaaggagttcaaatgcagggtcaacagtgcagctttccctgcccccatcgagaaaaccatctccaaaaccaaaggcagaccgaaggctccacaggtgtacaccattccacctcccaaggagcagatggccaaggataaagtcagtctgacctgcatgataacagacttcttccctgaagacattactgtggagtggcagtggaatgggcagccagcggagaactacaagaacactcagcccatcatggacacagatggctcttacttcgtctacagcaagctcaatgtgcagaagagcaactgggaggcaggaaatactttcacctgctctgtgttacatgagggcctgcacaaccaccatactgagaagagcctctcccactctcctggttagtaactcgaggacggggtgaactacgcctgaggatccgatctttttccctctgccaaaaattatggggacatcatgaagccccttgagcatctgacttctggctaataaaggaaatttattttcattgcaatagtgtgttggaattttttgtgtctctcactcggcctaggtagataagtagcatggcgggttaatcattaactacaaggaacccctagtgatggagttggccactccctctctgcgcgctcgctcgctcactgaggccgggcgaccaaaggtcgcccgacgcccgggctttgcccgggcggcctcagtgagcgagcgagcgcgcag

SEQ ID NO: 2001 - DNA, 4029 bp, Artificial Sequence
  Description of Artificial Sequence: Synthetic polynucleotide
ctgcgcgctcgctcgctcactgaggccgcccgggcaaagcccgggcgtcgggcgacctttggtcgcccggcctcagtgagcgagcgagcgcgcagagagggagtggccaactccatcactaggggttccttgtagttaatgattaacccgccatgctacttatctaccagggtaatggggatcctctagaactatagctagtcgacataacgcgtgatctaacatatcctggtgtggagtagcggacgctgctatgacagaggctcgggggcctgagctggctctgtgagctggggaggaggcagacagccaggccttgtctgcaagcagacctggcagcattgggctggccgccccccagggcctcctcttcatgcccagtgaatgactcaccttggcacagacacaatgttcggggtgggcacagtgcctgcttcccgccgcaccccagcccccctcaaatgccttccgagaagcccattgagcagggggcttgcattgcaccccagcctgacagcctggcatcttgggataaaagcagcacagccccctaggggctgcccttgctgtgtggcgccaccggcggtggagaacaaggctctattcagcctgtgcccaggaaaggggatcaggggatgcccaggcatggacagtgggtggcagggggggagaggagggctgtctgcttcccagaagtccaaggacacaaatgggtgaggggagagctctccccatagctgggctgcggcccaaccccaccccctcaggctatgccagggggtgttgccaggggcacccgggcatcgccagtctagcccactccttcataaagccctcgcatcccaggagcgagcagagccagagcaggttggagaggagacgcatcacctccgctgctcgcggggatcctctagaagcttcgtttagtgaaccgtcagatcgcctggagacgccatccacgctgttttgacctccatagaagacaccgggaccgatccagcctccgcggattcgaatcccggccgggaacggtgcattggaacgcggattccccgtgccaagagtgacgtaagtaccgcctatagagtctataggcccacaaaaaatgctttcttcttttaatatacttttttgtttatcttatttctaatactttccctaatctctttctttcagggcaataatgatacaatgtatcatgcctctttgcaccattctaaagaataacagtgataatttctgggttaaggcaatagcaatatttctgcatataaatatttctgcatataaattgtaactgatgtaagaggtttcatattgctaatagcagctacaatccagctaccattctgcttttattttatggttgggataaggctggattattctgagtccaagctaggcccttttgctaatcatgttcatacctcttatcttcctcccacagctcctgggcaacgtgctggtctgtgtgctggcccatcactttggcaaagaattgggattcgaaccggtgccgccaccatgaagttgcctgttaggctgttggtgctgatgttctggattcctgcttccagcagtgatgttttgatgacccaaactccactctccctgcctgtcagtcttggagatcaagcctccatctcttgcaaatctagtcagagcattgtacatagtaatggaaacacctatttagaatggtacctgcagaaaccaggccagtctccaaagctcctggtctacaaagtttccaatcgattttctggggtcccagacaggttcagtggcagtggatcagggacagatttcacactcaagatcagcagagtggaggctgaggatctgggaacttattactgctttcaaggttcacttgttccttgggcgttcggtggaggcaccaagctggaaatcaaacgggctgatgctgcaccaactgtatccatcttcccaccatccagtgagcagttaacatctggaggtgcctcagtcgtgtgcttcttgaacaacttctaccccaaagacatcaatgtcaagtggaagattgatggcagtgaacgacaaaatggcgtcctgaacagttggactgatcaggacagcaaagacagcacctacagcatgagcagcaccctcacgttgaccaaggacgagtatgaacgacataacagctatacctgtgaggccactcacaagacatcaacttcacccattgtcaagagcttcaacaggaatgagtgtggaagcggagtgaaacagactttgaattttgaccttctcaagttggcgggagacgtggagtccaaccctggacctatgaacttcgggctcagcttgattttccttgtccttgttttaaaaggtgtccagtgtgaggttcatctggtggagtctgggggagccttagtgaagcctggagggtccctgaaactctcctgtgcagcctctggattcagtttcagtaaatatggcatgtcttgggttcgccagactccagacaagaggctggagtgggtcgcaaccattagtagtagtgggagtcgcacctactatccagacagtgtgaagggccaattcaccatctccagagacaatgccaagaacaccctgtacctgcaaatgagcagtctgaagtctgaggacacagccatgtattactgttcaattagctgggacggtgctatggactactggggtcaagggacctcagtcaccgtctcctcagccaaaacgacacccccatctgtctatccactggcccctggatctgctgcccaaactaactccatggtgaccctgggatgcctggtcaagggctatttccctgagccagtgacagtgacctggaactctggatccctgtccagcggtgtgcacaccttcccagctgtcctgcagtctgacctctacactctgagcagctcagtgactgtcccctccagcacctggcccagcgagaccgtcacctgcaacgttgcccacccggccagcagcaccaaggtggacaagaaaattgtgcccagggattgtggttgtaagccttgcatatgtacagtcccagaagtatcatctgtcttcatcttccccccaaagcccaaggatgtgctcaccattactctgactcctaaggtcacgtgtgttgtggtagacatcagcaaggatgatcccgaggtccagttcagctggtttgtagatgatgtggaggtgcacacagctcagacgcaaccccgggaggagcagttcaacagcactttccgctcagtcagtgaacttcccatcatgcaccaggactggctcaatggcaaggagttcaaatgcagggtcaacagtgcagctttccctgcccccatcgagaaaaccatctccaaaaccaaaggcagaccgaaggctccacaggtgtacaccattccacctcccaaggagcagatggccaaggataaagtcagtctgacctgcatgataacagacttcttccctgaagacattactgtggagtggcagtggaatgggcagccagcggagaactacaagaacactcagcccatcatggacacagatggctcttacttcgtctacagcaagctcaatgtgcagaagagcaactgggaggcaggaaatactttcacctgctctgtgttacatgagggcctgcacaaccaccatactgagaagagcctctcccactctcctggttagtaactcgaggacggggtgaactacgcctgaggatccgatctttttccctctgccaaaaattatggggacatcatgaagccccttgagcatctgacttctggctaataaaggaaatttattttcattgcaatagtgtgttggaattttttgtgtctctcactcggcctaggtagataagtagcatggcgggttaatcattaactacaaggaacccctagtgatggagttggccactccctctctgcgcgctcgctcgctcactgaggccgggcgaccaaaggtcgcccgacgcccgggctttgcccgggcggcctcagtgagcgagcgagcgcgcag

SEQ ID NO: 2002 - DNA, 4008 bp, Artificial Sequence
  Description of Artificial Sequence: Synthetic polynucleotide
ctgcgcgctcgctcgctcactgaggccgcccgggcaaagcccgggcgtcgggcgacctttggtcgcccggcctcagtgagcgagcgagcgcgcagagagggagtggccaactccatcactaggggttccttgtagttaatgattaacccgccatgctacttatctaccagggtaatggggatcctctagaactatagctagtcgacataacgcgtgatctaacatatcctggtgtggagtagcggacgctgctatgacagaggctcgggggcctgagctggctctgtgagctggggaggaggcagacagccaggccttgtctgcaagcagacctggcagcattgggctggccgccccccagggcctcctcttcatgcccagtgaatgactcaccttggcacagacacaatgttcggggtgggcacagtgcctgcttcccgccgcaccccagcccccctcaaatgccttccgagaagcccattgagcagggggcttgcattgcaccccagcctgacagcctggcatcttgggataaaagcagcacagccccctaggggctgcccttgctgtgtggcgccaccggcggtggagaacaaggctctattcagcctgtgcccaggaaaggggatcaggggatgcccaggcatggacagtgggtggcagggggggagaggagggctgtctgcttcccagaagtccaaggacacaaatgggtgaggggagagctctccccatagctgggctgcggcccaaccccaccccctcaggctatgccagggggtgttgccaggggcacccgggcatcgccagtctagcccactccttcataaagccctcgcatcccaggagcgagcagagccagagcaggttggagaggagacgcatcacctccgctgctcgcggggatcctctagaagcttcgtttagtgaaccgtcagatcgcctggagacgccatccacgctgttttgacctccatagaagacaccgggaccgatccagcctccgcggattcgaatcccggccgggaacggtgcattggaacgcggattccccgtgccaagagtgacgtaagtaccgcctatagagtctataggcccacaaaaaatgctttcttcttttaatatacttttttgtttatcttatttctaatactttccctaatctctttctttcagggcaataatgatacaatgtatcatgcctctttgcaccattctaaagaataacagtgataatttctgggttaaggcaatagcaatatttctgcatataaatatttctgcatataaattgtaactgatgtaagaggtttcatattgctaatagcagctacaatccagctaccattctgcttttattttatggttgggataaggctggattattctgagtccaagctaggcccttttgctaatcatgttcatacctcttatcttcctcccacagctcctgggcaacgtgctggtctgtgtgctggcccatcactttggcaaagaattgggattcgaaccggtgccgccaccatgaagttgcctgttaggctgttggtgctgatgttctggattcctgcttccagcagtgatgttttgatgacccaaactccactctccctgcctgtcagtcttggagatcaagcctccatctcttgcaaatctagtcagagcattgtacatagtaatggaaacacctatttagaatggtacctgcagaaaccaggccagtctccaaagctcctggtctacaaagtttccaatcgattttctggggtcccagacaggttcagtggcagtggatcagggacagatttcacactcaagatcagcagagtggaggctgaggatctgggaacttattactgctttcaaggttcacttgttccttgggcgttcggtggaggcaccaagctggaaatcaaacgggctgatgctgcaccaactgtatccatcttcccaccatccagtgagcagttaacatctggaggtgcctcagtcgtgtgcttcttgaacaacttctaccccaaagacatcaatgtcaagtggaagattgatggcagtgaacgacaaaatggcgtcctgaacagttggactgatcaggacagcaaagacagcacctacagcatgagcagcaccctcacgttgaccaaggacgagtatgaacgacataacagctatacctgtgaggccactcacaagacatcaacttcacccattgtcaagagcttcaacaggaatgagtgtgagggcagaggaagtcttctaacatgcggtgacgtggaggagaatcccggccctatgaacttcgggctcagcttgattttccttgtccttgttttaaaaggtgtccagtgtgaggttcatctggtggagtctgggggagccttagtgaagcctggagggtccctgaaactctcctgtgcagcctctggattcagtttcagtaaatatggcatgtcttgggttcgccagactccagacaagaggctggagtgggtcgcaaccattagtagtagtgggagtcgcacctactatccagacagtgtgaagggccaattcaccatctccagagacaatgccaagaacaccctgtacctgcaaatgagcagtctgaagtctgaggacacagccatgtattactgttcaattagctgggacggtgctatggactactggggtcaagggacctcagtcaccgtctcctcagccaaaacgacacccccatctgtctatccactggcccctggatctgctgcccaaactaactccatggtgaccctgggatgcctggtcaagggctatttccctgagccagtgacagtgacctggaactctggatccctgtccagcggtgtgcacaccttcccagctgtcctgcagtctgacctctacactctgagcagctcagtgactgtcccctccagcacctggcccagcgagaccgtcacctgcaacgttgcccacccggccagcagcaccaaggtggacaagaaaattgtgcccagggattgtggttgtaagccttgcatatgtacagtcccagaagtatcatctgtcttcatcttccccccaaagcccaaggatgtgctcaccattactctgactcctaaggtcacgtgtgttgtggtagacatcagcaaggatgatcccgaggtccagttcagctggtttgtagatgatgtggaggtgcacacagctcagacgcaaccccgggaggagcagttcaacagcactttccgctcagtcagtgaacttcccatcatgcaccaggactggctcaatggcaaggagttcaaatgcagggtcaacagtgcagctttccctgcccccatcgagaaaaccatctccaaaaccaaaggcagaccgaaggctccacaggtgtacaccattccacctcccaaggagcagatggccaaggataaagtcagtctgacctgcatgataacagacttcttccctgaagacattactgtggagtggcagtggaatgggcagccagcggagaactacaagaacactcagcccatcatggacacagatggctcttacttcgtctacagcaagctcaatgtgcagaagagcaactgggaggcaggaaatactttcacctgctctgtgttacatgagggcctgcacaaccaccatactgagaagagcctctcccactctcctggttagtaactcgaggacggggtgaactacgcctgaggatccgatctttttccctctgccaaaaattatggggacatcatgaagccccttgagcatctgacttctggctaataaaggaaatttattttcattgcaatagtgtgttggaattttttgtgtctctcactcggcctaggtagataagtagcatggcgggttaatcattaactacaaggaacccctagtgatggagttggccactccctctctgcgcgctcgctcgctcactgaggccgggcgaccaaaggtcgcccgacgcccgggctttgcccgggcggcctcagtgagcgagcgagcgcgcag

SEQ ID NO: 2003 - DNA, 3887 bp, Artificial Sequence
  Description of Artificial Sequence: Synthetic polynucleotide
ctgcgcgctcgctcgctcactgaggccgcccgggcaaagcccgggcgtcgggcgacctttggtcgcccggcctcagtgagcgagcgagcgcgcagagagggagtggccaactccatcactaggggttccttgtagttaatgattaacccgccatgctacttatctaccagggtaatggggatcctctagaactatagctagtcgacataacgcgttagtatctgcagagggccctgcgtatgagtgcaagtgggttttaggaccaggatgaggcggggtgggggtgcctacctgacgaccgaccccgacccactggacaagcacccaacccccattccccaaattgcgcatcccctatcagagagggggaggggaaacaggatgcggcgaggcgcgtgcgcactgccagcttcagcaccgcggacagtgccttcgcccccgcctggcggcgcgcgccaccgccgcctcagcactgaaggcgcgctgacgtcactcgccggtcccccgcaaactccccttcccggccaccttggtcgcgtccgcgccgccgccggcccagccggaccgcaccacgcgaggcgcgagataggggggcacgggcgcgaccatctgcgctgcggcgccggcgactcagcgctgcctcagtctgcggtgggcagcggaggagtcgtgtcgtgcctgagagcgcagctgtgctcctgggcaccgcgcagtccgcccccgcggctcctggccagaccacccctaggaccccctgccccaagtcgcagccaagcttcgtttagtgaaccgtcagatcgcctggagacgccatccacgctgttttgacctccatagaagacaccgggaccgatccagcctccgcggattcgaatcccggccgggaacggtgcattggaacgcggattccccgtgccaagagtgacgtaagtaccgcctatagagtctataggcccacaaaaaatgctttcttcttttaatatacttttttgtttatcttatttctaatactttccctaatctctttctttcagggcaataatgatacaatgtatcatgcctctttgcaccattctaaagaataacagtgataatttctgggttaaggcaatagcaatatttctgcatataaatatttctgcatataaattgtaactgatgtaagaggtttcatattgctaatagcagctacaatccagctaccattctgcttttattttatggttgggataaggctggattattctgagtccaagctaggcccttttgctaatcatgttcatacctcttatcttcctcccacagctcctgggcaacgtgctggtctgtgtgctggcccatcactttggcaaagaattgggattcgaaccggtgccgccaccatgaagttgcctgttaggctgttggtgctgatgttctggattcctgcttccagcagtgatgttttgatgacccaaactccactctccctgcctgtcagtcttggagatcaagcctccatctcttgcaaatctagtcagagcattgtacatagtaatggaaacacctatttagaatggtacctgcagaaaccaggccagtctccaaagctcctggtctacaaagtttccaatcgattttctggggtcccagacaggttcagtggcagtggatcagggacagatttcacactcaagatcagcagagtggaggctgaggatctgggaacttattactgctttcaaggttcacttgttccttgggcgttcggtggaggcaccaagctggaaatcaaacgggctgatgctgcaccaactgtatccatcttcccaccatccagtgagcagttaacatctggaggtgcctcagtcgtgtgcttcttgaacaacttctaccccaaagacatcaatgtcaagtggaagattgatggcagtgaacgacaaaatggcgtcctgaacagttggactgatcaggacagcaaagacagcacctacagcatgagcagcaccctcacgttgaccaaggacgagtatgaacgacataacagctatacctgtgaggccactcacaagacatcaacttcacccattgtcaagagcttcaacaggaatgagtgtggaagcggagtgaaacagactttgaattttgaccttctcaagttggcgggagacgtggagtccaaccctggacctatgaacttcgggctcagcttgattttccttgtccttgttttaaaaggtgtccagtgtgaggttcatctggtggagtctgggggagccttagtgaagcctggagggtccctgaaactctcctgtgcagcctctggattcagtttcagtaaatatggcatgtcttgggttcgccagactccagacaagaggctggagtgggtcgcaaccattagtagtagtgggagtcgcacctactatccagacagtgtgaagggccaattcaccatctccagagacaatgccaagaacaccctgtacctgcaaatgagcagtctgaagtctgaggacacagccatgtattactgttcaattagctgggacggtgctatggactactggggtcaagggacctcagtcaccgtctcctcagccaaaacgacacccccatctgtctatccactggcccctggatctgctgcccaaactaactccatggtgaccctgggatgcctggtcaagggctatttccctgagccagtgacagtgacctggaactctggatccctgtccagcggtgtgcacaccttcccagctgtcctgcagtctgacctctacactctgagcagctcagtgactgtcccctccagcacctggcccagcgagaccgtcacctgcaacgttgcccacccggccagcagcaccaaggtggacaagaaaattgtgcccagggattgtggttgtaagccttgcatatgtacagtcccagaagtatcatctgtcttcatcttccccccaaagcccaaggatgtgctcaccattactctgactcctaaggtcacgtgtgttgtggtagacatcagcaaggatgatcccgaggtccagttcagctggtttgtagatgatgtggaggtgcacacagctcagacgcaaccccgggaggagcagttcaacagcactttccgctcagtcagtgaacttcccatcatgcaccaggactggctcaatggcaaggagttcaaatgcagggtcaacagtgcagctttccctgcccccatcgagaaaaccatctccaaaaccaaaggcagaccgaaggctccacaggtgtacaccattccacctcccaaggagcagatggccaaggataaagtcagtctgacctgcatgataacagacttcttccctgaagacattactgtggagtggcagtggaatgggcagccagcggagaactacaagaacactcagcccatcatggacacagatggctcttacttcgtctacagcaagctcaatgtgcagaagagcaactgggaggcaggaaatactttcacctgctctgtgttacatgagggcctgcacaaccaccatactgagaagagcctctcccactctcctggttagtaactcgaggacggggtgaactacgcctgaggatccgatctttttccctctgccaaaaattatggggacatcatgaagccccttgagcatctgacttctggctaataaaggaaatttattttcattgcaatagtgtgttggaattttttgtgtctctcactcggcctaggtagataagtagcatggcgggttaatcattaactacaaggaacccctagtgatggagttggccactccctctctgcgcgctcgctcgctcactgaggccgggcgaccaaaggtcgcccgacgcccgggctttgcccgggcggcctcagtgagcgagcgagcgcgcag

SEQ ID NO: 2004 - DNA, 3866 bp, Artificial Sequence
  Description of Artificial Sequence: Synthetic polynucleotide
ctgcgcgctcgctcgctcactgaggccgcccgggcaaagcccgggcgtcgggcgacctttggtcgcccggcctcagtgagcgagcgagcgcgcagagagggagtggccaactccatcactaggggttccttgtagttaatgattaacccgccatgctacttatctaccagggtaatggggatcctctagaactatagctagtcgacataacgcgttagtatctgcagagggccctgcgtatgagtgcaagtgggttttaggaccaggatgaggcggggtgggggtgcctacctgacgaccgaccccgacccactggacaagcacccaacccccattccccaaattgcgcatcccctatcagagagggggaggggaaacaggatgcggcgaggcgcgtgcgcactgccagcttcagcaccgcggacagtgccttcgcccccgcctggcggcgcgcgccaccgccgcctcagcactgaaggcgcgctgacgtcactcgccggtcccccgcaaactccccttcccggccaccttggtcgcgtccgcgccgccgccggcccagccggaccgcaccacgcgaggcgcgagataggggggcacgggcgcgaccatctgcgctgcggcgccggcgactcagcgctgcctcagtctgcggtgggcagcggaggagtcgtgtcgtgcctgagagcgcagctgtgctcctgggcaccgcgcagtccgcccccgcggctcctggccagaccacccctaggaccccctgccccaagtcgcagccaagcttcgtttagtgaaccgtcagatcgcctggagacgccatccacgctgttttgacctccatagaagacaccgggaccgatccagcctccgcggattcgaatcccggccgggaacggtgcattggaacgcggattccccgtgccaagagtgacgtaagtaccgcctatagagtctataggcccacaaaaaatgctttcttcttttaatatacttttttgtttatcttatttctaatactttccctaatctctttctttcagggcaataatgatacaatgtatcatgcctctttgcaccattctaaagaataacagtgataatttctgggttaaggcaatagcaatatttctgcatataaatatttctgcatataaattgtaactgatgtaagaggtttcatattgctaatagcagctacaatccagctaccattctgcttttattttatggttgggataaggctggattattctgagtccaagctaggcccttttgctaatcatgttcatacctcttatcttcctcccacagctcctgggcaacgtgctggtctgtgtgctggcccatcactttggcaaagaattgggattcgaaccggtgccgccaccatgaagttgcctgttaggctgttggtgctgatgttctggattcctgcttccagcagtgatgttttgatgacccaaactccactctccctgcctgtcagtcttggagatcaagcctccatctcttgcaaatctagtcagagcattgtacatagtaatggaaacacctatttagaatggtacctgcagaaaccaggccagtctccaaagctcctggtctacaaagtttccaatcgattttctggggtcccagacaggttcagtggcagtggatcagggacagatttcacactcaagatcagcagagtggaggctgaggatctgggaacttattactgctttcaaggttcacttgttccttgggcgttcggtggaggcaccaagctggaaatcaaacgggctgatgctgcaccaactgtatccatcttcccaccatccagtgagcagttaacatctggaggtgcctcagtcgtgtgcttcttgaacaacttctaccccaaagacatcaatgtcaagtggaagattgatggcagtgaacgacaaaatggcgtcctgaacagttggactgatcaggacagcaaagacagcacctacagcatgagcagcaccctcacgttgaccaaggacgagtatgaacgacataacagctatacctgtgaggccactcacaagacatcaacttcacccattgtcaagagcttcaacaggaatgagtgtgagggcagaggaagtcttctaacatgcggtgacgtggaggagaatcccggccctatgaacttcgggctcagcttgattttccttgtccttgttttaaaaggtgtccagtgtgaggttcatctggtggagtctgggggagccttagtgaagcctggagggtccctgaaactctcctgtgcagcctctggattcagtttcagtaaatatggcatgtcttgggttcgccagactccagacaagaggctggagtgggtcgcaaccattagtagtagtgggagtcgcacctactatccagacagtgtgaagggccaattcaccatctccagagacaatgccaagaacaccctgtacctgcaaatgagcagtctgaagtctgaggacacagccatgtattactgttcaattagctgggacggtgctatggactactggggtcaagggacctcagtcaccgtctcctcagccaaaacgacacccccatctgtctatccactggcccctggatctgctgcccaaactaactccatggtgaccctgggatgcctggtcaagggctatttccctgagccagtgacagtgacctggaactctggatccctgtccagcggtgtgcacaccttcccagctgtcctgcagtctgacctctacactctgagcagctcagtgactgtcccctccagcacctggcccagcgagaccgtcacctgcaacgttgcccacccggccagcagcaccaaggtggacaagaaaattgtgcccagggattgtggttgtaagccttgcatatgtacagtcccagaagtatcatctgtcttcatcttccccccaaagcccaaggatgtgctcaccattactctgactcctaaggtcacgtgtgttgtggtagacatcagcaaggatgatcccgaggtccagttcagctggtttgtagatgatgtggaggtgcacacagctcagacgcaaccccgggaggagcagttcaacagcactttccgctcagtcagtgaacttcccatcatgcaccaggactggctcaatggcaaggagttcaaatgcagggtcaacagtgcagctttccctgcccccatcgagaaaaccatctccaaaaccaaaggcagaccgaaggctccacaggtgtacaccattccacctcccaaggagcagatggccaaggataaagtcagtctgacctgcatgataacagacttcttccctgaagacattactgtggagtggcagtggaatgggcagccagcggagaactacaagaacactcagcccatcatggacacagatggctcttacttcgtctacagcaagctcaatgtgcagaagagcaactgggaggcaggaaatactttcacctgctctgtgttacatgagggcctgcacaaccaccatactgagaagagcctctcccactctcctggttagtaactcgaggacggggtgaactacgcctgaggatccgatctttttccctctgccaaaaattatggggacatcatgaagccccttgagcatctgacttctggctaataaaggaaatttattttcattgcaatagtgtgttggaattttttgtgtctctcactcggcctaggtagataagtagcatggcgggttaatcattaactacaaggaacccctagtgatggagttggccactccctctctgcgcgctcgctcgctcactgaggccgggcgaccaaaggtcgcccgacgcccgggctttgcccgggcggcctcagtgagcgagcgagcgcgcag

SEQ ID NO: 2005 - DNA, 3932 bp, Artificial Sequence
  Description of Artificial Sequence: Synthetic polynucleotide
ctgcgcgctcgctcgctcactgaggccgcccgggcaaagcccgggcgtcgggcgacctttggtcgcccggcctcagtgagcgagcgagcgcgcagagagggagtggccaactccatcactaggggttccttgtagttaatgattaacccgccatgctacttatctaccagggtaatggggatcctctagaactatagctagtcgacattgattattgactagttattaatagtaatcaattacggggtcattagttcatagcccatatatggagttccgcgttacataacttacggtaaatggcccgcctggctgaccgcccaacgacccccgcccattgacgtcaataatgacgtatgttcccatagtaacgccaatagggactttccattgacgtcaatgggtggagtatttacggtaaactgcccacttggcagtacatcaagtgtatcatatgccaagtacgccccctattgacgtcaatgacggtaaatggcccgcctggcattatgcccagtacatgaccttatgggactttcctacttggcagtacatctacgtattagtcatcgctattaccatgtcgaggccacgttctgcttcactctccccatctcccccccctccccacccccaattttgtatttatttattttttaattattttgtgcagcgatgggggcggggggggggggcgcgcgccaggcggggcggggcggggcgaggggcggggcggggcgaggcggagaggtgcggcggcagccaatcagagcggcgcgctccgaaagtttccttttatggcgaggcggcggcggcggcggccctataaaaagcgaagcgcgcggcgggcgggagcaagcttcgtttagtgaaccgtcagatcgcctggagacgccatccacgctgttttgacctccatagaagacaccgggaccgatccagcctccgcggattcgaatcccggccgggaacggtgcattggaacgcggattccccgtgccaagagtgacgtaagtaccgcctatagagtctataggcccacaaaaaatgctttcttcttttaatatacttttttgtttatcttatttctaatactttccctaatctctttctttcagggcaataatgatacaatgtatcatgcctctttgcaccattctaaagaataacagtgataatttctgggttaaggcaatagcaatatttctgcatataaatatttctgcatataaattgtaactgatgtaagaggtttcatattgctaatagcagctacaatccagctaccattctgcttttattttatggttgggataaggctggattattctgagtccaagctaggcccttttgctaatcatgttcatacctcttatcttcctcccacagctcctgggcaacgtgctggtctgtgtgctggcccatcactttggcaaagaattgggattcgaaccggtgccgccaccatgaagttgcctgttaggctgttggtgctgatgttctggattcctgcttccagcagtgacgtgcagatgatccagagccccagcagcctgagcgccagcctgggcgacatcgtgaccatgacctgccaggccagccagggcaccagcatcaacctgaactggttccagcagaagcccggcaaggcccccaagctgctgatctacggcgccagcaacctggaggacggcgtgcccagcaggttcagcggcagcaggtacggcaccgacttcaccctgaccatcagcagcctggaggacgaggacatggccacctacttctgcctgcagcacacctacctgcccttcaccttcggcagcggcaccaagctggagatcaagcgggctgatgctgcaccaactgtatccatcttcccaccatccagtgagcagttaacatctggaggtgcctcagtcgtgtgcttcttgaacaacttctaccccaaagacatcaatgtcaagtggaagattgatggcagtgaacgacaaaatggcgtcctgaacagttggactgatcaggacagcaaagacagcacctacagcatgagcagcaccctcacgttgaccaaggacgagtatgaacgacataacagctatacctgtgaggccactcacaagacatcaacttcacccattgtcaagagcttcaacaggaatgagtgtgagggcagaggaagtcttctaacatgcggtgacgtggaggagaatcccggccctatgaacttcgggctcagcttgattttccttgtccttgttttaaaaggtgtccagtgtcaggtgcagctgcagcagagcgacgccgagctggtgaagcccggcgccagcgtgaagatcagctgcaaggccagcggctacaccttcaccgacaggaccatccactgggtgaagcagaggcccgagcagggcctggagtggatcggctacatctaccccggcgacggcagcaccaagtacaacgagaacttcaagggcaaggccaccctgaccgccgacaagagcagcagcaccgcctacatgcagctgaacagcctgaccagcgaggacagcgccgtgtacttctgcgccaggaggggcgcgatggactactggggccagggcaccagcgtgaccgtgagcagcgccaaaacgacacccccatctgtctatccactggcccctggatctgctgcccaaactaactccatggtgaccctgggatgcctggtcaagggctatttccctgagccagtgacagtgacctggaactctggatccctgtccagcggtgtgcacaccttcccagctgtcctgcagtctgacctctacactctgagcagctcagtgactgtcccctccagcacctggcccagcgagaccgtcacctgcaacgttgcccacccggccagcagcaccaaggtggacaagaaaattgtgcccagggattgtggttgtaagccttgcatatgtacagtcccagaagtatcatctgtcttcatcttccccccaaagcccaaggatgtgctcaccattactctgactcctaaggtcacgtgtgttgtggtagacatcagcaaggatgatcccgaggtccagttcagctggtttgtagatgatgtggaggtgcacacagctcagacgcaaccccgggaggagcagttcaacagcactttccgctcagtcagtgaacttcccatcatgcaccaggactggctcaatggcaaggagttcaaatgcagggtcaacagtgcagctttccctgcccccatcgagaaaaccatctccaaaaccaaaggcagaccgaaggctccacaggtgtacaccattccacctcccaaggagcagatggccaaggataaagtcagtctgacctgcatgataacagacttcttccctgaagacattactgtggagtggcagtggaatgggcagccagcggagaactacaagaacactcagcccatcatggacacagatggctcttacttcgtctacagcaagctcaatgtgcagaagagcaactgggaggcaggaaatactttcacctgctctgtgttacatgagggcctgcacaaccaccatactgagaagagcctctcccactctcctggtaagtagtaactcgaggacggggtgaactacgcctgaggatccgatctttttccctctgccaaaaattatggggacatcatgaagccccttgagcatctgacttctggctaataaaggaaatttattttcattgcaatagtgtgttggaattttttgtgtctctcactcggcctaggtagataagtagcatggcgggttaatcattaactacaaggaacccctagtgatggagttggccactccctctctgcgcgctcgctcgctcactgaggccgggcgaccaaaggtcgcccgacgcccgggctttgcccgggcggcctcagtgagcgagcgagcgcgcag

SEQ ID NO: 2006 - DNA, 3932 bp, Artificial Sequence
  Description of Artificial Sequence: Synthetic polynucleotide
ctgcgcgctcgctcgctcactgaggccgcccgggcaaagcccgggcgtcgggcgacctttggtcgcccggcctcagtgagcgagcgagcgcgcagagagggagtggccaactccatcactaggggttccttgtagttaatgattaacccgccatgctacttatctaccagggtaatggggatcctctagaactatagctagtcgacattgattattgactagttattaatagtaatcaattacggggtcattagttcatagcccatatatggagttccgcgttacataacttacggtaaatggcccgcctggctgaccgcccaacgacccccgcccattgacgtcaataatgacgtatgttcccatagtaacgccaatagggactttccattgacgtcaatgggtggagtatttacggtaaactgcccacttggcagtacatcaagtgtatcatatgccaagtacgccccctattgacgtcaatgacggtaaatggcccgcctggcattatgcccagtacatgaccttatgggactttcctacttggcagtacatctacgtattagtcatcgctattaccatgtcgaggccacgttctgcttcactctccccatctcccccccctccccacccccaattttgtatttatttattttttaattattttgtgcagcgatgggggcggggggggggggcgcgcgccaggcggggcggggcggggcgaggggcggggcggggcgaggcggagaggtgcggcggcagccaatcagagcggcgcgctccgaaagtttccttttatggcgaggcggcggcggcggcggccctataaaaagcgaagcgcgcggcgggcgggagcaagcttcgtttagtgaaccgtcagatcgcctggagacgccatccacgctgttttgacctccatagaagacaccgggaccgatccagcctccgcggattcgaatcccggccgggaacggtgcattggaacgcggattccccgtgccaagagtgacgtaagtaccgcctatagagtctataggcccacaaaaaatgctttcttcttttaatatacttttttgtttatcttatttctaatactttccctaatctctttctttcagggcaataatgatacaatgtatcatgcctctttgcaccattctaaagaataacagtgataatttctgggttaaggcaatagcaatatttctgcatataaatatttctgcatataaattgtaactgatgtaagaggtttcatattgctaatagcagctacaatccagctaccattctgcttttattttatggttgggataaggctggattattctgagtccaagctaggcccttttgctaatcatgttcatacctcttatcttcctcccacagctcctgggcaacgtgctggtctgtgtgctggcccatcactttggcaaagaattgggattcgaaccggtgccgccaccatgaagttgcctgttaggctgttggtgctgatgttctggattcctgcttccagcagtgacgttcagatgatccagagccccagcagcctgagcgccagcctgggcgacatcgtgaccatgacctgccaggccagccagggcaccagcatcaacctgaactggttccagcagaagcccggcaaggcccccaagctgctgatctacggcgccagcaacctggaggacggcgtgcccagccggttcagcggcagccggtacggcaccgacttcaccctgaccatcagcagcctggaggacgaggacatggccacctacttctgcctgcagcacacctacctgcccttcaccttcggcagcggcaccaagctggagatcaagcgggctgatgctgcaccaactgtatccatcttcccaccatccagtgagcagttaacatctggaggtgcctcagtcgtgtgcttcttgaacaacttctaccccaaagacatcaatgtcaagtggaagattgatggcagtgaacgacaaaatggcgtcctgaacagttggactgatcaggacagcaaagacagcacctacagcatgagcagcaccctcacgttgaccaaggacgagtatgaacgacataacagctatacctgtgaggccactcacaagacatcaacttcacccattgtcaagagcttcaacaggaatgagtgtgagggcagaggaagtcttctaacatgcggtgacgtggaggagaatcccggccctatgaacttcgggctcagcttgattttccttgtccttgttttaaaaggtgtccagtgtcaggtgcagctgcagcagagcgacgccgagctggtgaagcccggcgccagcgtgaagatcagctgcaaggccagcggctacaccttcaccgaccggaccatccactgggtgaagcagcggcccgagcagggcctggagtggatcggctacatctaccccggcgacggcagcaccaagtacaacgagaacttcaagggcaaggccaccctgaccgccgacaagagcagcagcaccgcctacatgcagctgaacagcctgaccagcgaggacagcgccgtgtacttctgcgcccggcggggcgctatggactactggggccagggcaccagcgtgaccgtgagcagcgccaaaacgacacccccatctgtctatccactggcccctggatctgctgcccaaactaactccatggtgaccctgggatgcctggtcaagggctatttccctgagccagtgacagtgacctggaactctggatccctgtccagcggtgtgcacaccttcccagctgtcctgcagtctgacctctacactctgagcagctcagtgactgtcccctccagcacctggcccagcgagaccgtcacctgcaacgttgcccacccggccagcagcaccaaggtggacaagaaaattgtgcccagggattgtggttgtaagccttgcatatgtacagtcccagaagtatcatctgtcttcatcttccccccaaagcccaaggatgtgctcaccattactctgactcctaaggtcacgtgtgttgtggtagacatcagcaaggatgatcccgaggtccagttcagctggtttgtagatgatgtggaggtgcacacagctcagacgcaaccccgggaggagcagttcaacagcactttccgctcagtcagtgaacttcccatcatgcaccaggactggctcaatggcaaggagttcaaatgcagggtcaacagtgcagctttccctgcccccatcgagaaaaccatctccaaaaccaaaggcagaccgaaggctccacaggtgtacaccattccacctcccaaggagcagatggccaaggataaagtcagtctgacctgcatgataacagacttcttccctgaagacattactgtggagtggcagtggaatgggcagccagcggagaactacaagaacactcagcccatcatggacacagatggctcttacttcgtctacagcaagctcaatgtgcagaagagcaactgggaggcaggaaatactttcacctgctctgtgttacatgagggcctgcacaaccaccatactgagaagagcctctcccactctcctggtaagtagtaactcgaggacggggtgaactacgcctgaggatccgatctttttccctctgccaaaaattatggggacatcatgaagccccttgagcatctgacttctggctaataaaggaaatttattttcattgcaatagtgtgttggaattttttgtgtctctcactcggcctaggtagataagtagcatggcgggttaatcattaactacaaggaacccctagtgatggagttggccactccctctctgcgcgctcgctcgctcactgaggccgggcgaccaaaggtcgcccgacgcccgggctttgcccgggcggcctcagtgagcgagcgagcgcgcag

SEQ ID NO: 2007 - DNA, 3932 bp, Artificial Sequence
  Description of Artificial Sequence: Synthetic polynucleotide
ctgcgcgctcgctcgctcactgaggccgcccgggcaaagcccgggcgtcgggcgacctttggtcgcccggcctcagtgagcgagcgagcgcgcagagagggagtggccaactccatcactaggggttccttgtagttaatgattaacccgccatgctacttatctaccagggtaatggggatcctctagaactatagctagtcgacattgattattgactagttattaatagtaatcaattacggggtcattagttcatagcccatatatggagttccgcgttacataacttacggtaaatggcccgcctggctgaccgcccaacgacccccgcccattgacgtcaataatgacgtatgttcccatagtaacgccaatagggactttccattgacgtcaatgggtggagtatttacggtaaactgcccacttggcagtacatcaagtgtatcatatgccaagtacgccccctattgacgtcaatgacggtaaatggcccgcctggcattatgcccagtacatgaccttatgggactttcctacttggcagtacatctacgtattagtcatcgctattaccatgtcgaggccacgttctgcttcactctccccatctcccccccctccccacccccaattttgtatttatttattttttaattattttgtgcagcgatgggggcggggggggggggcgcgcgccaggcggggcggggcggggcgaggggcggggcggggcgaggcggagaggtgcggcggcagccaatcagagcggcgcgctccgaaagtttccttttatggcgaggcggcggcggcggcggccctataaaaagcgaagcgcgcggcgggcgggagcaagcttcgtttagtgaaccgtcagatcgcctggagacgccatccacgctgttttgacctccatagaagacaccgggaccgatccagcctccgcggattcgaatcccggccgggaacggtgcattggaacgcggattccccgtgccaagagtgacgtaagtaccgcctatagagtctataggcccacaaaaaatgctttcttcttttaatatacttttttgtttatcttatttctaatactttccctaatctctttctttcagggcaataatgatacaatgtatcatgcctctttgcaccattctaaagaataacagtgataatttctgggttaaggcaatagcaatatttctgcatataaatatttctgcatataaattgtaactgatgtaagaggtttcatattgctaatagcagctacaatccagctaccattctgcttttattttatggttgggataaggctggattattctgagtccaagctaggcccttttgctaatcatgttcatacctcttatcttcctcccacagctcctgggcaacgtgctggtctgtgtgctggcccatcactttggcaaagaattgggattcgaaccggtgccgccaccatgaagttgcctgttaggctgttggtgctgatgttctggattcctgcttccagcagtgatgtgcagatgatccagagcccttcttccctctccgcctccctgggcgacatcgtgaccatgacctgccaggccagccagggcaccagcatcaacctgaactggttccagcagaagcccgggaaggcccccaagctcctcatctacggcgcctcaaatttggaagatggagtgcccagccgcttctccgggtcccgctatggaacagacttcacactgaccatcagcagcctggaggatgaggacatggccacctacttctgcctgcagcacacatacctgcccttcaccttcggcagcgggaccaagctggagatcaagcgggctgatgctgcaccaactgtatccatcttcccaccatccagtgagcagttaacatctggaggtgcctcagtcgtgtgcttcttgaacaacttctaccccaaagacatcaatgtcaagtggaagattgatggcagtgaacgacaaaatggcgtcctgaacagttggactgatcaggacagcaaagacagcacctacagcatgagcagcaccctcacgttgaccaaggacgagtatgaacgacataacagctatacctgtgaggccactcacaagacatcaacttcacccattgtcaagagcttcaacaggaatgagtgtgagggcagaggaagtcttctaacatgcggtgacgtggaggagaatcccggccctatgaacttcgggctcagcttgattttccttgtccttgttttaaaaggtgtccagtgtcaggtgcagctgcagcagagcgacgccgagctggtgaagcccggcgccagcgtgaagatcagctgcaaggccagcggctacaccttcaccgaccgaaccatccactgggtgaagcagcgacccgagcagggcctggagtggatcggctacatctaccccggcgacggcagcaccaagtacaacgagaacttcaagggcaaggccaccctgaccgccgacaagagcagcagcaccgcctacatgcagctgaacagcctgaccagcgaggacagcgccgtgtacttctgcgcccgacgaggcgctatggactactggggccagggcaccagcgtgaccgtgagcagcgccaaaacgacacccccatctgtctatccactggcccctggatctgctgcccaaactaactccatggtgaccctgggatgcctggtcaagggctatttccctgagccagtgacagtgacctggaactctggatccctgtccagcggtgtgcacaccttcccagctgtcctgcagtctgacctctacactctgagcagctcagtgactgtcccctccagcacctggcccagcgagaccgtcacctgcaacgttgcccacccggccagcagcaccaaggtggacaagaaaattgtgcccagggattgtggttgtaagccttgcatatgtacagtcccagaagtatcatctgtcttcatcttccccccaaagcccaaggatgtgctcaccattactctgactcctaaggtcacgtgtgttgtggtagacatcagcaaggatgatcccgaggtccagttcagctggtttgtagatgatgtggaggtgcacacagctcagacgcaaccccgggaggagcagttcaacagcactttccgctcagtcagtgaacttcccatcatgcaccaggactggctcaatggcaaggagttcaaatgcagggtcaacagtgcagctttccctgcccccatcgagaaaaccatctccaaaaccaaaggcagaccgaaggctccacaggtgtacaccattccacctcccaaggagcagatggccaaggataaagtcagtctgacctgcatgataacagacttcttccctgaagacattactgtggagtggcagtggaatgggcagccagcggagaactacaagaacactcagcccatcatggacacagatggctcttacttcgtctacagcaagctcaatgtgcagaagagcaactgggaggcaggaaatactttcacctgctctgtgttacatgagggcctgcacaaccaccatactgagaagagcctctcccactctcctggtaagtagtaactcgaggacggggtgaactacgcctgaggatccgatctttttccctctgccaaaaattatggggacatcatgaagccccttgagcatctgacttctggctaataaaggaaatttattttcattgcaatagtgtgttggaattttttgtgtctctcactcggcctaggtagataagtagcatggcgggttaatcattaactacaaggaacccctagtgatggagttggccactccctctctgcgcgctcgctcgctcactgaggccgggcgaccaaaggtcgcccgacgcccgggctttgcccgggcggcctcagtgagcgagcgagcgcgcag

SEQ ID NO: 2008 - DNA, 3932 bp, Artificial Sequence
  Description of Artificial Sequence: Synthetic polynucleotide
ctgcgcgctcgctcgctcactgaggccgcccgggcaaagcccgggcgtcgggcgacctttggtcgcccggcctcagtgagcgagcgagcgcgcagagagggagtggccaactccatcactaggggttccttgtagttaatgattaacccgccatgctacttatctaccagggtaatggggatcctctagaactatagctagtcgacattgattattgactagttattaatagtaatcaattacggggtcattagttcatagcccatatatggagttccgcgttacataacttacggtaaatggcccgcctggctgaccgcccaacgacccccgcccattgacgtcaataatgacgtatgttcccatagtaacgccaatagggactttccattgacgtcaatgggtggagtatttacggtaaactgcccacttggcagtacatcaagtgtatcatatgccaagtacgccccctattgacgtcaatgacggtaaatggcccgcctggcattatgcccagtacatgaccttatgggactttcctacttggcagtacatctacgtattagtcatcgctattaccatgtcgaggccacgttctgcttcactctccccatctcccccccctccccacccccaattttgtatttatttattttttaattattttgtgcagcgatgggggcggggggggggggcgcgcgccaggcggggcggggcggggcgaggggcggggcggggcgaggcggagaggtgcggcggcagccaatcagagcggcgcgctccgaaagtttccttttatggcgaggcggcggcggcggcggccctataaaaagcgaagcgcgcggcgggcgggagcaagcttcgtttagtgaaccgtcagatcgcctggagacgccatccacgctgttttgacctccatagaagacaccgggaccgatccagcctccgcggattcgaatcccggccgggaacggtgcattggaacgcggattccccgtgccaagagtgacgtaagtaccgcctatagagtctataggcccacaaaaaatgctttcttcttttaatatacttttttgtttatcttatttctaatactttccctaatctctttctttcagggcaataatgatacaatgtatcatgcctctttgcaccattctaaagaataacagtgataatttctgggttaaggcaatagcaatatttctgcatataaatatttctgcatataaattgtaactgatgtaagaggtttcatattgctaatagcagctacaatccagctaccattctgcttttattttatggttgggataaggctggattattctgagtccaagctaggcccttttgctaatcatgttcatacctcttatcttcctcccacagctcctgggcaacgtgctggtctgtgtgctggcccatcactttggcaaagaattgggattcgaaccggtgccgccaccatgaagttgcctgttaggctgttggtgctgatgttctggattcctgcttccagcagtgacgtgcagatgatccagagcccctccagcctgagcgcctcgctgggggacatcgtgaccatgacctgccaggcctcccagggcaccagcatcaacctcaactggttccagcagaagcccggcaaggcccccaagctgctgatctacggggccagcaacctggaggacggcgtgcccagccgcttcagcggctcccgctacggcacggacttcacgctgaccatctcctccctggaggacgaggacatggccacctacttctgcctgcagcacacctacctgcccttcaccttcggcagcgggaccaagctggagatcaagcgggctgatgctgcaccaactgtatccatcttcccaccatccagtgagcagttaacatctggaggtgcctcagtcgtgtgcttcttgaacaacttctaccccaaagacatcaatgtcaagtggaagattgatggcagtgaacgacaaaatggcgtcctgaacagttggactgatcaggacagcaaagacagcacctacagcatgagcagcaccctcacgttgaccaaggacgagtatgaacgacataacagctatacctgtgaggccactcacaagacatcaacttcacccattgtcaagagcttcaacaggaatgagtgtgagggcagaggaagtcttctaacatgcggtgacgtggaggagaatcccggccctatgaacttcgggctcagcttgattttccttgtccttgttttaaaaggtgtccagtgtcaggtgcagctgcagcagagcgatgccgagctggtgaaacctggggccagcgtcaagatcagctgcaaggcctccgggtacaccttcaccgaccgcaccatccactgggtgaagcagcggcccgagcaggggctggagtggatcggctacatctaccccggggacggcagcaccaagtacaacgagaacttcaagggcaaggccaccctgaccgccgacaagtccagcagcacggcctacatgcagctcaacagcctcaccagcgaggacagcgccgtgtacttctgcgcccggcggggcgcaatggactactggggccagggcacctccgtgaccgtgtcctccgccaaaacgacacccccatctgtctatccactggcccctggatctgctgcccaaactaactccatggtgaccctgggatgcctggtcaagggctatttccctgagccagtgacagtgacctggaactctggatccctgtccagcggtgtgcacaccttcccagctgtcctgcagtctgacctctacactctgagcagctcagtgactgtcccctccagcacctggcccagcgagaccgtcacctgcaacgttgcccacccggccagcagcaccaaggtggacaagaaaattgtgcccagggattgtggttgtaagccttgcatatgtacagtcccagaagtatcatctgtcttcatcttccccccaaagcccaaggatgtgctcaccattactctgactcctaaggtcacgtgtgttgtggtagacatcagcaaggatgatcccgaggtccagttcagctggtttgtagatgatgtggaggtgcacacagctcagacgcaaccccgggaggagcagttcaacagcactttccgctcagtcagtgaacttcccatcatgcaccaggactggctcaatggcaaggagttcaaatgcagggtcaacagtgcagctttccctgcccccatcgagaaaaccatctccaaaaccaaaggcagaccgaaggctccacaggtgtacaccattccacctcccaaggagcagatggccaaggataaagtcagtctgacctgcatgataacagacttcttccctgaagacattactgtggagtggcagtggaatgggcagccagcggagaactacaagaacactcagcccatcatggacacagatggctcttacttcgtctacagcaagctcaatgtgcagaagagcaactgggaggcaggaaatactttcacctgctctgtgttacatgagggcctgcacaaccaccatactgagaagagcctctcccactctcctggtaagtagtaactcgaggacggggtgaactacgcctgaggatccgatctttttccctctgccaaaaattatggggacatcatgaagccccttgagcatctgacttctggctaataaaggaaatttattttcattgcaatagtgtgttggaattttttgtgtctctcactcggcctaggtagataagtagcatggcgggttaatcattaactacaaggaacccctagtgatggagttggccactccctctctgcgcgctcgctcgctcactgaggccgggcgaccaaaggtcgcccgacgcccgggctttgcccgggcggcctcagtgagcgagcgagcgcgcag

SEQ ID NO: 2009 - DNA, 3932 bp, Artificial Sequence
  Description of Artificial Sequence: Synthetic polynucleotide
ctgcgcgctcgctcgctcactgaggccgcccgggcaaagcccgggcgtcgggcgacctttggtcgcccggcctcagtgagcgagcgagcgcgcagagagggagtggccaactccatcactaggggttccttgtagttaatgattaacccgccatgctacttatctaccagggtaatggggatcctctagaactatagctagtcgacattgattattgactagttattaatagtaatcaattacggggtcattagttcatagcccatatatggagttccgcgttacataacttacggtaaatggcccgcctggctgaccgcccaacgacccccgcccattgacgtcaataatgacgtatgttcccatagtaacgccaatagggactttccattgacgtcaatgggtggagtatttacggtaaactgcccacttggcagtacatcaagtgtatcatatgccaagtacgccccctattgacgtcaatgacggtaaatggcccgcctggcattatgcccagtacatgaccttatgggactttcctacttggcagtacatctacgtattagtcatcgctattaccatgtcgaggccacgttctgcttcactctccccatctcccccccctccccacccccaattttgtatttatttattttttaattattttgtgcagcgatgggggcggggggggggggcgcgcgccaggcggggcggggcggggcgaggggcggggcggggcgaggcggagaggtgcggcggcagccaatcagagcggcgcgctccgaaagtttccttttatggcgaggcggcggcggcggcggccctataaaaagcgaagcgcgcggcgggcgggagcaagcttcgtttagtgaaccgtcagatcgcctggagacgccatccacgctgttttgacctccatagaagacaccgggaccgatccagcctccgcggattcgaatcccggccgggaacggtgcattggaacgcggattccccgtgccaagagtgacgtaagtaccgcctatagagtctataggcccacaaaaaatgctttcttcttttaatatacttttttgtttatcttatttctaatactttccctaatctctttctttcagggcaataatgatacaatgtatcatgcctctttgcaccattctaaagaataacagtgataatttctgggttaaggcaatagcaatatttctgcatataaatatttctgcatataaattgtaactgatgtaagaggtttcatattgctaatagcagctacaatccagctaccattctgcttttattttatggttgggataaggctggattattctgagtccaagctaggcccttttgctaatcatgttcatacctcttatcttcctcccacagctcctgggcaacgtgctggtctgtgtgctggcccatcactttggcaaagaattgggattcgaaccggtgccgccaccatgaagttgcctgttaggctgttggtgctgatgttctggattcctgcttccagcagtgacgtgcagatgatccagagccccagctccctcagcgcctccctgggggacatcgtgaccatgacctgccaggccagccagggcaccagcatcaacctcaactggttccagcagaagcccggcaaggcccccaagctgctgatctacggggcctccaacctggaggacggcgtgccctcccgcttcagcggcagccgctacggcacggacttcacgctgaccatcagcagcctggaggacgaggacatggccacctacttctgcctgcagcacacctacctgcccttcaccttcgggagcgggaccaagttggagatcaagcgggctgatgctgcaccaactgtatccatcttcccaccatccagtgagcagttaacatctggaggtgcctcagtcgtgtgcttcttgaacaacttctaccccaaagacatcaatgtcaagtggaagattgatggcagtgaacgacaaaatggcgtcctgaacagttggactgatcaggacagcaaagacagcacctacagcatgagcagcaccctcacgttgaccaaggacgagtatgaacgacataacagctatacctgtgaggccactcacaagacatcaacttcacccattgtcaagagcttcaacaggaatgagtgtgagggcagaggaagtcttctaacatgcggtgacgtggaggagaatcccggccctatgaacttcgggctcagcttgattttccttgtccttgttttaaaaggtgtccagtgtcaggtgcagctgcagcagagcgatgccgagctggtgaaacccggggcctccgtcaagatcagctgcaaggccagcgggtacaccttcaccgaccgcaccatccactgggtgaagcagcggcccgagcagggcctggagtggatcggctacatctaccccggggacggcagcaccaagtacaacgagaacttcaagggcaaggccaccctgaccgccgacaagtccagcagcacagcctacatgcagctcaacagcctcacctctgaggacagcgccgtgtacttctgcgcccggcggggcgcgatggactactggggccaggggaccagcgtgaccgtgtcctccgccaaaacgacacccccatctgtctatccactggcccctggatctgctgcccaaactaactccatggtgaccctgggatgcctggtcaagggctatttccctgagccagtgacagtgacctggaactctggatccctgtccagcggtgtgcacaccttcccagctgtcctgcagtctgacctctacactctgagcagctcagtgactgtcccctccagcacctggcccagcgagaccgtcacctgcaacgttgcccacccggccagcagcaccaaggtggacaagaaaattgtgcccagggattgtggttgtaagccttgcatatgtacagtcccagaagtatcatctgtcttcatcttccccccaaagcccaaggatgtgctcaccattactctgactcctaaggtcacgtgtgttgtggtagacatcagcaaggatgatcccgaggtccagttcagctggtttgtagatgatgtggaggtgcacacagctcagacgcaaccccgggaggagcagttcaacagcactttccgctcagtcagtgaacttcccatcatgcaccaggactggctcaatggcaaggagttcaaatgcagggtcaacagtgcagctttccctgcccccatcgagaaaaccatctccaaaaccaaaggcagaccgaaggctccacaggtgtacaccattccacctcccaaggagcagatggccaaggataaagtcagtctgacctgcatgataacagacttcttccctgaagacattactgtggagtggcagtggaatgggcagccagcggagaactacaagaacactcagcccatcatggacacagatggctcttacttcgtctacagcaagctcaatgtgcagaagagcaactgggaggcaggaaatactttcacctgctctgtgttacatgagggcctgcacaaccaccatactgagaagagcctctcccactctcctggtaagtagtaactcgaggacggggtgaactacgcctgaggatccgatctttttccctctgccaaaaattatggggacatcatgaagccccttgagcatctgacttctggctaataaaggaaatttattttcattgcaatagtgtgttggaattttttgtgtctctcactcggcctaggtagataagtagcatggcgggttaatcattaactacaaggaacccctagtgatggagttggccactccctctctgcgcgctcgctcgctcactgaggccgggcgaccaaaggtcgcccgacgcccgggctttgcccgggcggcctcagtgagcgagcgagcgcgcag

SEQ ID NO: 2010 - DNA, 3932 bp, Artificial Sequence
  Description of Artificial Sequence: Synthetic polynucleotide
ctgcgcgctcgctcgctcactgaggccgcccgggcaaagcccgggcgtcgggcgacctttggtcgcccggcctcagtgagcgagcgagcgcgcagagagggagtggccaactccatcactaggggttccttgtagttaatgattaacccgccatgctacttatctaccagggtaatggggatcctctagaactatagctagtcgacattgattattgactagttattaatagtaatcaattacggggtcattagttcatagcccatatatggagttccgcgttacataacttacggtaaatggcccgcctggctgaccgcccaacgacccccgcccattgacgtcaataatgacgtatgttcccatagtaacgccaatagggactttccattgacgtcaatgggtggagtatttacggtaaactgcccacttggcagtacatcaagtgtatcatatgccaagtacgccccctattgacgtcaatgacggtaaatggcccgcctggcattatgcccagtacatgaccttatgggactttcctacttggcagtacatctacgtattagtcatcgctattaccatgtcgaggccacgttctgcttcactctccccatctcccccccctccccacccccaattttgtatttatttattttttaattattttgtgcagcgatgggggcggggggggggggcgcgcgccaggcggggcggggcggggcgaggggcggggcggggcgaggcggagaggtgcggcggcagccaatcagagcggcgcgctccgaaagtttccttttatggcgaggcggcggcggcggcggccctataaaaagcgaagcgcgcggcgggcgggagcaagcttcgtttagtgaaccgtcagatcgcctggagacgccatccacgctgttttgacctccatagaagacaccgggaccgatccagcctccgcggattcgaatcccggccgggaacggtgcattggaacgcggattccccgtgccaagagtgacgtaagtaccgcctatagagtctataggcccacaaaaaatgctttcttcttttaatatacttttttgtttatcttatttctaatactttccctaatctctttctttcagggcaataatgatacaatgtatcatgcctctttgcaccattctaaagaataacagtgataatttctgggttaaggcaatagcaatatttctgcatataaatatttctgcatataaattgtaactgatgtaagaggtttcatattgctaatagcagctacaatccagctaccattctgcttttattttatggttgggataaggctggattattctgagtccaagctaggcccttttgctaatcatgttcatacctcttatcttcctcccacagctcctgggcaacgtgctggtctgtgtgctggcccatcactttggcaaagaattgggattcgaaccggtgccgccaccatgaagttgcctgttaggctgttggtgctgatgttctggattcctgcttccagcagtgacgtgcagatgatccagagccccagcagcctgagcgcctcgctgggggacatcgtgaccatgacctgccaggcctcccagggcaccagcatcaacctcaactggttccagcagaagcccggcaaggcccccaagctcctcatctacggggccagcaacctggaggacggcgtgccctcccgcttcagcggctcccgctacggcacggacttcacgctgaccatctcctccctggaggacgaggacatggccacctacttctgcctgcagcacacctacctgcccttcaccttcggcagcgggaccaagctggagatcaagcgggctgatgctgcaccaactgtatccatcttcccaccatccagtgagcagttaacatctggaggtgcctcagtcgtgtgcttcttgaacaacttctaccccaaagacatcaatgtcaagtggaagattgatggcagtgaacgacaaaatggcgtcctgaacagttggactgatcaggacagcaaagacagcacctacagcatgagcagcaccctcacgttgaccaaggacgagtatgaacgacataacagctatacctgtgaggccactcacaagacatcaacttcacccattgtcaagagcttcaacaggaatgagtgtgagggcagaggaagtcttctaacatgcggtgacgtggaggagaatcccggccctatgaacttcgggctcagcttgattttccttgtccttgttttaaaaggtgtccagtgtcaggtgcagctgcagcagagcgacgccgagctggtgaaacctggggccagcgtcaagatcagctgcaaggcctccggctacaccttcaccgaccgcaccatccactgggtgaagcagcggcccgagcaggggctggagtggatcgggtacatctaccccggggacggctccaccaagtacaacgagaacttcaagggcaaagccaccctgacggccgacaagtccagcagcaccgcctacatgcagctgaacagcctgaccagcgaggacagcgccgtgtacttctgcgcccggcggggggctatggactactggggccagggcacctccgtgaccgtgtcctccgccaaaacgacacccccatctgtctatccactggcccctggatctgctgcccaaactaactccatggtgaccctgggatgcctggtcaagggctatttccctgagccagtgacagtgacctggaactctggatccctgtccagcggtgtgcacaccttcccagctgtcctgcagtctgacctctacactctgagcagctcagtgactgtcccctccagcacctggcccagcgagaccgtcacctgcaacgttgcccacccggccagcagcaccaaggtggacaagaaaattgtgcccagggattgtggttgtaagccttgcatatgtacagtcccagaagtatcatctgtcttcatcttccccccaaagcccaaggatgtgctcaccattactctgactcctaaggtcacgtgtgttgtggtagacatcagcaaggatgatcccgaggtccagttcagctggtttgtagatgatgtggaggtgcacacagctcagacgcaaccccgggaggagcagttcaacagcactttccgctcagtcagtgaacttcccatcatgcaccaggactggctcaatggcaaggagttcaaatgcagggtcaacagtgcagctttccctgcccccatcgagaaaaccatctccaaaaccaaaggcagaccgaaggctccacaggtgtacaccattccacctcccaaggagcagatggccaaggataaagtcagtctgacctgcatgataacagacttcttccctgaagacattactgtggagtggcagtggaatgggcagccagcggagaactacaagaacactcagcccatcatggacacagatggctcttacttcgtctacagcaagctcaatgtgcagaagagcaactgggaggcaggaaatactttcacctgctctgtgttacatgagggcctgcacaaccaccatactgagaagagcctctcccactctcctggtaagtagtaactcgaggacggggtgaactacgcctgaggatccgatctttttccctctgccaaaaattatggggacatcatgaagccccttgagcatctgacttctggctaataaaggaaatttattttcattgcaatagtgtgttggaattttttgtgtctctcactcggcctaggtagataagtagcatggcgggttaatcattaactacaaggaacccctagtgatggagttggccactccctctctgcgcgctcgctcgctcactgaggccgggcgaccaaaggtcgcccgacgcccgggctttgcccgggcggcctcagtgagcgagcgagcgcgcag

SEQ ID NO: 2011 - DNA, 3932 bp, Artificial Sequence
  Description of Artificial Sequence: Synthetic polynucleotide
ctgcgcgctcgctcgctcactgaggccgcccgggcaaagcccgggcgtcgggcgacctttggtcgcccggcctcagtgagcgagcgagcgcgcagagagggagtggccaactccatcactaggggttccttgtagttaatgattaacccgccatgctacttatctaccagggtaatggggatcctctagaactatagctagtcgacattgattattgactagttattaatagtaatcaattacggggtcattagttcatagcccatatatggagttccgcgttacataacttacggtaaatggcccgcctggctgaccgcccaacgacccccgcccattgacgtcaataatgacgtatgttcccatagtaacgccaatagggactttccattgacgtcaatgggtggagtatttacggtaaactgcccacttggcagtacatcaagtgtatcatatgccaagtacgccccctattgacgtcaatgacggtaaatggcccgcctggcattatgcccagtacatgaccttatgggactttcctacttggcagtacatctacgtattagtcatcgctattaccatgtcgaggccacgttctgcttcactctccccatctcccccccctccccacccccaattttgtatttatttattttttaattattttgtgcagcgatgggggcggggggggggggcgcgcgccaggcggggcggggcggggcgaggggcggggcggggcgaggcggagaggtgcggcggcagccaatcagagcggcgcgctccgaaagtttccttttatggcgaggcggcggcggcggcggccctataaaaagcgaagcgcgcggcgggcgggagcaagcttcgtttagtgaaccgtcagatcgcctggagacgccatccacgctgttttgacctccatagaagacaccgggaccgatccagcctccgcggattcgaatcccggccgggaacggtgcattggaacgcggattccccgtgccaagagtgacgtaagtaccgcctatagagtctataggcccacaaaaaatgctttcttcttttaatatacttttttgtttatcttatttctaatactttccctaatctctttctttcagggcaataatgatacaatgtatcatgcctctttgcaccattctaaagaataacagtgataatttctgggttaaggcaatagcaatatttctgcatataaatatttctgcatataaattgtaactgatgtaagaggtttcatattgctaatagcagctacaatccagctaccattctgcttttattttatggttgggataaggctggattattctgagtccaagctaggcccttttgctaatcatgttcatacctcttatcttcctcccacagctcctgggcaacgtgctggtctgtgtgctggcccatcactttggcaaagaattgggattcgaaccggtgccgccaccatgaagttgcctgttaggctgttggtgctgatgttctggattcctgcttccagcagtgacgttcagatgatccagtccccctcctccctgtccgcctccctgggcgacatcgtgaccatgacctgccaggcctcccagggcacctccatcaacctgaactggttccagcagaagcccggcaaggcccccaagctgctgatctacggcgcctccaacctggaggacggcgtgccctcccggttctccggctcccggtacggcaccgacttcaccctgaccatctcctccctggaggacgaggacatggccacctacttctgcctgcagcacacctacctgcccttcaccttcggctccggcaccaagctggagatcaagcgggctgatgctgcaccaactgtatccatcttcccaccatccagtgagcagttaacatctggaggtgcctcagtcgtgtgcttcttgaacaacttctaccccaaagacatcaatgtcaagtggaagattgatggcagtgaacgacaaaatggcgtcctgaacagttggactgatcaggacagcaaagacagcacctacagcatgagcagcaccctcacgttgaccaaggacgagtatgaacgacataacagctatacctgtgaggccactcacaagacatcaacttcacccattgtcaagagcttcaacaggaatgagtgtgagggcagaggaagtcttctaacatgcggtgacgtggaggagaatcccggccctatgaacttcgggctcagcttgattttccttgtccttgttttaaaaggtgtccagtgtcaggtgcagctgcagcagtccgacgccgagctggtgaagcccggcgcctccgtgaagatctcctgcaaggcctccggctacaccttcaccgaccggaccatccactgggtgaagcagcggcccgagcagggcctggagtggatcggctacatctaccccggcgacggctccaccaagtacaacgagaacttcaagggcaaggccaccctgaccgccgacaagtcctcctccaccgcctacatgcagctgaactccctgacctccgaggactccgccgtgtacttctgcgcccggcggggcgctatggactactggggccagggcacctccgtgaccgtgtcctccgccaaaacgacacccccatctgtctatccactggcccctggatctgctgcccaaactaactccatggtgaccctgggatgcctggtcaagggctatttccctgagccagtgacagtgacctggaactctggatccctgtccagcggtgtgcacaccttcccagctgtcctgcagtctgacctctacactctgagcagctcagtgactgtcccctccagcacctggcccagcgagaccgtcacctgcaacgttgcccacccggccagcagcaccaaggtggacaagaaaattgtgcccagggattgtggttgtaagccttgcatatgtacagtcccagaagtatcatctgtcttcatcttccccccaaagcccaaggatgtgctcaccattactctgactcctaaggtcacgtgtgttgtggtagacatcagcaaggatgatcccgaggtccagttcagctggtttgtagatgatgtggaggtgcacacagctcagacgcaaccccgggaggagcagttcaacagcactttccgctcagtcagtgaacttcccatcatgcaccaggactggctcaatggcaaggagttcaaatgcagggtcaacagtgcagctttccctgcccccatcgagaaaaccatctccaaaaccaaaggcagaccgaaggctccacaggtgtacaccattccacctcccaaggagcagatggccaaggataaagtcagtctgacctgcatgataacagacttcttccctgaagacattactgtggagtggcagtggaatgggcagccagcggagaactacaagaacactcagcccatcatggacacagatggctcttacttcgtctacagcaagctcaatgtgcagaagagcaactgggaggcaggaaatactttcacctgctctgtgttacatgagggcctgcacaaccaccatactgagaagagcctctcccactctcctggtaagtagtaactcgaggacggggtgaactacgcctgaggatccgatctttttccctctgccaaaaattatggggacatcatgaagccccttgagcatctgacttctggctaataaaggaaatttattttcattgcaatagtgtgttggaattttttgtgtctctcactcggcctaggtagataagtagcatggcgggttaatcattaactacaaggaacccctagtgatggagttggccactccctctctgcgcgctcgctcgctcactgaggccgggcgaccaaaggtcgcccgacgcccgggctttgcccgggcggcctcagtgagcgagcgagcgcgcag

SEQ ID NO: 2012 - DNA, 3932 bp, Artificial Sequence
  Description of Artificial Sequence: Synthetic polynucleotide
ctgcgcgctcgctcgctcactgaggccgcccgggcaaagcccgggcgtcgggcgacctttggtcgcccggcctcagtgagcgagcgagcgcgcagagagggagtggccaactccatcactaggggttccttgtagttaatgattaacccgccatgctacttatctaccagggtaatggggatcctctagaactatagctagtcgacattgattattgactagttattaatagtaatcaattacggggtcattagttcatagcccatatatggagttccgcgttacataacttacggtaaatggcccgcctggctgaccgcccaacgacccccgcccattgacgtcaataatgacgtatgttcccatagtaacgccaatagggactttccattgacgtcaatgggtggagtatttacggtaaactgcccacttggcagtacatcaagtgtatcatatgccaagtacgccccctattgacgtcaatgacggtaaatggcccgcctggcattatgcccagtacatgaccttatgggactttcctacttggcagtacatctacgtattagtcatcgctattaccatgtcgaggccacgttctgcttcactctccccatctcccccccctccccacccccaattttgtatttatttattttttaattattttgtgcagcgatgggggcggggggggggggcgcgcgccaggcggggcggggcggggcgaggggcggggcggggcgaggcggagaggtgcggcggcagccaatcagagcggcgcgctccgaaagtttccttttatggcgaggcggcggcggcggcggccctataaaaagcgaagcgcgcggcgggcgggagcaagcttcgtttagtgaaccgtcagatcgcctggagacgccatccacgctgttttgacctccatagaagacaccgggaccgatccagcctccgcggattcgaatcccggccgggaacggtgcattggaacgcggattccccgtgccaagagtgacgtaagtaccgcctatagagtctataggcccacaaaaaatgctttcttcttttaatatacttttttgtttatcttatttctaatactttccctaatctctttctttcagggcaataatgatacaatgtatcatgcctctttgcaccattctaaagaataacagtgataatttctgggttaaggcaatagcaatatttctgcatataaatatttctgcatataaattgtaactgatgtaagaggtttcatattgctaatagcagctacaatccagctaccattctgcttttattttatggttgggataaggctggattattctgagtccaagctaggcccttttgctaatcatgttcatacctcttatcttcctcccacagctcctgggcaacgtgctggtctgtgtgctggcccatcactttggcaaagaattgggattcgaaccggtgccgccaccatgaagttgcctgttaggctgttggtgctgatgttctggattcctgcttccagcagtgacgtgcagatgatccagagcccctcctccctgagcgccagcctgggggacatcgtgaccatgacctgccaggcctcccagggcaccagcatcaacctcaactggttccagcagaagcccggcaaggcccccaagctcctcatctacggggccagcaacctggaggacggcgtgcccagccgcttcagcggctcccgctacggcacggacttcacgctgaccatcagcagcctggaggacgaggacatggccacctacttctgcctgcagcacacctacctgcccttcaccttcggcagcgggaccaagctggagatcaagcgggctgatgctgcaccaactgtatccatcttcccaccatccagtgagcagttaacatctggaggtgcctcagtcgtgtgcttcttgaacaacttctaccccaaagacatcaatgtcaagtggaagattgatggcagtgaacgacaaaatggcgtcctgaacagttggactgatcaggacagcaaagacagcacctacagcatgagcagcaccctcacgttgaccaaggacgagtatgaacgacataacagctatacctgtgaggccactcacaagacatcaacttcacccattgtcaagagcttcaacaggaatgagtgtgagggcagaggaagtcttctaacatgcggtgacgtggaggagaatcccggccctatgaacttcgggctcagcttgattttccttgtccttgttttaaaaggtgtccagtgtcaggtgcagctgcagcagtccgatgccgagctggtgaaaccgggggccagcgtcaagatctcatgcaaagcttccggctacaccttcaccgacagaaccatccactgggtgaagcagcggcccgagcaggggctggagtggatcgggtacatctaccccggggacggcagcaccaagtacaacgagaacttcaagggcaaggccaccctgacagccgacaagtccagctccaccgcctacatgcagctcaacagcctgacctccgaggacagcgccgtgtacttctgcgcccggcggggcgcaatggactactggggccagggcaccagcgtgaccgtgagcagcgccaaaacgacacccccatctgtctatccactggcccctggatctgctgcccaaactaactccatggtgaccctgggatgcctggtcaagggctatttccctgagccagtgacagtgacctggaactctggatccctgtccagcggtgtgcacaccttcccagctgtcctgcagtctgacctctacactctgagcagctcagtgactgtcccctccagcacctggcccagcgagaccgtcacctgcaacgttgcccacccggccagcagcaccaaggtggacaagaaaattgtgcccagggattgtggttgtaagccttgcatatgtacagtcccagaagtatcatctgtcttcatcttccccccaaagcccaaggatgtgctcaccattactctgactcctaaggtcacgtgtgttgtggtagacatcagcaaggatgatcccgaggtccagttcagctggtttgtagatgatgtggaggtgcacacagctcagacgcaaccccgggaggagcagttcaacagcactttccgctcagtcagtgaacttcccatcatgcaccaggactggctcaatggcaaggagttcaaatgcagggtcaacagtgcagctttccctgcccccatcgagaaaaccatctccaaaaccaaaggcagaccgaaggctccacaggtgtacaccattccacctcccaaggagcagatggccaaggataaagtcagtctgacctgcatgataacagacttcttccctgaagacattactgtggagtggcagtggaatgggcagccagcggagaactacaagaacactcagcccatcatggacacagatggctcttacttcgtctacagcaagctcaatgtgcagaagagcaactgggaggcaggaaatactttcacctgctctgtgttacatgagggcctgcacaaccaccatactgagaagagcctctcccactctcctggtaagtagtaactcgaggacggggtgaactacgcctgaggatccgatctttttccctctgccaaaaattatggggacatcatgaagccccttgagcatctgacttctggctaataaaggaaatttattttcattgcaatagtgtgttggaattttttgtgtctctcactcggcctaggtagataagtagcatggcgggttaatcattaactacaaggaacccctagtgatggagttggccactccctctctgcgcgctcgctcgctcactgaggccgggcgaccaaaggtcgcccgacgcccgggctttgcccgggcggcctcagtgagcgagcgagcgcgcag

SEQ ID NO: 2013 - DNA, 3932 bp, Artificial Sequence
  Description of Artificial Sequence: Synthetic polynucleotide
ctgcgcgctcgctcgctcactgaggccgcccgggcaaagcccgggcgtcgggcgacctttggtcgcccggcctcagtgagcgagcgagcgcgcagagagggagtggccaactccatcactaggggttccttgtagttaatgattaacccgccatgctacttatctaccagggtaatggggatcctctagaactatagctagtcgacattgattattgactagttattaatagtaatcaattacggggtcattagttcatagcccatatatggagttccgcgttacataacttacggtaaatggcccgcctggctgaccgcccaacgacccccgcccattgacgtcaataatgacgtatgttcccatagtaacgccaatagggactttccattgacgtcaatgggtggagtatttacggtaaactgcccacttggcagtacatcaagtgtatcatatgccaagtacgccccctattgacgtcaatgacggtaaatggcccgcctggcattatgcccagtacatgaccttatgggactttcctacttggcagtacatctacgtattagtcatcgctattaccatgtcgaggccacgttctgcttcactctccccatctcccccccctccccacccccaattttgtatttatttattttttaattattttgtgcagcgatgggggcggggggggggggcgcgcgccaggcggggcggggcggggcgaggggcggggcggggcgaggcggagaggtgcggcggcagccaatcagagcggcgcgctccgaaagtttccttttatggcgaggcggcggcggcggcggccctataaaaagcgaagcgcgcggcgggcgggagcaagcttcgtttagtgaaccgtcagatcgcctggagacgccatccacgctgttttgacctccatagaagacaccgggaccgatccagcctccgcggattcgaatcccggccgggaacggtgcattggaacgcggattccccgtgccaagagtgacgtaagtaccgcctatagagtctataggcccacaaaaaatgctttcttcttttaatatacttttttgtttatcttatttctaatactttccctaatctctttctttcagggcaataatgatacaatgtatcatgcctctttgcaccattctaaagaataacagtgataatttctgggttaaggcaatagcaatatttctgcatataaatatttctgcatataaattgtaactgatgtaagaggtttcatattgctaatagcagctacaatccagctaccattctgcttttattttatggttgggataaggctggattattctgagtccaagctaggcccttttgctaatcatgttcatacctcttatcttcctcccacagctcctgggcaacgtgctggtctgtgtgctggcccatcactttggcaaagaattgggattcgaaccggtgccgccaccatgaagttgcctgttaggctgttggtgctgatgttctggattcctgcttccagcagtgacgttcagatgatccagagccctagcagcctgagcgccagcctgggcgacatcgtgaccatgacctgccaggccagccagggcaccagcatcaacctgaactggttccagcagaagcctggcaaggcccctaagctgctgatctacggcgccagcaacctggaggacggcgtgcctagccgtttcagcggcagccgttacggcaccgacttcaccctgaccatcagcagcctggaggacgaggacatggccacctacttctgcctgcagcacacctacctgcctttcaccttcggcagcggcaccaagctggagatcaagcgggctgatgctgcaccaactgtatccatcttcccaccatccagtgagcagttaacatctggaggtgcctcagtcgtgtgcttcttgaacaacttctaccccaaagacatcaatgtcaagtggaagattgatggcagtgaacgacaaaatggcgtcctgaacagttggactgatcaggacagcaaagacagcacctacagcatgagcagcaccctcacgttgaccaaggacgagtatgaacgacataacagctatacctgtgaggccactcacaagacatcaacttcacccattgtcaagagcttcaacaggaatgagtgtgagggcagaggaagtcttctaacatgcggtgacgtggaggagaatcccggccctatgaacttcgggctcagcttgattttccttgtccttgttttaaaaggtgtccagtgtcaggtgcagctgcagcagagcgacgccgagctggtgaagcctggcgccagcgtgaagatcagctgcaaggccagcggctacaccttcaccgaccgtaccatccactgggtgaagcagcgacctgagcagggcctggagtggatcggctacatctaccctggcgacggcagcaccaagtacaacgagaacttcaagggcaaggccaccctgaccgccgacaagagcagcagcaccgcctacatgcagctgaacagcctgaccagcgaggacagcgccgtgtacttctgcgcccgtcgaggcgctatggactactggggccagggcaccagcgtgaccgtgagcagcgccaaaacgacacccccatctgtctatccactggcccctggatctgctgcccaaactaactccatggtgaccctgggatgcctggtcaagggctatttccctgagccagtgacagtgacctggaactctggatccctgtccagcggtgtgcacaccttcccagctgtcctgcagtctgacctctacactctgagcagctcagtgactgtcccctccagcacctggcccagcgagaccgtcacctgcaacgttgcccacccggccagcagcaccaaggtggacaagaaaattgtgcccagggattgtggttgtaagccttgcatatgtacagtcccagaagtatcatctgtcttcatcttccccccaaagcccaaggatgtgctcaccattactctgactcctaaggtcacgtgtgttgtggtagacatcagcaaggatgatcccgaggtccagttcagctggtttgtagatgatgtggaggtgcacacagctcagacgcaaccccgggaggagcagttcaacagcactttccgctcagtcagtgaacttcccatcatgcaccaggactggctcaatggcaaggagttcaaatgcagggtcaacagtgcagctttccctgcccccatcgagaaaaccatctccaaaaccaaaggcagaccgaaggctccacaggtgtacaccattccacctcccaaggagcagatggccaaggataaagtcagtctgacctgcatgataacagacttcttccctgaagacattactgtggagtggcagtggaatgggcagccagcggagaactacaagaacactcagcccatcatggacacagatggctcttacttcgtctacagcaagctcaatgtgcagaagagcaactgggaggcaggaaatactttcacctgctctgtgttacatgagggcctgcacaaccaccatactgagaagagcctctcccactctcctggtaagtagtaactcgaggacggggtgaactacgcctgaggatccgatctttttccctctgccaaaaattatggggacatcatgaagccccttgagcatctgacttctggctaataaaggaaatttattttcattgcaatagtgtgttggaattttttgtgtctctcactcggcctaggtagataagtagcatggcgggttaatcattaactacaaggaacccctagtgatggagttggccactccctctctgcgcgctcgctcgctcactgaggccgggcgaccaaaggtcgcccgacgcccgggctttgcccgggcggcctcagtgagcgagcgagcgcgcag

SEQ ID NO: 2014 - DNA, 3932 bp, Artificial Sequence
  Description of Artificial Sequence: Synthetic polynucleotide
ctgcgcgctcgctcgctcactgaggccgcccgggcaaagcccgggcgtcgggcgacctttggtcgcccggcctcagtgagcgagcgagcgcgcagagagggagtggccaactccatcactaggggttccttgtagttaatgattaacccgccatgctacttatctaccagggtaatggggatcctctagaactatagctagtcgacattgattattgactagttattaatagtaatcaattacggggtcattagttcatagcccatatatggagttccgcgttacataacttacggtaaatggcccgcctggctgaccgcccaacgacccccgcccattgacgtcaataatgacgtatgttcccatagtaacgccaatagggactttccattgacgtcaatgggtggagtatttacggtaaactgcccacttggcagtacatcaagtgtatcatatgccaagtacgccccctattgacgtcaatgacggtaaatggcccgcctggcattatgcccagtacatgaccttatgggactttcctacttggcagtacatctacgtattagtcatcgctattaccatgtcgaggccacgttctgcttcactctccccatctcccccccctccccacccccaattttgtatttatttattttttaattattttgtgcagcgatgggggcggggggggggggcgcgcgccaggcggggcggggcggggcgaggggcggggcggggcgaggcggagaggtgcggcggcagccaatcagagcggcgcgctccgaaagtttccttttatggcgaggcggcggcggcggcggccctataaaaagcgaagcgcgcggcgggcgggagcaagcttcgtttagtgaaccgtcagatcgcctggagacgccatccacgctgttttgacctccatagaagacaccgggaccgatccagcctccgcggattcgaatcccggccgggaacggtgcattggaacgcggattccccgtgccaagagtgacgtaagtaccgcctatagagtctataggcccacaaaaaatgctttcttcttttaatatacttttttgtttatcttatttctaatactttccctaatctctttctttcagggcaataatgatacaatgtatcatgcctctttgcaccattctaaagaataacagtgataatttctgggttaaggcaatagcaatatttctgcatataaatatttctgcatataaattgtaactgatgtaagaggtttcatattgctaatagcagctacaatccagctaccattctgcttttattttatggttgggataaggctggattattctgagtccaagctaggcccttttgctaatcatgttcatacctcttatcttcctcccacagctcctgggcaacgtgctggtctgtgtgctggcccatcactttggcaaagaattgggattcgaaccggtgccgccaccatgaagttgcctgttaggctgttggtgctgatgttctggattcctgcttccagcagtgacgttcagatgatccagagccctagcagcctgagcgccagcctgggcgacatcgtgaccatgacctgccaggccagccagggcaccagcatcaacctgaactggttccagcagaagcctggcaaggcccctaagctgctgatctacggcgccagcaacctggaggacggcgtgcccagccggttcagcggcagccggtacggcaccgacttcaccctgaccatcagcagcctggaggacgaggacatggccacctacttctgcctgcagcacacctacctgcccttcaccttcggcagcggcaccaagctggagatcaagcgggctgatgctgcaccaactgtatccatcttcccaccatccagtgagcagttaacatctggaggtgcctcagtcgtgtgcttcttgaacaacttctaccccaaagacatcaatgtcaagtggaagattgatggcagtgaacgacaaaatggcgtcctgaacagttggactgatcaggacagcaaagacagcacctacagcatgagcagcaccctcacgttgaccaaggacgagtatgaacgacataacagctatacctgtgaggccactcacaagacatcaacttcacccattgtcaagagcttcaacaggaatgagtgtgagggcagaggaagtcttctaacatgcggtgacgtggaggagaatcccggccctatgaacttcgggctcagcttgattttccttgtccttgttttaaaaggtgtccagtgtcaggtgcagctgcagcagagcgacgccgagctggtgaagcctggcgccagcgtgaagatcagctgcaaggccagcggctacaccttcaccgaccgtaccatccactgggtgaagcagcgacctgagcagggcctggagtggatcggctacatctaccccggcgacggcagcaccaagtacaacgagaacttcaagggcaaggccaccctgaccgccgacaagagcagcagcaccgcctacatgcagctgaacagcctgaccagcgaggacagcgccgtgtacttctgcgcccggcggggcgctatggactactggggccagggcaccagcgtgaccgtgagcagcgccaaaacgacacccccatctgtctatccactggcccctggatctgctgcccaaactaactccatggtgaccctgggatgcctggtcaagggctatttccctgagccagtgacagtgacctggaactctggatccctgtccagcggtgtgcacaccttcccagctgtcctgcagtctgacctctacactctgagcagctcagtgactgtcccctccagcacctggcccagcgagaccgtcacctgcaacgttgcccacccggccagcagcaccaaggtggacaagaaaattgtgcccagggattgtggttgtaagccttgcatatgtacagtcccagaagtatcatctgtcttcatcttccccccaaagcccaaggatgtgctcaccattactctgactcctaaggtcacgtgtgttgtggtagacatcagcaaggatgatcccgaggtccagttcagctggtttgtagatgatgtggaggtgcacacagctcagacgcaaccccgggaggagcagttcaacagcactttccgctcagtcagtgaacttcccatcatgcaccaggactggctcaatggcaaggagttcaaatgcagggtcaacagtgcagctttccctgcccccatcgagaaaaccatctccaaaaccaaaggcagaccgaaggctccacaggtgtacaccattccacctcccaaggagcagatggccaaggataaagtcagtctgacctgcatgataacagacttcttccctgaagacattactgtggagtggcagtggaatgggcagccagcggagaactacaagaacactcagcccatcatggacacagatggctcttacttcgtctacagcaagctcaatgtgcagaagagcaactgggaggcaggaaatactttcacctgctctgtgttacatgagggcctgcacaaccaccatactgagaagagcctctcccactctcctggtaagtagtaactcgaggacggggtgaactacgcctgaggatccgatctttttccctctgccaaaaattatggggacatcatgaagccccttgagcatctgacttctggctaataaaggaaatttattttcattgcaatagtgtgttggaattttttgtgtctctcactcggcctaggtagataagtagcatggcgggttaatcattaactacaaggaacccctagtgatggagttggccactccctctctgcgcgctcgctcgctcactgaggccgggcgaccaaaggtcgcccgacgcccgggctttgcccgggcggcctcagtgagcgagcgagcgcgcag

SEQ ID NO: 2015 - DNA, 4309 bp, Artificial Sequence
  Description of Artificial Sequence: Synthetic polynucleotide
cctgcaggcagctgcgcgctcgctcgctcactgaggccgcccgggcaaagcccgggcgtcgggcgacctttggtcgcccggcctcagtgagcgagcgagcgcgcagagagggagtggccaactccatcactaggggttccttgtagttaatgattaacccgccatgctacttatctacgtagccatgcgtcgacataacgcgtcgacattgattattgactagttattaatagtaatcaattacggggtcattagttcatagcccatatatggagttccgcgttacataacttacggtaaatggcccgcctggctgaccgcccaacgacccccgcccattgacgtcaataatgacgtatgttcccatagtaacgccaatagggactttccattgacgtcaatgggtggagtatttacggtaaactgcccacttggcagtacatcaagtgtatcatatgccaagtacgccccctattgacgtcaatgacggtaaatggcccgcctggcattatgcccagtacatgaccttatgggactttcctacttggcagtacatctacgtattagtcatcgctattaccatgtcgaggccacgttctgcttcactctccccatctcccccccctccccacccccaattttgtatttatttattttttaattattttgtgcagcgatgggggcggggggggggggcgcgcgccaggcggggcggggcggggcgaggggcggggcggggcgaggcggagaggtgcggcggcagccaatcagagcggcgcgctccgaaagtttccttttatggcgaggcggcggcggcggcggccctataaaaagcgaagcgcgcggcgggcgggagcaagcttcgtttagtgaaccgtcagatcgcctggagacgccatccacgctgttttgacctccatagaagacaccgggaccgatccagcctccgcggattcgaatcccggccgggaacggtgcattggaacgcggattccccgtgccaagagtgacgtaagtaccgcctatagagtctataggcccacaaaaaatgctttcttcttttaatatacttttttgtttatcttatttctaatactttccctaatctctttctttcagggcaataatgatacaatgtatcatgcctctttgcaccattctaaagaataacagtgataatttctgggttaaggcaatagcaatatttctgcatataaatatttctgcatataaattgtaactgatgtaagaggtttcatattgctaatagcagctacaatccagctaccattctgcttttattttatggttgggataaggctggattattctgagtccaagctaggcccttttgctaatcatgttcatacctcttatcttcctcccacagctcctgggcaacgtgctggtctgtgtgctggcccatcactttggcaaagaattgggattcgaaccggtgccgccaccatgaacttcgggctcagcttgattttccttgtccttgttttaaaaggtgtccagtgtgaggtgaagctggtggagtctggcggagacctggtgaagccaggcggaagcctgaagctgtcctgcgccgcttctggcttcacctttagctcctacgccatgagctgggtgcggcagaacccagagaagcgcctggagtgggtggcttccatctctaagggcggaaacacctactaccctaacagcgtgaagggaaggttcacaatctccagggataacgccagaaacatcctgtacctgcagatgtctagcctgaggtccgaggacacagccctgtactactgtgctcggggctggggagattacggctggtttgcctactggggacaggtgaccctggtgacagtgtctgctgccaaaacgacacccccatctgtctatccactggcccctggatctgctgcccaaactaactccatggtgaccctgggatgcctggtcaagggctatttccctgagccagtgacagtgacctggaactctggatccctgtccagcggtgtgcacaccttcccagctgtcctgcagtctgacctctacactctgagcagctcagtgactgtcccctccagcacctggcccagcgagaccgtcacctgcaacgttgcccacccggccagcagcaccaaggtggacaagaaaattgtgcccagggattgtggttgtaagccttgcatatgtacagtcccagaagtatcatctgtcttcatcttccccccaaagcccaaggatgtgctcaccattactctgactcctaaggtcacgtgtgttgtggtagacatcagcaaggatgatcccgaggtccagttcagctggtttgtagatgatgtggaggtgcacacagctcagacgcaaccccgggaggagcagttcaacagcactttccgctcagtcagtgaacttcccatcatgcaccaggactggctcaatggcaaggagttcaaatgcagggtcaacagtgcagctttccctgcccccatcgagaaaaccatctccaaaaccaaaggcagaccgaaggctccacaggtgtacaccattccacctcccaaggagcagatggccaaggataaagtcagtctgacctgcatgataacagacttcttccctgaagacattactgtggagtggcagtggaatgggcagccagcggagaactacaagaacactcagcccatcatggacacagatggctcttacttcgtctacagcaagctcaatgtgcagaagagcaactgggaggcaggaaatactttcacctgctctgtgttacatgagggcctgcacaaccaccatactgagaagagcctctcccactctcctggtagaaagaggcgagagggcagaggaagtcttctaacatgcggtgacgtggaggagaatcccggccctatgaagttgcctgttaggctgttggtgctgatgttctggattcctgcttccagcagtgacatcaagatgacccagtcccccagctccatgtacgcctctctgggagagcgggtgaccatcacatgcaaggcttctcaggatatcaaccgctacctgaactggttccagcagaagcccggaaagagccctaagaccctgatctacagggccaacagactgctggacggcgtgccaagcaggttttccggctctggaagcggccaggattactccctgacaatctctagcctggactacgaggatatgggcatctactactgtctgcagtacgacgagttccccctgacctttggagatggcacaaagctggagctgaagcgggctgatgctgcaccaactgtatccatcttcccaccatccagtgagcagttaacatctggaggtgcctcagtcgtgtgcttcttgaacaacttctaccccaaagacatcaatgtcaagtggaagattgatggcagtgaacgacaaaatggcgtcctgaacagttggactgatcaggacagcaaagacagcacctacagcatgagcagcaccctcacgttgaccaaggacgagtatgaacgacataacagctatacctgtgaggccactcacaagacatcaacttcacccattgtcaagagcttcaacaggaatgagtgttagtaactcgagcctgaggatgggtggcatccctgtgacccctccccagtgcctctcctggccctggaagttgccactccagtgcccaccagccttgtcctaataaaattaagttgcatcattttgtctgactaggtgtccttctataatattatggggtggaggggggtggtatggagcaaggggcaagttgggaagacaacctgtagggcctgcggggtctattgggaaccaagctggagtgcagtggcacaatcttggctcactgcaatctccgcctcctgggttcaagcgattctcctgcctcagcctcccgagttgttgggattccaggcatgcatgaccaggctcagctaatttttgtttttttggtagagacggggtttcaccatattggccaggctggtctccaactcctaatctcaggtgatctacccaccttggcctcccaaattgctgggattacaggcgtgaaccactgctcccttccctgtccttggcctaggtatcgatgctacgtagataagtagcatggcgggttaatcattaactacagaggaacccctagtgatggagttggccactccctctctgcgcgctcgctcgctcactgaggccgggcgaccaaaggtcgcccgacgcccgggctttgcccgggcggcctcagtgagcgagcgagcgcgcagctgcctgcagg

SEQ ID NO: 2016 - DNA, 4309 bp, Artificial Sequence
  Description of Artificial Sequence: Synthetic polynucleotide
cctgcaggcagctgcgcgctcgctcgctcactgaggccgcccgggcaaagcccgggcgtcgggcgacctttggtcgcccggcctcagtgagcgagcgagcgcgcagagagggagtggccaactccatcactaggggttccttgtagttaatgattaacccgccatgctacttatctacgtagccatgcgtcgacataacgcgtcgacattgattattgactagttattaatagtaatcaattacggggtcattagttcatagcccatatatggagttccgcgttacataacttacggtaaatggcccgcctggctgaccgcccaacgacccccgcccattgacgtcaataatgacgtatgttcccatagtaacgccaatagggactttccattgacgtcaatgggtggagtatttacggtaaactgcccacttggcagtacatcaagtgtatcatatgccaagtacgccccctattgacgtcaatgacggtaaatggcccgcctggcattatgcccagtacatgaccttatgggactttcctacttggcagtacatctacgtattagtcatcgctattaccatgtcgaggccacgttctgcttcactctccccatctcccccccctccccacccccaattttgtatttatttattttttaattattttgtgcagcgatgggggcggggggggggggcgcgcgccaggcggggcggggcggggcgaggggcggggcggggcgaggcggagaggtgcggcggcagccaatcagagcggcgcgctccgaaagtttccttttatggcgaggcggcggcggcggcggccctataaaaagcgaagcgcgcggcgggcgggagcaagcttcgtttagtgaaccgtcagatcgcctggagacgccatccacgctgttttgacctccatagaagacaccgggaccgatccagcctccgcggattcgaatcccggccgggaacggtgcattggaacgcggattccccgtgccaagagtgacgtaagtaccgcctatagagtctataggcccacaaaaaatgctttcttcttttaatatacttttttgtttatcttatttctaatactttccctaatctctttctttcagggcaataatgatacaatgtatcatgcctctttgcaccattctaaagaataacagtgataatttctgggttaaggcaatagcaatatttctgcatataaatatttctgcatataaattgtaactgatgtaagaggtttcatattgctaatagcagctacaatccagctaccattctgcttttattttatggttgggataaggctggattattctgagtccaagctaggcccttttgctaatcatgttcatacctcttatcttcctcccacagctcctgggcaacgtgctggtctgtgtgctggcccatcactttggcaaagaattgggattcgaaccggtgccgccaccatgaacttcgggctcaggaggtgaagctggtggagagcggcggcgacctggtgaagcctggcggcagcctgaagctgagctgcgccgccagcggcttcaccttcagcagctacgccatgagctgggtgagacagaaccctgagaagagactggagtgggtggccagcatcagcaagggcggcaacacctactaccctaacagcgtgaagggcagattcaccatcagcagagacaacgccagaaacatcctgtacctgcagatgagcagcctgagaagcgaggacaccgccctgtactactgcgccagaggctggggcgactacggctggttcgcctactggggccaggtgaccctggtgaccgtgagcgcccttgattttccttgtccttgttttaaaaggtgtccagtgtgccaaaacgacacccccatctgtctatccactggcccctggatctgctgcccaaactaactccatggtgaccctgggatgcctggtcaagggctatttccctgagccagtgacagtgacctggaactctggatccctgtccagcggtgtgcacaccttcccagctgtcctgcagtctgacctctacactctgagcagctcagtgactgtcccctccagcacctggcccagcgagaccgtcacctgcaacgttgcccacccggccagcagcaccaaggtggacaagaaaattgtgcccagggattgtggttgtaagccttgcatatgtacagtcccagaagtatcatctgtcttcatcttccccccaaagcccaaggatgtgctcaccattactctgactcctaaggtcacgtgtgttgtggtagacatcagcaaggatgatcccgaggtccagttcagctggtttgtagatgatgtggaggtgcacacagctcagacgcaaccccgggaggagcagttcaacagcactttccgctcagtcagtgaacttcccatcatgcaccaggactggctcaatggcaaggagttcaaatgcagggtcaacagtgcagctttccctgcccccatcgagaaaaccatctccaaaaccaaaggcagaccgaaggctccacaggtgtacaccattccacctcccaaggagcagatggccaaggataaagtcagtctgacctgcatgataacagacttcttccctgaagacattactgtggagtggcagtggaatgggcagccagcggagaactacaagaacactcagcccatcatggacacagatggctcttacttcgtctacagcaagctcaatgtgcagaagagcaactgggaggcaggaaatactttcacctgctctgtgttacatgagggcctgcacaaccaccatactgagaagagcctctcccactctcctggtagaaagaggcgagagggcagaggaagtcttctaacatgcggtgacgtggaggagaatcccggccctatgaagttgcctgttaggctgttggtgctgatgttctggattcctgcttccagcagtgacatcaagatgacccagagccctagcagcatgtacgccagcctgggcgagagagtgaccatcacctgcaaggccagccaggacatcaacagatacctgaactggttccagcagaagcctggcaagagccctaagaccctgatctacagagccaacagactgctggacggcgtgcctagcagattcagcggcagcggcagcggccaggactacagcctgaccatcagcagcctggactacgaggacatgggcatctactactgcctgcagtacgacgagttccctctgaccttcggcgacggcaccaagctggagctgaagcgggctgatgctgcaccaactgtatccatcttcccaccatccagtgagcagttaacatctggaggtgcctcagtcgtgtgcttcttgaacaacttctaccccaaagacatcaatgtcaagtggaagattgatggcagtgaacgacaaaatggcgtcctgaacagttggactgatcaggacagcaaagacagcacctacagcatgagcagcaccctcacgttgaccaaggacgagtatgaacgacataacagctatacctgtgaggccactcacaagacatcaacttcacccattgtcaagagcttcaacaggaatgagtgttagtaactcgagcctgaggatgggtggcatccctgtgacccctccccagtgcctctcctggccctggaagttgccactccagtgcccaccagccttgtcctaataaaattaagttgcatcattttgtctgactaggtgtccttctataatattatggggtggaggggggtggtatggagcaaggggcaagttgggaagacaacctgtagggcctgcggggtctattgggaaccaagctggagtgcagtggcacaatcttggctcactgcaatctccgcctcctgggttcaagcgattctcctgcctcagcctcccgagttgttgggattccaggcatgcatgaccaggctcagctaatttttgtttttttggtagagacggggtttcaccatattggccaggctggtctccaactcctaatctcaggtgatctacccaccttggcctcccaaattgctgggattacaggcgtgaaccactgctcccttccctgtccttggcctaggtatcgatgctacgtagataagtagcatggcgggttaatcattaactacagaggaacccctagtgatggagttggccactccctctctgcgcgctcgctcgctcactgaggccgggcgaccaaaggtcgcccgacgcccgggctttgcccgggcggcctcagtgagcgagcgagcgcgcagctgcctgcagg

SEQ ID NO: 2017 - DNA, 4309 bp, Artificial Sequence
  Description of Artificial Sequence: Synthetic polynucleotide
cctgcaggcagctgcgcgctcgctcgctcactgaggccgcccgggcaaagcccgggcgtcgggcgacctttggtcgcccggcctcagtgagcgagcgagcgcgcagagagggagtggccaactccatcactaggggttccttgtagttaatgattaacccgccatgctacttatctacgtagccatgcgtcgacataacgcgtcgacattgattattgactagttattaatagtaatcaattacggggtcattagttcatagcccatatatggagttccgcgttacataacttacggtaaatggcccgcctggctgaccgcccaacgacccccgcccattgacgtcaataatgacgtatgttcccatagtaacgccaatagggactttccattgacgtcaatgggtggagtatttacggtaaactgcccacttggcagtacatcaagtgtatcatatgccaagtacgccccctattgacgtcaatgacggtaaatggcccgcctggcattatgcccagtacatgaccttatgggactttcctacttggcagtacatctacgtattagtcatcgctattaccatgtcgaggccacgttctgcttcactctccccatctcccccccctccccacccccaattttgtatttatttattttttaattattttgtgcagcgatgggggcggggggggggggcgcgcgccaggcggggcggggcggggcgaggggcggggcggggcgaggcggagaggtgcggcggcagccaatcagagcggcgcgctccgaaagtttccttttatggcgaggcggcggcggcggcggccctataaaaagcgaagcgcgcggcgggcgggagcaagcttcgtttagtgaaccgtcagatcgcctggagacgccatccacgctgttttgacctccatagaagacaccgggaccgatccagcctccgcggattcgaatcccggccgggaacggtgcattggaacgcggattccccgtgccaagagtgacgtaagtaccgcctatagagtctataggcccacaaaaaatgctttcttcttttaatatacttttttgtttatcttatttctaatactttccctaatctctttctttcagggcaataatgatacaatgtatcatgcctctttgcaccattctaaagaataacagtgataatttctgggttaaggcaatagcaatatttctgcatataaatatttctgcatataaattgtaactgatgtaagaggtttcatattgctaatagcagctacaatccagctaccattctgcttttattttatggttgggataaggctggattattctgagtccaagctaggcccttttgctaatcatgttcatacctcttatcttcctcccacagctcctgggcaacgtgctggtctgtgtgctggcccatcactttggcaaagaattgggattcgaaccggtgccgccaccatgaacttcgggctcagcttgattttccttgtccttgttttaaaaggtgtccagtgtgaggtgaagctggtggagagcggcggcgacctggtgaagcccggcggcagcctgaagctgagctgcgccgccagcggcttcaccttcagcagctacgccatgagctgggtgaggcagaaccccgagaagaggctggagtgggtggccagcatcagcaagggcggcaacacctactaccccaacagcgtgaagggcaggttcaccatcagcagggacaacgccaggaacatcctgtacctgcagatgagcagcctgaggagcgaggacaccgccctgtactactgcgccaggggctggggcgactacggctggttcgcctactggggccaggtgaccctggtgaccgtgagcgccgccaaaacgacacccccatctgtctatccactggcccctggatctgctgcccaaactaactccatggtgaccctgggatgcctggtcaagggctatttccctgagccagtgacagtgacctggaactctggatccctgtccagcggtgtgcacaccttcccagctgtcctgcagtctgacctctacactctgagcagctcagtgactgtcccctccagcacctggcccagcgagaccgtcacctgcaacgttgcccacccggccagcagcaccaaggtggacaagaaaattgtgcccagggattgtggttgtaagccttgcatatgtacagtcccagaagtatcatctgtcttcatcttccccccaaagcccaaggatgtgctcaccattactctgactcctaaggtcacgtgtgttgtggtagacatcagcaaggatgatcccgaggtccagttcagctggtttgtagatgatgtggaggtgcacacagctcagacgcaaccccgggaggagcagttcaacagcactttccgctcagtcagtgaacttcccatcatgcaccaggactggctcaatggcaaggagttcaaatgcagggtcaacagtgcagctttccctgcccccatcgagaaaaccatctccaaaaccaaaggcagaccgaaggctccacaggtgtacaccattccacctcccaaggagcagatggccaaggataaagtcagtctgacctgcatgataacagacttcttccctgaagacattactgtggagtggcagtggaatgggcagccagcggagaactacaagaacactcagcccatcatggacacagatggctcttacttcgtctacagcaagctcaatgtgcagaagagcaactgggaggcaggaaatactttcacctgctctgtgttacatgagggcctgcacaaccaccatactgagaagagcctctcccactctcctggtagaaagaggcgagagggcagaggaagtcttctaacatgcggtgacgtggaggagaatcccggccctatgaagttgcctgttaggctgttggtgctgatgttctggattcctgcttccagcagtgacatcaagatgacccagagccccagcagcatgtacgccagcctgggcgagagggtgaccatcacctgcaaggccagccaggacatcaacaggtacctgaactggttccagcagaagcccggcaagagccccaagaccctgatctacagggccaacaggctgctggacggcgtgcccagcaggttcagcggcagcggcagcggccaggactacagcctgaccatcagcagcctggactacgaggacatgggcatctactactgcctgcagtacgacgagttccccctgaccttcggcgacggcaccaagctggagctgaagcgggctgatgctgcaccaactgtatccatcttcccaccatccagtgagcagttaacatctggaggtgcctcagtcgtgtgcttcttgaacaacttctaccccaaagacatcaatgtcaagtggaagattgatggcagtgaacgacaaaatggcgtcctgaacagttggactgatcaggacagcaaagacagcacctacagcatgagcagcaccctcacgttgaccaaggacgagtatgaacgacataacagctatacctgtgaggccactcacaagacatcaacttcacccattgtcaagagcttcaacaggaatgagtgttagtaactcgagcctgaggatgggtggcatccctgtgacccctccccagtgcctctcctggccctggaagttgccactccagtgcccaccagccttgtcctaataaaattaagttgcatcattttgtctgactaggtgtccttctataatattatggggtggaggggggtggtatggagcaaggggcaagttgggaagacaacctgtagggcctgcggggtctattgggaaccaagctggagtgcagtggcacaatcttggctcactgcaatctccgcctcctgggttcaagcgattctcctgcctcagcctcccgagttgttgggattccaggcatgcatgaccaggctcagctaatttttgtttttttggtagagacggggtttcaccatattggccaggctggtctccaactcctaatctcaggtgatctacccaccttggcctcccaaattgctgggattacaggcgtgaaccactgctcccttccctgtccttggcctaggtatcgatgctacgtagataagtagcatggcgggttaatcattaactacagaggaacccctagtgatggagttggccactccctctctgcgcgctcgctcgctcactgaggccgggcgaccaaaggtcgcccgacgcccgggctttgcccgggcggcctcagtgagcgagcgagcgcgcagctgcctgcagg

SEQ ID NO: 2018 - DNA, 4309 bp, Artificial Sequence
  Description of Artificial Sequence: Synthetic polynucleotide
cctgcaggcagctgcgcgctcgctcgctcactgaggccgcccgggcaaagcccgggcgtcgggcgacctttggtcgcccggcctcagtgagcgagcgagcgcgcagagagggagtggccaactccatcactaggggttccttgtagttaatgattaacccgccatgctacttatctacgtagccatgcgtcgacataacgcgtcgacattgattattgactagttattaatagtaatcaattacggggtcattagttcatagcccatatatggagttccgcgttacataacttacggtaaatggcccgcctggctgaccgcccaacgacccccgcccattgacgtcaataatgacgtatgttcccatagtaacgccaatagggactttccattgacgtcaatgggtggagtatttacggtaaactgcccacttggcagtacatcaagtgtatcatatgccaagtacgccccctattgacgtcaatgacggtaaatggcccgcctggcattatgcccagtacatgaccttatgggactttcctacttggcagtacatctacgtattagtcatcgctattaccatgtcgaggccacgttctgcttcactctccccatctcccccccctccccacccccaattttgtatttatttattttttaattattttgtgcagcgatgggggcggggggggggggcgcgcgccaggcggggcggggcggggcgaggggcggggcggggcgaggcggagaggtgcggcggcagccaatcagagcggcgcgctccgaaagtttccttttatggcgaggcggcggcggcggcggccctataaaaagcgaagcgcgcggcgggcgggagcaagcttcgtttagtgaaccgtcagatcgcctggagacgccatccacgctgttttgacctccatagaagacaccgggaccgatccagcctccgcggattcgaatcccggccgggaacggtgcattggaacgcggattccccgtgccaagagtgacgtaagtaccgcctatagagtctataggcccacaaaaaatgctttcttcttttaatatacttttttgtttatcttatttctaatactttccctaatctctttctttcagggcaataatgatacaatgtatcatgcctctttgcaccattctaaagaataacagtgataatttctgggttaaggcaatagcaatatttctgcatataaatatttctgcatataaattgtaactgatgtaagaggtttcatattgctaatagcagctacaatccagctaccattctgcttttattttatggttgggataaggctggattattctgagtccaagctaggcccttttgctaatcatgttcatacctcttatcttcctcccacagctcctgggcaacgtgctggtctgtgtgctggcccatcactttggcaaagaattgggattcgaaccggtgccgccaccatgaacttcgggctcagcttgattttccttgtccttgttttaaaaggtgtccagtgtgaagtgaaactggtggaaagcggcggcgatctggtgaaaccgggcggcagcctgaaactgagctgcgcggcgagcggctttacctttagcagctatgcgatgagctgggtgcgccagaacccggaaaaacgcctggaatgggtggcgagcattagcaaaggcggcaacacctattatccgaacagcgtgaaaggccgctttaccattagccgcgataacgcgcgcaacattctgtatctgcagatgagcagcctgcgcagcgaagataccgcgctgtattattgcgcgcgcggctggggcgattatggctggtttgcgtattggggccaggtgaccctggtgaccgtgagcgcggccaaaacgacacccccatctgtctatccactggcccctggatctgctgcccaaactaactccatggtgaccctgggatgcctggtcaagggctatttccctgagccagtgacagtgacctggaactctggatccctgtccagcggtgtgcacaccttcccagctgtcctgcagtctgacctctacactctgagcagctcagtgactgtcccctccagcacctggcccagcgagaccgtcacctgcaacgttgcccacccggccagcagcaccaaggtggacaagaaaattgtgcccagggattgtggttgtaagccttgcatatgtacagtcccagaagtatcatctgtcttcatcttccccccaaagcccaaggatgtgctcaccattactctgactcctaaggtcacgtgtgttgtggtagacatcagcaaggatgatcccgaggtccagttcagctggtttgtagatgatgtggaggtgcacacagctcagacgcaaccccgggaggagcagttcaacagcactttccgctcagtcagtgaacttcccatcatgcaccaggactggctcaatggcaaggagttcaaatgcagggtcaacagtgcagctttccctgcccccatcgagaaaaccatctccaaaaccaaaggcagaccgaaggctccacaggtgtacaccattccacctcccaaggagcagatggccaaggataaagtcagtctgacctgcatgataacagacttcttccctgaagacattactgtggagtggcagtggaatgggcagccagcggagaactacaagaacactcagcccatcatggacacagatggctcttacttcgtctacagcaagctcaatgtgcagaagagcaactgggaggcaggaaatactttcacctgctctgtgttacatgagggcctgcacaaccaccatactgagaagagcctctcccactctcctggtagaaagaggcgagagggcagaggaagtcttctaacatgcggtgacgtggaggagaatcccggccctatgaagttgcctgttaggctgttggtgctgatgttctggattcctgcttccagcagtgatattaaaatgacccagagcccgagcagcatgtatgcgagcctgggcgaacgcgtgaccattacctgcaaagcgagccaggatattaaccgctatctgaactggtttcagcagaaaccgggcaaaagcccgaaaaccctgatttatcgcgcgaaccgcctgctggatggcgtgccgagccgctttagcggcagcggcagcggccaggattatagcctgaccattagcagcctggattatgaagatatgggcatttattattgcctgcagtatgatgaatttccgctgacctttggcgatggcaccaaactggaactgaaacgggctgatgctgcaccaactgtatccatcttcccaccatccagtgagcagttaacatctggaggtgcctcagtcgtgtgcttcttgaacaacttctaccccaaagacatcaatgtcaagtggaagattgatggcagtgaacgacaaaatggcgtcctgaacagttggactgatcaggacagcaaagacagcacctacagcatgagcagcaccctcacgttgaccaaggacgagtatgaacgacataacagctatacctgtgaggccactcacaagacatcaacttcacccattgtcaagagcttcaacaggaatgagtgttagtaactcgagcctgaggatgggtggcatccctgtgacccctccccagtgcctctcctggccctggaagttgccactccagtgcccaccagccttgtcctaataaaattaagttgcatcattttgtctgactaggtgtccttctataatattatggggtggaggggggtggtatggagcaaggggcaagttgggaagacaacctgtagggcctgcggggtctattgggaaccaagctggagtgcagtggcacaatcttggctcactgcaatctccgcctcctgggttcaagcgattctcctgcctcagcctcccgagttgttgggattccaggcatgcatgaccaggctcagctaatttttgtttttttggtagagacggggtttcaccatattggccaggctggtctccaactcctaatctcaggtgatctacccaccttggcctcccaaattgctgggattacaggcgtgaaccactgctcccttccctgtccttggcctaggtatcgatgctacgtagataagtagcatggcgggttaatcattaactacagaggaacccctagtgatggagttggccactccctctctgcgcgctcgctcgctcactgaggccgggcgaccaaaggtcgcccgacgcccgggctttgcccgggcggcctcagtgagcgagcgagcgcgcagctgcctgcagg

SEQ ID NO: 2019 - DNA, 4309 bp, Artificial Sequence
  Description of Artificial Sequence: Synthetic polynucleotide
cctgcaggcagctgcgcgctcgctcgctcactgaggccgcccgggcaaagcccgggcgtcgggcgacctttggtcgcccggcctcagtgagcgagcgagcgcgcagagagggagtggccaactccatcactaggggttccttgtagttaatgattaacccgccatgctacttatctacgtagccatgcgtcgacataacgcgtcgacattgattattgactagttattaatagtaatcaattacggggtcattagttcatagcccatatatggagttccgcgttacataacttacggtaaatggcccgcctggctgaccgcccaacgacccccgcccattgacgtcaataatgacgtatgttcccatagtaacgccaatagggactttccattgacgtcaatgggtggagtatttacggtaaactgcccacttggcagtacatcaagtgtatcatatgccaagtacgccccctattgacgtcaatgacggtaaatggcccgcctggcattatgcccagtacatgaccttatgggactttcctacttggcagtacatctacgtattagtcatcgctattaccatgtcgaggccacgttctgcttcactctccccatctcccccccctccccacccccaattttgtatttatttattttttaattattttgtgcagcgatgggggcggggggggggggcgcgcgccaggcggggcggggcggggcgaggggcggggcggggcgaggcggagaggtgcggcggcagccaatcagagcggcgcgctccgaaagtttccttttatggcgaggcggcggcggcggcggccctataaaaagcgaagcgcgcggcgggcgggagcaagcttcgtttagtgaaccgtcagatcgcctggagacgccatccacgctgttttgacctccatagaagacaccgggaccgatccagcctccgcggattcgaatcccggccgggaacggtgcattggaacgcggattccccgtgccaagagtgacgtaagtaccgcctatagagtctataggcccacaaaaaatgctttcttcttttaatatacttttttgtttatcttatttctaatactttccctaatctctttctttcagggcaataatgatacaatgtatcatgcctctttgcaccattctaaagaataacagtgataatttctgggttaaggcaatagcaatatttctgcatataaatatttctgcatataaattgtaactgatgtaagaggtttcatattgctaatagcagctacaatccagctaccattctgcttttattttatggttgggataaggctggattattctgagtccaagctaggcccttttgctaatcatgttcatacctcttatcttcctcccacagctcctgggcaacgtgctggtctgtgtgctggcccatcactttggcaaagaattgggattcgaaccggtgccgccaccatgaacttcgggctcagcttgattttccttgtccttgttttaaaaggtgtccagtgtgaggtgaaacttgtggagtctggaggagacctggtgaagccaggaggcagcctgaagctgagctgtgctgccagtggcttcaccttcagcagctatgccatgtcctgggtccggcagaaccctgagaagaggctggagtgggtggccagcatctccaagggcggcaacacctactatcccaacagcgtcaaaggaagatttaccatcagccgggacaatgccaggaacatcctctacctgcagatgagctccctgcggtctgaggacacagccctgtactactgtgcccggggctggggagattatggatggtttgcctactggggccaggtgaccctggtcactgtgtctgctgccaaaacgacacccccatctgtctatccactggcccctggatctgctgcccaaactaactccatggtgaccctgggatgcctggtcaagggctatttccctgagccagtgacagtgacctggaactctggatccctgtccagcggtgtgcacaccttcccagctgtcctgcagtctgacctctacactctgagcagctcagtgactgtcccctccagcacctggcccagcgagaccgtcacctgcaacgttgcccacccggccagcagcaccaaggtggacaagaaaattgtgcccagggattgtggttgtaagccttgcatatgtacagtcccagaagtatcatctgtcttcatcttccccccaaagcccaaggatgtgctcaccattactctgactcctaaggtcacgtgtgttgtggtagacatcagcaaggatgatcccgaggtccagttcagctggtttgtagatgatgtggaggtgcacacagctcagacgcaaccccgggaggagcagttcaacagcactttccgctcagtcagtgaacttcccatcatgcaccaggactggctcaatggcaaggagttcaaatgcagggtcaacagtgcagctttccctgcccccatcgagaaaaccatctccaaaaccaaaggcagaccgaaggctccacaggtgtacaccattccacctcccaaggagcagatggccaaggataaagtcagtctgacctgcatgataacagacttcttccctgaagacattactgtggagtggcagtggaatgggcagccagcggagaactacaagaacactcagcccatcatggacacagatggctcttacttcgtctacagcaagctcaatgtgcagaagagcaactgggaggcaggaaatactttcacctgctctgtgttacatgagggcctgcacaaccaccatactgagaagagcctctcccactctcctggtagaaagaggcgagagggcagaggaagtcttctaacatgcggtgacgtggaggagaatcccggccctatgaagttgcctgttaggctgttggtgctgatgttctggattcctgcttccagcagtcgggctgatgctgcaccaactgtatccatcttcccaccatccagtgagcagttaacatctggaggtgcctcagtcgtgtgcttcttgaacaacttctaccccaaagacatcaatgtcaagtggaagattgatggcagtgaacgacaaaatgacatcaagatgacccagagcccttcctccatgtatgcctccctgggggagcgggtgacaatcacctgcaaggccagccaggatatcaaccgctacctgaactggttccagcagaagccaggcaagagccccaagaccctcatctatagagccaaccggctgctggacggccgggctgatgctgcaccaactgtatccatcttcccaccatccagtgagcagttaacatctggaggtgcctcagtcgtgtgcttcttgaacaacttctaccccaaagacatcaatgtcaagtggaagattgatggcagtgaacgacaaaatggcgtcctgaacagttggactgatcaggacagcaaagacagcacctacagcatgagcagcaccctcacgttgaccaaggacgagtatgaacgacataacagctatacctgtgaggccactcacaagacatcaacttcacccattgtcaagagcttcaacaggaatgagtgttagtaactcgagcctgaggatgggtggcatccctgtgacccctccccagtgcctctcctggccctggaagttgccactccagtgcccaccagccttgtcctaataaaattaagttgcatcattttgtctgactaggtgtccttctataatattatggggtggaggggggtggtatggagcaaggggcaagttgggaagacaacctgtagggcctgcggggtctattgggaaccaagctggagtgcagtggcacaatcttggctcactgcaatctccgcctcctgggttcaagcgattctcctgcctcagcctcccgagttgttgggattccaggcatgcatgaccaggctcagctaatttttgtttttttggtagagacggggtttcaccatattggccaggctggtctccaactcctaatctcaggtgatctacccaccttggcctcccaaattgctgggattacaggcgtgaaccactgctcccttccctgtccttggcctaggtatcgatgctacgtagataagtagcatggcgggttaatcattaactacagaggaacccctagtgatggagttggccactccctctctgcgcgctcgctcgctcactgaggccgggcgaccaaaggtcgcccgacgcccgggctttgcccgggcggcctcagtgagcgagcgagcgcgcagctgcctgcagg

SEQ ID NO: 2020 - DNA, 4309 bp, Artificial Sequence
  Description of Artificial Sequence: Synthetic polynucleotide
cctgcaggcagctgcgcgctcgctcgctcactgaggccgcccgggcaaagcccgggcgtcgggcgacctttggtcgcccggcctcagtgagcgagcgagcgcgcagagagggagtggccaactccatcactaggggttccttgtagttaatgattaacccgccatgctacttatctacgtagccatgcgtcgacataacgcgtcgacattgattattgactagttattaatagtaatcaattacggggtcattagttcatagcccatatatggagttccgcgttacataacttacggtaaatggcccgcctggctgaccgcccaacgacccccgcccattgacgtcaataatgacgtatgttcccatagtaacgccaatagggactttccattgacgtcaatgggtggagtatttacggtaaactgcccacttggcagtacatcaagtgtatcatatgccaagtacgccccctattgacgtcaatgacggtaaatggcccgcctggcattatgcccagtacatgaccttatgggactttcctacttggcagtacatctacgtattagtcatcgctattaccatgtcgaggccacgttctgcttcactctccccatctcccccccctccccacccccaattttgtatttatttattttttaattattttgtgcagcgatgggggcggggggggggggcgcgcgccaggcggggcggggcggggcgaggggcggggcggggcgaggcggagaggtgcggcggcagccaatcagagcggcgcgctccgaaagtttccttttatggcgaggcggcggcggcggcggccctataaaaagcgaagcgcgcggcgggcgggagcaagcttcgtttagtgaaccgtcagatcgcctggagacgccatccacgctgttttgacctccatagaagacaccgggaccgatccagcctccgcggattcgaatcccggccgggaacggtgcattggaacgcggattccccgtgccaagagtgacgtaagtaccgcctatagagtctataggcccacaaaaaatgctttcttcttttaatatacttttttgtttatcttatttctaatactttccctaatctctttctttcagggcaataatgatacaatgtatcatgcctctttgcaccattctaaagaataacagtgataatttctgggttaaggcaatagcaatatttctgcatataaatatttctgcatataaattgtaactgatgtaagaggtttcatattgctaatagcagctacaatccagctaccattctgcttttattttatggttgggataaggctggattattctgagtccaagctaggcccttttgctaatcatgttcatacctcttatcttcctcccacagctcctgggcaacgtgctggtctgtgtgctggcccatcactttggcaaagaattgggattcgaaccggtgccgccaccatgaacttcgggctcagcttgattttccttgtccttgttttaaaaggtgtccagtgtgaggtgaaattagtggagtctggaggagacctggtgaagccaggaggcagcctgaagctgagctgtgctgcttctggcttcaccttcagcagctatgccatgtcctgggtcagacagaatcctgagaagagactggagtgggtggccagcatctccaaaggtggcaacacctactatcccaacagtgttaaaggaagatttaccatcagcagagataatgcaagaaacatcctctacctgcagatgtcttctttaagaagtgaagatacagccctgtactactgtgccagaggctggggagattatggatggtttgcctactggggccaggtgacattagttactgtgtctgctgccaaaacgacacccccatctgtctatccactggcccctggatctgctgcccaaactaactccatggtgaccctgggatgcctggtcaagggctatttccctgagccagtgacagtgacctggaactctggatccctgtccagcggtgtgcacaccttcccagctgtcctgcagtctgacctctacactctgagcagctcagtgactgtcccctccagcacctggcccagcgagaccgtcacctgcaacgttgcccacccggccagcagcaccaaggtggacaagaaaattgtgcccagggattgtggttgtaagccttgcatatgtacagtcccagaagtatcatctgtcttcatcttccccccaaagcccaaggatgtgctcaccattactctgactcctaaggtcacgtgtgttgtggtagacatcagcaaggatgatcccgaggtccagttcagctggtttgtagatgatgtggaggtgcacacagctcagacgcaaccccgggaggagcagttcaacagcactttccgctcagtcagtgaacttcccatcatgcaccaggactggctcaatggcaaggagttcaaatgcagggtcaacagtgcagctttccctgcccccatcgagaaaaccatctccaaaaccaaaggcagaccgaaggctccacaggtgtacaccattccacctcccaaggagcagatggccaaggataaagtcagtctgacctgcatgataacagacttcttccctgaagacattactgtggagtggcagtggaatgggcagccagcggagaactacaagaacactcagcccatcatggacacagatggctcttacttcgtctacagcaagctcaatgtgcagaagagcaactgggaggcaggaaatactttcacctgctctgtgttacatgagggcctgcacaaccaccatactgagaagagcctctcccactctcctggtagaaagaggcgagagggcagaggaagtcttctaacatgcggtgacgtggaggagaatcccggccctatgaagttgcctgttaggctgttggtgctgatgttctggattcctgcttccagcagtgacatcaagatgacccagagcccttcttccatgtatgcttctttaggagaaagagtgacaatcacctgcaaggccagccaggatatcaaccgctacctgaactggttccagcagaagccaggaaaatctcccaagaccctgatttatagagccaacagactgctggacggcgtgcccagccgcttcagtggatctggaagtggccaggactacagcctgaccatctcttctctggattatgaagacatgggcatctactactgcctgcagtatgatgaatttcctttaacatttggagatggcaccaagctggagctgaagcgggctgatgctgcaccaactgtatccatcttcccaccatccagtgagcagttaacatctggaggtgcctcagtcgtgtgcttcttgaacaacttctaccccaaagacatcaatgtcaagtggaagattgatggcagtgaacgacaaaatggcgtcctgaacagttggactgatcaggacagcaaagacagcacctacagcatgagcagcaccctcacgttgaccaaggacgagtatgaacgacataacagctatacctgtgaggccactcacaagacatcaacttcacccattgtcaagagcttcaacaggaatgagtgttagtaactcgagcctgaggatgggtggcatccctgtgacccctccccagtgcctctcctggccctggaagttgccactccagtgcccaccagccttgtcctaataaaattaagttgcatcattttgtctgactaggtgtccttctataatattatggggtggaggggggtggtatggagcaaggggcaagttgggaagacaacctgtagggcctgcggggtctattgggaaccaagctggagtgcagtggcacaatcttggctcactgcaatctccgcctcctgggttcaagcgattctcctgcctcagcctcccgagttgttgggattccaggcatgcatgaccaggctcagctaatttttgtttttttggtagagacggggtttcaccatattggccaggctggtctccaactcctaatctcaggtgatctacccaccttggcctcccaaattgctgggattacaggcgtgaaccactgctcccttccctgtccttggcctaggtatcgatgctacgtagataagtagcatggcgggttaatcattaactacagaggaacccctagtgatggagttggccactccctctctgcgcgctcgctcgctcactgaggccgggcgaccaaaggtcgcccgacgcccgggctttgcccgggcggcctcagtgagcgagcgagcgcgcagctgcctgcagg

SEQ ID NO: 2021 - DNA, 4309 bp, Artificial Sequence
  Description of Artificial Sequence: Synthetic polynucleotide
cctgcaggcagctgcgcgctcgctcgctcactgaggccgcccgggcaaagcccgggcgtcgggcgacctttggtcgcccggcctcagtgagcgagcgagcgcgcagagagggagtggccaactccatcactaggggttccttgtagttaatgattaacccgccatgctacttatctacgtagccatgcgtcgacataacgcgtcgacattgattattgactagttattaatagtaatcaattacggggtcattagttcatagcccatatatggagttccgcgttacataacttacggtaaatggcccgcctggctgaccgcccaacgacccccgcccattgacgtcaataatgacgtatgttcccatagtaacgccaatagggactttccattgacgtcaatgggtggagtatttacggtaaactgcccacttggcagtacatcaagtgtatcatatgccaagtacgccccctattgacgtcaatgacggtaaatggcccgcctggcattatgcccagtacatgaccttatgggactttcctacttggcagtacatctacgtattagtcatcgctattaccatgtcgaggccacgttctgcttcactctccccatctcccccccctccccacccccaattttgtatttatttattttttaattattttgtgcagcgatgggggcggggggggggggcgcgcgccaggcggggcggggcggggcgaggggcggggcggggcgaggcggagaggtgcggcggcagccaatcagagcggcgcgctccgaaagtttccttttatggcgaggcggcggcggcggcggccctataaaaagcgaagcgcgcggcgggcgggagcaagcttcgtttagtgaaccgtcagatcgcctggagacgccatccacgctgttttgacctccatagaagacaccgggaccgatccagcctccgcggattcgaatcccggccgggaacggtgcattggaacgcggattccccgtgccaagagtgacgtaagtaccgcctatagagtctataggcccacaaaaaatgctttcttcttttaatatacttttttgtttatcttatttctaatactttccctaatctctttctttcagggcaataatgatacaatgtatcatgcctctttgcaccattctaaagaataacagtgataatttctgggttaaggcaatagcaatatttctgcatataaatatttctgcatataaattgtaactgatgtaagaggtttcatattgctaatagcagctacaatccagctaccattctgcttttattttatggttgggataaggctggattattctgagtccaagctaggcccttttgctaatcatgttcatacctcttatcttcctcccacagctcctgggcaacgtgctggtctgtgtgctggcccatcactttggcaaagaattgggattcgaaccggtgccgccaccatgaacttcgggctcagcttgattttccttgtccttgttttaaaaggtgtccagtgtgaggtgaaacttgtggagagcggcggggacctggtcaagccaggcggcagcctgaagctgagctgtgccgcctccggcttcaccttcagcagctatgccatgtcctgggtccggcagaaccctgagaagaggctggagtgggtggccagcatcagcaaaggaggcaacacctactatcccaacagcgtgaagggccgcttcaccatctcccgggacaatgccaggaacatcctctacctgcagatgagctccctgcggtctgaggacacagccctgtactactgcgcccggggctggggagactatggatggtttgcctactggggccaggtgaccctggtgacagtgtctgccgccaaaacgacacccccatctgtctatccactggcccctggatctgctgcccaaactaactccatggtgaccctgggatgcctggtcaagggctatttccctgagccagtgacagtgacctggaactctggatccctgtccagcggtgtgcacaccttcccagctgtcctgcagtctgacctctacactctgagcagctcagtgactgtcccctccagcacctggcccagcgagaccgtcacctgcaacgttgcccacccggccagcagcaccaaggtggacaagaaaattgtgcccagggattgtggttgtaagccttgcatatgtacagtcccagaagtatcatctgtcttcatcttccccccaaagcccaaggatgtgctcaccattactctgactcctaaggtcacgtgtgttgtggtagacatcagcaaggatgatcccgaggtccagttcagctggtttgtagatgatgtggaggtgcacacagctcagacgcaaccccgggaggagcagttcaacagcactttccgctcagtcagtgaacttcccatcatgcaccaggactggctcaatggcaaggagttcaaatgcagggtcaacagtgcagctttccctgcccccatcgagaaaaccatctccaaaaccaaaggcagaccgaaggctccacaggtgtacaccattccacctcccaaggagcagatggccaaggataaagtcagtctgacctgcatgataacagacttcttccctgaagacattactgtggagtggcagtggaatgggcagccagcggagaactacaagaacactcagcccatcatggacacagatggctcttacttcgtctacagcaagctcaatgtgcagaagagcaactgggaggcaggaaatactttcacctgctctgtgttacatgagggcctgcacaaccaccatactgagaagagcctctcccactctcctggtagaaagaggcgagagggcagaggaagtcttctaacatgcggtgacgtggaggagaatcccggccctatgaagttgcctgttaggctgttggtgctgatgttctggattcctgcttccagcagtgacatcaagatgacccagagcccttcctccatgtatgcctccctgggggagcgggtgaccatcacctgcaaggccagccaggatatcaaccgctacctgaactggttccagcagaagccaggcaagagccccaagaccctcatctatcgggccaaccggctgctggatggagtgcccagccgcttctccggcagcggcagtggccaggactacagcctcaccatttccagcctggactatgaggacatgggcatctactactgcctgcagtatgatgagttccccctgacctttggagatggcaccaagctggagctgaagcgggctgatgctgcaccaactgtatccatcttcccaccatccagtgagcagttaacatctggaggtgcctcagtcgtgtgcttcttgaacaacttctaccccaaagacatcaatgtcaagtggaagattgatggcagtgaacgacaaaatggcgtcctgaacagttggactgatcaggacagcaaagacagcacctacagcatgagcagcaccctcacgttgaccaaggacgagtatgaacgacataacagctatacctgtgaggccactcacaagacatcaacttcacccattgtcaagagcttcaacaggaatgagtgttagtaactcgagcctgaggatgggtggcatccctgtgacccctccccagtgcctctcctggccctggaagttgccactccagtgcccaccagccttgtcctaataaaattaagttgcatcattttgtctgactaggtgtccttctataatattatggggtggaggggggtggtatggagcaaggggcaagttgggaagacaacctgtagggcctgcggggtctattgggaaccaagctggagtgcagtggcacaatcttggctcactgcaatctccgcctcctgggttcaagcgattctcctgcctcagcctcccgagttgttgggattccaggcatgcatgaccaggctcagctaatttttgtttttttggtagagacggggtttcaccatattggccaggctggtctccaactcctaatctcaggtgatctacccaccttggcctcccaaattgctgggattacaggcgtgaaccactgctcccttccctgtccttggcctaggtatcgatgctacgtagataagtagcatggcgggttaatcattaactacagaggaacccctagtgatggagttggccactccctctctgcgcgctcgctcgctcactgaggccgggcgaccaaaggtcgcccgacgcccgggctttgcccgggcggcctcagtgagcgagcgagcgcgcagctgcctgcagg

SEQ ID NO: 2022 - DNA, 4309 bp, Artificial Sequence
  Description of Artificial Sequence: Synthetic polynucleotide
cctgcaggcagctgcgcgctcgctcgctcactgaggccgcccgggcaaagcccgggcgtcgggcgacctttggtcgcccggcctcagtgagcgagcgagcgcgcagagagggagtggccaactccatcactaggggttccttgtagttaatgattaacccgccatgctacttatctacgtagccatgcgtcgacataacgcgtcgacattgattattgactagttattaatagtaatcaattacggggtcattagttcatagcccatatatggagttccgcgttacataacttacggtaaatggcccgcctggctgaccgcccaacgacccccgcccattgacgtcaataatgacgtatgttcccatagtaacgccaatagggactttccattgacgtcaatgggtggagtatttacggtaaactgcccacttggcagtacatcaagtgtatcatatgccaagtacgccccctattgacgtcaatgacggtaaatggcccgcctggcattatgcccagtacatgaccttatgggactttcctacttggcagtacatctacgtattagtcatcgctattaccatgtcgaggccacgttctgcttcactctccccatctcccccccctccccacccccaattttgtatttatttattttttaattattttgtgcagcgatgggggcggggggggggggcgcgcgccaggcggggcggggcggggcgaggggcggggcggggcgaggcggagaggtgcggcggcagccaatcagagcggcgcgctccgaaagtttccttttatggcgaggcggcggcggcggcggccctataaaaagcgaagcgcgcggcgggcgggagcaagcttcgtttagtgaaccgtcagatcgcctggagacgccatccacgctgttttgacctccatagaagacaccgggaccgatccagcctccgcggattcgaatcccggccgggaacggtgcattggaacgcggattccccgtgccaagagtgacgtaagtaccgcctatagagtctataggcccacaaaaaatgctttcttcttttaatatacttttttgtttatcttatttctaatactttccctaatctctttctttcagggcaataatgatacaatgtatcatgcctctttgcaccattctaaagaataacagtgataatttctgggttaaggcaatagcaatatttctgcatataaatatttctgcatataaattgtaactgatgtaagaggtttcatattgctaatagcagctacaatccagctaccattctgcttttattttatggttgggataaggctggattattctgagtccaagctaggcccttttgctaatcatgttcatacctcttatcttcctcccacagctcctgggcaacgtgctggtctgtgtgctggcccatcactttggcaaagaattgggattcgaaccggtgccgccaccatgaacttcgggctcagcttgattttccttgtccttgttttaaaaggtgtccagtgtgaggtgaaacttgtggagagcggcggggacctggtgaagccaggcggcagcctgaagctgagctgtgccgcctccggcttcaccttcagcagctatgccatgtcctgggtccggcagaaccctgagaagaggctggagtgggtggccagcatcagcaaaggaggcaacacctactaccccaacagcgtcaagggccgcttcaccatctcccgggacaatgccaggaacatcctgtacctgcagatgagctccctgcggtctgaggacacagccctgtattactgcgcccggggctggggagactatggatggtttgcctactggggccaggtgaccctggtcaccgtgtctgccgccaaaacgacacccccatctgtctatccactggcccctggatctgctgcccaaactaactccatggtgaccctgggatgcctggtcaagggctatttccctgagccagtgacagtgacctggaactctggatccctgtccagcggtgtgcacaccttcccagctgtcctgcagtctgacctctacactctgagcagctcagtgactgtcccctccagcacctggcccagcgagaccgtcacctgcaacgttgcccacccggccagcagcaccaaggtggacaagaaaattgtgcccagggattgtggttgtaagccttgcatatgtacagtcccagaagtatcatctgtcttcatcttccccccaaagcccaaggatgtgctcaccattactctgactcctaaggtcacgtgtgttgtggtagacatcagcaaggatgatcccgaggtccagttcagctggtttgtagatgatgtggaggtgcacacagctcagacgcaaccccgggaggagcagttcaacagcactttccgctcagtcagtgaacttcccatcatgcaccaggactggctcaatggcaaggagttcaaatgcagggtcaacagtgcagctttccctgcccccatcgagaaaaccatctccaaaaccaaaggcagaccgaaggctccacaggtgtacaccattccacctcccaaggagcagatggccaaggataaagtcagtctgacctgcatgataacagacttcttccctgaagacattactgtggagtggcagtggaatgggcagccagcggagaactacaagaacactcagcccatcatggacacagatggctcttacttcgtctacagcaagctcaatgtgcagaagagcaactgggaggcaggaaatactttcacctgctctgtgttacatgagggcctgcacaaccaccatactgagaagagcctctcccactctcctggtagaaagaggcgagagggcagaggaagtcttctaacatgcggtgacgtggaggagaatcccggccctatgaagttgcctgttaggctgttggtgctgatgttctggattcctgcttccagcagtgacatcaagatgacccagagcccttcctccatgtatgcctccctgggggagcgggtgaccatcacctgcaaggccagccaggatatcaaccgctacctgaactggttccagcagaagcccggcaagagccccaagaccctcatctatcgggccaaccggctgctggatggagtgcccagccgcttctccggcagcggcagtggccaggactacagcctgaccatttcttctctggactatgaggacatgggcatctactactgcctgcagtatgatgagttccccctgacatttggagatggcaccaagctggagctgaagcgggctgatgctgcaccaactgtatccatcttcccaccatccagtgagcagttaacatctggaggtgcctcagtcgtgtgcttcttgaacaacttctaccccaaagacatcaatgtcaagtggaagattgatggcagtgaacgacaaaatggcgtcctgaacagttggactgatcaggacagcaaagacagcacctacagcatgagcagcaccctcacgttgaccaaggacgagtatgaacgacataacagctatacctgtgaggccactcacaagacatcaacttcacccattgtcaagagcttcaacaggaatgagtgttagtaactcgagcctgaggatgggtggcatccctgtgacccctccccagtgcctctcctggccctggaagttgccactccagtgcccaccagccttgtcctaataaaattaagttgcatcattttgtctgactaggtgtccttctataatattatggggtggaggggggtggtatggagcaaggggcaagttgggaagacaacctgtagggcctgcggggtctattgggaaccaagctggagtgcagtggcacaatcttggctcactgcaatctccgcctcctgggttcaagcgattctcctgcctcagcctcccgagttgttgggattccaggcatgcatgaccaggctcagctaatttttgtttttttggtagagacggggtttcaccatattggccaggctggtctccaactcctaatctcaggtgatctacccaccttggcctcccaaattgctgggattacaggcgtgaaccactgctcccttccctgtccttggcctaggtatcgatgctacgtagataagtagcatggcgggttaatcattaactacagaggaacccctagtgatggagttggccactccctctctgcgcgctcgctcgctcactgaggccgggcgaccaaaggtcgcccgacgcccgggctttgcccgggcggcctcagtgagcgagcgagcgcgcagctgcctgcagg

SEQ ID NO: 2023 - DNA, 4309 bp, Artificial Sequence
  Description of Artificial Sequence: Synthetic polynucleotide
cctgcaggcagctgcgcgctcgctcgctcactgaggccgcccgggcaaagcccgggcgtcgggcgacctttggtcgcccggcctcagtgagcgagcgagcgcgcagagagggagtggccaactccatcactaggggttccttgtagttaatgattaacccgccatgctacttatctacgtagccatgcgtcgacataacgcgtcgacattgattattgactagttattaatagtaatcaattacggggtcattagttcatagcccatatatggagttccgcgttacataacttacggtaaatggcccgcctggctgaccgcccaacgacccccgcccattgacgtcaataatgacgtatgttcccatagtaacgccaatagggactttccattgacgtcaatgggtggagtatttacggtaaactgcccacttggcagtacatcaagtgtatcatatgccaagtacgccccctattgacgtcaatgacggtaaatggcccgcctggcattatgcccagtacatgaccttatgggactttcctacttggcagtacatctacgtattagtcatcgctattaccatgtcgaggccacgttctgcttcactctccccatctcccccccctccccacccccaattttgtatttatttattttttaattattttgtgcagcgatgggggcggggggggggggcgcgcgccaggcggggcggggcggggcgaggggcggggcggggcgaggcggagaggtgcggcggcagccaatcagagcggcgcgctccgaaagtttccttttatggcgaggcggcggcggcggcggccctataaaaagcgaagcgcgcggcgggcgggagcaagcttcgtttagtgaaccgtcagatcgcctggagacgccatccacgctgttttgacctccatagaagacaccgggaccgatccagcctccgcggattcgaatcccggccgggaacggtgcattggaacgcggattccccgtgccaagagtgacgtaagtaccgcctatagagtctataggcccacaaaaaatgctttcttcttttaatatacttttttgtttatcttatttctaatactttccctaatctctttctttcagggcaataatgatacaatgtatcatgcctctttgcaccattctaaagaataacagtgataatttctgggttaaggcaatagcaatatttctgcatataaatatttctgcatataaattgtaactgatgtaagaggtttcatattgctaatagcagctacaatccagctaccattctgcttttattttatggttgggataaggctggattattctgagtccaagctaggcccttttgctaatcatgttcatacctcttatcttcctcccacagctcctgggcaacgtgctggtctgtgtgctggcccatcactttggcaaagaattgggattcgaaccggtgccgccaccatgaacttcgggctcagcttgattttccttgtccttgttttaaaaggtgtccagtgtgaggtgaagctggtggagagcggaggagacctggtcaagcccgggggctccctgaagctcagctgtgccgccagcggcttcaccttctcctcctatgccatgtcctgggtccggcagaaccctgagaagaggctggagtgggtggcctccatctccaagggcggcaacacctactatcccaacagcgtgaaaggaagatttaccatcagccgggacaatgccaggaacatcctctacctgcagatgagcagcctgcggtctgaggacacagccctgtactactgcgcccggggctggggggactatggatggtttgcctactggggccaggtgaccctggttactgtgtctgccgccaaaacgacacccccatctgtctatccactggcccctggatctgctgcccaaactaactccatggtgaccctgggatgcctggtcaagggctatttccctgagccagtgacagtgacctggaactctggatccctgtccagcggtgtgcacaccttcccagctgtcctgcagtctgacctctacactctgagcagctcagtgactgtcccctccagcacctggcccagcgagaccgtcacctgcaacgttgcccacccggccagcagcaccaaggtggacaagaaaattgtgcccagggattgtggttgtaagccttgcatatgtacagtcccagaagtatcatctgtcttcatcttccccccaaagcccaaggatgtgctcaccattactctgactcctaaggtcacgtgtgttgtggtagacatcagcaaggatgatcccgaggtccagttcagctggtttgtagatgatgtggaggtgcacacagctcagacgcaaccccgggaggagcagttcaacagcactttccgctcagtcagtgaacttcccatcatgcaccaggactggctcaatggcaaggagttcaaatgcagggtcaacagtgcagctttccctgcccccatcgagaaaaccatctccaaaaccaaaggcagaccgaaggctccacaggtgtacaccattccacctcccaaggagcagatggccaaggataaagtcagtctgacctgcatgataacagacttcttccctgaagacattactgtggagtggcagtggaatgggcagccagcggagaactacaagaacactcagcccatcatggacacagatggctcttacttcgtctacagcaagctcaatgtgcagaagagcaactgggaggcaggaaatactttcacctgctctgtgttacatgagggcctgcacaaccaccatactgagaagagcctctcccactctcctggtagaaagaggcgagagggcagaggaagtcttctaacatgcggtgacgtggaggagaatcccggccctatgaagttgcctgttaggctgttggtgctgatgttctggattcctgcttccagcagtgatatcaagatgacccagagccccagctccatgtatgccagcctgggggagcgggtgaccatcacctgcaaggcctcccaggacatcaaccgctacctgaactggttccagcagaagccaggcaagtcccccaagaccctcatctatcgggccaaccggctgctggatggagtgccctcccgcttctccggcagtggcagcggccaggattacagcctcaccatttcttccctggactatgaggacatgggcatctactactgcctgcagtatgatgagttccccctgacctttggagatggcaccaagctggagctgaagcgggctgatgctgcaccaactgtatccatcttcccaccatccagtgagcagttaacatctggaggtgcctcagtcgtgtgcttcttgaacaacttctaccccaaagacatcaatgtcaagtggaagattgatggcagtgaacgacaaaatggcgtcctgaacagttggactgatcaggacagcaaagacagcacctacagcatgagcagcaccctcacgttgaccaaggacgagtatgaacgacataacagctatacctgtgaggccactcacaagacatcaacttcacccattgtcaagagcttcaacaggaatgagtgttagtaactcgagcctgaggatgggtggcatccctgtgacccctccccagtgcctctcctggccctggaagttgccactccagtgcccaccagccttgtcctaataaaattaagttgcatcattttgtctgactaggtgtccttctataatattatggggtggaggggggtggtatggagcaaggggcaagttgggaagacaacctgtagggcctgcggggtctattgggaaccaagctggagtgcagtggcacaatcttggctcactgcaatctccgcctcctgggttcaagcgattctcctgcctcagcctcccgagttgttgggattccaggcatgcatgaccaggctcagctaatttttgtttttttggtagagacggggtttcaccatattggccaggctggtctccaactcctaatctcaggtgatctacccaccttggcctcccaaattgctgggattacaggcgtgaaccactgctcccttccctgtccttggcctaggtatcgatgctacgtagataagtagcatggcgggttaatcattaactacagaggaacccctagtgatggagttggccactccctctctgcgcgctcgctcgctcactgaggccgggcgaccaaaggtcgcccgacgcccgggctttgcccgggcggcctcagtgagcgagcgagcgcgcagctgcctgcagg

SEQ ID NO: 2024 - DNA, 4309 bp, Artificial Sequence
  Description of Artificial Sequence: Synthetic polynucleotide
cctgcaggcagctgcgcgctcgctcgctcactgaggccgcccgggcaaagcccgggcgtcgggcgacctttggtcgcccggcctcagtgagcgagcgagcgcgcagagagggagtggccaactccatcactaggggttccttgtagttaatgattaacccgccatgctacttatctacgtagccatgcgtcgacataacgcgtcgacattgattattgactagttattaatagtaatcaattacggggtcattagttcatagcccatatatggagttccgcgttacataacttacggtaaatggcccgcctggctgaccgcccaacgacccccgcccattgacgtcaataatgacgtatgttcccatagtaacgccaatagggactttccattgacgtcaatgggtggagtatttacggtaaactgcccacttggcagtacatcaagtgtatcatatgccaagtacgccccctattgacgtcaatgacggtaaatggcccgcctggcattatgcccagtacatgaccttatgggactttcctacttggcagtacatctacgtattagtcatcgctattaccatgtcgaggccacgttctgcttcactctccccatctcccccccctccccacccccaattttgtatttatttattttttaattattttgtgcagcgatgggggcggggggggggggcgcgcgccaggcggggcggggcggggcgaggggcggggcggggcgaggcggagaggtgcggcggcagccaatcagagcggcgcgctccgaaagtttccttttatggcgaggcggcggcggcggcggccctataaaaagcgaagcgcgcggcgggcgggagcaagcttcgtttagtgaaccgtcagatcgcctggagacgccatccacgctgttttgacctccatagaagacaccgggaccgatccagcctccgcggattcgaatcccggccgggaacggtgcattggaacgcggattccccgtgccaagagtgacgtaagtaccgcctatagagtctataggcccacaaaaaatgctttcttcttttaatatacttttttgtttatcttatttctaatactttccctaatctctttctttcagggcaataatgatacaatgtatcatgcctctttgcaccattctaaagaataacagtgataatttctgggttaaggcaatagcaatatttctgcatataaatatttctgcatataaattgtaactgatgtaagaggtttcatattgctaatagcagctacaatccagctaccattctgcttttattttatggttgggataaggctggattattctgagtccaagctaggcccttttgctaatcatgttcatacctcttatcttcctcccacagctcctgggcaacgtgctggtctgtgtgctggcccatcactttggcaaagaattgggattcgaaccggtgccgccaccatgaacttcgggctcagcttgattttccttgtccttgttttaaaaggtgtccagtgtgaggtgaagctggtggagagcggcggggacctggtcaagcccgggggcagcctgaagctcagctgtgccgcctccggcttcaccttcagcagctatgccatgtcctgggtccggcagaaccctgagaagaggctggagtgggtggccagcatcagcaagggcggcaacacctactatcccaacagcgtgaaaggccgcttcaccatctcccgggacaatgccaggaacatcctgtacctgcagatgagctccctgcgcagcgaggacacagccctctactactgcgcccggggctggggagactatggatggtttgcctactggggccaggtgaccctggttactgtgtctgccgccaaaacgacacccccatctgtctatccactggcccctggatctgctgcccaaactaactccatggtgaccctgggatgcctggtcaagggctatttccctgagccagtgacagtgacctggaactctggatccctgtccagcggtgtgcacaccttcccagctgtcctgcagtctgacctctacactctgagcagctcagtgactgtcccctccagcacctggcccagcgagaccgtcacctgcaacgttgcccacccggccagcagcaccaaggtggacaagaaaattgtgcccagggattgtggttgtaagccttgcatatgtacagtcccagaagtatcatctgtcttcatcttccccccaaagcccaaggatgtgctcaccattactctgactcctaaggtcacgtgtgttgtggtagacatcagcaaggatgatcccgaggtccagttcagctggtttgtagatgatgtggaggtgcacacagctcagacgcaaccccgggaggagcagttcaacagcactttccgctcagtcagtgaacttcccatcatgcaccaggactggctcaatggcaaggagttcaaatgcagggtcaacagtgcagctttccctgcccccatcgagaaaaccatctccaaaaccaaaggcagaccgaaggctccacaggtgtacaccattccacctcccaaggagcagatggccaaggataaagtcagtctgacctgcatgataacagacttcttccctgaagacattactgtggagtggcagtggaatgggcagccagcggagaactacaagaacactcagcccatcatggacacagatggctcttacttcgtctacagcaagctcaatgtgcagaagagcaactgggaggcaggaaatactttcacctgctctgtgttacatgagggcctgcacaaccaccatactgagaagagcctctcccactctcctggtagaaagaggcgagagggcagaggaagtcttctaacatgcggtgacgtggaggagaatcccggccctatgaagttgcctgttaggctgttggtgctgatgttctggattcctgcttccagcagtgatatcaagatgacccagagcccttcctccatgtatgcctccctgggggagcgggtgaccatcacctgcaaggccagccaggacatcaaccgctacctgaactggttccagcagaagcccggcaagagccccaagaccctcatctatcgggccaaccggctgctggatggagtgcccagccgcttctccggcagcggcagtggccaggattacagcctcaccatttccagcctggactatgaggacatgggcatctactactgcctgcagtatgatgagttccccctgacctttggagatggcaccaagctggagctgaagcgggctgatgctgcaccaactgtatccatcttcccaccatccagtgagcagttaacatctggaggtgcctcagtcgtgtgcttcttgaacaacttctaccccaaagacatcaatgtcaagtggaagattgatggcagtgaacgacaaaatggcgtcctgaacagttggactgatcaggacagcaaagacagcacctacagcatgagcagcaccctcacgttgaccaaggacgagtatgaacgacataacagctatacctgtgaggccactcacaagacatcaacttcacccattgtcaagagcttcaacaggaatgagtgttagtaactcgagcctgaggatgggtggcatccctgtgacccctccccagtgcctctcctggccctggaagttgccactccagtgcccaccagccttgtcctaataaaattaagttgcatcattttgtctgactaggtgtccttctataatattatggggtggaggggggtggtatggagcaaggggcaagttgggaagacaacctgtagggcctgcggggtctattgggaaccaagctggagtgcagtggcacaatcttggctcactgcaatctccgcctcctgggttcaagcgattctcctgcctcagcctcccgagttgttgggattccaggcatgcatgaccaggctcagctaatttttgtttttttggtagagacggggtttcaccatattggccaggctggtctccaactcctaatctcaggtgatctacccaccttggcctcccaaattgctgggattacaggcgtgaaccactgctcccttccctgtccttggcctaggtatcgatgctacgtagataagtagcatggcgggttaatcattaactacagaggaacccctagtgatggagttggccactccctctctgcgcgctcgctcgctcactgaggccgggcgaccaaaggtcgcccgacgcccgggctttgcccgggcggcctcagtgagcgagcgagcgcgcagctgcctgcagg

SEQ ID NO: 2025 - DNA, 4253 bp, Artificial Sequence
  Description of Artificial Sequence: Synthetic polynucleotide
cctgcaggcagctgcgcgctcgctcgctcactgaggccgcccgggcaaagcccgggcgtcgggcgacctttggtcgcccggcctcagtgagcgagcgagcgcgcagagagggagtggccaactccatcactaggggttccttgtagttaatgattaacccgccatgctacttatctacgtagccatgcgtcgacataacgcgtctagttattaatagtaatcaattacggggtcattagttcatagcccatatatggagttccgcgttacataacttacggtaaatggcccgcctggctgaccgcccaacgacccccgcccattgacgtcaataatgacgtatgttcccatagtaacgccaatagggactttccattgacgtcaatgggtggagtatttacggtaaactgcccacttggcagtacatcaagtgtatcatatgccaagtacgccccctattgacgtcaatgacggtaaatggcccgcctggcattatgcccagtacatgaccttatgggactttcctacttggcagtacatctacgtattagtcatcgctattaccatggtcgaggtgagccccacgttctgcttcactctccccatctcccccccctccccacccccaattttgtatttatttattttttaattattttgtgcagcgatgggggcggggggggggggggggcgcgcgccaggcggggcggggcggggcgaggggcggggcggggcgaggcggagaggtgcggcggcagccaatcagagcggcgcgctccgaaagtttccttttatggcgaggcggcggcggcggcggccctataaaaagcgaagcgcgcggcgggcgggagtcgctgcgcgctgccttcgccccgtgccccgctccgccgccgcctcgcgccgcccgccccggctctgactgaccgcgttactcccacaggtgagcgggcgggacggcccttctcctccgggctgtaattagcgcttggtttaatgacggcttgtttcttttctgtggctgcgtgaaagccttgaggggctccgggagggccctttgtgcggggggagcggctcggggggtgcgtgcgtgtgtgtgtgcgtggggagcgccgcgtgcggctccgcgctgcccggcggctgtgagcgctgcgggcgcggcgcggggctttgtgcgctccgcagtgtgcgcgaggggagcgcggccgggggcggtgccccgcggtgcggggggggctgcgaggggaacaaaggctgcgtgcggggtgtgtgcgtgggggggtgagcagggggtgtgggcgcgtcggtcgggctgcaaccccccctgcacccccctccccgagttgctgagcacggcccggcttcgggtgcggggctccgtacggggcgtggcgcggggctcgccgtgccgggcggggggtggcggcaggtgggggtgccgggcggggcggggccgcctcgggccggggagggctcgggggaggggcgcggcggcccccggagcgccggcggctgtcgaggcgcggcgagccgcagccattgccttttatggtaatcgtgcgagagggcgcagggacttcctttgtcccaaatctgtgcggagccgaaatctgggaggcgccgccgcaccccctctagcgggcgcggggcgaagcggtgcggcgccggcaggaaggaaatgggcggggagggccttcgtgcgtcgccgcgccgccgtccccttctccctctccagcctcggggctgtccgcggggggacggctgccttcgggggggacggggcagggcggggttcggcttctggcgtgtgaccggcggctctagagcctctgctaaccatgttcatgccttcttctttttcctacagctcctgggcaacgtgctggttattgtgctgtctcatcattttggcaaagaattcgggattcgaaccggtgccgccaccatgggatggagctggatctttctctttctcctgtcaggaactacaggtgtcctctctgaggtccagctgcaacagtctggacctgagctggtgaagcctggggcttcagtgaagatatcctgcaagacttctggatacacattcactgaatacaccatacactgggtgaagcagagccatggagagagccttgagtggattggaggtattaatccaaacgatggtggtactatttacaaccagaagttcaagggcaaggccacattgactgtagacaagtcctccaaaacagcctacatggagctccgcagcctgacatctgaggattctgcagtcttttactgtgcaagagggccctccgccaggtttccttactggggccaagggactctggtcactgtctctgcaggtggtggtggtagcggcggcggcggctctggtggtggtggatccgatgttgtgatgacccagactccactcactttgtcggttaccattggacaaccagcctccatctcttgcaagtcaagtcagagcctcttagatagtgatggaaagacatatttgaattggttgttacagaggccaggccagtctccaaagcgcctaatctatctggtgtctaaactggactctggagtccctgacagattcactggcagtggatcagggacagatttcacactgaaaattagcagagtggaggctgaggatttgggagtttattattgctggcaaggtacacattttcctcggacgttcggtggaggcaccaagctggaaatcaaacggtacccatacgatgttccagattacgcttagtgacctgaggatgatctttttccctctgccaaaaattatggggacatcatgaagccccttgagcatctgacttctggctaataaaggaaatttattttcattgcaatagtgtgttggaattttttgtgtctctcactcgcctaggtttcttgagacctctacaagagttggagttgacacttggggtactttcttggtgtaacgaactaatagcctgaaaaaaagaagtcatgtgttttcagcaaggcaagaaactgtctaacatagtagataaaacagagaacacttggccggaatcaactaagatgttgctatgttccattcatcatattatctccatctgcagagtagtgggttagtggagggtagaaaacattctcctgaacaactagttaaacttggctttgagttccacctgtaccacttgcataatcttgggaaagtgagttgcctaattcagtgacattaataaatttattaatttcttctttcaataaaacctggagagagcttcatatgtatcagcatatgctaaacttgaaagatacaagtagaaaatggaaggaaatatatctgactcaatagggatagttcaagggttaaattaaaagtagtaaagtattataattaatctgacatggtacctaatatataataatcatgtattaagaatgccagtcaccattaaaagtcaatgtatgactttaatctactcgaggaaagaaactatgtcttgttcactgttattatctctaaaatccataatcagaagagcaccatgtgtatgagccacacaataaatatctactgtataatatgtctcttcttgtttttaaccttcatagataagactctattgaattgggacattagtccagcaagccattctgtctctgtctcttctatggagggaaaggtttaaccatcaaagactaggtgcatctcccaaacaacctgaatttaatattcaaatatgtatctaaattcatttgttacatttttgtgttcagcttacatattactttttgagcgacatctattcaaggcctactacttgctgctctacaaaatattgccatgctctatttgcccattaactatttcttaaccttcaagggacatgctcagttctgatataccaagatttggtatttaccctcccagcctacatacttccaatcttaagagaacaatttttagactacattcaaatatagacctctccaccccatcaactattttatctctcctctcctatctttcttgacaaagagtgattagaaatatgcaattctaggtatcgatgctacgtagataagtagcatggcgggttaatcattaactacagaggaacccctagtgatggagttggccactccctctctgcgcgctcgctcgctcactgaggccgggcgaccaaaggtcgcccgacgcccgggctttgcccgggcggcctcagtgagcgagcgagcgcgcagctgcctgcagg

SEQ ID NO: 2026 - DNA, 4716 bp, Artificial Sequence
  Description of Artificial Sequence: Synthetic polynucleotide
cctgcaggcagctgcgcgctcgctcgctcactgaggccgcccgggcaaagcccgggcgtcgggcgacctttggtcgcccggcctcagtgagcgagcgagcgcgcagagagggagtggccaactccatcactaggggttccttgtagttaatgattaacccgccatgctacttatctacgtagccatgcgtcgacataacgcgtctagttattaatagtaatcaattacggggtcattagttcatagcccatatatggagttccgcgttacataacttacggtaaatggcccgcctggctgaccgcccaacgacccccgcccattgacgtcaataatgacgtatgttcccatagtaacgccaatagggactttccattgacgtcaatgggtggagtatttacggtaaactgcccacttggcagtacatcaagtgtatcatatgccaagtacgccccctattgacgtcaatgacggtaaatggcccgcctggcattatgcccagtacatgaccttatgggactttcctacttggcagtacatctacgtattagtcatcgctattaccatggtcgaggtgagccccacgttctgcttcactctccccatctcccccccctccccacccccaattttgtatttatttattttttaattattttgtgcagcgatgggggcggggggggggggggggcgcgcgccaggcggggcggggcggggcgaggggcggggcggggcgaggcggagaggtgcggcggcagccaatcagagcggcgcgctccgaaagtttccttttatggcgaggcggcggcggcggcggccctataaaaagcgaagcgcgcggcgggcgggagtcgctgcgcgctgccttcgccccgtgccccgctccgccgccgcctcgcgccgcccgccccggctctgactgaccgcgttactcccacaggtgagcgggcgggacggcccttctcctccgggctgtaattagcgcttggtttaatgacggcttgtttcttttctgtggctgcgtgaaagccttgaggggctccgggagggccctttgtgcggggggagcggctcggggggtgcgtgcgtgtgtgtgtgcgtggggagcgccgcgtgcggctccgcgctgcccggcggctgtgagcgctgcgggcgcggcgcggggctttgtgcgctccgcagtgtgcgcgaggggagcgcggccgggggcggtgccccgcggtgcggggggggctgcgaggggaacaaaggctgcgtgcggggtgtgtgcgtgggggggtgagcagggggtgtgggcgcgtcggtcgggctgcaaccccccctgcacccccctccccgagttgctgagcacggcccggcttcgggtgcggggctccgtacggggcgtggcgcggggctcgccgtgccgggcggggggtggcggcaggtgggggtgccgggcggggcggggccgcctcgggccggggagggctcgggggaggggcgcggcggcccccggagcgccggcggctgtcgaggcgcggcgagccgcagccattgccttttatggtaatcgtgcgagagggcgcagggacttcctttgtcccaaatctgtgcggagccgaaatctgggaggcgccgccgcaccccctctagcgggcgcggggcgaagcggtgcggcgccggcaggaaggaaatgggcggggagggccttcgtgcgtcgccgcgccgccgtccccttctccctctccagcctcggggctgtccgcggggggacggctgccttcgggggggacggggcagggcggggttcggcttctggcgtgtgaccggcggctctagagcctctgctaaccatgttcatgccttcttctttttcctacagctcctgggcaacgtgctggttattgtgctgtctcatcattttggcaaagaattcgggattcgaaccggtgccgccaccatggcgacgggttcaagaacttccctacttcttgcatttggcctgctttgtttgccgtggttacaggagggctcggcagctgccgaggtccagctgcaacagtctggacctgagctggtgaagcctggggcttcagtgaagatatcctgcaagacttctggatacacattcactgaatacaccatacactgggtgaagcagagccatggagagagccttgagtggattggaggtattaatccaaacgatggtggtactatttacaaccagaagttcaagggcaaggccacattgactgtagacaagtcctccaaaacagcctacatggagctccgcagcctgacatctgaggattctgcagtcttttactgtgcaagagggccctccgccaggtttccttactggggccaagggactctggtcactgtctctgcaggtggtggtggtagcggcggcggcggctctggtggtggtggatccgatgttgtgatgacccagactccactcactttgtcggttaccattggacaaccagcctccatctcttgcaagtcaagtcagagcctcttagatagtgatggaaagacatatttgaattggttgttacagaggccaggccagtctccaaagcgcctaatctatctggtgtctaaactggactctggagtccctgacagattcactggcagtggatcagggacagatttcacactgaaaattagcagagtggaggctgaggatttgggagtttattattgctggcaaggtacacattttcctcggacgttcggtggaggcaccaagctggaaatcaaacggagcgagaaggacgagctgtagtgacctgaggatgggtggcatccctgtgacccctccccagtgcctctcctggccctggaagttgccactccagtgcccaccagccttgtcctaataaaattaagttgcatcattttgtctgactaggtgtccttctataatattatggggtggaggggggtggtatggagcaaggggcaagttgggaagacaacctgtagggcctgcggggtctattgggaaccaagctggagtgcagtggcacaatcttggctcactgcaatctccgcctcctgggttcaagcgattctcctgcctcagcctcccgagttgttgggattccaggcatgcatgaccaggctcagctaatttttgtttttttggtagagacggggtttcaccatattggccaggctggtctccaactcctaatctcaggtgatctacccaccttggcctcccaaattgctgggattacaggcgtgaaccactgctcccttccctgtccttggcctagaattatatttttttaaagactcacatagtcttctgcacagggcattctttttgcttcaggatgtttacaacatttgctgcccacttttcctaggtttcttgagacctctacaagagttggagttgacacttggggtactttcttggtgtaacgaactaatagcctgaaaaaaagaagtcatgtgttttcagcaaggcaagaaactgtctaacatagtagataaaacagagaacacttggccggaatcaactaagatgttgctatgttccattcatcatattatctccatctgcagagtagtgggttagtggagggtagaaaacattctcctgaacaactagttaaacttggctttgagttccacctgtaccacttgcataatcttgggaaagtgagttgcctaattcagtgacattaataaatttattaatttcttctttcaataaaacctggagagagcttcatatgtatcagcatatgctaaacttgaaagatacaagtagaaaatggaaggaaatatatctgactcaatagggatagttcaagggttaaattaaaagtagtaaagtattataattaatctgacatggtacctaatatataataatcatgtattaagaatgccagtcaccattaaaagtcaatgtatgactttaatctactcgaggaaagaaactatgtcttgttcactgttattatctctaaaatccataatcagaagagcaccatgtgtatgagccacacaataaatatctactgtataatatgtctcttcttgtttttaaccttcatagataagactctattgaattgggacattagtccagcaagccattctgtctctgtctcttctatggagggaaaggtttaaccatcaaagactaggtgcatctcccaaacaacctgaatttaatattcaaatatgtatctaaattcatttgttacatttttgtgttcagcttacatattactttttgagcgacatctattcaaggcctactacttgctgctctacaaaatattgccatgctctatttgcccattaactatttcttaaccttcaagggacatgctcagttctgatataccaagatttggtatttaccctcccagcctacatacttccaatcttaagagaacaatttttagactacattcaaatatagacctctccaccccatcaactattttatctctcctctcctatctttcttgacaaagagtgattagaaatatgcaattctaggtatcgatgctacgtagataagtagcatggcgggttaatcattaactacagaggaacccctagtgatggagttggccactccctctctgcgcgctcgctcgctcactgaggccgggcgaccaaaggtcgcccgacgcccgggctttgcccgggcggcctcagtgagcgagcgagcgcgcagctgcctgcagg

SEQ ID NO: 2027 - DNA, 4716 bp, Artificial Sequence
  Description of Artificial Sequence: Synthetic polynucleotide
cctgcaggcagctgcgcgctcgctcgctcactgaggccgcccgggcaaagcccgggcgtcgggcgacctttggtcgcccggcctcagtgagcgagcgagcgcgcagagagggagtggccaactccatcactaggggttccttgtagttaatgattaacccgccatgctacttatctacgtagccatgcgtcgacataacgcgtctagttattaatagtaatcaattacggggtcattagttcatagcccatatatggagttccgcgttacataacttacggtaaatggcccgcctggctgaccgcccaacgacccccgcccattgacgtcaataatgacgtatgttcccatagtaacgccaatagggactttccattgacgtcaatgggtggagtatttacggtaaactgcccacttggcagtacatcaagtgtatcatatgccaagtacgccccctattgacgtcaatgacggtaaatggcccgcctggcattatgcccagtacatgaccttatgggactttcctacttggcagtacatctacgtattagtcatcgctattaccatggtcgaggtgagccccacgttctgcttcactctccccatctcccccccctccccacccccaattttgtatttatttattttttaattattttgtgcagcgatgggggcggggggggggggggggcgcgcgccaggcggggcggggcggggcgaggggcggggcggggcgaggcggagaggtgcggcggcagccaatcagagcggcgcgctccgaaagtttccttttatggcgaggcggcggcggcggcggccctataaaaagcgaagcgcgcggcgggcgggagtcgctgcgcgctgccttcgccccgtgccccgctccgccgccgcctcgcgccgcccgccccggctctgactgaccgcgttactcccacaggtgagcgggcgggacggcccttctcctccgggctgtaattagcgcttggtttaatgacggcttgtttcttttctgtggctgcgtgaaagccttgaggggctccgggagggccctttgtgcggggggagcggctcggggggtgcgtgcgtgtgtgtgtgcgtggggagcgccgcgtgcggctccgcgctgcccggcggctgtgagcgctgcgggcgcggcgcggggctttgtgcgctccgcagtgtgcgcgaggggagcgcggccgggggcggtgccccgcggtgcggggggggctgcgaggggaacaaaggctgcgtgcggggtgtgtgcgtgggggggtgagcagggggtgtgggcgcgtcggtcgggctgcaaccccccctgcacccccctccccgagttgctgagcacggcccggcttcgggtgcggggctccgtacggggcgtggcgcggggctcgccgtgccgggcggggggtggcggcaggtgggggtgccgggcggggcggggccgcctcgggccggggagggctcgggggaggggcgcggcggcccccggagcgccggcggctgtcgaggcgcggcgagccgcagccattgccttttatggtaatcgtgcgagagggcgcagggacttcctttgtcccaaatctgtgcggagccgaaatctgggaggcgccgccgcaccccctctagcgggcgcggggcgaagcggtgcggcgccggcaggaaggaaatgggcggggagggccttcgtgcgtcgccgcgccgccgtccccttctccctctccagcctcggggctgtccgcggggggacggctgccttcgggggggacggggcagggcggggttcggcttctggcgtgtgaccggcggctctagagcctctgctaaccatgttcatgccttcttctttttcctacagctcctgggcaacgtgctggttattgtgctgtctcatcattttggcaaagaattcgggattcgaaccggtgccgccaccatggcgacgggttcaagaacttccctacttcttgcatttggcctgctttgtttgccgtggttacaggagggctcggcagctgccgaggtccagctgcaacagtctggacctgagctggtgaagcctggggcttcagtgaagatatcctgcaagacttctggatacacattcactgaatacaccatacactgggtgaagcagagccatggagagagccttgagtggattggaggtattaatccaaacgatggtggtactatttacaaccagaagttcaagggcaaggccacattgactgtagacaagtcctccaaaacagcctacatggagctccgcagcctgacatctgaggattctgcagtcttttactgtgcaagagggccctccgccaggtttccttactggggccaagggactctggtcactgtctctgcaggtggtggtggtagcggcggcggcggctctggtggtggtggatccgatgttgtgatgacccagactccactcactttgtcggttaccattggacaaccagcctccatctcttgcaagtcaagtcagagcctcttagatagtgatggaaagacatatttgaattggttgttacagaggccaggccagtctccaaagcgcctaatctatctggtgtctaaactggactctggagtccctgacagattcactggcagtggatcagggacagatttcacactgaaaattagcagagtggaggctgaggatttgggagtttattattgctggcaaggtacacattttcctcggacgttcggtggaggcaccaagctggaaatcaaacggcatcaccatcaccatcactagtgacctgaggatgggtggcatccctgtgacccctccccagtgcctctcctggccctggaagttgccactccagtgcccaccagccttgtcctaataaaattaagttgcatcattttgtctgactaggtgtccttctataatattatggggtggaggggggtggtatggagcaaggggcaagttgggaagacaacctgtagggcctgcggggtctattgggaaccaagctggagtgcagtggcacaatcttggctcactgcaatctccgcctcctgggttcaagcgattctcctgcctcagcctcccgagttgttgggattccaggcatgcatgaccaggctcagctaatttttgtttttttggtagagacggggtttcaccatattggccaggctggtctccaactcctaatctcaggtgatctacccaccttggcctcccaaattgctgggattacaggcgtgaaccactgctcccttccctgtccttggcctagaattatatttttttaaagactcacatagtcttctgcacagggcattctttttgcttcaggatgtttacaacatttgctgcccacttttcctaggtttcttgagacctctacaagagttggagttgacacttggggtactttcttggtgtaacgaactaatagcctgaaaaaaagaagtcatgtgttttcagcaaggcaagaaactgtctaacatagtagataaaacagagaacacttggccggaatcaactaagatgttgctatgttccattcatcatattatctccatctgcagagtagtgggttagtggagggtagaaaacattctcctgaacaactagttaaacttggctttgagttccacctgtaccacttgcataatcttgggaaagtgagttgcctaattcagtgacattaataaatttattaatttcttctttcaataaaacctggagagagcttcatatgtatcagcatatgctaaacttgaaagatacaagtagaaaatggaaggaaatatatctgactcaatagggatagttcaagggttaaattaaaagtagtaaagtattataattaatctgacatggtacctaatatataataatcatgtattaagaatgccagtcaccattaaaagtcaatgtatgactttaatctactcgaggaaagaaactatgtcttgttcactgttattatctctaaaatccataatcagaagagcaccatgtgtatgagccacacaataaatatctactgtataatatgtctcttcttgtttttaaccttcatagataagactctattgaattgggacattagtccagcaagccattctgtctctgtctcttctatggagggaaaggtttaaccatcaaagactaggtgcatctcccaaacaacctgaatttaatattcaaatatgtatctaaattcatttgttacatttttgtgttcagcttacatattactttttgagcgacatctattcaaggcctactacttgctgctctacaaaatattgccatgctctatttgcccattaactatttcttaaccttcaagggacatgctcagttctgatataccaagatttggtatttaccctcccagcctacatacttccaatcttaagagaacaatttttagactacattcaaatatagacctctccaccccatcaactattttatctctcctctcctatctttcttgacaaagagtgattagaaatatgcaattctaggtatcgatgctacgtagataagtagcatggcgggttaatcattaactacagaggaacccctagtgatggagttggccactccctctctgcgcgctcgctcgctcactgaggccgggcgaccaaaggtcgcccgacgcccgggctttgcccgggcggcctcagtgagcgagcgagcgcgcagctgcctgcagg

SEQ ID NO: 2028 - DNA, 4698 bp, Artificial Sequence
  Description of Artificial Sequence: Synthetic polynucleotide
cctgcaggcagctgcgcgctcgctcgctcactgaggccgcccgggcaaagcccgggcgtcgggcgacctttggtcgcccggcctcagtgagcgagcgagcgcgcagagagggagtggccaactccatcactaggggttccttgtagttaatgattaacccgccatgctacttatctacgtagccatgcgtcgacataacgcgtctagttattaatagtaatcaattacggggtcattagttcatagcccatatatggagttccgcgttacataacttacggtaaatggcccgcctggctgaccgcccaacgacccccgcccattgacgtcaataatgacgtatgttcccatagtaacgccaatagggactttccattgacgtcaatgggtggagtatttacggtaaactgcccacttggcagtacatcaagtgtatcatatgccaagtacgccccctattgacgtcaatgacggtaaatggcccgcctggcattatgcccagtacatgaccttatgggactttcctacttggcagtacatctacgtattagtcatcgctattaccatggtcgaggtgagccccacgttctgcttcactctccccatctcccccccctccccacccccaattttgtatttatttattttttaattattttgtgcagcgatgggggcggggggggggggggggcgcgcgccaggcggggcggggcggggcgaggggcggggcggggcgaggcggagaggtgcggcggcagccaatcagagcggcgcgctccgaaagtttccttttatggcgaggcggcggcggcggcggccctataaaaagcgaagcgcgcggcgggcgggagtcgctgcgcgctgccttcgccccgtgccccgctccgccgccgcctcgcgccgcccgccccggctctgactgaccgcgttactcccacaggtgagcgggcgggacggcccttctcctccgggctgtaattagcgcttggtttaatgacggcttgtttcttttctgtggctgcgtgaaagccttgaggggctccgggagggccctttgtgcggggggagcggctcggggggtgcgtgcgtgtgtgtgtgcgtggggagcgccgcgtgcggctccgcgctgcccggcggctgtgagcgctgcgggcgcggcgcggggctttgtgcgctccgcagtgtgcgcgaggggagcgcggccgggggcggtgccccgcggtgcggggggggctgcgaggggaacaaaggctgcgtgcggggtgtgtgcgtgggggggtgagcagggggtgtgggcgcgtcggtcgggctgcaaccccccctgcacccccctccccgagttgctgagcacggcccggcttcgggtgcggggctccgtacggggcgtggcgcggggctcgccgtgccgggcggggggtggcggcaggtgggggtgccgggcggggcggggccgcctcgggccggggagggctcgggggaggggcgcggcggcccccggagcgccggcggctgtcgaggcgcggcgagccgcagccattgccttttatggtaatcgtgcgagagggcgcagggacttcctttgtcccaaatctgtgcggagccgaaatctgggaggcgccgccgcaccccctctagcgggcgcggggcgaagcggtgcggcgccggcaggaaggaaatgggcggggagggccttcgtgcgtcgccgcgccgccgtccccttctccctctccagcctcggggctgtccgcggggggacggctgccttcgggggggacggggcagggcggggttcggcttctggcgtgtgaccggcggctctagagcctctgctaaccatgttcatgccttcttctttttcctacagctcctgggcaacgtgctggttattgtgctgtctcatcattttggcaaagaattcgggattcgaaccggtgccgccaccatgggatggagctggatctttctctttctcctgtcaggaactacaggtgtcctctctgaggtccagctgcaacagtctggacctgagctggtgaagcctggggcttcagtgaagatatcctgcaagacttctggatacacattcactgaatacaccatacactgggtgaagcagagccatggagagagccttgagtggattggaggtattaatccaaacgatggtggtactatttacaaccagaagttcaagggcaaggccacattgactgtagacaagtcctccaaaacagcctacatggagctccgcagcctgacatctgaggattctgcagtcttttactgtgcaagagggccctccgccaggtttccttactggggccaagggactctggtcactgtctctgcaggtggtggtggtagcggcggcggcggctctggtggtggtggatccgatgttgtgatgacccagactccactcactttgtcggttaccattggacaaccagcctccatctcttgcaagtcaagtcagagcctcttagatagtgatggaaagacatatttgaattggttgttacagaggccaggccagtctccaaagcgcctaatctatctggtgtctaaactggactctggagtccctgacagattcactggcagtggatcagggacagatttcacactgaaaattagcagagtggaggctgaggatttgggagtttattattgctggcaaggtacacattttcctcggacgttcggtggaggcaccaagctggaaatcaaacggtacccatacgatgttccagattacgcttagtgacctgaggatgggtggcatccctgtgacccctccccagtgcctctcctggccctggaagttgccactccagtgcccaccagccttgtcctaataaaattaagttgcatcattttgtctgactaggtgtccttctataatattatggggtggaggggggtggtatggagcaaggggcaagttgggaagacaacctgtagggcctgcggggtctattgggaaccaagctggagtgcagtggcacaatcttggctcactgcaatctccgcctcctgggttcaagcgattctcctgcctcagcctcccgagttgttgggattccaggcatgcatgaccaggctcagctaatttttgtttttttggtagagacggggtttcaccatattggccaggctggtctccaactcctaatctcaggtgatctacccaccttggcctcccaaattgctgggattacaggcgtgaaccactgctcccttccctgtccttggcctagaattatatttttttaaagactcacatagtcttctgcacagggcattctttttgcttcaggatgtttacaacatttgctgcccacttttcctaggtttcttgagacctctacaagagttggagttgacacttggggtactttcttggtgtaacgaactaatagcctgaaaaaaagaagtcatgtgttttcagcaaggcaagaaactgtctaacatagtagataaaacagagaacacttggccggaatcaactaagatgttgctatgttccattcatcatattatctccatctgcagagtagtgggttagtggagggtagaaaacattctcctgaacaactagttaaacttggctttgagttccacctgtaccacttgcataatcttgggaaagtgagttgcctaattcagtgacattaataaatttattaatttcttctttcaataaaacctggagagagcttcatatgtatcagcatatgctaaacttgaaagatacaagtagaaaatggaaggaaatatatctgactcaatagggatagttcaagggttaaattaaaagtagtaaagtattataattaatctgacatggtacctaatatataataatcatgtattaagaatgccagtcaccattaaaagtcaatgtatgactttaatctactcgaggaaagaaactatgtcttgttcactgttattatctctaaaatccataatcagaagagcaccatgtgtatgagccacacaataaatatctactgtataatatgtctcttcttgtttttaaccttcatagataagactctattgaattgggacattagtccagcaagccattctgtctctgtctcttctatggagggaaaggtttaaccatcaaagactaggtgcatctcccaaacaacctgaatttaatattcaaatatgtatctaaattcatttgttacatttttgtgttcagcttacatattactttttgagcgacatctattcaaggcctactacttgctgctctacaaaatattgccatgctctatttgcccattaactatttcttaaccttcaagggacatgctcagttctgatataccaagatttggtatttaccctcccagcctacatacttccaatcttaagagaacaatttttagactacattcaaatatagacctctccaccccatcaactattttatctctcctctcctatctttcttgacaaagagtgattagaaatatgcaattctaggtatcgatgctacgtagataagtagcatggcgggttaatcattaactacagaggaacccctagtgatggagttggccactccctctctgcgcgctcgctcgctcactgaggccgggcgaccaaaggtcgcccgacgcccgggctttgcccgggcggcctcagtgagcgagcgagcgcgcagctgcctgcagg

SEQ ID NO: 2029 - DNA, 4689 bp, Artificial Sequence
  Description of Artificial Sequence: Synthetic polynucleotide
cctgcaggcagctgcgcgctcgctcgctcactgaggccgcccgggcaaagcccgggcgtcgggcgacctttggtcgcccggcctcagtgagcgagcgagcgcgcagagagggagtggccaactccatcactaggggttccttgtagttaatgattaacccgccatgctacttatctacgtagccatgcgtcgacataacgcgtctagttattaatagtaatcaattacggggtcattagttcatagcccatatatggagttccgcgttacataacttacggtaaatggcccgcctggctgaccgcccaacgacccccgcccattgacgtcaataatgacgtatgttcccatagtaacgccaatagggactttccattgacgtcaatgggtggagtatttacggtaaactgcccacttggcagtacatcaagtgtatcatatgccaagtacgccccctattgacgtcaatgacggtaaatggcccgcctggcattatgcccagtacatgaccttatgggactttcctacttggcagtacatctacgtattagtcatcgctattaccatggtcgaggtgagccccacgttctgcttcactctccccatctcccccccctccccacccccaattttgtatttatttattttttaattattttgtgcagcgatgggggcggggggggggggggggcgcgcgccaggcggggcggggcggggcgaggggcggggcggggcgaggcggagaggtgcggcggcagccaatcagagcggcgcgctccgaaagtttccttttatggcgaggcggcggcggcggcggccctataaaaagcgaagcgcgcggcgggcgggagtcgctgcgcgctgccttcgccccgtgccccgctccgccgccgcctcgcgccgcccgccccggctctgactgaccgcgttactcccacaggtgagcgggcgggacggcccttctcctccgggctgtaattagcgcttggtttaatgacggcttgtttcttttctgtggctgcgtgaaagccttgaggggctccgggagggccctttgtgcggggggagcggctcggggggtgcgtgcgtgtgtgtgtgcgtggggagcgccgcgtgcggctccgcgctgcccggcggctgtgagcgctgcgggcgcggcgcggggctttgtgcgctccgcagtgtgcgcgaggggagcgcggccgggggcggtgccccgcggtgcggggggggctgcgaggggaacaaaggctgcgtgcggggtgtgtgcgtgggggggtgagcagggggtgtgggcgcgtcggtcgggctgcaaccccccctgcacccccctccccgagttgctgagcacggcccggcttcgggtgcggggctccgtacggggcgtggcgcggggctcgccgtgccgggcggggggtggcggcaggtgggggtgccgggcggggcggggccgcctcgggccggggagggctcgggggaggggcgcggcggcccccggagcgccggcggctgtcgaggcgcggcgagccgcagccattgccttttatggtaatcgtgcgagagggcgcagggacttcctttgtcccaaatctgtgcggagccgaaatctgggaggcgccgccgcaccccctctagcgggcgcggggcgaagcggtgcggcgccggcaggaaggaaatgggcggggagggccttcgtgcgtcgccgcgccgccgtccccttctccctctccagcctcggggctgtccgcggggggacggctgccttcgggggggacggggcagggcggggttcggcttctggcgtgtgaccggcggctctagagcctctgctaaccatgttcatgccttcttctttttcctacagctcctgggcaacgtgctggttattgtgctgtctcatcattttggcaaagaattcgggattcgaaccggtgccgccaccatgggatggagctggatctttctctttctcctgtcaggaactacaggtgtcctctctgaggtccagctgcaacagtctggacctgagctggtgaagcctggggcttcagtgaagatatcctgcaagacttctggatacacattcactgaatacaccatacactgggtgaagcagagccatggagagagccttgagtggattggaggtattaatccaaacgatggtggtactatttacaaccagaagttcaagggcaaggccacattgactgtagacaagtcctccaaaacagcctacatggagctccgcagcctgacatctgaggattctgcagtcttttactgtgcaagagggccctccgccaggtttccttactggggccaagggactctggtcactgtctctgcaggtggtggtggtagcggcggcggcggctctggtggtggtggatccgatgttgtgatgacccagactccactcactttgtcggttaccattggacaaccagcctccatctcttgcaagtcaagtcagagcctcttagatagtgatggaaagacatatttgaattggttgttacagaggccaggccagtctccaaagcgcctaatctatctggtgtctaaactggactctggagtccctgacagattcactggcagtggatcagggacagatttcacactgaaaattagcagagtggaggctgaggatttgggagtttattattgctggcaaggtacacattttcctcggacgttcggtggaggcaccaagctggaaatcaaacggcatcaccatcaccatcactagtgacctgaggatgggtggcatccctgtgacccctccccagtgcctctcctggccctggaagttgccactccagtgcccaccagccttgtcctaataaaattaagttgcatcattttgtctgactaggtgtccttctataatattatggggtggaggggggtggtatggagcaaggggcaagttgggaagacaacctgtagggcctgcggggtctattgggaaccaagctggagtgcagtggcacaatcttggctcactgcaatctccgcctcctgggttcaagcgattctcctgcctcagcctcccgagttgttgggattccaggcatgcatgaccaggctcagctaatttttgtttttttggtagagacggggtttcaccatattggccaggctggtctccaactcctaatctcaggtgatctacccaccttggcctcccaaattgctgggattacaggcgtgaaccactgctcccttccctgtccttggcctagaattatatttttttaaagactcacatagtcttctgcacagggcattctttttgcttcaggatgtttacaacatttgctgcccacttttcctaggtttcttgagacctctacaagagttggagttgacacttggggtactttcttggtgtaacgaactaatagcctgaaaaaaagaagtcatgtgttttcagcaaggcaagaaactgtctaacatagtagataaaacagagaacacttggccggaatcaactaagatgttgctatgttccattcatcatattatctccatctgcagagtagtgggttagtggagggtagaaaacattctcctgaacaactagttaaacttggctttgagttccacctgtaccacttgcataatcttgggaaagtgagttgcctaattcagtgacattaataaatttattaatttcttctttcaataaaacctggagagagcttcatatgtatcagcatatgctaaacttgaaagatacaagtagaaaatggaaggaaatatatctgactcaatagggatagttcaagggttaaattaaaagtagtaaagtattataattaatctgacatggtacctaatatataataatcatgtattaagaatgccagtcaccattaaaagtcaatgtatgactttaatctactcgaggaaagaaactatgtcttgttcactgttattatctctaaaatccataatcagaagagcaccatgtgtatgagccacacaataaatatctactgtataatatgtctcttcttgtttttaaccttcatagataagactctattgaattgggacattagtccagcaagccattctgtctctgtctcttctatggagggaaaggtttaaccatcaaagactaggtgcatctcccaaacaacctgaatttaatattcaaatatgtatctaaattcatttgttacatttttgtgttcagcttacatattactttttgagcgacatctattcaaggcctactacttgctgctctacaaaatattgccatgctctatttgcccattaactatttcttaaccttcaagggacatgctcagttctgatataccaagatttggtatttaccctcccagcctacatacttccaatcttaagagaacaatttttagactacattcaaatatagacctctccaccccatcaactattttatctctcctctcctatctttcttgacaaagagtgattagaaatatgcaattctaggtatcgatgctacgtagataagtagcatggcgggttaatcattaactacagaggaacccctagtgatggagttggccactccctctctgcgcgctcgctcgctcactgaggccgggcgaccaaaggtcgcccgacgcccgggctttgcccgggcggcctcagtgagcgagcgagcgcgcagctgcctgcagg

SEQ ID NO: 2030 - DNA, 4716 bp, Artificial Sequence
  Description of Artificial Sequence: Synthetic polynucleotide
cctgcaggcagctgcgcgctcgctcgctcactgaggccgcccgggcaaagcccgggcgtcgggcgacctttggtcgcccggcctcagtgagcgagcgagcgcgcagagagggagtggccaactccatcactaggggttccttgtagttaatgattaacccgccatgctacttatctacgtagccatgcgtcgacataacgcgtctagttattaatagtaatcaattacggggtcattagttcatagcccatatatggagttccgcgttacataacttacggtaaatggcccgcctggctgaccgcccaacgacccccgcccattgacgtcaataatgacgtatgttcccatagtaacgccaatagggactttccattgacgtcaatgggtggagtatttacggtaaactgcccacttggcagtacatcaagtgtatcatatgccaagtacgccccctattgacgtcaatgacggtaaatggcccgcctggcattatgcccagtacatgaccttatgggactttcctacttggcagtacatctacgtattagtcatcgctattaccatggtcgaggtgagccccacgttctgcttcactctccccatctcccccccctccccacccccaattttgtatttatttattttttaattattttgtgcagcgatgggggcggggggggggggggggcgcgcgccaggcggggcggggcggggcgaggggcggggcggggcgaggcggagaggtgcggcggcagccaatcagagcggcgcgctccgaaagtttccttttatggcgaggcggcggcggcggcggccctataaaaagcgaagcgcgcggcgggcgggagtcgctgcgcgctgccttcgccccgtgccccgctccgccgccgcctcgcgccgcccgccccggctctgactgaccgcgttactcccacaggtgagcgggcgggacggcccttctcctccgggctgtaattagcgcttggtttaatgacggcttgtttcttttctgtggctgcgtgaaagccttgaggggctccgggagggccctttgtgcggggggagcggctcggggggtgcgtgcgtgtgtgtgtgcgtggggagcgccgcgtgcggctccgcgctgcccggcggctgtgagcgctgcgggcgcggcgcggggctttgtgcgctccgcagtgtgcgcgaggggagcgcggccgggggcggtgccccgcggtgcggggggggctgcgaggggaacaaaggctgcgtgcggggtgtgtgcgtgggggggtgagcagggggtgtgggcgcgtcggtcgggctgcaaccccccctgcacccccctccccgagttgctgagcacggcccggcttcgggtgcggggctccgtacggggcgtggcgcggggctcgccgtgccgggcggggggtggcggcaggtgggggtgccgggcggggcggggccgcctcgggccggggagggctcgggggaggggcgcggcggcccccggagcgccggcggctgtcgaggcgcggcgagccgcagccattgccttttatggtaatcgtgcgagagggcgcagggacttcctttgtcccaaatctgtgcggagccgaaatctgggaggcgccgccgcaccccctctagcgggcgcggggcgaagcggtgcggcgccggcaggaaggaaatgggcggggagggccttcgtgcgtcgccgcgccgccgtccccttctccctctccagcctcggggctgtccgcggggggacggctgccttcgggggggacggggcagggcggggttcggcttctggcgtgtgaccggcggctctagagcctctgctaaccatgttcatgccttcttctttttcctacagctcctgggcaacgtgctggttattgtgctgtctcatcattttggcaaagaattcgggattcgaaccggtgccgccaccatggcgacgggttcaagaacttccctacttcttgcatttggcctgctttgtttgccgtggttacaggagggctcggcagctgccgatgttgtgatgacccagactccactcactttgtcggttaccattggacaaccagcctccatctcttgcaagtcaagtcagagcctcttagatagtgatggaaagacatatttgaattggttgttacagaggccaggccagtctccaaagcgcctaatctatctggtgtctaaactggactctggagtccctgacagattcactggcagtggatcagggacagatttcacactgaaaattagcagagtggaggctgaggatttgggagtttattattgctggcaaggtacacattttcctcggacgttcggtggaggcaccaagctggaaatcaaacggggtggtggtggtagcggcggcggcggctctggtggtggtggatccgaggtccagctgcaacagtctggacctgagctggtgaagcctggggcttcagtgaagatatcctgcaagacttctggatacacattcactgaatacaccatacactgggtgaagcagagccatggagagagccttgagtggattggaggtattaatccaaacgatggtggtactatttacaaccagaagttcaagggcaaggccacattgactgtagacaagtcctccaaaacagcctacatggagctccgcagcctgacatctgaggattctgcagtcttttactgtgcaagagggccctccgccaggtttccttactggggccaagggactctggtcactgtctctgcaagcgagaaggacgagctgtagtgacctgaggatgggtggcatccctgtgacccctccccagtgcctctcctggccctggaagttgccactccagtgcccaccagccttgtcctaataaaattaagttgcatcattttgtctgactaggtgtccttctataatattatggggtggaggggggtggtatggagcaaggggcaagttgggaagacaacctgtagggcctgcggggtctattgggaaccaagctggagtgcagtggcacaatcttggctcactgcaatctccgcctcctgggttcaagcgattctcctgcctcagcctcccgagttgttgggattccaggcatgcatgaccaggctcagctaatttttgtttttttggtagagacggggtttcaccatattggccaggctggtctccaactcctaatctcaggtgatctacccaccttggcctcccaaattgctgggattacaggcgtgaaccactgctcccttccctgtccttggcctagaattatatttttttaaagactcacatagtcttctgcacagggcattctttttgcttcaggatgtttacaacatttgctgcccacttttcctaggtttcttgagacctctacaagagttggagttgacacttggggtactttcttggtgtaacgaactaatagcctgaaaaaaagaagtcatgtgttttcagcaaggcaagaaactgtctaacatagtagataaaacagagaacacttggccggaatcaactaagatgttgctatgttccattcatcatattatctccatctgcagagtagtgggttagtggagggtagaaaacattctcctgaacaactagttaaacttggctttgagttccacctgtaccacttgcataatcttgggaaagtgagttgcctaattcagtgacattaataaatttattaatttcttctttcaataaaacctggagagagcttcatatgtatcagcatatgctaaacttgaaagatacaagtagaaaatggaaggaaatatatctgactcaatagggatagttcaagggttaaattaaaagtagtaaagtattataattaatctgacatggtacctaatatataataatcatgtattaagaatgccagtcaccattaaaagtcaatgtatgactttaatctactcgaggaaagaaactatgtcttgttcactgttattatctctaaaatccataatcagaagagcaccatgtgtatgagccacacaataaatatctactgtataatatgtctcttcttgtttttaaccttcatagataagactctattgaattgggacattagtccagcaagccattctgtctctgtctcttctatggagggaaaggtttaaccatcaaagactaggtgcatctcccaaacaacctgaatttaatattcaaatatgtatctaaattcatttgttacatttttgtgttcagcttacatattactttttgagcgacatctattcaaggcctactacttgctgctctacaaaatattgccatgctctatttgcccattaactatttcttaaccttcaagggacatgctcagttctgatataccaagatttggtatttaccctcccagcctacatacttccaatcttaagagaacaatttttagactacattcaaatatagacctctccaccccatcaactattttatctctcctctcctatctttcttgacaaagagtgattagaaatatgcaattctaggtatcgatgctacgtagataagtagcatggcgggttaatcattaactacagaggaacccctagtgatggagttggccactccctctctgcgcgctcgctcgctcactgaggccgggcgaccaaaggtcgcccgacgcccgggctttgcccgggcggcctcagtgagcgagcgagcgcgcagctgcctgcagg

SEQ ID NO: 2031 - DNA, 4716 bp, Artificial Sequence
  Description of Artificial Sequence: Synthetic polynucleotide
cctgcaggcagctgcgcgctcgctcgctcactgaggccgcccgggcaaagcccgggcgtcgggcgacctttggtcgcccggcctcagtgagcgagcgagcgcgcagagagggagtggccaactccatcactaggggttccttgtagttaatgattaacccgccatgctacttatctacgtagccatgcgtcgacataacgcgtctagttattaatagtaatcaattacggggtcattagttcatagcccatatatggagttccgcgttacataacttacggtaaatggcccgcctggctgaccgcccaacgacccccgcccattgacgtcaataatgacgtatgttcccatagtaacgccaatagggactttccattgacgtcaatgggtggagtatttacggtaaactgcccacttggcagtacatcaagtgtatcatatgccaagtacgccccctattgacgtcaatgacggtaaatggcccgcctggcattatgcccagtacatgaccttatgggactttcctacttggcagtacatctacgtattagtcatcgctattaccatggtcgaggtgagccccacgttctgcttcactctccccatctcccccccctccccacccccaattttgtatttatttattttttaattattttgtgcagcgatgggggcggggggggggggggggcgcgcgccaggcggggcggggcggggcgaggggcggggcggggcgaggcggagaggtgcggcggcagccaatcagagcggcgcgctccgaaagtttccttttatggcgaggcggcggcggcggcggccctataaaaagcgaagcgcgcggcgggcgggagtcgctgcgcgctgccttcgccccgtgccccgctccgccgccgcctcgcgccgcccgccccggctctgactgaccgcgttactcccacaggtgagcgggcgggacggcccttctcctccgggctgtaattagcgcttggtttaatgacggcttgtttcttttctgtggctgcgtgaaagccttgaggggctccgggagggccctttgtgcggggggagcggctcggggggtgcgtgcgtgtgtgtgtgcgtggggagcgccgcgtgcggctccgcgctgcccggcggctgtgagcgctgcgggcgcggcgcggggctttgtgcgctccgcagtgtgcgcgaggggagcgcggccgggggcggtgccccgcggtgcggggggggctgcgaggggaacaaaggctgcgtgcggggtgtgtgcgtgggggggtgagcagggggtgtgggcgcgtcggtcgggctgcaaccccccctgcacccccctccccgagttgctgagcacggcccggcttcgggtgcggggctccgtacggggcgtggcgcggggctcgccgtgccgggcggggggtggcggcaggtgggggtgccgggcggggcggggccgcctcgggccggggagggctcgggggaggggcgcggcggcccccggagcgccggcggctgtcgaggcgcggcgagccgcagccattgccttttatggtaatcgtgcgagagggcgcagggacttcctttgtcccaaatctgtgcggagccgaaatctgggaggcgccgccgcaccccctctagcgggcgcggggcgaagcggtgcggcgccggcaggaaggaaatgggcggggagggccttcgtgcgtcgccgcgccgccgtccccttctccctctccagcctcggggctgtccgcggggggacggctgccttcgggggggacggggcagggcggggttcggcttctggcgtgtgaccggcggctctagagcctctgctaaccatgttcatgccttcttctttttcctacagctcctgggcaacgtgctggttattgtgctgtctcatcattttggcaaagaattcgggattcgaaccggtgccgccaccatggcgacgggttcaagaacttccctacttcttgcatttggcctgctttgtttgccgtggttacaggagggctcggcagctgccgatgttgtgatgacccagactccactcactttgtcggttaccattggacaaccagcctccatctcttgcaagtcaagtcagagcctcttagatagtgatggaaagacatatttgaattggttgttacagaggccaggccagtctccaaagcgcctaatctatctggtgtctaaactggactctggagtccctgacagattcactggcagtggatcagggacagatttcacactgaaaattagcagagtggaggctgaggatttgggagtttattattgctggcaaggtacacattttcctcggacgttcggtggaggcaccaagctggaaatcaaacggggtggtggtggtagcggcggcggcggctctggtggtggtggatccgaggtccagctgcaacagtctggacctgagctggtgaagcctggggcttcagtgaagatatcctgcaagacttctggatacacattcactgaatacaccatacactgggtgaagcagagccatggagagagccttgagtggattggaggtattaatccaaacgatggtggtactatttacaaccagaagttcaagggcaaggccacattgactgtagacaagtcctccaaaacagcctacatggagctccgcagcctgacatctgaggattctgcagtcttttactgtgcaagagggccctccgccaggtttccttactggggccaagggactctggtcactgtctctgcacatcaccatcaccatcactagtgacctgaggatgggtggcatccctgtgacccctccccagtgcctctcctggccctggaagttgccactccagtgcccaccagccttgtcctaataaaattaagttgcatcattttgtctgactaggtgtccttctataatattatggggtggaggggggtggtatggagcaaggggcaagttgggaagacaacctgtagggcctgcggggtctattgggaaccaagctggagtgcagtggcacaatcttggctcactgcaatctccgcctcctgggttcaagcgattctcctgcctcagcctcccgagttgttgggattccaggcatgcatgaccaggctcagctaatttttgtttttttggtagagacggggtttcaccatattggccaggctggtctccaactcctaatctcaggtgatctacccaccttggcctcccaaattgctgggattacaggcgtgaaccactgctcccttccctgtccttggcctagaattatatttttttaaagactcacatagtcttctgcacagggcattctttttgcttcaggatgtttacaacatttgctgcccacttttcctaggtttcttgagacctctacaagagttggagttgacacttggggtactttcttggtgtaacgaactaatagcctgaaaaaaagaagtcatgtgttttcagcaaggcaagaaactgtctaacatagtagataaaacagagaacacttggccggaatcaactaagatgttgctatgttccattcatcatattatctccatctgcagagtagtgggttagtggagggtagaaaacattctcctgaacaactagttaaacttggctttgagttccacctgtaccacttgcataatcttgggaaagtgagttgcctaattcagtgacattaataaatttattaatttcttctttcaataaaacctggagagagcttcatatgtatcagcatatgctaaacttgaaagatacaagtagaaaatggaaggaaatatatctgactcaatagggatagttcaagggttaaattaaaagtagtaaagtattataattaatctgacatggtacctaatatataataatcatgtattaagaatgccagtcaccattaaaagtcaatgtatgactttaatctactcgaggaaagaaactatgtcttgttcactgttattatctctaaaatccataatcagaagagcaccatgtgtatgagccacacaataaatatctactgtataatatgtctcttcttgtttttaaccttcatagataagactctattgaattgggacattagtccagcaagccattctgtctctgtctcttctatggagggaaaggtttaaccatcaaagactaggtgcatctcccaaacaacctgaatttaatattcaaatatgtatctaaattcatttgttacatttttgtgttcagcttacatattactttttgagcgacatctattcaaggcctactacttgctgctctacaaaatattgccatgctctatttgcccattaactatttcttaaccttcaagggacatgctcagttctgatataccaagatttggtatttaccctcccagcctacatacttccaatcttaagagaacaatttttagactacattcaaatatagacctctccaccccatcaactattttatctctcctctcctatctttcttgacaaagagtgattagaaatatgcaattctaggtatcgatgctacgtagataagtagcatggcgggttaatcattaactacagaggaacccctagtgatggagttggccactccctctctgcgcgctcgctcgctcactgaggccgggcgaccaaaggtcgcccgacgcccgggctttgcccgggcggcctcagtgagcgagcgagcgcgcagctgcctgcagg

SEQ ID NO: 2032 - DNA, 4698 bp, Artificial Sequence
  Description of Artificial Sequence: Synthetic polynucleotide
cctgcaggcagctgcgcgctcgctcgctcactgaggccgcccgggcaaagcccgggcgtcgggcgacctttggtcgcccggcctcagtgagcgagcgagcgcgcagagagggagtggccaactccatcactaggggttccttgtagttaatgattaacccgccatgctacttatctacgtagccatgcgtcgacataacgcgtctagttattaatagtaatcaattacggggtcattagttcatagcccatatatggagttccgcgttacataacttacggtaaatggcccgcctggctgaccgcccaacgacccccgcccattgacgtcaataatgacgtatgttcccatagtaacgccaatagggactttccattgacgtcaatgggtggagtatttacggtaaactgcccacttggcagtacatcaagtgtatcatatgccaagtacgccccctattgacgtcaatgacggtaaatggcccgcctggcattatgcccagtacatgaccttatgggactttcctacttggcagtacatctacgtattagtcatcgctattaccatggtcgaggtgagccccacgttctgcttcactctccccatctcccccccctccccacccccaattttgtatttatttattttttaattattttgtgcagcgatgggggcggggggggggggggggcgcgcgccaggcggggcggggcggggcgaggggcggggcggggcgaggcggagaggtgcggcggcagccaatcagagcggcgcgctccgaaagtttccttttatggcgaggcggcggcggcggcggccctataaaaagcgaagcgcgcggcgggcgggagtcgctgcgcgctgccttcgccccgtgccccgctccgccgccgcctcgcgccgcccgccccggctctgactgaccgcgttactcccacaggtgagcgggcgggacggcccttctcctccgggctgtaattagcgcttggtttaatgacggcttgtttcttttctgtggctgcgtgaaagccttgaggggctccgggagggccctttgtgcggggggagcggctcggggggtgcgtgcgtgtgtgtgtgcgtggggagcgccgcgtgcggctccgcgctgcccggcggctgtgagcgctgcgggcgcggcgcggggctttgtgcgctccgcagtgtgcgcgaggggagcgcggccgggggcggtgccccgcggtgcggggggggctgcgaggggaacaaaggctgcgtgcggggtgtgtgcgtgggggggtgagcagggggtgtgggcgcgtcggtcgggctgcaaccccccctgcacccccctccccgagttgctgagcacggcccggcttcgggtgcggggctccgtacggggcgtggcgcggggctcgccgtgccgggcggggggtggcggcaggtgggggtgccgggcggggcggggccgcctcgggccggggagggctcgggggaggggcgcggcggcccccggagcgccggcggctgtcgaggcgcggcgagccgcagccattgccttttatggtaatcgtgcgagagggcgcagggacttcctttgtcccaaatctgtgcggagccgaaatctgggaggcgccgccgcaccccctctagcgggcgcggggcgaagcggtgcggcgccggcaggaaggaaatgggcggggagggccttcgtgcgtcgccgcgccgccgtccccttctccctctccagcctcggggctgtccgcggggggacggctgccttcgggggggacggggcagggcggggttcggcttctggcgtgtgaccggcggctctagagcctctgctaaccatgttcatgccttcttctttttcctacagctcctgggcaacgtgctggttattgtgctgtctcatcattttggcaaagaattcgggattcgaaccggtgccgccaccatgagtcctgcccagttcctgtttctgttagtgctctggattcgggaaaccaacggtgatgttgtgatgacccagactccactcactttgtcggttaccattggacaaccagcctccatctcttgcaagtcaagtcagagcctcttagatagtgatggaaagacatatttgaattggttgttacagaggccaggccagtctccaaagcgcctaatctatctggtgtctaaactggactctggagtccctgacagattcactggcagtggatcagggacagatttcacactgaaaattagcagagtggaggctgaggatttgggagtttattattgctggcaaggtacacattttcctcggacgttcggtggaggcaccaagctggaaatcaaacggggtggtggtggtagcggcggcggcggctctggtggtggtggatccgaggtccagctgcaacagtctggacctgagctggtgaagcctggggcttcagtgaagatatcctgcaagacttctggatacacattcactgaatacaccatacactgggtgaagcagagccatggagagagccttgagtggattggaggtattaatccaaacgatggtggtactatttacaaccagaagttcaagggcaaggccacattgactgtagacaagtcctccaaaacagcctacatggagctccgcagcctgacatctgaggattctgcagtcttttactgtgcaagagggccctccgccaggtttccttactggggccaagggactctggtcactgtctctgcatacccatacgatgttccagattacgcttagtgacctgaggatgggtggcatccctgtgacccctccccagtgcctctcctggccctggaagttgccactccagtgcccaccagccttgtcctaataaaattaagttgcatcattttgtctgactaggtgtccttctataatattatggggtggaggggggtggtatggagcaaggggcaagttgggaagacaacctgtagggcctgcggggtctattgggaaccaagctggagtgcagtggcacaatcttggctcactgcaatctccgcctcctgggttcaagcgattctcctgcctcagcctcccgagttgttgggattccaggcatgcatgaccaggctcagctaatttttgtttttttggtagagacggggtttcaccatattggccaggctggtctccaactcctaatctcaggtgatctacccaccttggcctcccaaattgctgggattacaggcgtgaaccactgctcccttccctgtccttggcctagaattatatttttttaaagactcacatagtcttctgcacagggcattctttttgcttcaggatgtttacaacatttgctgcccacttttcctaggtttcttgagacctctacaagagttggagttgacacttggggtactttcttggtgtaacgaactaatagcctgaaaaaaagaagtcatgtgttttcagcaaggcaagaaactgtctaacatagtagataaaacagagaacacttggccggaatcaactaagatgttgctatgttccattcatcatattatctccatctgcagagtagtgggttagtggagggtagaaaacattctcctgaacaactagttaaacttggctttgagttccacctgtaccacttgcataatcttgggaaagtgagttgcctaattcagtgacattaataaatttattaatttcttctttcaataaaacctggagagagcttcatatgtatcagcatatgctaaacttgaaagatacaagtagaaaatggaaggaaatatatctgactcaatagggatagttcaagggttaaattaaaagtagtaaagtattataattaatctgacatggtacctaatatataataatcatgtattaagaatgccagtcaccattaaaagtcaatgtatgactttaatctactcgaggaaagaaactatgtcttgttcactgttattatctctaaaatccataatcagaagagcaccatgtgtatgagccacacaataaatatctactgtataatatgtctcttcttgtttttaaccttcatagataagactctattgaattgggacattagtccagcaagccattctgtctctgtctcttctatggagggaaaggtttaaccatcaaagactaggtgcatctcccaaacaacctgaatttaatattcaaatatgtatctaaattcatttgttacatttttgtgttcagcttacatattactttttgagcgacatctattcaaggcctactacttgctgctctacaaaatattgccatgctctatttgcccattaactatttcttaaccttcaagggacatgctcagttctgatataccaagatttggtatttaccctcccagcctacatacttccaatcttaagagaacaatttttagactacattcaaatatagacctctccaccccatcaactattttatctctcctctcctatctttcttgacaaagagtgattagaaatatgcaattctaggtatcgatgctacgtagataagtagcatggcgggttaatcattaactacagaggaacccctagtgatggagttggccactccctctctgcgcgctcgctcgctcactgaggccgggcgaccaaaggtcgcccgacgcccgggctttgcccgggcggcctcagtgagcgagcgagcgcgcagctgcctgcagg

SEQ ID NO: 2033 - DNA, 4689 bp, Artificial Sequence
  Description of Artificial Sequence: Synthetic polynucleotide
cctgcaggcagctgcgcgctcgctcgctcactgaggccgcccgggcaaagcccgggcgtcgggcgacctttggtcgcccggcctcagtgagcgagcgagcgcgcagagagggagtggccaactccatcactaggggttccttgtagttaatgattaacccgccatgctacttatctacgtagccatgcgtcgacataacgcgtctagttattaatagtaatcaattacggggtcattagttcatagcccatatatggagttccgcgttacataacttacggtaaatggcccgcctggctgaccgcccaacgacccccgcccattgacgtcaataatgacgtatgttcccatagtaacgccaatagggactttccattgacgtcaatgggtggagtatttacggtaaactgcccacttggcagtacatcaagtgtatcatatgccaagtacgccccctattgacgtcaatgacggtaaatggcccgcctggcattatgcccagtacatgaccttatgggactttcctacttggcagtacatctacgtattagtcatcgctattaccatggtcgaggtgagccccacgttctgcttcactctccccatctcccccccctccccacccccaattttgtatttatttattttttaattattttgtgcagcgatgggggcggggggggggggggggcgcgcgccaggcggggcggggcggggcgaggggcggggcggggcgaggcggagaggtgcggcggcagccaatcagagcggcgcgctccgaaagtttccttttatggcgaggcggcggcggcggcggccctataaaaagcgaagcgcgcggcgggcgggagtcgctgcgcgctgccttcgccccgtgccccgctccgccgccgcctcgcgccgcccgccccggctctgactgaccgcgttactcccacaggtgagcgggcgggacggcccttctcctccgggctgtaattagcgcttggtttaatgacggcttgtttcttttctgtggctgcgtgaaagccttgaggggctccgggagggccctttgtgcggggggagcggctcggggggtgcgtgcgtgtgtgtgtgcgtggggagcgccgcgtgcggctccgcgctgcccggcggctgtgagcgctgcgggcgcggcgcggggctttgtgcgctccgcagtgtgcgcgaggggagcgcggccgggggcggtgccccgcggtgcggggggggctgcgaggggaacaaaggctgcgtgcggggtgtgtgcgtgggggggtgagcagggggtgtgggcgcgtcggtcgggctgcaaccccccctgcacccccctccccgagttgctgagcacggcccggcttcgggtgcggggctccgtacggggcgtggcgcggggctcgccgtgccgggcggggggtggcggcaggtgggggtgccgggcggggcggggccgcctcgggccggggagggctcgggggaggggcgcggcggcccccggagcgccggcggctgtcgaggcgcggcgagccgcagccattgccttttatggtaatcgtgcgagagggcgcagggacttcctttgtcccaaatctgtgcggagccgaaatctgggaggcgccgccgcaccccctctagcgggcgcggggcgaagcggtgcggcgccggcaggaaggaaatgggcggggagggccttcgtgcgtcgccgcgccgccgtccccttctccctctccagcctcggggctgtccgcggggggacggctgccttcgggggggacggggcagggcggggttcggcttctggcgtgtgaccggcggctctagagcctctgctaaccatgttcatgccttcttctttttcctacagctcctgggcaacgtgctggttattgtgctgtctcatcattttggcaaagaattcgggattcgaaccggtgccgccaccatgagtcctgcccagttcctgtttctgttagtgctctggattcgggaaaccaacggtgatgttgtgatgacccagactccactcactttgtcggttaccattggacaaccagcctccatctcttgcaagtcaagtcagagcctcttagatagtgatggaaagacatatttgaattggttgttacagaggccaggccagtctccaaagcgcctaatctatctggtgtctaaactggactctggagtccctgacagattcactggcagtggatcagggacagatttcacactgaaaattagcagagtggaggctgaggatttgggagtttattattgctggcaaggtacacattttcctcggacgttcggtggaggcaccaagctggaaatcaaacggggtggtggtggtagcggcggcggcggctctggtggtggtggatccgaggtccagctgcaacagtctggacctgagctggtgaagcctggggcttcagtgaagatatcctgcaagacttctggatacacattcactgaatacaccatacactgggtgaagcagagccatggagagagccttgagtggattggaggtattaatccaaacgatggtggtactatttacaaccagaagttcaagggcaaggccacattgactgtagacaagtcctccaaaacagcctacatggagctccgcagcctgacatctgaggattctgcagtcttttactgtgcaagagggccctccgccaggtttccttactggggccaagggactctggtcactgtctctgcacatcaccatcaccatcactagtgacctgaggatgggtggcatccctgtgacccctccccagtgcctctcctggccctggaagttgccactccagtgcccaccagccttgtcctaataaaattaagttgcatcattttgtctgactaggtgtccttctataatattatggggtggaggggggtggtatggagcaaggggcaagttgggaagacaacctgtagggcctgcggggtctattgggaaccaagctggagtgcagtggcacaatcttggctcactgcaatctccgcctcctgggttcaagcgattctcctgcctcagcctcccgagttgttgggattccaggcatgcatgaccaggctcagctaatttttgtttttttggtagagacggggtttcaccatattggccaggctggtctccaactcctaatctcaggtgatctacccaccttggcctcccaaattgctgggattacaggcgtgaaccactgctcccttccctgtccttggcctagaattatatttttttaaagactcacatagtcttctgcacagggcattctttttgcttcaggatgtttacaacatttgctgcccacttttcctaggtttcttgagacctctacaagagttggagttgacacttggggtactttcttggtgtaacgaactaatagcctgaaaaaaagaagtcatgtgttttcagcaaggcaagaaactgtctaacatagtagataaaacagagaacacttggccggaatcaactaagatgttgctatgttccattcatcatattatctccatctgcagagtagtgggttagtggagggtagaaaacattctcctgaacaactagttaaacttggctttgagttccacctgtaccacttgcataatcttgggaaagtgagttgcctaattcagtgacattaataaatttattaatttcttctttcaataaaacctggagagagcttcatatgtatcagcatatgctaaacttgaaagatacaagtagaaaatggaaggaaatatatctgactcaatagggatagttcaagggttaaattaaaagtagtaaagtattataattaatctgacatggtacctaatatataataatcatgtattaagaatgccagtcaccattaaaagtcaatgtatgactttaatctactcgaggaaagaaactatgtcttgttcactgttattatctctaaaatccataatcagaagagcaccatgtgtatgagccacacaataaatatctactgtataatatgtctcttcttgtttttaaccttcatagataagactctattgaattgggacattagtccagcaagccattctgtctctgtctcttctatggagggaaaggtttaaccatcaaagactaggtgcatctcccaaacaacctgaatttaatattcaaatatgtatctaaattcatttgttacatttttgtgttcagcttacatattactttttgagcgacatctattcaaggcctactacttgctgctctacaaaatattgccatgctctatttgcccattaactatttcttaaccttcaagggacatgctcagttctgatataccaagatttggtatttaccctcccagcctacatacttccaatcttaagagaacaatttttagactacattcaaatatagacctctccaccccatcaactattttatctctcctctcctatctttcttgacaaagagtgattagaaatatgcaattctaggtatcgatgctacgtagataagtagcatggcgggttaatcattaactacagaggaacccctagtgatggagttggccactccctctctgcgcgctcgctcgctcactgaggccgggcgaccaaaggtcgcccgacgcccgggctttgcccgggcggcctcagtgagcgagcgagcgcgcagctgcctgcagg

SEQ ID NO: 2034 - DNA, 4253 bp, Artificial Sequence
  Description of Artificial Sequence: Synthetic polynucleotide
cctgcaggcagctgcgcgctcgctcgctcactgaggccgcccgggcaaagcccgggcgtcgggcgacctttggtcgcccggcctcagtgagcgagcgagcgcgcagagagggagtggccaactccatcactaggggttccttgtagttaatgattaacccgccatgctacttatctacgtagccatgcgtcgacataacgcgtctagttattaatagtaatcaattacggggtcattagttcatagcccatatatggagttccgcgttacataacttacggtaaatggcccgcctggctgaccgcccaacgacccccgcccattgacgtcaataatgacgtatgttcccatagtaacgccaatagggactttccattgacgtcaatgggtggagtatttacggtaaactgcccacttggcagtacatcaagtgtatcatatgccaagtacgccccctattgacgtcaatgacggtaaatggcccgcctggcattatgcccagtacatgaccttatgggactttcctacttggcagtacatctacgtattagtcatcgctattaccatggtcgaggtgagccccacgttctgcttcactctccccatctcccccccctccccacccccaattttgtatttatttattttttaattattttgtgcagcgatgggggcggggggggggggggggcgcgcgccaggcggggcggggcggggcgaggggcggggcggggcgaggcggagaggtgcggcggcagccaatcagagcggcgcgctccgaaagtttccttttatggcgaggcggcggcggcggcggccctataaaaagcgaagcgcgcggcgggcgggagtcgctgcgcgctgccttcgccccgtgccccgctccgccgccgcctcgcgccgcccgccccggctctgactgaccgcgttactcccacaggtgagcgggcgggacggcccttctcctccgggctgtaattagcgcttggtttaatgacggcttgtttcttttctgtggctgcgtgaaagccttgaggggctccgggagggccctttgtgcggggggagcggctcggggggtgcgtgcgtgtgtgtgtgcgtggggagcgccgcgtgcggctccgcgctgcccggcggctgtgagcgctgcgggcgcggcgcggggctttgtgcgctccgcagtgtgcgcgaggggagcgcggccgggggcggtgccccgcggtgcggggggggctgcgaggggaacaaaggctgcgtgcggggtgtgtgcgtgggggggtgagcagggggtgtgggcgcgtcggtcgggctgcaaccccccctgcacccccctccccgagttgctgagcacggcccggcttcgggtgcggggctccgtacggggcgtggcgcggggctcgccgtgccgggcggggggtggcggcaggtgggggtgccgggcggggcggggccgcctcgggccggggagggctcgggggaggggcgcggcggcccccggagcgccggcggctgtcgaggcgcggcgagccgcagccattgccttttatggtaatcgtgcgagagggcgcagggacttcctttgtcccaaatctgtgcggagccgaaatctgggaggcgccgccgcaccccctctagcgggcgcggggcgaagcggtgcggcgccggcaggaaggaaatgggcggggagggccttcgtgcgtcgccgcgccgccgtccccttctccctctccagcctcggggctgtccgcggggggacggctgccttcgggggggacggggcagggcggggttcggcttctggcgtgtgaccggcggctctagagcctctgctaaccatgttcatgccttcttctttttcctacagctcctgggcaacgtgctggttattgtgctgtctcatcattttggcaaagaattcgggattcgaaccggtgccgccaccatgagtcctgcccagttcctgtttctgttagtgctctggattcgggaaaccaacggtgatgttgtgatgacccagactccactcactttgtcggttaccattggacaaccagcctccatctcttgcaagtcaagtcagagcctcttagatagtgatggaaagacatatttgaattggttgttacagaggccaggccagtctccaaagcgcctaatctatctggtgtctaaactggactctggagtccctgacagattcactggcagtggatcagggacagatttcacactgaaaattagcagagtggaggctgaggatttgggagtttattattgctggcaaggtacacattttcctcggacgttcggtggaggcaccaagctggaaatcaaacggggtggtggtggtagcggcggcggcggctctggtggtggtggatccgaggtccagctgcaacagtctggacctgagctggtgaagcctggggcttcagtgaagatatcctgcaagacttctggatacacattcactgaatacaccatacactgggtgaagcagagccatggagagagccttgagtggattggaggtattaatccaaacgatggtggtactatttacaaccagaagttcaagggcaaggccacattgactgtagacaagtcctccaaaacagcctacatggagctccgcagcctgacatctgaggattctgcagtcttttactgtgcaagagggccctccgccaggtttccttactggggccaagggactctggtcactgtctctgcatacccatacgatgttccagattacgcttagtgacctgaggatgatctttttccctctgccaaaaattatggggacatcatgaagccccttgagcatctgacttctggctaataaaggaaatttattttcattgcaatagtgtgttggaattttttgtgtctctcactcgcctaggtttcttgagacctctacaagagttggagttgacacttggggtactttcttggtgtaacgaactaatagcctgaaaaaaagaagtcatgtgttttcagcaaggcaagaaactgtctaacatagtagataaaacagagaacacttggccggaatcaactaagatgttgctatgttccattcatcatattatctccatctgcagagtagtgggttagtggagggtagaaaacattctcctgaacaactagttaaacttggctttgagttccacctgtaccacttgcataatcttgggaaagtgagttgcctaattcagtgacattaataaatttattaatttcttctttcaataaaacctggagagagcttcatatgtatcagcatatgctaaacttgaaagatacaagtagaaaatggaaggaaatatatctgactcaatagggatagttcaagggttaaattaaaagtagtaaagtattataattaatctgacatggtacctaatatataataatcatgtattaagaatgccagtcaccattaaaagtcaatgtatgactttaatctactcgaggaaagaaactatgtcttgttcactgttattatctctaaaatccataatcagaagagcaccatgtgtatgagccacacaataaatatctactgtataatatgtctcttcttgtttttaaccttcatagataagactctattgaattgggacattagtccagcaagccattctgtctctgtctcttctatggagggaaaggtttaaccatcaaagactaggtgcatctcccaaacaacctgaatttaatattcaaatatgtatctaaattcatttgttacatttttgtgttcagcttacatattactttttgagcgacatctattcaaggcctactacttgctgctctacaaaatattgccatgctctatttgcccattaactatttcttaaccttcaagggacatgctcagttctgatataccaagatttggtatttaccctcccagcctacatacttccaatcttaagagaacaatttttagactacattcaaatatagacctctccaccccatcaactattttatctctcctctcctatctttcttgacaaagagtgattagaaatatgcaattctaggtatcgatgctacgtagataagtagcatggcgggttaatcattaactacagaggaacccctagtgatggagttggccactccctctctgcgcgctcgctcgctcactgaggccgggcgaccaaaggtcgcccgacgcccgggctttgcccgggcggcctcagtgagcgagcgagcgcgcagctgcctgcagg

SEQ ID NO: 2035 - DNA, 2350 bp, Artificial Sequence
  Description of Artificial Sequence: Synthetic polynucleotide
cctgcaggcagctgcgcgctcgctcgctcactgaggccgcccgggcaaagcccgggcgtcgggcgacctttggtcgcccggcctcagtgagcgagcgagcgcgcagagagggagtggccaactccatcactaggggttccttgtagttaatgattaacccgccatgctacttatctacgtagccatgcgtcgacataacgcgtcgacattgattattgactagttattaatagtaatcaattacggggtcattagttcatagcccatatatggagttccgcgttacataacttacggtaaatggcccgcctggctgaccgcccaacgacccccgcccattgacgtcaataatgacgtatgttcccatagtaacgccaatagggactttccattgacgtcaatgggtggagtatttacggtaaactgcccacttggcagtacatcaagtgtatcatatgccaagtacgccccctattgacgtcaatgacggtaaatggcccgcctggcattatgcccagtacatgaccttatgggactttcctacttggcagtacatctacgtattagtcatcgctattaccatgtcgaggccacgttctgcttcactctccccatctcccccccctccccacccccaattttgtatttatttattttttaattattttgtgcagcgatgggggcggggggggggggcgcgcgccaggcggggcggggcggggcgaggggcggggcggggcgaggcggagaggtgcggcggcagccaatcagagcggcgcgctccgaaagtttccttttatggcgaggcggcggcggcggcggccctataaaaagcgaagcgcgcggcgggcgggagcaagcttcgtttagtgaaccgtcagatcgcctggagacgccatccacgctgttttgacctccatagaagacaccgggaccgatccagcctccgcggattcgaatcccggccgggaacggtgcattggaacgcggattccccgtgccaagagtgacgtaagtaccgcctatagagtctataggcccacaaaaaatgctttcttcttttaatatacttttcttttgctaatcatgttcatacctcttatcttcctcccacagctcctgggcaacgtgctggtctgtgtgctggcccatcactttggcaaagaattgggattcgaaccggtgccgccaccatgggatggagctggatctttctctttctcctgtcaggaactacaggtgtcctctctgaggtccagctgcaacagtctggacctgagctggtgaagcctggggcttcagtgaagatatcctgcaagacttctggatacacattcactgaatacaccatacactgggtgaagcagagccatggagagagccttgagtggattggaggtattaatccaaacgatggtggtactatttacaaccagaagttcaagggcaaggccacattgactgtagacaagtcctccaaaacagcctacatggagctccgcagcctgacatctgaggattctgcagtcttttactgtgcaagagggccctccgccaggtttccttactggggccaagggactctggtcactgtctctgcaggtggtggtggtagcggcggcggcggctctggtggtggtggatccgatgttgtgatgacccagactccactcactttgtcggttaccattggacaaccagcctccatctcttgcaagtcaagtcagagcctcttagatagtgatggaaagacatatttgaattggttgttacagaggccaggccagtctccaaagcgcctaatctatctggtgtctaaactggactctggagtccctgacagattcactggcagtggatcagggacagatttcacactgaaaattagcagagtggaggctgaggatttgggagtttattattgctggcaaggtacacattttcctcggacgttcggtggaggcaccaagctggaaatcaaacggtacccatacgatgttccagattacgcttagtgacctgaggatgatctttttccctctgccaaaaattatggggacatcatgaagccccttgagcatctgacttctggctaataaaggaaatttattttcattgcaatagtgtgttggaattttttgtgtctctcactcgcctaggatcgatgctacgtagataagtagcatggcgggttaatcattaactacagaggaacccctagtgatggagttggccactccctctctgcgcgctcgctcgctcactgaggccgggcgaccaaaggtcgcccgacgcccgggctttgcccgggcggcctcagtgagcgagcgagcgcgcagctgcctgcagg

SEQ ID NO: 2036 - DNA, 2370 bp, Artificial Sequence
  Description of Artificial Sequence: Synthetic polynucleotide
cctgcaggcagctgcgcgctcgctcgctcactgaggccgcccgggcaaagcccgggcgtcgggcgacctttggtcgcccggcctcagtgagcgagcgagcgcgcagagagggagtggccaactccatcactaggggttccttgtagttaatgattaacccgccatgctacttatctacgtagccatgcgtcgacataacgcgtcgacattgattattgactagttattaatagtaatcaattacggggtcattagttcatagcccatatatggagttccgcgttacataacttacggtaaatggcccgcctggctgaccgcccaacgacccccgcccattgacgtcaataatgacgtatgttcccatagtaacgccaatagggactttccattgacgtcaatgggtggagtatttacggtaaactgcccacttggcagtacatcaagtgtatcatatgccaagtacgccccctattgacgtcaatgacggtaaatggcccgcctggcattatgcccagtacatgaccttatgggactttcctacttggcagtacatctacgtattagtcatcgctattaccatgtcgaggccacgttctgcttcactctccccatctcccccccctccccacccccaattttgtatttatttattttttaattattttgtgcagcgatgggggcggggggggggggcgcgcgccaggcggggcggggcggggcgaggggcggggcggggcgaggcggagaggtgcggcggcagccaatcagagcggcgcgctccgaaagtttccttttatggcgaggcggcggcggcggcggccctataaaaagcgaagcgcgcggcgggcgggagcaagcttcgtttagtgaaccgattcgaatcccggccgggaacggtgcattggaacgcggattccccgtgccaagagtgacgtaagtaccgcctatagagtctataggcccactctgcatataaattgtaactgatgtaagaggtttcatattgctaatagcagctacaatccagctaccattctgcttttattttatggttgggataaggctggattattctgagtccaagctaggcccttttgctaatcatgttcatacctcttatcttcctcccacagctcctgggcaacgtgctggtctgtgtgctggcccatcactttggcaaagaattgggattcgaaccggtgccgccaccatgggatggagctggatctttctctttctcctgtcaggaactacaggtgtcctctctgaggtccagctgcaacagtctggacctgagctggtgaagcctggggcttcagtgaagatatcctgcaagacttctggatacacattcactgaatacaccatacactgggtgaagcagagccatggagagagccttgagtggattggaggtattaatccaaacgatggtggtactatttacaaccagaagttcaagggcaaggccacattgactgtagacaagtcctccaaaacagcctacatggagctccgcagcctgacatctgaggattctgcagtcttttactgtgcaagagggccctccgccaggtttccttactggggccaagggactctggtcactgtctctgcaggtggtggtggtagcggcggcggcggctctggtggtggtggatccgatgttgtgatgacccagactccactcactttgtcggttaccattggacaaccagcctccatctcttgcaagtcaagtcagagcctcttagatagtgatggaaagacatatttgaattggttgttacagaggccaggccagtctccaaagcgcctaatctatctggtgtctaaactggactctggagtccctgacagattcactggcagtggatcagggacagatttcacactgaaaattagcagagtggaggctgaggatttgggagtttattattgctggcaaggtacacattttcctcggacgttcggtggaggcaccaagctggaaatcaaacggtacccatacgatgttccagattacgcttagtgacctgaggatgatctttttccctctgccaaaaattatggggacatcatgaagccccttgagcatctgacttctggctaataaaggaaatttattttcattgcaatagtgtgttggaattttttgtgtctctcactcgcctaggatcgatgctacgtagataagtagcatggcgggttaatcattaactacagaggaacccctagtgatggagttggccactccctctctgcgcgctcgctcgctcactgaggccgggcgaccaaaggtcgcccgacgcccgggctttgcccgggcggcctcagtgagcgagcgagcgcgcagctgcctgcagg

SEQ ID NO: 2037 - DNA, 2282 bp, Artificial Sequence
  Description of Artificial Sequence: Synthetic polynucleotide
cctgcaggcagctgcgcgctcgctcgctcactgaggccgcccgggcaaagcccgggcgtcgggcgacctttggtcgcccggcctcagtgagcgagcgagcgcgcagagagggagtggccaactccatcactaggggttccttgtagttaatgattaacccgccatgctacttatctacgtagccatgcgtcgacataacgcgtcgacattgattattgactagttattaatagtaatcaattacggggtcattagttcatagcccatatatggagttccgcgttacataacttacggtaaatggcccgcctggctgaccgcccaacgacccccgcccattgacgtcaataatgacgtatgttcccatagtaacgccaatagggactttccattgacgtcaatgggtggagtatttacggtaaactgcccacttggcagtacatcaagtgtatcatatgccaagtacgccccctattgacgtcaatgacggtaaatggcccgcctggcattatgcccagtacatgaccttatgggactttcctacttggcagtacatctacgtattagtcatcgctattaccatgtcgaggccacgttctgcttcactctccccatctcccccccctccccacccccaattttgtatttatttattttttaattattttgtgcagcgatgggggcggggggggggggcgcgcgccaggcggggcggggcggggcgaggggcggggcggggcgaggcggagaggtgcggcggcagccaatcagagcggcgcgctccgaaagtttccttttatggcgaggcggcggcggcggcggccctataaaaagcgaagcgcgcggcgggcgggagcaagcttcgtttagtgaaccgttgacctccatagaagacaccgggaccgatccagcctccgcggattcgaatcccggccgggaacggtgcattggaacgcggattccccgtgccaagagtgacgtaagtaccgcctatacaagctaggcccttttgctaatcatgttcatacctcttatcttcctcccacagctcctgggcaacgtgctggtctgtgtgctggcccatcactttggcaaagaattgggattcgaaccggtgccgccaccatgggatggagctggatctttctctttctcctgtcaggaactacaggtgtcctctctgaggtccagctgcaacagtctggacctgagctggtgaagcctggggcttcagtgaagatatcctgcaagacttctggatacacattcactgaatacaccatacactgggtgaagcagagccatggagagagccttgagtggattggaggtattaatccaaacgatggtggtactatttacaaccagaagttcaagggcaaggccacattgactgtagacaagtcctccaaaacagcctacatggagctccgcagcctgacatctgaggattctgcagtcttttactgtgcaagagggccctccgccaggtttccttactggggccaagggactctggtcactgtctctgcaggtggtggtggtagcggcggcggcggctctggtggtggtggatccgatgttgtgatgacccagactccactcactttgtcggttaccattggacaaccagcctccatctcttgcaagtcaagtcagagcctcttagatagtgatggaaagacatatttgaattggttgttacagaggccaggccagtctccaaagcgcctaatctatctggtgtctaaactggactctggagtccctgacagattcactggcagtggatcagggacagatttcacactgaaaattagcagagtggaggctgaggatttgggagtttattattgctggcaaggtacacattttcctcggacgttcggtggaggcaccaagctggaaatcaaacggtacccatacgatgttccagattacgcttagtgacctgaggatgatctttttccctctgccaaaaattatggggacatcatgaagccccttgagcatctgacttctggctaataaaggaaatttattttcattgcaatagtgtgttggaattttttgtgtctctcactcgcctaggatcgatgctacgtagataagtagcatggcgggttaatcattaactacagaggaacccctagtgatggagttggccactccctctctgcgcgctcgctcgctcactgaggccgggcgaccaaaggtcgcccgacgcccgggctttgcccgggcggcctcagtgagcgagcgagcgcgcagctgcctgcagg

SEQ ID NO: 2038 - DNA, 2314 bp, Artificial Sequence
  Description of Artificial Sequence: Synthetic polynucleotide
cctgcaggcagctgcgcgctcgctcgctcactgaggccgcccgggcaaagcccgggcgtcgggcgacctttggtcgcccggcctcagtgagcgagcgagcgcgcagagagggagtggccaactccatcactaggggttccttgtagttaatgattaacccgccatgctacttatctacgtagccatgcgtcgacataacgcgtcgacattgattattgactagttattaatagtaatcaattacggggtcattagttcatagcccatatatggagttccgcgttacataacttacggtaaatggcccgcctggctgaccgcccaacgacccccgcccattgacgtcaataatgacgtatgttcccatagtaacgccaatagggactttccattgacgtcaatgggtggagtatttacggtaaactgcccacttggcagtacatcaagtgtatcatatgccaagtacgccccctattgacgtcaatgacggtaaatggcccgcctggcattatgcccagtacatgaccttatgggactttcctacttggcagtacatctacgtattagtcatcgctattaccatgtcgaggccacgttctgcttcactctccccatctcccccccctccccacccccaattttgtatttatttattttttaattattttgtgcagcgatgggggcggggggggggggcgcgcgccaggcggggcggggcggggcgaggggcggggcggggcgaggcggagaggtgcggcggcagccaatcagagcggcgcgctccgaaagtttccttttatggcgaggcggcggcggcggcggccctataaaaagcgaagcgcgcggcgggcgggagcaagcttcgtttagtgaaccgtcagatcgcctggagacgccatccacgctgttttgacctccatagaagacaccgggaccgatccagcctccgcggattcgaatcccggccgggaacggtgcattggaacgcggattccccgtgccaagagtgacgtaagtaccgcctatacaagctaggcccttttgctaatcatgttcatacctcttatcttcctcccacagctcctgggcaacgtgctggtctgtgtgctggcccatcactttggcaaagaattgggattcgaaccggtgccgccaccatgggatggagctggatctttctctttctcctgtcaggaactacaggtgtcctctctgaggtccagctgcaacagtctggacctgagctggtgaagcctggggcttcagtgaagatatcctgcaagacttctggatacacattcactgaatacaccatacactgggtgaagcagagccatggagagagccttgagtggattggaggtattaatccaaacgatggtggtactatttacaaccagaagttcaagggcaaggccacattgactgtagacaagtcctccaaaacagcctacatggagctccgcagcctgacatctgaggattctgcagtcttttactgtgcaagagggccctccgccaggtttccttactggggccaagggactctggtcactgtctctgcaggtggtggtggtagcggcggcggcggctctggtggtggtggatccgatgttgtgatgacccagactccactcactttgtcggttaccattggacaaccagcctccatctcttgcaagtcaagtcagagcctcttagatagtgatggaaagacatatttgaattggttgttacagaggccaggccagtctccaaagcgcctaatctatctggtgtctaaactggactctggagtccctgacagattcactggcagtggatcagggacagatttcacactgaaaattagcagagtggaggctgaggatttgggagtttattattgctggcaaggtacacattttcctcggacgttcggtggaggcaccaagctggaaatcaaacggtacccatacgatgttccagattacgcttagtgacctgaggatgatctttttccctctgccaaaaattatggggacatcatgaagccccttgagcatctgacttctggctaataaaggaaatttattttcattgcaatagtgtgttggaattttttgtgtctctcactcgcctaggatcgatgctacgtagataagtagcatggcgggttaatcattaactacagaggaacccctagtgatggagttggccactccctctctgcgcgctcgctcgctcactgaggccgggcgaccaaaggtcgcccgacgcccgggctttgcccgggcggcctcagtgagcgagcgagcgcgcagctgcctgcagg

SEQ ID NO: 2039 - DNA, 2350 bp, Artificial Sequence
  Description of Artificial Sequence: Synthetic polynucleotide
cctgcaggcagctgcgcgctcgctcgctcactgaggccgcccgggcaaagcccgggcgtcgggcgacctttggtcgcccggcctcagtgagcgagcgagcgcgcagagagggagtggccaactccatcactaggggttccttgtagttaatgattaacccgccatgctacttatctacgtagccatgcgtcgacataacgcgtcgacattgattattgactagttattaatagtaatcaattacggggtcattagttcatagcccatatatggagttccgcgttacataacttacggtaaatggcccgcctggctgaccgcccaacgacccccgcccattgacgtcaataatgacgtatgttcccatagtaacgccaatagggactttccattgacgtcaatgggtggagtatttacggtaaactgcccacttggcagtacatcaagtgtatcatatgccaagtacgccccctattgacgtcaatgacggtaaatggcccgcctggcattatgcccagtacatgaccttatgggactttcctacttggcagtacatctacgtattagtcatcgctattaccatgtcgaggccacgttctgcttcactctccccatctcccccccctccccacccccaattttgtatttatttattttttaattattttgtgcagcgatgggggcggggggggggggcgcgcgccaggcggggcggggcggggcgaggggcggggcggggcgaggcggagaggtgcggcggcagccaatcagagcggcgcgctccgaaagtttccttttatggcgaggcggcggcggcggcggccctataaaaagcgaagcgcgcggcgggcgggagcaagcttcgtttagtgaaccgtcagatcgcctggagacgccatccacgctgttttgacctccatagaagacaccgggaccgatccagcctccgcggattcgaatcccggccgggaacggtgcattggaacgcggattccccgtgccaagagtgacgtaagtaccgcctatagagtctataggcccacaggctggattattctgagtccaagctaggcccttttgctaatcatgttcatacctcttatcttcctcccacagctcctgggcaacgtgctggtctgtgtgctggcccatcactttggcaaagaattgggattcgaaccggtgccgccaccatgggatggagctggatctttctctttctcctgtcaggaactacaggtgtcctctctgaggtccagctgcaacagtctggacctgagctggtgaagcctggggcttcagtgaagatatcctgcaagacttctggatacacattcactgaatacaccatacactgggtgaagcagagccatggagagagccttgagtggattggaggtattaatccaaacgatggtggtactatttacaaccagaagttcaagggcaaggccacattgactgtagacaagtcctccaaaacagcctacatggagctccgcagcctgacatctgaggattctgcagtcttttactgtgcaagagggccctccgccaggtttccttactggggccaagggactctggtcactgtctctgcaggtggtggtggtagcggcggcggcggctctggtggtggtggatccgatgttgtgatgacccagactccactcactttgtcggttaccattggacaaccagcctccatctcttgcaagtcaagtcagagcctcttagatagtgatggaaagacatatttgaattggttgttacagaggccaggccagtctccaaagcgcctaatctatctggtgtctaaactggactctggagtccctgacagattcactggcagtggatcagggacagatttcacactgaaaattagcagagtggaggctgaggatttgggagtttattattgctggcaaggtacacattttcctcggacgttcggtggaggcaccaagctggaaatcaaacggtacccatacgatgttccagattacgcttagtgacctgaggatgatctttttccctctgccaaaaattatggggacatcatgaagccccttgagcatctgacttctggctaataaaggaaatttattttcattgcaatagtgtgttggaattttttgtgtctctcactcgcctaggatcgatgctacgtagataagtagcatggcgggttaatcattaactacagaggaacccctagtgatggagttggccactccctctctgcgcgctcgctcgctcactgaggccgggcgaccaaaggtcgcccgacgcccgggctttgcccgggcggcctcagtgagcgagcgagcgcgcagctgcctgcagg

SEQ ID NO: 2040 - DNA, 2370 bp, Artificial Sequence
  Description of Artificial Sequence: Synthetic polynucleotide
cctgcaggcagctgcgcgctcgctcgctcactgaggccgcccgggcaaagcccgggcgtcgggcgacctttggtcgcccggcctcagtgagcgagcgagcgcgcagagagggagtggccaactccatcactaggggttccttgtagttaatgattaacccgccatgctacttatctacgtagccatgcgtcgacataacgcgtcgacattgattattgactagttattaatagtaatcaattacggggtcattagttcatagcccatatatggagttccgcgttacataacttacggtaaatggcccgcctggctgaccgcccaacgacccccgcccattgacgtcaataatgacgtatgttcccatagtaacgccaatagggactttccattgacgtcaatgggtggagtatttacggtaaactgcccacttggcagtacatcaagtgtatcatatgccaagtacgccccctattgacgtcaatgacggtaaatggcccgcctggcattatgcccagtacatgaccttatgggactttcctacttggcagtacatctacgtattagtcatcgctattaccatgtcgaggccacgttctgcttcactctccccatctcccccccctccccacccccaattttgtatttatttattttttaattattttgtgcagcgatgggggcggggggggggggcgcgcgccaggcggggcggggcggggcgaggggcggggcggggcgaggcggagaggtgcggcggcagccaatcagagcggcgcgctccgaaagtttccttttatggcgaggcggcggcggcggcggccctataaaaagcgaagcgcgcggcgggcgggagcaagcttcgtttagtgaaccgattcgaatcccggccgggaacggtgcattggaacgcggattccccgtgccaagagtgacgtaagtaccgcctatagagtctataggcccactctgcatataaattgtaactgatgtaagaggtttcatattgctaatagcagctacaatccagctaccattctgcttttattttatggttgggataaggctggattattctgagtccaagctaggcccttttgctaatcatgttcatacctcttatcttcctcccacagctcctgggcaacgtgctggtctgtgtgctggcccatcactttggcaaagaattgggattcgaaccggtgccgccaccatgagtcctgcccagttcctgtttctgttagtgctctggattcgggaaaccaacggtgatgttgtgatgacccagactccactcactttgtcggttaccattggacaaccagcctccatctcttgcaagtcaagtcagagcctcttagatagtgatggaaagacatatttgaattggttgttacagaggccaggccagtctccaaagcgcctaatctatctggtgtctaaactggactctggagtccctgacagattcactggcagtggatcagggacagatttcacactgaaaattagcagagtggaggctgaggatttgggagtttattattgctggcaaggtacacattttcctcggacgttcggtggaggcaccaagctggaaatcaaacggggtggtggtggtagcggcggcggcggctctggtggtggtggatccgaggtccagctgcaacagtctggacctgagctggtgaagcctggggcttcagtgaagatatcctgcaagacttctggatacacattcactgaatacaccatacactgggtgaagcagagccatggagagagccttgagtggattggaggtattaatccaaacgatggtggtactatttacaaccagaagttcaagggcaaggccacattgactgtagacaagtcctccaaaacagcctacatggagctccgcagcctgacatctgaggattctgcagtcttttactgtgcaagagggccctccgccaggtttccttactggggccaagggactctggtcactgtctctgcatacccatacgatgttccagattacgcttagtgacctgaggatgatctttttccctctgccaaaaattatggggacatcatgaagccccttgagcatctgacttctggctaataaaggaaatttattttcattgcaatagtgtgttggaattttttgtgtctctcactcgcctaggatcgatgctacgtagataagtagcatggcgggttaatcattaactacagaggaacccctagtgatggagttggccactccctctctgcgcgctcgctcgctcactgaggccgggcgaccaaaggtcgcccgacgcccgggctttgcccgggcggcctcagtgagcgagcgagcgcgcagctgcctgcagg

SEQ ID NO: 2041 - DNA, 2624 bp, Artificial Sequence
  Description of Artificial Sequence: Synthetic polynucleotide
cctgcaggcagctgcgcgctcgctcgctcactgaggccgcccgggcaaagcccgggcgtcgggcgacctttggtcgcccggcctcagtgagcgagcgagcgcgcagagagggagtggccaactccatcactaggggttccttgtagttaatgattaacccgccatgctacttatctacgtagccatgcgtcgacataacgcgtcgacattgattattgactagttattaatagtaatcaattacggggtcattagttcatagcccatatatggagttccgcgttacataacttacggtaaatggcccgcctggctgaccgcccaacgacccccgcccattgacgtcaataatgacgtatgttcccatagtaacgccaatagggactttccattgacgtcaatgggtggagtatttacggtaaactgcccacttggcagtacatcaagtgtatcatatgccaagtacgccccctattgacgtcaatgacggtaaatggcccgcctggcattatgcccagtacatgaccttatgggactttcctacttggcagtacatctacgtattagtcatcgctattaccatgtcgaggccacgttctgcttcactctccccatctcccccccctccccacccccaattttgtatttatttattttttaattattttgtgcagcgatgggggcggggggggggggcgcgcgccaggcggggcggggcggggcgaggggcggggcggggcgaggcggagaggtgcggcggcagccaatcagagcggcgcgctccgaaagtttccttttatggcgaggcggcggcggcggcggccctataaaaagcgaagcgcgcggcgggcgggagcaagcttcgtttagtgaaccgtcagatcgcctggagacgccatccacgctgttttgacctccatagaagacaccgggaccgatccagcctccgcggattcgaatcccggccgggaacggtgcattggaacgcggattccccgtgccaagagtgacgtaagtaccgcctatagagtctataggcccacaaaaaatgctttcttcttttaatatacttttttgtttatcttatttctaatactttccctaatctctttctttcagggcaataatgatacaatgtatcatgcctctttgcaccattctaaagaataacagtgataatttctgggttaaggcaatagcaatatttctgcatataaatatttctgcatataaattgtaactgatgtaagaggtttcatattgctaatagcagctacaatccagctaccattctgcttttattttatggttgggataaggctggattattctgagtccaagctaggcccttttgctaatcatgttcatacctcttatcttcctcccacagctcctgggcaacgtgctggtctgtgtgctggcccatcactttggcaaagaattgggattcgaaccggtgccgccaccatgagtcctgcccagttcctgtttctgttagtgctctggattcgggaaaccaacggtgatgttgtgatgacccagactccactcactttgtcggttaccattggacaaccagcctccatctcttgcaagtcaagtcagagcctcttagatagtgatggaaagacatatttgaattggttgttacagaggccaggccagtctccaaagcgcctaatctatctggtgtctaaactggactctggagtccctgacagattcactggcagtggatcagggacagatttcacactgaaaattagcagagtggaggctgaggatttgggagtttattattgctggcaaggtacacattttcctcggacgttcggtggaggcaccaagctggaaatcaaacggggtggtggtggtagcggcggcggcggctctggtggtggtggatccgaggtccagctgcaacagtctggacctgagctggtgaagcctggggcttcagtgaagatatcctgcaagacttctggatacacattcactgaatacaccatacactgggtgaagcagagccatggagagagccttgagtggattggaggtattaatccaaacgatggtggtactatttacaaccagaagttcaagggcaaggccacattgactgtagacaagtcctccaaaacagcctacatggagctccgcagcctgacatctgaggattctgcagtcttttactgtgcaagagggccctccgccaggtttccttactggggccaagggactctggtcactgtctctgcatacccatacgatgttccagattacgcttagtgacctgaggatgatctttttccctctgccaaaaattatggggacatcatgaagccccttgagcatctgacttctggctaataaaggaaatttattttcattgcaatagtgtgttggaattttttgtgtctctcactcgcctaggatcgatgctacgtagataagtagcatggcgggttaatcattaactacagaggaacccctagtgatggagttggccactccctctctgcgcgctcgctcgctcactgaggccgggcgaccaaaggtcgcccgacgcccgggctttgcccgggcggcctcagtgagcgagcgagcgcgcagctgcctgcagg

SEQ ID NO: 2042 - DNA, 3778 bp, Artificial Sequence
  Description of Artificial Sequence: Synthetic polynucleotide
cctgcaggcagctgcgcgctcgctcgctcactgaggccgcccgggcaaagcccgggcgtcgggcgacctttggtcgcccggcctcagtgagcgagcgagcgcgcagagagggagtggccaactccatcactaggggttccttgtagttaatgattaacccgccatgctacttatctacgtagccatgcgtcgacataacgcgtcgacattgattattgactagttattaatagtaatcaattacggggtcattagttcatagcccatatatggagttccgcgttacataacttacggtaaatggcccgcctggctgaccgcccaacgacccccgcccattgacgtcaataatgacgtatgttcccatagtaacgccaatagggactttccattgacgtcaatgggtggagtatttacggtaaactgcccacttggcagtacatcaagtgtatcatatgccaagtacgccccctattgacgtcaatgacggtaaatggcccgcctggcattatgcccagtacatgaccttatgggactttcctacttggcagtacatctacgtattagtcatcgctattaccatgtcgaggccacgttctgcttcactctccccatctcccccccctccccacccccaattttgtatttatttattttttaattattttgtgcagcgatgggggcggggggggggggcgcgcgccaggcggggcggggcggggcgaggggcggggcggggcgaggcggagaggtgcggcggcagccaatcagagcggcgcgctccgaaagtttccttttatggcgaggcggcggcggcggcggccctataaaaagcgaagcgcgcggcgggcgggagcaagcttcgtttagtgaaccgtcagatcgcctggagacgccatccacgctgttttgacctccatagaagacaccgggaccgatccagcctccgcggattcgaatcccggccgggaacggtgcattggaacgcggattccccgtgccaagagtgacgtaagtaccgcctatagagtctataggcccacaaaaaatgctttcttcttttaatatacttttttgtttatcttatttctaatactttccctaatctctttctttcagggcaataatgatacaatgtatcatgcctctttgcaccattctaaagaataacagtgataatttctgggttaaggcaatagcaatatttctgcatataaatatttctgcatataaattgtaactgatgtaagaggtttcatattgctaatagcagctacaatccagctaccattctgcttttattttatggttgggataaggctggattattctgagtccaagctaggcccttttgctaatcatgttcatacctcttatcttcctcccacagctcctgggcaacgtgctggtctgtgtgctggcccatcactttggcaaagaattgggattcgaaccggtgccgccaccatgagtcctgcccagttcctgtttctgttagtgctctggattcgggaaaccaacggtgatgttgtgatgacccagactccactcactttgtcggttaccattggacaaccagcctccatctcttgcaagtcaagtcagagcctcttagatagtgatggaaagacatatttgaattggttgttacagaggccaggccagtctccaaagcgcctaatctatctggtgtctaaactggactctggagtccctgacagattcactggcagtggatcagggacagatttcacactgaaaattagcagagtggaggctgaggatttgggagtttattattgctggcaaggtacacattttcctcggacgttcggtggaggcaccaagctggaaatcaaacggggtggtggtggtagcggcggcggcggctctggtggtggtggatccgaggtccagctgcaacagtctggacctgagctggtgaagcctggggcttcagtgaagatatcctgcaagacttctggatacacattcactgaatacaccatacactgggtgaagcagagccatggagagagccttgagtggattggaggtattaatccaaacgatggtggtactatttacaaccagaagttcaagggcaaggccacattgactgtagacaagtcctccaaaacagcctacatggagctccgcagcctgacatctgaggattctgcagtcttttactgtgcaagagggccctccgccaggtttccttactggggccaagggactctggtcactgtctctgcatacccatacgatgttccagattacgcttagtgacctgaggatgatctttttccctctgccaaaaattatggggacatcatgaagccccttgagcatctgacttctggctaataaaggaaatttattttcattgcaatagtgtgttggaattttttgtgtctctcactcgcctaggtttcttgagacctctacaagagttggagttgacacttggggtactttcttggtgtaacgaactaatagcctgaaaaaaagaagtcatgtgttttcagcaaggcaagaaactgtctaacatagtagataaaacagagaacacttggccggaatcaactaagatgttgctatgttccattcatcatattatctccatctgcagagtagtgggttagtggagggtagaaaacattctcctgaacaactagttaaacttggctttgagttccacctgtaccacttgcataatcttgggaaagtgagttgcctaattcagtgacattaataaatttattaatttcttctttcaataaaacctggagagagcttcatatgtatcagcatatgctaaacttgaaagatacaagtagaaaatggaaggaaatatatctgactcaatagggatagttcaagggttaaattaaaagtagtaaagtattataattaatctgacatggtacctaatatataataatcatgtattaagaatgccagtcaccattaaaagtcaatgtatgactttaatctactcgaggaaagaaactatgtcttgttcactgttattatctctaaaatccataatcagaagagcaccatgtgtatgagccacacaataaatatctactgtataatatgtctcttcttgtttttaaccttcatagataagactctattgaattgggacattagtccagcaagccattctgtctctgtctcttctatggagggaaaggtttaaccatcaaagactaggtgcatctcccaaacaacctgaatttaatattcaaatatgtatctaaattcatttgttacatttttgtgttcagcttacatattactttttgagcgacatctattcaaggcctactacttgctgctctacaaaatattgccatgctctatttgcccattaactatttcttaaccttcaagggacatgctcagttctgatataccaagatttggtatttaccctcccagcctacatacttccaatcttaagagaacaatttttagactacattcaaatatagacctctccaccccatcaactattttatctctcctctcctatctttcttgacaaagagtgattagaaatatgcaattctaggtatcgatgctacgtagataagtagcatggcgggttaatcattaactacagaggaacccctagtgatggagttggccactccctctctgcgcgctcgctcgctcactgaggccgggcgaccaaaggtcgcccgacgcccgggctttgcccgggcggcctcagtgagcgagcgagcgcgcagctgcctgcagg

SEQ ID NO: 2043 - DNA, 2029 bp, Artificial Sequence
  Description of Artificial Sequence: Synthetic polynucleotide
cctgcaggcagctgcgcgctcgctcgctcactgaggccgcccgggcaaagcccgggcgtcgggcgacctttggtcgcccggcctcagtgagcgagcgagcgcgcagagagggagtggccaactccatcactaggggttccttgtagttaatgattaacccgccatgctacttatctacgtagccatgcgtcgacataacgcgtcgacattgattattgactagttattaatagtaatcaattacggggtcattagttcatagcccatatatggagttccgcgttacataacttacggtaaatggcccgcctggctgaccgcccaacgacccccgcccattgacgtcaataatgacgtatgttcccatagtaacgccaatagggactttccattgacgtcaatgggtggagtatttacggtaaactgcccacttggcagtacatcaagtgtatcatatgccaagtacgccccctattgacgtcaatgacggtaaatggcccgcctggcattatgcccagtacatgaccttatgggactttcctacttggcagtacatctacgtattagtcatcgctattaccatgtcgaggccacgttctgcttcactctccccatctcccccccctccccacccccaattttgtatttatttattttttaattattttgtgcagcgatgggggcggggggggggggcgcgcgccaggcggggcggggcggggcgaggggcggggcggggcgaggcggagaggtgcggcggcagccaatcagagcggcgcgctccgaaagtttccttttatggcgaggcggcggcggcggcggccctataaaaagcgaagcgcgcggcgggcgggagcaccggtgccgccaccatgagtcctgcccagttcctgtttctgttagtgctctggattcgggaaaccaacggtgatgttgtgatgacccagactccactcactttgtcggttaccattggacaaccagcctccatctcttgcaagtcaagtcagagcctcttagatagtgatggaaagacatatttgaattggttgttacagaggccaggccagtctccaaagcgcctaatctatctggtgtctaaactggactctggagtccctgacagattcactggcagtggatcagggacagatttcacactgaaaattagcagagtggaggctgaggatttgggagtttattattgctggcaaggtacacattttcctcggacgttcggtggaggcaccaagctggaaatcaaacggggtggtggtggtagcggcggcggcggctctggtggtggtggatccgaggtccagctgcaacagtctggacctgagctggtgaagcctggggcttcagtgaagatatcctgcaagacttctggatacacattcactgaatacaccatacactgggtgaagcagagccatggagagagccttgagtggattggaggtattaatccaaacgatggtggtactatttacaaccagaagttcaagggcaaggccacattgactgtagacaagtcctccaaaacagcctacatggagctccgcagcctgacatctgaggattctgcagtcttttactgtgcaagagggccctccgccaggtttccttactggggccaagggactctggtcactgtctctgcatacccatacgatgttccagattacgcttagtgacctgaggatgatctttttccctctgccaaaaattatggggacatcatgaagccccttgagcatctgacttctggctaataaaggaaatttattttcattgcaatagtgtgttggaattttttgtgtctctcactcgcctaggatcgatgctacgtagataagtagcatggcgggttaatcattaactacagaggaacccctagtgatggagttggccactccctctctgcgcgctcgctcgctcactgaggccgggcgaccaaaggtcgcccgacgcccgggctttgcccgggcggcctcagtgagcgagcgagcgcgcagctgcctgcagg

SEQ ID NO: 2044 - DNA, 2218 bp, Artificial Sequence
  Description of Artificial Sequence: Synthetic polynucleotide
cctgcaggcagctgcgcgctcgctcgctcactgaggccgcccgggcaaagcccgggcgtcgggcgacctttggtcgcccggcctcagtgagcgagcgagcgcgcagagagggagtggccaactccatcactaggggttccttgtagttaatgattaacccgccatgctacttatctacgtagccatgcgtcgacataacgcgtcgacattgattattgactagttattaatagtaatcaattacggggtcattagttcatagcccatatatggagttccgcgttacataacttacggtaaatggcccgcctggctgaccgcccaacgacccccgcccattgacgtcaataatgacgtatgttcccatagtaacgccaatagggactttccattgacgtcaatgggtggagtatttacggtaaactgcccacttggcagtacatcaagtgtatcatatgccaagtacgccccctattgacgtcaatgacggtaaatggcccgcctggcattatgcccagtacatgaccttatgggactttcctacttggcagtacatctacgtattagtcatcgctattaccatgtcgaggccacgttctgcttcactctccccatctcccccccctccccacccccaattttgtatttatttattttttaattattttgtgcagcgatgggggcggggggggggggcgcgcgccaggcggggcggggcggggcgaggggcggggcggggcgaggcggagaggtgcggcggcagccaatcagagcggcgcgctccgaaagtttccttttatggcgaggcggcggcggcggcggccctataaaaagcgaagcgcgcggcgggcgggagcaagcttgaactgaaaaaccagaaagttaactggtaagtttagtctttttgtcttttatttcaggtcccggatccggtggtggtgcaaatcaaagaactgctcctcagtggatgttgcctttacttctaggcctgtacggaagtgttacttctgctctaaaagctgcggaattgtacccgcggccgatccaccggtgccgccaccatgagtcctgcccagttcctgtttctgttagtgctctggattcgggaaaccaacggtgatgttgtgatgacccagactccactcactttgtcggttaccattggacaaccagcctccatctcttgcaagtcaagtcagagcctcttagatagtgatggaaagacatatttgaattggttgttacagaggccaggccagtctccaaagcgcctaatctatctggtgtctaaactggactctggagtccctgacagattcactggcagtggatcagggacagatttcacactgaaaattagcagagtggaggctgaggatttgggagtttattattgctggcaaggtacacattttcctcggacgttcggtggaggcaccaagctggaaatcaaacggggtggtggtggtagcggcggcggcggctctggtggtggtggatccgaggtccagctgcaacagtctggacctgagctggtgaagcctggggcttcagtgaagatatcctgcaagacttctggatacacattcactgaatacaccatacactgggtgaagcagagccatggagagagccttgagtggattggaggtattaatccaaacgatggtggtactatttacaaccagaagttcaagggcaaggccacattgactgtagacaagtcctccaaaacagcctacatggagctccgcagcctgacatctgaggattctgcagtcttttactgtgcaagagggccctccgccaggtttccttactggggccaagggactctggtcactgtctctgcatacccatacgatgttccagattacgcttagtgacctgaggatgatctttttccctctgccaaaaattatggggacatcatgaagccccttgagcatctgacttctggctaataaaggaaatttattttcattgcaatagtgtgttggaattttttgtgtctctcactcgcctaggatcgatgctacgtagataagtagcatggcgggttaatcattaactacagaggaacccctagtgatggagttggccactccctctctgcgcgctcgctcgctcactgaggccgggcgaccaaaggtcgcccgacgcccgggctttgcccgggcggcctcagtgagcgagcgagcgcgcagctgcctgcagg

SEQ ID NO: 2045 - DNA, 3778 bp, Artificial Sequence
  Description of Artificial Sequence: Synthetic polynucleotide
cctgcaggcagctgcgcgctcgctcgctcactgaggccgcccgggcaaagcccgggcgtcgggcgacctttggtcgcccggcctcagtgagcgagcgagcgcgcagagagggagtggccaactccatcactaggggttccttgtagttaatgattaacccgccatgctacttatctacgtagccatgcgtcgacataacgcgtcgacattgattattgactagttattaatagtaatcaattacggggtcattagttcatagcccatatatggagttccgcgttacataacttacggtaaatggcccgcctggctgaccgcccaacgacccccgcccattgacgtcaataatgacgtatgttcccatagtaacgccaatagggactttccattgacgtcaatgggtggagtatttacggtaaactgcccacttggcagtacatcaagtgtatcatatgccaagtacgccccctattgacgtcaatgacggtaaatggcccgcctggcattatgcccagtacatgaccttatgggactttcctacttggcagtacatctacgtattagtcatcgctattaccatgtcgaggccacgttctgcttcactctccccatctcccccccctccccacccccaattttgtatttatttattttttaattattttgtgcagcgatgggggcggggggggggggcgcgcgccaggcggggcggggcggggcgaggggcggggcggggcgaggcggagaggtgcggcggcagccaatcagagcggcgcgctccgaaagtttccttttatggcgaggcggcggcggcggcggccctataaaaagcgaagcgcgcggcgggcgggagcaagcttcgtttagtgaaccgtcagatcgcctggagacgccatccacgctgttttgacctccatagaagacaccgggaccgatccagcctccgcggattcgaatcccggccgggaacggtgcattggaacgcggattccccgtgccaagagtgacgtaagtaccgcctatagagtctataggcccacaaaaaatgctttcttcttttaatatacttttttgtttatcttatttctaatactttccctaatctctttctttcagggcaataatgatacaatgtatcatgcctctttgcaccattctaaagaataacagtgataatttctgggttaaggcaatagcaatatttctgcatataaatatttctgcatataaattgtaactgatgtaagaggtttcatattgctaatagcagctacaatccagctaccattctgcttttattttatggttgggataaggctggattattctgagtccaagctaggcccttttgctaatcatgttcatacctcttatcttcctcccacagctcctgggcaacgtgctggtctgtgtgctggcccatcactttggcaaagaattgggattcgaaccggtgccgccaccatgggatggagctggatctttctctttctcctgtcaggaactacaggtgtcctctctgaggtccagctgcaacagtctggacctgagctggtgaagcctggggcttcagtgaagatatcctgcaagacttctggatacacattcactgaatacaccatacactgggtgaagcagagccatggagagagccttgagtggattggaggtattaatccaaacgatggtggtactatttacaaccagaagttcaagggcaaggccacattgactgtagacaagtcctccaaaacagcctacatggagctccgcagcctgacatctgaggattctgcagtcttttactgtgcaagagggccctccgccaggtttccttactggggccaagggactctggtcactgtctctgcaggtggtggtggtagcggcggcggcggctctggtggtggtggatccgatgttgtgatgacccagactccactcactttgtcggttaccattggacaaccagcctccatctcttgcaagtcaagtcagagcctcttagatagtgatggaaagacatatttgaattggttgttacagaggccaggccagtctccaaagcgcctaatctatctggtgtctaaactggactctggagtccctgacagattcactggcagtggatcagggacagatttcacactgaaaattagcagagtggaggctgaggatttgggagtttattattgctggcaaggtacacattttcctcggacgttcggtggaggcaccaagctggaaatcaaacggtacccatacgatgttccagattacgcttagtgacctgaggatgatctttttccctctgccaaaaattatggggacatcatgaagccccttgagcatctgacttctggctaataaaggaaatttattttcattgcaatagtgtgttggaattttttgtgtctctcactcgcctaggtttcttgagacctctacaagagttggagttgacacttggggtactttcttggtgtaacgaactaatagcctgaaaaaaagaagtcatgtgttttcagcaaggcaagaaactgtctaacatagtagataaaacagagaacacttggccggaatcaactaagatgttgctatgttccattcatcatattatctccatctgcagagtagtgggttagtggagggtagaaaacattctcctgaacaactagttaaacttggctttgagttccacctgtaccacttgcataatcttgggaaagtgagttgcctaattcagtgacattaataaatttattaatttcttctttcaataaaacctggagagagcttcatatgtatcagcatatgctaaacttgaaagatacaagtagaaaatggaaggaaatatatctgactcaatagggatagttcaagggttaaattaaaagtagtaaagtattataattaatctgacatggtacctaatatataataatcatgtattaagaatgccagtcaccattaaaagtcaatgtatgactttaatctactcgaggaaagaaactatgtcttgttcactgttattatctctaaaatccataatcagaagagcaccatgtgtatgagccacacaataaatatctactgtataatatgtctcttcttgtttttaaccttcatagataagactctattgaattgggacattagtccagcaagccattctgtctctgtctcttctatggagggaaaggtttaaccatcaaagactaggtgcatctcccaaacaacctgaatttaatattcaaatatgtatctaaattcatttgttacatttttgtgttcagcttacatattactttttgagcgacatctattcaaggcctactacttgctgctctacaaaatattgccatgctctatttgcccattaactatttcttaaccttcaagggacatgctcagttctgatataccaagatttggtatttaccctcccagcctacatacttccaatcttaagagaacaatttttagactacattcaaatatagacctctccaccccatcaactattttatctctcctctcctatctttcttgacaaagagtgattagaaatatgcaattctaggtatcgatgctacgtagataagtagcatggcgggttaatcattaactacagaggaacccctagtgatggagttggccactccctctctgcgcgctcgctcgctcactgaggccgggcgaccaaaggtcgcccgacgcccgggctttgcccgggcggcctcagtgagcgagcgagcgcgcagctgcctgcagg

SEQ ID NO: 2046 - DNA, 2624 bp, Artificial Sequence
  Description of Artificial Sequence: Synthetic polynucleotide
cctgcaggcagctgcgcgctcgctcgctcactgaggccgcccgggcaaagcccgggcgtcgggcgacctttggtcgcccggcctcagtgagcgagcgagcgcgcagagagggagtggccaactccatcactaggggttccttgtagttaatgattaacccgccatgctacttatctacgtagccatgcgtcgacataacgcgtcgacattgattattgactagttattaatagtaatcaattacggggtcattagttcatagcccatatatggagttccgcgttacataacttacggtaaatggcccgcctggctgaccgcccaacgacccccgcccattgacgtcaataatgacgtatgttcccatagtaacgccaatagggactttccattgacgtcaatgggtggagtatttacggtaaactgcccacttggcagtacatcaagtgtatcatatgccaagtacgccccctattgacgtcaatgacggtaaatggcccgcctggcattatgcccagtacatgaccttatgggactttcctacttggcagtacatctacgtattagtcatcgctattaccatgtcgaggccacgttctgcttcactctccccatctcccccccctccccacccccaattttgtatttatttattttttaattattttgtgcagcgatgggggcggggggggggggcgcgcgccaggcggggcggggcggggcgaggggcggggcggggcgaggcggagaggtgcggcggcagccaatcagagcggcgcgctccgaaagtttccttttatggcgaggcggcggcggcggcggccctataaaaagcgaagcgcgcggcgggcgggagcaagcttcgtttagtgaaccgtcagatcgcctggagacgccatccacgctgttttgacctccatagaagacaccgggaccgatccagcctccgcggattcgaatcccggccgggaacggtgcattggaacgcggattccccgtgccaagagtgacgtaagtaccgcctatagagtctataggcccacaaaaaatgctttcttcttttaatatacttttttgtttatcttatttctaatactttccctaatctctttctttcagggcaataatgatacaatgtatcatgcctctttgcaccattctaaagaataacagtgataatttctgggttaaggcaatagcaatatttctgcatataaatatttctgcatataaattgtaactgatgtaagaggtttcatattgctaatagcagctacaatccagctaccattctgcttttattttatggttgggataaggctggattattctgagtccaagctaggcccttttgctaatcatgttcatacctcttatcttcctcccacagctcctgggcaacgtgctggtctgtgtgctggcccatcactttggcaaagaattgggattcgaaccggtgccgccaccatgggatggagctggatctttctctttctcctgtcaggaactacaggtgtcctctctgaggtccagctgcaacagtctggacctgagctggtgaagcctggggcttcagtgaagatatcctgcaagacttctggatacacattcactgaatacaccatacactgggtgaagcagagccatggagagagccttgagtggattggaggtattaatccaaacgatggtggtactatttacaaccagaagttcaagggcaaggccacattgactgtagacaagtcctccaaaacagcctacatggagctccgcagcctgacatctgaggattctgcagtcttttactgtgcaagagggccctccgccaggtttccttactggggccaagggactctggtcactgtctctgcaggtggtggtggtagcggcggcggcggctctggtggtggtggatccgatgttgtgatgacccagactccactcactttgtcggttaccattggacaaccagcctccatctcttgcaagtcaagtcagagcctcttagatagtgatggaaagacatatttgaattggttgttacagaggccaggccagtctccaaagcgcctaatctatctggtgtctaaactggactctggagtccctgacagattcactggcagtggatcagggacagatttcacactgaaaattagcagagtggaggctgaggatttgggagtttattattgctggcaaggtacacattttcctcggacgttcggtggaggcaccaagctggaaatcaaacggtacccatacgatgttccagattacgcttagtgacctgaggatgatctttttccctctgccaaaaattatggggacatcatgaagccccttgagcatctgacttctggctaataaaggaaatttattttcattgcaatagtgtgttggaattttttgtgtctctcactcgcctaggatcgatgctacgtagataagtagcatggcgggttaatcattaactacagaggaacccctagtgatggagttggccactccctctctgcgcgctcgctcgctcactgaggccgggcgaccaaaggtcgcccgacgcccgggctttgcccgggcggcctcagtgagcgagcgagcgcgcagctgcctgcagg

SEQ ID NO: 2047 - DNA, 2350 bp, Artificial Sequence
  Description of Artificial Sequence: Synthetic polynucleotide
cctgcaggcagctgcgcgctcgctcgctcactgaggccgcccgggcaaagcccgggcgtcgggcgacctttggtcgcccggcctcagtgagcgagcgagcgcgcagagagggagtggccaactccatcactaggggttccttgtagttaatgattaacccgccatgctacttatctacgtagccatgcgtcgacataacgcgtcgacattgattattgactagttattaatagtaatcaattacggggtcattagttcatagcccatatatggagttccgcgttacataacttacggtaaatggcccgcctggctgaccgcccaacgacccccgcccattgacgtcaataatgacgtatgttcccatagtaacgccaatagggactttccattgacgtcaatgggtggagtatttacggtaaactgcccacttggcagtacatcaagtgtatcatatgccaagtacgccccctattgacgtcaatgacggtaaatggcccgcctggcattatgcccagtacatgaccttatgggactttcctacttggcagtacatctacgtattagtcatcgctattaccatgtcgaggccacgttctgcttcactctccccatctcccccccctccccacccccaattttgtatttatttattttttaattattttgtgcagcgatgggggcggggggggggggcgcgcgccaggcggggcggggcggggcgaggggcggggcggggcgaggcggagaggtgcggcggcagccaatcagagcggcgcgctccgaaagtttccttttatggcgaggcggcggcggcggcggccctataaaaagcgaagcgcgcggcgggcgggagcaagcttcgtttagtgaaccgtcagatcgcctggagacgccatccacgctgttttgacctccatagaagacaccgggaccgatccagcctccgcggattcgaatcccggccgggaacggtgcattggaacgcggattccccgtgccaagagtgacgtaagtaccgcctatagagtctataggcccacaaaaaatgctttcttcttttcaagctaggcccttttgctaatcatgttcatacctcttatcttcctcccacagctcctgggcaacgtgctggtctgtgtgctggcccatcactttggcaaagaattgggattcgaaccggtgccgccaccatgggatggagctggatctttctctttctcctgtcaggaactacaggtgtcctctctgaggtccagctgcaacagtctggacctgagctggtgaagcctggggcttcagtgaagatatcctgcaagacttctggatacacattcactgaatacaccatacactgggtgaagcagagccatggagagagccttgagtggattggaggtattaatccaaacgatggtggtactatttacaaccagaagttcaagggcaaggccacattgactgtagacaagtcctccaaaacagcctacatggagctccgcagcctgacatctgaggattctgcagtcttttactgtgcaagagggccctccgccaggtttccttactggggccaagggactctggtcactgtctctgcaggtggtggtggtagcggcggcggcggctctggtggtggtggatccgatgttgtgatgacccagactccactcactttgtcggttaccattggacaaccagcctccatctcttgcaagtcaagtcagagcctcttagatagtgatggaaagacatatttgaattggttgttacagaggccaggccagtctccaaagcgcctaatctatctggtgtctaaactggactctggagtccctgacagattcactggcagtggatcagggacagatttcacactgaaaattagcagagtggaggctgaggatttgggagtttattattgctggcaaggtacacattttcctcggacgttcggtggaggcaccaagctggaaatcaaacggtacccatacgatgttccagattacgcttagtgacctgaggatgatctttttccctctgccaaaaattatggggacatcatgaagccccttgagcatctgacttctggctaataaaggaaatttattttcattgcaatagtgtgttggaattttttgtgtctctcactcgcctaggatcgatgctacgtagataagtagcatggcgggttaatcattaactacagaggaacccctagtgatggagttggccactccctctctgcgcgctcgctcgctcactgaggccgggcgaccaaaggtcgcccgacgcccgggctttgcccgggcggcctcagtgagcgagcgagcgcgcagctgcctgcagg

SEQ ID NO: 2048 - DNA, 2029 bp, Artificial Sequence
  Description of Artificial Sequence: Synthetic polynucleotide
cctgcaggcagctgcgcgctcgctcgctcactgaggccgcccgggcaaagcccgggcgtcgggcgacctttggtcgcccggcctcagtgagcgagcgagcgcgcagagagggagtggccaactccatcactaggggttccttgtagttaatgattaacccgccatgctacttatctacgtagccatgcgtcgacataacgcgtcgacattgattattgactagttattaatagtaatcaattacggggtcattagttcatagcccatatatggagttccgcgttacataacttacggtaaatggcccgcctggctgaccgcccaacgacccccgcccattgacgtcaataatgacgtatgttcccatagtaacgccaatagggactttccattgacgtcaatgggtggagtatttacggtaaactgcccacttggcagtacatcaagtgtatcatatgccaagtacgccccctattgacgtcaatgacggtaaatggcccgcctggcattatgcccagtacatgaccttatgggactttcctacttggcagtacatctacgtattagtcatcgctattaccatgtcgaggccacgttctgcttcactctccccatctcccccccctccccacccccaattttgtatttatttattttttaattattttgtgcagcgatgggggcggggggggggggcgcgcgccaggcggggcggggcggggcgaggggcggggcggggcgaggcggagaggtgcggcggcagccaatcagagcggcgcgctccgaaagtttccttttatggcgaggcggcggcggcggcggccctataaaaagcgaagcgcgcggcgggcgggagcaccggtgccgccaccatgggatggagctggatctttctctttctcctgtcaggaactacaggtgtcctctctgaggtccagctgcaacagtctggacctgagctggtgaagcctggggcttcagtgaagatatcctgcaagacttctggatacacattcactgaatacaccatacactgggtgaagcagagccatggagagagccttgagtggattggaggtattaatccaaacgatggtggtactatttacaaccagaagttcaagggcaaggccacattgactgtagacaagtcctccaaaacagcctacatggagctccgcagcctgacatctgaggattctgcagtcttttactgtgcaagagggccctccgccaggtttccttactggggccaagggactctggtcactgtctctgcaggtggtggtggtagcggcggcggcggctctggtggtggtggatccgatgttgtgatgacccagactccactcactttgtcggttaccattggacaaccagcctccatctcttgcaagtcaagtcagagcctcttagatagtgatggaaagacatatttgaattggttgttacagaggccaggccagtctccaaagcgcctaatctatctggtgtctaaactggactctggagtccctgacagattcactggcagtggatcagggacagatttcacactgaaaattagcagagtggaggctgaggatttgggagtttattattgctggcaaggtacacattttcctcggacgttcggtggaggcaccaagctggaaatcaaacggtacccatacgatgttccagattacgcttagtgacctgaggatgatctttttccctctgccaaaaattatggggacatcatgaagccccttgagcatctgacttctggctaataaaggaaatttattttcattgcaatagtgtgttggaattttttgtgtctctcactcgcctaggatcgatgctacgtagataagtagcatggcgggttaatcattaactacagaggaacccctagtgatggagttggccactccctctctgcgcgctcgctcgctcactgaggccgggcgaccaaaggtcgcccgacgcccgggctttgcccgggcggcctcagtgagcgagcgagcgcgcagctgcctgcagg

SEQ ID NO: 2049 - DNA, 2218 bp, Artificial Sequence
  Description of Artificial Sequence: Synthetic polynucleotide
cctgcaggcagctgcgcgctcgctcgctcactgaggccgcccgggcaaagcccgggcgtcgggcgacctttggtcgcccggcctcagtgagcgagcgagcgcgcagagagggagtggccaactccatcactaggggttccttgtagttaatgattaacccgccatgctacttatctacgtagccatgcgtcgacataacgcgtcgacattgattattgactagttattaatagtaatcaattacggggtcattagttcatagcccatatatggagttccgcgttacataacttacggtaaatggcccgcctggctgaccgcccaacgacccccgcccattgacgtcaataatgacgtatgttcccatagtaacgccaatagggactttccattgacgtcaatgggtggagtatttacggtaaactgcccacttggcagtacatcaagtgtatcatatgccaagtacgccccctattgacgtcaatgacggtaaatggcccgcctggcattatgcccagtacatgaccttatgggactttcctacttggcagtacatctacgtattagtcatcgctattaccatgtcgaggccacgttctgcttcactctccccatctcccccccctccccacccccaattttgtatttatttattttttaattattttgtgcagcgatgggggcggggggggggggcgcgcgccaggcggggcggggcggggcgaggggcggggcggggcgaggcggagaggtgcggcggcagccaatcagagcggcgcgctccgaaagtttccttttatggcgaggcggcggcggcggcggccctataaaaagcgaagcgcgcggcgggcgggagcaagcttgaactgaaaaaccagaaagttaactggtaagtttagtctttttgtcttttatttcaggtcccggatccggtggtggtgcaaatcaaagaactgctcctcagtggatgttgcctttacttctaggcctgtacggaagtgttacttctgctctaaaagctgcggaattgtacccgcggccgatccaccggtgccgccaccatgggatggagctggatctttctctttctcctgtcaggaactacaggtgtcctctctgaggtccagctgcaacagtctggacctgagctggtgaagcctggggcttcagtgaagatatcctgcaagacttctggatacacattcactgaatacaccatacactgggtgaagcagagccatggagagagccttgagtggattggaggtattaatccaaacgatggtggtactatttacaaccagaagttcaagggcaaggccacattgactgtagacaagtcctccaaaacagcctacatggagctccgcagcctgacatctgaggattctgcagtcttttactgtgcaagagggccctccgccaggtttccttactggggccaagggactctggtcactgtctctgcaggtggtggtggtagcggcggcggcggctctggtggtggtggatccgatgttgtgatgacccagactccactcactttgtcggttaccattggacaaccagcctccatctcttgcaagtcaagtcagagcctcttagatagtgatggaaagacatatttgaattggttgttacagaggccaggccagtctccaaagcgcctaatctatctggtgtctaaactggactctggagtccctgacagattcactggcagtggatcagggacagatttcacactgaaaattagcagagtggaggctgaggatttgggagtttattattgctggcaaggtacacattttcctcggacgttcggtggaggcaccaagctggaaatcaaacggtacccatacgatgttccagattacgcttagtgacctgaggatgatctttttccctctgccaaaaattatggggacatcatgaagccccttgagcatctgacttctggctaataaaggaaatttattttcattgcaatagtgtgttggaattttttgtgtctctcactcgcctaggatcgatgctacgtagataagtagcatggcgggttaatcattaactacagaggaacccctagtgatggagttggccactccctctctgcgcgctcgctcgctcactgaggccgggcgaccaaaggtcgcccgacgcccgggctttgcccgggcggcctcagtgagcgagcgagcgcgcagctgcctgcagg

SEQ ID NO: 2050 - DNA, 4188 bp, Artificial Sequence
  Description of Artificial Sequence: Synthetic polynucleotide
cctgcaggcagctgcgcgctcgctcgctcactgaggccgcccgggcaaagcccgggcgtcgggcgacctttggtcgcccggcctcagtgagcgagcgagcgcgcagagagggagtggccaactccatcactaggggttccttgtagttaatgattaacccgccatgctacttatctacgtagccatgcgtcgacataacgcgtcgacattgattattgactagttattaatagtaatcaattacggggtcattagttcatagcccatatatggagttccgcgttacataacttacggtaaatggcccgcctggctgaccgcccaacgacccccgcccattgacgtcaataatgacgtatgttcccatagtaacgccaatagggactttccattgacgtcaatgggtggagtatttacggtaaactgcccacttggcagtacatcaagtgtatcatatgccaagtacgccccctattgacgtcaatgacggtaaatggcccgcctggcattatgcccagtacatgaccttatgggactttcctacttggcagtacatctacgtattagtcatcgctattaccatgtcgaggccacgttctgcttcactctccccatctcccccccctccccacccccaattttgtatttatttattttttaattattttgtgcagcgatgggggcggggggggggggcgcgcgccaggcggggcggggcggggcgaggggcggggcggggcgaggcggagaggtgcggcggcagccaatcagagcggcgcgctccgaaagtttccttttatggcgaggcggcggcggcggcggccctataaaaagcgaagcgcgcggcgggcgggagcaagcttcgtttagtgaaccgtcagatcgcctggagacgccatccacgctgttttgacctccatagaagacaccgggaccgatccagcctccgcggattcgaatcccggccgggaacggtgcattggaacgcggattccccgtgccaagagtgacgtaagtaccgcctatagagtctataggcccacaaaaaatgctttcttcttttaatatacttttttgtttatcttatttctaatactttccctaatctctttctttcagggcaataatgatacaatgtatcatgcctctttgcaccattctaaagaataacagtgataatttctgggttaaggcaatagcaatatttctgcatataaatatttctgcatataaattgtaactgatgtaagaggtttcatattgctaatagcagctacaatccagctaccattctgcttttattttatggttgggataaggctggattattctgagtccaagctaggcccttttgctaatcatgttcatacctcttatcttcctcccacagctcctgggcaacgtgctggtctgtgtgctggcccatcactttggcaaagaattgggattcgaaccggtgccgccaccatgggatggagctggatctttctctttctcctgtcaggaactacaggtgtcctctctgaggtccagctgcaacagtctggacctgagctggtgaagcctggggcttcagtgaagatatcctgcaagacttctggatacacattcactgaatacaccatacactgggtgaagcagagccatggagagagccttgagtggattggaggtattaatccaaacgatggtggtactatttacaaccagaagttcaagggcaaggccacattgactgtagacaagtcctccaaaacagcctacatggagctccgcagcctgacatctgaggattctgcagtcttttactgtgcaagagggccctccgccaggtttccttactggggccaagggactctggtcactgtctctgcaggtggtggtggtagcggcggcggcggctctggtggtggtggatccgatgttgtgatgacccagactccactcactttgtcggttaccattggacaaccagcctccatctcttgcaagtcaagtcagagcctcttagatagtgatggaaagacatatttgaattggttgttacagaggccaggccagtctccaaagcgcctaatctatctggtgtctaaactggactctggagtccctgacagattcactggcagtggatcagggacagatttcacactgaaaattagcagagtggaggctgaggatttgggagtttattattgctggcaaggtacacattttcctcggacgttcggtggaggcaccaagctggaaatcaaacggtccggaggcggcggcagcatgggatggagctggatctttctctttctcctgtcaggaactacaggtgtcctctctgaggtccagctgcaacagtctggacctgagctggtgaagcctggggcttcagtgaagatatcctgcaagacttctggatacacattcactgaatacaccatacactgggtgaagcagagccatggagagagccttgagtggattggaggtattaatccaaacgatggtggtactatttacaaccagaagttcaagggcaaggccacattgactgtagacaagtcctccaaaacagcctacatggagctccgcagcctgacatctgaggattctgcagtcttttactgtgcaagagggccctccgccaggtttccttactggggccaagggactctggtcactgtctctgcaggtggtggtggtagcggcggcggcggctctggtggtggtggatccgatgttgtgatgacccagactccactcactttgtcggttaccattggacaaccagcctccatctcttgcaagtcaagtcagagcctcttagatagtgatggaaagacatatttgaattggttgttacagaggccaggccagtctccaaagcgcctaatctatctggtgtctaaactggactctggagtccctgacagattcactggcagtggatcagggacagatttcacactgaaaattagcagagtggaggctgaggatttgggagtttattattgctggcaaggtacacattttcctcggacgttcggtggaggcaccaagctggaaatcaaacggtccggaggcggcggcagcgaggtccagctgcaacagtctggacctgagctggtgaagcctggggcttcagtgaagatatcctgcaagacttctggatacacattcactgaatacaccatacactgggtgaagcagagccatggagagagccttgagtggattggaggtattaatccaaacgatggtggtactatttacaaccagaagttcaagggcaaggccacattgactgtagacaagtcctccaaaacagcctacatggagctccgcagcctgacatctgaggattctgcagtcttttactgtgcaagagggccctccgccaggtttccttactggggccaagggactctggtcactgtctctgcaggtggtggtggtagcggcggcggcggctctggtggtggtggatccgatgttgtgatgacccagactccactcactttgtcggttaccattggacaaccagcctccatctcttgcaagtcaagtcagagcctcttagatagtgatggaaagacatatttgaattggttgttacagaggccaggccagtctccaaagcgcctaatctatctggtgtctaaactggactctggagtccctgacagattcactggcagtggatcagggacagatttcacactgaaaattagcagagtggaggctgaggatttgggagtttattattgctggcaaggtacacattttcctcggacgttcggtggaggcaccaagctggaaatcaaacggtacccatacgatgttccagattacgcttagtgacctgaggatgatctttttccctctgccaaaaattatggggacatcatgaagccccttgagcatctgacttctggctaataaaggaaatttattttcattgcaatagtgtgttggaattttttgtgtctctcactcgtcctaggatcgatgctacgtagataagtagcatggcgggttaatcattaactacagaggaacccctagtgatggagttggccactccctctctgcgcgctcgctcgctcactgaggccgggcgaccaaaggtcgcccgacgcccgggctttgcccgggcggcctcagtgagcgagcgagcgcgcagctgcctgcagg

SEQ ID NO: 2051 - DNA, 3435 bp, Artificial Sequence
  Description of Artificial Sequence: Synthetic polynucleotide
cctgcaggcagctgcgcgctcgctcgctcactgaggccgcccgggcaaagcccgggcgtcgggcgacctttggtcgcccggcctcagtgagcgagcgagcgcgcagagagggagtggccaactccatcactaggggttccttgtagttaatgattaacccgccatgctacttatctacgtagccatgcgtcgacataacgcgtcgacattgattattgactagttattaatagtaatcaattacggggtcattagttcatagcccatatatggagttccgcgttacataacttacggtaaatggcccgcctggctgaccgcccaacgacccccgcccattgacgtcaataatgacgtatgttcccatagtaacgccaatagggactttccattgacgtcaatgggtggagtatttacggtaaactgcccacttggcagtacatcaagtgtatcatatgccaagtacgccccctattgacgtcaatgacggtaaatggcccgcctggcattatgcccagtacatgaccttatgggactttcctacttggcagtacatctacgtattagtcatcgctattaccatgtcgaggccacgttctgcttcactctccccatctcccccccctccccacccccaattttgtatttatttattttttaattattttgtgcagcgatgggggcggggggggggggcgcgcgccaggcggggcggggcggggcgaggggcggggcggggcgaggcggagaggtgcggcggcagccaatcagagcggcgcgctccgaaagtttccttttatggcgaggcggcggcggcggcggccctataaaaagcgaagcgcgcggcgggcgggagcaagcttcgtttagtgaaccgtcagatcgcctggagacgccatccacgctgttttgacctccatagaagacaccgggaccgatccagcctccgcggattcgaatcccggccgggaacggtgcattggaacgcggattccccgtgccaagagtgacgtaagtaccgcctatagagtctataggcccacaaaaaatgctttcttcttttaatatacttttttgtttatcttatttctaatactttccctaatctctttctttcagggcaataatgatacaatgtatcatgcctctttgcaccattctaaagaataacagtgataatttctgggttaaggcaatagcaatatttctgcatataaatatttctgcatataaattgtaactgatgtaagaggtttcatattgctaatagcagctacaatccagctaccattctgcttttattttatggttgggataaggctggattattctgagtccaagctaggcccttttgctaatcatgttcatacctcttatcttcctcccacagctcctgggcaacgtgctggtctgtgtgctggcccatcactttggcaaagaattgggattcgaaccggtgccgccaccatgggatggagctggatctttctctttctcctgtcaggaactacaggtgtcctctctgaggtccagctgcaacagtctggacctgagctggtgaagcctggggcttcagtgaagatatcctgcaagacttctggatacacattcactgaatacaccatacactgggtgaagcagagccatggagagagccttgagtggattggaggtattaatccaaacgatggtggtactatttacaaccagaagttcaagggcaaggccacattgactgtagacaagtcctccaaaacagcctacatggagctccgcagcctgacatctgaggattctgcagtcttttactgtgcaagagggccctccgccaggtttccttactggggccaagggactctggtcactgtctctgcaggtggtggtggtagcggcggcggcggctctggtggtggtggatccgatgttgtgatgacccagactccactcactttgtcggttaccattggacaaccagcctccatctcttgcaagtcaagtcagagcctcttagatagtgatggaaagacatatttgaattggttgttacagaggccaggccagtctccaaagcgcctaatctatctggtgtctaaactggactctggagtccctgacagattcactggcagtggatcagggacagatttcacactgaaaattagcagagtggaggctgaggatttgggagtttattattgctggcaaggtacacattttcctcggacgttcggtggaggcaccaagctggaaatcaaacggtccggaggcggcggcagcatgggatggagctggatctttctctttctcctgtcaggaactacaggtgtcctctctgaggtccagctgcaacagtctggacctgagctggtgaagcctggggcttcagtgaagatatcctgcaagacttctggatacacattcactgaatacaccatacactgggtgaagcagagccatggagagagccttgagtggattggaggtattaatccaaacgatggtggtactatttacaaccagaagttcaagggcaaggccacattgactgtagacaagtcctccaaaacagcctacatggagctccgcagcctgacatctgaggattctgcagtcttttactgtgcaagagggccctccgccaggtttccttactggggccaagggactctggtcactgtctctgcaggtggtggtggtagcggcggcggcggctctggtggtggtggatccgatgttgtgatgacccagactccactcactttgtcggttaccattggacaaccagcctccatctcttgcaagtcaagtcagagcctcttagatagtgatggaaagacatatttgaattggttgttacagaggccaggccagtctccaaagcgcctaatctatctggtgtctaaactggactctggagtccctgacagattcactggcagtggatcagggacagatttcacactgaaaattagcagagtggaggctgaggatttgggagtttattattgctggcaaggtacacattttcctcggacgttcggtggaggcaccaagctggaaatcaaacggtacccatacgatgttccagattacgcttagtgacctgaggatgatctttttccctctgccaaaaattatggggacatcatgaagccccttgagcatctgacttctggctaataaaggaaatttattttcattgcaatagtgtgttggaattttttgtgtctctcactcgtcctaggatcgatgctacgtagataagtagcatggcgggttaatcattaactacagaggaacccctagtgatggagttggccactccctctctgcgcgctcgctcgctcactgaggccgggcgaccaaaggtcgcccgacgcccgggctttgcccgggcggcctcagtgagcgagcgagcgcgcagctgcctgcagg

SEQ ID NO: 2052 - DNA, 4395 bp, Artificial Sequence
  Description of Artificial Sequence: Synthetic polynucleotide
cctgcaggcagctgcgcgctcgctcgctcactgaggccgcccgggcaaagcccgggcgtcgggcgacctttggtcgcccggcctcagtgagcgagcgagcgcgcagagagggagtggccaactccatcactaggggttccttgtagttaatgattaacccgccatgctacttatctacgtagccatgcgtcgacataacgcgtcgacattgattattgactagttattaatagtaatcaattacggggtcattagttcatagcccatatatggagttccgcgttacataacttacggtaaatggcccgcctggctgaccgcccaacgacccccgcccattgacgtcaataatgacgtatgttcccatagtaacgccaatagggactttccattgacgtcaatgggtggagtatttacggtaaactgcccacttggcagtacatcaagtgtatcatatgccaagtacgccccctattgacgtcaatgacggtaaatggcccgcctggcattatgcccagtacatgaccttatgggactttcctacttggcagtacatctacgtattagtcatcgctattaccatgtcgaggccacgttctgcttcactctccccatctcccccccctccccacccccaattttgtatttatttattttttaattattttgtgcagcgatgggggcggggggggggggcgcgcgccaggcggggcggggcggggcgaggggcggggcggggcgaggcggagaggtgcggcggcagccaatcagagcggcgcgctccgaaagtttccttttatggcgaggcggcggcggcggcggccctataaaaagcgaagcgcgcggcgggcgggagcaagcttcgtttagtgaaccgtcagatcgcctggagacgccatccacgctgttttgacctccatagaagacaccgggaccgatccagcctccgcggattcgaatcccggccgggaacggtgcattggaacgcggattccccgtgccaagagtgacgtaagtaccgcctatagagtctataggcccacaaaaaatgctttcttcttttaatatacttttttgtttatcttatttctaatactttccctaatctctttctttcagggcaataatgatacaatgtatcatgcctctttgcaccattctaaagaataacagtgataatttctgggttaaggcaatagcaatatttctgcatataaatatttctgcatataaattgtaactgatgtaagaggtttcatattgctaatagcagctacaatccagctaccattctgcttttattttatggttgggataaggctggattattctgagtccaagctaggcccttttgctaatcatgttcatacctcttatcttcctcccacagctcctgggcaacgtgctggtctgtgtgctggcccatcactttggcaaagaattgggattcgaaccggtgccgccaccatgggatggagctggatctttctctttctcctgtcaggaactacaggtgtcctctctgaggtccagctgcaacagtctggacctgagctggtgaagcctggggcttcagtgaagatatcctgcaagacttctggatacacattcactgaatacaccatacactgggtgaagcagagccatggagagagccttgagtggattggaggtattaatccaaacgatggtggtactatttacaaccagaagttcaagggcaaggccacattgactgtagacaagtcctccaaaacagcctacatggagctccgcagcctgacatctgaggattctgcagtcttttactgtgcaagagggccctccgccaggtttccttactggggccaagggactctggtcactgtctctgcaggtggtggtggtagcggcggcggcggctctggtggtggtggatccgatgttgtgatgacccagactccactcactttgtcggttaccattggacaaccagcctccatctcttgcaagtcaagtcagagcctcttagatagtgatggaaagacatatttgaattggttgttacagaggccaggccagtctccaaagcgcctaatctatctggtgtctaaactggactctggagtccctgacagattcactggcagtggatcagggacagatttcacactgaaaattagcagagtggaggctgaggatttgggagtttattattgctggcaaggtacacattttcctcggacgttcggtggaggcaccaagctggaaatcaaacggtacccatacgatgttccagattacgctagaaagaggcgagagggcagaggaagtcttctaacatgcggtgacgtggaggagaatcccggccctatgggatggagctggatctttctctttctcctgtcaggaactacaggtgtcctctctgaggtccagctgcaacagtctggacctgagctggtgaagcctggggcttcagtgaagatatcctgcaagacttctggatacacattcactgaatacaccatacactgggtgaagcagagccatggagagagccttgagtggattggaggtattaatccaaacgatggtggtactatttacaaccagaagttcaagggcaaggccacattgactgtagacaagtcctccaaaacagcctacatggagctccgcagcctgacatctgaggattctgcagtcttttactgtgcaagagggccctccgccaggtttccttactggggccaagggactctggtcactgtctctgcaggtggtggtggtagcggcggcggcggctctggtggtggtggatccgatgttgtgatgacccagactccactcactttgtcggttaccattggacaaccagcctccatctcttgcaagtcaagtcagagcctcttagatagtgatggaaagacatatttgaattggttgttacagaggccaggccagtctccaaagcgcctaatctatctggtgtctaaactggactctggagtccctgacagattcactggcagtggatcagggacagatttcacactgaaaattagcagagtggaggctgaggatttgggagtttattattgctggcaaggtacacattttcctcggacgttcggtggaggcaccaagctggaaatcaaacggtacccatacgatgttccagattacgctagaaagaggcgagagggcagaggaagtcttctaacatgcggtgacgtggaggagaatcccggccctatgggatggagctggatctttctctttctcctgtcaggaactacaggtgtcctctctgaggtccagctgcaacagtctggacctgagctggtgaagcctggggcttcagtgaagatatcctgcaagacttctggatacacattcactgaatacaccatacactgggtgaagcagagccatggagagagccttgagtggattggaggtattaatccaaacgatggtggtactatttacaaccagaagttcaagggcaaggccacattgactgtagacaagtcctccaaaacagcctacatggagctccgcagcctgacatctgaggattctgcagtcttttactgtgcaagagggccctccgccaggtttccttactggggccaagggactctggtcactgtctctgcaggtggtggtggtagcggcggcggcggctctggtggtggtggatccgatgttgtgatgacccagactccactcactttgtcggttaccattggacaaccagcctccatctcttgcaagtcaagtcagagcctcttagatagtgatggaaagacatatttgaattggttgttacagaggccaggccagtctccaaagcgcctaatctatctggtgtctaaactggactctggagtccctgacagattcactggcagtggatcagggacagatttcacactgaaaattagcagagtggaggctgaggatttgggagtttattattgctggcaaggtacacattttcctcggacgttcggtggaggcaccaagctggaaatcaaacggtacccatacgatgttccagattacgcttagtgacctgaggatgatctttttccctctgccaaaaattatggggacatcatgaagccccttgagcatctgacttctggctaataaaggaaatttattttcattgcaatagtgtgttggaattttttgtgtctctcactcgtcctaggatcgatgctacgtagataagtagcatggcgggttaatcattaactacagaggaacccctagtgatggagttggccactccctctctgcgcgctcgctcgctcactgaggccgggcgaccaaaggtcgcccgacgcccgggctttgcccgggcggcctcagtgagcgagcgagcgcgcagctgcctgcagg

SEQ ID NO: 2053 - DNA, 3510 bp, Artificial Sequence
  Description of Artificial Sequence: Synthetic polynucleotide
cctgcaggcagctgcgcgctcgctcgctcactgaggccgcccgggcaaagcccgggcgtcgggcgacctttggtcgcccggcctcagtgagcgagcgagcgcgcagagagggagtggccaactccatcactaggggttccttgtagttaatgattaacccgccatgctacttatctacgtagccatgcgtcgacataacgcgtcgacattgattattgactagttattaatagtaatcaattacggggtcattagttcatagcccatatatggagttccgcgttacataacttacggtaaatggcccgcctggctgaccgcccaacgacccccgcccattgacgtcaataatgacgtatgttcccatagtaacgccaatagggactttccattgacgtcaatgggtggagtatttacggtaaactgcccacttggcagtacatcaagtgtatcatatgccaagtacgccccctattgacgtcaatgacggtaaatggcccgcctggcattatgcccagtacatgaccttatgggactttcctacttggcagtacatctacgtattagtcatcgctattaccatgtcgaggccacgttctgcttcactctccccatctcccccccctccccacccccaattttgtatttatttattttttaattattttgtgcagcgatgggggcggggggggggggcgcgcgccaggcggggcggggcggggcgaggggcggggcggggcgaggcggagaggtgcggcggcagccaatcagagcggcgcgctccgaaagtttccttttatggcgaggcggcggcggcggcggccctataaaaagcgaagcgcgcggcgggcgggagcaagcttcgtttagtgaaccgtcagatcgcctggagacgccatccacgctgttttgacctccatagaagacaccgggaccgatccagcctccgcggattcgaatcccggccgggaacggtgcattggaacgcggattccccgtgccaagagtgacgtaagtaccgcctatagagtctataggcccacaaaaaatgctttcttcttttaatatacttttttgtttatcttatttctaatactttccctaatctctttctttcagggcaataatgatacaatgtatcatgcctctttgcaccattctaaagaataacagtgataatttctgggttaaggcaatagcaatatttctgcatataaatatttctgcatataaattgtaactgatgtaagaggtttcatattgctaatagcagctacaatccagctaccattctgcttttattttatggttgggataaggctggattattctgagtccaagctaggcccttttgctaatcatgttcatacctcttatcttcctcccacagctcctgggcaacgtgctggtctgtgtgctggcccatcactttggcaaagaattgggattcgaaccggtgccgccaccatgggatggagctggatctttctctttctcctgtcaggaactacaggtgtcctctctgaggtccagctgcaacagtctggacctgagctggtgaagcctggggcttcagtgaagatatcctgcaagacttctggatacacattcactgaatacaccatacactgggtgaagcagagccatggagagagccttgagtggattggaggtattaatccaaacgatggtggtactatttacaaccagaagttcaagggcaaggccacattgactgtagacaagtcctccaaaacagcctacatggagctccgcagcctgacatctgaggattctgcagtcttttactgtgcaagagggccctccgccaggtttccttactggggccaagggactctggtcactgtctctgcaggtggtggtggtagcggcggcggcggctctggtggtggtggatccgatgttgtgatgacccagactccactcactttgtcggttaccattggacaaccagcctccatctcttgcaagtcaagtcagagcctcttagatagtgatggaaagacatatttgaattggttgttacagaggccaggccagtctccaaagcgcctaatctatctggtgtctaaactggactctggagtccctgacagattcactggcagtggatcagggacagatttcacactgaaaattagcagagtggaggctgaggatttgggagtttattattgctggcaaggtacacattttcctcggacgttcggtggaggcaccaagctggaaatcaaacggtacccatacgatgttccagattacgctagaaagaggcgagagggcagaggaagtcttctaacatgcggtgacgtggaggagaatcccggccctatgggatggagctggatctttctctttctcctgtcaggaactacaggtgtcctctctgaggtccagctgcaacagtctggacctgagctggtgaagcctggggcttcagtgaagatatcctgcaagacttctggatacacattcactgaatacaccatacactgggtgaagcagagccatggagagagccttgagtggattggaggtattaatccaaacgatggtggtactatttacaaccagaagttcaagggcaaggccacattgactgtagacaagtcctccaaaacagcctacatggagctccgcagcctgacatctgaggattctgcagtcttttactgtgcaagagggccctccgccaggtttccttactggggccaagggactctggtcactgtctctgcaggtggtggtggtagcggcggcggcggctctggtggtggtggatccgatgttgtgatgacccagactccactcactttgtcggttaccattggacaaccagcctccatctcttgcaagtcaagtcagagcctcttagatagtgatggaaagacatatttgaattggttgttacagaggccaggccagtctccaaagcgcctaatctatctggtgtctaaactggactctggagtccctgacagattcactggcagtggatcagggacagatttcacactgaaaattagcagagtggaggctgaggatttgggagtttattattgctggcaaggtacacattttcctcggacgttcggtggaggcaccaagctggaaatcaaacggtacccatacgatgttccagattacgcttagtgacctgaggatgatctttttccctctgccaaaaattatggggacatcatgaagccccttgagcatctgacttctggctaataaaggaaatttattttcattgcaatagtgtgttggaattttttgtgtctctcactcgtcctaggatcgatgctacgtagataagtagcatggcgggttaatcattaactacagaggaacccctagtgatggagttggccactccctctctgcgcgctcgctcgctcactgaggccgggcgaccaaaggtcgcccgacgcccgggctttgcccgggcggcctcagtgagcgagcgagcgcgcagctgcctgcagg

SEQ ID NO: 2054 - DNA, 4131 bp, Artificial Sequence
  Description of Artificial Sequence: Synthetic polynucleotide
cctgcaggcagctgcgcgctcgctcgctcactgaggccgcccgggcaaagcccgggcgtcgggcgacctttggtcgcccggcctcagtgagcgagcgagcgcgcagagagggagtggccaactccatcactaggggttccttgtagttaatgattaacccgccatgctacttatctacgtagccatgcgtcgacataacgcgtcgacattgattattgactagttattaatagtaatcaattacggggtcattagttcatagcccatatatggagttccgcgttacataacttacggtaaatggcccgcctggctgaccgcccaacgacccccgcccattgacgtcaataatgacgtatgttcccatagtaacgccaatagggactttccattgacgtcaatgggtggagtatttacggtaaactgcccacttggcagtacatcaagtgtatcatatgccaagtacgccccctattgacgtcaatgacggtaaatggcccgcctggcattatgcccagtacatgaccttatgggactttcctacttggcagtacatctacgtattagtcatcgctattaccatgtcgaggccacgttctgcttcactctccccatctcccccccctccccacccccaattttgtatttatttattttttaattattttgtgcagcgatgggggcggggggggggggcgcgcgccaggcggggcggggcggggcgaggggcggggcggggcgaggcggagaggtgcggcggcagccaatcagagcggcgcgctccgaaagtttccttttatggcgaggcggcggcggcggcggccctataaaaagcgaagcgcgcggcgggcgggagcaagcttcgtttagtgaaccgtcagatcgcctggagacgccatccacgctgttttgacctccatagaagacaccgggaccgatccagcctccgcggattcgaatcccggccgggaacggtgcattggaacgcggattccccgtgccaagagtgacgtaagtaccgcctatagagtctataggcccacaaaaaatgctttcttcttttaatatacttttttgtttatcttatttctaatactttccctaatctctttctttcagggcaataatgatacaatgtatcatgcctctttgcaccattctaaagaataacagtgataatttctgggttaaggcaatagcaatatttctgcatataaatatttctgcatataaattgtaactgatgtaagaggtttcatattgctaatagcagctacaatccagctaccattctgcttttattttatggttgggataaggctggattattctgagtccaagctaggcccttttgctaatcatgttcatacctcttatcttcctcccacagctcctgggcaacgtgctggtctgtgtgctggcccatcactttggcaaagaattgggattcgaaccggtgccgccaccatgagtcctgcccagttcctgtttctgttagtgctctggattcgggaaaccaacggtgatgttgtgatgacccagactccactcactttgtcggttaccattggacaaccagcctccatctcttgcaagtcaagtcagagcctcttagatagtgatggaaagacatatttgaattggttgttacagaggccaggccagtctccaaagcgcctaatctatctggtgtctaaactggactctggagtccccgacagattcactggcagtggatcagggacagatttcacactgaaaattagcagagtggaggctgaggatttgggagtttattattgctggcaaggtacacattttcctcggacgttcggtggaggcaccaagctggaaatcaaacggggtggtggtggtagcggcggcggcggctctggtggtggtggatccgaggtccagctgcaacagtctggacctgagctggtgaagcctggggcttcagtgaagatatcctgcaagacttctggatacacattcactgaatacaccatacactgggtgaagcagagccatggagagagccttgagtggattggaggtattaatccaaacgatggtggtactatttacaaccagaagttcaagggcaaggccacattgactgtagacaagtcctccaaaacagcctacatggagctccgcagcctgacatctgaggattctgcagtcttttactgtgcaagagggccctccgccaggtttccttactggggccaagggactctggtcactgtctctgcatccggaggcggcggcagcgatgttgtgatgacccagactccactcactttgtcggttaccattggacaaccagcctccatctcttgcaagtcaagtcagagcctcttagatagtgatggaaagacatatttgaattggttgttacagaggccaggccagtctccaaagcgcctaatctatctggtgtctaaactggactctggagtccccgacagattcactggcagtggatcagggacagatttcacactgaaaattagcagagtggaggctgaggatttgggagtttattattgctggcaaggtacacattttcctcggacgttcggtggaggcaccaagctggaaatcaaacggggtggtggtggtagcggcggcggcggctctggtggtggtggatccgaggtccagctgcaacagtctggacctgagctggtgaagcctggggcttcagtgaagatatcctgcaagacttctggatacacattcactgaatacaccatacactgggtgaagcagagccatggagagagccttgagtggattggaggtattaatccaaacgatggtggtactatttacaaccagaagttcaagggcaaggccacattgactgtagacaagtcctccaaaacagcctacatggagctccgcagcctgacatctgaggattctgcagtcttttactgtgcaagagggccctccgccaggtttccttactggggccaagggactctggtcactgtctctgcatccggaggcggcggcagcgatgttgtgatgacccagactccactcactttgtcggttaccattggacaaccagcctccatctcttgcaagtcaagtcagagcctcttagatagtgatggaaagacatatttgaattggttgttacagaggccaggccagtctccaaagcgcctaatctatctggtgtctaaactggactctggagtccccgacagattcactggcagtggatcagggacagatttcacactgaaaattagcagagtggaggctgaggatttgggagtttattattgctggcaaggtacacattttcctcggacgttcggtggaggcaccaagctggaaatcaaacggggtggtggtggtagcggcggcggcggctctggtggtggtggatccgaggtccagctgcaacagtctggacctgagctggtgaagcctggggcttcagtgaagatatcctgcaagacttctggatacacattcactgaatacaccatacactgggtgaagcagagccatggagagagccttgagtggattggaggtattaatccaaacgatggtggtactatttacaaccagaagttcaagggcaaggccacattgactgtagacaagtcctccaaaacagcctacatggagctccgcagcctgacatctgaggattctgcagtcttttactgtgcaagagggccctccgccaggtttccttactggggccaagggactctggtcactgtctctgcatacccatacgatgttccagattacgcttagtgacctgaggatgatctttttccctctgccaaaaattatggggacatcatgaagccccttgagcatctgacttctggctaataaaggaaatttattttcattgcaatagtgtgttggaattttttgtgtctctcactcgtcctaggatcgatgctacgtagataagtagcatggcgggttaatcattaactacagaggaacccctagtgatggagttggccactccctctctgcgcgctcgctcgctcactgaggccgggcgaccaaaggtcgcccgacgcccgggctttgcccgggcggcctcagtgagcgagcgagcgcgcagctgcctgcagg

SEQ ID NO: 2055 - DNA, 3378 bp, Artificial Sequence
  Description of Artificial Sequence: Synthetic polynucleotide
cctgcaggcagctgcgcgctcgctcgctcactgaggccgcccgggcaaagcccgggcgtcgggcgacctttggtcgcccggcctcagtgagcgagcgagcgcgcagagagggagtggccaactccatcactaggggttccttgtagttaatgattaacccgccatgctacttatctacgtagccatgcgtcgacataacgcgtcgacattgattattgactagttattaatagtaatcaattacggggtcattagttcatagcccatatatggagttccgcgttacataacttacggtaaatggcccgcctggctgaccgcccaacgacccccgcccattgacgtcaataatgacgtatgttcccatagtaacgccaatagggactttccattgacgtcaatgggtggagtatttacggtaaactgcccacttggcagtacatcaagtgtatcatatgccaagtacgccccctattgacgtcaatgacggtaaatggcccgcctggcattatgcccagtacatgaccttatgggactttcctacttggcagtacatctacgtattagtcatcgctattaccatgtcgaggccacgttctgcttcactctccccatctcccccccctccccacccccaattttgtatttatttattttttaattattttgtgcagcgatgggggcggggggggggggcgcgcgccaggcggggcggggcggggcgaggggcggggcggggcgaggcggagaggtgcggcggcagccaatcagagcggcgcgctccgaaagtttccttttatggcgaggcggcggcggcggcggccctataaaaagcgaagcgcgcggcgggcgggagcaagcttcgtttagtgaaccgtcagatcgcctggagacgccatccacgctgttttgacctccatagaagacaccgggaccgatccagcctccgcggattcgaatcccggccgggaacggtgcattggaacgcggattccccgtgccaagagtgacgtaagtaccgcctatagagtctataggcccacaaaaaatgctttcttcttttaatatacttttttgtttatcttatttctaatactttccctaatctctttctttcagggcaataatgatacaatgtatcatgcctctttgcaccattctaaagaataacagtgataatttctgggttaaggcaatagcaatatttctgcatataaatatttctgcatataaattgtaactgatgtaagaggtttcatattgctaatagcagctacaatccagctaccattctgcttttattttatggttgggataaggctggattattctgagtccaagctaggcccttttgctaatcatgttcatacctcttatcttcctcccacagctcctgggcaacgtgctggtctgtgtgctggcccatcactttggcaaagaattgggattcgaaccggtgccgccaccatgagtcctgcccagttcctgtttctgttagtgctctggattcgggaaaccaacggtgatgttgtgatgacccagactccactcactttgtcggttaccattggacaaccagcctccatctcttgcaagtcaagtcagagcctcttagatagtgatggaaagacatatttgaattggttgttacagaggccaggccagtctccaaagcgcctaatctatctggtgtctaaactggactctggagtccccgacagattcactggcagtggatcagggacagatttcacactgaaaattagcagagtggaggctgaggatttgggagtttattattgctggcaaggtacacattttcctcggacgttcggtggaggcaccaagctggaaatcaaacggggtggtggtggtagcggcggcggcggctctggtggtggtggatccgaggtccagctgcaacagtctggacctgagctggtgaagcctggggcttcagtgaagatatcctgcaagacttctggatacacattcactgaatacaccatacactgggtgaagcagagccatggagagagccttgagtggattggaggtattaatccaaacgatggtggtactatttacaaccagaagttcaagggcaaggccacattgactgtagacaagtcctccaaaacagcctacatggagctccgcagcctgacatctgaggattctgcagtcttttactgtgcaagagggccctccgccaggtttccttactggggccaagggactctggtcactgtctctgcatccggaggcggcggcagcgatgttgtgatgacccagactccactcactttgtcggttaccattggacaaccagcctccatctcttgcaagtcaagtcagagcctcttagatagtgatggaaagacatatttgaattggttgttacagaggccaggccagtctccaaagcgcctaatctatctggtgtctaaactggactctggagtccccgacagattcactggcagtggatcagggacagatttcacactgaaaattagcagagtggaggctgaggatttgggagtttattattgctggcaaggtacacattttcctcggacgttcggtggaggcaccaagctggaaatcaaacggggtggtggtggtagcggcggcggcggctctggtggtggtggatccgaggtccagctgcaacagtctggacctgagctggtgaagcctggggcttcagtgaagatatcctgcaagacttctggatacacattcactgaatacaccatacactgggtgaagcagagccatggagagagccttgagtggattggaggtattaatccaaacgatggtggtactatttacaaccagaagttcaagggcaaggccacattgactgtagacaagtcctccaaaacagcctacatggagctccgcagcctgacatctgaggattctgcagtcttttactgtgcaagagggccctccgccaggtttccttactggggccaagggactctggtcactgtctctgcatacccatacgatgttccagattacgcttagtgacctgaggatgatctttttccctctgccaaaaattatggggacatcatgaagccccttgagcatctgacttctggctaataaaggaaatttattttcattgcaatagtgtgttggaattttttgtgtctctcactcgtcctaggatcgatgctacgtagataagtagcatggcgggttaatcattaactacagaggaacccctagtgatggagttggccactccctctctgcgcgctcgctcgctcactgaggccgggcgaccaaaggtcgcccgacgcccgggctttgcccgggcggcctcagtgagcgagcgagcgcgcagctgcctgcagg

SEQ ID NO: 2056 - DNA, 4395 bp, Artificial Sequence
  Description of Artificial Sequence: Synthetic polynucleotide
cctgcaggcagctgcgcgctcgctcgctcactgaggccgcccgggcaaagcccgggcgtcgggcgacctttggtcgcccggcctcagtgagcgagcgagcgcgcagagagggagtggccaactccatcactaggggttccttgtagttaatgattaacccgccatgctacttatctacgtagccatgcgtcgacataacgcgtcgacattgattattgactagttattaatagtaatcaattacggggtcattagttcatagcccatatatggagttccgcgttacataacttacggtaaatggcccgcctggctgaccgcccaacgacccccgcccattgacgtcaataatgacgtatgttcccatagtaacgccaatagggactttccattgacgtcaatgggtggagtatttacggtaaactgcccacttggcagtacatcaagtgtatcatatgccaagtacgccccctattgacgtcaatgacggtaaatggcccgcctggcattatgcccagtacatgaccttatgggactttcctacttggcagtacatctacgtattagtcatcgctattaccatgtcgaggccacgttctgcttcactctccccatctcccccccctccccacccccaattttgtatttatttattttttaattattttgtgcagcgatgggggcggggggggggggcgcgcgccaggcggggcggggcggggcgaggggcggggcggggcgaggcggagaggtgcggcggcagccaatcagagcggcgcgctccgaaagtttccttttatggcgaggcggcggcggcggcggccctataaaaagcgaagcgcgcggcgggcgggagcaagcttcgtttagtgaaccgtcagatcgcctggagacgccatccacgctgttttgacctccatagaagacaccgggaccgatccagcctccgcggattcgaatcccggccgggaacggtgcattggaacgcggattccccgtgccaagagtgacgtaagtaccgcctatagagtctataggcccacaaaaaatgctttcttcttttaatatacttttttgtttatcttatttctaatactttccctaatctctttctttcagggcaataatgatacaatgtatcatgcctctttgcaccattctaaagaataacagtgataatttctgggttaaggcaatagcaatatttctgcatataaatatttctgcatataaattgtaactgatgtaagaggtttcatattgctaatagcagctacaatccagctaccattctgcttttattttatggttgggataaggctggattattctgagtccaagctaggcccttttgctaatcatgttcatacctcttatcttcctcccacagctcctgggcaacgtgctggtctgtgtgctggcccatcactttggcaaagaattgggattcgaaccggtgccgccaccatgagtcctgcccagttcctgtttctgttagtgctctggattcgggaaaccaacggtgatgttgtgatgacccagactccactcactttgtcggttaccattggacaaccagcctccatctcttgcaagtcaagtcagagcctcttagatagtgatggaaagacatatttgaattggttgttacagaggccaggccagtctccaaagcgcctaatctatctggtgtctaaactggactctggagtccccgacagattcactggcagtggatcagggacagatttcacactgaaaattagcagagtggaggctgaggatttgggagtttattattgctggcaaggtacacattttcctcggacgttcggtggaggcaccaagctggaaatcaaacggggtggtggtggtagcggcggcggcggctctggtggtggtggatccgaggtccagctgcaacagtctggacctgagctggtgaagcctggggcttcagtgaagatatcctgcaagacttctggatacacattcactgaatacaccatacactgggtgaagcagagccatggagagagccttgagtggattggaggtattaatccaaacgatggtggtactatttacaaccagaagttcaagggcaaggccacattgactgtagacaagtcctccaaaacagcctacatggagctccgcagcctgacatctgaggattctgcagtcttttactgtgcaagagggccctccgccaggtttccttactggggccaagggactctggtcactgtctctgcatacccatacgatgttccagattacgctagaaagaggcgagagggcagaggaagtcttctaacatgcggtgacgtggaggagaatcccggccctatgagtcctgcccagttcctgtttctgttagtgctctggattcgggaaaccaacggtgatgttgtgatgacccagactccactcactttgtcggttaccattggacaaccagcctccatctcttgcaagtcaagtcagagcctcttagatagtgatggaaagacatatttgaattggttgttacagaggccaggccagtctccaaagcgcctaatctatctggtgtctaaactggactctggagtccccgacagattcactggcagtggatcagggacagatttcacactgaaaattagcagagtggaggctgaggatttgggagtttattattgctggcaaggtacacattttcctcggacgttcggtggaggcaccaagctggaaatcaaacggggtggtggtggtagcggcggcggcggctctggtggtggtggatccgaggtccagctgcaacagtctggacctgagctggtgaagcctggggcttcagtgaagatatcctgcaagacttctggatacacattcactgaatacaccatacactgggtgaagcagagccatggagagagccttgagtggattggaggtattaatccaaacgatggtggtactatttacaaccagaagttcaagggcaaggccacattgactgtagacaagtcctccaaaacagcctacatggagctccgcagcctgacatctgaggattctgcagtcttttactgtgcaagagggccctccgccaggtttccttactggggccaagggactctggtcactgtctctgcatacccatacgatgttccagattacgctagaaagaggcgagagggcagaggaagtcttctaacatgcggtgacgtggaggagaatcccggccctatgagtcctgcccagttcctgtttctgttagtgctctggattcgggaaaccaacggtgatgttgtgatgacccagactccactcactttgtcggttaccattggacaaccagcctccatctcttgcaagtcaagtcagagcctcttagatagtgatggaaagacatatttgaattggttgttacagaggccaggccagtctccaaagcgcctaatctatctggtgtctaaactggactctggagtccccgacagattcactggcagtggatcagggacagatttcacactgaaaattagcagagtggaggctgaggatttgggagtttattattgctggcaaggtacacattttcctcggacgttcggtggaggcaccaagctggaaatcaaacggggtggtggtggtagcggcggcggcggctctggtggtggtggatccgaggtccagctgcaacagtctggacctgagctggtgaagcctggggcttcagtgaagatatcctgcaagacttctggatacacattcactgaatacaccatacactgggtgaagcagagccatggagagagccttgagtggattggaggtattaatccaaacgatggtggtactatttacaaccagaagttcaagggcaaggccacattgactgtagacaagtcctccaaaacagcctacatggagctccgcagcctgacatctgaggattctgcagtcttttactgtgcaagagggccctccgccaggtttccttactggggccaagggactctggtcactgtctctgcatacccatacgatgttccagattacgcttagtgacctgaggatgatctttttccctctgccaaaaattatggggacatcatgaagccccttgagcatctgacttctggctaataaaggaaatttattttcattgcaatagtgtgttggaattttttgtgtctctcactcgtcctaggatcgatgctacgtagataagtagcatggcgggttaatcattaactacagaggaacccctagtgatggagttggccactccctctctgcgcgctcgctcgctcactgaggccgggcgaccaaaggtcgcccgacgcccgggctttgcccgggcggcctcagtgagcgagcgagcgcgcagctgcctgcagg

SEQ ID NO: 2057 - DNA, 3510 bp, Artificial Sequence
  Description of Artificial Sequence: Synthetic polynucleotide
cctgcaggcagctgcgcgctcgctcgctcactgaggccgcccgggcaaagcccgggcgtcgggcgacctttggtcgcccggcctcagtgagcgagcgagcgcgcagagagggagtggccaactccatcactaggggttccttgtagttaatgattaacccgccatgctacttatctacgtagccatgcgtcgacataacgcgtcgacattgattattgactagttattaatagtaatcaattacggggtcattagttcatagcccatatatggagttccgcgttacataacttacggtaaatggcccgcctggctgaccgcccaacgacccccgcccattgacgtcaataatgacgtatgttcccatagtaacgccaatagggactttccattgacgtcaatgggtggagtatttacggtaaactgcccacttggcagtacatcaagtgtatcatatgccaagtacgccccctattgacgtcaatgacggtaaatggcccgcctggcattatgcccagtacatgaccttatgggactttcctacttggcagtacatctacgtattagtcatcgctattaccatgtcgaggccacgttctgcttcactctccccatctcccccccctccccacccccaattttgtatttatttattttttaattattttgtgcagcgatgggggcggggggggggggcgcgcgccaggcggggcggggcggggcgaggggcggggcggggcgaggcggagaggtgcggcggcagccaatcagagcggcgcgctccgaaagtttccttttatggcgaggcggcggcggcggcggccctataaaaagcgaagcgcgcggcgggcgggagcaagcttcgtttagtgaaccgtcagatcgcctggagacgccatccacgctgttttgacctccatagaagacaccgggaccgatccagcctccgcggattcgaatcccggccgggaacggtgcattggaacgcggattccccgtgccaagagtgacgtaagtaccgcctatagagtctataggcccacaaaaaatgctttcttcttttaatatacttttttgtttatcttatttctaatactttccctaatctctttctttcagggcaataatgatacaatgtatcatgcctctttgcaccattctaaagaataacagtgataatttctgggttaaggcaatagcaatatttctgcatataaatatttctgcatataaattgtaactgatgtaagaggtttcatattgctaatagcagctacaatccagctaccattctgcttttattttatggttgggataaggctggattattctgagtccaagctaggcccttttgctaatcatgttcatacctcttatcttcctcccacagctcctgggcaacgtgctggtctgtgtgctggcccatcactttggcaaagaattgggattcgaaccggtgccgccaccatgagtcctgcccagttcctgtttctgttagtgctctggattcgggaaaccaacggtgatgttgtgatgacccagactccactcactttgtcggttaccattggacaaccagcctccatctcttgcaagtcaagtcagagcctcttagatagtgatggaaagacatatttgaattggttgttacagaggccaggccagtctccaaagcgcctaatctatctggtgtctaaactggactctggagtccccgacagattcactggcagtggatcagggacagatttcacactgaaaattagcagagtggaggctgaggatttgggagtttattattgctggcaaggtacacattttcctcggacgttcggtggaggcaccaagctggaaatcaaacggggtggtggtggtagcggcggcggcggctctggtggtggtggatccgaggtccagctgcaacagtctggacctgagctggtgaagcctggggcttcagtgaagatatcctgcaagacttctggatacacattcactgaatacaccatacactgggtgaagcagagccatggagagagccttgagtggattggaggtattaatccaaacgatggtggtactatttacaaccagaagttcaagggcaaggccacattgactgtagacaagtcctccaaaacagcctacatggagctccgcagcctgacatctgaggattctgcagtcttttactgtgcaagagggccctccgccaggtttccttactggggccaagggactctggtcactgtctctgcatacccatacgatgttccagattacgctagaaagaggcgagagggcagaggaagtcttctaacatgcggtgacgtggaggagaatcccggccctatgagtcctgcccagttcctgtttctgttagtgctctggattcgggaaaccaacggtgatgttgtgatgacccagactccactcactttgtcggttaccattggacaaccagcctccatctcttgcaagtcaagtcagagcctcttagatagtgatggaaagacatatttgaattggttgttacagaggccaggccagtctccaaagcgcctaatctatctggtgtctaaactggactctggagtccccgacagattcactggcagtggatcagggacagatttcacactgaaaattagcagagtggaggctgaggatttgggagtttattattgctggcaaggtacacattttcctcggacgttcggtggaggcaccaagctggaaatcaaacggggtggtggtggtagcggcggcggcggctctggtggtggtggatccgaggtccagctgcaacagtctggacctgagctggtgaagcctggggcttcagtgaagatatcctgcaagacttctggatacacattcactgaatacaccatacactgggtgaagcagagccatggagagagccttgagtggattggaggtattaatccaaacgatggtggtactatttacaaccagaagttcaagggcaaggccacattgactgtagacaagtcctccaaaacagcctacatggagctccgcagcctgacatctgaggattctgcagtcttttactgtgcaagagggccctccgccaggtttccttactggggccaagggactctggtcactgtctctgcatacccatacgatgttccagattacgcttagtgacctgaggatgatctttttccctctgccaaaaattatggggacatcatgaagccccttgagcatctgacttctggctaataaaggaaatttattttcattgcaatagtgtgttggaattttttgtgtctctcactcgtcctaggatcgatgctacgtagataagtagcatggcgggttaatcattaactacagaggaacccctagtgatggagttggccactccctctctgcgcgctcgctcgctcactgaggccgggcgaccaaaggtcgcccgacgcccgggctttgcccgggcggcctcagtgagcgagcgagcgcgcagctgcctgcagg

SEQ ID NO: 2058 - DNA, 4016 bp, Artificial Sequence
  Description of Artificial Sequence: Synthetic polynucleotide
ctgcgcgctcgctcgctcactgaggccgcccgggcaaagcccgggcgtcgggcgacctttggtcgcccggcctcagtgagcgagcgagcgcgcagagagggagtggccaactccatcactaggggttccttgtagttaatgattaacccgccatgctacttatctaccagggtaatggggatcctctagaactatagctagtcgacattgattattgactagttattaatagtaatcaattacggggtcattagttcatagcccatatatggagttccgcgttacataacttacggtaaatggcccgcctggctgaccgcccaacgacccccgcccattgacgtcaataatgacgtatgttcccatagtaacgccaatagggactttccattgacgtcaatgggtggagtatttacggtaaactgcccacttggcagtacatcaagtgtatcatatgccaagtacgccccctattgacgtcaatgacggtaaatggcccgcctggcattatgcccagtacatgaccttatgggactttcctacttggcagtacatctacgtattagtcatcgctattaccatgtcgaggccacgttctgcttcactctccccatctcccccccctccccacccccaattttgtatttatttattttttaattattttgtgcagcgatgggggcggggggggggggcgcgcgccaggcggggcggggcggggcgaggggcggggcggggcgaggcggagaggtgcggcggcagccaatcagagcggcgcgctccgaaagtttccttttatggcgaggcggcggcggcggcggccctataaaaagcgaagcgcgcggcgggcgggagcaagcttcgtttagtgaaccgtcagatcgcctggagacgccatccacgctgttttgacctccatagaagacaccgggaccgatccagcctccgcggattcgaatcccggccgggaacggtgcattggaacgcggattccccgtgccaagagtgacgtaagtaccgcctatagagtctataggcccacaaaaaatgctttcttcttttaatatacttttttgtttatcttatttctaatactttccctaatctctttctttcagggcaataatgatacaatgtatcatgcctctttgcaccattctaaagaataacagtgataatttctgggttaaggcaatagcaatatttctgcatataaatatttctgcatataaattgtaactgatgtaagaggtttcatattgctaatagcagctacaatccagctaccattctgcttttattttatggttgggataaggctggattattctgagtccaagctaggcccttttgctaatcatgttcatacctcttatcttcctcccacagctcctgggcaacgtgctggtctgtgtgctggcccatcactttggcaaagaattgggattcgaaccggtgccgccaccatgggatggagctggatctttctctttctcctgtcaggaactacaggtgtcctctctgaggtccagctgcaacagtctggacctgagctggtgaagcctggggcttcagtgaagatatcctgcaagacttctggatacacattcactgaatacaccatacactgggtgaagcagagccatggagagagccttgagtggattggaggtattaatccaaacgatggtggtactatttacaaccagaagttcaagggcaaggccacattgactgtagacaagtcctccaaaacagcctacatggagctccgcagcctgacatctgaggattctgcagtcttttactgtgcaagagggccctccgccaggtttccttactggggccaagggactctggtcactgtctctgcagccaaaacgacacccccatctgtctatccactggcccctggatctgctgcccaaactaactccatggtgaccctgggatgcctggtcaagggctatttccctgagccagtgacagtgacctggaactctggatccctgtccagcggtgtgcacaccttcccagctgtcctgcagtctgacctctacactctgagcagctcagtgactgtcccctccagcacctggcccagcgagaccgtcacctgcaacgttgcccacccggccagcagcaccaaggtggacaagaaaattgtgcccagggattgtggttgtaagccttgcatatgtacagtcccagaagtatcatctgtcttcatcttccccccaaagcccaaggatgtgctcaccattactctgactcctaaggtcacgtgtgttgtggtagacatcagcaaggatgatcccgaggtccagttcagctggtttgtagatgatgtggaggtgcacacagctcagacgcaaccccgggaggagcagttcaacagcactttccgctcagtcagtgaacttcccatcatgcaccaggactggctcaatggcaaggagttcaaatgcagggtcaacagtgcagctttccctgcccccatcgagaaaaccatctccaaaaccaaaggcagaccgaaggctccacaggtgtacaccattccacctcccaaggagcagatggccaaggataaagtcagtctgacctgcatgataacagacttcttccctgaagacattactgtggagtggcagtggaatgggcagccagcggagaactacaagaacactcagcccatcatggacacagatggctcttacttcgtctacagcaagctcaatgtgcagaagagcaactgggaggcaggaaatactttcacctgctctgtgttacatgagggcctgcacaaccaccatactgagaagagcctctcccactctcctggtggaagcggagtgaaacagactttgaattttgaccttctcaagttggcgggagacgtggagtccaaccctggacctatgagtcctgcccagttcctgtttctgttagtgctctggattcgggaaaccaacggtgatgttgtgatgacccagactccactcactttgtcggttaccattggacaaccagcctccatctcttgcaagtcaagtcagagcctcttagatagtgatggaaagacatatttgaattggttgttacagaggccaggccagtctccaaagcgcctaatctatctggtgtctaaactggactctggagtccctgacagattcactggcagtggatcagggacagatttcacactgaaaattagcagagtggaggctgaggatttgggagtttattattgctggcaaggtacacattttcctcggacgttcggtggaggcaccaagctggaaatcaaacgggctgatgctgcaccaactgtatccatcttcccaccatccagtgagcagttaacatctggaggtgcctcagtcgtgtgcttcttgaacaacttctaccccaaagacatcaatgtcaagtggaagattgatggcagtgaacgacaaaatggcgtcctgaacagttggactgatcaggacagcaaagacagcacctacagcatgagcagcaccctcacgttgaccaaggacgagtatgaacgacataacagctatacctgtgaggccactcacaagacatcaacttcacccattgtcaagagcttcaacaggaatgagtgttagtaactcgaggacggggtgaactacgcctgaggatccgatctttttccctctgccaaaaattatggggacatcatgaagccccttgagcatctgacttctggctaataaaggaaatttattttcattgcaatagtgtgttggaattttttgtgtctctcactcggaagcaattcgttgatctgaatttcgaccacccataatacccattaccctggtagataagtagcatggcgggttaatcattaactacaaggaacccctagtgatggagttggccactccctctctgcgcgctcgctcgctcactgaggccgggcgaccaaaggtcgcccgacgcccgggctttgcccgggcggcctcagtgagcgagcgagcgcgcag

SEQ ID NO: 2059 - DNA, 4016 bp, Artificial Sequence
  Description of Artificial Sequence: Synthetic polynucleotide
ctgcgcgctcgctcgctcactgaggccgcccgggcaaagcccgggcgtcgggcgacctttggtcgcccggcctcagtgagcgagcgagcgcgcagagagggagtggccaactccatcactaggggttccttgtagttaatgattaacccgccatgctacttatctaccagggtaatggggatcctctagaactatagctagtcgacattgattattgactagttattaatagtaatcaattacggggtcattagttcatagcccatatatggagttccgcgttacataacttacggtaaatggcccgcctggctgaccgcccaacgacccccgcccattgacgtcaataatgacgtatgttcccatagtaacgccaatagggactttccattgacgtcaatgggtggagtatttacggtaaactgcccacttggcagtacatcaagtgtatcatatgccaagtacgccccctattgacgtcaatgacggtaaatggcccgcctggcattatgcccagtacatgaccttatgggactttcctacttggcagtacatctacgtattagtcatcgctattaccatgtcgaggccacgttctgcttcactctccccatctcccccccctccccacccccaattttgtatttatttattttttaattattttgtgcagcgatgggggcggggggggggggcgcgcgccaggcggggcggggcggggcgaggggcggggcggggcgaggcggagaggtgcggcggcagccaatcagagcggcgcgctccgaaagtttccttttatggcgaggcggcggcggcggcggccctataaaaagcgaagcgcgcggcgggcgggagcaagcttcgtttagtgaaccgtcagatcgcctggagacgccatccacgctgttttgacctccatagaagacaccgggaccgatccagcctccgcggattcgaatcccggccgggaacggtgcattggaacgcggattccccgtgccaagagtgacgtaagtaccgcctatagagtctataggcccacaaaaaatgctttcttcttttaatatacttttttgtttatcttatttctaatactttccctaatctctttctttcagggcaataatgatacaatgtatcatgcctctttgcaccattctaaagaataacagtgataatttctgggttaaggcaatagcaatatttctgcatataaatatttctgcatataaattgtaactgatgtaagaggtttcatattgctaatagcagctacaatccagctaccattctgcttttattttatggttgggataaggctggattattctgagtccaagctaggcccttttgctaatcatgttcatacctcttatcttcctcccacagctcctgggcaacgtgctggtctgtgtgctggcccatcactttggcaaagaattgggattcgaaccggtgccgccaccatgagtcctgcccagttcctgtttctgttagtgctctggattcgggaaaccaacggtgatgttgtgatgacccagactccactcactttgtcggttaccattggacaaccagcctccatctcttgcaagtcaagtcagagcctcttagatagtgatggaaagacatatttgaattggttgttacagaggccaggccagtctccaaagcgcctaatctatctggtgtctaaactggactctggagtccctgacagattcactggcagtggatcagggacagatttcacactgaaaattagcagagtggaggctgaggatttgggagtttattattgctggcaaggtacacattttcctcggacgttcggtggaggcaccaagctggaaatcaaacgggctgatgctgcaccaactgtatccatcttcccaccatccagtgagcagttaacatctggaggtgcctcagtcgtgtgcttcttgaacaacttctaccccaaagacatcaatgtcaagtggaagattgatggcagtgaacgacaaaatggcgtcctgaacagttggactgatcaggacagcaaagacagcacctacagcatgagcagcaccctcacgttgaccaaggacgagtatgaacgacataacagctatacctgtgaggccactcacaagacatcaacttcacccattgtcaagagcttcaacaggaatgagtgtggaagcggagtgaaacagactttgaattttgaccttctcaagttggcgggagacgtggagtccaaccctggacctatgggatggagctggatctttctctttctcctgtcaggaactacaggtgtcctctctgaggtccagctgcaacagtctggacctgagctggtgaagcctggggcttcagtgaagatatcctgcaagacttctggatacacattcactgaatacaccatacactgggtgaagcagagccatggagagagccttgagtggattggaggtattaatccaaacgatggtggtactatttacaaccagaagttcaagggcaaggccacattgactgtagacaagtcctccaaaacagcctacatggagctccgcagcctgacatctgaggattctgcagtcttttactgtgcaagagggccctccgccaggtttccttactggggccaagggactctggtcactgtctctgcagccaaaacgacacccccatctgtctatccactggcccctggatctgctgcccaaactaactccatggtgaccctgggatgcctggtcaagggctatttccctgagccagtgacagtgacctggaactctggatccctgtccagcggtgtgcacaccttcccagctgtcctgcagtctgacctctacactctgagcagctcagtgactgtcccctccagcacctggcccagcgagaccgtcacctgcaacgttgcccacccggccagcagcaccaaggtggacaagaaaattgtgcccagggattgtggttgtaagccttgcatatgtacagtcccagaagtatcatctgtcttcatcttccccccaaagcccaaggatgtgctcaccattactctgactcctaaggtcacgtgtgttgtggtagacatcagcaaggatgatcccgaggtccagttcagctggtttgtagatgatgtggaggtgcacacagctcagacgcaaccccgggaggagcagttcaacagcactttccgctcagtcagtgaacttcccatcatgcaccaggactggctcaatggcaaggagttcaaatgcagggtcaacagtgcagctttccctgcccccatcgagaaaaccatctccaaaaccaaaggcagaccgaaggctccacaggtgtacaccattccacctcccaaggagcagatggccaaggataaagtcagtctgacctgcatgataacagacttcttccctgaagacattactgtggagtggcagtggaatgggcagccagcggagaactacaagaacactcagcccatcatggacacagatggctcttacttcgtctacagcaagctcaatgtgcagaagagcaactgggaggcaggaaatactttcacctgctctgtgttacatgagggcctgcacaaccaccatactgagaagagcctctcccactctcctggttagtaactcgaggacggggtgaactacgcctgaggatccgatctttttccctctgccaaaaattatggggacatcatgaagccccttgagcatctgacttctggctaataaaggaaatttattttcattgcaatagtgtgttggaattttttgtgtctctcactcggaagcaattcgttgatctgaatttcgaccacccataatacccattaccctggtagataagtagcatggcgggttaatcattaactacaaggaacccctagtgatggagttggccactccctctctgcgcgctcgctcgctcactgaggccgggcgaccaaaggtcgcccgacgcccgggctttgcccgggcggcctcagtgagcgagcgagcgcgcag

SEQ ID NO: 2060 - DNA, 3608 bp, Artificial Sequence
  Description of Artificial Sequence: Synthetic polynucleotide
ctgcgcgctcgctcgctcactgaggccgcccgggcaaagcccgggcgtcgggcgacctttggtcgcccggcctcagtgagcgagcgagcgcgcagagagggagtggccaactccatcactaggggttccttgtagttaatgattaacccgccatgctacttatctaccagggtaatggggacgcgtactataggatctaacatatcctggtgtggagtagcggacgctgctatgacagaggctcgggggcctgagctggctctgtgagctggggaggaggcagacagccaggccttgtctgcaagcagacctggcagcattgggctggccgccccccagggcctcctcttcatgcccagtgaatgactcaccttggcacagacacaatgttcggggtgggcacagtgcctgcttcccgccgcaccccagcccccctcaaatgccttccgagaagcccattgagcagggggcttgcattgcaccccagcctgacagcctggcatcttgggataaaagcagcacagccccctaggggctgcccttgctgtgtggcgccaccggcggtggagaacaaggctctattcagcctgtgcccaggaaaggggatcaggggatgcccaggcatggacagtgggtggcagggggggagaggagggctgtctgcttcccagaagtccaaggacacaaatgggtgaggggagagctctccccatagctgggctgcggcccaaccccaccccctcaggctatgccagggggtgttgccaggggcacccgggcatcgccagtctagcccactccttcataaagccctcgcatcccaggagcgagcagagccagagcaggttggagaggagacgcatcacctccgctgctcgcggggatcctctagcgggagcaagcttgaactgaaaaaccagaaagttaactggtaagtttagtctttttgtcttttatttcaggtcccggatccggtggtggtgcaaatcaaagaactgctcctcagtggatgttgcctttacttctaggcctgtacggaagtgttacttctgctctaaaagctgcggaattgtacccgcggccgatccaccggtgccgccaccatgagtcctgcccagttcctgtttctgttagtgctctggattcgggaaaccaacggtgatgttgtgatgacccagactccactcactttgtcggttaccattggacaaccagcctccatctcttgcaagtcaagtcagagcctcttagatagtgatggaaagacatatttgaattggttgttacagaggccaggccagtctccaaagcgcctaatctatctggtgtctaaactggactctggagtccctgacagattcactggcagtggatcagggacagatttcacactgaaaattagcagagtggaggctgaggatttgggagtttattattgctggcaaggtacacattttcctcggacgttcggtggaggcaccaagctggaaatcaaacgggctgatgctgcaccaactgtatccatcttcccaccatccagtgagcagttaacatctggaggtgcctcagtcgtgtgcttcttgaacaacttctaccccaaagacatcaatgtcaagtggaagattgatggcagtgaacgacaaaatggcgtcctgaacagttggactgatcaggacagcaaagacagcacctacagcatgagcagcaccctcacgttgaccaaggacgagtatgaacgacataacagctatacctgtgaggccactcacaagacatcaacttcacccattgtcaagagcttcaacaggaatgagtgtggaagcggagtgaaacagactttgaattttgaccttctcaagttggcgggagacgtggagtccaaccctggacctatgggatggagctggatctttctctttctcctgtcaggaactacaggtgtcctctctgaggtccagctgcaacagtctggacctgagctggtgaagcctggggcttcagtgaagatatcctgcaagacttctggatacacattcactgaatacaccatacactgggtgaagcagagccatggagagagccttgagtggattggaggtattaatccaaacgatggtggtactatttacaaccagaagttcaagggcaaggccacattgactgtagacaagtcctccaaaacagcctacatggagctccgcagcctgacatctgaggattctgcagtcttttactgtgcaagagggccctccgccaggtttccttactggggccaagggactctggtcactgtctctgcagccaaaacgacacccccatctgtctatccactggcccctggatctgctgcccaaactaactccatggtgaccctgggatgcctggtcaagggctatttccctgagccagtgacagtgacctggaactctggatccctgtccagcggtgtgcacaccttcccagctgtcctgcagtctgacctctacactctgagcagctcagtgactgtcccctccagcacctggcccagcgagaccgtcacctgcaacgttgcccacccggccagcagcaccaaggtggacaagaaaattgtgcccagggattgtggttgtaagccttgcatatgtacagtcccagaagtatcatctgtcttcatcttccccccaaagcccaaggatgtgctcaccattactctgactcctaaggtcacgtgtgttgtggtagacatcagcaaggatgatcccgaggtccagttcagctggtttgtagatgatgtggaggtgcacacagctcagacgcaaccccgggaggagcagttcaacagcactttccgctcagtcagtgaacttcccatcatgcaccaggactggctcaatggcaaggagttcaaatgcagggtcaacagtgcagctttccctgcccccatcgagaaaaccatctccaaaaccaaaggcagaccgaaggctccacaggtgtacaccattccacctcccaaggagcagatggccaaggataaagtcagtctgacctgcatgataacagacttcttccctgaagacattactgtggagtggcagtggaatgggcagccagcggagaactacaagaacactcagcccatcatggacacagatggctcttacttcgtctacagcaagctcaatgtgcagaagagcaactgggaggcaggaaatactttcacctgctctgtgttacatgagggcctgcacaaccaccatactgagaagagcctctcccactctcctggttagtaactcgaggacggggtgaactacgcctgaggatccgatctttttccctctgccaaaaattatggggacatcatgaagccccttgagcatctgacttctggctaataaaggaaatttattttcattgcaatagtgtgttggaattttttgtgtctctcactcggcctaggtagataagtagcatggcgggttaatcattaactacaaggaacccctagtgatggagttggccactccctctctgcgcgctcgctcgctcactgaggccgggcgaccaaaggtcgcccgacgcccgggctttgcccgggcggcctcagtgagcgagcgagcgcgcag

SEQ ID NO: 2061 - DNA, 3619 bp, Artificial Sequence
  Description of Artificial Sequence: Synthetic polynucleotide
ctgcgcgctcgctcgctcactgaggccgcccgggcaaagcccgggcgtcgggcgacctttggtcgcccggcctcagtgagcgagcgagcgcgcagagagggagtggccaactccatcactaggggttccttgtagttaatgattaacccgccatgctacttatctaccagggtaatggggatcctctagaactatagctagtcgacattgattattgactagttattaatagtaatcaattacggggtcattagttcatagcccatatatggagttccgcgttacataacttacggtaaatggcccgcctggctgaccgcccaacgacccccgcccattgacgtcaataatgacgtatgttcccatagtaacgccaatagggactttccattgacgtcaatgggtggagtatttacggtaaactgcccacttggcagtacatcaagtgtatcatatgccaagtacgccccctattgacgtcaatgacggtaaatggcccgcctggcattatgcccagtacatgaccttatgggactttcctacttggcagtacatctacgtattagtcatcgctattaccatgtcgaggccacgttctgcttcactctccccatctcccccccctccccacccccaattttgtatttatttattttttaattattttgtgcagcgatgggggcggggggggggggcgcgcgccaggcggggcggggcggggcgaggggcggggcggggcgaggcggagaggtgcggcggcagccaatcagagcggcgcgctccgaaagtttccttttatggcgaggcggcggcggcggcggccctataaaaagcgaagcgcgcggcgggcgggagcaagcttgaactgaaaaaccagaaagttaactggtaagtttagtctttttgtcttttatttcaggtcccggatccggtggtggtgcaaatcaaagaactgctcctcagtggatgttgcctttacttctaggcctgtacggaagtgttacttctgctctaaaagctgcggaattgtacccgcggccgatccaccggtgccgccaccatggaatggacctgggtctttctcttcctcctgtcagtaactgcaggtgtccactcccaggttcagctgcagcagtctggagctgagctgatgaagcctggggcctcagtgaagatatcctgcaaggctactggctacacattcagtaactactggatagagtgggtaaagcagaggcctggacatggccttgagtggattggagagattttacctggaagtgatagtattaagtacaatgagaatttcaagggcaaggccacattcactgcagatacatcctccaacacagcctacatgcaactcagcagcctgacatctgaggactctgccgtctattactgtgcaagaagggggaactacccagactactggggccaaggcaccactctcacagtctcctcagccaaaacgacacccccatctgtctatccactggcccctggatctgctgcccaaactaactccatggtgaccctgggatgcctggtcaagggctatttccctgagccagtgacagtgacctggaactctggatccctgtccagcggtgtgcacaccttcccagctgtcctgcagtctgacctctacactctgagcagctcagtgactgtcccctccagcacctggcccagcgagaccgtcacctgcaacgttgcccacccggccagcagcaccaaggtggacaagaaaattgtgcccagggattgtggttgtaagccttgcatatgtacagtcccagaagtatcatctgtcttcatcttccccccaaagcccaaggatgtgctcaccattactctgactcctaaggtcacgtgtgttgtggtagacatcagcaaggatgatcccgaggtccagttcagctggtttgtagatgatgtggaggtgcacacagctcagacgcaaccccgggaggagcagttcaacagcactttccgctcagtcagtgaacttcccatcatgcaccaggactggctcaatggcaaggagttcaaatgcagggtcaacagtgcagctttccctgcccccatcgagaaaaccatctccaaaaccaaaggcagaccgaaggctccacaggtgtacaccattccacctcccaaggagcagatggccaaggataaagtcagtctgacctgcatgataacagacttcttccctgaagacattactgtggagtggcagtggaatgggcagccagcggagaactacaagaacactcagcccatcatggacacagatggctcttacttcgtctacagcaagctcaatgtgcagaagagcaactgggaggcaggaaatactttcacctgctctgtgttacatgagggcctgcacaaccaccatactgagaagagcctctcccactctcctggtcgggccaagcggggaagcggagtgaaacagactttgaattttgaccttctcaagttggcgggagacgtggagtccaaccctggacctatgaagttgcctgttaggctgttggtgctgatgttctggattcctgcttccagcagtgatgttgtgatgacccaaactccactctccctgcctgtcagtcttggagatcaagcctccatctcttgcagatctagtcagagccttgtacacagtaatggaaacacctatttacattggtacctgcagaagccaggccagtctccaaagctcctgatctacaaagtttccaaccgattttctggggtcccagacaggttcagtggcagtggatcagggacagatttcacactcaagatcagcagagtggaggctgaggatctgggagtttatttctgctctcaaagtacacatgttccgctcacgttcggtgctgggaccaagctggagctgaaacgggctgatgctgcaccaactgtatccatcttcccaccatccagtgagcagttaacatctggaggtgcctcagtcgtgtgcttcttgaacaacttctaccccaaagacatcaatgtcaagtggaagattgatggcagtgaacgacaaaatggcgtcctgaacagttggactgatcaggacagcaaagacagcacctacagcatgagcagcaccctcacgttgaccaaggacgagtatgaacgacataacagctatacctgtgaggccactcacaagacatcaacttcacccattgtcaagagcttcaacaggaatgagtgttagtaactcgaggacggggtgaactacgcctgaggatccgatctttttccctctgccaaaaattatggggacatcatgaagccccttgagcatctgacttctggctaataaaggaaatttattttcattgcaatagtgtgttggaattttttgtgtctctcactcggaagcaattcgttgatctgaatttcgaccacccataatacccattaccctggtagataagtagcatggcgggttaatcattaactacaaggaacccctagtgatggagttggccactccctctctgcgcgctcgctcgctcactgaggccgggcgaccaaaggtcgcccgacgcccgggctttgcccgggcggcctcagtgagcgagcgagcgcgcag

SEQ ID NO: 2062 - DNA, 3610 bp, Artificial Sequence
  Description of Artificial Sequence: Synthetic polynucleotide
ctgcgcgctcgctcgctcactgaggccgcccgggcaaagcccgggcgtcgggcgacctttggtcgcccggcctcagtgagcgagcgagcgcgcagagagggagtggccaactccatcactaggggttccttgtagttaatgattaacccgccatgctacttatctaccagggtaatggggatcctctagaactatagctagtcgacattgattattgactagttattaatagtaatcaattacggggtcattagttcatagcccatatatggagttccgcgttacataacttacggtaaatggcccgcctggctgaccgcccaacgacccccgcccattgacgtcaataatgacgtatgttcccatagtaacgccaatagggactttccattgacgtcaatgggtggagtatttacggtaaactgcccacttggcagtacatcaagtgtatcatatgccaagtacgccccctattgacgtcaatgacggtaaatggcccgcctggcattatgcccagtacatgaccttatgggactttcctacttggcagtacatctacgtattagtcatcgctattaccatgtcgaggccacgttctgcttcactctccccatctcccccccctccccacccccaattttgtatttatttattttttaattattttgtgcagcgatgggggcggggggggggggcgcgcgccaggcggggcggggcggggcgaggggcggggcggggcgaggcggagaggtgcggcggcagccaatcagagcggcgcgctccgaaagtttccttttatggcgaggcggcggcggcggcggccctataaaaagcgaagcgcgcggcgggcgggagcaagcttgaactgaaaaaccagaaagttaactggtaagtttagtctttttgtcttttatttcaggtcccggatccggtggtggtgcaaatcaaagaactgctcctcagtggatgttgcctttacttctaggcctgtacggaagtgttacttctgctctaaaagctgcggaattgtacccgcggccgatccaccggtgccgccaccatggaatggacctgggtctttctcttcctcctgtcagtaactgcaggtgtccactcccaggttcagctgcagcagtctggagctgagctgatgaagcctggggcctcagtgaagatatcctgcaaggctactggctacacattcagtaactactggatagagtgggtaaagcagaggcctggacatggccttgagtggattggagagattttacctggaagtgatagtattaagtacaatgagaatttcaagggcaaggccacattcactgcagatacatcctccaacacagcctacatgcaactcagcagcctgacatctgaggactctgccgtctattactgtgcaagaagggggaactacccagactactggggccaaggcaccactctcacagtctcctcagccaaaacgacacccccatctgtctatccactggcccctggatctgctgcccaaactaactccatggtgaccctgggatgcctggtcaagggctatttccctgagccagtgacagtgacctggaactctggatccctgtccagcggtgtgcacaccttcccagctgtcctgcagtctgacctctacactctgagcagctcagtgactgtcccctccagcacctggcccagcgagaccgtcacctgcaacgttgcccacccggccagcagcaccaaggtggacaagaaaattgtgcccagggattgtggttgtaagccttgcatatgtacagtcccagaagtatcatctgtcttcatcttccccccaaagcccaaggatgtgctcaccattactctgactcctaaggtcacgtgtgttgtggtagacatcagcaaggatgatcccgaggtccagttcagctggtttgtagatgatgtggaggtgcacacagctcagacgcaaccccgggaggagcagttcaacagcactttccgctcagtcagtgaacttcccatcatgcaccaggactggctcaatggcaaggagttcaaatgcagggtcaacagtgcagctttccctgcccccatcgagaaaaccatctccaaaaccaaaggcagaccgaaggctccacaggtgtacaccattccacctcccaaggagcagatggccaaggataaagtcagtctgacctgcatgataacagacttcttccctgaagacattactgtggagtggcagtggaatgggcagccagcggagaactacaagaacactcagcccatcatggacacagatggctcttacttcgtctacagcaagctcaatgtgcagaagagcaactgggaggcaggaaatactttcacctgctctgtgttacatgagggcctgcacaaccaccatactgagaagagcctctcccactctcctggtcgggccaagcggggaagcggagctactaacttcagcctgctgaagcaggctggagacgtggaggagaaccctggacctatgaagttgcctgttaggctgttggtgctgatgttctggattcctgcttccagcagtgatgttgtgatgacccaaactccactctccctgcctgtcagtcttggagatcaagcctccatctcttgcagatctagtcagagccttgtacacagtaatggaaacacctatttacattggtacctgcagaagccaggccagtctccaaagctcctgatctacaaagtttccaaccgattttctggggtcccagacaggttcagtggcagtggatcagggacagatttcacactcaagatcagcagagtggaggctgaggatctgggagtttatttctgctctcaaagtacacatgttccgctcacgttcggtgctgggaccaagctggagctgaaacgggctgatgctgcaccaactgtatccatcttcccaccatccagtgagcagttaacatctggaggtgcctcagtcgtgtgcttcttgaacaacttctaccccaaagacatcaatgtcaagtggaagattgatggcagtgaacgacaaaatggcgtcctgaacagttggactgatcaggacagcaaagacagcacctacagcatgagcagcaccctcacgttgaccaaggacgagtatgaacgacataacagctatacctgtgaggccactcacaagacatcaacttcacccattgtcaagagcttcaacaggaatgagtgttagtaactcgaggacggggtgaactacgcctgaggatccgatctttttccctctgccaaaaattatggggacatcatgaagccccttgagcatctgacttctggctaataaaggaaatttattttcattgcaatagtgtgttggaattttttgtgtctctcactcggaagcaattcgttgatctgaatttcgaccacccataatacccattaccctggtagataagtagcatggcgggttaatcattaactacaaggaacccctagtgatggagttggccactccctctctgcgcgctcgctcgctcactgaggccgggcgaccaaaggtcgcccgacgcccgggctttgcccgggcggcctcagtgagcgagcgagcgcgcag

SEQ ID NO: 2063 - DNA, 3607 bp, Artificial Sequence
  Description of Artificial Sequence: Synthetic polynucleotide
ctgcgcgctcgctcgctcactgaggccgcccgggcaaagcccgggcgtcgggcgacctttggtcgcccggcctcagtgagcgagcgagcgcgcagagagggagtggccaactccatcactaggggttccttgtagttaatgattaacccgccatgctacttatctaccagggtaatggggatcctctagaactatagctagtcgacattgattattgactagttattaatagtaatcaattacggggtcattagttcatagcccatatatggagttccgcgttacataacttacggtaaatggcccgcctggctgaccgcccaacgacccccgcccattgacgtcaataatgacgtatgttcccatagtaacgccaatagggactttccattgacgtcaatgggtggagtatttacggtaaactgcccacttggcagtacatcaagtgtatcatatgccaagtacgccccctattgacgtcaatgacggtaaatggcccgcctggcattatgcccagtacatgaccttatgggactttcctacttggcagtacatctacgtattagtcatcgctattaccatgtcgaggccacgttctgcttcactctccccatctcccccccctccccacccccaattttgtatttatttattttttaattattttgtgcagcgatgggggcggggggggggggcgcgcgccaggcggggcggggcggggcgaggggcggggcggggcgaggcggagaggtgcggcggcagccaatcagagcggcgcgctccgaaagtttccttttatggcgaggcggcggcggcggcggccctataaaaagcgaagcgcgcggcgggcgggagcaagcttgaactgaaaaaccagaaagttaactggtaagtttagtctttttgtcttttatttcaggtcccggatccggtggtggtgcaaatcaaagaactgctcctcagtggatgttgcctttacttctaggcctgtacggaagtgttacttctgctctaaaagctgcggaattgtacccgcggccgatccaccggtgccgccaccatggaatggacctgggtctttctcttcctcctgtcagtaactgcaggtgtccactcccaggttcagctgcagcagtctggagctgagctgatgaagcctggggcctcagtgaagatatcctgcaaggctactggctacacattcagtaactactggatagagtgggtaaagcagaggcctggacatggccttgagtggattggagagattttacctggaagtgatagtattaagtacaatgagaatttcaagggcaaggccacattcactgcagatacatcctccaacacagcctacatgcaactcagcagcctgacatctgaggactctgccgtctattactgtgcaagaagggggaactacccagactactggggccaaggcaccactctcacagtctcctcagccaaaacgacacccccatctgtctatccactggcccctggatctgctgcccaaactaactccatggtgaccctgggatgcctggtcaagggctatttccctgagccagtgacagtgacctggaactctggatccctgtccagcggtgtgcacaccttcccagctgtcctgcagtctgacctctacactctgagcagctcagtgactgtcccctccagcacctggcccagcgagaccgtcacctgcaacgttgcccacccggccagcagcaccaaggtggacaagaaaattgtgcccagggattgtggttgtaagccttgcatatgtacagtcccagaagtatcatctgtcttcatcttccccccaaagcccaaggatgtgctcaccattactctgactcctaaggtcacgtgtgttgtggtagacatcagcaaggatgatcccgaggtccagttcagctggtttgtagatgatgtggaggtgcacacagctcagacgcaaccccgggaggagcagttcaacagcactttccgctcagtcagtgaacttcccatcatgcaccaggactggctcaatggcaaggagttcaaatgcagggtcaacagtgcagctttccctgcccccatcgagaaaaccatctccaaaaccaaaggcagaccgaaggctccacaggtgtacaccattccacctcccaaggagcagatggccaaggataaagtcagtctgacctgcatgataacagacttcttccctgaagacattactgtggagtggcagtggaatgggcagccagcggagaactacaagaacactcagcccatcatggacacagatggctcttacttcgtctacagcaagctcaatgtgcagaagagcaactgggaggcaggaaatactttcacctgctctgtgttacatgagggcctgcacaaccaccatactgagaagagcctctcccactctcctggtggaagcggagtgaaacagactttgaattttgaccttctcaagttggcgggagacgtggagtccaaccctggacctatgaagttgcctgttaggctgttggtgctgatgttctggattcctgcttccagcagtgatgttgtgatgacccaaactccactctccctgcctgtcagtcttggagatcaagcctccatctcttgcagatctagtcagagccttgtacacagtaatggaaacacctatttacattggtacctgcagaagccaggccagtctccaaagctcctgatctacaaagtttccaaccgattttctggggtcccagacaggttcagtggcagtggatcagggacagatttcacactcaagatcagcagagtggaggctgaggatctgggagtttatttctgctctcaaagtacacatgttccgctcacgttcggtgctgggaccaagctggagctgaaacgggctgatgctgcaccaactgtatccatcttcccaccatccagtgagcagttaacatctggaggtgcctcagtcgtgtgcttcttgaacaacttctaccccaaagacatcaatgtcaagtggaagattgatggcagtgaacgacaaaatggcgtcctgaacagttggactgatcaggacagcaaagacagcacctacagcatgagcagcaccctcacgttgaccaaggacgagtatgaacgacataacagctatacctgtgaggccactcacaagacatcaacttcacccattgtcaagagcttcaacaggaatgagtgttagtaactcgaggacggggtgaactacgcctgaggatccgatctttttccctctgccaaaaattatggggacatcatgaagccccttgagcatctgacttctggctaataaaggaaatttattttcattgcaatagtgtgttggaattttttgtgtctctcactcggaagcaattcgttgatctgaatttcgaccacccataatacccattaccctggtagataagtagcatggcgggttaatcattaactacaaggaacccctagtgatggagttggccactccctctctgcgcgctcgctcgctcactgaggccgggcgaccaaaggtcgcccgacgcccgggctttgcccgggcggcctcagtgagcgagcgagcgcgcag

SEQ ID NO: 2064 - DNA, 4158 bp, Artificial Sequence
  Description of Artificial Sequence: Synthetic polynucleotide
ctgcgcgctcgctcgctcactgaggccgcccgggcaaagcccgggcgtcgggcgacctttggtcgcccggcctcagtgagcgagcgagcgcgcagagagggagtggccaactccatcactaggggttccttgtagttaatgattaacccgccatgctacttatctaccagggtaatggggatcctctagaactatagctagtcgacattgattattgactagttattaatagtaatcaattacggggtcattagttcatagcccatatatggagttccgcgttacataacttacggtaaatggcccgcctggctgaccgcccaacgacccccgcccattgacgtcaataatgacgtatgttcccatagtaacgccaatagggactttccattgacgtcaatgggtggagtatttacggtaaactgcccacttggcagtacatcaagtgtatcatatgccaagtacgccccctattgacgtcaatgacggtaaatggcccgcctggcattatgcccagtacatgaccttatgggactttcctacttggcagtacatctacgtattagtcatcgctattaccatgtcgaggccacgttctgcttcactctccccatctcccccccctccccacccccaattttgtatttatttattttttaattattttgtgcagcgatgggggcggggggggggggcgcgcgccaggcggggcggggcggggcgaggggcggggcggggcgaggcggagaggtgcggcggcagccaatcagagcggcgcgctccgaaagtttccttttatggcgaggcggcggcggcggcggccctataaaaagcgaagcgcgcggcgggcgggagcaagcttgaactgaaaaaccagaaagttaactggtaagtttagtctttttgtcttttatttcaggtcccggatccggtggtggtgcaaatcaaagaactgctcctcagtggatgttgcctttacttctaggcctgtacggaagtgttacttctgctctaaaagctgcggaattgtacccgcggccgatccaccggtgccgccaccatggaatggacctgggtctttctcttcctcctgtcagtaactgcaggtgtccactcccaggttcagctgcagcagtctggagctgagctgatgaagcctggggcctcagtgaagatatcctgcaaggctactggctacacattcagtaactactggatagagtgggtaaagcagaggcctggacatggccttgagtggattggagagattttacctggaagtgatagtattaagtacaatgagaatttcaagggcaaggccacattcactgcagatacatcctccaacacagcctacatgcaactcagcagcctgacatctgaggactctgccgtctattactgtgcaagaagggggaactacccagactactggggccaaggcaccactctcacagtctcctcagccaaaacgacacccccatctgtctatccactggcccctggatctgctgcccaaactaactccatggtgaccctgggatgcctggtcaagggctatttccctgagccagtgacagtgacctggaactctggatccctgtccagcggtgtgcacaccttcccagctgtcctgcagtctgacctctacactctgagcagctcagtgactgtcccctccagcacctggcccagcgagaccgtcacctgcaacgttgcccacccggccagcagcaccaaggtggacaagaaaattgtgcccagggattgtggttgtaagccttgcatatgtacagtcccagaagtatcatctgtcttcatcttccccccaaagcccaaggatgtgctcaccattactctgactcctaaggtcacgtgtgttgtggtagacatcagcaaggatgatcccgaggtccagttcagctggtttgtagatgatgtggaggtgcacacagctcagacgcaaccccgggaggagcagttcaacagcactttccgctcagtcagtgaacttcccatcatgcaccaggactggctcaatggcaaggagttcaaatgcagggtcaacagtgcagctttccctgcccccatcgagaaaaccatctccaaaaccaaaggcagaccgaaggctccacaggtgtacaccattccacctcccaaggagcagatggccaaggataaagtcagtctgacctgcatgataacagacttcttccctgaagacattactgtggagtggcagtggaatgggcagccagcggagaactacaagaacactcagcccatcatggacacagatggctcttacttcgtctacagcaagctcaatgtgcagaagagcaactgggaggcaggaaatactttcacctgctctgtgttacatgagggcctgcacaaccaccatactgagaagagcctctcccactctcctggttagtaacgaattccgcccctctcccccccccccctctccctcccccccccctaacgttactggccgaagccgcttggaataaggccggtgtgcgtttgtctatatgttattttccaccatattgccgtcttttggcaatgtgagggcccggaaacctggccctgtcttcttgacgagcattcctaggggtctttcccctctcgccaaaggaatgcaaggtctgttgaatgtcgtgaaggaagcagttcctctggaagcttcttgaagacaaacaacgtctgtagcgaccctttgcaggcagcggaaccccccacctggcgacaggtgcctctgcggccaaaagccacgtgtataagatacacctgcaaaggcggcacaaccccagtgccacgttgtgagttggatagttgtggaaagagtcaaatggctctcctcaagcgtattcaacaaggggctgaaggatgcccagaaggtaccccattgtatgggatctgatctggggcctcggtgcacatgctttacatgtgtttagtcgaggttaaaaaaacgtctaggccccccgaaccacggggacgtggttttcctttgaaaaacacgatgataatatggccacaaccgccgccaccatgaagttgcctgttaggctgttggtgctgatgttctggattcctgcttccagcagtgatgttgtgatgacccaaactccactctccctgcctgtcagtcttggagatcaagcctccatctcttgcagatctagtcagagccttgtacacagtaatggaaacacctatttacattggtacctgcagaagccaggccagtctccaaagctcctgatctacaaagtttccaaccgattttctggggtcccagacaggttcagtggcagtggatcagggacagatttcacactcaagatcagcagagtggaggctgaggatctgggagtttatttctgctctcaaagtacacatgttccgctcacgttcggtgctgggaccaagctggagctgaaacgggctgatgctgcaccaactgtatccatcttcccaccatccagtgagcagttaacatctggaggtgcctcagtcgtgtgcttcttgaacaacttctaccccaaagacatcaatgtcaagtggaagattgatggcagtgaacgacaaaatggcgtcctgaacagttggactgatcaggacagcaaagacagcacctacagcatgagcagcaccctcacgttgaccaaggacgagtatgaacgacataacagctatacctgtgaggccactcacaagacatcaacttcacccattgtcaagagcttcaacaggaatgagtgttagtaactcgaggacggggtgaactacgcctgaggatccgatctttttccctctgccaaaaattatggggacatcatgaagccccttgagcatctgacttctggctaataaaggaaatttattttcattgcaatagtgtgttggaattttttgtgtctctcactcggaagcaattcgttgatctgaatttcgaccacccataatacccattaccctggtagataagtagcatggcgggttaatcattaactacaaggaacccctagtgatggagttggccactccctctctgcgcgctcgctcgctcactgaggccgggcgaccaaaggtcgcccgacgcccgggctttgcccgggcggcctcagtgagcgagcgagcgcgcag

SEQ ID NO: 2065 - DNA, 3598 bp, Artificial Sequence
  Description of Artificial Sequence: Synthetic polynucleotide
ctgcgcgctcgctcgctcactgaggccgcccgggcaaagcccgggcgtcgggcgacctttggtcgcccggcctcagtgagcgagcgagcgcgcagagagggagtggccaactccatcactaggggttccttgtagttaatgattaacccgccatgctacttatctaccagggtaatggggatcctctagaactatagctagtcgacattgattattgactagttattaatagtaatcaattacggggtcattagttcatagcccatatatggagttccgcgttacataacttacggtaaatggcccgcctggctgaccgcccaacgacccccgcccattgacgtcaataatgacgtatgttcccatagtaacgccaatagggactttccattgacgtcaatgggtggagtatttacggtaaactgcccacttggcagtacatcaagtgtatcatatgccaagtacgccccctattgacgtcaatgacggtaaatggcccgcctggcattatgcccagtacatgaccttatgggactttcctacttggcagtacatctacgtattagtcatcgctattaccatgtcgaggccacgttctgcttcactctccccatctcccccccctccccacccccaattttgtatttatttattttttaattattttgtgcagcgatgggggcggggggggggggcgcgcgccaggcggggcggggcggggcgaggggcggggcggggcgaggcggagaggtgcggcggcagccaatcagagcggcgcgctccgaaagtttccttttatggcgaggcggcggcggcggcggccctataaaaagcgaagcgcgcggcgggcgggagcaagcttgaactgaaaaaccagaaagttaactggtaagtttagtctttttgtcttttatttcaggtcccggatccggtggtggtgcaaatcaaagaactgctcctcagtggatgttgcctttacttctaggcctgtacggaagtgttacttctgctctaaaagctgcggaattgtacccgcggccgatccaccggtgccgccaccatggaatggacctgggtctttctcttcctcctgtcagtaactgcaggtgtccactcccaggttcagctgcagcagtctggagctgagctgatgaagcctggggcctcagtgaagatatcctgcaaggctactggctacacattcagtaactactggatagagtgggtaaagcagaggcctggacatggccttgagtggattggagagattttacctggaagtgatagtattaagtacaatgagaatttcaagggcaaggccacattcactgcagatacatcctccaacacagcctacatgcaactcagcagcctgacatctgaggactctgccgtctattactgtgcaagaagggggaactacccagactactggggccaaggcaccactctcacagtctcctcagccaaaacgacacccccatctgtctatccactggcccctggatctgctgcccaaactaactccatggtgaccctgggatgcctggtcaagggctatttccctgagccagtgacagtgacctggaactctggatccctgtccagcggtgtgcacaccttcccagctgtcctgcagtctgacctctacactctgagcagctcagtgactgtcccctccagcacctggcccagcgagaccgtcacctgcaacgttgcccacccggccagcagcaccaaggtggacaagaaaattgtgcccagggattgtggttgtaagccttgcatatgtacagtcccagaagtatcatctgtcttcatcttccccccaaagcccaaggatgtgctcaccattactctgactcctaaggtcacgtgtgttgtggtagacatcagcaaggatgatcccgaggtccagttcagctggtttgtagatgatgtggaggtgcacacagctcagacgcaaccccgggaggagcagttcaacagcactttccgctcagtcagtgaacttcccatcatgcaccaggactggctcaatggcaaggagttcaaatgcagggtcaacagtgcagctttccctgcccccatcgagaaaaccatctccaaaaccaaaggcagaccgaaggctccacaggtgtacaccattccacctcccaaggagcagatggccaaggataaagtcagtctgacctgcatgataacagacttcttccctgaagacattactgtggagtggcagtggaatgggcagccagcggagaactacaagaacactcagcccatcatggacacagatggctcttacttcgtctacagcaagctcaatgtgcagaagagcaactgggaggcaggaaatactttcacctgctctgtgttacatgagggcctgcacaaccaccatactgagaagagcctctcccactctcctggtggaagcggagctactaacttcagcctgctgaagcaggctggagacgtggaggagaaccctggacctatgaagttgcctgttaggctgttggtgctgatgttctggattcctgcttccagcagtgatgttgtgatgacccaaactccactctccctgcctgtcagtcttggagatcaagcctccatctcttgcagatctagtcagagccttgtacacagtaatggaaacacctatttacattggtacctgcagaagccaggccagtctccaaagctcctgatctacaaagtttccaaccgattttctggggtcccagacaggttcagtggcagtggatcagggacagatttcacactcaagatcagcagagtggaggctgaggatctgggagtttatttctgctctcaaagtacacatgttccgctcacgttcggtgctgggaccaagctggagctgaaacgggctgatgctgcaccaactgtatccatcttcccaccatccagtgagcagttaacatctggaggtgcctcagtcgtgtgcttcttgaacaacttctaccccaaagacatcaatgtcaagtggaagattgatggcagtgaacgacaaaatggcgtcctgaacagttggactgatcaggacagcaaagacagcacctacagcatgagcagcaccctcacgttgaccaaggacgagtatgaacgacataacagctatacctgtgaggccactcacaagacatcaacttcacccattgtcaagagcttcaacaggaatgagtgttagtaactcgaggacggggtgaactacgcctgaggatccgatctttttccctctgccaaaaattatggggacatcatgaagccccttgagcatctgacttctggctaataaaggaaatttattttcattgcaatagtgtgttggaattttttgtgtctctcactcggaagcaattcgttgatctgaatttcgaccacccataatacccattaccctggtagataagtagcatggcgggttaatcattaactacaaggaacccctagtgatggagttggccactccctctctgcgcgctcgctcgctcactgaggccgggcgaccaaaggtcgcccgacgcccgggctttgcccgggcggcctcagtgagcgagcgagcgcgcag

SEQ ID NO: 2066 - DNA, 3622 bp, Artificial Sequence
  Description of Artificial Sequence: Synthetic polynucleotide
ctgcgcgctcgctcgctcactgaggccgcccgggcaaagcccgggcgtcgggcgacctttggtcgcccggcctcagtgagcgagcgagcgcgcagagagggagtggccaactccatcactaggggttccttgtagttaatgattaacccgccatgctacttatctaccagggtaatggggatcctctagaactatagctagtcgacattgattattgactagttattaatagtaatcaattacggggtcattagttcatagcccatatatggagttccgcgttacataacttacggtaaatggcccgcctggctgaccgcccaacgacccccgcccattgacgtcaataatgacgtatgttcccatagtaacgccaatagggactttccattgacgtcaatgggtggagtatttacggtaaactgcccacttggcagtacatcaagtgtatcatatgccaagtacgccccctattgacgtcaatgacggtaaatggcccgcctggcattatgcccagtacatgaccttatgggactttcctacttggcagtacatctacgtattagtcatcgctattaccatgtcgaggccacgttctgcttcactctccccatctcccccccctccccacccccaattttgtatttatttattttttaattattttgtgcagcgatgggggcggggggggggggcgcgcgccaggcggggcggggcggggcgaggggcggggcggggcgaggcggagaggtgcggcggcagccaatcagagcggcgcgctccgaaagtttccttttatggcgaggcggcggcggcggcggccctataaaaagcgaagcgcgcggcgggcgggagcaagcttgaactgaaaaaccagaaagttaactggtaagtttagtctttttgtcttttatttcaggtcccggatccggtggtggtgcaaatcaaagaactgctcctcagtggatgttgcctttacttctaggcctgtacggaagtgttacttctgctctaaaagctgcggaattgtacccgcggccgatccaccggtgccgccaccatgaacttcgggctcagcttgattttccttgtccttgttttaaaaggtgtccagtgtgaggttcatctggtggagtctgggggagccttagtgaagcctggagggtccctgaaactctcctgtgcagcctctggattcagtttcagtaaatatggcatgtcttgggttcgccagactccagacaagaggctggagtgggtcgcaaccattagtagtagtgggagtcgcacctactatccagacagtgtgaagggccaattcaccatctccagagacaatgccaagaacaccctgtacctgcaaatgagcagtctgaagtctgaggacacagccatgtattactgttcaattagctgggacggtgctatggactactggggtcaagggacctcagtcaccgtctcctcagccaaaacgacacccccatctgtctatccactggcccctggatctgctgcccaaactaactccatggtgaccctgggatgcctggtcaagggctatttccctgagccagtgacagtgacctggaactctggatccctgtccagcggtgtgcacaccttcccagctgtcctgcagtctgacctctacactctgagcagctcagtgactgtcccctccagcacctggcccagcgagaccgtcacctgcaacgttgcccacccggccagcagcaccaaggtggacaagaaaattgtgcccagggattgtggttgtaagccttgcatatgtacagtcccagaagtatcatctgtcttcatcttccccccaaagcccaaggatgtgctcaccattactctgactcctaaggtcacgtgtgttgtggtagacatcagcaaggatgatcccgaggtccagttcagctggtttgtagatgatgtggaggtgcacacagctcagacgcaaccccgggaggagcagttcaacagcactttccgctcagtcagtgaacttcccatcatgcaccaggactggctcaatggcaaggagttcaaatgcagggtcaacagtgcagctttccctgcccccatcgagaaaaccatctccaaaaccaaaggcagaccgaaggctccacaggtgtacaccattccacctcccaaggagcagatggccaaggataaagtcagtctgacctgcatgataacagacttcttccctgaagacattactgtggagtggcagtggaatgggcagccagcggagaactacaagaacactcagcccatcatggacacagatggctcttacttcgtctacagcaagctcaatgtgcagaagagcaactgggaggcaggaaatactttcacctgctctgtgttacatgagggcctgcacaaccaccatactgagaagagcctctcccactctcctggtcgggccaagcggggaagcggagtgaaacagactttgaattttgaccttctcaagttggcgggagacgtggagtccaaccctggacctatgaagttgcctgttaggctgttggtgctgatgttctggattcctgcttccagcagtgatgttttgatgacccaaactccactctccctgcctgtcagtcttggagatcaagcctccatctcttgcaaatctagtcagagcattgtacatagtaatggaaacacctatttagaatggtacctgcagaaaccaggccagtctccaaagctcctggtctacaaagtttccaatcgattttctggggtcccagacaggttcagtggcagtggatcagggacagatttcacactcaagatcagcagagtggaggctgaggatctgggaacttattactgctttcaaggttcacttgttccttgggcgttcggtggaggcaccaagctggaaatcaaacgggctgatgctgcaccaactgtatccatcttcccaccatccagtgagcagttaacatctggaggtgcctcagtcgtgtgcttcttgaacaacttctaccccaaagacatcaatgtcaagtggaagattgatggcagtgaacgacaaaatggcgtcctgaacagttggactgatcaggacagcaaagacagcacctacagcatgagcagcaccctcacgttgaccaaggacgagtatgaacgacataacagctatacctgtgaggccactcacaagacatcaacttcacccattgtcaagagcttcaacaggaatgagtgttagtaactcgaggacggggtgaactacgcctgaggatccgatctttttccctctgccaaaaattatggggacatcatgaagccccttgagcatctgacttctggctaataaaggaaatttattttcattgcaatagtgtgttggaattttttgtgtctctcactcggaagcaattcgttgatctgaatttcgaccacccataatacccattaccctggtagataagtagcatggcgggttaatcattaactacaaggaacccctagtgatggagttggccactccctctctgcgcgctcgctcgctcactgaggccgggcgaccaaaggtcgcccgacgcccgggctttgcccgggcggcctcagtgagcgagcgagcgcgcag

SEQ ID NO: 2067 - DNA, 3619 bp, Artificial Sequence
  Description of Artificial Sequence: Synthetic polynucleotide
ctgcgcgctcgctcgctcactgaggccgcccgggcaaagcccgggcgtcgggcgacctttggtcgcccggcctcagtgagcgagcgagcgcgcagagagggagtggccaactccatcactaggggttccttgtagttaatgattaacccgccatgctacttatctaccagggtaatggggatcctctagaactatagctagtcgacattgattattgactagttattaatagtaatcaattacggggtcattagttcatagcccatatatggagttccgcgttacataacttacggtaaatggcccgcctggctgaccgcccaacgacccccgcccattgacgtcaataatgacgtatgttcccatagtaacgccaatagggactttccattgacgtcaatgggtggagtatttacggtaaactgcccacttggcagtacatcaagtgtatcatatgccaagtacgccccctattgacgtcaatgacggtaaatggcccgcctggcattatgcccagtacatgaccttatgggactttcctacttggcagtacatctacgtattagtcatcgctattaccatgtcgaggccacgttctgcttcactctccccatctcccccccctccccacccccaattttgtatttatttattttttaattattttgtgcagcgatgggggcggggggggggggcgcgcgccaggcggggcggggcggggcgaggggcggggcggggcgaggcggagaggtgcggcggcagccaatcagagcggcgcgctccgaaagtttccttttatggcgaggcggcggcggcggcggccctataaaaagcgaagcgcgcggcgggcgggagcaagcttgaactgaaaaaccagaaagttaactggtaagtttagtctttttgtcttttatttcaggtcccggatccggtggtggtgcaaatcaaagaactgctcctcagtggatgttgcctttacttctaggcctgtacggaagtgttacttctgctctaaaagctgcggaattgtacccgcggccgatccaccggtgccgccaccatgaagttgcctgttaggctgttggtgctgatgttctggattcctgcttccagcagtgatgttgtgatgacccaaactccactctccctgcctgtcagtcttggagatcaagcctccatctcttgcagatctagtcagagccttgtacacagtaatggaaacacctatttacattggtacctgcagaagccaggccagtctccaaagctcctgatctacaaagtttccaaccgattttctggggtcccagacaggttcagtggcagtggatcagggacagatttcacactcaagatcagcagagtggaggctgaggatctgggagtttatttctgctctcaaagtacacatgttccgctcacgttcggtgctgggaccaagctggagctgaaacgggctgatgctgcaccaactgtatccatcttcccaccatccagtgagcagttaacatctggaggtgcctcagtcgtgtgcttcttgaacaacttctaccccaaagacatcaatgtcaagtggaagattgatggcagtgaacgacaaaatggcgtcctgaacagttggactgatcaggacagcaaagacagcacctacagcatgagcagcaccctcacgttgaccaaggacgagtatgaacgacataacagctatacctgtgaggccactcacaagacatcaacttcacccattgtcaagagcttcaacaggaatgagtgtcgggccaagcggggaagcggagtgaaacagactttgaattttgaccttctcaagttggcgggagacgtggagtccaaccctggacctatggaatggacctgggtctttctcttcctcctgtcagtaactgcaggtgtccactcccaggttcagctgcagcagtctggagctgagctgatgaagcctggggcctcagtgaagatatcctgcaaggctactggctacacattcagtaactactggatagagtgggtaaagcagaggcctggacatggccttgagtggattggagagattttacctggaagtgatagtattaagtacaatgagaatttcaagggcaaggccacattcactgcagatacatcctccaacacagcctacatgcaactcagcagcctgacatctgaggactctgccgtctattactgtgcaagaagggggaactacccagactactggggccaaggcaccactctcacagtctcctcagccaaaacgacacccccatctgtctatccactggcccctggatctgctgcccaaactaactccatggtgaccctgggatgcctggtcaagggctatttccctgagccagtgacagtgacctggaactctggatccctgtccagcggtgtgcacaccttcccagctgtcctgcagtctgacctctacactctgagcagctcagtgactgtcccctccagcacctggcccagcgagaccgtcacctgcaacgttgcccacccggccagcagcaccaaggtggacaagaaaattgtgcccagggattgtggttgtaagccttgcatatgtacagtcccagaagtatcatctgtcttcatcttccccccaaagcccaaggatgtgctcaccattactctgactcctaaggtcacgtgtgttgtggtagacatcagcaaggatgatcccgaggtccagttcagctggtttgtagatgatgtggaggtgcacacagctcagacgcaaccccgggaggagcagttcaacagcactttccgctcagtcagtgaacttcccatcatgcaccaggactggctcaatggcaaggagttcaaatgcagggtcaacagtgcagctttccctgcccccatcgagaaaaccatctccaaaaccaaaggcagaccgaaggctccacaggtgtacaccattccacctcccaaggagcagatggccaaggataaagtcagtctgacctgcatgataacagacttcttccctgaagacattactgtggagtggcagtggaatgggcagccagcggagaactacaagaacactcagcccatcatggacacagatggctcttacttcgtctacagcaagctcaatgtgcagaagagcaactgggaggcaggaaatactttcacctgctctgtgttacatgagggcctgcacaaccaccatactgagaagagcctctcccactctcctggttagtaactcgaggacggggtgaactacgcctgaggatccgatctttttccctctgccaaaaattatggggacatcatgaagccccttgagcatctgacttctggctaataaaggaaatttattttcattgcaatagtgtgttggaattttttgtgtctctcactcggaagcaattcgttgatctgaatttcgaccacccataatacccattaccctggtagataagtagcatggcgggttaatcattaactacaaggaacccctagtgatggagttggccactccctctctgcgcgctcgctcgctcactgaggccgggcgaccaaaggtcgcccgacgcccgggctttgcccgggcggcctcagtgagcgagcgagcgcgcag

SEQ ID NO: 2068 - DNA, 3607 bp, Artificial Sequence
  Description of Artificial Sequence: Synthetic polynucleotide
ctgcgcgctcgctcgctcactgaggccgcccgggcaaagcccgggcgtcgggcgacctttggtcgcccggcctcagtgagcgagcgagcgcgcagagagggagtggccaactccatcactaggggttccttgtagttaatgattaacccgccatgctacttatctaccagggtaatggggatcctctagaactatagctagtcgacattgattattgactagttattaatagtaatcaattacggggtcattagttcatagcccatatatggagttccgcgttacataacttacggtaaatggcccgcctggctgaccgcccaacgacccccgcccattgacgtcaataatgacgtatgttcccatagtaacgccaatagggactttccattgacgtcaatgggtggagtatttacggtaaactgcccacttggcagtacatcaagtgtatcatatgccaagtacgccccctattgacgtcaatgacggtaaatggcccgcctggcattatgcccagtacatgaccttatgggactttcctacttggcagtacatctacgtattagtcatcgctattaccatgtcgaggccacgttctgcttcactctccccatctcccccccctccccacccccaattttgtatttatttattttttaattattttgtgcagcgatgggggcggggggggggggcgcgcgccaggcggggcggggcggggcgaggggcggggcggggcgaggcggagaggtgcggcggcagccaatcagagcggcgcgctccgaaagtttccttttatggcgaggcggcggcggcggcggccctataaaaagcgaagcgcgcggcgggcgggagcaagcttgaactgaaaaaccagaaagttaactggtaagtttagtctttttgtcttttatttcaggtcccggatccggtggtggtgcaaatcaaagaactgctcctcagtggatgttgcctttacttctaggcctgtacggaagtgttacttctgctctaaaagctgcggaattgtacccgcggccgatccaccggtgccgccaccatgaagttgcctgttaggctgttggtgctgatgttctggattcctgcttccagcagtgatgttgtgatgacccaaactccactctccctgcctgtcagtcttggagatcaagcctccatctcttgcagatctagtcagagccttgtacacagtaatggaaacacctatttacattggtacctgcagaagccaggccagtctccaaagctcctgatctacaaagtttccaaccgattttctggggtcccagacaggttcagtggcagtggatcagggacagatttcacactcaagatcagcagagtggaggctgaggatctgggagtttatttctgctctcaaagtacacatgttccgctcacgttcggtgctgggaccaagctggagctgaaacgggctgatgctgcaccaactgtatccatcttcccaccatccagtgagcagttaacatctggaggtgcctcagtcgtgtgcttcttgaacaacttctaccccaaagacatcaatgtcaagtggaagattgatggcagtgaacgacaaaatggcgtcctgaacagttggactgatcaggacagcaaagacagcacctacagcatgagcagcaccctcacgttgaccaaggacgagtatgaacgacataacagctatacctgtgaggccactcacaagacatcaacttcacccattgtcaagagcttcaacaggaatgagtgtggaagcggagtgaaacagactttgaattttgaccttctcaagttggcgggagacgtggagtccaaccctggacctatggaatggacctgggtctttctcttcctcctgtcagtaactgcaggtgtccactcccaggttcagctgcagcagtctggagctgagctgatgaagcctggggcctcagtgaagatatcctgcaaggctactggctacacattcagtaactactggatagagtgggtaaagcagaggcctggacatggccttgagtggattggagagattttacctggaagtgatagtattaagtacaatgagaatttcaagggcaaggccacattcactgcagatacatcctccaacacagcctacatgcaactcagcagcctgacatctgaggactctgccgtctattactgtgcaagaagggggaactacccagactactggggccaaggcaccactctcacagtctcctcagccaaaacgacacccccatctgtctatccactggcccctggatctgctgcccaaactaactccatggtgaccctgggatgcctggtcaagggctatttccctgagccagtgacagtgacctggaactctggatccctgtccagcggtgtgcacaccttcccagctgtcctgcagtctgacctctacactctgagcagctcagtgactgtcccctccagcacctggcccagcgagaccgtcacctgcaacgttgcccacccggccagcagcaccaaggtggacaagaaaattgtgcccagggattgtggttgtaagccttgcatatgtacagtcccagaagtatcatctgtcttcatcttccccccaaagcccaaggatgtgctcaccattactctgactcctaaggtcacgtgtgttgtggtagacatcagcaaggatgatcccgaggtccagttcagctggtttgtagatgatgtggaggtgcacacagctcagacgcaaccccgggaggagcagttcaacagcactttccgctcagtcagtgaacttcccatcatgcaccaggactggctcaatggcaaggagttcaaatgcagggtcaacagtgcagctttccctgcccccatcgagaaaaccatctccaaaaccaaaggcagaccgaaggctccacaggtgtacaccattccacctcccaaggagcagatggccaaggataaagtcagtctgacctgcatgataacagacttcttccctgaagacattactgtggagtggcagtggaatgggcagccagcggagaactacaagaacactcagcccatcatggacacagatggctcttacttcgtctacagcaagctcaatgtgcagaagagcaactgggaggcaggaaatactttcacctgctctgtgttacatgagggcctgcacaaccaccatactgagaagagcctctcccactctcctggttagtaactcgaggacggggtgaactacgcctgaggatccgatctttttccctctgccaaaaattatggggacatcatgaagccccttgagcatctgacttctggctaataaaggaaatttattttcattgcaatagtgtgttggaattttttgtgtctctcactcggaagcaattcgttgatctgaatttcgaccacccataatacccattaccctggtagataagtagcatggcgggttaatcattaactacaaggaacccctagtgatggagttggccactccctctctgcgcgctcgctcgctcactgaggccgggcgaccaaaggtcgcccgacgcccgggctttgcccgggcggcctcagtgagcgagcgagcgcgcag

SEQ ID NO: 2069 - DNA, 4158 bp, Artificial Sequence
  Description of Artificial Sequence: Synthetic polynucleotide
ctgcgcgctcgctcgctcactgaggccgcccgggcaaagcccgggcgtcgggcgacctttggtcgcccggcctcagtgagcgagcgagcgcgcagagagggagtggccaactccatcactaggggttccttgtagttaatgattaacccgccatgctacttatctaccagggtaatggggatcctctagaactatagctagtcgacattgattattgactagttattaatagtaatcaattacggggtcattagttcatagcccatatatggagttccgcgttacataacttacggtaaatggcccgcctggctgaccgcccaacgacccccgcccattgacgtcaataatgacgtatgttcccatagtaacgccaatagggactttccattgacgtcaatgggtggagtatttacggtaaactgcccacttggcagtacatcaagtgtatcatatgccaagtacgccccctattgacgtcaatgacggtaaatggcccgcctggcattatgcccagtacatgaccttatgggactttcctacttggcagtacatctacgtattagtcatcgctattaccatgtcgaggccacgttctgcttcactctccccatctcccccccctccccacccccaattttgtatttatttattttttaattattttgtgcagcgatgggggcggggggggggggcgcgcgccaggcggggcggggcggggcgaggggcggggcggggcgaggcggagaggtgcggcggcagccaatcagagcggcgcgctccgaaagtttccttttatggcgaggcggcggcggcggcggccctataaaaagcgaagcgcgcggcgggcgggagcaagcttgaactgaaaaaccagaaagttaactggtaagtttagtctttttgtcttttatttcaggtcccggatccggtggtggtgcaaatcaaagaactgctcctcagtggatgttgcctttacttctaggcctgtacggaagtgttacttctgctctaaaagctgcggaattgtacccgcggccgatccaccggtgccgccaccatgaagttgcctgttaggctgttggtgctgatgttctggattcctgcttccagcagtgatgttgtgatgacccaaactccactctccctgcctgtcagtcttggagatcaagcctccatctcttgcagatctagtcagagccttgtacacagtaatggaaacacctatttacattggtacctgcagaagccaggccagtctccaaagctcctgatctacaaagtttccaaccgattttctggggtcccagacaggttcagtggcagtggatcagggacagatttcacactcaagatcagcagagtggaggctgaggatctgggagtttatttctgctctcaaagtacacatgttccgctcacgttcggtgctgggaccaagctggagctgaaacgggctgatgctgcaccaactgtatccatcttcccaccatccagtgagcagttaacatctggaggtgcctcagtcgtgtgcttcttgaacaacttctaccccaaagacatcaatgtcaagtggaagattgatggcagtgaacgacaaaatggcgtcctgaacagttggactgatcaggacagcaaagacagcacctacagcatgagcagcaccctcacgttgaccaaggacgagtatgaacgacataacagctatacctgtgaggccactcacaagacatcaacttcacccattgtcaagagcttcaacaggaatgagtgttagtaacgaattccgcccctctcccccccccccctctccctcccccccccctaacgttactggccgaagccgcttggaataaggccggtgtgcgtttgtctatatgttattttccaccatattgccgtcttttggcaatgtgagggcccggaaacctggccctgtcttcttgacgagcattcctaggggtctttcccctctcgccaaaggaatgcaaggtctgttgaatgtcgtgaaggaagcagttcctctggaagcttcttgaagacaaacaacgtctgtagcgaccctttgcaggcagcggaaccccccacctggcgacaggtgcctctgcggccaaaagccacgtgtataagatacacctgcaaaggcggcacaaccccagtgccacgttgtgagttggatagttgtggaaagagtcaaatggctctcctcaagcgtattcaacaaggggctgaaggatgcccagaaggtaccccattgtatgggatctgatctggggcctcggtgcacatgctttacatgtgtttagtcgaggttaaaaaaacgtctaggccccccgaaccacggggacgtggttttcctttgaaaaacacgatgataatatggccacaaccgccgccaccatggaatggacctgggtctttctcttcctcctgtcagtaactgcaggtgtccactcccaggttcagctgcagcagtctggagctgagctgatgaagcctggggcctcagtgaagatatcctgcaaggctactggctacacattcagtaactactggatagagtgggtaaagcagaggcctggacatggccttgagtggattggagagattttacctggaagtgatagtattaagtacaatgagaatttcaagggcaaggccacattcactgcagatacatcctccaacacagcctacatgcaactcagcagcctgacatctgaggactctgccgtctattactgtgcaagaagggggaactacccagactactggggccaaggcaccactctcacagtctcctcagccaaaacgacacccccatctgtctatccactggcccctggatctgctgcccaaactaactccatggtgaccctgggatgcctggtcaagggctatttccctgagccagtgacagtgacctggaactctggatccctgtccagcggtgtgcacaccttcccagctgtcctgcagtctgacctctacactctgagcagctcagtgactgtcccctccagcacctggcccagcgagaccgtcacctgcaacgttgcccacccggccagcagcaccaaggtggacaagaaaattgtgcccagggattgtggttgtaagccttgcatatgtacagtcccagaagtatcatctgtcttcatcttccccccaaagcccaaggatgtgctcaccattactctgactcctaaggtcacgtgtgttgtggtagacatcagcaaggatgatcccgaggtccagttcagctggtttgtagatgatgtggaggtgcacacagctcagacgcaaccccgggaggagcagttcaacagcactttccgctcagtcagtgaacttcccatcatgcaccaggactggctcaatggcaaggagttcaaatgcagggtcaacagtgcagctttccctgcccccatcgagaaaaccatctccaaaaccaaaggcagaccgaaggctccacaggtgtacaccattccacctcccaaggagcagatggccaaggataaagtcagtctgacctgcatgataacagacttcttccctgaagacattactgtggagtggcagtggaatgggcagccagcggagaactacaagaacactcagcccatcatggacacagatggctcttacttcgtctacagcaagctcaatgtgcagaagagcaactgggaggcaggaaatactttcacctgctctgtgttacatgagggcctgcacaaccaccatactgagaagagcctctcccactctcctggttagtaactcgaggacggggtgaactacgcctgaggatccgatctttttccctctgccaaaaattatggggacatcatgaagccccttgagcatctgacttctggctaataaaggaaatttattttcattgcaatagtgtgttggaattttttgtgtctctcactcggaagcaattcgttgatctgaatttcgaccacccataatacccattaccctggtagataagtagcatggcgggttaatcattaactacaaggaacccctagtgatggagttggccactccctctctgcgcgctcgctcgctcactgaggccgggcgaccaaaggtcgcccgacgcccgggctttgcccgggcggcctcagtgagcgagcgagcgcgcag

SEQ ID NO: 2070 - DNA, 3607 bp, Artificial Sequence
  Description of Artificial Sequence: Synthetic polynucleotide
ctgcgcgctcgctcgctcactgaggccgcccgggcaaagcccgggcgtcgggcgacctttggtcgcccggcctcagtgagcgagcgagcgcgcagagagggagtggccaactccatcactaggggttccttgtagttaatgattaacccgccatgctacttatctaccagggtaatggggatcctctagaactatagctagtcgacattgattattgactagttattaatagtaatcaattacggggtcattagttcatagcccatatatggagttccgcgttacataacttacggtaaatggcccgcctggctgaccgcccaacgacccccgcccattgacgtcaataatgacgtatgttcccatagtaacgccaatagggactttccattgacgtcaatgggtggagtatttacggtaaactgcccacttggcagtacatcaagtgtatcatatgccaagtacgccccctattgacgtcaatgacggtaaatggcccgcctggcattatgcccagtacatgaccttatgggactttcctacttggcagtacatctacgtattagtcatcgctattaccatgtcgaggccacgttctgcttcactctccccatctcccccccctccccacccccaattttgtatttatttattttttaattattttgtgcagcgatgggggcggggggggggggcgcgcgccaggcggggcggggcggggcgaggggcggggcggggcgaggcggagaggtgcggcggcagccaatcagagcggcgcgctccgaaagtttccttttatggcgaggcggcggcggcggcggccctataaaaagcgaagcgcgcggcgggcgggagcaagcttgaactgaaaaaccagaaagttaactggtaagtttagtctttttgtcttttatttcaggtcccggatccggtggtggtgcaaatcaaagaactgctcctcagtggatgttgcctttacttctaggcctgtacggaagtgttacttctgctctaaaagctgcggaattgtacccgcggccgatccaccggtgccgccaccatgaagttgcctgttaggctgttggtgctgatgttctggattcctgcttccagcagtgatgttgtgatgacccaaactccactctccctgcctgtcagtcttggagatcaagcctccatctcttgcagatctagtcagagccttgtacacagtaatggaaacacctatttacattggtacctgcagaagccaggccagtctccaaagctcctgatctacaaagtttccaaccgattttctggggtcccagacaggttcagtggcagtggatcagggacagatttcacactcaagatcagcagagtggaggctgaggatctgggagtttatttctgctctcaaagtacacatgttccgctcacgttcggtgctgggaccaagctggagctgaaacgggctgatgctgcaccaactgtatccatcttcccaccatccagtgagcagttaacatctggaggtgcctcagtcgtgtgcttcttgaacaacttctaccccaaagacatcaatgtcaagtggaagattgatggcagtgaacgacaaaatggcgtcctgaacagttggactgatcaggacagcaaagacagcacctacagcatgagcagcaccctcacgttgaccaaggacgagtatgaacgacataacagctatacctgtgaggccactcacaagacatcaacttcacccattgtcaagagcttcaacaggaatgagtgtggcggaggtggctccggaggcggaggcagcggcggaggtgggtctggcggaggcgggtgcggcggaggtggctccatggaatggacctgggtctttctcttcctcctgtcagtaactgcaggtgtccactcccaggttcagctgcagcagtctggagctgagctgatgaagcctggggcctcagtgaagatatcctgcaaggctactggctacacattcagtaactactggatagagtgggtaaagcagaggcctggacatggccttgagtggattggagagattttacctggaagtgatagtattaagtacaatgagaatttcaagggcaaggccacattcactgcagatacatcctccaacacagcctacatgcaactcagcagcctgacatctgaggactctgccgtctattactgtgcaagaagggggaactacccagactactggggccaaggcaccactctcacagtctcctcagccaaaacgacacccccatctgtctatccactggcccctggatctgctgcccaaactaactccatggtgaccctgggatgcctggtcaagggctatttccctgagccagtgacagtgacctggaactctggatccctgtccagcggtgtgcacaccttcccagctgtcctgcagtctgacctctacactctgagcagctcagtgactgtcccctccagcacctggcccagcgagaccgtcacctgcaacgttgcccacccggccagcagcaccaaggtggacaagaaaattgtgcccagggattgtggttgtaagccttgcatatgtacagtcccagaagtatcatctgtcttcatcttccccccaaagcccaaggatgtgctcaccattactctgactcctaaggtcacgtgtgttgtggtagacatcagcaaggatgatcccgaggtccagttcagctggtttgtagatgatgtggaggtgcacacagctcagacgcaaccccgggaggagcagttcaacagcactttccgctcagtcagtgaacttcccatcatgcaccaggactggctcaatggcaaggagttcaaatgcagggtcaacagtgcagctttccctgcccccatcgagaaaaccatctccaaaaccaaaggcagaccgaaggctccacaggtgtacaccattccacctcccaaggagcagatggccaaggataaagtcagtctgacctgcatgataacagacttcttccctgaagacattactgtggagtggcagtggaatgggcagccagcggagaactacaagaacactcagcccatcatggacacagatggctcttacttcgtctacagcaagctcaatgtgcagaagagcaactgggaggcaggaaatactttcacctgctctgtgttacatgagggcctgcacaaccaccatactgagaagagcctctcccactctcctggttagtaactcgaggacggggtgaactacgcctgaggatccgatctttttccctctgccaaaaattatggggacatcatgaagccccttgagcatctgacttctggctaataaaggaaatttattttcattgcaatagtgtgttggaattttttgtgtctctcactcggaagcaattcgttgatctgaatttcgaccacccataatacccattaccctggtagataagtagcatggcgggttaatcattaactacaaggaacccctagtgatggagttggccactccctctctgcgcgctcgctcgctcactgaggccgggcgaccaaaggtcgcccgacgcccgggctttgcccgggcggcctcagtgagcgagcgagcgcgcag

SEQ ID NO: 2071 - DNA, 3598 bp, Artificial Sequence
  Description of Artificial Sequence: Synthetic polynucleotide
ctgcgcgctcgctcgctcactgaggccgcccgggcaaagcccgggcgtcgggcgacctttggtcgcccggcctcagtgagcgagcgagcgcgcagagagggagtggccaactccatcactaggggttccttgtagttaatgattaacccgccatgctacttatctaccagggtaatggggatcctctagaactatagctagtcgacattgattattgactagttattaatagtaatcaattacggggtcattagttcatagcccatatatggagttccgcgttacataacttacggtaaatggcccgcctggctgaccgcccaacgacccccgcccattgacgtcaataatgacgtatgttcccatagtaacgccaatagggactttccattgacgtcaatgggtggagtatttacggtaaactgcccacttggcagtacatcaagtgtatcatatgccaagtacgccccctattgacgtcaatgacggtaaatggcccgcctggcattatgcccagtacatgaccttatgggactttcctacttggcagtacatctacgtattagtcatcgctattaccatgtcgaggccacgttctgcttcactctccccatctcccccccctccccacccccaattttgtatttatttattttttaattattttgtgcagcgatgggggcggggggggggggcgcgcgccaggcggggcggggcggggcgaggggcggggcggggcgaggcggagaggtgcggcggcagccaatcagagcggcgcgctccgaaagtttccttttatggcgaggcggcggcggcggcggccctataaaaagcgaagcgcgcggcgggcgggagcaagcttgaactgaaaaaccagaaagttaactggtaagtttagtctttttgtcttttatttcaggtcccggatccggtggtggtgcaaatcaaagaactgctcctcagtggatgttgcctttacttctaggcctgtacggaagtgttacttctgctctaaaagctgcggaattgtacccgcggccgatccaccggtgccgccaccatgaagttgcctgttaggctgttggtgctgatgttctggattcctgcttccagcagtgatgttgtgatgacccaaactccactctccctgcctgtcagtcttggagatcaagcctccatctcttgcagatctagtcagagccttgtacacagtaatggaaacacctatttacattggtacctgcagaagccaggccagtctccaaagctcctgatctacaaagtttccaaccgattttctggggtcccagacaggttcagtggcagtggatcagggacagatttcacactcaagatcagcagagtggaggctgaggatctgggagtttatttctgctctcaaagtacacatgttccgctcacgttcggtgctgggaccaagctggagctgaaacgggctgatgctgcaccaactgtatccatcttcccaccatccagtgagcagttaacatctggaggtgcctcagtcgtgtgcttcttgaacaacttctaccccaaagacatcaatgtcaagtggaagattgatggcagtgaacgacaaaatggcgtcctgaacagttggactgatcaggacagcaaagacagcacctacagcatgagcagcaccctcacgttgaccaaggacgagtatgaacgacataacagctatacctgtgaggccactcacaagacatcaacttcacccattgtcaagagcttcaacaggaatgagtgtggaagcggagctactaacttcagcctgctgaagcaggctggagacgtggaggagaaccctggacctatggaatggacctgggtctttctcttcctcctgtcagtaactgcaggtgtccactcccaggttcagctgcagcagtctggagctgagctgatgaagcctggggcctcagtgaagatatcctgcaaggctactggctacacattcagtaactactggatagagtgggtaaagcagaggcctggacatggccttgagtggattggagagattttacctggaagtgatagtattaagtacaatgagaatttcaagggcaaggccacattcactgcagatacatcctccaacacagcctacatgcaactcagcagcctgacatctgaggactctgccgtctattactgtgcaagaagggggaactacccagactactggggccaaggcaccactctcacagtctcctcagccaaaacgacacccccatctgtctatccactggcccctggatctgctgcccaaactaactccatggtgaccctgggatgcctggtcaagggctatttccctgagccagtgacagtgacctggaactctggatccctgtccagcggtgtgcacaccttcccagctgtcctgcagtctgacctctacactctgagcagctcagtgactgtcccctccagcacctggcccagcgagaccgtcacctgcaacgttgcccacccggccagcagcaccaaggtggacaagaaaattgtgcccagggattgtggttgtaagccttgcatatgtacagtcccagaagtatcatctgtcttcatcttccccccaaagcccaaggatgtgctcaccattactctgactcctaaggtcacgtgtgttgtggtagacatcagcaaggatgatcccgaggtccagttcagctggtttgtagatgatgtggaggtgcacacagctcagacgcaaccccgggaggagcagttcaacagcactttccgctcagtcagtgaacttcccatcatgcaccaggactggctcaatggcaaggagttcaaatgcagggtcaacagtgcagctttccctgcccccatcgagaaaaccatctccaaaaccaaaggcagaccgaaggctccacaggtgtacaccattccacctcccaaggagcagatggccaaggataaagtcagtctgacctgcatgataacagacttcttccctgaagacattactgtggagtggcagtggaatgggcagccagcggagaactacaagaacactcagcccatcatggacacagatggctcttacttcgtctacagcaagctcaatgtgcagaagagcaactgggaggcaggaaatactttcacctgctctgtgttacatgagggcctgcacaaccaccatactgagaagagcctctcccactctcctggttagtaactcgaggacggggtgaactacgcctgaggatccgatctttttccctctgccaaaaattatggggacatcatgaagccccttgagcatctgacttctggctaataaaggaaatttattttcattgcaatagtgtgttggaattttttgtgtctctcactcggaagcaattcgttgatctgaatttcgaccacccataatacccattaccctggtagataagtagcatggcgggttaatcattaactacaaggaacccctagtgatggagttggccactccctctctgcgcgctcgctcgctcactgaggccgggcgaccaaaggtcgcccgacgcccgggctttgcccgggcggcctcagtgagcgagcgagcgcgcag

SEQ ID NO: 2072 - DNA, 3610 bp, Artificial Sequence
  Description of Artificial Sequence: Synthetic polynucleotide
ctgcgcgctcgctcgctcactgaggccgcccgggcaaagcccgggcgtcgggcgacctttggtcgcccggcctcagtgagcgagcgagcgcgcagagagggagtggccaactccatcactaggggttccttgtagttaatgattaacccgccatgctacttatctaccagggtaatggggatcctctagaactatagctagtcgacattgattattgactagttattaatagtaatcaattacggggtcattagttcatagcccatatatggagttccgcgttacataacttacggtaaatggcccgcctggctgaccgcccaacgacccccgcccattgacgtcaataatgacgtatgttcccatagtaacgccaatagggactttccattgacgtcaatgggtggagtatttacggtaaactgcccacttggcagtacatcaagtgtatcatatgccaagtacgccccctattgacgtcaatgacggtaaatggcccgcctggcattatgcccagtacatgaccttatgggactttcctacttggcagtacatctacgtattagtcatcgctattaccatgtcgaggccacgttctgcttcactctccccatctcccccccctccccacccccaattttgtatttatttattttttaattattttgtgcagcgatgggggcggggggggggggcgcgcgccaggcggggcggggcggggcgaggggcggggcggggcgaggcggagaggtgcggcggcagccaatcagagcggcgcgctccgaaagtttccttttatggcgaggcggcggcggcggcggccctataaaaagcgaagcgcgcggcgggcgggagcaagcttgaactgaaaaaccagaaagttaactggtaagtttagtctttttgtcttttatttcaggtcccggatccggtggtggtgcaaatcaaagaactgctcctcagtggatgttgcctttacttctaggcctgtacggaagtgttacttctgctctaaaagctgcggaattgtacccgcggccgatccaccggtgccgccaccatgaagttgcctgttaggctgttggtgctgatgttctggattcctgcttccagcagtgatgttgtgatgacccaaactccactctccctgcctgtcagtcttggagatcaagcctccatctcttgcagatctagtcagagccttgtacacagtaatggaaacacctatttacattggtacctgcagaagccaggccagtctccaaagctcctgatctacaaagtttccaaccgattttctggggtcccagacaggttcagtggcagtggatcagggacagatttcacactcaagatcagcagagtggaggctgaggatctgggagtttatttctgctctcaaagtacacatgttccgctcacgttcggtgctgggaccaagctggagctgaaacgggctgatgctgcaccaactgtatccatcttcccaccatccagtgagcagttaacatctggaggtgcctcagtcgtgtgcttcttgaacaacttctaccccaaagacatcaatgtcaagtggaagattgatggcagtgaacgacaaaatggcgtcctgaacagttggactgatcaggacagcaaagacagcacctacagcatgagcagcaccctcacgttgaccaaggacgagtatgaacgacataacagctatacctgtgaggccactcacaagacatcaacttcacccattgtcaagagcttcaacaggaatgagtgtcgggccaagcggggaagcggagctactaacttcagcctgctgaagcaggctggagacgtggaggagaaccctggacctatggaatggacctgggtctttctcttcctcctgtcagtaactgcaggtgtccactcccaggttcagctgcagcagtctggagctgagctgatgaagcctggggcctcagtgaagatatcctgcaaggctactggctacacattcagtaactactggatagagtgggtaaagcagaggcctggacatggccttgagtggattggagagattttacctggaagtgatagtattaagtacaatgagaatttcaagggcaaggccacattcactgcagatacatcctccaacacagcctacatgcaactcagcagcctgacatctgaggactctgccgtctattactgtgcaagaagggggaactacccagactactggggccaaggcaccactctcacagtctcctcagccaaaacgacacccccatctgtctatccactggcccctggatctgctgcccaaactaactccatggtgaccctgggatgcctggtcaagggctatttccctgagccagtgacagtgacctggaactctggatccctgtccagcggtgtgcacaccttcccagctgtcctgcagtctgacctctacactctgagcagctcagtgactgtcccctccagcacctggcccagcgagaccgtcacctgcaacgttgcccacccggccagcagcaccaaggtggacaagaaaattgtgcccagggattgtggttgtaagccttgcatatgtacagtcccagaagtatcatctgtcttcatcttccccccaaagcccaaggatgtgctcaccattactctgactcctaaggtcacgtgtgttgtggtagacatcagcaaggatgatcccgaggtccagttcagctggtttgtagatgatgtggaggtgcacacagctcagacgcaaccccgggaggagcagttcaacagcactttccgctcagtcagtgaacttcccatcatgcaccaggactggctcaatggcaaggagttcaaatgcagggtcaacagtgcagctttccctgcccccatcgagaaaaccatctccaaaaccaaaggcagaccgaaggctccacaggtgtacaccattccacctcccaaggagcagatggccaaggataaagtcagtctgacctgcatgataacagacttcttccctgaagacattactgtggagtggcagtggaatgggcagccagcggagaactacaagaacactcagcccatcatggacacagatggctcttacttcgtctacagcaagctcaatgtgcagaagagcaactgggaggcaggaaatactttcacctgctctgtgttacatgagggcctgcacaaccaccatactgagaagagcctctcccactctcctggttagtaactcgaggacggggtgaactacgcctgaggatccgatctttttccctctgccaaaaattatggggacatcatgaagccccttgagcatctgacttctggctaataaaggaaatttattttcattgcaatagtgtgttggaattttttgtgtctctcactcggaagcaattcgttgatctgaatttcgaccacccataatacccattaccctggtagataagtagcatggcgggttaatcattaactacaaggaacccctagtgatggagttggccactccctctctgcgcgctcgctcgctcactgaggccgggcgaccaaaggtcgcccgacgcccgggctttgcccgggcggcctcagtgagcgagcgagcgcgcag

SEQ ID NO: 2073 - DNA, 3610 bp, Artificial Sequence
  Description of Artificial Sequence: Synthetic polynucleotide
ctgcgcgctcgctcgctcactgaggccgcccgggcaaagcccgggcgtcgggcgacctttggtcgcccggcctcagtgagcgagcgagcgcgcagagagggagtggccaactccatcactaggggttccttgtagttaatgattaacccgccatgctacttatctaccagggtaatggggatcctctagaactatagctagtcgacattgattattgactagttattaatagtaatcaattacggggtcattagttcatagcccatatatggagttccgcgttacataacttacggtaaatggcccgcctggctgaccgcccaacgacccccgcccattgacgtcaataatgacgtatgttcccatagtaacgccaatagggactttccattgacgtcaatgggtggagtatttacggtaaactgcccacttggcagtacatcaagtgtatcatatgccaagtacgccccctattgacgtcaatgacggtaaatggcccgcctggcattatgcccagtacatgaccttatgggactttcctacttggcagtacatctacgtattagtcatcgctattaccatgtcgaggccacgttctgcttcactctccccatctcccccccctccccacccccaattttgtatttatttattttttaattattttgtgcagcgatgggggcggggggggggggcgcgcgccaggcggggcggggcggggcgaggggcggggcggggcgaggcggagaggtgcggcggcagccaatcagagcggcgcgctccgaaagtttccttttatggcgaggcggcggcggcggcggccctataaaaagcgaagcgcgcggcgggcgggagcaagcttgaactgaaaaaccagaaagttaactggtaagtttagtctttttgtcttttatttcaggtcccggatccggtggtggtgcaaatcaaagaactgctcctcagtggatgttgcctttacttctaggcctgtacggaagtgttacttctgctctaaaagctgcggaattgtacccgcggccgatccaccggtgccgccaccatgaagttgcctgttaggctgttggtgctgatgttctggattcctgcttccagcagtgatgttttgatgacccaaactccactctccctgcctgtcagtcttggagatcaagcctccatctcttgcaaatctagtcagagcattgtacatagtaatggaaacacctatttagaatggtacctgcagaaaccaggccagtctccaaagctcctggtctacaaagtttccaatcgattttctggggtcccagacaggttcagtggcagtggatcagggacagatttcacactcaagatcagcagagtggaggctgaggatctgggaacttattactgctttcaaggttcacttgttccttgggcgttcggtggaggcaccaagctggaaatcaaacgggctgatgctgcaccaactgtatccatcttcccaccatccagtgagcagttaacatctggaggtgcctcagtcgtgtgcttcttgaacaacttctaccccaaagacatcaatgtcaagtggaagattgatggcagtgaacgacaaaatggcgtcctgaacagttggactgatcaggacagcaaagacagcacctacagcatgagcagcaccctcacgttgaccaaggacgagtatgaacgacataacagctatacctgtgaggccactcacaagacatcaacttcacccattgtcaagagcttcaacaggaatgagtgtggaagcggagtgaaacagactttgaattttgaccttctcaagttggcgggagacgtggagtccaaccctggacctatgaacttcgggctcagcttgattttccttgtccttgttttaaaaggtgtccagtgtgaggttcatctggtggagtctgggggagccttagtgaagcctggagggtccctgaaactctcctgtgcagcctctggattcagtttcagtaaatatggcatgtcttgggttcgccagactccagacaagaggctggagtgggtcgcaaccattagtagtagtgggagtcgcacctactatccagacagtgtgaagggccaattcaccatctccagagacaatgccaagaacaccctgtacctgcaaatgagcagtctgaagtctgaggacacagccatgtattactgttcaattagctgggacggtgctatggactactggggtcaagggacctcagtcaccgtctcctcagccaaaacgacacccccatctgtctatccactggcccctggatctgctgcccaaactaactccatggtgaccctgggatgcctggtcaagggctatttccctgagccagtgacagtgacctggaactctggatccctgtccagcggtgtgcacaccttcccagctgtcctgcagtctgacctctacactctgagcagctcagtgactgtcccctccagcacctggcccagcgagaccgtcacctgcaacgttgcccacccggccagcagcaccaaggtggacaagaaaattgtgcccagggattgtggttgtaagccttgcatatgtacagtcccagaagtatcatctgtcttcatcttccccccaaagcccaaggatgtgctcaccattactctgactcctaaggtcacgtgtgttgtggtagacatcagcaaggatgatcccgaggtccagttcagctggtttgtagatgatgtggaggtgcacacagctcagacgcaaccccgggaggagcagttcaacagcactttccgctcagtcagtgaacttcccatcatgcaccaggactggctcaatggcaaggagttcaaatgcagggtcaacagtgcagctttccctgcccccatcgagaaaaccatctccaaaaccaaaggcagaccgaaggctccacaggtgtacaccattccacctcccaaggagcagatggccaaggataaagtcagtctgacctgcatgataacagacttcttccctgaagacattactgtggagtggcagtggaatgggcagccagcggagaactacaagaacactcagcccatcatggacacagatggctcttacttcgtctacagcaagctcaatgtgcagaagagcaactgggaggcaggaaatactttcacctgctctgtgttacatgagggcctgcacaaccaccatactgagaagagcctctcccactctcctggttagtaactcgaggacggggtgaactacgcctgaggatccgatctttttccctctgccaaaaattatggggacatcatgaagccccttgagcatctgacttctggctaataaaggaaatttattttcattgcaatagtgtgttggaattttttgtgtctctcactcggaagcaattcgttgatctgaatttcgaccacccataatacccattaccctggtagataagtagcatggcgggttaatcattaactacaaggaacccctagtgatggagttggccactccctctctgcgcgctcgctcgctcactgaggccgggcgaccaaaggtcgcccgacgcccgggctttgcccgggcggcctcagtgagcgagcgagcgcgcag

SEQ ID NO: 2074 - DNA, 3622 bp, Artificial Sequence
  Description of Artificial Sequence: Synthetic polynucleotide
ctgcgcgctcgctcgctcactgaggccgcccgggcaaagcccgggcgtcgggcgacctttggtcgcccggcctcagtgagcgagcgagcgcgcagagagggagtggccaactccatcactaggggttccttgtagttaatgattaacccgccatgctacttatctaccagggtaatggggatcctctagaactatagctagtcgacattgattattgactagttattaatagtaatcaattacggggtcattagttcatagcccatatatggagttccgcgttacataacttacggtaaatggcccgcctggctgaccgcccaacgacccccgcccattgacgtcaataatgacgtatgttcccatagtaacgccaatagggactttccattgacgtcaatgggtggagtatttacggtaaactgcccacttggcagtacatcaagtgtatcatatgccaagtacgccccctattgacgtcaatgacggtaaatggcccgcctggcattatgcccagtacatgaccttatgggactttcctacttggcagtacatctacgtattagtcatcgctattaccatgtcgaggccacgttctgcttcactctccccatctcccccccctccccacccccaattttgtatttatttattttttaattattttgtgcagcgatgggggcggggggggggggcgcgcgccaggcggggcggggcggggcgaggggcggggcggggcgaggcggagaggtgcggcggcagccaatcagagcggcgcgctccgaaagtttccttttatggcgaggcggcggcggcggcggccctataaaaagcgaagcgcgcggcgggcgggagcaagcttgaactgaaaaaccagaaagttaactggtaagtttagtctttttgtcttttatttcaggtcccggatccggtggtggtgcaaatcaaagaactgctcctcagtggatgttgcctttacttctaggcctgtacggaagtgttacttctgctctaaaagctgcggaattgtacccgcggccgatccaccggtgccgccaccatgggatggagctggatctttctctttctcctgtcaggaactacaggtgtcctctctgaggtccagctgcaacagtctggacctgagctggtgaagcctggggcttcagtgaagatatcctgcaagacttctggatacacattcactgaatacaccatacactgggtgaagcagagccatggagagagccttgagtggattggaggtattaatccaaacgatggtggtactatttacaaccagaagttcaagggcaaggccacattgactgtagacaagtcctccaaaacagcctacatggagctccgcagcctgacatctgaggattctgcagtcttttactgtgcaagagggccctccgccaggtttccttactggggccaagggactctggtcactgtctctgcagccaaaacgacacccccatctgtctatccactggcccctggatctgctgcccaaactaactccatggtgaccctgggatgcctggtcaagggctatttccctgagccagtgacagtgacctggaactctggatccctgtccagcggtgtgcacaccttcccagctgtcctgcagtctgacctctacactctgagcagctcagtgactgtcccctccagcacctggcccagcgagaccgtcacctgcaacgttgcccacccggccagcagcaccaaggtggacaagaaaattgtgcccagggattgtggttgtaagccttgcatatgtacagtcccagaagtatcatctgtcttcatcttccccccaaagcccaaggatgtgctcaccattactctgactcctaaggtcacgtgtgttgtggtagacatcagcaaggatgatcccgaggtccagttcagctggtttgtagatgatgtggaggtgcacacagctcagacgcaaccccgggaggagcagttcaacagcactttccgctcagtcagtgaacttcccatcatgcaccaggactggctcaatggcaaggagttcaaatgcagggtcaacagtgcagctttccctgcccccatcgagaaaaccatctccaaaaccaaaggcagaccgaaggctccacaggtgtacaccattccacctcccaaggagcagatggccaaggataaagtcagtctgacctgcatgataacagacttcttccctgaagacattactgtggagtggcagtggaatgggcagccagcggagaactacaagaacactcagcccatcatggacacagatggctcttacttcgtctacagcaagctcaatgtgcagaagagcaactgggaggcaggaaatactttcacctgctctgtgttacatgagggcctgcacaaccaccatactgagaagagcctctcccactctcctggtcgggccaagcggggaagcggagtgaaacagactttgaattttgaccttctcaagttggcgggagacgtggagtccaaccctggacctatgagtcctgcccagttcctgtttctgttagtgctctggattcgggaaaccaacggtgatgttgtgatgacccagactccactcactttgtcggttaccattggacaaccagcctccatctcttgcaagtcaagtcagagcctcttagatagtgatggaaagacatatttgaattggttgttacagaggccaggccagtctccaaagcgcctaatctatctggtgtctaaactggactctggagtccctgacagattcactggcagtggatcagggacagatttcacactgaaaattagcagagtggaggctgaggatttgggagtttattattgctggcaaggtacacattttcctcggacgttcggtggaggcaccaagctggaaatcaaacgggctgatgctgcaccaactgtatccatcttcccaccatccagtgagcagttaacatctggaggtgcctcagtcgtgtgcttcttgaacaacttctaccccaaagacatcaatgtcaagtggaagattgatggcagtgaacgacaaaatggcgtcctgaacagttggactgatcaggacagcaaagacagcacctacagcatgagcagcaccctcacgttgaccaaggacgagtatgaacgacataacagctatacctgtgaggccactcacaagacatcaacttcacccattgtcaagagcttcaacaggaatgagtgttagtaactcgaggacggggtgaactacgcctgaggatccgatctttttccctctgccaaaaattatggggacatcatgaagccccttgagcatctgacttctggctaataaaggaaatttattttcattgcaatagtgtgttggaattttttgtgtctctcactcggaagcaattcgttgatctgaatttcgaccacccataatacccattaccctggtagataagtagcatggcgggttaatcattaactacaaggaacccctagtgatggagttggccactccctctctgcgcgctcgctcgctcactgaggccgggcgaccaaaggtcgcccgacgcccgggctttgcccgggcggcctcagtgagcgagcgagcgcgcag

SEQ ID NO: 2075 - DNA, 3610 bp, Artificial Sequence
  Description of Artificial Sequence: Synthetic polynucleotide
ctgcgcgctcgctcgctcactgaggccgcccgggcaaagcccgggcgtcgggcgacctttggtcgcccggcctcagtgagcgagcgagcgcgcagagagggagtggccaactccatcactaggggttccttgtagttaatgattaacccgccatgctacttatctaccagggtaatggggatcctctagaactatagctagtcgacattgattattgactagttattaatagtaatcaattacggggtcattagttcatagcccatatatggagttccgcgttacataacttacggtaaatggcccgcctggctgaccgcccaacgacccccgcccattgacgtcaataatgacgtatgttcccatagtaacgccaatagggactttccattgacgtcaatgggtggagtatttacggtaaactgcccacttggcagtacatcaagtgtatcatatgccaagtacgccccctattgacgtcaatgacggtaaatggcccgcctggcattatgcccagtacatgaccttatgggactttcctacttggcagtacatctacgtattagtcatcgctattaccatgtcgaggccacgttctgcttcactctccccatctcccccccctccccacccccaattttgtatttatttattttttaattattttgtgcagcgatgggggcggggggggggggcgcgcgccaggcggggcggggcggggcgaggggcggggcggggcgaggcggagaggtgcggcggcagccaatcagagcggcgcgctccgaaagtttccttttatggcgaggcggcggcggcggcggccctataaaaagcgaagcgcgcggcgggcgggagcaagcttgaactgaaaaaccagaaagttaactggtaagtttagtctttttgtcttttatttcaggtcccggatccggtggtggtgcaaatcaaagaactgctcctcagtggatgttgcctttacttctaggcctgtacggaagtgttacttctgctctaaaagctgcggaattgtacccgcggccgatccaccggtgccgccaccatgagtcctgcccagttcctgtttctgttagtgctctggattcgggaaaccaacggtgatgttgtgatgacccagactccactcactttgtcggttaccattggacaaccagcctccatctcttgcaagtcaagtcagagcctcttagatagtgatggaaagacatatttgaattggttgttacagaggccaggccagtctccaaagcgcctaatctatctggtgtctaaactggactctggagtccctgacagattcactggcagtggatcagggacagatttcacactgaaaattagcagagtggaggctgaggatttgggagtttattattgctggcaaggtacacattttcctcggacgttcggtggaggcaccaagctggaaatcaaacgggctgatgctgcaccaactgtatccatcttcccaccatccagtgagcagttaacatctggaggtgcctcagtcgtgtgcttcttgaacaacttctaccccaaagacatcaatgtcaagtggaagattgatggcagtgaacgacaaaatggcgtcctgaacagttggactgatcaggacagcaaagacagcacctacagcatgagcagcaccctcacgttgaccaaggacgagtatgaacgacataacagctatacctgtgaggccactcacaagacatcaacttcacccattgtcaagagcttcaacaggaatgagtgtggaagcggagtgaaacagactttgaattttgaccttctcaagttggcgggagacgtggagtccaaccctggacctatgggatggagctggatctttctctttctcctgtcaggaactacaggtgtcctctctgaggtccagctgcaacagtctggacctgagctggtgaagcctggggcttcagtgaagatatcctgcaagacttctggatacacattcactgaatacaccatacactgggtgaagcagagccatggagagagccttgagtggattggaggtattaatccaaacgatggtggtactatttacaaccagaagttcaagggcaaggccacattgactgtagacaagtcctccaaaacagcctacatggagctccgcagcctgacatctgaggattctgcagtcttttactgtgcaagagggccctccgccaggtttccttactggggccaagggactctggtcactgtctctgcagccaaaacgacacccccatctgtctatccactggcccctggatctgctgcccaaactaactccatggtgaccctgggatgcctggtcaagggctatttccctgagccagtgacagtgacctggaactctggatccctgtccagcggtgtgcacaccttcccagctgtcctgcagtctgacctctacactctgagcagctcagtgactgtcccctccagcacctggcccagcgagaccgtcacctgcaacgttgcccacccggccagcagcaccaaggtggacaagaaaattgtgcccagggattgtggttgtaagccttgcatatgtacagtcccagaagtatcatctgtcttcatcttccccccaaagcccaaggatgtgctcaccattactctgactcctaaggtcacgtgtgttgtggtagacatcagcaaggatgatcccgaggtccagttcagctggtttgtagatgatgtggaggtgcacacagctcagacgcaaccccgggaggagcagttcaacagcactttccgctcagtcagtgaacttcccatcatgcaccaggactggctcaatggcaaggagttcaaatgcagggtcaacagtgcagctttccctgcccccatcgagaaaaccatctccaaaaccaaaggcagaccgaaggctccacaggtgtacaccattccacctcccaaggagcagatggccaaggataaagtcagtctgacctgcatgataacagacttcttccctgaagacattactgtggagtggcagtggaatgggcagccagcggagaactacaagaacactcagcccatcatggacacagatggctcttacttcgtctacagcaagctcaatgtgcagaagagcaactgggaggcaggaaatactttcacctgctctgtgttacatgagggcctgcacaaccaccatactgagaagagcctctcccactctcctggttagtaactcgaggacggggtgaactacgcctgaggatccgatctttttccctctgccaaaaattatggggacatcatgaagccccttgagcatctgacttctggctaataaaggaaatttattttcattgcaatagtgtgttggaattttttgtgtctctcactcggaagcaattcgttgatctgaatttcgaccacccataatacccattaccctggtagataagtagcatggcgggttaatcattaactacaaggaacccctagtgatggagttggccactccctctctgcgcgctcgctcgctcactgaggccgggcgaccaaaggtcgcccgacgcccgggctttgcccgggcggcctcagtgagcgagcgagcgcgcag

SEQ ID NO: 2076 - DNA, 130 bp, Artificial Sequence
  Description of Artificial Sequence: Synthetic polynucleotide
ctgcgcgctcgctcgctcactgaggccgcccgggcaaagcccgggcgtcgggcgacctttggtcgcccggcctcagtgagcgagcgagcgcgcagagagggagtggccaactccatcactaggggttcct

SEQ ID NO: 2077 - DNA, 141 bp, Artificial Sequence
  Description of Artificial Sequence: Synthetic polynucleotide
cctgcaggcagctgcgcgctcgctcgctcactgaggccgcccgggcaaagcccgggcgtcgggcgacctttggtcgcccggcctcagtgagcgagcgagcgcgcagagagggagtggccaactccatcactaggggttcct

SEQ ID NO: 2078 - DNA, 130 bp, Artificial Sequence
  Description of Artificial Sequence: Synthetic polynucleotide
aggaacccctagtgatggagttggccactccctctctgcgcgctcgctcgctcactgaggccgggcgaccaaaggtcgcccgacgcccgggctttgcccgggcggcctcagtgagcgagcgagcgcgcag

SEQ ID NO: 2079 - DNA, 141 bp, Artificial Sequence
  Description of Artificial Sequence: Synthetic polynucleotide
aggaacccctagtgatggagttggccactccctctctgcgcgctcgctcgctcactgaggccgggcgaccaaaggtcgcccgacgcccgggctttgcccgggcggcctcagtgagcgagcgagcgcgcagctgcctgcagg

SEQ ID NO: 2080 - DNA, 1715 bp, Artificial Sequence
  Description of Artificial Sequence: Synthetic polynucleotide
ctagttattaatagtaatcaattacggggtcattagttcatagcccatatatggagttccgcgttacataacttacggtaaatggcccgcctggctgaccgcccaacgacccccgcccattgacgtcaataatgacgtatgttcccatagtaacgccaatagggactttccattgacgtcaatgggtggagtatttacggtaaactgcccacttggcagtacatcaagtgtatcatatgccaagtacgccccctattgacgtcaatgacggtaaatggcccgcctggcattatgcccagtacatgaccttatgggactttcctacttggcagtacatctacgtattagtcatcgctattaccatggtcgaggtgagccccacgttctgcttcactctccccatctcccccccctccccacccccaattttgtatttatttattttttaattattttgtgcagcgatgggggcggggggggggggggggcgcgcgccaggcggggcggggcggggcgaggggcggggcggggcgaggcggagaggtgcggcggcagccaatcagagcggcgcgctccgaaagtttccttttatggcgaggcggcggcggcggcggccctataaaaagcgaagcgcgcggcgggcgggagtcgctgcgcgctgccttcgccccgtgccccgctccgccgccgcctcgcgccgcccgccccggctctgactgaccgcgttactcccacaggtgagcgggcgggacggcccttctcctccgggctgtaattagcgcttggtttaatgacggcttgtttcttttctgtggctgcgtgaaagccttgaggggctccgggagggccctttgtgcggggggagcggctcggggggtgcgtgcgtgtgtgtgtgcgtggggagcgccgcgtgcggctccgcgctgcccggcggctgtgagcgctgcgggcgcggcgcggggctttgtgcgctccgcagtgtgcgcgaggggagcgcggccgggggcggtgccccgcggtgcggggggggctgcgaggggaacaaaggctgcgtgcggggtgtgtgcgtgggggggtgagcagggggtgtgggcgcgtcggtcgggctgcaaccccccctgcacccccctccccgagttgctgagcacggcccggcttcgggtgcggggctccgtacggggcgtggcgcggggctcgccgtgccgggcggggggtggcggcaggtgggggtgccgggcggggcggggccgcctcgggccggggagggctcgggggaggggcgcggcggcccccggagcgccggcggctgtcgaggcgcggcgagccgcagccattgccttttatggtaatcgtgcgagagggcgcagggacttcctttgtcccaaatctgtgcggagccgaaatctgggaggcgccgccgcaccccctctagcgggcgcggggcgaagcggtgcggcgccggcaggaaggaaatgggcggggagggccttcgtgcgtcgccgcgccgccgtccccttctccctctccagcctcggggctgtccgcggggggacggctgccttcgggggggacggggcagggcggggttcggcttctggcgtgtgaccggcggctctagagcctctgctaaccatgttcatgccttcttctttttcctacagctcctgggcaacgtgctggttattgtgctgtctcatcattttggcaaagaattc

SEQ ID NO: 2081 - DNA, 299 bp, Artificial Sequence
  Description of Artificial Sequence: Synthetic polynucleotide
tagcccatatatggagttccgcgttacataacttacggtaaatggcccgcctggctgaccgcccaacgacccccgcccattgacgtcaataatgacgtatgttcccatagtaacgccaatagggactttccattgacgtcaatgggtggagtatttacggtaaactgcccacttggcagtacatcaagtgtatcatatgccaagtacgccccctattgacgtcaatgacggtaaatggcccgcctggcattatgcccagtacatgaccttatgggactttcctacttggcagtacatct

SEQ ID NO: 2082 - DNA, 283 bp, Artificial Sequence
  Description of Artificial Sequence: Synthetic polynucleotide
catggtcgaggtgagccccacgttctgcttcactctccccatctcccccccctccccacccccaattttgtatttatttattttttaattattttgtgcagcgatgggggcggggggggggggggggcgcgcgccaggcggggcggggcggggcgaggggcggggcggggcgaggcggagaggtgcggcggcagccaatcagagcggcgcgctccgaaagtttccttttatggcgaggcggcggcggcggcggccctataaaaagcgaagcgcgcggcgggcg

SEQ ID NO: 2083 - DNA, 260 bp, Artificial Sequence
  Description of Artificial Sequence: Synthetic polynucleotide
ccacgttctgcttcactctccccatctcccccccctccccacccccaattttgtatttatttattttttaattattttgtgcagcgatgggggcggggggggggggcgcgcgccaggcggggcggggcggggcgaggggcggggcggggcgaggcggagaggtgcggcggcagccaatcagagcggcgcgctccgaaagtttccttttatggcgaggcggcggcggcggcggccctataaaaagcgaagcgcgcggcggg

SEQ ID NO: 2084 - DNA, 654 bp, Artificial Sequence
  Description of Artificial Sequence: Synthetic polynucleotide
cgacattgattattgactagttattaatagtaatcaattacggggtcattagttcatagcccatatatggagttccgcgttacataacttacggtaaatggcccgcctggctgaccgcccaacgacccccgcccattgacgtcaataatgacgtatgttcccatagtaacgccaatagggactttccattgacgtcaatgggtggagtatttacggtaaactgcccacttggcagtacatcaagtgtatcatatgccaagtacgccccctattgacgtcaatgacggtaaatggcccgcctggcattatgcccagtacatgaccttatgggactttcctacttggcagtacatctacgtattagtcatcgctattaccatgtcgaggccacgttctgcttcactctccccatctcccccccctccccacccccaattttgtatttatttattttttaattattttgtgcagcgatgggggcggggggggggggcgcgcgccaggcggggcggggcggggcgaggggcggggcggggcgaggcggagaggtgcggcggcagccaatcagagcggcgcgctccgaaagtttccttttatggcgaggcggcggcggcggcggccctataaaaagcgaagcgcgcggcgggcgggagc

SEQ ID NO: 2085 - DNA, 699 bp, Artificial Sequence
  Description of Artificial Sequence: Synthetic polynucleotide
gatctaacatatcctggtgtggagtagcggacgctgctatgacagaggctcgggggcctgagctggctctgtgagctggggaggaggcagacagccaggccttgtctgcaagcagacctggcagcattgggctggccgccccccagggcctcctcttcatgcccagtgaatgactcaccttggcacagacacaatgttcggggtgggcacagtgcctgcttcccgccgcaccccagcccccctcaaatgccttccgagaagcccattgagcagggggcttgcattgcaccccagcctgacagcctggcatcttgggataaaagcagcacagccccctaggggctgcccttgctgtgtggcgccaccggcggtggagaacaaggctctattcagcctgtgcccaggaaaggggatcaggggatgcccaggcatggacagtgggtggcagggggggagaggagggctgtctgcttcccagaagtccaaggacacaaatgggtgaggggagagctctccccatagctgggctgcggcccaaccccaccccctcaggctatgccagggggtgttgccaggggcacccgggcatcgccagtctagcccactccttcataaagccctcgcatcccaggagcgagcagagccagagcaggttggagaggagacgcatcacctccgctgctcgcggggatcctctag

SEQ ID NO: 2086 - DNA, 557 bp, Artificial Sequence
  Description of Artificial Sequence: Synthetic polynucleotide
tagtatctgcagagggccctgcgtatgagtgcaagtgggttttaggaccaggatgaggcggggtgggggtgcctacctgacgaccgaccccgacccactggacaagcacccaacccccattccccaaattgcgcatcccctatcagagagggggaggggaaacaggatgcggcgaggcgcgtgcgcactgccagcttcagcaccgcggacagtgccttcgcccccgcctggcggcgcgcgccaccgccgcctcagcactgaaggcgcgctgacgtcactcgccggtcccccgcaaactccccttcccggccaccttggtcgcgtccgcgccgccgccggcccagccggaccgcaccacgcgaggcgcgagataggggggcacgggcgcgaccatctgcgctgcggcgccggcgactcagcgctgcctcagtctgcggtgggcagcggaggagtcgtgtcgtgcctgagagcgcagctgtgctcctgggcaccgcgcagtccgcccccgcggctcctggccagaccacccctaggaccccctgccccaagtcgcagcc

SEQ ID NO: 2087 - DNA, 382 bp, Artificial Sequence
  Description of Artificial Sequence: Synthetic polynucleotide
ctagtcgacattgattattgactagttattaatagtaatcaattacggggtcattagttcatagcccatatatggagttccgcgttacataacttacggtaaatggcccgcctggctgaccgcccaacgacccccgcccattgacgtcaataatgacgtatgttcccatagtaacgccaatagggactttccattgacgtcaatgggtggagtatttacggtaaactgcccacttggcagtacatcaagtgtatcatatgccaagtacgccccctattgacgtcaatgacggtaaatggcccgcctggcattatgcccagtacatgaccttatgggactttcctacttggcagtacatctacgtattagtcatcgctattac

SEQ ID NO: 2088 - DNA, 1736 bp, Artificial Sequence
  Description of Artificial Sequence: Synthetic polynucleotide
ctagtcgacattgattattgactagttattaatagtaatcaattacggggtcattagttcatagcccatatatggagttccgcgttacataacttacggtaaatggcccgcctggctgaccgcccaacgacccccgcccattgacgtcaataatgacgtatgttcccatagtaacgccaatagggactttccattgacgtcaatgggtggagtatttacggtaaactgcccacttggcagtacatcaagtgtatcatatgccaagtacgccccctattgacgtcaatgacggtaaatggcccgcctggcattatgcccagtacatgaccttatgggactttcctacttggcagtacatctacgtattagtcatcgctattaccatggtcgaggtgagccccacgttctgcttcactctccccatctcccccccctccccacccccaattttgtatttatttattttttaattattttgtgcagcgatgggggcggggggggggggggggcgcgcgccaggcggggcggggcggggcgaggggcggggcggggcgaggcggagaggtgcggcggcagccaatcagagcggcgcgctccgaaagtttccttttatggcgaggcggcggcggcggcggccctataaaaagcgaagcgcgcggcgggcgggagtcgctgcgcgctgccttcgccccgtgccccgctccgccgccgcctcgcgccgcccgccccggctctgactgaccgcgttactcccacaggtgagcgggcgggacggcccttctcctccgggctgtaattagcgcttggtttaatgacggcttgtttcttttctgtggctgcgtgaaagccttgaggggctccgggagggccctttgtgcggggggagcggctcggggggtgcgtgcgtgtgtgtgtgcgtggggagcgccgcgtgcggctccgcgctgcccggcggctgtgagcgctgcgggcgcggcgcggggctttgtgcgctccgcagtgtgcgcgaggggagcgcggccgggggcggtgccccgcggtgcggggggggctgcgaggggaacaaaggctgcgtgcggggtgtgtgcgtgggggggtgagcagggggtgtgggcgcgtcggtcgggctgcaaccccccctgcacccccctccccgagttgctgagcacggcccggcttcgggtgcggggctccgtacggggcgtggcgcggggctcgccgtgccgggcggggggtggcggcaggtgggggtgccgggcggggcggggccgcctcgggccggggagggctcgggggaggggcgcggcggcccccggagcgccggcggctgtcgaggcgcggcgagccgcagccattgccttttatggtaatcgtgcgagagggcgcagggacttcctttgtcccaaatctgtgcggagccgaaatctgggaggcgccgccgcaccccctctagcgggcgcggggcgaagcggtgcggcgccggcaggaaggaaatgggcggggagggccttcgtgcgtcgccgcgccgccgtccccttctccctctccagcctcggggctgtccgcggggggacggctgccttcgggggggacggggcagggcggggttcggcttctggcgtgtgaccggcggctctagagcctctgctaaccatgttcatgccttcttctttttcctacagctcctgggcaacgtgctggttattgtgctgtctcatcattttggcaaagaattc

SEQ ID NO: 2089 - DNA, 365 bp, Artificial Sequence
  Description of Artificial Sequence: Synthetic polynucleotide
ctagtcgacattgattattgactagttattaatagtaatcaattacggggtcattagttcatagcccatatatggagttccgcgttacataacttacggtaaatggcccgcctggctgaccgcccaacgacccccgcccattgacgtcaataatgacgtatgttcccatagtaacgccaatagggactttccattgacgtcaatgggtggagtatttacggtaaactgcccacttggcagtacatcaagtgtatcatatgccaagtacgccccctattgacgtcaatgacggtaaatggcccgcctggcattatgcccagtacatgaccttatgggactttcctacttggcagtacatctacgta

SEQ ID NO: 2090 - DNA, 134 bp, Artificial Sequence
  Description of Artificial Sequence: Synthetic polynucleotide
tcagatcgcctggagacgccatccacgctgttttgacctccatagaagacaccgggaccgatccagcctccgcggattcgaatcccggccgggaacggtgcattggaacgcggattccccgtgccaagagtgac

SEQ ID NO: 2091 - DNA, 102 bp, Artificial Sequence
  Description of Artificial Sequence: Synthetic polynucleotide
ttgacctccatagaagacaccgggaccgatccagcctccgcggattcgaatcccggccgggaacggtgcattggaacgcggattccccgtgccaagagtgac

SEQ ID NO: 2092 - DNA, 59 bp, Artificial Sequence
  Description of Artificial Sequence: Synthetic oligonucleotide
attcgaatcccggccgggaacggtgcattggaacgcggattccccgtgccaagagtgac

SEQ ID NO: 2093 - DNA, 53 bp, Artificial Sequence
  Description of Artificial Sequence: Synthetic oligonucleotide
ctcctgggcaacgtgctggtctgtgtgctggcccatcactttggcaaagaatt

SEQ ID NO: 2094 - DNA, 54 bp, Artificial Sequence
  Description of Artificial Sequence: Synthetic oligonucleotide
ctcctgggcaacgtgctggttattgtgctgtctcatcattttggcaaagaattc

SEQ ID NO: 2095 - DNA, 32 bp, Artificial Sequence
  Description of Artificial Sequence: Synthetic oligonucleotide
gtaagtaccgcctatagagtctataggcccac

SEQ ID NO: 2096 - DNA, 15 bp, Artificial Sequence
  Description of Artificial Sequence: Synthetic oligonucleotide
gtaagtaccgcctat

SEQ ID NO: 2097 - DNA, 347 bp, Artificial Sequence
  Description of Artificial Sequence: Synthetic polynucleotide
aaaaaatgctttcttcttttaatatacttttttgtttatcttatttctaatactttccctaatctctttctttcagggcaataatgatacaatgtatcatgcctctttgcaccattctaaagaataacagtgataatttctgggttaaggcaatagcaatatttctgcatataaatatttctgcatataaattgtaactgatgtaagaggtttcatattgctaatagcagctacaatccagctaccattctgcttttattttatggttgggataaggctggattattctgagtccaagctaggcccttttgctaatcatgttcatacctcttatcttcctcccacag

(The sequence listing continues in the following parts.)
